United States Patent Application Publication US 2018/0305689 A1 - sequence listing, part 121

SEQ ID NO: 1750421 - RNA, 19 nt, Artificial Sequence
  Description of Artificial Sequence: Synthetic oligonucleotide
  Sense strand starting at position 397 of SEQ ID NO: 1562482
acucgaauuaucugaggua

SEQ ID NO: 1750422 - RNA, 19 nt, Artificial Sequence
  Description of Artificial Sequence: Synthetic oligonucleotide
  Antisense strand to SEQ ID NO: 1750421
uaccucagauaauucgagu

SEQ ID NO: 1750423 - RNA, 19 nt, Artificial Sequence
  Description of Artificial Sequence: Synthetic oligonucleotide
  Sense strand starting at position 454 of SEQ ID NO: 1562482
guaaauuaagcagagugau

SEQ ID NO: 1750424 - RNA, 19 nt, Artificial Sequence
  Description of Artificial Sequence: Synthetic oligonucleotide
  Antisense strand to SEQ ID NO: 1750423
aucacucugcuuaauuuac

SEQ ID NO: 1750425 - RNA, 19 nt, Artificial Sequence
  Description of Artificial Sequence: Synthetic oligonucleotide
  Sense strand starting at position 457 of SEQ ID NO: 1562482
aauuaagcagagugaugaa

SEQ ID NO: 1750426 - RNA, 19 nt, Artificial Sequence
  Description of Artificial Sequence: Synthetic oligonucleotide
  Antisense strand to SEQ ID NO: 1750425
uucaucacucugcuuaauu

SEQ ID NO: 1750427 - RNA, 19 nt, Artificial Sequence
  Description of Artificial Sequence: Synthetic oligonucleotide
  Sense strand starting at position 519 of SEQ ID NO: 1562482
augcaagagcaucaccaau

SEQ ID NO: 1750428 - RNA, 19 nt, Artificial Sequence
  Description of Artificial Sequence: Synthetic oligonucleotide
  Antisense strand to SEQ ID NO: 1750427
auuggugaugcucuugcau

SEQ ID NO: 1750429 - RNA, 19 nt, Artificial Sequence
  Description of Artificial Sequence: Synthetic oligonucleotide
  Sense strand starting at position 521 of SEQ ID NO: 1562482
gcaagagcaucaccaauaa

SEQ ID NO: 1750430 - RNA, 19 nt, Artificial Sequence
  Description of Artificial Sequence: Synthetic oligonucleotide
  Antisense strand to SEQ ID NO: 1750429
uuauuggugaugcucuugc

SEQ ID NO: 1750431 - RNA, 19 nt, Artificial Sequence
  Description of Artificial Sequence: Synthetic oligonucleotide
  Sense strand starting at position 568 of SEQ ID NO: 1562482
ucgauucuuccuuauguuu

SEQ ID NO: 1750432 - RNA, 19 nt, Artificial Sequence
  Description of Artificial Sequence: Synthetic oligonucleotide
  Antisense strand to SEQ ID NO: 1750431
aaacauaaggaagaaucga

SEQ ID NO: 1750433 - RNA, 19 nt, Artificial Sequence
  Description of Artificial Sequence: Synthetic oligonucleotide
  Sense strand starting at position 571 of SEQ ID NO: 1562482
auucuuccuuauguuuaga

SEQ ID NO: 1750434 - RNA, 19 nt, Artificial Sequence
  Description of Artificial Sequence: Synthetic oligonucleotide
  Antisense strand to SEQ ID NO: 1750433
ucuaaacauaaggaagaau

SEQ ID NO: 1750435 - RNA, 19 nt, Artificial Sequence
  Description of Artificial Sequence: Synthetic oligonucleotide
  Sense strand starting at position 573 of SEQ ID NO: 1562482
ucuuccuuauguuuagaga

SEQ ID NO: 1750436 - RNA, 19 nt, Artificial Sequence
  Description of Artificial Sequence: Synthetic oligonucleotide
  Antisense strand to SEQ ID NO: 1750435
ucucuaaacauaaggaaga

SEQ ID NO: 1750437 - RNA, 19 nt, Artificial Sequence
  Description of Artificial Sequence: Synthetic oligonucleotide
  Sense strand starting at position 574 of SEQ ID NO: 1562482
cuuccuuauguuuagagaa

SEQ ID NO: 1750438 - RNA, 19 nt, Artificial Sequence
  Description of Artificial Sequence: Synthetic oligonucleotide
  Antisense strand to SEQ ID NO: 1750437
uucucuaaacauaaggaag

SEQ ID NO: 1750439 - RNA, 19 nt, Artificial Sequence
  Description of Artificial Sequence: Synthetic oligonucleotide
  Sense strand starting at position 852 of SEQ ID NO: 1562482
ucaggaauccgccaucgga

SEQ ID NO: 1750440 - RNA, 19 nt, Artificial Sequence
  Description of Artificial Sequence: Synthetic oligonucleotide
  Antisense strand to SEQ ID NO: 1750439
uccgauggcggauuccuga

SEQ ID NO: 1750441 - RNA, 19 nt, Artificial Sequence
  Description of Artificial Sequence: Synthetic oligonucleotide
  Sense strand starting at position 897 of SEQ ID NO: 1562482
agagccacuguccaaauaa

SEQ ID NO: 1750442 - RNA, 19 nt, Artificial Sequence
  Description of Artificial Sequence: Synthetic oligonucleotide
  Antisense strand to SEQ ID NO: 1750441
uuauuuggacaguggcucu

SEQ ID NO: 1750443 - RNA, 19 nt, Artificial Sequence
  Description of Artificial Sequence: Synthetic oligonucleotide
  Sense strand starting at position 972 of SEQ ID NO: 1562482
cguuaagugacacgauuuc

SEQ ID NO: 1750444 - RNA, 19 nt, Artificial Sequence
  Description of Artificial Sequence: Synthetic oligonucleotide
  Antisense strand to SEQ ID NO: 1750443
gaaaucgugucacuuaacg

SEQ ID NO: 1750445 - RNA, 19 nt, Artificial Sequence
  Description of Artificial Sequence: Synthetic oligonucleotide
  Sense strand starting at position 984 of SEQ ID NO: 1562482
cgauuucccucacaaggaa

SEQ ID NO: 1750446 - RNA, 19 nt, Artificial Sequence
  Description of Artificial Sequence: Synthetic oligonucleotide
  Antisense strand to SEQ ID NO: 1750445
uuccuugugagggaaaucg

SEQ ID NO: 1750447 - RNA, 19 nt, Artificial Sequence
  Description of Artificial Sequence: Synthetic oligonucleotide
  Sense strand starting at position 1539 of SEQ ID NO: 1562482
cggcgccuuccagaaauuu

SEQ ID NO: 1750448 - RNA, 19 nt, Artificial Sequence
  Description of Artificial Sequence: Synthetic oligonucleotide
  Antisense strand to SEQ ID NO: 1750447
aaauuucuggaaggcgccg

SEQ ID NO: 1750449 - RNA, 19 nt, Artificial Sequence
  Description of Artificial Sequence: Synthetic oligonucleotide
  Sense strand starting at position 1549 of SEQ ID NO: 1562482
cagaaauuuccgcgucccu

SEQ ID NO: 1750450 - RNA, 19 nt, Artificial Sequence
  Description of Artificial Sequence: Synthetic oligonucleotide
  Antisense strand to SEQ ID NO: 1750449
agggacgcggaaauuucug

SEQ ID NO: 1750451 - RNA, 19 nt, Artificial Sequence
  Description of Artificial Sequence: Synthetic oligonucleotide
  Sense strand starting at position 2223 of SEQ ID NO: 1562482
gccuuaugacuaugcagua

SEQ ID NO: 1750452 - RNA, 19 nt, Artificial Sequence
  Description of Artificial Sequence: Synthetic oligonucleotide
  Antisense strand to SEQ ID NO: 1750451
uacugcauagucauaaggc

SEQ ID NO: 1750453 - RNA, 19 nt, Artificial Sequence
  Description of Artificial Sequence: Synthetic oligonucleotide
  Sense strand starting at position 2408 of SEQ ID NO: 1562482
gugugugcccgguuugaau

SEQ ID NO: 1750454 - RNA, 19 nt, Artificial Sequence
  Description of Artificial Sequence: Synthetic oligonucleotide
  Antisense strand to SEQ ID NO: 1750453
auucaaaccgggcacacac

SEQ ID NO: 1750455 - RNA, 19 nt, Artificial Sequence
  Description of Artificial Sequence: Synthetic oligonucleotide
  Sense strand starting at position 2570 of SEQ ID NO: 1562482
ugucuucccucugugagga

SEQ ID NO: 1750456 - RNA, 19 nt, Artificial Sequence
  Description of Artificial Sequence: Synthetic oligonucleotide
  Antisense strand to SEQ ID NO: 1750455
uccucacagagggaagaca

SEQ ID NO: 1750457 - RNA, 19 nt, Artificial Sequence
  Description of Artificial Sequence: Synthetic oligonucleotide
  Sense strand starting at position 2822 of SEQ ID NO: 1562482
uggcuuuggucuccaagau

SEQ ID NO: 1750458 - RNA, 19 nt, Artificial Sequence
  Description of Artificial Sequence: Synthetic oligonucleotide
  Antisense strand to SEQ ID NO: 1750457
aucuuggagaccaaagcca

SEQ ID NO: 1750459 - RNA, 19 nt, Artificial Sequence
  Description of Artificial Sequence: Synthetic oligonucleotide
  Sense strand starting at position 2823 of SEQ ID NO: 1562482
ggcuuuggucuccaagaug

SEQ ID NO: 1750460 - RNA, 19 nt, Artificial Sequence
  Description of Artificial Sequence: Synthetic oligonucleotide
  Antisense strand to SEQ ID NO: 1750459
caucuuggagaccaaagcc

SEQ ID NO: 1750461 - RNA, 19 nt, Artificial Sequence
  Description of Artificial Sequence: Synthetic oligonucleotide
  Sense strand starting at position 2826 of SEQ ID NO: 1562482
uuuggucuccaagauguaa

SEQ ID NO: 1750462 - RNA, 19 nt, Artificial Sequence
  Description of Artificial Sequence: Synthetic oligonucleotide
  Antisense strand to SEQ ID NO: 1750461
uuacaucuuggagaccaaa

SEQ ID NO: 1750463 - RNA, 19 nt, Artificial Sequence
  Description of Artificial Sequence: Synthetic oligonucleotide
  Sense strand starting at position 3031 of SEQ ID NO: 1562482
acuggagcugauugcuaga

SEQ ID NO: 1750464 - RNA, 19 nt, Artificial Sequence
  Description of Artificial Sequence: Synthetic oligonucleotide
  Antisense strand to SEQ ID NO: 1750463
ucuagcaaucagcuccagu

SEQ ID NO: 1750465 - RNA, 19 nt, Artificial Sequence
  Description of Artificial Sequence: Synthetic oligonucleotide
  Sense strand starting at position 3211 of SEQ ID NO: 1562482
ugagauacuugcccaagga

SEQ ID NO: 1750466 - RNA, 19 nt, Artificial Sequence
  Description of Artificial Sequence: Synthetic oligonucleotide
  Antisense strand to SEQ ID NO: 1750465
uccuugggcaaguaucuca

SEQ ID NO: 1750467 - RNA, 19 nt, Artificial Sequence
  Description of Artificial Sequence: Synthetic oligonucleotide
  Sense strand starting at position 3273 of SEQ ID NO: 1562482
gcauaaucugcagagccua

SEQ ID NO: 1750468 - RNA, 19 nt, Artificial Sequence
  Description of Artificial Sequence: Synthetic oligonucleotide
  Antisense strand to SEQ ID NO: 1750467
uaggcucugcagauuaugc

SEQ ID NO: 1750469 - RNA, 19 nt, Artificial Sequence
  Description of Artificial Sequence: Synthetic oligonucleotide
  Sense strand starting at position 3292 of SEQ ID NO: 1562482
gugcaagauccagaugcaa

SEQ ID NO: 1750470 - RNA, 19 nt, Artificial Sequence
  Description of Artificial Sequence: Synthetic oligonucleotide
  Antisense strand to SEQ ID NO: 1750469
uugcaucuggaucuugcac

SEQ ID NO: 1750471 - RNA, 19 nt, Artificial Sequence
  Description of Artificial Sequence: Synthetic oligonucleotide
  Sense strand starting at position 3294 of SEQ ID NO: 1562482
gcaagauccagaugcaagu

SEQ ID NO: 1750472 - RNA, 19 nt, Artificial Sequence
  Description of Artificial Sequence: Synthetic oligonucleotide
  Antisense strand to SEQ ID NO: 1750471
acuugcaucuggaucuugc

SEQ ID NO: 1750473 - RNA, 19 nt, Artificial Sequence
  Description of Artificial Sequence: Synthetic oligonucleotide
  Sense strand starting at position 3310 of SEQ ID NO: 1562482
agugucaauagguguugga

SEQ ID NO: 1750474 - RNA, 19 nt, Artificial Sequence
  Description of Artificial Sequence: Synthetic oligonucleotide
  Antisense strand to SEQ ID NO: 1750473
uccaacaccuauugacacu

SEQ ID NO: 1750475 - RNA, 19 nt, Artificial Sequence
  Description of Artificial Sequence: Synthetic oligonucleotide
  Sense strand starting at position 3402 of SEQ ID NO: 1562482
guucuuaguaaucggauga

SEQ ID NO: 1750476 - RNA, 19 nt, Artificial Sequence
  Description of Artificial Sequence: Synthetic oligonucleotide
  Antisense strand to SEQ ID NO: 1750475
ucauccgauuacuaagaac

SEQ ID NO: 1750477 - RNA, 19 nt, Artificial Sequence
  Description of Artificial Sequence: Synthetic oligonucleotide
  Sense strand starting at position 3403 of SEQ ID NO: 1562482
uucuuaguaaucggaugag

SEQ ID NO: 1750478 - RNA, 19 nt, Artificial Sequence
  Description of Artificial Sequence: Synthetic oligonucleotide
  Antisense strand to SEQ ID NO: 1750477
cucauccgauuacuaagaa

SEQ ID NO: 1750479 - RNA, 19 nt, Artificial Sequence
  Description of Artificial Sequence: Synthetic oligonucleotide
  Sense strand starting at position 3406 of SEQ ID NO: 1562482
uuaguaaucggaugagaua

SEQ ID NO: 1750480 - RNA, 19 nt, Artificial Sequence
  Description of Artificial Sequence: Synthetic oligonucleotide
  Antisense strand to SEQ ID NO: 1750479
uaucucauccgauuacuaa

SEQ ID NO: 1750481 - RNA, 19 nt, Artificial Sequence
  Description of Artificial Sequence: Synthetic oligonucleotide
  Sense strand starting at position 3521 of SEQ ID NO: 1562482
gaaagugaccuguggccuu

SEQ ID NO: 1750482 - RNA, 19 nt, Artificial Sequence
  Description of Artificial Sequence: Synthetic oligonucleotide
  Antisense strand to SEQ ID NO: 1750481
aaggccacaggucacuuuc

SEQ ID NO: 1750483 - RNA, 19 nt, Artificial Sequence
  Description of Artificial Sequence: Synthetic oligonucleotide
  Sense strand starting at position 3567 of SEQ ID NO: 1562482
aauauaugagcuugguaaa

SEQ ID NO: 1750484 - RNA, 19 nt, Artificial Sequence
  Description of Artificial Sequence: Synthetic oligonucleotide
  Antisense strand to SEQ ID NO: 1750483
uuuaccaagcucauauauu

SEQ ID NO: 1750485 - RNA, 19 nt, Artificial Sequence
  Description of Artificial Sequence: Synthetic oligonucleotide
  Sense strand starting at position 3976 of SEQ ID NO: 1562482
gccuaaguucugggaauuc

SEQ ID NO: 1750486 - RNA, 19 nt, Artificial Sequence
  Description of Artificial Sequence: Synthetic oligonucleotide
  Antisense strand to SEQ ID NO: 1750485
gaauucccagaacuuaggc

SEQ ID NO: 1750487 - RNA, 19 nt, Artificial Sequence
  Description of Artificial Sequence: Synthetic oligonucleotide
  Sense strand starting at position 1 of SEQ ID NO: 1562483
cuaugaacaucagugacuu

SEQ ID NO: 1750488 - RNA, 19 nt, Artificial Sequence
  Description of Artificial Sequence: Synthetic oligonucleotide
  Antisense strand to SEQ ID NO: 1750487
aagucacugauguucauag

SEQ ID NO: 1750489 - RNA, 19 nt, Artificial Sequence
  Description of Artificial Sequence: Synthetic oligonucleotide
  Sense strand starting at position 88 of SEQ ID NO: 1562483
guagucuuauuuguugaau

SEQ ID NO: 1750490 - RNA, 19 nt, Artificial Sequence
  Description of Artificial Sequence: Synthetic oligonucleotide
  Antisense strand to SEQ ID NO: 1750489
auucaacaaauaagacuac

SEQ ID NO: 1750491 - RNA, 19 nt, Artificial Sequence
  Description of Artificial Sequence: Synthetic oligonucleotide
  Sense strand starting at position 139 of SEQ ID NO: 1562483
gacagcacgcuagauguaa

SEQ ID NO: 1750492 - RNA, 19 nt, Artificial Sequence
  Description of Artificial Sequence: Synthetic oligonucleotide
  Antisense strand to SEQ ID NO: 1750491
uuacaucuagcgugcuguc

SEQ ID NO: 1750493 - RNA, 19 nt, Artificial Sequence
  Description of Artificial Sequence: Synthetic oligonucleotide
  Sense strand starting at position 143 of SEQ ID NO: 1562483
gcacgcuagauguaacaca

SEQ ID NO: 1750494 - RNA, 19 nt, Artificial Sequence
  Description of Artificial Sequence: Synthetic oligonucleotide
  Antisense strand to SEQ ID NO: 1750493
uguguuacaucuagcgugc

SEQ ID NO: 1750495 - RNA, 19 nt, Artificial Sequence
  Description of Artificial Sequence: Synthetic oligonucleotide
  Sense strand starting at position 403 of SEQ ID NO: 1562483
acacucagugguggaaaua

SEQ ID NO: 1750496 - RNA, 19 nt, Artificial Sequence
  Description of Artificial Sequence: Synthetic oligonucleotide
  Antisense strand to SEQ ID NO: 1750495
uauuuccaccacugagugu

SEQ ID NO: 1750497 - RNA, 19 nt, Artificial Sequence
  Description of Artificial Sequence: Synthetic oligonucleotide
  Sense strand starting at position 464 of SEQ ID NO: 1562483
aaagcuguccucugggaca

SEQ ID NO: 1750498 - RNA, 19 nt, Artificial Sequence
  Description of Artificial Sequence: Synthetic oligonucleotide
  Antisense strand to SEQ ID NO: 1750497
ugucccagaggacagcuuu

SEQ ID NO: 1750499 - RNA, 19 nt, Artificial Sequence
  Description of Artificial Sequence: Synthetic oligonucleotide
  Sense strand starting at position 469 of SEQ ID NO: 1562483
uguccucugggacaguaaa

SEQ ID NO: 1750500 - RNA, 19 nt, Artificial Sequence
  Description of Artificial Sequence: Synthetic oligonucleotide
  Antisense strand to SEQ ID NO: 1750499
uuuacugucccagaggaca

SEQ ID NO: 1750501 - RNA, 19 nt, Artificial Sequence
  Description of Artificial Sequence: Synthetic oligonucleotide
  Sense strand starting at position 483 of SEQ ID NO: 1562483
guaaacuuacuugagcuaa

SEQ ID NO: 1750502 - RNA, 19 nt, Artificial Sequence
  Description of Artificial Sequence: Synthetic oligonucleotide
  Antisense strand to SEQ ID NO: 1750501
uuagcucaaguaaguuuac

SEQ ID NO: 1750503 - RNA, 19 nt, Artificial Sequence
  Description of Artificial Sequence: Synthetic oligonucleotide
  Sense strand starting at position 522 of SEQ ID NO: 1562483
ggagaagguuagcucuagu

SEQ ID NO: 1750504 - RNA, 19 nt, Artificial Sequence
  Description of Artificial Sequence: Synthetic oligonucleotide
  Antisense strand to SEQ ID NO: 1750503
acuagagcuaaccuucucc

SEQ ID NO: 1750505 - RNA, 19 nt, Artificial Sequence
  Description of Artificial Sequence: Synthetic oligonucleotide
  Sense strand starting at position 532 of SEQ ID NO: 1562483
agcucuaguauugauggaa

SEQ ID NO: 1750506 - RNA, 19 nt, Artificial Sequence
  Description of Artificial Sequence: Synthetic oligonucleotide
  Antisense strand to SEQ ID NO: 1750505
uuccaucaauacuagagcu

SEQ ID NO: 1750507 - RNA, 19 nt, Artificial Sequence
  Description of Artificial Sequence: Synthetic oligonucleotide
  Sense strand starting at position 535 of SEQ ID NO: 1562483
ucuaguauugauggaagcu

SEQ ID NO: 1750508 - RNA, 19 nt, Artificial Sequence
  Description of Artificial Sequence: Synthetic oligonucleotide
  Antisense strand to SEQ ID NO: 1750507
agcuuccaucaauacuaga

SEQ ID NO: 1750509 - RNA, 19 nt, Artificial Sequence
  Description of Artificial Sequence: Synthetic oligonucleotide
  Sense strand starting at position 536 of SEQ ID NO: 1562483
cuaguauugauggaagcuu

SEQ ID NO: 1750510 - RNA, 19 nt, Artificial Sequence
  Description of Artificial Sequence: Synthetic oligonucleotide
  Antisense strand to SEQ ID NO: 1750509
aagcuuccaucaauacuag

SEQ ID NO: 1750511 - RNA, 19 nt, Artificial Sequence
  Description of Artificial Sequence: Synthetic oligonucleotide
  Sense strand starting at position 678 of SEQ ID NO: 1562483
cuaggcaucccagaugcua

SEQ ID NO: 1750512 - RNA, 19 nt, Artificial Sequence
  Description of Artificial Sequence: Synthetic oligonucleotide
  Antisense strand to SEQ ID NO: 1750511
uagcaucugggaugccuag

SEQ ID NO: 1750513 - RNA, 19 nt, Artificial Sequence
  Description of Artificial Sequence: Synthetic oligonucleotide
  Sense strand starting at position 824 of SEQ ID NO: 1562483
cuuuaaaggcuauguuuaa

SEQ ID NO: 1750514 - RNA, 19 nt, Artificial Sequence
  Description of Artificial Sequence: Synthetic oligonucleotide
  Antisense strand to SEQ ID NO: 1750513
uuaaacauagccuuuaaag

SEQ ID NO: 1750515 - RNA, 19 nt, Artificial Sequence
  Description of Artificial Sequence: Synthetic oligonucleotide
  Sense strand starting at position 833 of SEQ ID NO: 1562483
cuauguuuaagcgucguuu

SEQ ID NO: 1750516 - RNA, 19 nt, Artificial Sequence
  Description of Artificial Sequence: Synthetic oligonucleotide
  Antisense strand to SEQ ID NO: 1750515
aaacgacgcuuaaacauag

SEQ ID NO: 1750517 - RNA, 19 nt, Artificial Sequence
  Description of Artificial Sequence: Synthetic oligonucleotide
  Sense strand starting at position 836 of SEQ ID NO: 1562483
uguuuaagcgucguuucau

SEQ ID NO: 1750518 - RNA, 19 nt, Artificial Sequence
  Description of Artificial Sequence: Synthetic oligonucleotide
  Antisense strand to SEQ ID NO: 1750517
augaaacgacgcuuaaaca

SEQ ID NO: 1750519 - RNA, 19 nt, Artificial Sequence
  Description of Artificial Sequence: Synthetic oligonucleotide
  Sense strand starting at position 1156 of SEQ ID NO: 1562483
gaacauagucaacguaaca

SEQ ID NO: 1750520 - RNA, 19 nt, Artificial Sequence
  Description of Artificial Sequence: Synthetic oligonucleotide
  Antisense strand to SEQ ID NO: 1750519
uguuacguugacuauguuc

SEQ ID NO: 1750521 - RNA, 19 nt, Artificial Sequence
  Description of Artificial Sequence: Synthetic oligonucleotide
  Sense strand starting at position 1248 of SEQ ID NO: 1562483
uggaaaguggcauauguac

SEQ ID NO: 1750522 - RNA, 19 nt, Artificial Sequence
  Description of Artificial Sequence: Synthetic oligonucleotide
  Antisense strand to SEQ ID NO: 1750521
guacauaugccacuuucca

SEQ ID NO: 1750523 - RNA, 19 nt, Artificial Sequence
  Description of Artificial Sequence: Synthetic oligonucleotide
  Sense strand starting at position 1273 of SEQ ID NO: 1562483
aguguucccucauuuccau

SEQ ID NO: 1750524 - RNA, 19 nt, Artificial Sequence
  Description of Artificial Sequence: Synthetic oligonucleotide
  Antisense strand to SEQ ID NO: 1750523
auggaaaugagggaacacu

SEQ ID NO: 1750525 - RNA, 19 nt, Artificial Sequence
  Description of Artificial Sequence: Synthetic oligonucleotide
  Sense strand starting at position 1418 of SEQ ID NO: 1562483
gggaaaggugccugaugau

SEQ ID NO: 1750526 - RNA, 19 nt, Artificial Sequence
  Description of Artificial Sequence: Synthetic oligonucleotide
  Antisense strand to SEQ ID NO: 1750525
aucaucaggcaccuuuccc

SEQ ID NO: 1750527 - RNA, 19 nt, Artificial Sequence
  Description of Artificial Sequence: Synthetic oligonucleotide
  Sense strand starting at position 1563 of SEQ ID NO: 1562483
cauucuaaugccuggaagu

SEQ ID NO: 1750528 - RNA, 19 nt, Artificial Sequence
  Description of Artificial Sequence: Synthetic oligonucleotide
  Antisense strand to SEQ ID NO: 1750527
acuuccaggcauuagaaug

SEQ ID NO: 1750529 - RNA, 19 nt, Artificial Sequence
  Description of Artificial Sequence: Synthetic oligonucleotide
  Sense strand starting at position 1564 of SEQ ID NO: 1562483
auucuaaugccuggaagua

SEQ ID NO: 1750530 - RNA, 19 nt, Artificial Sequence
  Description of Artificial Sequence: Synthetic oligonucleotide
  Antisense strand to SEQ ID NO: 1750529
uacuuccaggcauuagaau

SEQ ID NO: 1750531 - RNA, 19 nt, Artificial Sequence
  Description of Artificial Sequence: Synthetic oligonucleotide
  Sense strand starting at position 1565 of SEQ ID NO: 1562483
uucuaaugccuggaaguaa

SEQ ID NO: 1750532 - RNA, 19 nt, Artificial Sequence
  Description of Artificial Sequence: Synthetic oligonucleotide
  Antisense strand to SEQ ID NO: 1750531
uuacuuccaggcauuagaa

SEQ ID NO: 1750533 - RNA, 19 nt, Artificial Sequence
  Description of Artificial Sequence: Synthetic oligonucleotide
  Sense strand starting at position 1579 of SEQ ID NO: 1562483
aguaacgugauccaguaua

SEQ ID NO: 1750534 - RNA, 19 nt, Artificial Sequence
  Description of Artificial Sequence: Synthetic oligonucleotide
  Antisense strand to SEQ ID NO: 1750533
uauacuggaucacguuacu

SEQ ID NO: 1750535 - RNA, 19 nt, Artificial Sequence
  Description of Artificial Sequence: Synthetic oligonucleotide
  Sense strand starting at position 1691 of SEQ ID NO: 1562483
aaccauguuuaggccagau

SEQ ID NO: 1750536 - RNA, 19 nt, Artificial Sequence
  Description of Artificial Sequence: Synthetic oligonucleotide
  Antisense strand to SEQ ID NO: 1750535
aucuggccuaaacaugguu

SEQ ID NO: 1750537 - RNA, 19 nt, Artificial Sequence
  Description of Artificial Sequence: Synthetic oligonucleotide
  Sense strand starting at position 1693 of SEQ ID NO: 1562483
ccauguuuaggccagauau

SEQ ID NO: 1750538 - RNA, 19 nt, Artificial Sequence
  Description of Artificial Sequence: Synthetic oligonucleotide
  Antisense strand to SEQ ID NO: 1750537
auaucuggccuaaacaugg

SEQ ID NO: 1750539 - RNA, 19 nt, Artificial Sequence
  Description of Artificial Sequence: Synthetic oligonucleotide
  Sense strand starting at position 1695 of SEQ ID NO: 1562483
auguuuaggccagauauau

SEQ ID NO: 1750540 - RNA, 19 nt, Artificial Sequence
  Description of Artificial Sequence: Synthetic oligonucleotide
  Antisense strand to SEQ ID NO: 1750539
auauaucuggccuaaacau

SEQ ID NO: 1750541 - RNA, 19 nt, Artificial Sequence
  Description of Artificial Sequence: Synthetic oligonucleotide
  Sense strand starting at position 1706 of SEQ ID NO: 1562483
agauauauucgucaucuaa

SEQ ID NO: 1750542 - RNA, 19 nt, Artificial Sequence
  Description of Artificial Sequence: Synthetic oligonucleotide
  Antisense strand to SEQ ID NO: 1750541
uuagaugacgaauauaucu

SEQ ID NO: 1750543 - RNA, 19 nt, Artificial Sequence
  Description of Artificial Sequence: Synthetic oligonucleotide
  Sense strand starting at position 1952 of SEQ ID NO: 1562483
gguguaaauauagauagca

SEQ ID NO: 1750544 - RNA, 19 nt, Artificial Sequence
  Description of Artificial Sequence: Synthetic oligonucleotide
  Antisense strand to SEQ ID NO: 1750543
ugcuaucuauauuuacacc

SEQ ID NO: 1750545 - RNA, 19 nt, Artificial Sequence
  Description of Artificial Sequence: Synthetic oligonucleotide
  Sense strand starting at position 1983 of SEQ ID NO: 1562483
aauggauuaugagcuacga

SEQ ID NO: 1750546 - RNA, 19 nt, Artificial Sequence
  Description of Artificial Sequence: Synthetic oligonucleotide
  Antisense strand to SEQ ID NO: 1750545
ucguagcucauaauccauu

SEQ ID NO: 1750547 - RNA, 19 nt, Artificial Sequence
  Description of Artificial Sequence: Synthetic oligonucleotide
  Sense strand starting at position 1985 of SEQ ID NO: 1562483
uggauuaugagcuacgaau

SEQ ID NO: 1750548 - RNA, 19 nt, Artificial Sequence
  Description of Artificial Sequence: Synthetic oligonucleotide
  Antisense strand to SEQ ID NO: 1750547
auucguagcucauaaucca

SEQ ID NO: 1750549 - RNA, 19 nt, Artificial Sequence
  Description of Artificial Sequence: Synthetic oligonucleotide
  Sense strand starting at position 2122 of SEQ ID NO: 1562483
cucugacuugcugaagaac

SEQ ID NO: 1750550 - RNA, 19 nt, Artificial Sequence
  Description of Artificial Sequence: Synthetic oligonucleotide
  Antisense strand to SEQ ID NO: 1750549
guucuucagcaagucagag

SEQ ID NO: 1750551 - RNA, 19 nt, Artificial Sequence
  Description of Artificial Sequence: Synthetic oligonucleotide
  Sense strand starting at position 2141 of SEQ ID NO: 1562483
cuacccaguaguggagaua

SEQ ID NO: 1750552 - RNA, 19 nt, Artificial Sequence
  Description of Artificial Sequence: Synthetic oligonucleotide
  Antisense strand to SEQ ID NO: 1750551
uaucuccacuacuggguag

SEQ ID NO: 1750553 - RNA, 19 nt, Artificial Sequence
  Description of Artificial Sequence: Synthetic oligonucleotide
  Sense strand starting at position 2287 of SEQ ID NO: 1562483
caggaaggagcuugcaauu

SEQ ID NO: 1750554 - RNA, 19 nt, Artificial Sequence
  Description of Artificial Sequence: Synthetic oligonucleotide
  Antisense strand to SEQ ID NO: 1750553
aauugcaagcuccuuccug

SEQ ID NO: 1750555 - RNA, 19 nt, Artificial Sequence
  Description of Artificial Sequence: Synthetic oligonucleotide
  Sense strand starting at position 3112 of SEQ ID NO: 1562483
gaaagaugauggcugugaa

SEQ ID NO: 1750556 - RNA, 19 nt, Artificial Sequence
  Description of Artificial Sequence: Synthetic oligonucleotide
  Antisense strand to SEQ ID NO: 1750555
uucacagccaucaucuuuc

SEQ ID NO: 1750557 - RNA, 19 nt, Artificial Sequence
  Description of Artificial Sequence: Synthetic oligonucleotide
  Sense strand starting at position 3113 of SEQ ID NO: 1562483
aaagaugauggcugugaaa

SEQ ID NO: 1750558 - RNA, 19 nt, Artificial Sequence
  Description of Artificial Sequence: Synthetic oligonucleotide
  Antisense strand to SEQ ID NO: 1750557
uuucacagccaucaucuuu

SEQ ID NO: 1750559 - RNA, 19 nt, Artificial Sequence
  Description of Artificial Sequence: Synthetic oligonucleotide
  Sense strand starting at position 3400 of SEQ ID NO: 1562483
cugggagaguucuuggauu

SEQ ID NO: 1750560 - RNA, 19 nt, Artificial Sequence
  Description of Artificial Sequence: Synthetic oligonucleotide
  Antisense strand to SEQ ID NO: 1750559
aauccaagaacucucccag

SEQ ID NO: 1750561 - RNA, 19 nt, Artificial Sequence
  Description of Artificial Sequence: Synthetic oligonucleotide
  Sense strand starting at position 3613 of SEQ ID NO: 1562483
gguguaugcagauacuucu

SEQ ID NO: 1750562 - RNA, 19 nt, Artificial Sequence
  Description of Artificial Sequence: Synthetic oligonucleotide
  Antisense strand to SEQ ID NO: 1750561
agaaguaucugcauacacc

SEQ ID NO: 1750563 - RNA, 19 nt, Artificial Sequence
  Description of Artificial Sequence: Synthetic oligonucleotide
  Sense strand starting at position 3867 of SEQ ID NO: 1562483
ugugucauggaggagguua

SEQ ID NO: 1750564 - RNA, 19 nt, Artificial Sequence
  Description of Artificial Sequence: Synthetic oligonucleotide
  Antisense strand to SEQ ID NO: 1750563
uaaccuccuccaugacaca

SEQ ID NO: 1750565 - RNA, 19 nt, Artificial Sequence
  Description of Artificial Sequence: Synthetic oligonucleotide
  Sense strand starting at position 3869 of SEQ ID NO: 1562483
ugucauggaggagguuaua

SEQ ID NO: 1750566 - RNA, 19 nt, Artificial Sequence
  Description of Artificial Sequence: Synthetic oligonucleotide
  Antisense strand to SEQ ID NO: 1750565
uauaaccuccuccaugaca

SEQ ID NO: 1750567 - RNA, 19 nt, Artificial Sequence
  Description of Artificial Sequence: Synthetic oligonucleotide
  Sense strand starting at position 11 of SEQ ID NO: 1562484
guugacgucauacagaaga

SEQ ID NO: 1750568 - RNA, 19 nt, Artificial Sequence
  Description of Artificial Sequence: Synthetic oligonucleotide
  Antisense strand to SEQ ID NO: 1750567
ucuucuguaugacgucaac

SEQ ID NO: 1750569 - RNA, 19 nt, Artificial Sequence
  Description of Artificial Sequence: Synthetic oligonucleotide
  Sense strand starting at position 59 of SEQ ID NO: 1562484
gucucaaaugcugagguuu

SEQ ID NO: 1750570 - RNA, 19 nt, Artificial Sequence
  Description of Artificial Sequence: Synthetic oligonucleotide
  Antisense strand to SEQ ID NO: 1750569
aaaccucagcauuugagac

SEQ ID NO: 1750571 - RNA, 19 nt, Artificial Sequence
  Description of Artificial Sequence: Synthetic oligonucleotide
  Sense strand starting at position 139 of SEQ ID NO: 1562484
aaugguuccuaguuuguga

SEQ ID NO: 1750572 - RNA, 19 nt, Artificial Sequence
  Description of Artificial Sequence: Synthetic oligonucleotide
  Antisense strand to SEQ ID NO: 1750571
ucacaaacuaggaaccauu

SEQ ID NO: 1750573 - RNA, 19 nt, Artificial Sequence
  Description of Artificial Sequence: Synthetic oligonucleotide
  Sense strand starting at position 174 of SEQ ID NO: 1562484
guuucucuaugaccaguua

SEQ ID NO: 1750574 - RNA, 19 nt, Artificial Sequence
  Description of Artificial Sequence: Synthetic oligonucleotide
  Antisense strand to SEQ ID NO: 1750573
uaacuggucauagagaaac

SEQ ID NO: 1750575 - RNA, 19 nt, Artificial Sequence
  Description of Artificial Sequence: Synthetic oligonucleotide
  Sense strand starting at position 314 of SEQ ID NO: 1562484
uucucaaacuguuugguuu

SEQ ID NO: 1750576 - RNA, 19 nt, Artificial Sequence
  Description of Artificial Sequence: Synthetic oligonucleotide
  Antisense strand to SEQ ID NO: 1750575
aaaccaaacaguuugagaa

SEQ ID NO: 1750577 - RNA, 19 nt, Artificial Sequence
  Description of Artificial Sequence: Synthetic oligonucleotide
  Sense strand starting at position 315 of SEQ ID NO: 1562484
ucucaaacuguuugguuua

SEQ ID NO: 1750578 - RNA, 19 nt, Artificial Sequence
  Description of Artificial Sequence: Synthetic oligonucleotide
  Antisense strand to SEQ ID NO: 1750577
uaaaccaaacaguuugaga

SEQ ID NO: 1750579 - RNA, 19 nt, Artificial Sequence
  Description of Artificial Sequence: Synthetic oligonucleotide
  Sense strand starting at position 317 of SEQ ID NO: 1562484
ucaaacuguuugguuuaaa

SEQ ID NO: 1750580 - RNA, 19 nt, Artificial Sequence
  Description of Artificial Sequence: Synthetic oligonucleotide
  Antisense strand to SEQ ID NO: 1750579
uuuaaaccaaacaguuuga

SEQ ID NO: 1750581 - RNA, 19 nt, Artificial Sequence
  Description of Artificial Sequence: Synthetic oligonucleotide
  Sense strand starting at position 318 of SEQ ID NO: 1562484
caaacuguuugguuuaaag

SEQ ID NO: 1750582 - RNA, 19 nt, Artificial Sequence
  Description of Artificial Sequence: Synthetic oligonucleotide
  Antisense strand to SEQ ID NO: 1750581
cuuuaaaccaaacaguuug

SEQ ID NO: 1750583 - RNA, 19 nt, Artificial Sequence
  Description of Artificial Sequence: Synthetic oligonucleotide
  Sense strand starting at position 320 of SEQ ID NO: 1562484
aacuguuugguuuaaagac

SEQ ID NO: 1750584 - RNA, 19 nt, Artificial Sequence
  Description of Artificial Sequence: Synthetic oligonucleotide
  Antisense strand to SEQ ID NO: 1750583
gucuuuaaaccaaacaguu

SEQ ID NO: 1750585 - RNA, 19 nt, Artificial Sequence
  Description of Artificial Sequence: Synthetic oligonucleotide
  Sense strand starting at position 376 of SEQ ID NO: 1562484
gugcacuaugucuauugau

SEQ ID NO: 1750586 - RNA, 19 nt, Artificial Sequence
  Description of Artificial Sequence: Synthetic oligonucleotide
  Antisense strand to SEQ ID NO: 1750585
aucaauagacauagugcac

SEQ ID NO: 1750587 - RNA, 19 nt, Artificial Sequence
  Description of Artificial Sequence: Synthetic oligonucleotide
  Sense strand starting at position 385 of SEQ ID NO: 1562484
gucuauugauacguccuau

SEQ ID NO: 1750588 - RNA, 19 nt, Artificial Sequence
  Description of Artificial Sequence: Synthetic oligonucleotide
  Antisense strand to SEQ ID NO: 1750587
auaggacguaucaauagac

SEQ ID NO: 1750589 - RNA, 19 nt, Artificial Sequence
  Description of Artificial Sequence: Synthetic oligonucleotide
  Sense strand starting at position 391 of SEQ ID NO: 1562484
ugauacguccuauguuaga

SEQ ID NO: 1750590 - RNA, 19 nt, Artificial Sequence
  Description of Artificial Sequence: Synthetic oligonucleotide
  Antisense strand to SEQ ID NO: 1750589
ucuaacauaggacguauca

SEQ ID NO: 1750591 - RNA, 19 nt, Artificial Sequence
  Description of Artificial Sequence: Synthetic oligonucleotide
  Sense strand starting at position 401 of SEQ ID NO: 1562484
uauguuagacguuaaagcu

SEQ ID NO: 1750592 - RNA, 19 nt, Artificial Sequence
  Description of Artificial Sequence: Synthetic oligonucleotide
  Antisense strand to SEQ ID NO: 1750591
agcuuuaacgucuaacaua

SEQ ID NO: 1750593 - RNA, 19 nt, Artificial Sequence
  Description of Artificial Sequence: Synthetic oligonucleotide
  Sense strand starting at position 407 of SEQ ID NO: 1562484
agacguuaaagcuacaagu

SEQ ID NO: 1750594 - RNA, 19 nt, Artificial Sequence
  Description of Artificial Sequence: Synthetic oligonucleotide
  Antisense strand to SEQ ID NO: 1750593
acuuguagcuuuaacgucu

SEQ ID NO: 1750595 - RNA, 19 nt, Artificial Sequence
  Description of Artificial Sequence: Synthetic oligonucleotide
  Sense strand starting at position 409 of SEQ ID NO: 1562484
acguuaaagcuacaaguau

SEQ ID NO: 1750596 - RNA, 19 nt, Artificial Sequence
  Description of Artificial Sequence: Synthetic oligonucleotide
  Antisense strand to SEQ ID NO: 1750595
auacuuguagcuuuaacgu

SEQ ID NO: 1750597 - RNA, 19 nt, Artificial Sequence
  Description of Artificial Sequence: Synthetic oligonucleotide
  Sense strand starting at position 443 of SEQ ID NO: 1562484
auaagaagccauuacaugu

SEQ ID NO: 1750598 - RNA, 19 nt, Artificial Sequence
  Description of Artificial Sequence: Synthetic oligonucleotide
  Antisense strand to SEQ ID NO: 1750597
acauguaauggcuucuuau

SEQ ID NO: 1750599 - RNA, 19 nt, Artificial Sequence
  Description of Artificial Sequence: Synthetic oligonucleotide
  Sense strand starting at position 522 of SEQ ID NO: 1562484
cugugaugauguucuuaau

SEQ ID NO: 1750600 - RNA, 19 nt, Artificial Sequence
  Description of Artificial Sequence: Synthetic oligonucleotide
  Antisense strand to SEQ ID NO: 1750599
auuaagaacaucaucacag

SEQ ID NO: 1750601 - RNA, 19 nt, Artificial Sequence
  Description of Artificial Sequence: Synthetic oligonucleotide
  Sense strand starting at position 571 of SEQ ID NO: 1562484
gcuggauucccauacccgu

SEQ ID NO: 1750602 - RNA, 19 nt, Artificial Sequence
  Description of Artificial Sequence: Synthetic oligonucleotide
  Antisense strand to SEQ ID NO: 1750601
acggguaugggaauccagc

SEQ ID NO: 1750603 - RNA, 19 nt, Artificial Sequence
  Description of Artificial Sequence: Synthetic oligonucleotide
  Sense strand starting at position 673 of SEQ ID NO: 1562484
cguauaauacucugguacu

SEQ ID NO: 1750604 - RNA, 19 nt, Artificial Sequence
  Description of Artificial Sequence: Synthetic oligonucleotide
  Antisense strand to SEQ ID NO: 1750603
aguaccagaguauuauacg

SEQ ID NO: 1750605 - RNA, 19 nt, Artificial Sequence
  Description of Artificial Sequence: Synthetic oligonucleotide
  Sense strand starting at position 1009 of SEQ ID NO: 1562484
cgucuuggcccugagaauu

SEQ ID NO: 1750606 - RNA, 19 nt, Artificial Sequence
  Description of Artificial Sequence: Synthetic oligonucleotide
  Antisense strand to SEQ ID NO: 1750605
aauucucagggccaagacg

SEQ ID NO: 1750607 - RNA, 19 nt, Artificial Sequence
  Description of Artificial Sequence: Synthetic oligonucleotide
  Sense strand starting at position 1019 of SEQ ID NO: 1562484
cugagaauucacugcggag

SEQ ID NO: 1750608 - RNA, 19 nt, Artificial Sequence
  Description of Artificial Sequence: Synthetic oligonucleotide
  Antisense strand to SEQ ID NO: 1750607
cuccgcagugaauucucag

SEQ ID NO: 1750609 - RNA, 19 nt, Artificial Sequence
  Description of Artificial Sequence: Synthetic oligonucleotide
  Sense strand starting at position 2037 of SEQ ID NO: 1562484
cgugaaaugcguucccagu

SEQ ID NO: 1750610 - RNA, 19 nt, Artificial Sequence
  Description of Artificial Sequence: Synthetic oligonucleotide
  Antisense strand to SEQ ID NO: 1750609
acugggaacgcauuucacg

SEQ ID NO: 1750611 - RNA, 19 nt, Artificial Sequence
  Description of Artificial Sequence: Synthetic oligonucleotide
  Sense strand starting at position 2538 of SEQ ID NO: 1562484
augagagccuggguuucua

SEQ ID NO: 1750612 - RNA, 19 nt, Artificial Sequence
  Description of Artificial Sequence: Synthetic oligonucleotide
  Antisense strand to SEQ ID NO: 1750611
uagaaacccaggcucucau

SEQ ID NO: 1750613 - RNA, 19 nt, Artificial Sequence
  Description of Artificial Sequence: Synthetic oligonucleotide
  Sense strand starting at position 2768 of SEQ ID NO: 1562484
uucugcgaggcguuauuaa

SEQ ID NO: 1750614 - RNA, 19 nt, Artificial Sequence
  Description of Artificial Sequence: Synthetic oligonucleotide
  Antisense strand to SEQ ID NO: 1750613
uuaauaacgccucgcagaa

SEQ ID NO: 1750615 - RNA, 19 nt, Artificial Sequence
  Description of Artificial Sequence: Synthetic oligonucleotide
  Sense strand starting at position 2967 of SEQ ID NO: 1562484
aacgguauaauuggacgaa

SEQ ID NO: 1750616 - RNA, 19 nt, Artificial Sequence
  Description of Artificial Sequence: Synthetic oligonucleotide
  Antisense strand to SEQ ID NO: 1750615
uucguccaauuauaccguu

SEQ ID NO: 1750617 - RNA, 19 nt, Artificial Sequence
  Description of Artificial Sequence: Synthetic oligonucleotide
  Sense strand starting at position 2979 of SEQ ID NO: 1562484
ggacgaauuucuugaagga

SEQ ID NO: 1750618 - RNA, 19 nt, Artificial Sequence
  Description of Artificial Sequence: Synthetic oligonucleotide
  Antisense strand to SEQ ID NO: 1750617
uccuucaagaaauucgucc

SEQ ID NO: 1750619 - RNA, 19 nt, Artificial Sequence
  Description of Artificial Sequence: Synthetic oligonucleotide
  Sense strand starting at position 3035 of SEQ ID NO: 1562484
ucuguuaaauuugagauca

SEQ ID NO: 1750620 - RNA, 19 nt, Artificial Sequence
  Description of Artificial Sequence: Synthetic oligonucleotide
  Antisense strand to SEQ ID NO: 1750619
ugaucucaaauuuaacaga

SEQ ID NO: 1750621 - RNA, 19 nt, Artificial Sequence
  Description of Artificial Sequence: Synthetic oligonucleotide
  Sense strand starting at position 3107 of SEQ ID NO: 1562484
ggugaauccuacuuagaga

SEQ ID NO: 1750622 - RNA, 19 nt, Artificial Sequence
  Description of Artificial Sequence: Synthetic oligonucleotide
  Antisense strand to SEQ ID NO: 1750621
ucucuaaguaggauucacc

SEQ ID NO: 1750623 - RNA, 19 nt, Artificial Sequence
  Description of Artificial Sequence: Synthetic oligonucleotide
  Sense strand starting at position 3183 of SEQ ID NO: 1562484
cgauguaugggccagcauu

SEQ ID NO: 1750624 - RNA, 19 nt, Artificial Sequence
  Description of Artificial Sequence: Synthetic oligonucleotide
  Antisense strand to SEQ ID NO: 1750623
aaugcuggcccauacaucg

SEQ ID NO: 1750625 - RNA, 19 nt, Artificial Sequence
  Description of Artificial Sequence: Synthetic oligonucleotide
  Sense strand starting at position 3195 of SEQ ID NO: 1562484
cagcauugccuugauagca

SEQ ID NO: 1750626 - RNA, 19 nt, Artificial Sequence
  Description of Artificial Sequence: Synthetic oligonucleotide
  Antisense strand to SEQ ID NO: 1750625
ugcuaucaaggcaaugcug

SEQ ID NO: 1750627 - RNA, 19 nt, Artificial Sequence
  Description of Artificial Sequence: Synthetic oligonucleotide
  Sense strand starting at position 3299 of SEQ ID NO: 1562484
auuuauaucugccuauugu

SEQ ID NO: 1750628 - RNA, 19 nt, Artificial Sequence
  Description of Artificial Sequence: Synthetic oligonucleotide
  Antisense strand to SEQ ID NO: 1750627
acaauaggcagauauaaau

SEQ ID NO: 1750629 - RNA, 19 nt, Artificial Sequence
  Description of Artificial Sequence: Synthetic oligonucleotide
  Sense strand starting at position 3300 of SEQ ID NO: 1562484
uuuauaucugccuauuguu

SEQ ID NO: 1750630 - RNA, 19 nt, Artificial Sequence
  Description of Artificial Sequence: Synthetic oligonucleotide
  Antisense strand to SEQ ID NO: 1750629
aacaauaggcagauauaaa

SEQ ID NO: 1750631 - RNA, 19 nt, Artificial Sequence
  Description of Artificial Sequence: Synthetic oligonucleotide
  Sense strand starting at position 3392 of SEQ ID NO: 1562484
ucaggacguccugagaacu

SEQ ID NO: 1750632 - RNA, 19 nt, Artificial Sequence
  Description of Artificial Sequence: Synthetic oligonucleotide
  Antisense strand to SEQ ID NO: 1750631
aguucucaggacguccuga

SEQ ID NO: 1750633 - RNA, 19 nt, Artificial Sequence
  Description of Artificial Sequence: Synthetic oligonucleotide
  Sense strand starting at position 3574 of SEQ ID NO: 1562484
ggcaguugguugaaagaag

SEQ ID NO: 1750634 - RNA, 19 nt, Artificial Sequence
  Description of Artificial Sequence: Synthetic oligonucleotide
  Antisense strand to SEQ ID NO: 1750633
cuucuuucaaccaacugcc

SEQ ID NO: 1750635 - RNA, 19 nt, Artificial Sequence
  Description of Artificial Sequence: Synthetic oligonucleotide
  Sense strand starting at position 3598 of SEQ ID NO: 1562484
aucugaaggcuuggaauca

SEQ ID NO: 1750636 - RNA, 19 nt, Artificial Sequence
  Description of Artificial Sequence: Synthetic oligonucleotide
  Antisense strand to SEQ ID NO: 1750635
ugauuccaagccuucagau

SEQ ID NO: 1750637 - RNA, 19 nt, Artificial Sequence
  Description of Artificial Sequence: Synthetic oligonucleotide
  Sense strand starting at position 3625 of SEQ ID NO: 1562484
gagugucuggguuaagaga

SEQ ID NO: 1750638 - RNA, 19 nt, Artificial Sequence
  Description of Artificial Sequence: Synthetic oligonucleotide
  Antisense strand to SEQ ID NO: 1750637
ucucuuaacccagacacuc

SEQ ID NO: 1750639 - RNA, 19 nt, Artificial Sequence
  Description of Artificial Sequence: Synthetic oligonucleotide
  Sense strand starting at position 3656 of SEQ ID NO: 1562484
gaccgagguccuuauuaug

SEQ ID NO: 1750640 - RNA, 19 nt, Artificial Sequence
  Description of Artificial Sequence: Synthetic oligonucleotide
  Antisense strand to SEQ ID NO: 1750639
cauaauaaggaccucgguc

SEQ ID NO: 1750641 - RNA, 19 nt, Artificial Sequence
  Description of Artificial Sequence: Synthetic oligonucleotide
  Sense strand starting at position 3663 of SEQ ID NO: 1562484
guccuuauuauguggauga

SEQ ID NO: 1750642 - RNA, 19 nt, Artificial Sequence
  Description of Artificial Sequence: Synthetic oligonucleotide
  Antisense strand to SEQ ID NO: 1750641
ucauccacauaauaaggac

SEQ ID NO: 1750643 - RNA, 19 nt, Artificial Sequence
  Description of Artificial Sequence: Synthetic oligonucleotide
  Sense strand starting at position 3667 of SEQ ID NO: 1562484
uuauuauguggaugaaauc

SEQ ID NO: 1750644 - RNA, 19 nt, Artificial Sequence
  Description of Artificial Sequence: Synthetic oligonucleotide
  Antisense strand to SEQ ID NO: 1750643
gauuucauccacauaauaa

SEQ ID NO: 1750645 - RNA, 19 nt, Artificial Sequence
  Description of Artificial Sequence: Synthetic oligonucleotide
  Sense strand starting at position 3760 of SEQ ID NO: 1562484
cagccagucuccucaggau

SEQ ID NO: 1750646 - RNA, 19 nt, Artificial Sequence
  Description of Artificial Sequence: Synthetic oligonucleotide
  Antisense strand to SEQ ID NO: 1750645
auccugaggagacuggcug

SEQ ID NO: 1750647 - RNA, 19 nt, Artificial Sequence
  Description of Artificial Sequence: Synthetic oligonucleotide
  Sense strand starting at position 84 of SEQ ID NO: 1562485
acaggucacugguagacau

SEQ ID NO: 1750648 - RNA, 19 nt, Artificial Sequence
  Description of Artificial Sequence: Synthetic oligonucleotide
  Antisense strand to SEQ ID NO: 1750647
augucuaccagugaccugu

SEQ ID NO: 1750649 - RNA, 19 nt, Artificial Sequence
  Description of Artificial Sequence: Synthetic oligonucleotide
  Sense strand starting at position 267 of SEQ ID NO: 1562485
ucccgucuugauuaagaac

SEQ ID NO: 1750650 - RNA, 19 nt, Artificial Sequence
  Description of Artificial Sequence: Synthetic oligonucleotide
  Antisense strand to SEQ ID NO: 1750649
guucuuaaucaagacggga

SEQ ID NO: 1750651 - RNA, 19 nt, Artificial Sequence
  Description of Artificial Sequence: Synthetic oligonucleotide
  Sense strand starting at position 270 of SEQ ID NO: 1562485
cgucuugauuaagaacaca

SEQ ID NO: 1750652 - RNA, 19 nt, Artificial Sequence
  Description of Artificial Sequence: Synthetic oligonucleotide
  Antisense strand to SEQ ID NO: 1750651
uguguucuuaaucaagacg

SEQ ID NO: 1750653 - RNA, 19 nt, Artificial Sequence
  Description of Artificial Sequence: Synthetic oligonucleotide
  Sense strand starting at position 977 of SEQ ID NO: 1562485
uaagguuacucaguaaaga

SEQ ID NO: 1750654 - RNA, 19 nt, Artificial Sequence
  Description of Artificial Sequence: Synthetic oligonucleotide
  Antisense strand to SEQ ID NO: 1750653
ucuuuacugaguaaccuua

SEQ ID NO: 1750655 - RNA, 19 nt, Artificial Sequence
  Description of Artificial Sequence: Synthetic oligonucleotide
  Sense strand starting at position 1080 of SEQ ID NO: 1562485
gggacuuaguucucaauau

SEQ ID NO: 1750656 - RNA, 19 nt, Artificial Sequence
  Description of Artificial Sequence: Synthetic oligonucleotide
  Antisense strand to SEQ ID NO: 1750655
auauugagaacuaaguccc

SEQ ID NO: 1750657 - RNA, 19 nt, Artificial Sequence
  Description of Artificial Sequence: Synthetic oligonucleotide
  Sense strand starting at position 1081 of SEQ ID NO: 1562485
ggacuuaguucucaauaua

SEQ ID NO: 1750658 - RNA, 19 nt, Artificial Sequence
  Description of Artificial Sequence: Synthetic oligonucleotide
  Antisense strand to SEQ ID NO: 1750657
uauauugagaacuaagucc

SEQ ID NO: 1750659 - RNA, 19 nt, Artificial Sequence
  Description of Artificial Sequence: Synthetic oligonucleotide
  Sense strand starting at position 1103 of SEQ ID NO: 1562485
cuuucuauaguguacagaa

SEQ ID NO: 1750660 - RNA, 19 nt, Artificial Sequence
  Description of Artificial Sequence: Synthetic oligonucleotide
  Antisense strand to SEQ ID NO: 1750659
uucuguacacuauagaaag

SEQ ID NO: 1750661 - RNA, 19 nt, Artificial Sequence
  Description of Artificial Sequence: Synthetic oligonucleotide
  Sense strand starting at position 1105 of SEQ ID NO: 1562485
uucuauaguguacagaaca

SEQ ID NO: 1750662 - RNA, 19 nt, Artificial Sequence
  Description of Artificial Sequence: Synthetic oligonucleotide
  Antisense strand to SEQ ID NO: 1750661
uguucuguacacuauagaa

SEQ ID NO: 1750663 - RNA, 19 nt, Artificial Sequence
  Description of Artificial Sequence: Synthetic oligonucleotide
  Sense strand starting at position 1176 of SEQ ID NO: 1562485
cgaguuaaaucacuuuaaa

SEQ ID NO: 1750664 - RNA, 19 nt, Artificial Sequence
  Description of Artificial Sequence: Synthetic oligonucleotide
  Antisense strand to SEQ ID NO: 1750663
uuuaaagugauuuaacucg

SEQ ID NO: 1750665 - RNA, 19 nt, Artificial Sequence
  Description of Artificial Sequence: Synthetic oligonucleotide
  Sense strand starting at position 1198 of SEQ ID NO: 1562485
gucuauuaguguucuauaa

SEQ ID NO: 1750666 - RNA, 19 nt, Artificial Sequence
  Description of Artificial Sequence: Synthetic oligonucleotide
  Antisense strand to SEQ ID NO: 1750665
uuauagaacacuaauagac

SEQ ID NO: 1750667 - RNA, 19 nt, Artificial Sequence
  Description of Artificial Sequence: Synthetic oligonucleotide
  Sense strand starting at position 1206 of SEQ ID NO: 1562485
guguucuauaagggaaauu

SEQ ID NO: 1750668 - RNA, 19 nt, Artificial Sequence
  Description of Artificial Sequence: Synthetic oligonucleotide
  Antisense strand to SEQ ID NO: 1750667
aauuucccuuauagaacac

SEQ ID NO: 1750669 - RNA, 19 nt, Artificial Sequence
  Description of Artificial Sequence: Synthetic oligonucleotide
  Sense strand starting at position 1223 of SEQ ID NO: 1562485
uuguaauuggauuggaaau

SEQ ID NO: 1750670 - RNA, 19 nt, Artificial Sequence
  Description of Artificial Sequence: Synthetic oligonucleotide
  Antisense strand to SEQ ID NO: 1750669
auuuccaauccaauuacaa

SEQ ID NO: 1750671 - RNA, 19 nt, Artificial Sequence
  Description of Artificial Sequence: Synthetic oligonucleotide
  Sense strand starting at position 1224 of SEQ ID NO: 1562485
uguaauuggauuggaaauc

SEQ ID NO: 1750672 - RNA, 19 nt, Artificial Sequence
  Description of Artificial Sequence: Synthetic oligonucleotide
  Antisense strand to SEQ ID NO: 1750671
gauuuccaauccaauuaca

SEQ ID NO: 1750673 - RNA, 19 nt, Artificial Sequence
  Description of Artificial Sequence: Synthetic oligonucleotide
  Sense strand starting at position 1225 of SEQ ID NO: 1562485
guaauuggauuggaaauca

SEQ ID NO: 1750674 - RNA, 19 nt, Artificial Sequence
  Description of Artificial Sequence: Synthetic oligonucleotide
  Antisense strand to SEQ ID NO: 1750673
ugauuuccaauccaauuac

SEQ ID NO: 1750675 - RNA, 19 nt, Artificial Sequence
  Description of Artificial Sequence: Synthetic oligonucleotide
  Sense strand starting at position 1255 of SEQ ID NO: 1562485
uugugucgcuguuuauaaa

SEQ ID NO: 1750676 - RNA, 19 nt, Artificial Sequence
  Description of Artificial Sequence: Synthetic oligonucleotide
  Antisense strand to SEQ ID NO: 1750675
uuuauaaacagcgacacaa

SEQ ID NO: 1750677 - RNA, 19 nt, Artificial Sequence
  Description of Artificial Sequence: Synthetic oligonucleotide
  Sense strand starting at position 2550 of SEQ ID NO: 1562485
gcaagucuuggcgccacaa

SEQ ID NO: 1750678 - RNA, 19 nt, Artificial Sequence
  Description of Artificial Sequence: Synthetic oligonucleotide
  Antisense strand to SEQ ID NO: 1750677
uuguggcgccaagacuugc

SEQ ID NO: 1750679 - RNA, 19 nt, Artificial Sequence
  Description of Artificial Sequence: Synthetic oligonucleotide
  Sense strand starting at position 2552 of SEQ ID NO: 1562485
aagucuuggcgccacaaau

SEQ ID NO: 1750680 - RNA, 19 nt, Artificial Sequence
  Description of Artificial Sequence: Synthetic oligonucleotide
  Antisense strand to SEQ ID NO: 1750679
auuuguggcgccaagacuu

SEQ ID NO: 1750681 - RNA, 19 nt, Artificial Sequence
  Description of Artificial Sequence: Synthetic oligonucleotide
  Sense strand starting at position 2573 of SEQ ID NO: 1562485
cagugacagccuugcguua

SEQ ID NO: 1750682 - RNA, 19 nt, Artificial Sequence
  Description of Artificial Sequence: Synthetic oligonucleotide
  Antisense strand to SEQ ID NO: 1750681
uaacgcaaggcugucacug

SEQ ID NO: 1750683 - RNA, 19 nt, Artificial Sequence
  Description of Artificial Sequence: Synthetic oligonucleotide
  Sense strand starting at position 2594 of SEQ ID NO: 1562485
ggcaaaguucaugggaguu

SEQ ID NO: 1750684 - RNA, 19 nt, Artificial Sequence
  Description of Artificial Sequence: Synthetic oligonucleotide
  Antisense strand to SEQ ID NO: 1750683
aacucccaugaacuuugcc

SEQ ID NO: 1750685 - RNA, 19 nt, Artificial Sequence
  Description of Artificial Sequence: Synthetic oligonucleotide
  Sense strand starting at position 3689 of SEQ ID NO: 1562485
ggauucuaagccugggaca

SEQ ID NO: 1750686 - RNA, 19 nt, Artificial Sequence
  Description of Artificial Sequence: Synthetic oligonucleotide
  Antisense strand to SEQ ID NO: 1750685
ugucccaggcuuagaaucc

SEQ ID NO: 1750687 - RNA, 19 nt, Artificial Sequence
  Description of Artificial Sequence: Synthetic oligonucleotide
  Sense strand starting at position 3781 of SEQ ID NO: 1562485
ggaugaaugucuaggugug

SEQ ID NO: 1750688 - RNA, 19 nt, Artificial Sequence
  Description of Artificial Sequence: Synthetic oligonucleotide
  Antisense strand to SEQ ID NO: 1750687
cacaccuagacauucaucc

SEQ ID NO: 1750689 - RNA, 19 nt, Artificial Sequence
  Description of Artificial Sequence: Synthetic oligonucleotide
  Sense strand starting at position 3795 of SEQ ID NO: 1562485
gugugcagucacuggagua

SEQ ID NO: 1750690 - RNA, 19 nt, Artificial Sequence
  Description of Artificial Sequence: Synthetic oligonucleotide
  Antisense strand to SEQ ID NO: 1750689
uacuccagugacugcacac

SEQ ID NO: 1750691 - RNA, 19 nt, Artificial Sequence
  Description of Artificial Sequence: Synthetic oligonucleotide
  Sense strand starting at position 3796 of SEQ ID NO: 1562485
ugugcagucacuggaguaa

SEQ ID NO: 1750692 - RNA, 19 nt, Artificial Sequence
  Description of Artificial Sequence: Synthetic oligonucleotide
  Antisense strand to SEQ ID NO: 1750691
uuacuccagugacugcaca

SEQ ID NO: 1750693 - RNA, 19 nt, Artificial Sequence
  Description of Artificial Sequence: Synthetic oligonucleotide
  Sense strand starting at position 3810 of SEQ ID NO: 1562485
aguaaacgucacugggaca

SEQ ID NO: 1750694 - RNA, 19 nt, Artificial Sequence
  Description of Artificial Sequence: Synthetic oligonucleotide
  Antisense strand to SEQ ID NO: 1750693
ugucccagugacguuuacu

SEQ ID NO: 1750695 - RNA, 19 nt, Artificial Sequence
  Description of Artificial Sequence: Synthetic oligonucleotide
  Sense strand starting at position 3811 of SEQ ID NO: 1562485
guaaacgucacugggacau

SEQ ID NO: 1750696 - RNA, 19 nt, Artificial Sequence
  Description of Artificial Sequence: Synthetic oligonucleotide
  Antisense strand to SEQ ID NO: 1750695
augucccagugacguuuac

SEQ ID NO: 1750697 - RNA, 19 nt, Artificial Sequence
  Description of Artificial Sequence: Synthetic oligonucleotide
  Sense strand starting at position 3822 of SEQ ID NO: 1562485
ugggacaugauguguaauu

SEQ ID NO: 1750698 - RNA, 19 nt, Artificial Sequence
  Description of Artificial Sequence: Synthetic oligonucleotide
  Antisense strand to SEQ ID NO: 1750697
aauuacacaucauguccca

SEQ ID NO: 1750699 - RNA, 19 nt, Artificial Sequence
  Description of Artificial Sequence: Synthetic oligonucleotide
  Sense strand starting at position 3823 of SEQ ID NO: 1562485
gggacaugauguguaauuc

SEQ ID NO: 1750700 - RNA, 19 nt, Artificial Sequence
  Description of Artificial Sequence: Synthetic oligonucleotide
  Antisense strand to SEQ ID NO: 1750699
gaauuacacaucauguccc

SEQ ID NO: 1750701 - RNA, 19 nt, Artificial Sequence
  Description of Artificial Sequence: Synthetic oligonucleotide
  Sense strand starting at position 3824 of SEQ ID NO: 1562485
ggacaugauguguaauucu

SEQ ID NO: 1750702 - RNA, 19 nt, Artificial Sequence
  Description of Artificial Sequence: Synthetic oligonucleotide
  Antisense strand to SEQ ID NO: 1750701
agaauuacacaucaugucc

SEQ ID NO: 1750703 - RNA, 19 nt, Artificial Sequence
  Description of Artificial Sequence: Synthetic oligonucleotide
  Sense strand starting at position 3831 of SEQ ID NO: 1562485
auguguaauucuuugugua

SEQ ID NO: 1750704 - RNA, 19 nt, Artificial Sequence
  Description of Artificial Sequence: Synthetic oligonucleotide
  Antisense strand to SEQ ID NO: 1750703
uacacaaagaauuacacau

SEQ ID NO: 1750705 - RNA, 19 nt, Artificial Sequence
  Description of Artificial Sequence: Synthetic oligonucleotide
  Sense strand starting at position 3832 of SEQ ID NO: 1562485
uguguaauucuuuguguac

SEQ ID NO: 1750706 - RNA, 19 nt, Artificial Sequence
  Description of Artificial Sequence: Synthetic oligonucleotide
  Antisense strand to SEQ ID NO: 1750705
guacacaaagaauuacaca

SEQ ID NO: 1750707 - RNA, 19 nt, Artificial Sequence
  Description of Artificial Sequence: Synthetic oligonucleotide
  Sense strand starting at position 3833 of SEQ ID NO: 1562485
guguaauucuuuguguaca

SEQ ID NO: 1750708 - RNA, 19 nt, Artificial Sequence
  Description of Artificial Sequence: Synthetic oligonucleotide
  Antisense strand to SEQ ID NO: 1750707
uguacacaaagaauuacac

SEQ ID NO: 1750709 - RNA, 19 nt, Artificial Sequence
  Description of Artificial Sequence: Synthetic oligonucleotide
  Sense strand starting at position 3835 of SEQ ID NO: 1562485
guaauucuuuguguacauc

SEQ ID NO: 1750710 - RNA, 19 nt, Artificial Sequence
  Description of Artificial Sequence: Synthetic oligonucleotide
  Antisense strand to SEQ ID NO: 1750709
gauguacacaaagaauuac

SEQ ID NO: 1750711 - RNA, 19 nt, Artificial Sequence
  Description of Artificial Sequence: Synthetic oligonucleotide
  Sense strand starting at position 3853 of SEQ ID NO: 1562485
cgcugagugcuacugcuaa

SEQ ID NO: 1750712 - RNA, 19 nt, Artificial Sequence
  Description of Artificial Sequence: Synthetic oligonucleotide
  Antisense strand to SEQ ID NO: 1750711
uuagcaguagcacucagcg

SEQ ID NO: 1750713 - RNA, 19 nt, Artificial Sequence
  Description of Artificial Sequence: Synthetic oligonucleotide
  Sense strand starting at position 3865 of SEQ ID NO: 1562485
cugcuaauguuguuaagaa

SEQ ID NO: 1750714 - RNA, 19 nt, Artificial Sequence
  Description of Artificial Sequence: Synthetic oligonucleotide
  Antisense strand to SEQ ID NO: 1750713
uucuuaacaacauuagcag

SEQ ID NO: 1750715 - RNA, 19 nt, Artificial Sequence
  Description of Artificial Sequence: Synthetic oligonucleotide
  Sense strand starting at position 3873 of SEQ ID NO: 1562485
guuguuaagaacuggugua

SEQ ID NO: 1750716 - RNA, 19 nt, Artificial Sequence
  Description of Artificial Sequence: Synthetic oligonucleotide
  Antisense strand to SEQ ID NO: 1750715
uacaccaguucuuaacaac

SEQ ID NO: 1750717 - RNA, 19 nt, Artificial Sequence
  Description of Artificial Sequence: Synthetic oligonucleotide
  Sense strand starting at position 3874 of SEQ ID NO: 1562485
uuguuaagaacugguguau

SEQ ID NO: 1750718 - RNA, 19 nt, Artificial Sequence
  Description of Artificial Sequence: Synthetic oligonucleotide
  Antisense strand to SEQ ID NO: 1750717
auacaccaguucuuaacaa

SEQ ID NO: 1750719 - RNA, 19 nt, Artificial Sequence
  Description of Artificial Sequence: Synthetic oligonucleotide
  Sense strand starting at position 3878 of SEQ ID NO: 1562485
uaagaacugguguauccau

SEQ ID NO: 1750720 - RNA, 19 nt, Artificial Sequence
  Description of Artificial Sequence: Synthetic oligonucleotide
  Antisense strand to SEQ ID NO: 1750719
auggauacaccaguucuua

SEQ ID NO: 1750721 - RNA, 19 nt, Artificial Sequence
  Description of Artificial Sequence: Synthetic oligonucleotide
  Sense strand starting at position 3902 of SEQ ID NO: 1562485
agagaauuaccaggcuaua

SEQ ID NO: 1750722 - RNA, 19 nt, Artificial Sequence
  Description of Artificial Sequence: Synthetic oligonucleotide
  Antisense strand to SEQ ID NO: 1750721
uauagccugguaauucucu

SEQ ID NO: 1750723 - RNA, 19 nt, Artificial Sequence
  Description of Artificial Sequence: Synthetic oligonucleotide
  Sense strand starting at position 3905 of SEQ ID NO: 1562485
gaauuaccaggcuauaguu

SEQ ID NO: 1750724 - RNA, 19 nt, Artificial Sequence
  Description of Artificial Sequence: Synthetic oligonucleotide
  Antisense strand to SEQ ID NO: 1750723
aacuauagccugguaauuc

SEQ ID NO: 1750725 - RNA, 19 nt, Artificial Sequence
  Description of Artificial Sequence: Synthetic oligonucleotide
  Sense strand starting at position 3941 of SEQ ID NO: 1562485
uugauaucagaguaauguu

SEQ ID NO: 1750726 - RNA, 19 nt, Artificial Sequence
  Description of Artificial Sequence: Synthetic oligonucleotide
  Antisense strand to SEQ ID NO: 1750725
aacauuacucugauaucaa

SEQ ID NO: 1750727 - RNA, 19 nt, Artificial Sequence
  Description of Artificial Sequence: Synthetic oligonucleotide
  Sense strand starting at position 78 of SEQ ID NO: 1562486
ggaagacacaguugccuua

SEQ ID NO: 1750728 - RNA, 19 nt, Artificial Sequence
  Description of Artificial Sequence: Synthetic oligonucleotide
  Antisense strand to SEQ ID NO: 1750727
uaaggcaacugugucuucc

SEQ ID NO: 1750729 - RNA, 19 nt, Artificial Sequence
  Description of Artificial Sequence: Synthetic oligonucleotide
  Sense strand starting at position 81 of SEQ ID NO: 1562486
agacacaguugccuuaaau

SEQ ID NO: 1750730 - RNA, 19 nt, Artificial Sequence
  Description of Artificial Sequence: Synthetic oligonucleotide
  Antisense strand to SEQ ID NO: 1750729
auuuaaggcaacugugucu

SEQ ID NO: 1750731 - RNA, 19 nt, Artificial Sequence
  Description of Artificial Sequence: Synthetic oligonucleotide
  Sense strand starting at position 136 of SEQ ID NO: 1562486
ccuggccuucuguacagau

SEQ ID NO: 1750732 - RNA, 19 nt, Artificial Sequence
  Description of Artificial Sequence: Synthetic oligonucleotide
  Antisense strand to SEQ ID NO: 1750731
aucuguacagaaggccagg

SEQ ID NO: 1750733 - RNA, 19 nt, Artificial Sequence
  Description of Artificial Sequence: Synthetic oligonucleotide
  Sense strand starting at position 138 of SEQ ID NO: 1562486
uggccuucuguacagauaa

SEQ ID NO: 1750734 - RNA, 19 nt, Artificial Sequence
  Description of Artificial Sequence: Synthetic oligonucleotide
  Antisense strand to SEQ ID NO: 1750733
uuaucuguacagaaggcca

SEQ ID NO: 1750735 - RNA, 19 nt, Artificial Sequence
  Description of Artificial Sequence: Synthetic oligonucleotide
  Sense strand starting at position 357 of SEQ ID NO: 1562486
aaguaugaaucacagauag

SEQ ID NO: 1750736 - RNA, 19 nt, Artificial Sequence
  Description of Artificial Sequence: Synthetic oligonucleotide
  Antisense strand to SEQ ID NO: 1750735
cuaucugugauucauacuu

SEQ ID NO: 1750737 - RNA, 19 nt, Artificial Sequence
  Description of Artificial Sequence: Synthetic oligonucleotide
  Sense strand starting at position 464 of SEQ ID NO: 1562486
cagcgaugucaggaaaucu

SEQ ID NO: 1750738 - RNA, 19 nt, Artificial Sequence
  Description of Artificial Sequence: Synthetic oligonucleotide
  Antisense strand to SEQ ID NO: 1750737
agauuuccugacaucgcug

SEQ ID NO: 1750739 - RNA, 19 nt, Artificial Sequence
  Description of Artificial Sequence: Synthetic oligonucleotide
  Sense strand starting at position 579 of SEQ ID NO: 1562486
acccuuaucgaguguugac

SEQ ID NO: 1750740 - RNA, 19 nt, Artificial Sequence
  Description of Artificial Sequence: Synthetic oligonucleotide
  Antisense strand to SEQ ID NO: 1750739
gucaacacucgauaagggu

SEQ ID NO: 1750741 - RNA, 19 nt, Artificial Sequence
  Description of Artificial Sequence: Synthetic oligonucleotide
  Sense strand starting at position 588 of SEQ ID NO: 1562486
gaguguugacaucauugca

SEQ ID NO: 1750742 - RNA, 19 nt, Artificial Sequence
  Description of Artificial Sequence: Synthetic oligonucleotide
  Antisense strand to SEQ ID NO: 1750741
ugcaaugaugucaacacuc

SEQ ID NO: 1750743 - RNA, 19 nt, Artificial Sequence
  Description of Artificial Sequence: Synthetic oligonucleotide
  Sense strand starting at position 603 of SEQ ID NO: 1562486
ugcauucuccaaggagaac

SEQ ID NO: 1750744 - RNA, 19 nt, Artificial Sequence
  Description of Artificial Sequence: Synthetic oligonucleotide
  Antisense strand to SEQ ID NO: 1750743
guucuccuuggagaaugca

SEQ ID NO: 1750745 - RNA, 19 nt, Artificial Sequence
  Description of Artificial Sequence: Synthetic oligonucleotide
  Sense strand starting at position 615 of SEQ ID NO: 1562486
ggagaacugucacugcuac

SEQ ID NO: 1750746 - RNA, 19 nt, Artificial Sequence
  Description of Artificial Sequence: Synthetic oligonucleotide
  Antisense strand to SEQ ID NO: 1750745
guagcagugacaguucucc

SEQ ID NO: 1750747 - RNA, 19 nt, Artificial Sequence
  Description of Artificial Sequence: Synthetic oligonucleotide
  Sense strand starting at position 752 of SEQ ID NO: 1562486
gaguguugguagcuuuaaa

SEQ ID NO: 1750748 - RNA, 19 nt, Artificial Sequence
  Description of Artificial Sequence: Synthetic oligonucleotide
  Antisense strand to SEQ ID NO: 1750747
uuuaaagcuaccaacacuc

SEQ ID NO: 1750749 - RNA, 19 nt, Artificial Sequence
  Description of Artificial Sequence: Synthetic oligonucleotide
  Sense strand starting at position 786 of SEQ ID NO: 1562486
acgugucucugaucacaca

SEQ ID NO: 1750750 - RNA, 19 nt, Artificial Sequence
  Description of Artificial Sequence: Synthetic oligonucleotide
  Antisense strand to SEQ ID NO: 1750749
ugugugaucagagacacgu

SEQ ID NO: 1750751 - RNA, 19 nt, Artificial Sequence
  Description of Artificial Sequence: Synthetic oligonucleotide
  Sense strand starting at position 934 of SEQ ID NO: 1562486
accagauaggaguguuuau

SEQ ID NO: 1750752 - RNA, 19 nt, Artificial Sequence
  Description of Artificial Sequence: Synthetic oligonucleotide
  Antisense strand to SEQ ID NO: 1750751
auaaacacuccuaucuggu

SEQ ID NO: 1750753 - RNA, 19 nt, Artificial Sequence
  Description of Artificial Sequence: Synthetic oligonucleotide
  Sense strand starting at position 946 of SEQ ID NO: 1562486
uguuuauuuccaugaguuu

SEQ ID NO: 1750754 - RNA, 19 nt, Artificial Sequence
  Description of Artificial Sequence: Synthetic oligonucleotide
  Antisense strand to SEQ ID NO: 1750753
aaacucauggaaauaaaca

SEQ ID NO: 1750755 - RNA, 19 nt, Artificial Sequence
  Description of Artificial Sequence: Synthetic oligonucleotide
  Sense strand starting at position 1215 of SEQ ID NO: 1562486
ggacucagcuucucuaaac

SEQ ID NO: 1750756 - RNA, 19 nt, Artificial Sequence
  Description of Artificial Sequence: Synthetic oligonucleotide
  Antisense strand to SEQ ID NO: 1750755
guuuagagaagcugagucc

SEQ ID NO: 1750757 - RNA, 19 nt, Artificial Sequence
  Description of Artificial Sequence: Synthetic oligonucleotide
  Sense strand starting at position 1556 of SEQ ID NO: 1562486
gggaaauccagccggguuu

SEQ ID NO: 1750758 - RNA, 19 nt, Artificial Sequence
  Description of Artificial Sequence: Synthetic oligonucleotide
  Antisense strand to SEQ ID NO: 1750757
aaacccggcuggauuuccc

SEQ ID NO: 1750759 - RNA, 19 nt, Artificial Sequence
  Description of Artificial Sequence: Synthetic oligonucleotide
  Sense strand starting at position 1832 of SEQ ID NO: 1562486
uugcgauccgcuccggaaa

SEQ ID NO: 1750760 - RNA, 19 nt, Artificial Sequence
  Description of Artificial Sequence: Synthetic oligonucleotide
  Antisense strand to SEQ ID NO: 1750759
uuuccggagcggaucgcaa

SEQ ID NO: 1750761 - RNA, 19 nt, Artificial Sequence
  Description of Artificial Sequence: Synthetic oligonucleotide
  Sense strand starting at position 2553 of SEQ ID NO: 1562486
uucccucauguacgugaaa

SEQ ID NO: 1750762 - RNA, 19 nt, Artificial Sequence
  Description of Artificial Sequence: Synthetic oligonucleotide
  Antisense strand to SEQ ID NO: 1750761
uuucacguacaugagggaa

SEQ ID NO: 1750763 - RNA, 19 nt, Artificial Sequence
  Description of Artificial Sequence: Synthetic oligonucleotide
  Sense strand starting at position 2627 of SEQ ID NO: 1562486
gauggacaguucguaggaa

SEQ ID NO: 1750764 - RNA, 19 nt, Artificial Sequence
  Description of Artificial Sequence: Synthetic oligonucleotide
  Antisense strand to SEQ ID NO: 1750763
uuccuacgaacuguccauc

SEQ ID NO: 1750765 - RNA, 19 nt, Artificial Sequence
  Description of Artificial Sequence: Synthetic oligonucleotide
  Sense strand starting at position 2653 of SEQ ID NO: 1562486
gguucuuaagcauaugaga

SEQ ID NO: 1750766 - RNA, 19 nt, Artificial Sequence
  Description of Artificial Sequence: Synthetic oligonucleotide
  Antisense strand to SEQ ID NO: 1750765
ucucauaugcuuaagaacc

SEQ ID NO: 1750767 - RNA, 19 nt, Artificial Sequence
  Description of Artificial Sequence: Synthetic oligonucleotide
  Sense strand starting at position 3010 of SEQ ID NO: 1562486
cuccuuuacggguaggaga

SEQ ID NO: 1750768 - RNA, 19 nt, Artificial Sequence
  Description of Artificial Sequence: Synthetic oligonucleotide
  Antisense strand to SEQ ID NO: 1750767
ucuccuacccguaaaggag

SEQ ID NO: 1750769 - RNA, 19 nt, Artificial Sequence
  Description of Artificial Sequence: Synthetic oligonucleotide
  Sense strand starting at position 3012 of SEQ ID NO: 1562486
ccuuuacggguaggagaau

SEQ ID NO: 1750770 - RNA, 19 nt, Artificial Sequence
  Description of Artificial Sequence: Synthetic oligonucleotide
  Antisense strand to SEQ ID NO: 1750769
auucuccuacccguaaagg

SEQ ID NO: 1750771 - RNA, 19 nt, Artificial Sequence
  Description of Artificial Sequence: Synthetic oligonucleotide
  Sense strand starting at position 3025 of SEQ ID NO: 1562486
gagaauaaauuagcguagu

SEQ ID NO: 1750772 - RNA, 19 nt, Artificial Sequence
  Description of Artificial Sequence: Synthetic oligonucleotide
  Antisense strand to SEQ ID NO: 1750771
acuacgcuaauuuauucuc

SEQ ID NO: 1750773 - RNA, 19 nt, Artificial Sequence
  Description of Artificial Sequence: Synthetic oligonucleotide
  Sense strand starting at position 3050 of SEQ ID NO: 1562486
ucagauauuuguggauauc

SEQ ID NO: 1750774 - RNA, 19 nt, Artificial Sequence
  Description of Artificial Sequence: Synthetic oligonucleotide
  Antisense strand to SEQ ID NO: 1750773
gauauccacaaauaucuga

SEQ ID NO: 1750775 - RNA, 19 nt, Artificial Sequence
  Description of Artificial Sequence: Synthetic oligonucleotide
  Sense strand starting at position 3133 of SEQ ID NO: 1562486
gcuuguaugaauggcauau

SEQ ID NO: 1750776 - RNA, 19 nt, Artificial Sequence
  Description of Artificial Sequence: Synthetic oligonucleotide
  Antisense strand to SEQ ID NO: 1750775
auaugccauucauacaagc

SEQ ID NO: 1750777 - RNA, 19 nt, Artificial Sequence
  Description of Artificial Sequence: Synthetic oligonucleotide
  Sense strand starting at position 3137 of SEQ ID NO: 1562486
guaugaauggcauauguga

SEQ ID NO: 1750778 - RNA, 19 nt, Artificial Sequence
  Description of Artificial Sequence: Synthetic oligonucleotide
  Antisense strand to SEQ ID NO: 1750777
ucacauaugccauucauac

SEQ ID NO: 1750779 - RNA, 19 nt, Artificial Sequence
  Description of Artificial Sequence: Synthetic oligonucleotide
  Sense strand starting at position 3139 of SEQ ID NO: 1562486
augaauggcauaugugauc

SEQ ID NO: 1750780 - RNA, 19 nt, Artificial Sequence
  Description of Artificial Sequence: Synthetic oligonucleotide
  Antisense strand to SEQ ID NO: 1750779
gaucacauaugccauucau

SEQ ID NO: 1750781 - RNA, 19 nt, Artificial Sequence
  Description of Artificial Sequence: Synthetic oligonucleotide
  Sense strand starting at position 3144 of SEQ ID NO: 1562486
uggcauaugugaucaucac

SEQ ID NO: 1750782 - RNA, 19 nt, Artificial Sequence
  Description of Artificial Sequence: Synthetic oligonucleotide
  Antisense strand to SEQ ID NO: 1750781
gugaugaucacauaugcca

SEQ ID NO: 1750783 - RNA, 19 nt, Artificial Sequence
  Description of Artificial Sequence: Synthetic oligonucleotide
  Sense strand starting at position 3145 of SEQ ID NO: 1562486
ggcauaugugaucaucaca

SEQ ID NO: 1750784 - RNA, 19 nt, Artificial Sequence
  Description of Artificial Sequence: Synthetic oligonucleotide
  Antisense strand to SEQ ID NO: 1750783
ugugaugaucacauaugcc

SEQ ID NO: 1750785 - RNA, 19 nt, Artificial Sequence
  Description of Artificial Sequence: Synthetic oligonucleotide
  Sense strand starting at position 3180 of SEQ ID NO: 1562486
gugccaucccaugggaagu

SEQ ID NO: 1750786 - RNA, 19 nt, Artificial Sequence
  Description of Artificial Sequence: Synthetic oligonucleotide
  Antisense strand to SEQ ID NO: 1750785
acuucccaugggauggcac

SEQ ID NO: 1750787 - RNA, 19 nt, Artificial Sequence
  Description of Artificial Sequence: Synthetic oligonucleotide
  Sense strand starting at position 3190 of SEQ ID NO: 1562486
augggaaguguuggaugca

SEQ ID NO: 1750788 - RNA, 19 nt, Artificial Sequence
  Description of Artificial Sequence: Synthetic oligonucleotide
  Antisense strand to SEQ ID NO: 1750787
ugcauccaacacuucccau

SEQ ID NO: 1750789 - RNA, 19 nt, Artificial Sequence
  Description of Artificial Sequence: Synthetic oligonucleotide
  Sense strand starting at position 3251 of SEQ ID NO: 1562486
agauuaggcaaguguugau

SEQ ID NO: 1750790 - RNA, 19 nt, Artificial Sequence
  Description of Artificial Sequence: Synthetic oligonucleotide
  Antisense strand to SEQ ID NO: 1750789
aucaacacuugccuaaucu

SEQ ID NO: 1750791 - RNA, 19 nt, Artificial Sequence
  Description of Artificial Sequence: Synthetic oligonucleotide
  Sense strand starting at position 3645 of SEQ ID NO: 1562486
augaaacaguccucggcau

SEQ ID NO: 1750792 - RNA, 19 nt, Artificial Sequence
  Description of Artificial Sequence: Synthetic oligonucleotide
  Antisense strand to SEQ ID NO: 1750791
augccgaggacuguuucau

SEQ ID NO: 1750793 - RNA, 19 nt, Artificial Sequence
  Description of Artificial Sequence: Synthetic oligonucleotide
  Sense strand starting at position 3646 of SEQ ID NO: 1562486
ugaaacaguccucggcaua

SEQ ID NO: 1750794 - RNA, 19 nt, Artificial Sequence
  Description of Artificial Sequence: Synthetic oligonucleotide
  Antisense strand to SEQ ID NO: 1750793
uaugccgaggacuguuuca

SEQ ID NO: 1750795 - RNA, 19 nt, Artificial Sequence
  Description of Artificial Sequence: Synthetic oligonucleotide
  Sense strand starting at position 3647 of SEQ ID NO: 1562486
gaaacaguccucggcauau

SEQ ID NO: 1750796 - RNA, 19 nt, Artificial Sequence
  Description of Artificial Sequence: Synthetic oligonucleotide
  Antisense strand to SEQ ID NO: 1750795
auaugccgaggacuguuuc

SEQ ID NO: 1750797 - RNA, 19 nt, Artificial Sequence
  Description of Artificial Sequence: Synthetic oligonucleotide
  Sense strand starting at position 3651 of SEQ ID NO: 1562486
caguccucggcauauguga

SEQ ID NO: 1750798 - RNA, 19 nt, Artificial Sequence
  Description of Artificial Sequence: Synthetic oligonucleotide
  Antisense strand to SEQ ID NO: 1750797
ucacauaugccgaggacug

SEQ ID NO: 1750799 - RNA, 19 nt, Artificial Sequence
  Description of Artificial Sequence: Synthetic oligonucleotide
  Sense strand starting at position 3713 of SEQ ID NO: 1562486
gugcgaauaacugaaagua

SEQ ID NO: 1750800 - RNA, 19 nt, Artificial Sequence
  Description of Artificial Sequence: Synthetic oligonucleotide
  Antisense strand to SEQ ID NO: 1750799
uacuuucaguuauucgcac

SEQ ID NO: 1750801 - RNA, 19 nt, Artificial Sequence
  Description of Artificial Sequence: Synthetic oligonucleotide
  Sense strand starting at position 3828 of SEQ ID NO: 1562486
ucaagaggauugucaaugu

SEQ ID NO: 1750802 - RNA, 19 nt, Artificial Sequence
  Description of Artificial Sequence: Synthetic oligonucleotide
  Antisense strand to SEQ ID NO: 1750801
acauugacaauccucuuga

SEQ ID NO: 1750803 - RNA, 19 nt, Artificial Sequence
  Description of Artificial Sequence: Synthetic oligonucleotide
  Sense strand starting at position 3837 of SEQ ID NO: 1562486
uugucaauguguccacuau

SEQ ID NO: 1750804 - RNA, 19 nt, Artificial Sequence
  Description of Artificial Sequence: Synthetic oligonucleotide
  Antisense strand to SEQ ID NO: 1750803
auaguggacacauugacaa

SEQ ID NO: 1750805 - RNA, 19 nt, Artificial Sequence
  Description of Artificial Sequence: Synthetic oligonucleotide
  Sense strand starting at position 3838 of SEQ ID NO: 1562486
ugucaauguguccacuaua

SEQ ID NO: 1750806 - RNA, 19 nt, Artificial Sequence
  Description of Artificial Sequence: Synthetic oligonucleotide
  Antisense strand to SEQ ID NO: 1750805
uauaguggacacauugaca

SEQ ID NO: 1750807 - RNA, 19 nt, Artificial Sequence
  Description of Artificial Sequence: Synthetic oligonucleotide
  Sense strand starting at position 33 of SEQ ID NO: 1562487
augaaagcucauuggaaug

SEQ ID NO: 1750808 - RNA, 19 nt, Artificial Sequence
  Description of Artificial Sequence: Synthetic oligonucleotide
  Antisense strand to SEQ ID NO: 1750807
cauuccaaugagcuuucau

SEQ ID NO: 1750809 - RNA, 19 nt, Artificial Sequence
  Description of Artificial Sequence: Synthetic oligonucleotide
  Sense strand starting at position 220 of SEQ ID NO: 1562487
gcagaaacaguaugaauac

SEQ ID NO: 1750810 - RNA, 19 nt, Artificial Sequence
  Description of Artificial Sequence: Synthetic oligonucleotide
  Antisense strand to SEQ ID NO: 1750809
guauucauacuguuucugc

SEQ ID NO: 1750811 - RNA, 19 nt, Artificial Sequence
  Description of Artificial Sequence: Synthetic oligonucleotide
  Sense strand starting at position 247 of SEQ ID NO: 1562487
uuucuaauguguccaacuu

SEQ ID NO: 1750812 - RNA, 19 nt, Artificial Sequence
  Description of Artificial Sequence: Synthetic oligonucleotide
  Antisense strand to SEQ ID NO: 1750811
aaguuggacacauuagaaa

SEQ ID NO: 1750813 - RNA, 19 nt, Artificial Sequence
  Description of Artificial Sequence: Synthetic oligonucleotide
  Sense strand starting at position 281 of SEQ ID NO: 1562487
cugguauuaugccugaaau

SEQ ID NO: 1750814 - RNA, 19 nt, Artificial Sequence
  Description of Artificial Sequence: Synthetic oligonucleotide
  Antisense strand to SEQ ID NO: 1750813
auuucaggcauaauaccag

SEQ ID NO: 1750815 - RNA, 19 nt, Artificial Sequence
  Description of Artificial Sequence: Synthetic oligonucleotide
  Sense strand starting at position 282 of SEQ ID NO: 1562487
ugguauuaugccugaaauu

SEQ ID NO: 1750816 - RNA, 19 nt, Artificial Sequence
  Description of Artificial Sequence: Synthetic oligonucleotide
  Antisense strand to SEQ ID NO: 1750815
aauuucaggcauaauacca

SEQ ID NO: 1750817 - RNA, 19 nt, Artificial Sequence
  Description of Artificial Sequence: Synthetic oligonucleotide
  Sense strand starting at position 360 of SEQ ID NO: 1562487
cuaaaugaugcugauguuu

SEQ ID NO: 1750818 - RNA, 19 nt, Artificial Sequence
  Description of Artificial Sequence: Synthetic oligonucleotide
  Antisense strand to SEQ ID NO: 1750817
aaacaucagcaucauuuag

SEQ ID NO: 1750819 - RNA, 19 nt, Artificial Sequence
  Description of Artificial Sequence: Synthetic oligonucleotide
  Sense strand starting at position 387 of SEQ ID NO: 1562487
aguauuuccuuagaauugu

SEQ ID NO: 1750820 - RNA, 19 nt, Artificial Sequence
  Description of Artificial Sequence: Synthetic oligonucleotide
  Antisense strand to SEQ ID NO: 1750819
acaauucuaaggaaauacu

SEQ ID NO: 1750821 - RNA, 19 nt, Artificial Sequence
  Description of Artificial Sequence: Synthetic oligonucleotide
  Sense strand starting at position 393 of SEQ ID NO: 1562487
uccuuagaauuguuauggu

SEQ ID NO: 1750822 - RNA, 19 nt, Artificial Sequence
  Description of Artificial Sequence: Synthetic oligonucleotide
  Antisense strand to SEQ ID NO: 1750821
accauaacaauucuaagga

SEQ ID NO: 1750823 - RNA, 19 nt, Artificial Sequence
  Description of Artificial Sequence: Synthetic oligonucleotide
  Sense strand starting at position 443 of SEQ ID NO: 1562487
gcguuuccucugccucaca

SEQ ID NO: 1750824 - RNA, 19 nt, Artificial Sequence
  Description of Artificial Sequence: Synthetic oligonucleotide
  Antisense strand to SEQ ID NO: 1750823
ugugaggcagaggaaacgc

SEQ ID NO: 1750825 - RNA, 19 nt, Artificial Sequence
  Description of Artificial Sequence: Synthetic oligonucleotide
  Sense strand starting at position 542 of SEQ ID NO: 1562487
cuuagcucucuguaaugcu

SEQ ID NO: 1750826 - RNA, 19 nt, Artificial Sequence
  Description of Artificial Sequence: Synthetic oligonucleotide
  Antisense strand to SEQ ID NO: 1750825
agcauuacagagagcuaag

SEQ ID NO: 1750827 - RNA, 19 nt, Artificial Sequence
  Description of Artificial Sequence: Synthetic oligonucleotide
  Sense strand starting at position 595 of SEQ ID NO: 1562487
acggaaauuaccugcgauu

SEQ ID NO: 1750828 - RNA, 19 nt, Artificial Sequence
  Description of Artificial Sequence: Synthetic oligonucleotide
  Antisense strand to SEQ ID NO: 1750827
aaucgcagguaauuuccgu

SEQ ID NO: 1750829 - RNA, 19 nt, Artificial Sequence
  Description of Artificial Sequence: Synthetic oligonucleotide
  Sense strand starting at position 813 of SEQ ID NO: 1562487
augugugaagauuagugua

SEQ ID NO: 1750830 - RNA, 19 nt, Artificial Sequence
  Description of Artificial Sequence: Synthetic oligonucleotide
  Antisense strand to SEQ ID NO: 1750829
uacacuaaucuucacacau

SEQ ID NO: 1750831 - RNA, 19 nt, Artificial Sequence
  Description of Artificial Sequence: Synthetic oligonucleotide
  Sense strand starting at position 815 of SEQ ID NO: 1562487
gugugaagauuaguguaga

SEQ ID NO: 1750832 - RNA, 19 nt, Artificial Sequence
  Description of Artificial Sequence: Synthetic oligonucleotide
  Antisense strand to SEQ ID NO: 1750831
ucuacacuaaucuucacac

SEQ ID NO: 1750833 - RNA, 19 nt, Artificial Sequence
  Description of Artificial Sequence: Synthetic oligonucleotide
  Sense strand starting at position 962 of SEQ ID NO: 1562487
agaucaggugucgacuuaa

SEQ ID NO: 1750834 - RNA, 19 nt, Artificial Sequence
  Description of Artificial Sequence: Synthetic oligonucleotide
  Antisense strand to SEQ ID NO: 1750833
uuaagucgacaccugaucu

SEQ ID NO: 1750835 - RNA, 19 nt, Artificial Sequence
  Description of Artificial Sequence: Synthetic oligonucleotide
  Sense strand starting at position 971 of SEQ ID NO: 1562487
gucgacuuaaggcaauaaa

SEQ ID NO: 1750836 - RNA, 19 nt, Artificial Sequence
  Description of Artificial Sequence: Synthetic oligonucleotide
  Antisense strand to SEQ ID NO: 1750835
uuuauugccuuaagucgac

SEQ ID NO: 1750837 - RNA, 19 nt, Artificial Sequence
  Description of Artificial Sequence: Synthetic oligonucleotide
  Sense strand starting at position 1014 of SEQ ID NO: 1562487
gugugauagcuuuaauucc

SEQ ID NO: 1750838 - RNA, 19 nt, Artificial Sequence
  Description of Artificial Sequence: Synthetic oligonucleotide
  Antisense strand to SEQ ID NO: 1750837
ggaauuaaagcuaucacac

SEQ ID NO: 1750839 - RNA, 19 nt, Artificial Sequence
  Description of Artificial Sequence: Synthetic oligonucleotide
  Sense strand starting at position 1248 of SEQ ID NO: 1562487
ugauauucguaguuacaaa

SEQ ID NO: 1750840 - RNA, 19 nt, Artificial Sequence
  Description of Artificial Sequence: Synthetic oligonucleotide
  Antisense strand to SEQ ID NO: 1750839
uuuguaacuacgaauauca

SEQ ID NO: 1750841 - RNA, 19 nt, Artificial Sequence
  Description of Artificial Sequence: Synthetic oligonucleotide
  Sense strand starting at position 1259 of SEQ ID NO: 1562487
guuacaaaugcuuacugau

SEQ ID NO: 1750842 - RNA, 19 nt, Artificial Sequence
  Description of Artificial Sequence: Synthetic oligonucleotide
  Antisense strand to SEQ ID NO: 1750841
aucaguaagcauuuguaac

SEQ ID NO: 1750843 - RNA, 19 nt, Artificial Sequence
  Description of Artificial Sequence: Synthetic oligonucleotide
  Sense strand starting at position 2349 of SEQ ID NO: 1562487
ucugucuucccgcaaauaa

SEQ ID NO: 1750844 - RNA, 19 nt, Artificial Sequence
  Description of Artificial Sequence: Synthetic oligonucleotide
  Antisense strand to SEQ ID NO: 1750843
uuauuugcgggaagacaga

SEQ ID NO: 1750845 - RNA, 19 nt, Artificial Sequence
  Description of Artificial Sequence: Synthetic oligonucleotide
  Sense strand starting at position 2411 of SEQ ID NO: 1562487
gccuuucuucuggauaagu

SEQ ID NO: 1750846 - RNA, 19 nt, Artificial Sequence
  Description of Artificial Sequence: Synthetic oligonucleotide
  Antisense strand to SEQ ID NO: 1750845
acuuauccagaagaaaggc

SEQ ID NO: 1750847 - RNA, 19 nt, Artificial Sequence
  Description of Artificial Sequence: Synthetic oligonucleotide
  Sense strand starting at position 2481 of SEQ ID NO: 1562487
ggagaaauggguggcgcua

SEQ ID NO: 1750848 - RNA, 19 nt, Artificial Sequence
  Description of Artificial Sequence: Synthetic oligonucleotide
  Antisense strand to SEQ ID NO: 1750847
uagcgccacccauuucucc

SEQ ID NO: 1750849 - RNA, 19 nt, Artificial Sequence
  Description of Artificial Sequence: Synthetic oligonucleotide
  Sense strand starting at position 2595 of SEQ ID NO: 1562487
agacuauucuggccucgaa

SEQ ID NO: 1750850 - RNA, 19 nt, Artificial Sequence
  Description of Artificial Sequence: Synthetic oligonucleotide
  Antisense strand to SEQ ID NO: 1750849
uucgaggccagaauagucu

SEQ ID NO: 1750851 - RNA, 19 nt, Artificial Sequence
  Description of Artificial Sequence: Synthetic oligonucleotide
  Sense strand starting at position 2615 of SEQ ID NO: 1562487
ggaaguaagaguuggacau

SEQ ID NO: 1750852 - RNA, 19 nt, Artificial Sequence
  Description of Artificial Sequence: Synthetic oligonucleotide
  Antisense strand to SEQ ID NO: 1750851
auguccaacucuuacuucc

SEQ ID NO: 1750853 - RNA, 19 nt, Artificial Sequence
  Description of Artificial Sequence: Synthetic oligonucleotide
  Sense strand starting at position 2616 of SEQ ID NO: 1562487
gaaguaagaguuggacaug

SEQ ID NO: 1750854 - RNA, 19 nt, Artificial Sequence
  Description of Artificial Sequence: Synthetic oligonucleotide
  Antisense strand to SEQ ID NO: 1750853
cauguccaacucuuacuuc

SEQ ID NO: 1750855 - RNA, 19 nt, Artificial Sequence
  Description of Artificial Sequence: Synthetic oligonucleotide
  Sense strand starting at position 2805 of SEQ ID NO: 1562487
ucucucagcucacugagau

SEQ ID NO: 1750856 - RNA, 19 nt, Artificial Sequence
  Description of Artificial Sequence: Synthetic oligonucleotide
  Antisense strand to SEQ ID NO: 1750855
aucucagugagcugagaga

SEQ ID NO: 1750857 - RNA, 19 nt, Artificial Sequence
  Description of Artificial Sequence: Synthetic oligonucleotide
  Sense strand starting at position 2806 of SEQ ID NO: 1562487
cucucagcucacugagaua

SEQ ID NO: 1750858 - RNA, 19 nt, Artificial Sequence
  Description of Artificial Sequence: Synthetic oligonucleotide
  Antisense strand to SEQ ID NO: 1750857
uaucucagugagcugagag

SEQ ID NO: 1750859 - RNA, 19 nt, Artificial Sequence
  Description of Artificial Sequence: Synthetic oligonucleotide
  Sense strand starting at position 2882 of SEQ ID NO: 1562487
ugauuugucucauauuuac

SEQ ID NO: 1750860 - RNA, 19 nt, Artificial Sequence
  Description of Artificial Sequence: Synthetic oligonucleotide
  Antisense strand to SEQ ID NO: 1750859
guaaauaugagacaaauca

SEQ ID NO: 1750861 - RNA, 19 nt, Artificial Sequence
  Description of Artificial Sequence: Synthetic oligonucleotide
  Sense strand starting at position 3111 of SEQ ID NO: 1562487
uuccuaaguugacugagau

SEQ ID NO: 1750862 - RNA, 19 nt, Artificial Sequence
  Description of Artificial Sequence: Synthetic oligonucleotide
  Antisense strand to SEQ ID NO: 1750861
aucucagucaacuuaggaa

SEQ ID NO: 1750863 - RNA, 19 nt, Artificial Sequence
  Description of Artificial Sequence: Synthetic oligonucleotide
  Sense strand starting at position 3112 of SEQ ID NO: 1562487
uccuaaguugacugagauc

SEQ ID NO: 1750864 - RNA, 19 nt, Artificial Sequence
  Description of Artificial Sequence: Synthetic oligonucleotide
  Antisense strand to SEQ ID NO: 1750863
gaucucagucaacuuagga

SEQ ID NO: 1750865 - RNA, 19 nt, Artificial Sequence
  Description of Artificial Sequence: Synthetic oligonucleotide
  Sense strand starting at position 3203 of SEQ ID NO: 1562487
acaaaucugucaguccuua

SEQ ID NO: 1750866 - RNA, 19 nt, Artificial Sequence
  Description of Artificial Sequence: Synthetic oligonucleotide
  Antisense strand to SEQ ID NO: 1750865
uaaggacugacagauuugu

SEQ ID NO: 1750867 - RNA, 19 nt, Artificial Sequence
  Description of Artificial Sequence: Synthetic oligonucleotide
  Sense strand starting at position 3452 of SEQ ID NO: 1562487
agguaacucguuuauggag

SEQ ID NO: 1750868 - RNA, 19 nt, Artificial Sequence
  Description of Artificial Sequence: Synthetic oligonucleotide
  Antisense strand to SEQ ID NO: 1750867
cuccauaaacgaguuaccu

SEQ ID NO: 1750869 - RNA, 19 nt, Artificial Sequence
  Description of Artificial Sequence: Synthetic oligonucleotide
  Sense strand starting at position 3476 of SEQ ID NO: 1562487
gcucgcuucccacaggaaa

SEQ ID NO: 1750870 - RNA, 19 nt, Artificial Sequence
  Description of Artificial Sequence: Synthetic oligonucleotide
  Antisense strand to SEQ ID NO: 1750869
uuuccugugggaagcgagc

SEQ ID NO: 1750871 - RNA, 19 nt, Artificial Sequence
  Description of Artificial Sequence: Synthetic oligonucleotide
  Sense strand starting at position 3524 of SEQ ID NO: 1562487
ggugguagagagcaaucuu

SEQ ID NO: 1750872 - RNA, 19 nt, Artificial Sequence
  Description of Artificial Sequence: Synthetic oligonucleotide
  Antisense strand to SEQ ID NO: 1750871
aagauugcucucuaccacc

SEQ ID NO: 1750873 - RNA, 19 nt, Artificial Sequence
  Description of Artificial Sequence: Synthetic oligonucleotide
  Sense strand starting at position 3551 of SEQ ID NO: 1562487
gacccaucccuaggaagua

SEQ ID NO: 1750874 - RNA, 19 nt, Artificial Sequence
  Description of Artificial Sequence: Synthetic oligonucleotide
  Antisense strand to SEQ ID NO: 1750873
uacuuccuagggauggguc

SEQ ID NO: 1750875 - RNA, 19 nt, Artificial Sequence
  Description of Artificial Sequence: Synthetic oligonucleotide
  Sense strand starting at position 3581 of SEQ ID NO: 1562487
guuugucuuggcuauuaag

SEQ ID NO: 1750876 - RNA, 19 nt, Artificial Sequence
  Description of Artificial Sequence: Synthetic oligonucleotide
  Antisense strand to SEQ ID NO: 1750875
cuuaauagccaagacaaac

SEQ ID NO: 1750877 - RNA, 19 nt, Artificial Sequence
  Description of Artificial Sequence: Synthetic oligonucleotide
  Sense strand starting at position 3636 of SEQ ID NO: 1562487
uagugugcucaguaaccuu

SEQ ID NO: 1750878 - RNA, 19 nt, Artificial Sequence
  Description of Artificial Sequence: Synthetic oligonucleotide
  Antisense strand to SEQ ID NO: 1750877
aagguuacugagcacacua

SEQ ID NO: 1750879 - RNA, 19 nt, Artificial Sequence
  Description of Artificial Sequence: Synthetic oligonucleotide
  Sense strand starting at position 3639 of SEQ ID NO: 1562487
ugugcucaguaaccuuaua

SEQ ID NO: 1750880 - RNA, 19 nt, Artificial Sequence
  Description of Artificial Sequence: Synthetic oligonucleotide
  Antisense strand to SEQ ID NO: 1750879
uauaagguuacugagcaca

SEQ ID NO: 1750881 - RNA, 19 nt, Artificial Sequence
  Description of Artificial Sequence: Synthetic oligonucleotide
  Sense strand starting at position 3665 of SEQ ID NO: 1562487
caauccuucguuucgcuua

SEQ ID NO: 1750882 - RNA, 19 nt, Artificial Sequence
  Description of Artificial Sequence: Synthetic oligonucleotide
  Antisense strand to SEQ ID NO: 1750881
uaagcgaaacgaaggauug

SEQ ID NO: 1750883 - RNA, 19 nt, Artificial Sequence
  Description of Artificial Sequence: Synthetic oligonucleotide
  Sense strand starting at position 3750 of SEQ ID NO: 1562487
ucuaucugacuugaucgaa

SEQ ID NO: 1750884 - RNA, 19 nt, Artificial Sequence
  Description of Artificial Sequence: Synthetic oligonucleotide
  Antisense strand to SEQ ID NO: 1750883
uucgaucaagucagauaga

SEQ ID NO: 1750885 - RNA, 19 nt, Artificial Sequence
  Description of Artificial Sequence: Synthetic oligonucleotide
  Sense strand starting at position 3804 of SEQ ID NO: 1562487
cucugaaguggcuaaguuu

SEQ ID NO: 1750886 - RNA, 19 nt, Artificial Sequence
  Description of Artificial Sequence: Synthetic oligonucleotide
  Antisense strand to SEQ ID NO: 1750885
aaacuuagccacuucagag

SEQ ID NO: 1750887 - RNA, 19 nt, Artificial Sequence
  Description of Artificial Sequence: Synthetic oligonucleotide
  Sense strand starting at position 425 of SEQ ID NO: 1562488
gggcacuauauguaugauu

SEQ ID NO: 1750888 - RNA, 19 nt, Artificial Sequence
  Description of Artificial Sequence: Synthetic oligonucleotide
  Antisense strand to SEQ ID NO: 1750887
aaucauacauauagugccc

SEQ ID NO: 1750889 - RNA, 19 nt, Artificial Sequence
  Description of Artificial Sequence: Synthetic oligonucleotide
  Sense strand starting at position 499 of SEQ ID NO: 1562488
aaacgauggacucggacaa

SEQ ID NO: 1750890 - RNA, 19 nt, Artificial Sequence
  Description of Artificial Sequence: Synthetic oligonucleotide
  Antisense strand to SEQ ID NO: 1750889
uuguccgaguccaucguuu

SEQ ID NO: 1750891 - RNA, 19 nt, Artificial Sequence
  Description of Artificial Sequence: Synthetic oligonucleotide
  Sense strand starting at position 500 of SEQ ID NO: 1562488
aacgauggacucggacaau

SEQ ID NO: 1750892 - RNA, 19 nt, Artificial Sequence
  Description of Artificial Sequence: Synthetic oligonucleotide
  Antisense strand to SEQ ID NO: 1750891
auuguccgaguccaucguu

SEQ ID NO: 1750893 - RNA, 19 nt, Artificial Sequence
  Description of Artificial Sequence: Synthetic oligonucleotide
  Sense strand starting at position 542 of SEQ ID NO: 1562488
gcauacguguuuacggaga

SEQ ID NO: 1750894 - RNA, 19 nt, Artificial Sequence
  Description of Artificial Sequence: Synthetic oligonucleotide
  Antisense strand to SEQ ID NO: 1750893
ucuccguaaacacguaugc

SEQ ID NO: 1750895 - RNA, 19 nt, Artificial Sequence
  Description of Artificial Sequence: Synthetic oligonucleotide
  Sense strand starting at position 751 of SEQ ID NO: 1562488
aggugauacaaacguuaag

SEQ ID NO: 1750896 - RNA, 19 nt, Artificial Sequence
  Description of Artificial Sequence: Synthetic oligonucleotide
  Antisense strand to SEQ ID NO: 1750895
cuuaacguuuguaucaccu

SEQ ID NO: 1750897 - RNA, 19 nt, Artificial Sequence
  Description of Artificial Sequence: Synthetic oligonucleotide
  Sense strand starting at position 754 of SEQ ID NO: 1562488
ugauacaaacguuaaguga

SEQ ID NO: 1750898 - RNA, 19 nt, Artificial Sequence
  Description of Artificial Sequence: Synthetic oligonucleotide
  Antisense strand to SEQ ID NO: 1750897
ucacuuaacguuuguauca

SEQ ID NO: 1750899 - RNA, 19 nt, Artificial Sequence
  Description of Artificial Sequence: Synthetic oligonucleotide
  Sense strand starting at position 853 of SEQ ID NO: 1562488
agaggagguugcucuaaau

SEQ ID NO: 1750900 - RNA, 19 nt, Artificial Sequence
  Description of Artificial Sequence: Synthetic oligonucleotide
  Antisense strand to SEQ ID NO: 1750899
auuuagagcaaccuccucu

SEQ ID NO: 1750901 - RNA, 19 nt, Artificial Sequence
  Description of Artificial Sequence: Synthetic oligonucleotide
  Sense strand starting at position 873 of SEQ ID NO: 1562488
aagugacacgucuaaaugu

SEQ ID NO: 1750902 - RNA, 19 nt, Artificial Sequence
  Description of Artificial Sequence: Synthetic oligonucleotide
  Antisense strand to SEQ ID NO: 1750901
acauuuagacgugucacuu

SEQ ID NO: 1750903 - RNA, 19 nt, Artificial Sequence
  Description of Artificial Sequence: Synthetic oligonucleotide
  Sense strand starting at position 1024 of SEQ ID NO: 1562488
gugauaauagcauauguaa

SEQ ID NO: 1750904 - RNA, 19 nt, Artificial Sequence
  Description of Artificial Sequence: Synthetic oligonucleotide
  Antisense strand to SEQ ID NO: 1750903
uuacauaugcuauuaucac

SEQ ID NO: 1750905 - RNA, 19 nt, Artificial Sequence
  Description of Artificial Sequence: Synthetic oligonucleotide
  Sense strand starting at position 1056 of SEQ ID NO: 1562488
acguuugagauguauucug

SEQ ID NO: 1750906 - RNA, 19 nt, Artificial Sequence
  Description of Artificial Sequence: Synthetic oligonucleotide
  Antisense strand to SEQ ID NO: 1750905
cagaauacaucucaaacgu

SEQ ID NO: 1750907 - RNA, 19 nt, Artificial Sequence
  Description of Artificial Sequence: Synthetic oligonucleotide
  Sense strand starting at position 1092 of SEQ ID NO: 1562488
aggccaugaugacuggaau

SEQ ID NO: 1750908 - RNA, 19 nt, Artificial Sequence
  Description of Artificial Sequence: Synthetic oligonucleotide
  Antisense strand to SEQ ID NO: 1750907
auuccagucaucauggccu

SEQ ID NO: 1750909 - RNA, 19 nt, Artificial Sequence
  Description of Artificial Sequence: Synthetic oligonucleotide
  Sense strand starting at position 1093 of SEQ ID NO: 1562488
ggccaugaugacuggaauu

SEQ ID NO: 1750910 - RNA, 19 nt, Artificial Sequence
  Description of Artificial Sequence: Synthetic oligonucleotide
  Antisense strand to SEQ ID NO: 1750909
aauuccagucaucauggcc

SEQ ID NO: 1750911 - RNA, 19 nt, Artificial Sequence
  Description of Artificial Sequence: Synthetic oligonucleotide
  Sense strand starting at position 1104 of SEQ ID NO: 1562488
cuggaauucgcuuaggagu

SEQ ID NO: 1750912 - RNA, 19 nt, Artificial Sequence
  Description of Artificial Sequence: Synthetic oligonucleotide
  Antisense strand to SEQ ID NO: 1750911
acuccuaagcgaauuccag

SEQ ID NO: 1750913 - RNA, 19 nt, Artificial Sequence
  Description of Artificial Sequence: Synthetic oligonucleotide
  Sense strand starting at position 1158 of SEQ ID NO: 1562488
guugaauuuacccgguugu

SEQ ID NO: 1750914 - RNA, 19 nt, Artificial Sequence
  Description of Artificial Sequence: Synthetic oligonucleotide
  Antisense strand to SEQ ID NO: 1750913
acaaccggguaaauucaac

SEQ ID NO: 1750915 - RNA, 19 nt, Artificial Sequence
  Description of Artificial Sequence: Synthetic oligonucleotide
  Sense strand starting at position 1185 of SEQ ID NO: 1562488
cagggcucacuugacuauu

SEQ ID NO: 1750916 - RNA, 19 nt, Artificial Sequence
  Description of Artificial Sequence: Synthetic oligonucleotide
  Antisense strand to SEQ ID NO: 1750915
aauagucaagugagcccug

SEQ ID NO: 1750917 - RNA, 19 nt, Artificial Sequence
  Description of Artificial Sequence: Synthetic oligonucleotide
  Sense strand starting at position 1244 of SEQ ID NO: 1562488
cguguucaucggcuacuga

SEQ ID NO: 1750918 - RNA, 19 nt, Artificial Sequence
  Description of Artificial Sequence: Synthetic oligonucleotide
  Antisense strand to SEQ ID NO: 1750917
ucaguagccgaugaacacg

SEQ ID NO: 1750919 - RNA, 19 nt, Artificial Sequence
  Description of Artificial Sequence: Synthetic oligonucleotide
  Sense strand starting at position 1264 of SEQ ID NO: 1562488
acaucaugcuaauugaagu

SEQ ID NO: 1750920 - RNA, 19 nt, Artificial Sequence
  Description of Artificial Sequence: Synthetic oligonucleotide
  Antisense strand to SEQ ID NO: 1750919
acuucaauuagcaugaugu

SEQ ID NO: 1750921 - RNA, 19 nt, Artificial Sequence
  Description of Artificial Sequence: Synthetic oligonucleotide
  Sense strand starting at position 1324 of SEQ ID NO: 1562488
ccgugaacaauccacgaca

SEQ ID NO: 1750922 - RNA, 19 nt, Artificial Sequence
  Description of Artificial Sequence: Synthetic oligonucleotide
  Antisense strand to SEQ ID NO: 1750921
ugucguggauuguucacgg

SEQ ID NO: 1750923 - RNA, 19 nt, Artificial Sequence
  Description of Artificial Sequence: Synthetic oligonucleotide
  Sense strand starting at position 1326 of SEQ ID NO: 1562488
gugaacaauccacgacaaa

SEQ ID NO: 1750924 - RNA, 19 nt, Artificial Sequence
  Description of Artificial Sequence: Synthetic oligonucleotide
  Antisense strand to SEQ ID NO: 1750923
uuugucguggauuguucac

SEQ ID NO: 1750925 - RNA, 19 nt, Artificial Sequence
  Description of Artificial Sequence: Synthetic oligonucleotide
  Sense strand starting at position 2655 of SEQ ID NO: 1562488
cgcuucguggugguauaaa

SEQ ID NO: 1750926 - RNA, 19 nt, Artificial Sequence
  Description of Artificial Sequence: Synthetic oligonucleotide
  Antisense strand to SEQ ID NO: 1750925
uuuauaccaccacgaagcg

SEQ ID NO: 1750927 - RNA, 19 nt, Artificial Sequence
  Description of Artificial Sequence: Synthetic oligonucleotide
  Sense strand starting at position 2678 of SEQ ID NO: 1562488
agaccuuuacucuggcaau

SEQ ID NO: 1750928 - RNA, 19 nt, Artificial Sequence
  Description of Artificial Sequence: Synthetic oligonucleotide
  Antisense strand to SEQ ID NO: 1750927
auugccagaguaaaggucu

SEQ ID NO: 1750929 - RNA, 19 nt, Artificial Sequence
  Description of Artificial Sequence: Synthetic oligonucleotide
  Sense strand starting at position 2816 of SEQ ID NO: 1562488
agccuuuaauaagcagaau

SEQ ID NO: 1750930 - RNA, 19 nt, Artificial Sequence
  Description of Artificial Sequence: Synthetic oligonucleotide
  Antisense strand to SEQ ID NO: 1750929
auucugcuuauuaaaggcu

SEQ ID NO: 1750931 - RNA, 19 nt, Artificial Sequence
  Description of Artificial Sequence: Synthetic oligonucleotide
  Sense strand starting at position 2824 of SEQ ID NO: 1562488
auaagcagaaugugugauu

SEQ ID NO: 1750932 - RNA, 19 nt, Artificial Sequence
  Description of Artificial Sequence: Synthetic oligonucleotide
  Antisense strand to SEQ ID NO: 1750931
aaucacacauucugcuuau

SEQ ID NO: 1750933 - RNA, 19 nt, Artificial Sequence
  Description of Artificial Sequence: Synthetic oligonucleotide
  Sense strand starting at position 2837 of SEQ ID NO: 1562488
gugauuguucuuuaauugg

SEQ ID NO: 1750934 - RNA, 19 nt, Artificial Sequence
  Description of Artificial Sequence: Synthetic oligonucleotide
  Antisense strand to SEQ ID NO: 1750933
ccaauuaaagaacaaucac

SEQ ID NO: 1750935 - RNA, 19 nt, Artificial Sequence
  Description of Artificial Sequence: Synthetic oligonucleotide
  Sense strand starting at position 2998 of SEQ ID NO: 1562488
caugacaucgccugcauuu

SEQ ID NO: 1750936 - RNA, 19 nt, Artificial Sequence
  Description of Artificial Sequence: Synthetic oligonucleotide
  Antisense strand to SEQ ID NO: 1750935
aaaugcaggcgaugucaug

SEQ ID NO: 1750937 - RNA, 19 nt, Artificial Sequence
  Description of Artificial Sequence: Synthetic oligonucleotide
  Sense strand starting at position 3019 of SEQ ID NO: 1562488
ugacuuugucaguagucac

SEQ ID NO: 1750938 - RNA, 19 nt, Artificial Sequence
  Description of Artificial Sequence: Synthetic oligonucleotide
  Antisense strand to SEQ ID NO: 1750937
gugacuacugacaaaguca

SEQ ID NO: 1750939 - RNA, 19 nt, Artificial Sequence
  Description of Artificial Sequence: Synthetic oligonucleotide
  Sense strand starting at position 3026 of SEQ ID NO: 1562488
gucaguagucacgaaggua

SEQ ID NO: 1750940 - RNA, 19 nt, Artificial Sequence
  Description of Artificial Sequence: Synthetic oligonucleotide
  Antisense strand to SEQ ID NO: 1750939
uaccuucgugacuacugac

SEQ ID NO: 1750941 - RNA, 19 nt, Artificial Sequence
  Description of Artificial Sequence: Synthetic oligonucleotide
  Sense strand starting at position 3251 of SEQ ID NO: 1562488
agcuuaggaaacuggauau

SEQ ID NO: 1750942 - RNA, 19 nt, Artificial Sequence
  Description of Artificial Sequence: Synthetic oligonucleotide
  Antisense strand to SEQ ID NO: 1750941
auauccaguuuccuaagcu

SEQ ID NO: 1750943 - RNA, 19 nt, Artificial Sequence
  Description of Artificial Sequence: Synthetic oligonucleotide
  Sense strand starting at position 3263 of SEQ ID NO: 1562488
uggauauccuuagugagau

SEQ ID NO: 1750944 - RNA, 19 nt, Artificial Sequence
  Description of Artificial Sequence: Synthetic oligonucleotide
  Antisense strand to SEQ ID NO: 1750943
aucucacuaaggauaucca

SEQ ID NO: 1750945 - RNA, 19 nt, Artificial Sequence
  Description of Artificial Sequence: Synthetic oligonucleotide
  Sense strand starting at position 3319 of SEQ ID NO: 1562488
uuaggacuccuggguuaac

SEQ ID NO: 1750946 - RNA, 19 nt, Artificial Sequence
  Description of Artificial Sequence: Synthetic oligonucleotide
  Antisense strand to SEQ ID NO: 1750945
guuaacccaggaguccuaa

SEQ ID NO: 1750947 - RNA, 19 nt, Artificial Sequence
  Description of Artificial Sequence: Synthetic oligonucleotide
  Sense strand starting at position 3320 of SEQ ID NO: 1562488
uaggacuccuggguuaacu

SEQ ID NO: 1750948 - RNA, 19 nt, Artificial Sequence
  Description of Artificial Sequence: Synthetic oligonucleotide
  Antisense strand to SEQ ID NO: 1750947
aguuaacccaggaguccua

SEQ ID NO: 1750949 - RNA, 19 nt, Artificial Sequence
  Description of Artificial Sequence: Synthetic oligonucleotide
  Sense strand starting at position 3329 of SEQ ID NO: 1562488
uggguuaacuggucuauua

SEQ ID NO: 1750950 - RNA, 19 nt, Artificial Sequence
  Description of Artificial Sequence: Synthetic oligonucleotide
  Antisense strand to SEQ ID NO: 1750949
uaauagaccaguuaaccca

SEQ ID NO: 1750951 - RNA, 19 nt, Artificial Sequence
  Description of Artificial Sequence: Synthetic oligonucleotide
  Sense strand starting at position 3331 of SEQ ID NO: 1562488
gguuaacuggucuauuaug

SEQ ID NO: 1750952 - RNA, 19 nt, Artificial Sequence
  Description of Artificial Sequence: Synthetic oligonucleotide
  Antisense strand to SEQ ID NO: 1750951
cauaauagaccaguuaacc

SEQ ID NO: 1750953 - RNA, 19 nt, Artificial Sequence
  Description of Artificial Sequence: Synthetic oligonucleotide
  Sense strand starting at position 3490 of SEQ ID NO: 1562488
cuguaaauaggguaauagu

SEQ ID NO: 1750954 - RNA, 19 nt, Artificial Sequence
  Description of Artificial Sequence: Synthetic oligonucleotide
  Antisense strand to SEQ ID NO: 1750953
acuauuacccuauuuacag

SEQ ID NO: 1750955 - RNA, 19 nt, Artificial Sequence
  Description of Artificial Sequence: Synthetic oligonucleotide
  Sense strand starting at position 3499 of SEQ ID NO: 1562488
ggguaauaguaauacauuu

SEQ ID NO: 1750956 - RNA, 19 nt, Artificial Sequence
  Description of Artificial Sequence: Synthetic oligonucleotide
  Antisense strand to SEQ ID NO: 1750955
aaauguauuacuauuaccc

SEQ ID NO: 1750957 - RNA, 19 nt, Artificial Sequence
  Description of Artificial Sequence: Synthetic oligonucleotide
  Sense strand starting at position 3633 of SEQ ID NO: 1562488
aggcaaauauguucgaauu

SEQ ID NO: 1750958 - RNA, 19 nt, Artificial Sequence
  Description of Artificial Sequence: Synthetic oligonucleotide
  Antisense strand to SEQ ID NO: 1750957
aauucgaacauauuugccu

SEQ ID NO: 1750959 - RNA, 19 nt, Artificial Sequence
  Description of Artificial Sequence: Synthetic oligonucleotide
  Sense strand starting at position 3646 of SEQ ID NO: 1562488
cgaauuaaauacuuagcca

SEQ ID NO: 1750960 - RNA, 19 nt, Artificial Sequence
  Description of Artificial Sequence: Synthetic oligonucleotide
  Antisense strand to SEQ ID NO: 1750959
uggcuaaguauuuaauucg

SEQ ID NO: 1750961 - RNA, 19 nt, Artificial Sequence
  Description of Artificial Sequence: Synthetic oligonucleotide
  Sense strand starting at position 3850 of SEQ ID NO: 1562488
uauaguuacuuguugagga

SEQ ID NO: 1750962 - RNA, 19 nt, Artificial Sequence
  Description of Artificial Sequence: Synthetic oligonucleotide
  Antisense strand to SEQ ID NO: 1750961
uccucaacaaguaacuaua

SEQ ID NO: 1750963 - RNA, 19 nt, Artificial Sequence
  Description of Artificial Sequence: Synthetic oligonucleotide
  Sense strand starting at position 3852 of SEQ ID NO: 1562488
uaguuacuuguugaggaca

SEQ ID NO: 1750964 - RNA, 19 nt, Artificial Sequence
  Description of Artificial Sequence: Synthetic oligonucleotide
  Antisense strand to SEQ ID NO: 1750963
uguccucaacaaguaacua

SEQ ID NO: 1750965 - RNA, 19 nt, Artificial Sequence
  Description of Artificial Sequence: Synthetic oligonucleotide
  Sense strand starting at position 3975 of SEQ ID NO: 1562488
aauagcaguuuauuaggaa

SEQ ID NO: 1750966 - RNA, 19 nt, Artificial Sequence
  Description of Artificial Sequence: Synthetic oligonucleotide
  Antisense strand to SEQ ID NO: 1750965
uuccuaauaaacugcuauu

SEQ ID NO: 1750967 - RNA, 19 nt, Artificial Sequence
  Description of Artificial Sequence: Synthetic oligonucleotide
  Sense strand starting at position 40 of SEQ ID NO: 1562489
auggcaguuccggauuaau

SEQ ID NO: 1750968 - RNA, 19 nt, Artificial Sequence
  Description of Artificial Sequence: Synthetic oligonucleotide
  Antisense strand to SEQ ID NO: 1750967
auuaauccggaacugccau

SEQ ID NO: 1750969 - RNA, 19 nt, Artificial Sequence
  Description of Artificial Sequence: Synthetic oligonucleotide
  Sense strand starting at position 49 of SEQ ID NO: 1562489
ccggauuaauucccacacu

SEQ ID NO: 1750970 - RNA, 19 nt, Artificial Sequence
  Description of Artificial Sequence: Synthetic oligonucleotide
  Antisense strand to SEQ ID NO: 1750969
agugugggaauuaauccgg

SEQ ID NO: 1750971 - RNA, 19 nt, Artificial Sequence
  Description of Artificial Sequence: Synthetic oligonucleotide
  Sense strand starting at position 209 of SEQ ID NO: 1562489
uacaguugccagugaauca

SEQ ID NO: 1750972 - RNA, 19 nt, Artificial Sequence
  Description of Artificial Sequence: Synthetic oligonucleotide
  Antisense strand to SEQ ID NO: 1750971
ugauucacuggcaacugua

SEQ ID NO: 1750973 - RNA, 19 nt, Artificial Sequence
  Description of Artificial Sequence: Synthetic oligonucleotide
  Sense strand starting at position 246 of SEQ ID NO: 1562489
gcccauucuguuuguggaa

SEQ ID NO: 1750974 - RNA, 19 nt, Artificial Sequence
  Description of Artificial Sequence: Synthetic oligonucleotide
  Antisense strand to SEQ ID NO: 1750973
uuccacaaacagaaugggc

SEQ ID NO: 1750975 - RNA, 19 nt, Artificial Sequence
  Description of Artificial Sequence: Synthetic oligonucleotide
  Sense strand starting at position 247 of SEQ ID NO: 1562489
cccauucuguuuguggaaa

SEQ ID NO: 1750976 - RNA, 19 nt, Artificial Sequence
  Description of Artificial Sequence: Synthetic oligonucleotide
  Antisense strand to SEQ ID NO: 1750975
uuuccacaaacagaauggg

SEQ ID NO: 1750977 - RNA, 19 nt, Artificial Sequence
  Description of Artificial Sequence: Synthetic oligonucleotide
  Sense strand starting at position 330 of SEQ ID NO: 1562489
uggccuccuugacuaacaa

SEQ ID NO: 1750978 - RNA, 19 nt, Artificial Sequence
  Description of Artificial Sequence: Synthetic oligonucleotide
  Antisense strand to SEQ ID NO: 1750977
uuguuagucaaggaggcca

SEQ ID NO: 1750979 - RNA, 19 nt, Artificial Sequence
  Description of Artificial Sequence: Synthetic oligonucleotide
  Sense strand starting at position 331 of SEQ ID NO: 1562489
ggccuccuugacuaacaaa

SEQ ID NO: 1750980 - RNA, 19 nt, Artificial Sequence
  Description of Artificial Sequence: Synthetic oligonucleotide
  Antisense strand to SEQ ID NO: 1750979
uuuguuagucaaggaggcc

SEQ ID NO: 1750981 - RNA, 19 nt, Artificial Sequence
  Description of Artificial Sequence: Synthetic oligonucleotide
  Sense strand starting at position 420 of SEQ ID NO: 1562489
auaauccugcaucggaaua

SEQ ID NO: 1750982 - RNA, 19 nt, Artificial Sequence
  Description of Artificial Sequence: Synthetic oligonucleotide
  Antisense strand to SEQ ID NO: 1750981
uauuccgaugcaggauuau

SEQ ID NO: 1750983 - RNA, 19 nt, Artificial Sequence
  Description of Artificial Sequence: Synthetic oligonucleotide
  Sense strand starting at position 425 of SEQ ID NO: 1562489
ccugcaucggaauaaacau

SEQ ID NO: 1750984 - RNA, 19 nt, Artificial Sequence
  Description of Artificial Sequence: Synthetic oligonucleotide
  Antisense strand to SEQ ID NO: 1750983
auguuuauuccgaugcagg

SEQ ID NO: 1750985 - RNA, 19 nt, Artificial Sequence
  Description of Artificial Sequence: Synthetic oligonucleotide
  Sense strand starting at position 467 of SEQ ID NO: 1562489
ggugcucuacuaugcuaaa

SEQ ID NO: 1750986 - RNA, 19 nt, Artificial Sequence
  Description of Artificial Sequence: Synthetic oligonucleotide
  Antisense strand to SEQ ID NO: 1750985
uuuagcauaguagagcacc

SEQ ID NO: 1750987 - RNA, 19 nt, Artificial Sequence
  Description of Artificial Sequence: Synthetic oligonucleotide
  Sense strand starting at position 551 of SEQ ID NO: 1562489
ggucaacccuaauuguaag

SEQ ID NO: 1750988 - RNA, 19 nt, Artificial Sequence
  Description of Artificial Sequence: Synthetic oligonucleotide
  Antisense strand to SEQ ID NO: 1750987
cuuacaauuaggguugacc

SEQ ID NO: 1750989 - RNA, 19 nt, Artificial Sequence
  Description of Artificial Sequence: Synthetic oligonucleotide
  Sense strand starting at position 643 of SEQ ID NO: 1562489
ccagcaugacauugugaaa

SEQ ID NO: 1750990 - RNA, 19 nt, Artificial Sequence
  Description of Artificial Sequence: Synthetic oligonucleotide
  Antisense strand to SEQ ID NO: 1750989
uuucacaaugucaugcugg

SEQ ID NO: 1750991 - RNA, 19 nt, Artificial Sequence
  Description of Artificial Sequence: Synthetic oligonucleotide
  Sense strand starting at position 687 of SEQ ID NO: 1562489
cuuagaaccugcuggauuu

SEQ ID NO: 1750992 - RNA, 19 nt, Artificial Sequence
  Description of Artificial Sequence: Synthetic oligonucleotide
  Antisense strand to SEQ ID NO: 1750991
aaauccagcagguucuaag

SEQ ID NO: 1750993 - RNA, 19 nt, Artificial Sequence
  Description of Artificial Sequence: Synthetic oligonucleotide
  Sense strand starting at position 1725 of SEQ ID NO: 1562489
cgcucuaucagucagugga

SEQ ID NO: 1750994 - RNA, 19 nt, Artificial Sequence
  Description of Artificial Sequence: Synthetic oligonucleotide
  Antisense strand to SEQ ID NO: 1750993
uccacugacugauagagcg

SEQ ID NO: 1750995 - RNA, 19 nt, Artificial Sequence
  Description of Artificial Sequence: Synthetic oligonucleotide
  Sense strand starting at position 2267 of SEQ ID NO: 1562489
uuaagugagcccuggacga

SEQ ID NO: 1750996 - RNA, 19 nt, Artificial Sequence
  Description of Artificial Sequence: Synthetic oligonucleotide
  Antisense strand to SEQ ID NO: 1750995
ucguccagggcucacuuaa

SEQ ID NO: 1750997 - RNA, 19 nt, Artificial Sequence
  Description of Artificial Sequence: Synthetic oligonucleotide
  Sense strand starting at position 2398 of SEQ ID NO: 1562489
guacguuaaccacacuaga

SEQ ID NO: 1750998 - RNA, 19 nt, Artificial Sequence
  Description of Artificial Sequence: Synthetic oligonucleotide
  Antisense strand to SEQ ID NO: 1750997
ucuagugugguuaacguac

SEQ ID NO: 1750999 - RNA, 19 nt, Artificial Sequence
  Description of Artificial Sequence: Synthetic oligonucleotide
  Sense strand starting at position 2553 of SEQ ID NO: 1562489
cuaaauagugacggacauu

SEQ ID NO: 1751000 - RNA, 19 nt, Artificial Sequence
  Description of Artificial Sequence: Synthetic oligonucleotide
  Antisense strand to SEQ ID NO: 1750999
aauguccgucacuauuuag

SEQ ID NO: 1751001 - RNA, 19 nt, Artificial Sequence
  Description of Artificial Sequence: Synthetic oligonucleotide
  Sense strand starting at position 2609 of SEQ ID NO: 1562489
aggugugaacccgaacaca

SEQ ID NO: 1751002 - RNA, 19 nt, Artificial Sequence
  Description of Artificial Sequence: Synthetic oligonucleotide
  Antisense strand to SEQ ID NO: 1751001
uguguucggguucacaccu

SEQ ID NO: 1751003 - RNA, 19 nt, Artificial Sequence
  Description of Artificial Sequence: Synthetic oligonucleotide
  Sense strand starting at position 3250 of SEQ ID NO: 1562489
accugauagggcuggaguu

SEQ ID NO: 1751004 - RNA, 19 nt, Artificial Sequence
  Description of Artificial Sequence: Synthetic oligonucleotide
  Antisense strand to SEQ ID NO: 1751003
aacuccagcccuaucaggu

SEQ ID NO: 1751005 - RNA, 19 nt, Artificial Sequence
  Description of Artificial Sequence: Synthetic oligonucleotide
  Sense strand starting at position 3287 of SEQ ID NO: 1562489
aagaguuucguuuguuauu

SEQ ID NO: 1751006 - RNA, 19 nt, Artificial Sequence
  Description of Artificial Sequence: Synthetic oligonucleotide
  Antisense strand to SEQ ID NO: 1751005
aauaacaaacgaaacucuu

SEQ ID NO: 1751007 - RNA, 19 nt, Artificial Sequence
  Description of Artificial Sequence: Synthetic oligonucleotide
  Sense strand starting at position 3288 of SEQ ID NO: 1562489
agaguuucguuuguuauuu

SEQ ID NO: 1751008 - RNA, 19 nt, Artificial Sequence
  Description of Artificial Sequence: Synthetic oligonucleotide
  Antisense strand to SEQ ID NO: 1751007
aaauaacaaacgaaacucu

SEQ ID NO: 1751009 - RNA, 19 nt, Artificial Sequence
  Description of Artificial Sequence: Synthetic oligonucleotide
  Sense strand starting at position 3289 of SEQ ID NO: 1562489
gaguuucguuuguuauuuc

SEQ ID NO: 1751010 - RNA, 19 nt, Artificial Sequence
  Description of Artificial Sequence: Synthetic oligonucleotide
  Antisense strand to SEQ ID NO: 1751009
gaaauaacaaacgaaacuc

SEQ ID NO: 1751011 - RNA, 19 nt, Artificial Sequence
  Description of Artificial Sequence: Synthetic oligonucleotide
  Sense strand starting at position 3308 of SEQ ID NO: 1562489
uccaaagagucagcuguuu

SEQ ID NO: 1751012 - RNA, 19 nt, Artificial Sequence
  Description of Artificial Sequence: Synthetic oligonucleotide
  Antisense strand to SEQ ID NO: 1751011
aaacagcugacucuuugga

SEQ ID NO: 1751013 - RNA, 19 nt, Artificial Sequence
  Description of Artificial Sequence: Synthetic oligonucleotide
  Sense strand starting at position 3324 of SEQ ID NO: 1562489
uuugcaggugugugguuaa

SEQ ID NO: 1751014 - RNA, 19 nt, Artificial Sequence
  Description of Artificial Sequence: Synthetic oligonucleotide
  Antisense strand to SEQ ID NO: 1751013
uuaaccacacaccugcaaa

SEQ ID NO: 1751015 - RNA, 19 nt, Artificial Sequence
  Description of Artificial Sequence: Synthetic oligonucleotide
  Sense strand starting at position 3327 of SEQ ID NO: 1562489
gcaggugugugguuaacac

SEQ ID NO: 1751016 - RNA, 19 nt, Artificial Sequence
  Description of Artificial Sequence: Synthetic oligonucleotide
  Antisense strand to SEQ ID NO: 1751015
guguuaaccacacaccugc

SEQ ID NO: 1751017 - RNA, 19 nt, Artificial Sequence
  Description of Artificial Sequence: Synthetic oligonucleotide
  Sense strand starting at position 3341 of SEQ ID NO: 1562489
aacacuauccuucgagguu

SEQ ID NO: 1751018 - RNA, 19 nt, Artificial Sequence
  Description of Artificial Sequence: Synthetic oligonucleotide
  Antisense strand to SEQ ID NO: 1751017
aaccucgaaggauaguguu

SEQ ID NO: 1751019 - RNA, 19 nt, Artificial Sequence
  Description of Artificial Sequence: Synthetic oligonucleotide
  Sense strand starting at position 3449 of SEQ ID NO: 1562489
gcgaaucguggcuuaagca

SEQ ID NO: 1751020 - RNA, 19 nt, Artificial Sequence
  Description of Artificial Sequence: Synthetic oligonucleotide
  Antisense strand to SEQ ID NO: 1751019
ugcuuaagccacgauucgc

SEQ ID NO: 1751021 - RNA, 19 nt, Artificial Sequence
  Description of Artificial Sequence: Synthetic oligonucleotide
  Sense strand starting at position 3450 of SEQ ID NO: 1562489
cgaaucguggcuuaagcaa

SEQ ID NO: 1751022 - RNA, 19 nt, Artificial Sequence
  Description of Artificial Sequence: Synthetic oligonucleotide
  Antisense strand to SEQ ID NO: 1751021
uugcuuaagccacgauucg

SEQ ID NO: 1751023 - RNA, 19 nt, Artificial Sequence
  Description of Artificial Sequence: Synthetic oligonucleotide
  Sense strand starting at position 3533 of SEQ ID NO: 1562489
cuucuugaguaaccagauu

SEQ ID NO: 1751024 - RNA, 19 nt, Artificial Sequence
  Description of Artificial Sequence: Synthetic oligonucleotide
  Antisense strand to SEQ ID NO: 1751023
aaucugguuacucaagaag

SEQ ID NO: 1751025 - RNA, 19 nt, Artificial Sequence
  Description of Artificial Sequence: Synthetic oligonucleotide
  Sense strand starting at position 3566 of SEQ ID NO: 1562489
uuugucacuuaagagaacu

SEQ ID NO: 1751026 - RNA, 19 nt, Artificial Sequence
  Description of Artificial Sequence: Synthetic oligonucleotide
  Antisense strand to SEQ ID NO: 1751025
aguucucuuaagugacaaa

SEQ ID NO: 1751027 - RNA, 19 nt, Artificial Sequence
  Description of Artificial Sequence: Synthetic oligonucleotide
  Sense strand starting at position 3587 of SEQ ID NO: 1562489
uaggcaaucguccauccaa

SEQ ID NO: 1751028 - RNA, 19 nt, Artificial Sequence
  Description of Artificial Sequence: Synthetic oligonucleotide
  Antisense strand to SEQ ID NO: 1751027
uuggauggacgauugccua

SEQ ID NO: 1751029 - RNA, 19 nt, Artificial Sequence
  Description of Artificial Sequence: Synthetic oligonucleotide
  Sense strand starting at position 3677 of SEQ ID NO: 1562489
ugccaccucucguuauauu

SEQ ID NO: 1751030 - RNA, 19 nt, Artificial Sequence
  Description of Artificial Sequence: Synthetic oligonucleotide
  Antisense strand to SEQ ID NO: 1751029
aauauaacgagagguggca

SEQ ID NO: 1751031 - RNA, 19 nt, Artificial Sequence
  Description of Artificial Sequence: Synthetic oligonucleotide
  Sense strand starting at position 3678 of SEQ ID NO: 1562489
gccaccucucguuauauuu

SEQ ID NO: 1751032 - RNA, 19 nt, Artificial Sequence
  Description of Artificial Sequence: Synthetic oligonucleotide
  Antisense strand to SEQ ID NO: 1751031
aaauauaacgagagguggc

SEQ ID NO: 1751033 - RNA, 19 nt, Artificial Sequence
  Description of Artificial Sequence: Synthetic oligonucleotide
  Sense strand starting at position 3705 of SEQ ID NO: 1562489
ggucucacguaacuugaga

SEQ ID NO: 1751034 - RNA, 19 nt, Artificial Sequence
  Description of Artificial Sequence: Synthetic oligonucleotide
  Antisense strand to SEQ ID NO: 1751033
ucucaaguuacgugagacc

SEQ ID NO: 1751035 - RNA, 19 nt, Artificial Sequence
  Description of Artificial Sequence: Synthetic oligonucleotide
  Sense strand starting at position 3774 of SEQ ID NO: 1562489
uuacuuguuugcucaauug

SEQ ID NO: 1751036 - RNA, 19 nt, Artificial Sequence
  Description of Artificial Sequence: Synthetic oligonucleotide
  Antisense strand to SEQ ID NO: 1751035
caauugagcaaacaaguaa

SEQ ID NO: 1751037 - RNA, 19 nt, Artificial Sequence
  Description of Artificial Sequence: Synthetic oligonucleotide
  Sense strand starting at position 3795 of SEQ ID NO: 1562489
aaacgcuggcucuaggaua

SEQ ID NO: 1751038 - RNA, 19 nt, Artificial Sequence
  Description of Artificial Sequence: Synthetic oligonucleotide
  Antisense strand to SEQ ID NO: 1751037
uauccuagagccagcguuu

SEQ ID NO: 1751039 - RNA, 19 nt, Artificial Sequence
  Description of Artificial Sequence: Synthetic oligonucleotide
  Sense strand starting at position 3815 of SEQ ID NO: 1562489
aacggaaucuuugggagag

SEQ ID NO: 1751040 - RNA, 19 nt, Artificial Sequence
  Description of Artificial Sequence: Synthetic oligonucleotide
  Antisense strand to SEQ ID NO: 1751039
cucucccaaagauuccguu

SEQ ID NO: 1751041 - RNA, 19 nt, Artificial Sequence
  Description of Artificial Sequence: Synthetic oligonucleotide
  Sense strand starting at position 3845 of SEQ ID NO: 1562489
gguaguuggaagcauccaa

SEQ ID NO: 1751042 - RNA, 19 nt, Artificial Sequence
  Description of Artificial Sequence: Synthetic oligonucleotide
  Antisense strand to SEQ ID NO: 1751041
uuggaugcuuccaacuacc

SEQ ID NO: 1751043 - RNA, 19 nt, Artificial Sequence
  Description of Artificial Sequence: Synthetic oligonucleotide
  Sense strand starting at position 3979 of SEQ ID NO: 1562489
auccuuuguugucugaauu

SEQ ID NO: 1751044 - RNA, 19 nt, Artificial Sequence
  Description of Artificial Sequence: Synthetic oligonucleotide
  Antisense strand to SEQ ID NO: 1751043
aauucagacaacaaaggau

SEQ ID NO: 1751045 - RNA, 19 nt, Artificial Sequence
  Description of Artificial Sequence: Synthetic oligonucleotide
  Sense strand starting at position 3980 of SEQ ID NO: 1562489
uccuuuguugucugaauua

SEQ ID NO: 1751046 - RNA, 19 nt, Artificial Sequence
  Description of Artificial Sequence: Synthetic oligonucleotide
  Antisense strand to SEQ ID NO: 1751045
uaauucagacaacaaagga

SEQ ID NO: 1751047 - RNA, 19 nt, Artificial Sequence
  Description of Artificial Sequence: Synthetic oligonucleotide
  Sense strand starting at position 178 of SEQ ID NO: 1562490
uggugauaauaguaaucag

SEQ ID NO: 1751048 - RNA, 19 nt, Artificial Sequence
  Description of Artificial Sequence: Synthetic oligonucleotide
  Antisense strand to SEQ ID NO: 1751047
cugauuacuauuaucacca

SEQ ID NO: 1751049 - RNA, 19 nt, Artificial Sequence
  Description of Artificial Sequence: Synthetic oligonucleotide
  Sense strand starting at position 188 of SEQ ID NO: 1562490
aguaaucaguaucacuauu

SEQ ID NO: 1751050 - RNA, 19 nt, Artificial Sequence
  Description of Artificial Sequence: Synthetic oligonucleotide
  Antisense strand to SEQ ID NO: 1751049
aauagugauacugauuacu

SEQ ID NO: 1751051 - RNA, 19 nt, Artificial Sequence
  Description of Artificial Sequence: Synthetic oligonucleotide
  Sense strand starting at position 408 of SEQ ID NO: 1562490
ugaggcaucugggcagaga

SEQ ID NO: 1751052 - RNA, 19 nt, Artificial Sequence
  Description of Artificial Sequence: Synthetic oligonucleotide
  Antisense strand to SEQ ID NO: 1751051
ucucugcccagaugccuca

SEQ ID NO: 1751053 - RNA, 19 nt, Artificial Sequence
  Description of Artificial Sequence: Synthetic oligonucleotide
  Sense strand starting at position 411 of SEQ ID NO: 1562490
ggcaucugggcagagagau

SEQ ID NO: 1751054 - RNA, 19 nt, Artificial Sequence
  Description of Artificial Sequence: Synthetic oligonucleotide
  Antisense strand to SEQ ID NO: 1751053
aucucucugcccagaugcc

SEQ ID NO: 1751055 - RNA, 19 nt, Artificial Sequence
  Description of Artificial Sequence: Synthetic oligonucleotide
  Sense strand starting at position 460 of SEQ ID NO: 1562490
ucaccuuuccuggguaaga

SEQ ID NO: 1751056 - RNA, 19 nt, Artificial Sequence
  Description of Artificial Sequence: Synthetic oligonucleotide
  Antisense strand to SEQ ID NO: 1751055
ucuuacccaggaaagguga

SEQ ID NO: 1751057 - RNA, 19 nt, Artificial Sequence
  Description of Artificial Sequence: Synthetic oligonucleotide
  Sense strand starting at position 461 of SEQ ID NO: 1562490
caccuuuccuggguaagag

SEQ ID NO: 1751058 - RNA, 19 nt, Artificial Sequence
  Description of Artificial Sequence: Synthetic oligonucleotide
  Antisense strand to SEQ ID NO: 1751057
cucuuacccaggaaaggug

SEQ ID NO: 1751059 - RNA, 19 nt, Artificial Sequence
  Description of Artificial Sequence: Synthetic oligonucleotide
  Sense strand starting at position 558 of SEQ ID NO: 1562490
cccugugagcacugaggaa

SEQ ID NO: 1751060 - RNA, 19 nt, Artificial Sequence
  Description of Artificial Sequence: Synthetic oligonucleotide
  Antisense strand to SEQ ID NO: 1751059
uuccucagugcucacaggg

SEQ ID NO: 1751061 - RNA, 19 nt, Artificial Sequence
  Description of Artificial Sequence: Synthetic oligonucleotide
  Sense strand starting at position 571 of SEQ ID NO: 1562490
gaggaagccucccaagaca

SEQ ID NO: 1751062 - RNA, 19 nt, Artificial Sequence
  Description of Artificial Sequence: Synthetic oligonucleotide
  Antisense strand to SEQ ID NO: 1751061
ugucuugggaggcuuccuc

SEQ ID NO: 1751063 - RNA, 19 nt, Artificial Sequence
  Description of Artificial Sequence: Synthetic oligonucleotide
  Sense strand starting at position 688 of SEQ ID NO: 1562490
ggcuuccagaaguguggua

SEQ ID NO: 1751064 - RNA, 19 nt, Artificial Sequence
  Description of Artificial Sequence: Synthetic oligonucleotide
  Antisense strand to SEQ ID NO: 1751063
uaccacacuucuggaagcc

SEQ ID NO: 1751065 - RNA, 19 nt, Artificial Sequence
  Description of Artificial Sequence: Synthetic oligonucleotide
  Sense strand starting at position 701 of SEQ ID NO: 1562490
gugguaagccagcauccua

SEQ ID NO: 1751066 - RNA, 19 nt, Artificial Sequence
  Description of Artificial Sequence: Synthetic oligonucleotide
  Antisense strand to SEQ ID NO: 1751065
uaggaugcuggcuuaccac

SEQ ID NO: 1751067 - RNA, 19 nt, Artificial Sequence
  Description of Artificial Sequence: Synthetic oligonucleotide
  Sense strand starting at position 869 of SEQ ID NO: 1562490
ucaccugagcuggaaucua

SEQ ID NO: 1751068 - RNA, 19 nt, Artificial Sequence
  Description of Artificial Sequence: Synthetic oligonucleotide
  Antisense strand to SEQ ID NO: 1751067
uagauuccagcucagguga

SEQ ID NO: 1751069 - RNA, 19 nt, Artificial Sequence
  Description of Artificial Sequence: Synthetic oligonucleotide
  Sense strand starting at position 951 of SEQ ID NO: 1562490
ggagcuuggucagcagaag

SEQ ID NO: 1751070 - RNA, 19 nt, Artificial Sequence
  Description of Artificial Sequence: Synthetic oligonucleotide
  Antisense strand to SEQ ID NO: 1751069
cuucugcugaccaagcucc

SEQ ID NO: 1751071 - RNA, 19 nt, Artificial Sequence
  Description of Artificial Sequence: Synthetic oligonucleotide
  Sense strand starting at position 1009 of SEQ ID NO: 1562490
gccaccuugcaguaggaau

SEQ ID NO: 1751072 - RNA, 19 nt, Artificial Sequence
  Description of Artificial Sequence: Synthetic oligonucleotide
  Antisense strand to SEQ ID NO: 1751071
auuccuacugcaagguggc

SEQ ID NO: 1751073 - RNA, 19 nt, Artificial Sequence
  Description of Artificial Sequence: Synthetic oligonucleotide
  Sense strand starting at position 1035 of SEQ ID NO: 1562490
ggaugaaguccuggccugu

SEQ ID NO: 1751074 - RNA, 19 nt, Artificial Sequence
  Description of Artificial Sequence: Synthetic oligonucleotide
  Antisense strand to SEQ ID NO: 1751073
acaggccaggacuucaucc

SEQ ID NO: 1751075 - RNA, 19 nt, Artificial Sequence
  Description of Artificial Sequence: Synthetic oligonucleotide
  Sense strand starting at position 1061 of SEQ ID NO: 1562490
uggauaugguuucugguuu

SEQ ID NO: 1751076 - RNA, 19 nt, Artificial Sequence
  Description of Artificial Sequence: Synthetic oligonucleotide
  Antisense strand to SEQ ID NO: 1751075
aaaccagaaaccauaucca

SEQ ID NO: 1751077 - RNA, 19 nt, Artificial Sequence
  Description of Artificial Sequence: Synthetic oligonucleotide
  Sense strand starting at position 1154 of SEQ ID NO: 1562490
cccaguuucggacaggaca

SEQ ID NO: 1751078 - RNA, 19 nt, Artificial Sequence
  Description of Artificial Sequence: Synthetic oligonucleotide
  Antisense strand to SEQ ID NO: 1751077
uguccuguccgaaacuggg

SEQ ID NO: 1751079 - RNA, 19 nt, Artificial Sequence
  Description of Artificial Sequence: Synthetic oligonucleotide
  Sense strand starting at position 1393 of SEQ ID NO: 1562490
gggcguccgccucaggaau

SEQ ID NO: 1751080 - RNA, 19 nt, Artificial Sequence
  Description of Artificial Sequence: Synthetic oligonucleotide
  Antisense strand to SEQ ID NO: 1751079
auuccugaggcggacgccc

SEQ ID NO: 1751081 - RNA, 19 nt, Artificial Sequence
  Description of Artificial Sequence: Synthetic oligonucleotide
  Sense strand starting at position 1394 of SEQ ID NO: 1562490
ggcguccgccucaggaauu

SEQ ID NO: 1751082 - RNA, 19 nt, Artificial Sequence
  Description of Artificial Sequence: Synthetic oligonucleotide
  Antisense strand to SEQ ID NO: 1751081
aauuccugaggcggacgcc

SEQ ID NO: 1751083 - RNA, 19 nt, Artificial Sequence
  Description of Artificial Sequence: Synthetic oligonucleotide
  Sense strand starting at position 1623 of SEQ ID NO: 1562490
gggccauacucagguuaaa

SEQ ID NO: 1751084 - RNA, 19 nt, Artificial Sequence
  Description of Artificial Sequence: Synthetic oligonucleotide
  Antisense strand to SEQ ID NO: 1751083
uuuaaccugaguauggccc

SEQ ID NO: 1751085 - RNA, 19 nt, Artificial Sequence
  Description of Artificial Sequence: Synthetic oligonucleotide
  Sense strand starting at position 1667 of SEQ ID NO: 1562490
cccuguucccuccgagaag

SEQ ID NO: 1751086 - RNA, 19 nt, Artificial Sequence
  Description of Artificial Sequence: Synthetic oligonucleotide
  Antisense strand to SEQ ID NO: 1751085
cuucucggagggaacaggg

SEQ ID NO: 1751087 - RNA, 19 nt, Artificial Sequence
  Description of Artificial Sequence: Synthetic oligonucleotide
  Sense strand starting at position 2296 of SEQ ID NO: 1562490
acccaaaugucuucguucu

SEQ ID NO: 1751088 - RNA, 19 nt, Artificial Sequence
  Description of Artificial Sequence: Synthetic oligonucleotide
  Antisense strand to SEQ ID NO: 1751087
agaacgaagacauuugggu

SEQ ID NO: 1751089 - RNA, 19 nt, Artificial Sequence
  Description of Artificial Sequence: Synthetic oligonucleotide
  Sense strand starting at position 2297 of SEQ ID NO: 1562490
cccaaaugucuucguucuu

SEQ ID NO: 1751090 - RNA, 19 nt, Artificial Sequence
  Description of Artificial Sequence: Synthetic oligonucleotide
  Antisense strand to SEQ ID NO: 1751089
aagaacgaagacauuuggg

SEQ ID NO: 1751091 - RNA, 19 nt, Artificial Sequence
  Description of Artificial Sequence: Synthetic oligonucleotide
  Sense strand starting at position 2302 of SEQ ID NO: 1562490
augucuucguucuugugaa

SEQ ID NO: 1751092 - RNA, 19 nt, Artificial Sequence
  Description of Artificial Sequence: Synthetic oligonucleotide
  Antisense strand to SEQ ID NO: 1751091
uucacaagaacgaagacau

SEQ ID NO: 1751093 - RNA, 19 nt, Artificial Sequence
  Description of Artificial Sequence: Synthetic oligonucleotide
  Sense strand starting at position 2303 of SEQ ID NO: 1562490
ugucuucguucuugugaac

SEQ ID NO: 1751094 - RNA, 19 nt, Artificial Sequence
  Description of Artificial Sequence: Synthetic oligonucleotide
  Antisense strand to SEQ ID NO: 1751093
guucacaagaacgaagaca

SEQ ID NO: 1751095 - RNA, 19 nt, Artificial Sequence
  Description of Artificial Sequence: Synthetic oligonucleotide
  Sense strand starting at position 2306 of SEQ ID NO: 1562490
cuucguucuugugaacugu

SEQ ID NO: 1751096 - RNA, 19 nt, Artificial Sequence
  Description of Artificial Sequence: Synthetic oligonucleotide
  Antisense strand to SEQ ID NO: 1751095
acaguucacaagaacgaag

SEQ ID NO: 1751097 - RNA, 19 nt, Artificial Sequence
  Description of Artificial Sequence: Synthetic oligonucleotide
  Sense strand starting at position 2316 of SEQ ID NO: 1562490
gugaacuguuggguaagga

SEQ ID NO: 1751098 - RNA, 19 nt, Artificial Sequence
  Description of Artificial Sequence: Synthetic oligonucleotide
  Antisense strand to SEQ ID NO: 1751097
uccuuacccaacaguucac

SEQ ID NO: 1751099 - RNA, 19 nt, Artificial Sequence
  Description of Artificial Sequence: Synthetic oligonucleotide
  Sense strand starting at position 2320 of SEQ ID NO: 1562490
acuguuggguaaggaauua

SEQ ID NO: 1751100 - RNA, 19 nt, Artificial Sequence
  Description of Artificial Sequence: Synthetic oligonucleotide
  Antisense strand to SEQ ID NO: 1751099
uaauuccuuacccaacagu

SEQ ID NO: 1751101 - RNA, 19 nt, Artificial Sequence
  Description of Artificial Sequence: Synthetic oligonucleotide
  Sense strand starting at position 2340 of SEQ ID NO: 1562490
gaauaaagucccgaaugcu

SEQ ID NO: 1751102 - RNA, 19 nt, Artificial Sequence
  Description of Artificial Sequence: Synthetic oligonucleotide
  Antisense strand to SEQ ID NO: 1751101
agcauucgggacuuuauuc

SEQ ID NO: 1751103 - RNA, 19 nt, Artificial Sequence
  Description of Artificial Sequence: Synthetic oligonucleotide
  Sense strand starting at position 2596 of SEQ ID NO: 1562490
gcaugacugucucagagaa

SEQ ID NO: 1751104 - RNA, 19 nt, Artificial Sequence
  Description of Artificial Sequence: Synthetic oligonucleotide
  Antisense strand to SEQ ID NO: 1751103
uucucugagacagucaugc

SEQ ID NO: 1751105 - RNA, 19 nt, Artificial Sequence
  Description of Artificial Sequence: Synthetic oligonucleotide
  Sense strand starting at position 2664 of SEQ ID NO: 1562490
auaaucuaugcccaagagu

SEQ ID NO: 1751106 - RNA, 19 nt, Artificial Sequence
  Description of Artificial Sequence: Synthetic oligonucleotide
  Antisense strand to SEQ ID NO: 1751105
acucuugggcauagauuau

SEQ ID NO: 1751107 - RNA, 19 nt, Artificial Sequence
  Description of Artificial Sequence: Synthetic oligonucleotide
  Sense strand starting at position 2673 of SEQ ID NO: 1562490
gcccaagagucaggaacaa

SEQ ID NO: 1751108 - RNA, 19 nt, Artificial Sequence
  Description of Artificial Sequence: Synthetic oligonucleotide
  Antisense strand to SEQ ID NO: 1751107
uuguuccugacucuugggc

SEQ ID NO: 1751109 - RNA, 19 nt, Artificial Sequence
  Description of Artificial Sequence: Synthetic oligonucleotide
  Sense strand starting at position 2724 of SEQ ID NO: 1562490
auuacauacuguugucaca

SEQ ID NO: 1751110 - RNA, 19 nt, Artificial Sequence
  Description of Artificial Sequence: Synthetic oligonucleotide
  Antisense strand to SEQ ID NO: 1751109
ugugacaacaguauguaau

SEQ ID NO: 1751111 - RNA, 19 nt, Artificial Sequence
  Description of Artificial Sequence: Synthetic oligonucleotide
  Sense strand starting at position 238 of SEQ ID NO: 1562491
ggucaaauacagugacucu

SEQ ID NO: 1751112 - RNA, 19 nt, Artificial Sequence
  Description of Artificial Sequence: Synthetic oligonucleotide
  Antisense strand to SEQ ID NO: 1751111
agagucacuguauuugacc

SEQ ID NO: 1751113 - RNA, 19 nt, Artificial Sequence
  Description of Artificial Sequence: Synthetic oligonucleotide
  Sense strand starting at position 265 of SEQ ID NO: 1562491
cgggacugauaacugaauu

SEQ ID NO: 1751114 - RNA, 19 nt, Artificial Sequence
  Description of Artificial Sequence: Synthetic oligonucleotide
  Antisense strand to SEQ ID NO: 1751113
aauucaguuaucagucccg

SEQ ID NO: 1751115 - RNA, 19 nt, Artificial Sequence
  Description of Artificial Sequence: Synthetic oligonucleotide
  Sense strand starting at position 279 of SEQ ID NO: 1562491
gaauuuccauugcagguaa

SEQ ID NO: 1751116 - RNA, 19 nt, Artificial Sequence
  Description of Artificial Sequence: Synthetic oligonucleotide
  Antisense strand to SEQ ID NO: 1751115
uuaccugcaauggaaauuc

SEQ ID NO: 1751117 - RNA, 19 nt, Artificial Sequence
  Description of Artificial Sequence: Synthetic oligonucleotide
  Sense strand starting at position 407 of SEQ ID NO: 1562491
ugaggcaucugggcagaga

SEQ ID NO: 1751118 - RNA, 19 nt, Artificial Sequence
  Description of Artificial Sequence: Synthetic oligonucleotide
  Antisense strand to SEQ ID NO: 1751117
ucucugcccagaugccuca

SEQ ID NO: 1751119 - RNA, 19 nt, Artificial Sequence
  Description of Artificial Sequence: Synthetic oligonucleotide
  Sense strand starting at position 410 of SEQ ID NO: 1562491
ggcaucugggcagagagau

SEQ ID NO: 1751120 - RNA, 19 nt, Artificial Sequence
  Description of Artificial Sequence: Synthetic oligonucleotide
  Antisense strand to SEQ ID NO: 1751119
aucucucugcccagaugcc

SEQ ID NO: 1751121 - RNA, 19 nt, Artificial Sequence
  Description of Artificial Sequence: Synthetic oligonucleotide
  Sense strand starting at position 459 of SEQ ID NO: 1562491
ucaccuuuccuggguaaga

SEQ ID NO: 1751122 - RNA, 19 nt, Artificial Sequence
  Description of Artificial Sequence: Synthetic oligonucleotide
  Antisense strand to SEQ ID NO: 1751121
ucuuacccaggaaagguga

SEQ ID NO: 1751123 - RNA, 19 nt, Artificial Sequence
  Description of Artificial Sequence: Synthetic oligonucleotide
  Sense strand starting at position 460 of SEQ ID NO: 1562491
caccuuuccuggguaagag

SEQ ID NO: 1751124 - RNA, 19 nt, Artificial Sequence
  Description of Artificial Sequence: Synthetic oligonucleotide
  Antisense strand to SEQ ID NO: 1751123
cucuuacccaggaaaggug

SEQ ID NO: 1751125 - RNA, 19 nt, Artificial Sequence
  Description of Artificial Sequence: Synthetic oligonucleotide
  Sense strand starting at position 557 of SEQ ID NO: 1562491
cccugugagcacugaggaa

SEQ ID NO: 1751126 - RNA, 19 nt, Artificial Sequence
  Description of Artificial Sequence: Synthetic oligonucleotide
  Antisense strand to SEQ ID NO: 1751125
uuccucagugcucacaggg

SEQ ID NO: 1751127 - RNA, 19 nt, Artificial Sequence
  Description of Artificial Sequence: Synthetic oligonucleotide
  Sense strand starting at position 687 of SEQ ID NO: 1562491
ggcuuccagaaguguggua

SEQ ID NO: 1751128 - RNA, 19 nt, Artificial Sequence
  Description of Artificial Sequence: Synthetic oligonucleotide
  Antisense strand to SEQ ID NO: 1751127
uaccacacuucuggaagcc

SEQ ID NO: 1751129 - RNA, 19 nt, Artificial Sequence
  Description of Artificial Sequence: Synthetic oligonucleotide
  Sense strand starting at position 700 of SEQ ID NO: 1562491
gugguaagccagcauccua

SEQ ID NO: 1751130 - RNA, 19 nt, Artificial Sequence
  Description of Artificial Sequence: Synthetic oligonucleotide
  Antisense strand to SEQ ID NO: 1751129
uaggaugcuggcuuaccac

SEQ ID NO: 1751131 - RNA, 19 nt, Artificial Sequence
  Description of Artificial Sequence: Synthetic oligonucleotide
  Sense strand starting at position 868 of SEQ ID NO: 1562491
ucaccugagcuggaaucua

SEQ ID NO: 1751132 - RNA, 19 nt, Artificial Sequence
  Description of Artificial Sequence: Synthetic oligonucleotide
  Antisense strand to SEQ ID NO: 1751131
uagauuccagcucagguga

SEQ ID NO: 1751133 - RNA, 19 nt, Artificial Sequence
  Description of Artificial Sequence: Synthetic oligonucleotide
  Sense strand starting at position 950 of SEQ ID NO: 1562491
ggagcuuggucagcagaag

SEQ ID NO: 1751134 - RNA, 19 nt, Artificial Sequence
  Description of Artificial Sequence: Synthetic oligonucleotide
  Antisense strand to SEQ ID NO: 1751133
cuucugcugaccaagcucc

SEQ ID NO: 1751135 - RNA, 19 nt, Artificial Sequence
  Description of Artificial Sequence: Synthetic oligonucleotide
  Sense strand starting at position 1008 of SEQ ID NO: 1562491
gccaccuugcaguaggaau

SEQ ID NO: 1751136 - RNA, 19 nt, Artificial Sequence
  Description of Artificial Sequence: Synthetic oligonucleotide
  Antisense strand to SEQ ID NO: 1751135
auuccuacugcaagguggc

SEQ ID NO: 1751137 - RNA, 19 nt, Artificial Sequence
  Description of Artificial Sequence: Synthetic oligonucleotide
  Sense strand starting at position 1060 of SEQ ID NO: 1562491
uggauaugguuucugguuu

SEQ ID NO: 1751138 - RNA, 19 nt, Artificial Sequence
  Description of Artificial Sequence: Synthetic oligonucleotide
  Antisense strand to SEQ ID NO: 1751137
aaaccagaaaccauaucca

SEQ ID NO: 1751139 - RNA, 19 nt, Artificial Sequence
  Description of Artificial Sequence: Synthetic oligonucleotide
  Sense strand starting at position 1153 of SEQ ID NO: 1562491
cccaguuucggacaggaca

SEQ ID NO: 1751140 - RNA, 19 nt, Artificial Sequence
  Description of Artificial Sequence: Synthetic oligonucleotide
  Antisense strand to SEQ ID NO: 1751139
uguccuguccgaaacuggg

SEQ ID NO: 1751141 - RNA, 19 nt, Artificial Sequence
  Description of Artificial Sequence: Synthetic oligonucleotide
  Sense strand starting at position 1393 of SEQ ID NO: 1562491
ggcguccgccucaggaauu

SEQ ID NO: 1751142 - RNA, 19 nt, Artificial Sequence
  Description of Artificial Sequence: Synthetic oligonucleotide
  Antisense strand to SEQ ID NO: 1751141
aauuccugaggcggacgcc

SEQ ID NO: 1751143 - RNA, 19 nt, Artificial Sequence
  Description of Artificial Sequence: Synthetic oligonucleotide
  Sense strand starting at position 1666 of SEQ ID NO: 1562491
cccuguucccuccgagaag

SEQ ID NO: 1751144 - RNA, 19 nt, Artificial Sequence
  Description of Artificial Sequence: Synthetic oligonucleotide
  Antisense strand to SEQ ID NO: 1751143
cuucucggagggaacaggg

SEQ ID NO: 1751145 - RNA, 19 nt, Artificial Sequence
  Description of Artificial Sequence: Synthetic oligonucleotide
  Sense strand starting at position 2311 of SEQ ID NO: 1562491
gugaacuguuggguaagga

SEQ ID NO: 1751146 - RNA, 19 nt, Artificial Sequence
  Description of Artificial Sequence: Synthetic oligonucleotide
  Antisense strand to SEQ ID NO: 1751145
uccuuacccaacaguucac

SEQ ID NO: 1751147 - RNA, 19 nt, Artificial Sequence
  Description of Artificial Sequence: Synthetic oligonucleotide
  Sense strand starting at position 2335 of SEQ ID NO: 1562491
gaauaaagucccgaaugcu

SEQ ID NO: 1751148 - RNA, 19 nt, Artificial Sequence
  Description of Artificial Sequence: Synthetic oligonucleotide
  Antisense strand to SEQ ID NO: 1751147
agcauucgggacuuuauuc

SEQ ID NO: 1751149 - RNA, 19 nt, Artificial Sequence
  Description of Artificial Sequence: Synthetic oligonucleotide
  Sense strand starting at position 2657 of SEQ ID NO: 1562491
auaaucuaugcccaagagu

SEQ ID NO: 1751150 - RNA, 19 nt, Artificial Sequence
  Description of Artificial Sequence: Synthetic oligonucleotide
  Antisense strand to SEQ ID NO: 1751149
acucuugggcauagauuau

SEQ ID NO: 1751151 - RNA, 19 nt, Artificial Sequence
  Description of Artificial Sequence: Synthetic oligonucleotide
  Sense strand starting at position 2896 of SEQ ID NO: 1562491
gaauaccugcagugucaaa

SEQ ID NO: 1751152 - RNA, 19 nt, Artificial Sequence
  Description of Artificial Sequence: Synthetic oligonucleotide
  Antisense strand to SEQ ID NO: 1751151
uuugacacugcagguauuc

SEQ ID NO: 1751153 - RNA, 19 nt, Artificial Sequence
  Description of Artificial Sequence: Synthetic oligonucleotide
  Sense strand starting at position 2907 of SEQ ID NO: 1562491
gugucaaagucaccaacuu

SEQ ID NO: 1751154 - RNA, 19 nt, Artificial Sequence
  Description of Artificial Sequence: Synthetic oligonucleotide
  Antisense strand to SEQ ID NO: 1751153
aaguuggugacuuugacac

SEQ ID NO: 1751155 - RNA, 19 nt, Artificial Sequence
  Description of Artificial Sequence: Synthetic oligonucleotide
  Sense strand starting at position 2981 of SEQ ID NO: 1562491
ggucuuacagccugaugua

SEQ ID NO: 1751156 - RNA, 19 nt, Artificial Sequence
  Description of Artificial Sequence: Synthetic oligonucleotide
  Antisense strand to SEQ ID NO: 1751155
uacaucaggcuguaagacc

SEQ ID NO: 1751157 - RNA, 19 nt, Artificial Sequence
  Description of Artificial Sequence: Synthetic oligonucleotide
  Sense strand starting at position 2982 of SEQ ID NO: 1562491
gucuuacagccugauguau

SEQ ID NO: 1751158 - RNA, 19 nt, Artificial Sequence
  Description of Artificial Sequence: Synthetic oligonucleotide
  Antisense strand to SEQ ID NO: 1751157
auacaucaggcuguaagac

SEQ ID NO: 1751159 - RNA, 19 nt, Artificial Sequence
  Description of Artificial Sequence: Synthetic oligonucleotide
  Sense strand starting at position 2988 of SEQ ID NO: 1562491
cagccugauguauauagga

SEQ ID NO: 1751160 - RNA, 19 nt, Artificial Sequence
  Description of Artificial Sequence: Synthetic oligonucleotide
  Antisense strand to SEQ ID NO: 1751159
uccuauauacaucaggcug

SEQ ID NO: 1751161 - RNA, 19 nt, Artificial Sequence
  Description of Artificial Sequence: Synthetic oligonucleotide
  Sense strand starting at position 2990 of SEQ ID NO: 1562491
gccugauguauauaggaug

SEQ ID NO: 1751162 - RNA, 19 nt, Artificial Sequence
  Description of Artificial Sequence: Synthetic oligonucleotide
  Antisense strand to SEQ ID NO: 1751161
cauccuauauacaucaggc

SEQ ID NO: 1751163 - RNA, 19 nt, Artificial Sequence
  Description of Artificial Sequence: Synthetic oligonucleotide
  Sense strand starting at position 3215 of SEQ ID NO: 1562491
ugaauagaagccugugugu

SEQ ID NO: 1751164 - RNA, 19 nt, Artificial Sequence
  Description of Artificial Sequence: Synthetic oligonucleotide
  Antisense strand to SEQ ID NO: 1751163
acacacaggcuucuauuca

SEQ ID NO: 1751165 - RNA, 19 nt, Artificial Sequence
  Description of Artificial Sequence: Synthetic oligonucleotide
  Sense strand starting at position 3217 of SEQ ID NO: 1562491
aauagaagccuguguguau

SEQ ID NO: 1751166 - RNA, 19 nt, Artificial Sequence
  Description of Artificial Sequence: Synthetic oligonucleotide
  Antisense strand to SEQ ID NO: 1751165
auacacacaggcuucuauu

SEQ ID NO: 1751167 - RNA, 19 nt, Artificial Sequence
  Description of Artificial Sequence: Synthetic oligonucleotide
  Sense strand starting at position 3241 of SEQ ID NO: 1562491
cugcuaauucuguauggga

SEQ ID NO: 1751168 - RNA, 19 nt, Artificial Sequence
  Description of Artificial Sequence: Synthetic oligonucleotide
  Antisense strand to SEQ ID NO: 1751167
ucccauacagaauuagcag

SEQ ID NO: 1751169 - RNA, 19 nt, Artificial Sequence
  Description of Artificial Sequence: Synthetic oligonucleotide
  Sense strand starting at position 3243 of SEQ ID NO: 1562491
gcuaauucuguaugggaua

SEQ ID NO: 1751170 - RNA, 19 nt, Artificial Sequence
  Description of Artificial Sequence: Synthetic oligonucleotide
  Antisense strand to SEQ ID NO: 1751169
uaucccauacagaauuagc

SEQ ID NO: 1751171 - RNA, 19 nt, Artificial Sequence
  Description of Artificial Sequence: Synthetic oligonucleotide
  Sense strand starting at position 3264 of SEQ ID NO: 1562491
uggcaucuccacuaagagu

SEQ ID NO: 1751172 - RNA, 19 nt, Artificial Sequence
  Description of Artificial Sequence: Synthetic oligonucleotide
  Antisense strand to SEQ ID NO: 1751171
acucuuaguggagaugcca

SEQ ID NO: 1751173 - RNA, 19 nt, Artificial Sequence
  Description of Artificial Sequence: Synthetic oligonucleotide
  Sense strand starting at position 3318 of SEQ ID NO: 1562491
ugacaauggaacuguugua

SEQ ID NO: 1751174 - RNA, 19 nt, Artificial Sequence
  Description of Artificial Sequence: Synthetic oligonucleotide
  Antisense strand to SEQ ID NO: 1751173
uacaacaguuccauuguca

SEQ ID NO: 1751175 - RNA, 19 nt, Artificial Sequence
  Description of Artificial Sequence: Synthetic oligonucleotide
  Sense strand starting at position 3325 of SEQ ID NO: 1562491
ggaacuguuguagguaaag

SEQ ID NO: 1751176 - RNA, 19 nt, Artificial Sequence
  Description of Artificial Sequence: Synthetic oligonucleotide
  Antisense strand to SEQ ID NO: 1751175
cuuuaccuacaacaguucc

SEQ ID NO: 1751177 - RNA, 19 nt, Artificial Sequence
  Description of Artificial Sequence: Synthetic oligonucleotide
  Sense strand starting at position 3373 of SEQ ID NO: 1562491
acauuagaaucagaagagu

SEQ ID NO: 1751178 - RNA, 19 nt, Artificial Sequence
  Description of Artificial Sequence: Synthetic oligonucleotide
  Antisense strand to SEQ ID NO: 1751177
acucuucugauucuaaugu

SEQ ID NO: 1751179 - RNA, 19 nt, Artificial Sequence
  Description of Artificial Sequence: Synthetic oligonucleotide
  Sense strand starting at position 3467 of SEQ ID NO: 1562491
auuuacauguuccacagau

SEQ ID NO: 1751180 - RNA, 19 nt, Artificial Sequence
  Description of Artificial Sequence: Synthetic oligonucleotide
  Antisense strand to SEQ ID NO: 1751179
aucuguggaacauguaaau

SEQ ID NO: 1751181 - RNA, 19 nt, Artificial Sequence
  Description of Artificial Sequence: Synthetic oligonucleotide
  Sense strand starting at position 3687 of SEQ ID NO: 1562491
gggugacauucuucuuugu

SEQ ID NO: 1751182 - RNA, 19 nt, Artificial Sequence
  Description of Artificial Sequence: Synthetic oligonucleotide
  Antisense strand to SEQ ID NO: 1751181
acaaagaagaaugucaccc

SEQ ID NO: 1751183 - RNA, 19 nt, Artificial Sequence
  Description of Artificial Sequence: Synthetic oligonucleotide
  Sense strand starting at position 3702 of SEQ ID NO: 1562491
uugucuuaaagaggcagaa

SEQ ID NO: 1751184 - RNA, 19 nt, Artificial Sequence
  Description of Artificial Sequence: Synthetic oligonucleotide
  Antisense strand to SEQ ID NO: 1751183
uucugccucuuuaagacaa

SEQ ID NO: 1751185 - RNA, 19 nt, Artificial Sequence
  Description of Artificial Sequence: Synthetic oligonucleotide
  Sense strand starting at position 3805 of SEQ ID NO: 1562491
ggcaauuaagcgccguaaa

SEQ ID NO: 1751186 - RNA, 19 nt, Artificial Sequence
  Description of Artificial Sequence: Synthetic oligonucleotide
  Antisense strand to SEQ ID NO: 1751185
uuuacggcgcuuaauugcc

SEQ ID NO: 1751187 - RNA, 19 nt, Artificial Sequence
  Description of Artificial Sequence: Synthetic oligonucleotide
  Sense strand starting at position 3808 of SEQ ID NO: 1562491
aauuaagcgccguaaacau

SEQ ID NO: 1751188 - RNA, 19 nt, Artificial Sequence
  Description of Artificial Sequence: Synthetic oligonucleotide
  Antisense strand to SEQ ID NO: 1751187
auguuuacggcgcuuaauu

SEQ ID NO: 1751189 - RNA, 19 nt, Artificial Sequence
  Description of Artificial Sequence: Synthetic oligonucleotide
  Sense strand starting at position 3934 of SEQ ID NO: 1562491
uucccucuuccagaaggua

SEQ ID NO: 1751190 - RNA, 19 nt, Artificial Sequence
  Description of Artificial Sequence: Synthetic oligonucleotide
  Antisense strand to SEQ ID NO: 1751189
uaccuucuggaagagggaa

SEQ ID NO: 1751191 - RNA, 19 nt, Artificial Sequence
  Description of Artificial Sequence: Synthetic oligonucleotide
  Sense strand starting at position 34 of SEQ ID NO: 1562492
aaauacauagugugauagu

SEQ ID NO: 1751192 - RNA, 19 nt, Artificial Sequence
  Description of Artificial Sequence: Synthetic oligonucleotide
  Antisense strand to SEQ ID NO: 1751191
acuaucacacuauguauuu

SEQ ID NO: 1751193 - RNA, 19 nt, Artificial Sequence
  Description of Artificial Sequence: Synthetic oligonucleotide
  Sense strand starting at position 68 of SEQ ID NO: 1562492
gguguugaagucuaaagug

SEQ ID NO: 1751194 - RNA, 19 nt, Artificial Sequence
  Description of Artificial Sequence: Synthetic oligonucleotide
  Antisense strand to SEQ ID NO: 1751193
cacuuuagacuucaacacc

SEQ ID NO: 1751195 - RNA, 19 nt, Artificial Sequence
  Description of Artificial Sequence: Synthetic oligonucleotide
  Sense strand starting at position 203 of SEQ ID NO: 1562492
gauaaagaaugagaagaua

SEQ ID NO: 1751196 - RNA, 19 nt, Artificial Sequence
  Description of Artificial Sequence: Synthetic oligonucleotide
  Antisense strand to SEQ ID NO: 1751195
uaucuucucauucuuuauc

SEQ ID NO: 1751197 - RNA, 19 nt, Artificial Sequence
  Description of Artificial Sequence: Synthetic oligonucleotide
  Sense strand starting at position 246 of SEQ ID NO: 1562492
aacugauauugaucgaguc

SEQ ID NO: 1751198 - RNA, 19 nt, Artificial Sequence
  Description of Artificial Sequence: Synthetic oligonucleotide
  Antisense strand to SEQ ID NO: 1751197
gacucgaucaauaucaguu

SEQ ID NO: 1751199 - RNA, 19 nt, Artificial Sequence
  Description of Artificial Sequence: Synthetic oligonucleotide
  Sense strand starting at position 248 of SEQ ID NO: 1562492
cugauauugaucgaguccu

SEQ ID NO: 1751200 - RNA, 19 nt, Artificial Sequence
  Description of Artificial Sequence: Synthetic oligonucleotide
  Antisense strand to SEQ ID NO: 1751199
aggacucgaucaauaucag

SEQ ID NO: 1751201 - RNA, 19 nt, Artificial Sequence
  Description of Artificial Sequence: Synthetic oligonucleotide
  Sense strand starting at position 258 of SEQ ID NO: 1562492
ucgaguccugauugacuaa

SEQ ID NO: 1751202 - RNA, 19 nt, Artificial Sequence
  Description of Artificial Sequence: Synthetic oligonucleotide
  Antisense strand to SEQ ID NO: 1751201
uuagucaaucaggacucga

SEQ ID NO: 1751203 - RNA, 19 nt, Artificial Sequence
  Description of Artificial Sequence: Synthetic oligonucleotide
  Sense strand starting at position 259 of SEQ ID NO: 1562492
cgaguccugauugacuaaa

SEQ ID NO: 1751204 - RNA, 19 nt, Artificial Sequence
  Description of Artificial Sequence: Synthetic oligonucleotide
  Antisense strand to SEQ ID NO: 1751203
uuuagucaaucaggacucg

SEQ ID NO: 1751205 - RNA, 19 nt, Artificial Sequence
  Description of Artificial Sequence: Synthetic oligonucleotide
  Sense strand starting at position 282 of SEQ ID NO: 1562492
augguuauuggauaaugca

SEQ ID NO: 1751206 - RNA, 19 nt, Artificial Sequence
  Description of Artificial Sequence: Synthetic oligonucleotide
  Antisense strand to SEQ ID NO: 1751205
ugcauuauccaauaaccau

SEQ ID NO: 1751207 - RNA, 19 nt, Artificial Sequence
  Description of Artificial Sequence: Synthetic oligonucleotide
  Sense strand starting at position 383 of SEQ ID NO: 1562492
cuuuauauuucuuucgguu

SEQ ID NO: 1751208 - RNA, 19 nt, Artificial Sequence
  Description of Artificial Sequence: Synthetic oligonucleotide
  Antisense strand to SEQ ID NO: 1751207
aaccgaaagaaauauaaag

SEQ ID NO: 1751209 - RNA, 19 nt, Artificial Sequence
  Description of Artificial Sequence: Synthetic oligonucleotide
  Sense strand starting at position 588 of SEQ ID NO: 1562492
aacuguauuccuggaaaga

SEQ ID NO: 1751210 - RNA, 19 nt, Artificial Sequence
  Description of Artificial Sequence: Synthetic oligonucleotide
  Antisense strand to SEQ ID NO: 1751209
ucuuuccaggaauacaguu

SEQ ID NO: 1751211 - RNA, 19 nt, Artificial Sequence
  Description of Artificial Sequence: Synthetic oligonucleotide
  Sense strand starting at position 839 of SEQ ID NO: 1562492
gcaguaguagcgguagcaa

SEQ ID NO: 1751212 - RNA, 19 nt, Artificial Sequence
  Description of Artificial Sequence: Synthetic oligonucleotide
  Antisense strand to SEQ ID NO: 1751211
uugcuaccgcuacuacugc

SEQ ID NO: 1751213 - RNA, 19 nt, Artificial Sequence
  Description of Artificial Sequence: Synthetic oligonucleotide
  Sense strand starting at position 907 of SEQ ID NO: 1562492
uuccgauagccacauuaua

SEQ ID NO: 1751214 - RNA, 19 nt, Artificial Sequence
  Description of Artificial Sequence: Synthetic oligonucleotide
  Antisense strand to SEQ ID NO: 1751213
uauaauguggcuaucggaa

SEQ ID NO: 1751215 - RNA, 19 nt, Artificial Sequence
  Description of Artificial Sequence: Synthetic oligonucleotide
  Sense strand starting at position 1162 of SEQ ID NO: 1562492
guaauuccggaucauuaca

SEQ ID NO: 1751216 - RNA, 19 nt, Artificial Sequence
  Description of Artificial Sequence: Synthetic oligonucleotide
  Antisense strand to SEQ ID NO: 1751215
uguaaugauccggaauuac

SEQ ID NO: 1751217 - RNA, 19 nt, Artificial Sequence
  Description of Artificial Sequence: Synthetic oligonucleotide
  Sense strand starting at position 1195 of SEQ ID NO: 1562492
gcugaaugaguguaucuuu

SEQ ID NO: 1751218 - RNA, 19 nt, Artificial Sequence
  Description of Artificial Sequence: Synthetic oligonucleotide
  Antisense strand to SEQ ID NO: 1751217
aaagauacacucauucagc

SEQ ID NO: 1751219 - RNA, 19 nt, Artificial Sequence
  Description of Artificial Sequence: Synthetic oligonucleotide
  Sense strand starting at position 1223 of SEQ ID NO: 1562492
gauaccuagcuguauagga

SEQ ID NO: 1751220 - RNA, 19 nt, Artificial Sequence
  Description of Artificial Sequence: Synthetic oligonucleotide
  Antisense strand to SEQ ID NO: 1751219
uccuauacagcuagguauc

SEQ ID NO: 1751221 - RNA, 19 nt, Artificial Sequence
  Description of Artificial Sequence: Synthetic oligonucleotide
  Sense strand starting at position 1278 of SEQ ID NO: 1562492
ggcuuaauccuagagguac

SEQ ID NO: 1751222 - RNA, 19 nt, Artificial Sequence
  Description of Artificial Sequence: Synthetic oligonucleotide
  Antisense strand to SEQ ID NO: 1751221
guaccucuaggauuaagcc

SEQ ID NO: 1751223 - RNA, 19 nt, Artificial Sequence
  Description of Artificial Sequence: Synthetic oligonucleotide
  Sense strand starting at position 1314 of SEQ ID NO: 1562492
gaagguccucuugguauga

SEQ ID NO: 1751224 - RNA, 19 nt, Artificial Sequence
  Description of Artificial Sequence: Synthetic oligonucleotide
  Antisense strand to SEQ ID NO: 1751223
ucauaccaagaggaccuuc

SEQ ID NO: 1751225 - RNA, 19 nt, Artificial Sequence
  Description of Artificial Sequence: Synthetic oligonucleotide
  Sense strand starting at position 1315 of SEQ ID NO: 1562492
aagguccucuugguaugaa

SEQ ID NO: 1751226 - RNA, 19 nt, Artificial Sequence
  Description of Artificial Sequence: Synthetic oligonucleotide
  Antisense strand to SEQ ID NO: 1751225
uucauaccaagaggaccuu

SEQ ID NO: 1751227 - RNA, 19 nt, Artificial Sequence
  Description of Artificial Sequence: Synthetic oligonucleotide
  Sense strand starting at position 1350 of SEQ ID NO: 1562492
agggaaucaccuggucaca

SEQ ID NO: 1751228 - RNA, 19 nt, Artificial Sequence
  Description of Artificial Sequence: Synthetic oligonucleotide
  Antisense strand to SEQ ID NO: 1751227
ugugaccaggugauucccu

SEQ ID NO: 1751229 - RNA, 19 nt, Artificial Sequence
  Description of Artificial Sequence: Synthetic oligonucleotide
  Sense strand starting at position 1352 of SEQ ID NO: 1562492
ggaaucaccuggucacagu

SEQ ID NO: 1751230 - RNA, 19 nt, Artificial Sequence
  Description of Artificial Sequence: Synthetic oligonucleotide
  Antisense strand to SEQ ID NO: 1751229
acugugaccaggugauucc

SEQ ID NO: 1751231 - RNA, 19 nt, Artificial Sequence
  Description of Artificial Sequence: Synthetic oligonucleotide
  Sense strand starting at position 1523 of SEQ ID NO: 1562492
uuacuacuugacggagaac

SEQ ID NO: 1751232 - RNA, 19 nt, Artificial Sequence
  Description of Artificial Sequence: Synthetic oligonucleotide
  Antisense strand to SEQ ID NO: 1751231
guucuccgucaaguaguaa

SEQ ID NO: 1751233 - RNA, 19 nt, Artificial Sequence
  Description of Artificial Sequence: Synthetic oligonucleotide
  Sense strand starting at position 2280 of SEQ ID NO: 1562492
aaauaaagucacuguagag

SEQ ID NO: 1751234 - RNA, 19 nt, Artificial Sequence
  Description of Artificial Sequence: Synthetic oligonucleotide
  Antisense strand to SEQ ID NO: 1751233
cucuacagugacuuuauuu

SEQ ID NO: 1751235 - RNA, 19 nt, Artificial Sequence
  Description of Artificial Sequence: Synthetic oligonucleotide
  Sense strand starting at position 2417 of SEQ ID NO: 1562492
uuugaaagaaucgauguuu

SEQ ID NO: 1751236 - RNA, 19 nt, Artificial Sequence
  Description of Artificial Sequence: Synthetic oligonucleotide
  Antisense strand to SEQ ID NO: 1751235
aaacaucgauucuuucaaa

SEQ ID NO: 1751237 - RNA, 19 nt, Artificial Sequence
  Description of Artificial Sequence: Synthetic oligonucleotide
  Sense strand starting at position 2485 of SEQ ID NO: 1562492
gaaagugcucccuagauga

SEQ ID NO: 1751238 - RNA, 19 nt, Artificial Sequence
  Description of Artificial Sequence: Synthetic oligonucleotide
  Antisense strand to SEQ ID NO: 1751237
ucaucuagggagcacuuuc

SEQ ID NO: 1751239 - RNA, 19 nt, Artificial Sequence
  Description of Artificial Sequence: Synthetic oligonucleotide
  Sense strand starting at position 2487 of SEQ ID NO: 1562492
aagugcucccuagaugagu

SEQ ID NO: 1751240 - RNA, 19 nt, Artificial Sequence
  Description of Artificial Sequence: Synthetic oligonucleotide
  Antisense strand to SEQ ID NO: 1751239
acucaucuagggagcacuu

SEQ ID NO: 1751241 - RNA, 19 nt, Artificial Sequence
  Description of Artificial Sequence: Synthetic oligonucleotide
  Sense strand starting at position 2804 of SEQ ID NO: 1562492
uuugauaaaucagcuguca

SEQ ID NO: 1751242 - RNA, 19 nt, Artificial Sequence
  Description of Artificial Sequence: Synthetic oligonucleotide
  Antisense strand to SEQ ID NO: 1751241
ugacagcugauuuaucaaa

SEQ ID NO: 1751243 - RNA, 19 nt, Artificial Sequence
  Description of Artificial Sequence: Synthetic oligonucleotide
  Sense strand starting at position 2893 of SEQ ID NO: 1562492
ucauauaggugaucagaac

SEQ ID NO: 1751244 - RNA, 19 nt, Artificial Sequence
  Description of Artificial Sequence: Synthetic oligonucleotide
  Antisense strand to SEQ ID NO: 1751243
guucugaucaccuauauga

SEQ ID NO: 1751245 - RNA, 19 nt, Artificial Sequence
  Description of Artificial Sequence: Synthetic oligonucleotide
  Sense strand starting at position 3109 of SEQ ID NO: 1562492
ggauucuguuucuuaagga

SEQ ID NO: 1751246 - RNA, 19 nt, Artificial Sequence
  Description of Artificial Sequence: Synthetic oligonucleotide
  Antisense strand to SEQ ID NO: 1751245
uccuuaagaaacagaaucc

SEQ ID NO: 1751247 - RNA, 19 nt, Artificial Sequence
  Description of Artificial Sequence: Synthetic oligonucleotide
  Sense strand starting at position 3124 of SEQ ID NO: 1562492
aggaauggauuggacuaaa

SEQ ID NO: 1751248 - RNA, 19 nt, Artificial Sequence
  Description of Artificial Sequence: Synthetic oligonucleotide
  Antisense strand to SEQ ID NO: 1751247
uuuaguccaauccauuccu

SEQ ID NO: 1751249 - RNA, 19 nt, Artificial Sequence
  Description of Artificial Sequence: Synthetic oligonucleotide
  Sense strand starting at position 3224 of SEQ ID NO: 1562492
aagcuuauacuuugggaga

SEQ ID NO: 1751250 - RNA, 19 nt, Artificial Sequence
  Description of Artificial Sequence: Synthetic oligonucleotide
  Antisense strand to SEQ ID NO: 1751249
ucucccaaaguauaagcuu

SEQ ID NO: 1751251 - RNA, 19 nt, Artificial Sequence
  Description of Artificial Sequence: Synthetic oligonucleotide
  Sense strand starting at position 3346 of SEQ ID NO: 1562492
uuccucuaucaucaguaga

SEQ ID NO: 1751252 - RNA, 19 nt, Artificial Sequence
  Description of Artificial Sequence: Synthetic oligonucleotide
  Antisense strand to SEQ ID NO: 1751251
ucuacugaugauagaggaa

SEQ ID NO: 1751253 - RNA, 19 nt, Artificial Sequence
  Description of Artificial Sequence: Synthetic oligonucleotide
  Sense strand starting at position 3348 of SEQ ID NO: 1562492
ccucuaucaucaguagagu

SEQ ID NO: 1751254 - RNA, 19 nt, Artificial Sequence
  Description of Artificial Sequence: Synthetic oligonucleotide
  Antisense strand to SEQ ID NO: 1751253
acucuacugaugauagagg

SEQ ID NO: 1751255 - RNA, 19 nt, Artificial Sequence
  Description of Artificial Sequence: Synthetic oligonucleotide
  Sense strand starting at position 3349 of SEQ ID NO: 1562492
cucuaucaucaguagaguu

SEQ ID NO: 1751256 - RNA, 19 nt, Artificial Sequence
  Description of Artificial Sequence: Synthetic oligonucleotide
  Antisense strand to SEQ ID NO: 1751255
aacucuacugaugauagag

SEQ ID NO: 1751257 - RNA, 19 nt, Artificial Sequence
  Description of Artificial Sequence: Synthetic oligonucleotide
  Sense strand starting at position 3397 of SEQ ID NO: 1562492
acucauauuguaggcaaau

SEQ ID NO: 1751258 - RNA, 19 nt, Artificial Sequence
  Description of Artificial Sequence: Synthetic oligonucleotide
  Antisense strand to SEQ ID NO: 1751257
auuugccuacaauaugagu

SEQ ID NO: 1751259 - RNA, 19 nt, Artificial Sequence
  Description of Artificial Sequence: Synthetic oligonucleotide
  Sense strand starting at position 3398 of SEQ ID NO: 1562492
cucauauuguaggcaaaua

SEQ ID NO: 1751260 - RNA, 19 nt, Artificial Sequence
  Description of Artificial Sequence: Synthetic oligonucleotide
  Antisense strand to SEQ ID NO: 1751259
uauuugccuacaauaugag

SEQ ID NO: 1751261 - RNA, 19 nt, Artificial Sequence
  Description of Artificial Sequence: Synthetic oligonucleotide
  Sense strand starting at position 3628 of SEQ ID NO: 1562492
cuacacuuguaauuaaugu

SEQ ID NO: 1751262 - RNA, 19 nt, Artificial Sequence
  Description of Artificial Sequence: Synthetic oligonucleotide
  Antisense strand to SEQ ID NO: 1751261
acauuaauuacaaguguag

SEQ ID NO: 1751263 - RNA, 19 nt, Artificial Sequence
  Description of Artificial Sequence: Synthetic oligonucleotide
  Sense strand starting at position 3679 of SEQ ID NO: 1562492
cuucuuugucuacaaaugu

SEQ ID NO: 1751264 - RNA, 19 nt, Artificial Sequence
  Description of Artificial Sequence: Synthetic oligonucleotide
  Antisense strand to SEQ ID NO: 1751263
acauuuguagacaaagaag

SEQ ID NO: 1751265 - RNA, 19 nt, Artificial Sequence
  Description of Artificial Sequence: Synthetic oligonucleotide
  Sense strand starting at position 3903 of SEQ ID NO: 1562492
aaucuaguaguagguuaaa

SEQ ID NO: 1751266 - RNA, 19 nt, Artificial Sequence
  Description of Artificial Sequence: Synthetic oligonucleotide
  Antisense strand to SEQ ID NO: 1751265
uuuaaccuacuacuagauu

SEQ ID NO: 1751267 - RNA, 19 nt, Artificial Sequence
  Description of Artificial Sequence: Synthetic oligonucleotide
  Sense strand starting at position 3948 of SEQ ID NO: 1562492
acuguaccauuagucauau

SEQ ID NO: 1751268 - RNA, 19 nt, Artificial Sequence
  Description of Artificial Sequence: Synthetic oligonucleotide
  Antisense strand to SEQ ID NO: 1751267
auaugacuaaugguacagu

SEQ ID NO: 1751269 - RNA, 19 nt, Artificial Sequence
  Description of Artificial Sequence: Synthetic oligonucleotide
  Sense strand starting at position 3949 of SEQ ID NO: 1562492
cuguaccauuagucauaua

SEQ ID NO: 1751270 - RNA, 19 nt, Artificial Sequence
  Description of Artificial Sequence: Synthetic oligonucleotide
  Antisense strand to SEQ ID NO: 1751269
uauaugacuaaugguacag

SEQ ID NO: 1751271 - RNA, 19 nt, Artificial Sequence
  Description of Artificial Sequence: Synthetic oligonucleotide
  Sense strand starting at position 115 of SEQ ID NO: 1562493
cugauugcuguauaucuca

SEQ ID NO: 1751272 - RNA, 19 nt, Artificial Sequence
  Description of Artificial Sequence: Synthetic oligonucleotide
  Antisense strand to SEQ ID NO: 1751271
ugagauauacagcaaucag

SEQ ID NO: 1751273 - RNA, 19 nt, Artificial Sequence
  Description of Artificial Sequence: Synthetic oligonucleotide
  Sense strand starting at position 188 of SEQ ID NO: 1562493
gcuccagauucuccaaaug

SEQ ID NO: 1751274 - RNA, 19 nt, Artificial Sequence
  Description of Artificial Sequence: Synthetic oligonucleotide
  Antisense strand to SEQ ID NO: 1751273
cauuuggagaaucuggagc

SEQ ID NO: 1751275 - RNA, 19 nt, Artificial Sequence
  Description of Artificial Sequence: Synthetic oligonucleotide
  Sense strand starting at position 370 of SEQ ID NO: 1562493
ccaccaagaugugcaauua

SEQ ID NO: 1751276 - RNA, 19 nt, Artificial Sequence
  Description of Artificial Sequence: Synthetic oligonucleotide
  Antisense strand to SEQ ID NO: 1751275
uaauugcacaucuuggugg

SEQ ID NO: 1751277 - RNA, 19 nt, Artificial Sequence
  Description of Artificial Sequence: Synthetic oligonucleotide
  Sense strand starting at position 581 of SEQ ID NO: 1562493
gggagcuucuuccugucaa

SEQ ID NO: 1751278 - RNA, 19 nt, Artificial Sequence
  Description of Artificial Sequence: Synthetic oligonucleotide
  Antisense strand to SEQ ID NO: 1751277
uugacaggaagaagcuccc

SEQ ID NO: 1751279 - RNA, 19 nt, Artificial Sequence
  Description of Artificial Sequence: Synthetic oligonucleotide
  Sense strand starting at position 657 of SEQ ID NO: 1562493
cuaacuccucuguguaagu

SEQ ID NO: 1751280 - RNA, 19 nt, Artificial Sequence
  Description of Artificial Sequence: Synthetic oligonucleotide
  Antisense strand to SEQ ID NO: 1751279
acuuacacagaggaguuag

SEQ ID NO: 1751281 - RNA, 19 nt, Artificial Sequence
  Description of Artificial Sequence: Synthetic oligonucleotide
  Sense strand starting at position 777 of SEQ ID NO: 1562493
cuagcuguccuuugaguuc

SEQ ID NO: 1751282 - RNA, 19 nt, Artificial Sequence
  Description of Artificial Sequence: Synthetic oligonucleotide
  Antisense strand to SEQ ID NO: 1751281
gaacucaaaggacagcuag

SEQ ID NO: 1751283 - RNA, 19 nt, Artificial Sequence
  Description of Artificial Sequence: Synthetic oligonucleotide
  Sense strand starting at position 790 of SEQ ID NO: 1562493
gaguucugccaaugaaauc

SEQ ID NO: 1751284 - RNA, 19 nt, Artificial Sequence
  Description of Artificial Sequence: Synthetic oligonucleotide
  Antisense strand to SEQ ID NO: 1751283
gauuucauuggcagaacuc

SEQ ID NO: 1751285 - RNA, 19 nt, Artificial Sequence
  Description of Artificial Sequence: Synthetic oligonucleotide
  Sense strand starting at position 807 of SEQ ID NO: 1562493
ucagaagccugagaauuuc

SEQ ID NO: 1751286 - RNA, 19 nt, Artificial Sequence
  Description of Artificial Sequence: Synthetic oligonucleotide
  Antisense strand to SEQ ID NO: 1751285
gaaauucucaggcuucuga

SEQ ID NO: 1751287 - RNA, 19 nt, Artificial Sequence
  Description of Artificial Sequence: Synthetic oligonucleotide
  Sense strand starting at position 969 of SEQ ID NO: 1562493
cuggacaucccuuguuagu

SEQ ID NO: 1751288 - RNA, 19 nt, Artificial Sequence
  Description of Artificial Sequence: Synthetic oligonucleotide
  Antisense strand to SEQ ID NO: 1751287
acuaacaagggauguccag

SEQ ID NO: 1751289 - RNA, 19 nt, Artificial Sequence
  Description of Artificial Sequence: Synthetic oligonucleotide
  Sense strand starting at position 979 of SEQ ID NO: 1562493
cuuguuaguucccucagga

SEQ ID NO: 1751290 - RNA, 19 nt, Artificial Sequence
  Description of Artificial Sequence: Synthetic oligonucleotide
  Antisense strand to SEQ ID NO: 1751289
uccugagggaacuaacaag

SEQ ID NO: 1751291 - RNA, 19 nt, Artificial Sequence
  Description of Artificial Sequence: Synthetic oligonucleotide
  Sense strand starting at position 1195 of SEQ ID NO: 1562493
aagcaaggagcuugaaaug

SEQ ID NO: 1751292 - RNA, 19 nt, Artificial Sequence
  Description of Artificial Sequence: Synthetic oligonucleotide
  Antisense strand to SEQ ID NO: 1751291
cauuucaagcuccuugcuu

SEQ ID NO: 1751293 - RNA, 19 nt, Artificial Sequence
  Description of Artificial Sequence: Synthetic oligonucleotide
  Sense strand starting at position 1205 of SEQ ID NO: 1562493
cuugaaauguucccugcuu

SEQ ID NO: 1751294 - RNA, 19 nt, Artificial Sequence
  Description of Artificial Sequence: Synthetic oligonucleotide
  Antisense strand to SEQ ID NO: 1751293
aagcagggaacauuucaag

SEQ ID NO: 1751295 - RNA, 19 nt, Artificial Sequence
  Description of Artificial Sequence: Synthetic oligonucleotide
  Sense strand starting at position 1206 of SEQ ID NO: 1562493
uugaaauguucccugcuuu

SEQ ID NO: 1751296 - RNA, 19 nt, Artificial Sequence
  Description of Artificial Sequence: Synthetic oligonucleotide
  Antisense strand to SEQ ID NO: 1751295
aaagcagggaacauuucaa

SEQ ID NO: 1751297 - RNA, 19 nt, Artificial Sequence
  Description of Artificial Sequence: Synthetic oligonucleotide
  Sense strand starting at position 1207 of SEQ ID NO: 1562493
ugaaauguucccugcuuua

SEQ ID NO: 1751298 - RNA, 19 nt, Artificial Sequence
  Description of Artificial Sequence: Synthetic oligonucleotide
  Antisense strand to SEQ ID NO: 1751297
uaaagcagggaacauuuca

SEQ ID NO: 1751299 - RNA, 19 nt, Artificial Sequence
  Description of Artificial Sequence: Synthetic oligonucleotide
  Sense strand starting at position 1332 of SEQ ID NO: 1562493
guaagaccuucccugauca

SEQ ID NO: 1751300 - RNA, 19 nt, Artificial Sequence
  Description of Artificial Sequence: Synthetic oligonucleotide
  Antisense strand to SEQ ID NO: 1751299
ugaucagggaaggucuuac

SEQ ID NO: 1751301 - RNA, 19 nt, Artificial Sequence
  Description of Artificial Sequence: Synthetic oligonucleotide
  Sense strand starting at position 1342 of SEQ ID NO: 1562493
cccugaucaucuuauggaa

SEQ ID NO: 1751302 - RNA, 19 nt, Artificial Sequence
  Description of Artificial Sequence: Synthetic oligonucleotide
  Antisense strand to SEQ ID NO: 1751301
uuccauaagaugaucaggg

SEQ ID NO: 1751303 - RNA, 19 nt, Artificial Sequence
  Description of Artificial Sequence: Synthetic oligonucleotide
  Sense strand starting at position 1553 of SEQ ID NO: 1562493
guaccuaucccguagcgaa

SEQ ID NO: 1751304 - RNA, 19 nt, Artificial Sequence
  Description of Artificial Sequence: Synthetic oligonucleotide
  Antisense strand to SEQ ID NO: 1751303
uucgcuacgggauagguac

SEQ ID NO: 1751305 - RNA, 19 nt, Artificial Sequence
  Description of Artificial Sequence: Synthetic oligonucleotide
  Sense strand starting at position 1637 of SEQ ID NO: 1562493
ucaggauuguauccaacac

SEQ ID NO: 1751306 - RNA, 19 nt, Artificial Sequence
  Description of Artificial Sequence: Synthetic oligonucleotide
  Antisense strand to SEQ ID NO: 1751305
guguuggauacaauccuga

SEQ ID NO: 1751307 - RNA, 19 nt, Artificial Sequence
  Description of Artificial Sequence: Synthetic oligonucleotide
  Sense strand starting at position 1699 of SEQ ID NO: 1562493
gugacuugaccuuguucua

SEQ ID NO: 1751308 - RNA, 19 nt, Artificial Sequence
  Description of Artificial Sequence: Synthetic oligonucleotide
  Antisense strand to SEQ ID NO: 1751307
uagaacaaggucaagucac

SEQ ID NO: 1751309 - RNA, 19 nt, Artificial Sequence
  Description of Artificial Sequence: Synthetic oligonucleotide
  Sense strand starting at position 1709 of SEQ ID NO: 1562493
cuuguucuagcagaaagac

SEQ ID NO: 1751310 - RNA, 19 nt, Artificial Sequence
  Description of Artificial Sequence: Synthetic oligonucleotide
  Antisense strand to SEQ ID NO: 1751309
gucuuucugcuagaacaag

SEQ ID NO: 1751311 - RNA, 19 nt, Artificial Sequence
  Description of Artificial Sequence: Synthetic oligonucleotide
  Sense strand starting at position 1813 of SEQ ID NO: 1562493
ucaguaagacccugaguuc

SEQ ID NO: 1751312 - RNA, 19 nt, Artificial Sequence
  Description of Artificial Sequence: Synthetic oligonucleotide
  Antisense strand to SEQ ID NO: 1751311
gaacucagggucuuacuga

SEQ ID NO: 1751313 - RNA, 19 nt, Artificial Sequence
  Description of Artificial Sequence: Synthetic oligonucleotide
  Sense strand starting at position 1820 of SEQ ID NO: 1562493
gacccugaguuccugacaa

SEQ ID NO: 1751314 - RNA, 19 nt, Artificial Sequence
  Description of Artificial Sequence: Synthetic oligonucleotide
  Antisense strand to SEQ ID NO: 1751313
uugucaggaacucaggguc

SEQ ID NO: 1751315 - RNA, 19 nt, Artificial Sequence
  Description of Artificial Sequence: Synthetic oligonucleotide
  Sense strand starting at position 1822 of SEQ ID NO: 1562493
cccugaguuccugacaauu

SEQ ID NO: 1751316 - RNA, 19 nt, Artificial Sequence
  Description of Artificial Sequence: Synthetic oligonucleotide
  Antisense strand to SEQ ID NO: 1751315
aauugucaggaacucaggg

SEQ ID NO: 1751317 - RNA, 19 nt, Artificial Sequence
  Description of Artificial Sequence: Synthetic oligonucleotide
  Sense strand starting at position 1876 of SEQ ID NO: 1562493
gcacacggccauuguaauu

SEQ ID NO: 1751318 - RNA, 19 nt, Artificial Sequence
  Description of Artificial Sequence: Synthetic oligonucleotide
  Antisense strand to SEQ ID NO: 1751317
aauuacaauggccgugugc

SEQ ID NO: 1751319 - RNA, 19 nt, Artificial Sequence
  Description of Artificial Sequence: Synthetic oligonucleotide
  Sense strand starting at position 2205 of SEQ ID NO: 1562493
ccuccaaagugucuaaauu

SEQ ID NO: 1751320 - RNA, 19 nt, Artificial Sequence
  Description of Artificial Sequence: Synthetic oligonucleotide
  Antisense strand to SEQ ID NO: 1751319
aauuuagacacuuuggagg

SEQ ID NO: 1751321 - RNA, 19 nt, Artificial Sequence
  Description of Artificial Sequence: Synthetic oligonucleotide
  Sense strand starting at position 2206 of SEQ ID NO: 1562493
cuccaaagugucuaaauug

SEQ ID NO: 1751322 - RNA, 19 nt, Artificial Sequence
  Description of Artificial Sequence: Synthetic oligonucleotide
  Antisense strand to SEQ ID NO: 1751321
caauuuagacacuuuggag

SEQ ID NO: 1751323 - RNA, 19 nt, Artificial Sequence
  Description of Artificial Sequence: Synthetic oligonucleotide
  Sense strand starting at position 2214 of SEQ ID NO: 1562493
ugucuaaauuguguggauu

SEQ ID NO: 1751324 - RNA, 19 nt, Artificial Sequence
  Description of Artificial Sequence: Synthetic oligonucleotide
  Antisense strand to SEQ ID NO: 1751323
aauccacacaauuuagaca

SEQ ID NO: 1751325 - RNA, 19 nt, Artificial Sequence
  Description of Artificial Sequence: Synthetic oligonucleotide
  Sense strand starting at position 2215 of SEQ ID NO: 1562493
gucuaaauuguguggauuu

SEQ ID NO: 1751326 - RNA, 19 nt, Artificial Sequence
  Description of Artificial Sequence: Synthetic oligonucleotide
  Antisense strand to SEQ ID NO: 1751325
aaauccacacaauuuagac

SEQ ID NO: 1751327 - RNA, 19 nt, Artificial Sequence
  Description of Artificial Sequence: Synthetic oligonucleotide
  Sense strand starting at position 2343 of SEQ ID NO: 1562493
uccuaaaggucugaaagau

SEQ ID NO: 1751328 - RNA, 19 nt, Artificial Sequence
  Description of Artificial Sequence: Synthetic oligonucleotide
  Antisense strand to SEQ ID NO: 1751327
aucuuucagaccuuuagga

SEQ ID NO: 1751329 - RNA, 19 nt, Artificial Sequence
  Description of Artificial Sequence: Synthetic oligonucleotide
  Sense strand starting at position 2482 of SEQ ID NO: 1562493
cgucguccuauuuaugaac

SEQ ID NO: 1751330 - RNA, 19 nt, Artificial Sequence
  Description of Artificial Sequence: Synthetic oligonucleotide
  Antisense strand to SEQ ID NO: 1751329
guucauaaauaggacgacg

SEQ ID NO: 1751331 - RNA, 19 nt, Artificial Sequence
  Description of Artificial Sequence: Synthetic oligonucleotide
  Sense strand starting at position 2485 of SEQ ID NO: 1562493
cguccuauuuaugaacacu

SEQ ID NO: 1751332 - RNA, 19 nt, Artificial Sequence
  Description of Artificial Sequence: Synthetic oligonucleotide
  Antisense strand to SEQ ID NO: 1751331
aguguucauaaauaggacg

SEQ ID NO: 1751333 - RNA, 19 nt, Artificial Sequence
  Description of Artificial Sequence: Synthetic oligonucleotide
  Sense strand starting at position 3511 of SEQ ID NO: 1562493
acggaauucucuucacgug

SEQ ID NO: 1751334 - RNA, 19 nt, Artificial Sequence
  Description of Artificial Sequence: Synthetic oligonucleotide
  Antisense strand to SEQ ID NO: 1751333
cacgugaagagaauuccgu

SEQ ID NO: 1751335 - RNA, 19 nt, Artificial Sequence
  Description of Artificial Sequence: Synthetic oligonucleotide
  Sense strand starting at position 3512 of SEQ ID NO: 1562493
cggaauucucuucacguga

SEQ ID NO: 1751336 - RNA, 19 nt, Artificial Sequence
  Description of Artificial Sequence: Synthetic oligonucleotide
  Antisense strand to SEQ ID NO: 1751335
ucacgugaagagaauuccg

SEQ ID NO: 1751337 - RNA, 19 nt, Artificial Sequence
  Description of Artificial Sequence: Synthetic oligonucleotide
  Sense strand starting at position 3796 of SEQ ID NO: 1562493
ugguuagaugcuuaccgua

SEQ ID NO: 1751338 - RNA, 19 nt, Artificial Sequence
  Description of Artificial Sequence: Synthetic oligonucleotide
  Antisense strand to SEQ ID NO: 1751337
uacgguaagcaucuaacca

SEQ ID NO: 1751339 - RNA, 19 nt, Artificial Sequence
  Description of Artificial Sequence: Synthetic oligonucleotide
  Sense strand starting at position 3798 of SEQ ID NO: 1562493
guuagaugcuuaccguaua

SEQ ID NO: 1751340 - RNA, 19 nt, Artificial Sequence
  Description of Artificial Sequence: Synthetic oligonucleotide
  Antisense strand to SEQ ID NO: 1751339
uauacgguaagcaucuaac

SEQ ID NO: 1751341 - RNA, 19 nt, Artificial Sequence
  Description of Artificial Sequence: Synthetic oligonucleotide
  Sense strand starting at position 3801 of SEQ ID NO: 1562493
agaugcuuaccguauauua

SEQ ID NO: 1751342 - RNA, 19 nt, Artificial Sequence
  Description of Artificial Sequence: Synthetic oligonucleotide
  Antisense strand to SEQ ID NO: 1751341
uaauauacgguaagcaucu

SEQ ID NO: 1751343 - RNA, 19 nt, Artificial Sequence
  Description of Artificial Sequence: Synthetic oligonucleotide
  Sense strand starting at position 3803 of SEQ ID NO: 1562493
augcuuaccguauauuauc

SEQ ID NO: 1751344 - RNA, 19 nt, Artificial Sequence
  Description of Artificial Sequence: Synthetic oligonucleotide
  Antisense strand to SEQ ID NO: 1751343
gauaauauacgguaagcau

SEQ ID NO: 1751345 - RNA, 19 nt, Artificial Sequence
  Description of Artificial Sequence: Synthetic oligonucleotide
  Sense strand starting at position 3831 of SEQ ID NO: 1562493
cgcaauaaagacugaacua

SEQ ID NO: 1751346 - RNA, 19 nt, Artificial Sequence
  Description of Artificial Sequence: Synthetic oligonucleotide
  Antisense strand to SEQ ID NO: 1751345
uaguucagucuuuauugcg

SEQ ID NO: 1751347 - RNA, 19 nt, Artificial Sequence
  Description of Artificial Sequence: Synthetic oligonucleotide
  Sense strand starting at position 3884 of SEQ ID NO: 1562493
gcguauuagucacuauacc

SEQ ID NO: 1751348 - RNA, 19 nt, Artificial Sequence
  Description of Artificial Sequence: Synthetic oligonucleotide
  Antisense strand to SEQ ID NO: 1751347
gguauagugacuaauacgc

SEQ ID NO: 1751349 - RNA, 19 nt, Artificial Sequence
  Description of Artificial Sequence: Synthetic oligonucleotide
  Sense strand starting at position 3885 of SEQ ID NO: 1562493
cguauuagucacuauacca

SEQ ID NO: 1751350 - RNA, 19 nt, Artificial Sequence
  Description of Artificial Sequence: Synthetic oligonucleotide
  Antisense strand to SEQ ID NO: 1751349
ugguauagugacuaauacg

SEQ ID NO: 1751351 - RNA, 19 nt, Artificial Sequence
  Description of Artificial Sequence: Synthetic oligonucleotide
  Sense strand starting at position 154 of SEQ ID NO: 1562494
gcugaaguuuauucugacu

SEQ ID NO: 1751352 - RNA, 19 nt, Artificial Sequence
  Description of Artificial Sequence: Synthetic oligonucleotide
  Antisense strand to SEQ ID NO: 1751351
agucagaauaaacuucagc

SEQ ID NO: 1751353 - RNA, 19 nt, Artificial Sequence
  Description of Artificial Sequence: Synthetic oligonucleotide
  Sense strand starting at position 163 of SEQ ID NO: 1562494
uauucugacucguuugaag

SEQ ID NO: 1751354 - RNA, 19 nt, Artificial Sequence
  Description of Artificial Sequence: Synthetic oligonucleotide
  Antisense strand to SEQ ID NO: 1751353
cuucaaacgagucagaaua

SEQ ID NO: 1751355 - RNA, 19 nt, Artificial Sequence
  Description of Artificial Sequence: Synthetic oligonucleotide
  Sense strand starting at position 286 of SEQ ID NO: 1562494
gcauaugacccuugacuag

SEQ ID NO: 1751356 - RNA, 19 nt, Artificial Sequence
  Description of Artificial Sequence: Synthetic oligonucleotide
  Antisense strand to SEQ ID NO: 1751355
cuagucaagggucauaugc

SEQ ID NO: 1751357 - RNA, 19 nt, Artificial Sequence
  Description of Artificial Sequence: Synthetic oligonucleotide
  Sense strand starting at position 745 of SEQ ID NO: 1562494
guaagaagguaugauuuau

SEQ ID NO: 1751358 - RNA, 19 nt, Artificial Sequence
  Description of Artificial Sequence: Synthetic oligonucleotide
  Antisense strand to SEQ ID NO: 1751357
auaaaucauaccuucuuac

SEQ ID NO: 1751359 - RNA, 19 nt, Artificial Sequence
  Description of Artificial Sequence: Synthetic oligonucleotide
  Sense strand starting at position 771 of SEQ ID NO: 1562494
aucgaaucagcagaacagu

SEQ ID NO: 1751360 - RNA, 19 nt, Artificial Sequence
  Description of Artificial Sequence: Synthetic oligonucleotide
  Antisense strand to SEQ ID NO: 1751359
acuguucugcugauucgau

SEQ ID NO: 1751361 - RNA, 19 nt, Artificial Sequence
  Description of Artificial Sequence: Synthetic oligonucleotide
  Sense strand starting at position 855 of SEQ ID NO: 1562494
ggagguacaguuugguaau

SEQ ID NO: 1751362 - RNA, 19 nt, Artificial Sequence
  Description of Artificial Sequence: Synthetic oligonucleotide
  Antisense strand to SEQ ID NO: 1751361
auuaccaaacuguaccucc

SEQ ID NO: 1751363 - RNA, 19 nt, Artificial Sequence
  Description of Artificial Sequence: Synthetic oligonucleotide
  Sense strand starting at position 1275 of SEQ ID NO: 1562494
aggagauguccugagcucu

SEQ ID NO: 1751364 - RNA, 19 nt, Artificial Sequence
  Description of Artificial Sequence: Synthetic oligonucleotide
  Antisense strand to SEQ ID NO: 1751363
agagcucaggacaucuccu

SEQ ID NO: 1751365 - RNA, 19 nt, Artificial Sequence
  Description of Artificial Sequence: Synthetic oligonucleotide
  Sense strand starting at position 1418 of SEQ ID NO: 1562494
gggaguuuaacugguggac

SEQ ID NO: 1751366 - RNA, 19 nt, Artificial Sequence
  Description of Artificial Sequence: Synthetic oligonucleotide
  Antisense strand to SEQ ID NO: 1751365
guccaccaguuaaacuccc

SEQ ID NO: 1751367 - RNA, 19 nt, Artificial Sequence
  Description of Artificial Sequence: Synthetic oligonucleotide
  Sense strand starting at position 1421 of SEQ ID NO: 1562494
aguuuaacugguggacagu

SEQ ID NO: 1751368 - RNA, 19 nt, Artificial Sequence
  Description of Artificial Sequence: Synthetic oligonucleotide
  Antisense strand to SEQ ID NO: 1751367
acuguccaccaguuaaacu

SEQ ID NO: 1751369 - RNA, 19 nt, Artificial Sequence
  Description of Artificial Sequence: Synthetic oligonucleotide
  Sense strand starting at position 1682 of SEQ ID NO: 1562494
aggagagugucuucaggaa

SEQ ID NO: 1751370 - RNA, 19 nt, Artificial Sequence
  Description of Artificial Sequence: Synthetic oligonucleotide
  Antisense strand to SEQ ID NO: 1751369
uuccugaagacacucuccu

SEQ ID NO: 1751371 - RNA, 19 nt, Artificial Sequence
  Description of Artificial Sequence: Synthetic oligonucleotide
  Sense strand starting at position 1863 of SEQ ID NO: 1562494
uagggacauuucugagacu

SEQ ID NO: 1751372 - RNA, 19 nt, Artificial Sequence
  Description of Artificial Sequence: Synthetic oligonucleotide
  Antisense strand to SEQ ID NO: 1751371
agucucagaaaugucccua

SEQ ID NO: 1751373 - RNA, 19 nt, Artificial Sequence
  Description of Artificial Sequence: Synthetic oligonucleotide
  Sense strand starting at position 1864 of SEQ ID NO: 1562494
agggacauuucugagacuu

SEQ ID NO: 1751374 - RNA, 19 nt, Artificial Sequence
  Description of Artificial Sequence: Synthetic oligonucleotide
  Antisense strand to SEQ ID NO: 1751373
aagucucagaaaugucccu

SEQ ID NO: 1751375 - RNA, 19 nt, Artificial Sequence
  Description of Artificial Sequence: Synthetic oligonucleotide
  Sense strand starting at position 1876 of SEQ ID NO: 1562494
gagacuuucccacgaggga

SEQ ID NO: 1751376 - RNA, 19 nt, Artificial Sequence
  Description of Artificial Sequence: Synthetic oligonucleotide
  Antisense strand to SEQ ID NO: 1751375
ucccucgugggaaagucuc

SEQ ID NO: 1751377 - RNA, 19 nt, Artificial Sequence
  Description of Artificial Sequence: Synthetic oligonucleotide
  Sense strand starting at position 2014 of SEQ ID NO: 1562494
cuucguacauuuggaauuu

SEQ ID NO: 1751378 - RNA, 19 nt, Artificial Sequence
  Description of Artificial Sequence: Synthetic oligonucleotide
  Antisense strand to SEQ ID NO: 1751377
aaauuccaaauguacgaag

SEQ ID NO: 1751379 - RNA, 19 nt, Artificial Sequence
  Description of Artificial Sequence: Synthetic oligonucleotide
  Sense strand starting at position 2100 of SEQ ID NO: 1562494
agagaugacuuugaagaau

SEQ ID NO: 1751380 - RNA, 19 nt, Artificial Sequence
  Description of Artificial Sequence: Synthetic oligonucleotide
  Antisense strand to SEQ ID NO: 1751379
auucuucaaagucaucucu

SEQ ID NO: 1751381 - RNA, 19 nt, Artificial Sequence
  Description of Artificial Sequence: Synthetic oligonucleotide
  Sense strand starting at position 2236 of SEQ ID NO: 1562494
acugauaccuaguuauuau

SEQ ID NO: 1751382 - RNA, 19 nt, Artificial Sequence
  Description of Artificial Sequence: Synthetic oligonucleotide
  Antisense strand to SEQ ID NO: 1751381
auaauaacuagguaucagu

SEQ ID NO: 1751383 - RNA, 19 nt, Artificial Sequence
  Description of Artificial Sequence: Synthetic oligonucleotide
  Sense strand starting at position 2354 of SEQ ID NO: 1562494
gaaugugcucugcaaucua

SEQ ID NO: 1751384 - RNA, 19 nt, Artificial Sequence
  Description of Artificial Sequence: Synthetic oligonucleotide
  Antisense strand to SEQ ID NO: 1751383
uagauugcagagcacauuc

SEQ ID NO: 1751385 - RNA, 19 nt, Artificial Sequence
  Description of Artificial Sequence: Synthetic oligonucleotide
  Sense strand starting at position 2463 of SEQ ID NO: 1562494
ccaauauggcuuuggauau

SEQ ID NO: 1751386 - RNA, 19 nt, Artificial Sequence
  Description of Artificial Sequence: Synthetic oligonucleotide
  Antisense strand to SEQ ID NO: 1751385
auauccaaagccauauugg

SEQ ID NO: 1751387 - RNA, 19 nt, Artificial Sequence
  Description of Artificial Sequence: Synthetic oligonucleotide
  Sense strand starting at position 2469 of SEQ ID NO: 1562494
uggcuuuggauauaaagca

SEQ ID NO: 1751388 - RNA, 19 nt, Artificial Sequence
  Description of Artificial Sequence: Synthetic oligonucleotide
  Antisense strand to SEQ ID NO: 1751387
ugcuuuauauccaaagcca

SEQ ID NO: 1751389 - RNA, 19 nt, Artificial Sequence
  Description of Artificial Sequence: Synthetic oligonucleotide
  Sense strand starting at position 2563 of SEQ ID NO: 1562494
cucaauuagccggauagcu

SEQ ID NO: 1751390 - RNA, 19 nt, Artificial Sequence
  Description of Artificial Sequence: Synthetic oligonucleotide
  Antisense strand to SEQ ID NO: 1751389
agcuauccggcuaauugag

SEQ ID NO: 1751391 - RNA, 19 nt, Artificial Sequence
  Description of Artificial Sequence: Synthetic oligonucleotide
  Sense strand starting at position 2573 of SEQ ID NO: 1562494
cggauagcugcugaugaaa

SEQ ID NO: 1751392 - RNA, 19 nt, Artificial Sequence
  Description of Artificial Sequence: Synthetic oligonucleotide
  Antisense strand to SEQ ID NO: 1751391
uuucaucagcagcuauccg

SEQ ID NO: 1751393 - RNA, 19 nt, Artificial Sequence
  Description of Artificial Sequence: Synthetic oligonucleotide
  Sense strand starting at position 2745 of SEQ ID NO: 1562494
uagagaaaucugggagcuu

SEQ ID NO: 1751394 - RNA, 19 nt, Artificial Sequence
  Description of Artificial Sequence: Synthetic oligonucleotide
  Antisense strand to SEQ ID NO: 1751393
aagcucccagauuucucua

SEQ ID NO: 1751395 - RNA, 19 nt, Artificial Sequence
  Description of Artificial Sequence: Synthetic oligonucleotide
  Sense strand starting at position 2765 of SEQ ID NO: 1562494
aggccaggcccucauaauu

SEQ ID NO: 1751396 - RNA, 19 nt, Artificial Sequence
  Description of Artificial Sequence: Synthetic oligonucleotide
  Antisense strand to SEQ ID NO: 1751395
aauuaugagggccuggccu

SEQ ID NO: 1751397 - RNA, 19 nt, Artificial Sequence
  Description of Artificial Sequence: Synthetic oligonucleotide
  Sense strand starting at position 2813 of SEQ ID NO: 1562494
uuuauuuccuaagacgaaa

SEQ ID NO: 1751398 - RNA, 19 nt, Artificial Sequence
  Description of Artificial Sequence: Synthetic oligonucleotide
  Antisense strand to SEQ ID NO: 1751397
uuucgucuuaggaaauaaa

SEQ ID NO: 1751399 - RNA, 19 nt, Artificial Sequence
  Description of Artificial Sequence: Synthetic oligonucleotide
  Sense strand starting at position 2950 of SEQ ID NO: 1562494
cucgccuuccuagugaguu

SEQ ID NO: 1751400 - RNA, 19 nt, Artificial Sequence
  Description of Artificial Sequence: Synthetic oligonucleotide
  Antisense strand to SEQ ID NO: 1751399
aacucacuaggaaggcgag

SEQ ID NO: 1751401 - RNA, 19 nt, Artificial Sequence
  Description of Artificial Sequence: Synthetic oligonucleotide
  Sense strand starting at position 3021 of SEQ ID NO: 1562494
ucaguuaauuccucaggca

SEQ ID NO: 1751402 - RNA, 19 nt, Artificial Sequence
  Description of Artificial Sequence: Synthetic oligonucleotide
  Antisense strand to SEQ ID NO: 1751401
ugccugaggaauuaacuga

SEQ ID NO: 1751403 - RNA, 19 nt, Artificial Sequence
  Description of Artificial Sequence: Synthetic oligonucleotide
  Sense strand starting at position 3143 of SEQ ID NO: 1562494
uuagcauaaugcuuugaaa

SEQ ID NO: 1751404 - RNA, 19 nt, Artificial Sequence
  Description of Artificial Sequence: Synthetic oligonucleotide
  Antisense strand to SEQ ID NO: 1751403
uuucaaagcauuaugcuaa

SEQ ID NO: 1751405 - RNA, 19 nt, Artificial Sequence
  Description of Artificial Sequence: Synthetic oligonucleotide
  Sense strand starting at position 3334 of SEQ ID NO: 1562494
ugagauuccuuuccaagag

SEQ ID NO: 1751406 - RNA, 19 nt, Artificial Sequence
  Description of Artificial Sequence: Synthetic oligonucleotide
  Antisense strand to SEQ ID NO: 1751405
cucuuggaaaggaaucuca

SEQ ID NO: 1751407 - RNA, 19 nt, Artificial Sequence
  Description of Artificial Sequence: Synthetic oligonucleotide
  Sense strand starting at position 3369 of SEQ ID NO: 1562494
ugagcuggugcuuauaaag

SEQ ID NO: 1751408 - RNA, 19 nt, Artificial Sequence
  Description of Artificial Sequence: Synthetic oligonucleotide
  Antisense strand to SEQ ID NO: 1751407
cuuuauaagcaccagcuca

SEQ ID NO: 1751409 - RNA, 19 nt, Artificial Sequence
  Description of Artificial Sequence: Synthetic oligonucleotide
  Sense strand starting at position 3437 of SEQ ID NO: 1562494
acagcauccuguuuggaca

SEQ ID NO: 1751410 - RNA, 19 nt, Artificial Sequence
  Description of Artificial Sequence: Synthetic oligonucleotide
  Antisense strand to SEQ ID NO: 1751409
uguccaaacaggaugcugu

SEQ ID NO: 1751411 - RNA, 19 nt, Artificial Sequence
  Description of Artificial Sequence: Synthetic oligonucleotide
  Sense strand starting at position 3456 of SEQ ID NO: 1562494
gcaaauuccugagucaagu

SEQ ID NO: 1751412 - RNA, 19 nt, Artificial Sequence
  Description of Artificial Sequence: Synthetic oligonucleotide
  Antisense strand to SEQ ID NO: 1751411
acuugacucaggaauuugc

SEQ ID NO: 1751413 - RNA, 19 nt, Artificial Sequence
  Description of Artificial Sequence: Synthetic oligonucleotide
  Sense strand starting at position 3499 of SEQ ID NO: 1562494
gacaaaguguaaguuucua

SEQ ID NO: 1751414 - RNA, 19 nt, Artificial Sequence
  Description of Artificial Sequence: Synthetic oligonucleotide
  Antisense strand to SEQ ID NO: 1751413
uagaaacuuacacuuuguc

SEQ ID NO: 1751415 - RNA, 19 nt, Artificial Sequence
  Description of Artificial Sequence: Synthetic oligonucleotide
  Sense strand starting at position 3531 of SEQ ID NO: 1562494
acgucaacaccuuagucau

SEQ ID NO: 1751416 - RNA, 19 nt, Artificial Sequence
  Description of Artificial Sequence: Synthetic oligonucleotide
  Antisense strand to SEQ ID NO: 1751415
augacuaagguguugacgu

SEQ ID NO: 1751417 - RNA, 19 nt, Artificial Sequence
  Description of Artificial Sequence: Synthetic oligonucleotide
  Sense strand starting at position 3700 of SEQ ID NO: 1562494
ggacgacccuucuuaagau

SEQ ID NO: 1751418 - RNA, 19 nt, Artificial Sequence
  Description of Artificial Sequence: Synthetic oligonucleotide
  Antisense strand to SEQ ID NO: 1751417
aucuuaagaagggucgucc

SEQ ID NO: 1751419 - RNA, 19 nt, Artificial Sequence
  Description of Artificial Sequence: Synthetic oligonucleotide
  Sense strand starting at position 3741 of SEQ ID NO: 1562494
ggaugaaggucuguggcaa

SEQ ID NO: 1751420 - RNA, 19 nt, Artificial Sequence
  Description of Artificial Sequence: Synthetic oligonucleotide
  Antisense strand to SEQ ID NO: 1751419
uugccacagaccuucaucc

SEQ ID NO: 1751421 - RNA, 19 nt, Artificial Sequence
  Description of Artificial Sequence: Synthetic oligonucleotide
  Sense strand starting at position 3742 of SEQ ID NO: 1562494
gaugaaggucuguggcaau

SEQ ID NO: 1751422 - RNA, 19 nt, Artificial Sequence
  Description of Artificial Sequence: Synthetic oligonucleotide
  Antisense strand to SEQ ID NO: 1751421
auugccacagaccuucauc

SEQ ID NO: 1751423 - RNA, 19 nt, Artificial Sequence
  Description of Artificial Sequence: Synthetic oligonucleotide
  Sense strand starting at position 3828 of SEQ ID NO: 1562494
auacuugaucccuggaauu

SEQ ID NO: 1751424 - RNA, 19 nt, Artificial Sequence
  Description of Artificial Sequence: Synthetic oligonucleotide
  Antisense strand to SEQ ID NO: 1751423
aauuccagggaucaaguau

SEQ ID NO: 1751425 - RNA, 19 nt, Artificial Sequence
  Description of Artificial Sequence: Synthetic oligonucleotide
  Sense strand starting at position 3896 of SEQ ID NO: 1562494
uuugaaaucugucuugguc

SEQ ID NO: 1751426 - RNA, 19 nt, Artificial Sequence
  Description of Artificial Sequence: Synthetic oligonucleotide
  Antisense strand to SEQ ID NO: 1751425
gaccaagacagauuucaaa

SEQ ID NO: 1751427 - RNA, 19 nt, Artificial Sequence
  Description of Artificial Sequence: Synthetic oligonucleotide
  Sense strand starting at position 3899 of SEQ ID NO: 1562494
gaaaucugucuuggucaau

SEQ ID NO: 1751428 - RNA, 19 nt, Artificial Sequence
  Description of Artificial Sequence: Synthetic oligonucleotide
  Antisense strand to SEQ ID NO: 1751427
auugaccaagacagauuuc

SEQ ID NO: 1751429 - RNA, 19 nt, Artificial Sequence
  Description of Artificial Sequence: Synthetic oligonucleotide
  Sense strand starting at position 3902 of SEQ ID NO: 1562494
aucugucuuggucaauaaa

SEQ ID NO: 1751430 - RNA, 19 nt, Artificial Sequence
  Description of Artificial Sequence: Synthetic oligonucleotide
  Antisense strand to SEQ ID NO: 1751429
uuuauugaccaagacagau

SEQ ID NO: 1751431 - RNA, 19 nt, Artificial Sequence
  Description of Artificial Sequence: Synthetic oligonucleotide
  Sense strand starting at position 127 of SEQ ID NO: 1562495
ggacuugcuuuacugagga

SEQ ID NO: 1751432 - RNA, 19 nt, Artificial Sequence
  Description of Artificial Sequence: Synthetic oligonucleotide
  Antisense strand to SEQ ID NO: 1751431
uccucaguaaagcaagucc

SEQ ID NO: 1751433 - RNA, 19 nt, Artificial Sequence
  Description of Artificial Sequence: Synthetic oligonucleotide
  Sense strand starting at position 437 of SEQ ID NO: 1562495
ggcugauuugcaggcaucu

SEQ ID NO: 1751434 - RNA, 19 nt, Artificial Sequence
  Description of Artificial Sequence: Synthetic oligonucleotide
  Antisense strand to SEQ ID NO: 1751433
agaugccugcaaaucagcc

SEQ ID NO: 1751435 - RNA, 19 nt, Artificial Sequence
  Description of Artificial Sequence: Synthetic oligonucleotide
  Sense strand starting at position 447 of SEQ ID NO: 1562495
caggcaucuucugcagacu

SEQ ID NO: 1751436 - RNA, 19 nt, Artificial Sequence
  Description of Artificial Sequence: Synthetic oligonucleotide
  Antisense strand to SEQ ID NO: 1751435
agucugcagaagaugccug

SEQ ID NO: 1751437 - RNA, 19 nt, Artificial Sequence
  Description of Artificial Sequence: Synthetic oligonucleotide
  Sense strand starting at position 545 of SEQ ID NO: 1562495
gcuccaacccuugagcaaa

SEQ ID NO: 1751438 - RNA, 19 nt, Artificial Sequence
  Description of Artificial Sequence: Synthetic oligonucleotide
  Antisense strand to SEQ ID NO: 1751437
uuugcucaaggguuggagc

SEQ ID NO: 1751439 - RNA, 19 nt, Artificial Sequence
  Description of Artificial Sequence: Synthetic oligonucleotide
  Sense strand starting at position 743 of SEQ ID NO: 1562495
aagugagacgcugaacauu

SEQ ID NO: 1751440 - RNA, 19 nt, Artificial Sequence
  Description of Artificial Sequence: Synthetic oligonucleotide
  Antisense strand to SEQ ID NO: 1751439
aauguucagcgucucacuu

SEQ ID NO: 1751441 - RNA, 19 nt, Artificial Sequence
  Description of Artificial Sequence: Synthetic oligonucleotide
  Sense strand starting at position 776 of SEQ ID NO: 1562495
ugucuuucucaaggugaag

SEQ ID NO: 1751442 - RNA, 19 nt, Artificial Sequence
  Description of Artificial Sequence: Synthetic oligonucleotide
  Antisense strand to SEQ ID NO: 1751441
cuucaccuugagaaagaca

SEQ ID NO: 1751443 - RNA, 19 nt, Artificial Sequence
  Description of Artificial Sequence: Synthetic oligonucleotide
  Sense strand starting at position 799 of SEQ ID NO: 1562495
agaguuuccggucagcaua

SEQ ID NO: 1751444 - RNA, 19 nt, Artificial Sequence
  Description of Artificial Sequence: Synthetic oligonucleotide
  Antisense strand to SEQ ID NO: 1751443
uaugcugaccggaaacucu

SEQ ID NO: 1751445 - RNA, 19 nt, Artificial Sequence
  Description of Artificial Sequence: Synthetic oligonucleotide
  Sense strand starting at position 802 of SEQ ID NO: 1562495
guuuccggucagcauauaa

SEQ ID NO: 1751446 - RNA, 19 nt, Artificial Sequence
  Description of Artificial Sequence: Synthetic oligonucleotide
  Antisense strand to SEQ ID NO: 1751445
uuauaugcugaccggaaac

SEQ ID NO: 1751447 - RNA, 19 nt, Artificial Sequence
  Description of Artificial Sequence: Synthetic oligonucleotide
  Sense strand starting at position 984 of SEQ ID NO: 1562495
gcugaaguuuauucugacu

SEQ ID NO: 1751448 - RNA, 19 nt, Artificial Sequence
  Description of Artificial Sequence: Synthetic oligonucleotide
  Antisense strand to SEQ ID NO: 1751447
agucagaauaaacuucagc

SEQ ID NO: 1751449 - RNA, 19 nt, Artificial Sequence
  Description of Artificial Sequence: Synthetic oligonucleotide
  Sense strand starting at position 993 of SEQ ID NO: 1562495
uauucugacucguuugaag

SEQ ID NO: 1751450 - RNA, 19 nt, Artificial Sequence
  Description of Artificial Sequence: Synthetic oligonucleotide
  Antisense strand to SEQ ID NO: 1751449
cuucaaacgagucagaaua

SEQ ID NO: 1751451 - RNA, 19 nt, Artificial Sequence
  Description of Artificial Sequence: Synthetic oligonucleotide
  Sense strand starting at position 1028 of SEQ ID NO: 1562495
aggugauguccuugucaua

SEQ ID NO: 1751452 - RNA, 19 nt, Artificial Sequence
  Description of Artificial Sequence: Synthetic oligonucleotide
  Antisense strand to SEQ ID NO: 1751451
uaugacaaggacaucaccu

SEQ ID NO: 1751453 - RNA, 19 nt, Artificial Sequence
  Description of Artificial Sequence: Synthetic oligonucleotide
  Sense strand starting at position 1116 of SEQ ID NO: 1562495
gcauaugacccuugacuag

SEQ ID NO: 1751454 - RNA, 19 nt, Artificial Sequence
  Description of Artificial Sequence: Synthetic oligonucleotide
  Antisense strand to SEQ ID NO: 1751453
cuagucaagggucauaugc

SEQ ID NO: 1751455 - RNA, 19 nt, Artificial Sequence
  Description of Artificial Sequence: Synthetic oligonucleotide
  Sense strand starting at position 1575 of SEQ ID NO: 1562495
guaagaagguaugauuuau

SEQ ID NO: 1751456 - RNA, 19 nt, Artificial Sequence
  Description of Artificial Sequence: Synthetic oligonucleotide
  Antisense strand to SEQ ID NO: 1751455
auaaaucauaccuucuuac

SEQ ID NO: 1751457 - RNA, 19 nt, Artificial Sequence
  Description of Artificial Sequence: Synthetic oligonucleotide
  Sense strand starting at position 1601 of SEQ ID NO: 1562495
aucgaaucagcagaacagu

SEQ ID NO: 1751458 - RNA, 19 nt, Artificial Sequence
  Description of Artificial Sequence: Synthetic oligonucleotide
  Antisense strand to SEQ ID NO: 1751457
acuguucugcugauucgau

SEQ ID NO: 1751459 - RNA, 19 nt, Artificial Sequence
  Description of Artificial Sequence: Synthetic oligonucleotide
  Sense strand starting at position 1685 of SEQ ID NO: 1562495
ggagguacaguuugguaau

SEQ ID NO: 1751460 - RNA, 19 nt, Artificial Sequence
  Description of Artificial Sequence: Synthetic oligonucleotide
  Antisense strand to SEQ ID NO: 1751459
auuaccaaacuguaccucc

SEQ ID NO: 1751461 - RNA, 19 nt, Artificial Sequence
  Description of Artificial Sequence: Synthetic oligonucleotide
  Sense strand starting at position 1814 of SEQ ID NO: 1562495
ggcaguguugcauauauca

SEQ ID NO: 1751462 - RNA, 19 nt, Artificial Sequence
  Description of Artificial Sequence: Synthetic oligonucleotide
  Antisense strand to SEQ ID NO: 1751461
ugauauaugcaacacugcc

SEQ ID NO: 1751463 - RNA, 19 nt, Artificial Sequence
  Description of Artificial Sequence: Synthetic oligonucleotide
  Sense strand starting at position 2105 of SEQ ID NO: 1562495
aggagauguccugagcucu

SEQ ID NO: 1751464 - RNA, 19 nt, Artificial Sequence
  Description of Artificial Sequence: Synthetic oligonucleotide
  Antisense strand to SEQ ID NO: 1751463
agagcucaggacaucuccu

SEQ ID NO: 1751465 - RNA, 19 nt, Artificial Sequence
  Description of Artificial Sequence: Synthetic oligonucleotide
  Sense strand starting at position 2248 of SEQ ID NO: 1562495
gggaguuuaacugguggac

SEQ ID NO: 1751466 - RNA, 19 nt, Artificial Sequence
  Description of Artificial Sequence: Synthetic oligonucleotide
  Antisense strand to SEQ ID NO: 1751465
guccaccaguuaaacuccc

SEQ ID NO: 1751467 - RNA, 19 nt, Artificial Sequence
  Description of Artificial Sequence: Synthetic oligonucleotide
  Sense strand starting at position 2251 of SEQ ID NO: 1562495
aguuuaacugguggacagu

SEQ ID NO: 1751468 - RNA, 19 nt, Artificial Sequence
  Description of Artificial Sequence: Synthetic oligonucleotide
  Antisense strand to SEQ ID NO: 1751467
acuguccaccaguuaaacu

SEQ ID NO: 1751469 - RNA, 19 nt, Artificial Sequence
  Description of Artificial Sequence: Synthetic oligonucleotide
  Sense strand starting at position 2512 of SEQ ID NO: 1562495
aggagagugucuucaggaa

SEQ ID NO: 1751470 - RNA, 19 nt, Artificial Sequence
  Description of Artificial Sequence: Synthetic oligonucleotide
  Antisense strand to SEQ ID NO: 1751469
uuccugaagacacucuccu

SEQ ID NO: 1751471 - RNA, 19 nt, Artificial Sequence
  Description of Artificial Sequence: Synthetic oligonucleotide
  Sense strand starting at position 2693 of SEQ ID NO: 1562495
uagggacauuucugagacu

SEQ ID NO: 1751472 - RNA, 19 nt, Artificial Sequence
  Description of Artificial Sequence: Synthetic oligonucleotide
  Antisense strand to SEQ ID NO: 1751471
agucucagaaaugucccua

SEQ ID NO: 1751473 - RNA, 19 nt, Artificial Sequence
  Description of Artificial Sequence: Synthetic oligonucleotide
  Sense strand starting at position 2694 of SEQ ID NO: 1562495
agggacauuucugagacuu

SEQ ID NO: 1751474 - RNA, 19 nt, Artificial Sequence
  Description of Artificial Sequence: Synthetic oligonucleotide
  Antisense strand to SEQ ID NO: 1751473
aagucucagaaaugucccu

SEQ ID NO: 1751475 - RNA, 19 nt, Artificial Sequence
  Description of Artificial Sequence: Synthetic oligonucleotide
  Sense strand starting at position 2706 of SEQ ID NO: 1562495
gagacuuucccacgaggga

SEQ ID NO: 1751476 - RNA, 19 nt, Artificial Sequence
  Description of Artificial Sequence: Synthetic oligonucleotide
  Antisense strand to SEQ ID NO: 1751475
ucccucgugggaaagucuc

SEQ ID NO: 1751477 - RNA, 19 nt, Artificial Sequence
  Description of Artificial Sequence: Synthetic oligonucleotide
  Sense strand starting at position 2844 of SEQ ID NO: 1562495
cuucguacauuuggaauuu

SEQ ID NO: 1751478 - RNA, 19 nt, Artificial Sequence
  Description of Artificial Sequence: Synthetic oligonucleotide
  Antisense strand to SEQ ID NO: 1751477
aaauuccaaauguacgaag

SEQ ID NO: 1751479 - RNA, 19 nt, Artificial Sequence
  Description of Artificial Sequence: Synthetic oligonucleotide
  Sense strand starting at position 2930 of SEQ ID NO: 1562495
agagaugacuuugaagaau

SEQ ID NO: 1751480 - RNA, 19 nt, Artificial Sequence
  Description of Artificial Sequence: Synthetic oligonucleotide
  Antisense strand to SEQ ID NO: 1751479
auucuucaaagucaucucu

SEQ ID NO: 1751481 - RNA, 19 nt, Artificial Sequence
  Description of Artificial Sequence: Synthetic oligonucleotide
  Sense strand starting at position 3066 of SEQ ID NO: 1562495
acugauaccuaguuauuau

SEQ ID NO: 1751482 - RNA, 19 nt, Artificial Sequence
  Description of Artificial Sequence: Synthetic oligonucleotide
  Antisense strand to SEQ ID NO: 1751481
auaauaacuagguaucagu

SEQ ID NO: 1751483 - RNA, 19 nt, Artificial Sequence
  Description of Artificial Sequence: Synthetic oligonucleotide
  Sense strand starting at position 3140 of SEQ ID NO: 1562495
ggcucauguuaagugaacu

SEQ ID NO: 1751484 - RNA, 19 nt, Artificial Sequence
  Description of Artificial Sequence: Synthetic oligonucleotide
  Antisense strand to SEQ ID NO: 1751483
aguucacuuaacaugagcc

SEQ ID NO: 1751485 - RNA, 19 nt, Artificial Sequence
  Description of Artificial Sequence: Synthetic oligonucleotide
  Sense strand starting at position 3152 of SEQ ID NO: 1562495
gugaacucacuuuguagua

SEQ ID NO: 1751486 - RNA, 19 nt, Artificial Sequence
  Description of Artificial Sequence: Synthetic oligonucleotide
  Antisense strand to SEQ ID NO: 1751485
uacuacaaagugaguucac

SEQ ID NO: 1751487 - RNA, 19 nt, Artificial Sequence
  Description of Artificial Sequence: Synthetic oligonucleotide
  Sense strand starting at position 3180 of SEQ ID NO: 1562495
cauagaaugugcucugcaa

SEQ ID NO: 1751488 - RNA, 19 nt, Artificial Sequence
  Description of Artificial Sequence: Synthetic oligonucleotide
  Antisense strand to SEQ ID NO: 1751487
uugcagagcacauucuaug

SEQ ID NO: 1751489 - RNA, 19 nt, Artificial Sequence
  Description of Artificial Sequence: Synthetic oligonucleotide
  Sense strand starting at position 3184 of SEQ ID NO: 1562495
gaaugugcucugcaaucua

SEQ ID NO: 1751490 - RNA, 19 nt, Artificial Sequence
  Description of Artificial Sequence: Synthetic oligonucleotide
  Antisense strand to SEQ ID NO: 1751489
uagauugcagagcacauuc

SEQ ID NO: 1751491 - RNA, 19 nt, Artificial Sequence
  Description of Artificial Sequence: Synthetic oligonucleotide
  Sense strand starting at position 3293 of SEQ ID NO: 1562495
ccaauauggcuuuggauau

SEQ ID NO: 1751492 - RNA, 19 nt, Artificial Sequence
  Description of Artificial Sequence: Synthetic oligonucleotide
  Antisense strand to SEQ ID NO: 1751491
auauccaaagccauauugg

SEQ ID NO: 1751493 - RNA, 19 nt, Artificial Sequence
  Description of Artificial Sequence: Synthetic oligonucleotide
  Sense strand starting at position 3299 of SEQ ID NO: 1562495
uggcuuuggauauaaagca

SEQ ID NO: 1751494 - RNA, 19 nt, Artificial Sequence
  Description of Artificial Sequence: Synthetic oligonucleotide
  Antisense strand to SEQ ID NO: 1751493
ugcuuuauauccaaagcca

SEQ ID NO: 1751495 - RNA, 19 nt, Artificial Sequence
  Description of Artificial Sequence: Synthetic oligonucleotide
  Sense strand starting at position 3393 of SEQ ID NO: 1562495
cucaauuagccggauagcu

SEQ ID NO: 1751496 - RNA, 19 nt, Artificial Sequence
  Description of Artificial Sequence: Synthetic oligonucleotide
  Antisense strand to SEQ ID NO: 1751495
agcuauccggcuaauugag

SEQ ID NO: 1751497 - RNA, 19 nt, Artificial Sequence
  Description of Artificial Sequence: Synthetic oligonucleotide
  Sense strand starting at position 3403 of SEQ ID NO: 1562495
cggauagcugcugaugaaa

SEQ ID NO: 1751498 - RNA, 19 nt, Artificial Sequence
  Description of Artificial Sequence: Synthetic oligonucleotide
  Antisense strand to SEQ ID NO: 1751497
uuucaucagcagcuauccg

SEQ ID NO: 1751499 - RNA, 19 nt, Artificial Sequence
  Description of Artificial Sequence: Synthetic oligonucleotide
  Sense strand starting at position 3575 of SEQ ID NO: 1562495
uagagaaaucugggagcuu

SEQ ID NO: 1751500 - RNA, 19 nt, Artificial Sequence
  Description of Artificial Sequence: Synthetic oligonucleotide
  Antisense strand to SEQ ID NO: 1751499
aagcucccagauuucucua

SEQ ID NO: 1751501 - RNA, 19 nt, Artificial Sequence
  Description of Artificial Sequence: Synthetic oligonucleotide
  Sense strand starting at position 3595 of SEQ ID NO: 1562495
aggccaggcccucauaauu

SEQ ID NO: 1751502 - RNA, 19 nt, Artificial Sequence
  Description of Artificial Sequence: Synthetic oligonucleotide
  Antisense strand to SEQ ID NO: 1751501
aauuaugagggccuggccu

SEQ ID NO: 1751503 - RNA, 19 nt, Artificial Sequence
  Description of Artificial Sequence: Synthetic oligonucleotide
  Sense strand starting at position 3643 of SEQ ID NO: 1562495
uuuauuuccuaagacgaaa

SEQ ID NO: 1751504 - RNA, 19 nt, Artificial Sequence
  Description of Artificial Sequence: Synthetic oligonucleotide
  Antisense strand to SEQ ID NO: 1751503
uuucgucuuaggaaauaaa

SEQ ID NO: 1751505 - RNA, 19 nt, Artificial Sequence
  Description of Artificial Sequence: Synthetic oligonucleotide
  Sense strand starting at position 3780 of SEQ ID NO: 1562495
cucgccuuccuagugaguu

SEQ ID NO: 1751506 - RNA, 19 nt, Artificial Sequence
  Description of Artificial Sequence: Synthetic oligonucleotide
  Antisense strand to SEQ ID NO: 1751505
aacucacuaggaaggcgag

SEQ ID NO: 1751507 - RNA, 19 nt, Artificial Sequence
  Description of Artificial Sequence: Synthetic oligonucleotide
  Sense strand starting at position 3851 of SEQ ID NO: 1562495
ucaguuaauuccucaggca

SEQ ID NO: 1751508 - RNA, 19 nt, Artificial Sequence
  Description of Artificial Sequence: Synthetic oligonucleotide
  Antisense strand to SEQ ID NO: 1751507
ugccugaggaauuaacuga

SEQ ID NO: 1751509 - RNA, 19 nt, Artificial Sequence
  Description of Artificial Sequence: Synthetic oligonucleotide
  Sense strand starting at position 3973 of SEQ ID NO: 1562495
uuagcauaaugcuuugaaa

SEQ ID NO: 1751510 - RNA, 19 nt, Artificial Sequence
  Description of Artificial Sequence: Synthetic oligonucleotide
  Antisense strand to SEQ ID NO: 1751509
uuucaaagcauuaugcuaa

SEQ ID NO: 1751511 - RNA, 19 nt, Artificial Sequence
  Description of Artificial Sequence: Synthetic oligonucleotide
  Sense strand starting at position 33 of SEQ ID NO: 1562496
guaagaccuucccugauca

SEQ ID NO: 1751512 - RNA, 19 nt, Artificial Sequence
  Description of Artificial Sequence: Synthetic oligonucleotide
  Antisense strand to SEQ ID NO: 1751511
ugaucagggaaggucuuac

SEQ ID NO: 1751513 - RNA, 19 nt, Artificial Sequence
  Description of Artificial Sequence: Synthetic oligonucleotide
  Sense strand starting at position 254 of SEQ ID NO: 1562496
guaccuaucccguagcgaa

SEQ ID NO: 1751514 - RNA, 19 nt, Artificial Sequence
  Description of Artificial Sequence: Synthetic oligonucleotide
  Antisense strand to SEQ ID NO: 1751513
uucgcuacgggauagguac

SEQ ID NO: 1751515 - RNA, 19 nt, Artificial Sequence
  Description of Artificial Sequence: Synthetic oligonucleotide
  Sense strand starting at position 338 of SEQ ID NO: 1562496
ucaggauuguauccaacac

SEQ ID NO: 1751516 - RNA, 19 nt, Artificial Sequence
  Description of Artificial Sequence: Synthetic oligonucleotide
  Antisense strand to SEQ ID NO: 1751515
guguuggauacaauccuga

SEQ ID NO: 1751517 - RNA, 19 nt, Artificial Sequence
  Description of Artificial Sequence: Synthetic oligonucleotide
  Sense strand starting at position 400 of SEQ ID NO: 1562496
gugacuugaccuuguucua

SEQ ID NO: 1751518 - RNA, 19 nt, Artificial Sequence
  Description of Artificial Sequence: Synthetic oligonucleotide
  Antisense strand to SEQ ID NO: 1751517
uagaacaaggucaagucac

SEQ ID NO: 1751519 - RNA, 19 nt, Artificial Sequence
  Description of Artificial Sequence: Synthetic oligonucleotide
  Sense strand starting at position 410 of SEQ ID NO: 1562496
cuuguucuagcagaaagac

SEQ ID NO: 1751520 - RNA, 19 nt, Artificial Sequence
  Description of Artificial Sequence: Synthetic oligonucleotide
  Antisense strand to SEQ ID NO: 1751519
gucuuucugcuagaacaag

SEQ ID NO: 1751521 - RNA, 19 nt, Artificial Sequence
  Description of Artificial Sequence: Synthetic oligonucleotide
  Sense strand starting at position 514 of SEQ ID NO: 1562496
ucaguaagacccugaguuc

SEQ ID NO: 1751522 - RNA, 19 nt, Artificial Sequence
  Description of Artificial Sequence: Synthetic oligonucleotide
  Antisense strand to SEQ ID NO: 1751521
gaacucagggucuuacuga

SEQ ID NO: 1751523 - RNA, 19 nt, Artificial Sequence
  Description of Artificial Sequence: Synthetic oligonucleotide
  Sense strand starting at position 521 of SEQ ID NO: 1562496
gacccugaguuccugacaa

SEQ ID NO: 1751524 - RNA, 19 nt, Artificial Sequence
  Description of Artificial Sequence: Synthetic oligonucleotide
  Antisense strand to SEQ ID NO: 1751523
uugucaggaacucaggguc

SEQ ID NO: 1751525 - RNA, 19 nt, Artificial Sequence
  Description of Artificial Sequence: Synthetic oligonucleotide
  Sense strand starting at position 523 of SEQ ID NO: 1562496
cccugaguuccugacaauu

SEQ ID NO: 1751526 - RNA, 19 nt, Artificial Sequence
  Description of Artificial Sequence: Synthetic oligonucleotide
  Antisense strand to SEQ ID NO: 1751525
aauugucaggaacucaggg

SEQ ID NO: 1751527 - RNA, 19 nt, Artificial Sequence
  Description of Artificial Sequence: Synthetic oligonucleotide
  Sense strand starting at position 906 of SEQ ID NO: 1562496
ccuccaaagugucuaaauu

SEQ ID NO: 1751528 - RNA, 19 nt, Artificial Sequence
  Description of Artificial Sequence: Synthetic oligonucleotide
  Antisense strand to SEQ ID NO: 1751527
aauuuagacacuuuggagg

SEQ ID NO: 1751529 - RNA, 19 nt, Artificial Sequence
  Description of Artificial Sequence: Synthetic oligonucleotide
  Sense strand starting at position 907 of SEQ ID NO: 1562496
cuccaaagugucuaaauug

SEQ ID NO: 1751530 - RNA, 19 nt, Artificial Sequence
  Description of Artificial Sequence: Synthetic oligonucleotide
  Antisense strand to SEQ ID NO: 1751529
caauuuagacacuuuggag

SEQ ID NO: 1751531 - RNA, 19 nt, Artificial Sequence
  Description of Artificial Sequence: Synthetic oligonucleotide
  Sense strand starting at position 915 of SEQ ID NO: 1562496
ugucuaaauuguguggauu

SEQ ID NO: 1751532 - RNA, 19 nt, Artificial Sequence
  Description of Artificial Sequence: Synthetic oligonucleotide
  Antisense strand to SEQ ID NO: 1751531
aauccacacaauuuagaca

SEQ ID NO: 1751533 - RNA, 19 nt, Artificial Sequence
  Description of Artificial Sequence: Synthetic oligonucleotide
  Sense strand starting at position 916 of SEQ ID NO: 1562496
gucuaaauuguguggauuu

SEQ ID NO: 1751534 - RNA, 19 nt, Artificial Sequence
  Description of Artificial Sequence: Synthetic oligonucleotide
  Antisense strand to SEQ ID NO: 1751533
aaauccacacaauuuagac

SEQ ID NO: 1751535 - RNA, 19 nt, Artificial Sequence
  Description of Artificial Sequence: Synthetic oligonucleotide
  Sense strand starting at position 1183 of SEQ ID NO: 1562496
cgucguccuauuuaugaac

SEQ ID NO: 1751536 - RNA, 19 nt, Artificial Sequence
  Description of Artificial Sequence: Synthetic oligonucleotide
  Antisense strand to SEQ ID NO: 1751535
guucauaaauaggacgacg

SEQ ID NO: 1751537 - RNA, 19 nt, Artificial Sequence
  Description of Artificial Sequence: Synthetic oligonucleotide
  Sense strand starting at position 1186 of SEQ ID NO: 1562496
cguccuauuuaugaacacu

SEQ ID NO: 1751538 - RNA, 19 nt, Artificial Sequence
  Description of Artificial Sequence: Synthetic oligonucleotide
  Antisense strand to SEQ ID NO: 1751537
aguguucauaaauaggacg

SEQ ID NO: 1751539 - RNA, 19 nt, Artificial Sequence
  Description of Artificial Sequence: Synthetic oligonucleotide
  Sense strand starting at position 2212 of SEQ ID NO: 1562496
acggaauucucuucacgug

SEQ ID NO: 1751540 - RNA, 19 nt, Artificial Sequence
  Description of Artificial Sequence: Synthetic oligonucleotide
  Antisense strand to SEQ ID NO: 1751539
cacgugaagagaauuccgu

SEQ ID NO: 1751541 - RNA, 19 nt, Artificial Sequence
  Description of Artificial Sequence: Synthetic oligonucleotide
  Sense strand starting at position 2213 of SEQ ID NO: 1562496
cggaauucucuucacguga

SEQ ID NO: 1751542 - RNA, 19 nt, Artificial Sequence
  Description of Artificial Sequence: Synthetic oligonucleotide
  Antisense strand to SEQ ID NO: 1751541
ucacgugaagagaauuccg

SEQ ID NO: 1751543 - RNA, 19 nt, Artificial Sequence
  Description of Artificial Sequence: Synthetic oligonucleotide
  Sense strand starting at position 2497 of SEQ ID NO: 1562496
ugguuagaugcuuaccgua

SEQ ID NO: 1751544 - RNA, 19 nt, Artificial Sequence
  Description of Artificial Sequence: Synthetic oligonucleotide
  Antisense strand to SEQ ID NO: 1751543
uacgguaagcaucuaacca

SEQ ID NO: 1751545 - RNA, 19 nt, Artificial Sequence
  Description of Artificial Sequence: Synthetic oligonucleotide
  Sense strand starting at position 2499 of SEQ ID NO: 1562496
guuagaugcuuaccguaua

SEQ ID NO: 1751546 - RNA, 19 nt, Artificial Sequence
  Description of Artificial Sequence: Synthetic oligonucleotide
  Antisense strand to SEQ ID NO: 1751545
uauacgguaagcaucuaac

SEQ ID NO: 1751547 - RNA, 19 nt, Artificial Sequence
  Description of Artificial Sequence: Synthetic oligonucleotide
  Sense strand starting at position 2502 of SEQ ID NO: 1562496
agaugcuuaccguauauua

SEQ ID NO: 1751548 - RNA, 19 nt, Artificial Sequence
  Description of Artificial Sequence: Synthetic oligonucleotide
  Antisense strand to SEQ ID NO: 1751547
uaauauacgguaagcaucu

SEQ ID NO: 1751549 - RNA, 19 nt, Artificial Sequence
  Description of Artificial Sequence: Synthetic oligonucleotide
  Sense strand starting at position 2504 of SEQ ID NO: 1562496
augcuuaccguauauuauc

SEQ ID NO: 1751550 - RNA, 19 nt, Artificial Sequence
  Description of Artificial Sequence: Synthetic oligonucleotide
  Antisense strand to SEQ ID NO: 1751549
gauaauauacgguaagcau

SEQ ID NO: 1751551 - RNA, 19 nt, Artificial Sequence
  Description of Artificial Sequence: Synthetic oligonucleotide
  Sense strand starting at position 2532 of SEQ ID NO: 1562496
cgcaauaaagacugaacua

SEQ ID NO: 1751552 - RNA, 19 nt, Artificial Sequence
  Description of Artificial Sequence: Synthetic oligonucleotide
  Antisense strand to SEQ ID NO: 1751551
uaguucagucuuuauugcg

SEQ ID NO: 1751553 - RNA, 19 nt, Artificial Sequence
  Description of Artificial Sequence: Synthetic oligonucleotide
  Sense strand starting at position 2586 of SEQ ID NO: 1562496
cguauuagucacuauacca

SEQ ID NO: 1751554 - RNA, 19 nt, Artificial Sequence
  Description of Artificial Sequence: Synthetic oligonucleotide
  Antisense strand to SEQ ID NO: 1751553
ugguauagugacuaauacg

SEQ ID NO: 1751555 - RNA, 19 nt, Artificial Sequence
  Description of Artificial Sequence: Synthetic oligonucleotide
  Sense strand starting at position 2744 of SEQ ID NO: 1562496
agacaugucucuuccugaa

SEQ ID NO: 1751556 - RNA, 19 nt, Artificial Sequence
  Description of Artificial Sequence: Synthetic oligonucleotide
  Antisense strand to SEQ ID NO: 1751555
uucaggaagagacaugucu

SEQ ID NO: 1751557 - RNA, 19 nt, Artificial Sequence
  Description of Artificial Sequence: Synthetic oligonucleotide
  Sense strand starting at position 2795 of SEQ ID NO: 1562496
gugagaacuugggucugaa

SEQ ID NO: 1751558 - RNA, 19 nt, Artificial Sequence
  Description of Artificial Sequence: Synthetic oligonucleotide
  Antisense strand to SEQ ID NO: 1751557
uucagacccaaguucucac

SEQ ID NO: 1751559 - RNA, 19 nt, Artificial Sequence
  Description of Artificial Sequence: Synthetic oligonucleotide
  Sense strand starting at position 2799 of SEQ ID NO: 1562496
gaacuugggucugaauuuc

SEQ ID NO: 1751560 - RNA, 19 nt, Artificial Sequence
  Description of Artificial Sequence: Synthetic oligonucleotide
  Antisense strand to SEQ ID NO: 1751559
gaaauucagacccaaguuc

SEQ ID NO: 1751561 - RNA, 19 nt, Artificial Sequence
  Description of Artificial Sequence: Synthetic oligonucleotide
  Sense strand starting at position 2848 of SEQ ID NO: 1562496
agcugaaucuuaguuuccu

SEQ ID NO: 1751562 - RNA, 19 nt, Artificial Sequence
  Description of Artificial Sequence: Synthetic oligonucleotide
  Antisense strand to SEQ ID NO: 1751561
aggaaacuaagauucagcu

SEQ ID NO: 1751563 - RNA, 19 nt, Artificial Sequence
  Description of Artificial Sequence: Synthetic oligonucleotide
  Sense strand starting at position 2901 of SEQ ID NO: 1562496
ucagucagugcuuaauaaa

SEQ ID NO: 1751564 - RNA, 19 nt, Artificial Sequence
  Description of Artificial Sequence: Synthetic oligonucleotide
  Antisense strand to SEQ ID NO: 1751563
uuuauuaagcacugacuga

SEQ ID NO: 1751565 - RNA, 19 nt, Artificial Sequence
  Description of Artificial Sequence: Synthetic oligonucleotide
  Sense strand starting at position 2942 of SEQ ID NO: 1562496
uucuuuggagguugugaaa

SEQ ID NO: 1751566 - RNA, 19 nt, Artificial Sequence
  Description of Artificial Sequence: Synthetic oligonucleotide
  Antisense strand to SEQ ID NO: 1751565
uuucacaaccuccaaagaa

SEQ ID NO: 1751567 - RNA, 19 nt, Artificial Sequence
  Description of Artificial Sequence: Synthetic oligonucleotide
  Sense strand starting at position 2981 of SEQ ID NO: 1562496
agaguaggcuuacucucua

SEQ ID NO: 1751568 - RNA, 19 nt, Artificial Sequence
  Description of Artificial Sequence: Synthetic oligonucleotide
  Antisense strand to SEQ ID NO: 1751567
uagagaguaagccuacucu

SEQ ID NO: 1751569 - RNA, 19 nt, Artificial Sequence
  Description of Artificial Sequence: Synthetic oligonucleotide
  Sense strand starting at position 2989 of SEQ ID NO: 1562496
cuuacucucuaguuaggaa

SEQ ID NO: 1751570 - RNA, 19 nt, Artificial Sequence
  Description of Artificial Sequence: Synthetic oligonucleotide
  Antisense strand to SEQ ID NO: 1751569
uuccuaacuagagaguaag

SEQ ID NO: 1751571 - RNA, 19 nt, Artificial Sequence
  Description of Artificial Sequence: Synthetic oligonucleotide
  Sense strand starting at position 2997 of SEQ ID NO: 1562496
cuaguuaggaaguguuagu

SEQ ID NO: 1751572 - RNA, 19 nt, Artificial Sequence
  Description of Artificial Sequence: Synthetic oligonucleotide
  Antisense strand to SEQ ID NO: 1751571
acuaacacuuccuaacuag

SEQ ID NO: 1751573 - RNA, 19 nt, Artificial Sequence
  Description of Artificial Sequence: Synthetic oligonucleotide
  Sense strand starting at position 3002 of SEQ ID NO: 1562496
uaggaaguguuaguaauua

SEQ ID NO: 1751574 - RNA, 19 nt, Artificial Sequence
  Description of Artificial Sequence: Synthetic oligonucleotide
  Antisense strand to SEQ ID NO: 1751573
uaauuacuaacacuuccua

SEQ ID NO: 1751575 - RNA, 19 nt, Artificial Sequence
  Description of Artificial Sequence: Synthetic oligonucleotide
  Sense strand starting at position 3035 of SEQ ID NO: 1562496
uccaacagcugagauuuau

SEQ ID NO: 1751576 - RNA, 19 nt, Artificial Sequence
  Description of Artificial Sequence: Synthetic oligonucleotide
  Antisense strand to SEQ ID NO: 1751575
auaaaucucagcuguugga

SEQ ID NO: 1751577 - RNA, 19 nt, Artificial Sequence
  Description of Artificial Sequence: Synthetic oligonucleotide
  Sense strand starting at position 3072 of SEQ ID NO: 1562496
acgguucuaugauuacuau

SEQ ID NO: 1751578 - RNA, 19 nt, Artificial Sequence
  Description of Artificial Sequence: Synthetic oligonucleotide
  Antisense strand to SEQ ID NO: 1751577
auaguaaucauagaaccgu

SEQ ID NO: 1751579 - RNA, 19 nt, Artificial Sequence
  Description of Artificial Sequence: Synthetic oligonucleotide
  Sense strand starting at position 3073 of SEQ ID NO: 1562496
cgguucuaugauuacuauu

SEQ ID NO: 1751580 - RNA, 19 nt, Artificial Sequence
  Description of Artificial Sequence: Synthetic oligonucleotide
  Antisense strand to SEQ ID NO: 1751579
aauaguaaucauagaaccg

SEQ ID NO: 1751581 - RNA, 19 nt, Artificial Sequence
  Description of Artificial Sequence: Synthetic oligonucleotide
  Sense strand starting at position 3107 of SEQ ID NO: 1562496
caguuuguguccucaggga

SEQ ID NO: 1751582 - RNA, 19 nt, Artificial Sequence
  Description of Artificial Sequence: Synthetic oligonucleotide
  Antisense strand to SEQ ID NO: 1751581
ucccugaggacacaaacug

SEQ ID NO: 1751583 - RNA, 19 nt, Artificial Sequence
  Description of Artificial Sequence: Synthetic oligonucleotide
  Sense strand starting at position 3111 of SEQ ID NO: 1562496
uuguguccucagggagcua

SEQ ID NO: 1751584 - RNA, 19 nt, Artificial Sequence
  Description of Artificial Sequence: Synthetic oligonucleotide
  Antisense strand to SEQ ID NO: 1751583
uagcucccugaggacacaa

SEQ ID NO: 1751585 - RNA, 19 nt, Artificial Sequence
  Description of Artificial Sequence: Synthetic oligonucleotide
  Sense strand starting at position 3184 of SEQ ID NO: 1562496
auaugaggaugugaagaaa

SEQ ID NO: 1751586 - RNA, 19 nt, Artificial Sequence
  Description of Artificial Sequence: Synthetic oligonucleotide
  Antisense strand to SEQ ID NO: 1751585
uuucuucacauccucauau

SEQ ID NO: 1751587 - RNA, 19 nt, Artificial Sequence
  Description of Artificial Sequence: Synthetic oligonucleotide
  Sense strand starting at position 3198 of SEQ ID NO: 1562496
agaaauuggaaccgucaua

SEQ ID NO: 1751588 - RNA, 19 nt, Artificial Sequence
  Description of Artificial Sequence: Synthetic oligonucleotide
  Antisense strand to SEQ ID NO: 1751587
uaugacgguuccaauuucu

SEQ ID NO: 1751589 - RNA, 19 nt, Artificial Sequence
  Description of Artificial Sequence: Synthetic oligonucleotide
  Sense strand starting at position 3586 of SEQ ID NO: 1562496
gguacauguccucaggacu

SEQ ID NO: 1751590 - RNA, 19 nt, Artificial Sequence
  Description of Artificial Sequence: Synthetic oligonucleotide
  Antisense strand to SEQ ID NO: 1751589
aguccugaggacauguacc

SEQ ID NO: 1751591 - RNA, 19 nt, Artificial Sequence
  Description of Artificial Sequence: Synthetic oligonucleotide
  Sense strand starting at position 187 of SEQ ID NO: 1562497
gaguucugccaaugaaauc

SEQ ID NO: 1751592 - RNA, 19 nt, Artificial Sequence
  Description of Artificial Sequence: Synthetic oligonucleotide
  Antisense strand to SEQ ID NO: 1751591
gauuucauuggcagaacuc

SEQ ID NO: 1751593 - RNA, 19 nt, Artificial Sequence
  Description of Artificial Sequence: Synthetic oligonucleotide
  Sense strand starting at position 204 of SEQ ID NO: 1562497
ucagaagccugagaauuuc

SEQ ID NO: 1751594 - RNA, 19 nt, Artificial Sequence
  Description of Artificial Sequence: Synthetic oligonucleotide
  Antisense strand to SEQ ID NO: 1751593
gaaauucucaggcuucuga

SEQ ID NO: 1751595 - RNA, 19 nt, Artificial Sequence
  Description of Artificial Sequence: Synthetic oligonucleotide
  Sense strand starting at position 366 of SEQ ID NO: 1562497
cuggacaucccuuguuagu

SEQ ID NO: 1751596 - RNA, 19 nt, Artificial Sequence
  Description of Artificial Sequence: Synthetic oligonucleotide
  Antisense strand to SEQ ID NO: 1751595
acuaacaagggauguccag

SEQ ID NO: 1751597 - RNA, 19 nt, Artificial Sequence
  Description of Artificial Sequence: Synthetic oligonucleotide
  Sense strand starting at position 376 of SEQ ID NO: 1562497
cuuguuaguucccucagga

SEQ ID NO: 1751598 - RNA, 19 nt, Artificial Sequence
  Description of Artificial Sequence: Synthetic oligonucleotide
  Antisense strand to SEQ ID NO: 1751597
uccugagggaacuaacaag

SEQ ID NO: 1751599 - RNA, 19 nt, Artificial Sequence
  Description of Artificial Sequence: Synthetic oligonucleotide
  Sense strand starting at position 592 of SEQ ID NO: 1562497
aagcaaggagcuugaaaug

SEQ ID NO: 1751600 - RNA, 19 nt, Artificial Sequence
  Description of Artificial Sequence: Synthetic oligonucleotide
  Antisense strand to SEQ ID NO: 1751599
cauuucaagcuccuugcuu

SEQ ID NO: 1751601 - RNA, 19 nt, Artificial Sequence
  Description of Artificial Sequence: Synthetic oligonucleotide
  Sense strand starting at position 604 of SEQ ID NO: 1562497
ugaaauguucccugcuuua

SEQ ID NO: 1751602 - RNA, 19 nt, Artificial Sequence
  Description of Artificial Sequence: Synthetic oligonucleotide
  Antisense strand to SEQ ID NO: 1751601
uaaagcagggaacauuuca

SEQ ID NO: 1751603 - RNA, 19 nt, Artificial Sequence
  Description of Artificial Sequence: Synthetic oligonucleotide
  Sense strand starting at position 729 of SEQ ID NO: 1562497
guaagaccuucccugauca

SEQ ID NO: 1751604 - RNA, 19 nt, Artificial Sequence
  Description of Artificial Sequence: Synthetic oligonucleotide
  Antisense strand to SEQ ID NO: 1751603
ugaucagggaaggucuuac

SEQ ID NO: 1751605 - RNA, 19 nt, Artificial Sequence
  Description of Artificial Sequence: Synthetic oligonucleotide
  Sense strand starting at position 1034 of SEQ ID NO: 1562497
ucaggauuguauccaacac

SEQ ID NO: 1751606 - RNA, 19 nt, Artificial Sequence
  Description of Artificial Sequence: Synthetic oligonucleotide
  Antisense strand to SEQ ID NO: 1751605
guguuggauacaauccuga

SEQ ID NO: 1751607 - RNA, 19 nt, Artificial Sequence
  Description of Artificial Sequence: Synthetic oligonucleotide
  Sense strand starting at position 1096 of SEQ ID NO: 1562497
gugacuugaccuuguucua

SEQ ID NO: 1751608 - RNA, 19 nt, Artificial Sequence
  Description of Artificial Sequence: Synthetic oligonucleotide
  Antisense strand to SEQ ID NO: 1751607
uagaacaaggucaagucac

SEQ ID NO: 1751609 - RNA, 19 nt, Artificial Sequence
  Description of Artificial Sequence: Synthetic oligonucleotide
  Sense strand starting at position 1106 of SEQ ID NO: 1562497
cuuguucuagcagaaagac

SEQ ID NO: 1751610 - RNA, 19 nt, Artificial Sequence
  Description of Artificial Sequence: Synthetic oligonucleotide
  Antisense strand to SEQ ID NO: 1751609
gucuuucugcuagaacaag

SEQ ID NO: 1751611 - RNA, 19 nt, Artificial Sequence
  Description of Artificial Sequence: Synthetic oligonucleotide
  Sense strand starting at position 1210 of SEQ ID NO: 1562497
ucaguaagacccugaguuc

SEQ ID NO: 1751612 - RNA, 19 nt, Artificial Sequence
  Description of Artificial Sequence: Synthetic oligonucleotide
  Antisense strand to SEQ ID NO: 1751611
gaacucagggucuuacuga

SEQ ID NO: 1751613 - RNA, 19 nt, Artificial Sequence
  Description of Artificial Sequence: Synthetic oligonucleotide
  Sense strand starting at position 1217 of SEQ ID NO: 1562497
gacccugaguuccugacaa

SEQ ID NO: 1751614 - RNA, 19 nt, Artificial Sequence
  Description of Artificial Sequence: Synthetic oligonucleotide
  Antisense strand to SEQ ID NO: 1751613
uugucaggaacucaggguc

SEQ ID NO: 1751615 - RNA, 19 nt, Artificial Sequence
  Description of Artificial Sequence: Synthetic oligonucleotide
  Sense strand starting at position 1219 of SEQ ID NO: 1562497
cccugaguuccugacaauu

SEQ ID NO: 1751616 - RNA, 19 nt, Artificial Sequence
  Description of Artificial Sequence: Synthetic oligonucleotide
  Antisense strand to SEQ ID NO: 1751615
aauugucaggaacucaggg

SEQ ID NO: 1751617 - RNA, 19 nt, Artificial Sequence
  Description of Artificial Sequence: Synthetic oligonucleotide
  Sense strand starting at position 1602 of SEQ ID NO: 1562497
ccuccaaagugucuaaauu

SEQ ID NO: 1751618 - RNA, 19 nt, Artificial Sequence
  Description of Artificial Sequence: Synthetic oligonucleotide
  Antisense strand to SEQ ID NO: 1751617
aauuuagacacuuuggagg

SEQ ID NO: 1751619 - RNA, 19 nt, Artificial Sequence
  Description of Artificial Sequence: Synthetic oligonucleotide
  Sense strand starting at position 1603 of SEQ ID NO: 1562497
cuccaaagugucuaaauug

SEQ ID NO: 1751620 - RNA, 19 nt, Artificial Sequence
  Description of Artificial Sequence: Synthetic oligonucleotide
  Antisense strand to SEQ ID NO: 1751619
caauuuagacacuuuggag

SEQ ID NO: 1751621 - RNA, 19 nt, Artificial Sequence
  Description of Artificial Sequence: Synthetic oligonucleotide
  Sense strand starting at position 1611 of SEQ ID NO: 1562497
ugucuaaauuguguggauu

SEQ ID NO: 1751622 - RNA, 19 nt, Artificial Sequence
  Description of Artificial Sequence: Synthetic oligonucleotide
  Antisense strand to SEQ ID NO: 1751621
aauccacacaauuuagaca

SEQ ID NO: 1751623 - RNA, 19 nt, Artificial Sequence
  Description of Artificial Sequence: Synthetic oligonucleotide
  Sense strand starting at position 1612 of SEQ ID NO: 1562497
gucuaaauuguguggauuu

SEQ ID NO: 1751624 - RNA, 19 nt, Artificial Sequence
  Description of Artificial Sequence: Synthetic oligonucleotide
  Antisense strand to SEQ ID NO: 1751623
aaauccacacaauuuagac

SEQ ID NO: 1751625 - RNA, 19 nt, Artificial Sequence
  Description of Artificial Sequence: Synthetic oligonucleotide
  Sense strand starting at position 1879 of SEQ ID NO: 1562497
cgucguccuauuuaugaac

SEQ ID NO: 1751626 - RNA, 19 nt, Artificial Sequence
  Description of Artificial Sequence: Synthetic oligonucleotide
  Antisense strand to SEQ ID NO: 1751625
guucauaaauaggacgacg

SEQ ID NO: 1751627 - RNA, 19 nt, Artificial Sequence
  Description of Artificial Sequence: Synthetic oligonucleotide
  Sense strand starting at position 2909 of SEQ ID NO: 1562497
cggaauucucuucacguga

SEQ ID NO: 1751628 - RNA, 19 nt, Artificial Sequence
  Description of Artificial Sequence: Synthetic oligonucleotide
  Antisense strand to SEQ ID NO: 1751627
ucacgugaagagaauuccg

SEQ ID NO: 1751629 - RNA, 19 nt, Artificial Sequence
  Description of Artificial Sequence: Synthetic oligonucleotide
  Sense strand starting at position 3193 of SEQ ID NO: 1562497
ugguuagaugcuuaccgua

SEQ ID NO: 1751630 - RNA, 19 nt, Artificial Sequence
  Description of Artificial Sequence: Synthetic oligonucleotide
  Antisense strand to SEQ ID NO: 1751629
uacgguaagcaucuaacca

SEQ ID NO: 1751631 - RNA, 19 nt, Artificial Sequence
  Description of Artificial Sequence: Synthetic oligonucleotide
  Sense strand starting at position 3198 of SEQ ID NO: 1562497
agaugcuuaccguauauua

SEQ ID NO: 1751632 - RNA, 19 nt, Artificial Sequence
  Description of Artificial Sequence: Synthetic oligonucleotide
  Antisense strand to SEQ ID NO: 1751631
uaauauacgguaagcaucu

SEQ ID NO: 1751633 - RNA, 19 nt, Artificial Sequence
  Description of Artificial Sequence: Synthetic oligonucleotide
  Sense strand starting at position 3200 of SEQ ID NO: 1562497
augcuuaccguauauuauc

SEQ ID NO: 1751634 - RNA, 19 nt, Artificial Sequence
  Description of Artificial Sequence: Synthetic oligonucleotide
  Antisense strand to SEQ ID NO: 1751633
gauaauauacgguaagcau

SEQ ID NO: 1751635 - RNA, 19 nt, Artificial Sequence
  Description of Artificial Sequence: Synthetic oligonucleotide
  Sense strand starting at position 3228 of SEQ ID NO: 1562497
cgcaauaaagacugaacua

SEQ ID NO: 1751636 - RNA, 19 nt, Artificial Sequence
  Description of Artificial Sequence: Synthetic oligonucleotide
  Antisense strand to SEQ ID NO: 1751635
uaguucagucuuuauugcg

SEQ ID NO: 1751637 - RNA, 19 nt, Artificial Sequence
  Description of Artificial Sequence: Synthetic oligonucleotide
  Sense strand starting at position 3282 of SEQ ID NO: 1562497
cguauuagucacuauacca

SEQ ID NO: 1751638 - RNA, 19 nt, Artificial Sequence
  Description of Artificial Sequence: Synthetic oligonucleotide
  Antisense strand to SEQ ID NO: 1751637
ugguauagugacuaauacg

SEQ ID NO: 1751639 - RNA, 19 nt, Artificial Sequence
  Description of Artificial Sequence: Synthetic oligonucleotide
  Sense strand starting at position 3440 of SEQ ID NO: 1562497
agacaugucucuuccugaa

SEQ ID NO: 1751640 - RNA, 19 nt, Artificial Sequence
  Description of Artificial Sequence: Synthetic oligonucleotide
  Antisense strand to SEQ ID NO: 1751639
uucaggaagagacaugucu

SEQ ID NO: 1751641 - RNA, 19 nt, Artificial Sequence
  Description of Artificial Sequence: Synthetic oligonucleotide
  Sense strand starting at position 3491 of SEQ ID NO: 1562497
gugagaacuugggucugaa

SEQ ID NO: 1751642 - RNA, 19 nt, Artificial Sequence
  Description of Artificial Sequence: Synthetic oligonucleotide
  Antisense strand to SEQ ID NO: 1751641
uucagacccaaguucucac

SEQ ID NO: 1751643 - RNA, 19 nt, Artificial Sequence
  Description of Artificial Sequence: Synthetic oligonucleotide
  Sense strand starting at position 3495 of SEQ ID NO: 1562497
gaacuugggucugaauuuc

SEQ ID NO: 1751644 - RNA, 19 nt, Artificial Sequence
  Description of Artificial Sequence: Synthetic oligonucleotide
  Antisense strand to SEQ ID NO: 1751643
gaaauucagacccaaguuc

SEQ ID NO: 1751645 - RNA, 19 nt, Artificial Sequence
  Description of Artificial Sequence: Synthetic oligonucleotide
  Sense strand starting at position 3544 of SEQ ID NO: 1562497
agcugaaucuuaguuuccu

SEQ ID NO: 1751646 - RNA, 19 nt, Artificial Sequence
  Description of Artificial Sequence: Synthetic oligonucleotide
  Antisense strand to SEQ ID NO: 1751645
aggaaacuaagauucagcu

SEQ ID NO: 1751647 - RNA, 19 nt, Artificial Sequence
  Description of Artificial Sequence: Synthetic oligonucleotide
  Sense strand starting at position 3597 of SEQ ID NO: 1562497
ucagucagugcuuaauaaa

SEQ ID NO: 1751648 - RNA, 19 nt, Artificial Sequence
  Description of Artificial Sequence: Synthetic oligonucleotide
  Antisense strand to SEQ ID NO: 1751647
uuuauuaagcacugacuga

SEQ ID NO: 1751649 - RNA, 19 nt, Artificial Sequence
  Description of Artificial Sequence: Synthetic oligonucleotide
  Sense strand starting at position 3638 of SEQ ID NO: 1562497
uucuuuggagguugugaaa

SEQ ID NO: 1751650 - RNA, 19 nt, Artificial Sequence
  Description of Artificial Sequence: Synthetic oligonucleotide
  Antisense strand to SEQ ID NO: 1751649
uuucacaaccuccaaagaa

SEQ ID NO: 1751651 - RNA, 19 nt, Artificial Sequence
  Description of Artificial Sequence: Synthetic oligonucleotide
  Sense strand starting at position 3677 of SEQ ID NO: 1562497
agaguaggcuuacucucua

SEQ ID NO: 1751652 - RNA, 19 nt, Artificial Sequence
  Description of Artificial Sequence: Synthetic oligonucleotide
  Antisense strand to SEQ ID NO: 1751651
uagagaguaagccuacucu

SEQ ID NO: 1751653 - RNA, 19 nt, Artificial Sequence
  Description of Artificial Sequence: Synthetic oligonucleotide
  Sense strand starting at position 3685 of SEQ ID NO: 1562497
cuuacucucuaguuaggaa

SEQ ID NO: 1751654 - RNA, 19 nt, Artificial Sequence
  Description of Artificial Sequence: Synthetic oligonucleotide
  Antisense strand to SEQ ID NO: 1751653
uuccuaacuagagaguaag

SEQ ID NO: 1751655 - RNA, 19 nt, Artificial Sequence
  Description of Artificial Sequence: Synthetic oligonucleotide
  Sense strand starting at position 3693 of SEQ ID NO: 1562497
cuaguuaggaaguguuagu

SEQ ID NO: 1751656 - RNA, 19 nt, Artificial Sequence
  Description of Artificial Sequence: Synthetic oligonucleotide
  Antisense strand to SEQ ID NO: 1751655
acuaacacuuccuaacuag

SEQ ID NO: 1751657 - RNA, 19 nt, Artificial Sequence
  Description of Artificial Sequence: Synthetic oligonucleotide
  Sense strand starting at position 3698 of SEQ ID NO: 1562497
uaggaaguguuaguaauua

SEQ ID NO: 1751658 - RNA, 19 nt, Artificial Sequence
  Description of Artificial Sequence: Synthetic oligonucleotide
  Antisense strand to SEQ ID NO: 1751657
uaauuacuaacacuuccua

SEQ ID NO: 1751659 - RNA, 19 nt, Artificial Sequence
  Description of Artificial Sequence: Synthetic oligonucleotide
  Sense strand starting at position 3731 of SEQ ID NO: 1562497
uccaacagcugagauuuau

SEQ ID NO: 1751660 - RNA, 19 nt, Artificial Sequence
  Description of Artificial Sequence: Synthetic oligonucleotide
  Antisense strand to SEQ ID NO: 1751659
auaaaucucagcuguugga

SEQ ID NO: 1751661 - RNA, 19 nt, Artificial Sequence
  Description of Artificial Sequence: Synthetic oligonucleotide
  Sense strand starting at position 3768 of SEQ ID NO: 1562497
acgguucuaugauuacuau

SEQ ID NO: 1751662 - RNA, 19 nt, Artificial Sequence
  Description of Artificial Sequence: Synthetic oligonucleotide
  Antisense strand to SEQ ID NO: 1751661
auaguaaucauagaaccgu

SEQ ID NO: 1751663 - RNA, 19 nt, Artificial Sequence
  Description of Artificial Sequence: Synthetic oligonucleotide
  Sense strand starting at position 3769 of SEQ ID NO: 1562497
cgguucuaugauuacuauu

SEQ ID NO: 1751664 - RNA, 19 nt, Artificial Sequence
  Description of Artificial Sequence: Synthetic oligonucleotide
  Antisense strand to SEQ ID NO: 1751663
aauaguaaucauagaaccg

SEQ ID NO: 1751665 - RNA, 19 nt, Artificial Sequence
  Description of Artificial Sequence: Synthetic oligonucleotide
  Sense strand starting at position 3803 of SEQ ID NO: 1562497
caguuuguguccucaggga

SEQ ID NO: 1751666 - RNA, 19 nt, Artificial Sequence
  Description of Artificial Sequence: Synthetic oligonucleotide
  Antisense strand to SEQ ID NO: 1751665
ucccugaggacacaaacug

SEQ ID NO: 1751667 - RNA, 19 nt, Artificial Sequence
  Description of Artificial Sequence: Synthetic oligonucleotide
  Sense strand starting at position 3880 of SEQ ID NO: 1562497
auaugaggaugugaagaaa

SEQ ID NO: 1751668 - RNA, 19 nt, Artificial Sequence
  Description of Artificial Sequence: Synthetic oligonucleotide
  Antisense strand to SEQ ID NO: 1751667
uuucuucacauccucauau

SEQ ID NO: 1751669 - RNA, 19 nt, Artificial Sequence
  Description of Artificial Sequence: Synthetic oligonucleotide
  Sense strand starting at position 3894 of SEQ ID NO: 1562497
agaaauuggaaccgucaua

SEQ ID NO: 1751670 - RNA, 19 nt, Artificial Sequence
  Description of Artificial Sequence: Synthetic oligonucleotide
  Antisense strand to SEQ ID NO: 1751669
uaugacgguuccaauuucu

SEQ ID NO: 1751671 - RNA, 19 nt, Artificial Sequence
  Description of Artificial Sequence: Synthetic oligonucleotide
  Sense strand starting at position 139 of SEQ ID NO: 1562498
aggagagugucuucaggaa

SEQ ID NO: 1751672 - RNA, 19 nt, Artificial Sequence
  Description of Artificial Sequence: Synthetic oligonucleotide
  Antisense strand to SEQ ID NO: 1751671
uuccugaagacacucuccu

SEQ ID NO: 1751673 - RNA, 19 nt, Artificial Sequence
  Description of Artificial Sequence: Synthetic oligonucleotide
  Sense strand starting at position 321 of SEQ ID NO: 1562498
agggacauuucugagacuu

SEQ ID NO: 1751674 - RNA, 19 nt, Artificial Sequence
  Description of Artificial Sequence: Synthetic oligonucleotide
  Antisense strand to SEQ ID NO: 1751673
aagucucagaaaugucccu

SEQ ID NO: 1751675 - RNA, 19 nt, Artificial Sequence
  Description of Artificial Sequence: Synthetic oligonucleotide
  Sense strand starting at position 333 of SEQ ID NO: 1562498
gagacuuucccacgaggga

SEQ ID NO: 1751676 - RNA, 19 nt, Artificial Sequence
  Description of Artificial Sequence: Synthetic oligonucleotide
  Antisense strand to SEQ ID NO: 1751675
ucccucgugggaaagucuc

SEQ ID NO: 1751677 - RNA, 19 nt, Artificial Sequence
  Description of Artificial Sequence: Synthetic oligonucleotide
  Sense strand starting at position 471 of SEQ ID NO: 1562498
cuucguacauuuggaauuu

SEQ ID NO: 1751678 - RNA, 19 nt, Artificial Sequence
  Description of Artificial Sequence: Synthetic oligonucleotide
  Antisense strand to SEQ ID NO: 1751677
aaauuccaaauguacgaag

SEQ ID NO: 1751679 - RNA, 19 nt, Artificial Sequence
  Description of Artificial Sequence: Synthetic oligonucleotide
  Sense strand starting at position 693 of SEQ ID NO: 1562498
acugauaccuaguuauuau

SEQ ID NO: 1751680 - RNA, 19 nt, Artificial Sequence
  Description of Artificial Sequence: Synthetic oligonucleotide
  Antisense strand to SEQ ID NO: 1751679
auaauaacuagguaucagu

SEQ ID NO: 1751681 - RNA, 19 nt, Artificial Sequence
  Description of Artificial Sequence: Synthetic oligonucleotide
  Sense strand starting at position 920 of SEQ ID NO: 1562498
ccaauauggcuuuggauau

SEQ ID NO: 1751682 - RNA, 19 nt, Artificial Sequence
  Description of Artificial Sequence: Synthetic oligonucleotide
  Antisense strand to SEQ ID NO: 1751681
auauccaaagccauauugg

SEQ ID NO: 1751683 - RNA, 19 nt, Artificial Sequence
  Description of Artificial Sequence: Synthetic oligonucleotide
  Sense strand starting at position 926 of SEQ ID NO: 1562498
uggcuuuggauauaaagca

SEQ ID NO: 1751684 - RNA, 19 nt, Artificial Sequence
  Description of Artificial Sequence: Synthetic oligonucleotide
  Antisense strand to SEQ ID NO: 1751683
ugcuuuauauccaaagcca

SEQ ID NO: 1751685 - RNA, 19 nt, Artificial Sequence
  Description of Artificial Sequence: Synthetic oligonucleotide
  Sense strand starting at position 1030 of SEQ ID NO: 1562498
cggauagcugcugaugaaa

SEQ ID NO: 1751686 - RNA, 19 nt, Artificial Sequence
  Description of Artificial Sequence: Synthetic oligonucleotide
  Antisense strand to SEQ ID NO: 1751685
uuucaucagcagcuauccg

SEQ ID NO: 1751687 - RNA, 19 nt, Artificial Sequence
  Description of Artificial Sequence: Synthetic oligonucleotide
  Sense strand starting at position 1202 of SEQ ID NO: 1562498
uagagaaaucugggagcuu

SEQ ID NO: 1751688 - RNA, 19 nt, Artificial Sequence
  Description of Artificial Sequence: Synthetic oligonucleotide
  Antisense strand to SEQ ID NO: 1751687
aagcucccagauuucucua

SEQ ID NO: 1751689 - RNA, 19 nt, Artificial Sequence
  Description of Artificial Sequence: Synthetic oligonucleotide
  Sense strand starting at position 1222 of SEQ ID NO: 1562498
aggccaggcccucauaauu

SEQ ID NO: 1751690 - RNA, 19 nt, Artificial Sequence
  Description of Artificial Sequence: Synthetic oligonucleotide
  Antisense strand to SEQ ID NO: 1751689
aauuaugagggccuggccu

SEQ ID NO: 1751691 - RNA, 19 nt, Artificial Sequence
  Description of Artificial Sequence: Synthetic oligonucleotide
  Sense strand starting at position 1270 of SEQ ID NO: 1562498
uuuauuuccuaagacgaaa

SEQ ID NO: 1751692 - RNA, 19 nt, Artificial Sequence
  Description of Artificial Sequence: Synthetic oligonucleotide
  Antisense strand to SEQ ID NO: 1751691
uuucgucuuaggaaauaaa

SEQ ID NO: 1751693 - RNA, 19 nt, Artificial Sequence
  Description of Artificial Sequence: Synthetic oligonucleotide
  Sense strand starting at position 1407 of SEQ ID NO: 1562498
cucgccuuccuagugaguu

SEQ ID NO: 1751694 - RNA, 19 nt, Artificial Sequence
  Description of Artificial Sequence: Synthetic oligonucleotide
  Antisense strand to SEQ ID NO: 1751693
aacucacuaggaaggcgag

SEQ ID NO: 1751695 - RNA, 19 nt, Artificial Sequence
  Description of Artificial Sequence: Synthetic oligonucleotide
  Sense strand starting at position 1600 of SEQ ID NO: 1562498
uuagcauaaugcuuugaaa

SEQ ID NO: 1751696 - RNA, 19 nt, Artificial Sequence
  Description of Artificial Sequence: Synthetic oligonucleotide
  Antisense strand to SEQ ID NO: 1751695
uuucaaagcauuaugcuaa

SEQ ID NO: 1751697 - RNA, 19 nt, Artificial Sequence
  Description of Artificial Sequence: Synthetic oligonucleotide
  Sense strand starting at position 1791 of SEQ ID NO: 1562498
ugagauuccuuuccaagag

SEQ ID NO: 1751698 - RNA, 19 nt, Artificial Sequence
  Description of Artificial Sequence: Synthetic oligonucleotide
  Antisense strand to SEQ ID NO: 1751697
cucuuggaaaggaaucuca

SEQ ID NO: 1751699 - RNA, 19 nt, Artificial Sequence
  Description of Artificial Sequence: Synthetic oligonucleotide
  Sense strand starting at position 1826 of SEQ ID NO: 1562498
ugagcuggugcuuauaaag

SEQ ID NO: 1751700 - RNA, 19 nt, Artificial Sequence
  Description of Artificial Sequence: Synthetic oligonucleotide
  Antisense strand to SEQ ID NO: 1751699
cuuuauaagcaccagcuca

SEQ ID NO: 1751701 - RNA, 19 nt, Artificial Sequence
  Description of Artificial Sequence: Synthetic oligonucleotide
  Sense strand starting at position 1956 of SEQ ID NO: 1562498
gacaaaguguaaguuucua

SEQ ID NO: 1751702 - RNA, 19 nt, Artificial Sequence
  Description of Artificial Sequence: Synthetic oligonucleotide
  Antisense strand to SEQ ID NO: 1751701
uagaaacuuacacuuuguc

SEQ ID NO: 1751703 - RNA, 19 nt, Artificial Sequence
  Description of Artificial Sequence: Synthetic oligonucleotide
  Sense strand starting at position 1988 of SEQ ID NO: 1562498
acgucaacaccuuagucau

SEQ ID NO: 1751704 - RNA, 19 nt, Artificial Sequence
  Description of Artificial Sequence: Synthetic oligonucleotide
  Antisense strand to SEQ ID NO: 1751703
augacuaagguguugacgu

SEQ ID NO: 1751705 - RNA, 19 nt, Artificial Sequence
  Description of Artificial Sequence: Synthetic oligonucleotide
  Sense strand starting at position 2157 of SEQ ID NO: 1562498
ggacgacccuucuuaagau

SEQ ID NO: 1751706 - RNA, 19 nt, Artificial Sequence
  Description of Artificial Sequence: Synthetic oligonucleotide
  Antisense strand to SEQ ID NO: 1751705
aucuuaagaagggucgucc

SEQ ID NO: 1751707 - RNA, 19 nt, Artificial Sequence
  Description of Artificial Sequence: Synthetic oligonucleotide
  Sense strand starting at position 2198 of SEQ ID NO: 1562498
ggaugaaggucuguggcaa

SEQ ID NO: 1751708 - RNA, 19 nt, Artificial Sequence
  Description of Artificial Sequence: Synthetic oligonucleotide
  Antisense strand to SEQ ID NO: 1751707
uugccacagaccuucaucc

SEQ ID NO: 1751709 - RNA, 19 nt, Artificial Sequence
  Description of Artificial Sequence: Synthetic oligonucleotide
  Sense strand starting at position 2285 of SEQ ID NO: 1562498
auacuugaucccuggaauu

SEQ ID NO: 1751710 - RNA, 19 nt, Artificial Sequence
  Description of Artificial Sequence: Synthetic oligonucleotide
  Antisense strand to SEQ ID NO: 1751709
aauuccagggaucaaguau

SEQ ID NO: 1751711 - RNA, 19 nt, Artificial Sequence
  Description of Artificial Sequence: Synthetic oligonucleotide
  Sense strand starting at position 2356 of SEQ ID NO: 1562498
gaaaucugucuuggucaau

SEQ ID NO: 1751712 - RNA, 19 nt, Artificial Sequence
  Description of Artificial Sequence: Synthetic oligonucleotide
  Antisense strand to SEQ ID NO: 1751711
auugaccaagacagauuuc

SEQ ID NO: 1751713 - RNA, 19 nt, Artificial Sequence
  Description of Artificial Sequence: Synthetic oligonucleotide
  Sense strand starting at position 2359 of SEQ ID NO: 1562498
aucugucuuggucaauaaa

SEQ ID NO: 1751714 - RNA, 19 nt, Artificial Sequence
  Description of Artificial Sequence: Synthetic oligonucleotide
  Antisense strand to SEQ ID NO: 1751713
uuuauugaccaagacagau

SEQ ID NO: 1751715 - RNA, 19 nt, Artificial Sequence
  Description of Artificial Sequence: Synthetic oligonucleotide
  Sense strand starting at position 2447 of SEQ ID NO: 1562498
uuggaugaaugucccaauu

SEQ ID NO: 1751716 - RNA, 19 nt, Artificial Sequence
  Description of Artificial Sequence: Synthetic oligonucleotide
  Antisense strand to SEQ ID NO: 1751715
aauugggacauucauccaa

SEQ ID NO: 1751717 - RNA, 19 nt, Artificial Sequence
  Description of Artificial Sequence: Synthetic oligonucleotide
  Sense strand starting at position 2449 of SEQ ID NO: 1562498
ggaugaaugucccaauuuc

SEQ ID NO: 1751718 - RNA, 19 nt, Artificial Sequence
  Description of Artificial Sequence: Synthetic oligonucleotide
  Antisense strand to SEQ ID NO: 1751717
gaaauugggacauucaucc

SEQ ID NO: 1751719 - RNA, 19 nt, Artificial Sequence
  Description of Artificial Sequence: Synthetic oligonucleotide
  Sense strand starting at position 2469 of SEQ ID NO: 1562498
acuuguaucccacagugga

SEQ ID NO: 1751720 - RNA, 19 nt, Artificial Sequence
  Description of Artificial Sequence: Synthetic oligonucleotide
  Antisense strand to SEQ ID NO: 1751719
uccacugugggauacaagu

SEQ ID NO: 1751721 - RNA, 19 nt, Artificial Sequence
  Description of Artificial Sequence: Synthetic oligonucleotide
  Sense strand starting at position 2629 of SEQ ID NO: 1562498
cuuugaaacugagcaaucu

SEQ ID NO: 1751722 - RNA, 19 nt, Artificial Sequence
  Description of Artificial Sequence: Synthetic oligonucleotide
  Antisense strand to SEQ ID NO: 1751721
agauugcucaguuucaaag

SEQ ID NO: 1751723 - RNA, 19 nt, Artificial Sequence
  Description of Artificial Sequence: Synthetic oligonucleotide
  Sense strand starting at position 2920 of SEQ ID NO: 1562498
agaugccugguuuggagaa

SEQ ID NO: 1751724 - RNA, 19 nt, Artificial Sequence
  Description of Artificial Sequence: Synthetic oligonucleotide
  Antisense strand to SEQ ID NO: 1751723
uucuccaaaccaggcaucu

SEQ ID NO: 1751725 - RNA, 19 nt, Artificial Sequence
  Description of Artificial Sequence: Synthetic oligonucleotide
  Sense strand starting at position 2979 of SEQ ID NO: 1562498
guugcaacucuugaaccuu

SEQ ID NO: 1751726 - RNA, 19 nt, Artificial Sequence
  Description of Artificial Sequence: Synthetic oligonucleotide
  Antisense strand to SEQ ID NO: 1751725
aagguucaagaguugcaac

SEQ ID NO: 1751727 - RNA, 19 nt, Artificial Sequence
  Description of Artificial Sequence: Synthetic oligonucleotide
  Sense strand starting at position 3012 of SEQ ID NO: 1562498
aguuuagaucccuauggca

SEQ ID NO: 1751728 - RNA, 19 nt, Artificial Sequence
  Description of Artificial Sequence: Synthetic oligonucleotide
  Antisense strand to SEQ ID NO: 1751727
ugccauagggaucuaaacu

SEQ ID NO: 1751729 - RNA, 19 nt, Artificial Sequence
  Description of Artificial Sequence: Synthetic oligonucleotide
  Sense strand starting at position 3295 of SEQ ID NO: 1562498
gugaguguugcuuaauuuc

SEQ ID NO: 1751730 - RNA, 19 nt, Artificial Sequence
  Description of Artificial Sequence: Synthetic oligonucleotide
  Antisense strand to SEQ ID NO: 1751729
gaaauuaagcaacacucac

SEQ ID NO: 1751731 - RNA, 19 nt, Artificial Sequence
  Description of Artificial Sequence: Synthetic oligonucleotide
  Sense strand starting at position 3330 of SEQ ID NO: 1562498
cugccaacuguagaguuau

SEQ ID NO: 1751732 - RNA, 19 nt, Artificial Sequence
  Description of Artificial Sequence: Synthetic oligonucleotide
  Antisense strand to SEQ ID NO: 1751731
auaacucuacaguuggcag

SEQ ID NO: 1751733 - RNA, 19 nt, Artificial Sequence
  Description of Artificial Sequence: Synthetic oligonucleotide
  Sense strand starting at position 3479 of SEQ ID NO: 1562498
aguggucauccuggaugau

SEQ ID NO: 1751734 - RNA, 19 nt, Artificial Sequence
  Description of Artificial Sequence: Synthetic oligonucleotide
  Antisense strand to SEQ ID NO: 1751733
aucauccaggaugaccacu

SEQ ID NO: 1751735 - RNA, 19 nt, Artificial Sequence
  Description of Artificial Sequence: Synthetic oligonucleotide
  Sense strand starting at position 3480 of SEQ ID NO: 1562498
guggucauccuggaugaug

SEQ ID NO: 1751736 - RNA, 19 nt, Artificial Sequence
  Description of Artificial Sequence: Synthetic oligonucleotide
  Antisense strand to SEQ ID NO: 1751735
caucauccaggaugaccac

SEQ ID NO: 1751737 - RNA, 19 nt, Artificial Sequence
  Description of Artificial Sequence: Synthetic oligonucleotide
  Sense strand starting at position 3488 of SEQ ID NO: 1562498
ccuggaugaugcuucgaga

SEQ ID NO: 1751738 - RNA, 19 nt, Artificial Sequence
  Description of Artificial Sequence: Synthetic oligonucleotide
  Antisense strand to SEQ ID NO: 1751737
ucucgaagcaucauccagg

SEQ ID NO: 1751739 - RNA, 19 nt, Artificial Sequence
  Description of Artificial Sequence: Synthetic oligonucleotide
  Sense strand starting at position 3548 of SEQ ID NO: 1562498
agccuuugucuguccagca

SEQ ID NO: 1751740 - RNA, 19 nt, Artificial Sequence
  Description of Artificial Sequence: Synthetic oligonucleotide
  Antisense strand to SEQ ID NO: 1751739
ugcuggacagacaaaggcu

SEQ ID NO: 1751741 - RNA, 19 nt, Artificial Sequence
  Description of Artificial Sequence: Synthetic oligonucleotide
  Sense strand starting at position 3662 of SEQ ID NO: 1562498
cuuggaacuucucugaugu

SEQ ID NO: 1751742 - RNA, 19 nt, Artificial Sequence
  Description of Artificial Sequence: Synthetic oligonucleotide
  Antisense strand to SEQ ID NO: 1751741
acaucagagaaguuccaag

SEQ ID NO: 1751743 - RNA, 19 nt, Artificial Sequence
  Description of Artificial Sequence: Synthetic oligonucleotide
  Sense strand starting at position 3663 of SEQ ID NO: 1562498
uuggaacuucucugauguu

SEQ ID NO: 1751744 - RNA, 19 nt, Artificial Sequence
  Description of Artificial Sequence: Synthetic oligonucleotide
  Antisense strand to SEQ ID NO: 1751743
aacaucagagaaguuccaa

SEQ ID NO: 1751745 - RNA, 19 nt, Artificial Sequence
  Description of Artificial Sequence: Synthetic oligonucleotide
  Sense strand starting at position 3901 of SEQ ID NO: 1562498
gugggcucacccgaauaua

SEQ ID NO: 1751746 - RNA, 19 nt, Artificial Sequence
  Description of Artificial Sequence: Synthetic oligonucleotide
  Antisense strand to SEQ ID NO: 1751745
uauauucgggugagcccac

SEQ ID NO: 1751747 - RNA, 19 nt, Artificial Sequence
  Description of Artificial Sequence: Synthetic oligonucleotide
  Sense strand starting at position 3904 of SEQ ID NO: 1562498
ggcucacccgaauauacaa

SEQ ID NO: 1751748 - RNA, 19 nt, Artificial Sequence
  Description of Artificial Sequence: Synthetic oligonucleotide
  Antisense strand to SEQ ID NO: 1751747
uuguauauucgggugagcc

SEQ ID NO: 1751749 - RNA, 19 nt, Artificial Sequence
  Description of Artificial Sequence: Synthetic oligonucleotide
  Sense strand starting at position 3929 of SEQ ID NO: 1562498
uuucguuauauggauggaa

SEQ ID NO: 1751750 - RNA, 19 nt, Artificial Sequence
  Description of Artificial Sequence: Synthetic oligonucleotide
  Antisense strand to SEQ ID NO: 1751749
uuccauccauauaacgaaa

SEQ ID NO: 1751751 - RNA, 19 nt, Artificial Sequence
  Description of Artificial Sequence: Synthetic oligonucleotide
  Sense strand starting at position 300 of SEQ ID NO: 1562499
cuuugaacuaguggugauu

SEQ ID NO: 1751752 - RNA, 19 nt, Artificial Sequence
  Description of Artificial Sequence: Synthetic oligonucleotide
  Antisense strand to SEQ ID NO: 1751751
aaucaccacuaguucaaag

SEQ ID NO: 1751753 - RNA, 19 nt, Artificial Sequence
  Description of Artificial Sequence: Synthetic oligonucleotide
  Sense strand starting at position 343 of SEQ ID NO: 1562499
ugguguuuccaagaaacac

SEQ ID NO: 1751754 - RNA, 19 nt, Artificial Sequence
  Description of Artificial Sequence: Synthetic oligonucleotide
  Antisense strand to SEQ ID NO: 1751753
guguuucuuggaaacacca

SEQ ID NO: 1751755 - RNA, 19 nt, Artificial Sequence
  Description of Artificial Sequence: Synthetic oligonucleotide
  Sense strand starting at position 564 of SEQ ID NO: 1562499
acucaaucagccgagcauu

SEQ ID NO: 1751756 - RNA, 19 nt, Artificial Sequence
  Description of Artificial Sequence: Synthetic oligonucleotide
  Antisense strand to SEQ ID NO: 1751755
aaugcucggcugauugagu

SEQ ID NO: 1751757 - RNA, 19 nt, Artificial Sequence
  Description of Artificial Sequence: Synthetic oligonucleotide
  Sense strand starting at position 640 of SEQ ID NO: 1562499
cugaguguauguguucaag

SEQ ID NO: 1751758 - RNA, 19 nt, Artificial Sequence
  Description of Artificial Sequence: Synthetic oligonucleotide
  Antisense strand to SEQ ID NO: 1751757
cuugaacacauacacucag

SEQ ID NO: 1751759 - RNA, 19 nt, Artificial Sequence
  Description of Artificial Sequence: Synthetic oligonucleotide
  Sense strand starting at position 642 of SEQ ID NO: 1562499
gaguguauguguucaagga

SEQ ID NO: 1751760 - RNA, 19 nt, Artificial Sequence
  Description of Artificial Sequence: Synthetic oligonucleotide
  Antisense strand to SEQ ID NO: 1751759
uccuugaacacauacacuc

SEQ ID NO: 1751761 - RNA, 19 nt, Artificial Sequence
  Description of Artificial Sequence: Synthetic oligonucleotide
  Sense strand starting at position 643 of SEQ ID NO: 1562499
aguguauguguucaaggaa

SEQ ID NO: 1751762 - RNA, 19 nt, Artificial Sequence
  Description of Artificial Sequence: Synthetic oligonucleotide
  Antisense strand to SEQ ID NO: 1751761
uuccuugaacacauacacu

SEQ ID NO: 1751763 - RNA, 19 nt, Artificial Sequence
  Description of Artificial Sequence: Synthetic oligonucleotide
  Sense strand starting at position 832 of SEQ ID NO: 1562499
ucaaauuaugcacagacga

SEQ ID NO: 1751764 - RNA, 19 nt, Artificial Sequence
  Description of Artificial Sequence: Synthetic oligonucleotide
  Antisense strand to SEQ ID NO: 1751763
ucgucugugcauaauuuga

SEQ ID NO: 1751765 - RNA, 19 nt, Artificial Sequence
  Description of Artificial Sequence: Synthetic oligonucleotide
  Sense strand starting at position 1030 of SEQ ID NO: 1562499
agcgggucggucucgaaau

SEQ ID NO: 1751766 - RNA, 19 nt, Artificial Sequence
  Description of Artificial Sequence: Synthetic oligonucleotide
  Antisense strand to SEQ ID NO: 1751765
auuucgagaccgacccgcu

SEQ ID NO: 1751767 - RNA, 19 nt, Artificial Sequence
  Description of Artificial Sequence: Synthetic oligonucleotide
  Sense strand starting at position 1032 of SEQ ID NO: 1562499
cgggucggucucgaaauua

SEQ ID NO: 1751768 - RNA, 19 nt, Artificial Sequence
  Description of Artificial Sequence: Synthetic oligonucleotide
  Antisense strand to SEQ ID NO: 1751767
uaauuucgagaccgacccg

SEQ ID NO: 1751769 - RNA, 19 nt, Artificial Sequence
  Description of Artificial Sequence: Synthetic oligonucleotide
  Sense strand starting at position 1201 of SEQ ID NO: 1562499
gaagcuuccgaccgaaaua

SEQ ID NO: 1751770 - RNA, 19 nt, Artificial Sequence
  Description of Artificial Sequence: Synthetic oligonucleotide
  Antisense strand to SEQ ID NO: 1751769
uauuucggucggaagcuuc

SEQ ID NO: 1751771 - RNA, 19 nt, Artificial Sequence
  Description of Artificial Sequence: Synthetic oligonucleotide
  Sense strand starting at position 1813 of SEQ ID NO: 1562499
caggucuuccaguggacau

SEQ ID NO: 1751772 - RNA, 19 nt, Artificial Sequence
  Description of Artificial Sequence: Synthetic oligonucleotide
  Antisense strand to SEQ ID NO: 1751771
auguccacuggaagaccug

SEQ ID NO: 1751773 - RNA, 19 nt, Artificial Sequence
  Description of Artificial Sequence: Synthetic oligonucleotide
  Sense strand starting at position 2237 of SEQ ID NO: 1562499
gucacaugcaguuguaaga

SEQ ID NO: 1751774 - RNA, 19 nt, Artificial Sequence
  Description of Artificial Sequence: Synthetic oligonucleotide
  Antisense strand to SEQ ID NO: 1751773
ucuuacaacugcaugugac

SEQ ID NO: 1751775 - RNA, 19 nt, Artificial Sequence
  Description of Artificial Sequence: Synthetic oligonucleotide
  Sense strand starting at position 2391 of SEQ ID NO: 1562499
ucuuccuuugcauguauua

SEQ ID NO: 1751776 - RNA, 19 nt, Artificial Sequence
  Description of Artificial Sequence: Synthetic oligonucleotide
  Antisense strand to SEQ ID NO: 1751775
uaauacaugcaaaggaaga

SEQ ID NO: 1751777 - RNA, 19 nt, Artificial Sequence
  Description of Artificial Sequence: Synthetic oligonucleotide
  Sense strand starting at position 2421 of SEQ ID NO: 1562499
uguaaucaucuguguaccu

SEQ ID NO: 1751778 - RNA, 19 nt, Artificial Sequence
  Description of Artificial Sequence: Synthetic oligonucleotide
  Antisense strand to SEQ ID NO: 1751777
agguacacagaugauuaca

SEQ ID NO: 1751779 - RNA, 19 nt, Artificial Sequence
  Description of Artificial Sequence: Synthetic oligonucleotide
  Sense strand starting at position 2422 of SEQ ID NO: 1562499
guaaucaucuguguaccuu

SEQ ID NO: 1751780 - RNA, 19 nt, Artificial Sequence
  Description of Artificial Sequence: Synthetic oligonucleotide
  Antisense strand to SEQ ID NO: 1751779
aagguacacagaugauuac

SEQ ID NO: 1751781 - RNA, 19 nt, Artificial Sequence
  Description of Artificial Sequence: Synthetic oligonucleotide
  Sense strand starting at position 2544 of SEQ ID NO: 1562499
cagaaauguuauguuuaga

SEQ ID NO: 1751782 - RNA, 19 nt, Artificial Sequence
  Description of Artificial Sequence: Synthetic oligonucleotide
  Antisense strand to SEQ ID NO: 1751781
ucuaaacauaacauuucug

SEQ ID NO: 1751783 - RNA, 19 nt, Artificial Sequence
  Description of Artificial Sequence: Synthetic oligonucleotide
  Sense strand starting at position 2567 of SEQ ID NO: 1562499
ggaaucauacagcgccuaa

SEQ ID NO: 1751784 - RNA, 19 nt, Artificial Sequence
  Description of Artificial Sequence: Synthetic oligonucleotide
  Antisense strand to SEQ ID NO: 1751783
uuaggcgcuguaugauucc

SEQ ID NO: 1751785 - RNA, 19 nt, Artificial Sequence
  Description of Artificial Sequence: Synthetic oligonucleotide
  Sense strand starting at position 2615 of SEQ ID NO: 1562499
agucuaauucccugcaggu

SEQ ID NO: 1751786 - RNA, 19 nt, Artificial Sequence
  Description of Artificial Sequence: Synthetic oligonucleotide
  Antisense strand to SEQ ID NO: 1751785
accugcagggaauuagacu

SEQ ID NO: 1751787 - RNA, 19 nt, Artificial Sequence
  Description of Artificial Sequence: Synthetic oligonucleotide
  Sense strand starting at position 2651 of SEQ ID NO: 1562499
acacgaguuuccucucaga

SEQ ID NO: 1751788 - RNA, 19 nt, Artificial Sequence
  Description of Artificial Sequence: Synthetic oligonucleotide
  Antisense strand to SEQ ID NO: 1751787
ucugagaggaaacucgugu

SEQ ID NO: 1751789 - RNA, 19 nt, Artificial Sequence
  Description of Artificial Sequence: Synthetic oligonucleotide
  Sense strand starting at position 2722 of SEQ ID NO: 1562499
augcaagaguucccucauc

SEQ ID NO: 1751790 - RNA, 19 nt, Artificial Sequence
  Description of Artificial Sequence: Synthetic oligonucleotide
  Antisense strand to SEQ ID NO: 1751789
gaugagggaacucuugcau

SEQ ID NO: 1751791 - RNA, 19 nt, Artificial Sequence
  Description of Artificial Sequence: Synthetic oligonucleotide
  Sense strand starting at position 2769 of SEQ ID NO: 1562499
gguagaacagaugguuuga

SEQ ID NO: 1751792 - RNA, 19 nt, Artificial Sequence
  Description of Artificial Sequence: Synthetic oligonucleotide
  Antisense strand to SEQ ID NO: 1751791
ucaaaccaucuguucuacc

SEQ ID NO: 1751793 - RNA, 19 nt, Artificial Sequence
  Description of Artificial Sequence: Synthetic oligonucleotide
  Sense strand starting at position 2829 of SEQ ID NO: 1562499
ccagccuuggaaggauauu

SEQ ID NO: 1751794 - RNA, 19 nt, Artificial Sequence
  Description of Artificial Sequence: Synthetic oligonucleotide
  Antisense strand to SEQ ID NO: 1751793
aauauccuuccaaggcugg

SEQ ID NO: 1751795 - RNA, 19 nt, Artificial Sequence
  Description of Artificial Sequence: Synthetic oligonucleotide
  Sense strand starting at position 2838 of SEQ ID NO: 1562499
gaaggauauuuggguuaga

SEQ ID NO: 1751796 - RNA, 19 nt, Artificial Sequence
  Description of Artificial Sequence: Synthetic oligonucleotide
  Antisense strand to SEQ ID NO: 1751795
ucuaacccaaauauccuuc

SEQ ID NO: 1751797 - RNA, 19 nt, Artificial Sequence
  Description of Artificial Sequence: Synthetic oligonucleotide
  Sense strand starting at position 2858 of SEQ ID NO: 1562499
gccgaagugcaucacagau

SEQ ID NO: 1751798 - RNA, 19 nt, Artificial Sequence
  Description of Artificial Sequence: Synthetic oligonucleotide
  Antisense strand to SEQ ID NO: 1751797
aucugugaugcacuucggc

SEQ ID NO: 1751799 - RNA, 19 nt, Artificial Sequence
  Description of Artificial Sequence: Synthetic oligonucleotide
  Sense strand starting at position 2953 of SEQ ID NO: 1562499
acaggagauuaauaaugaa

SEQ ID NO: 1751800 - RNA, 19 nt, Artificial Sequence
  Description of Artificial Sequence: Synthetic oligonucleotide
  Antisense strand to SEQ ID NO: 1751799
uucauuauuaaucuccugu

SEQ ID NO: 1751801 - RNA, 19 nt, Artificial Sequence
  Description of Artificial Sequence: Synthetic oligonucleotide
  Sense strand starting at position 2956 of SEQ ID NO: 1562499
ggagauuaauaaugaagac

SEQ ID NO: 1751802 - RNA, 19 nt, Artificial Sequence
  Description of Artificial Sequence: Synthetic oligonucleotide
  Antisense strand to SEQ ID NO: 1751801
gucuucauuauuaaucucc

SEQ ID NO: 1751803 - RNA, 19 nt, Artificial Sequence
  Description of Artificial Sequence: Synthetic oligonucleotide
  Sense strand starting at position 3025 of SEQ ID NO: 1562499
uuguguuaguaacucggaa

SEQ ID NO: 1751804 - RNA, 19 nt, Artificial Sequence
  Description of Artificial Sequence: Synthetic oligonucleotide
  Antisense strand to SEQ ID NO: 1751803
uuccgaguuacuaacacaa

SEQ ID NO: 1751805 - RNA, 19 nt, Artificial Sequence
  Description of Artificial Sequence: Synthetic oligonucleotide
  Sense strand starting at position 3027 of SEQ ID NO: 1562499
guguuaguaacucggaaag

SEQ ID NO: 1751806 - RNA, 19 nt, Artificial Sequence
  Description of Artificial Sequence: Synthetic oligonucleotide
  Antisense strand to SEQ ID NO: 1751805
cuuuccgaguuacuaacac

SEQ ID NO: 1751807 - RNA, 19 nt, Artificial Sequence
  Description of Artificial Sequence: Synthetic oligonucleotide
  Sense strand starting at position 3290 of SEQ ID NO: 1562499
uaaaguuggucuccuuaag

SEQ ID NO: 1751808 - RNA, 19 nt, Artificial Sequence
  Description of Artificial Sequence: Synthetic oligonucleotide
  Antisense strand to SEQ ID NO: 1751807
cuuaaggagaccaacuuua

SEQ ID NO: 1751809 - RNA, 19 nt, Artificial Sequence
  Description of Artificial Sequence: Synthetic oligonucleotide
  Sense strand starting at position 3397 of SEQ ID NO: 1562499
cuacgaagauaccuuggaa

SEQ ID NO: 1751810 - RNA, 19 nt, Artificial Sequence
  Description of Artificial Sequence: Synthetic oligonucleotide
  Antisense strand to SEQ ID NO: 1751809
uuccaagguaucuucguag

SEQ ID NO: 1751811 - RNA, 19 nt, Artificial Sequence
  Description of Artificial Sequence: Synthetic oligonucleotide
  Sense strand starting at position 3400 of SEQ ID NO: 1562499
cgaagauaccuuggaagua

SEQ ID NO: 1751812 - RNA, 19 nt, Artificial Sequence
  Description of Artificial Sequence: Synthetic oligonucleotide
  Antisense strand to SEQ ID NO: 1751811
uacuuccaagguaucuucg

SEQ ID NO: 1751813 - RNA, 19 nt, Artificial Sequence
  Description of Artificial Sequence: Synthetic oligonucleotide
  Sense strand starting at position 3401 of SEQ ID NO: 1562499
gaagauaccuuggaaguaa

SEQ ID NO: 1751814 - RNA, 19 nt, Artificial Sequence
  Description of Artificial Sequence: Synthetic oligonucleotide
  Antisense strand to SEQ ID NO: 1751813
uuacuuccaagguaucuuc

SEQ ID NO: 1751815 - RNA, 19 nt, Artificial Sequence
  Description of Artificial Sequence: Synthetic oligonucleotide
  Sense strand starting at position 3453 of SEQ ID NO: 1562499
uggacuugaaagugaguca

SEQ ID NO: 1751816 - RNA, 19 nt, Artificial Sequence
  Description of Artificial Sequence: Synthetic oligonucleotide
  Antisense strand to SEQ ID NO: 1751815
ugacucacuuucaagucca

SEQ ID NO: 1751817 - RNA, 19 nt, Artificial Sequence
  Description of Artificial Sequence: Synthetic oligonucleotide
  Sense strand starting at position 3628 of SEQ ID NO: 1562499
gacaaauauuuauggagug

SEQ ID NO: 1751818 - RNA, 19 nt, Artificial Sequence
  Description of Artificial Sequence: Synthetic oligonucleotide
  Antisense strand to SEQ ID NO: 1751817
cacuccauaaauauuuguc

SEQ ID NO: 1751819 - RNA, 19 nt, Artificial Sequence
  Description of Artificial Sequence: Synthetic oligonucleotide
  Sense strand starting at position 3729 of SEQ ID NO: 1562499
gcagaucggguccaaagau

SEQ ID NO: 1751820 - RNA, 19 nt, Artificial Sequence
  Description of Artificial Sequence: Synthetic oligonucleotide
  Antisense strand to SEQ ID NO: 1751819
aucuuuggacccgaucugc

SEQ ID NO: 1751821 - RNA, 19 nt, Artificial Sequence
  Description of Artificial Sequence: Synthetic oligonucleotide
  Sense strand starting at position 3761 of SEQ ID NO: 1562499
gcaggaaccugguuuggua

SEQ ID NO: 1751822 - RNA, 19 nt, Artificial Sequence
  Description of Artificial Sequence: Synthetic oligonucleotide
  Antisense strand to SEQ ID NO: 1751821
uaccaaaccagguuccugc

SEQ ID NO: 1751823 - RNA, 19 nt, Artificial Sequence
  Description of Artificial Sequence: Synthetic oligonucleotide
  Sense strand starting at position 3793 of SEQ ID NO: 1562499
cggacuuugaagugcuuua

SEQ ID NO: 1751824 - RNA, 19 nt, Artificial Sequence
  Description of Artificial Sequence: Synthetic oligonucleotide
  Antisense strand to SEQ ID NO: 1751823
uaaagcacuucaaaguccg

SEQ ID NO: 1751825 - RNA, 19 nt, Artificial Sequence
  Description of Artificial Sequence: Synthetic oligonucleotide
  Sense strand starting at position 3798 of SEQ ID NO: 1562499
uuugaagugcuuuaccgau

SEQ ID NO: 1751826 - RNA, 19 nt, Artificial Sequence
  Description of Artificial Sequence: Synthetic oligonucleotide
  Antisense strand to SEQ ID NO: 1751825
aucgguaaagcacuucaaa

SEQ ID NO: 1751827 - RNA, 19 nt, Artificial Sequence
  Description of Artificial Sequence: Synthetic oligonucleotide
  Sense strand starting at position 3846 of SEQ ID NO: 1562499
acaccuuuccaggaauugu

SEQ ID NO: 1751828 - RNA, 19 nt, Artificial Sequence
  Description of Artificial Sequence: Synthetic oligonucleotide
  Antisense strand to SEQ ID NO: 1751827
acaauuccuggaaaggugu

SEQ ID NO: 1751829 - RNA, 19 nt, Artificial Sequence
  Description of Artificial Sequence: Synthetic oligonucleotide
  Sense strand starting at position 3904 of SEQ ID NO: 1562499
gcugcuauuuauguuaaca

SEQ ID NO: 1751830 - RNA, 19 nt, Artificial Sequence
  Description of Artificial Sequence: Synthetic oligonucleotide
  Antisense strand to SEQ ID NO: 1751829
uguuaacauaaauagcagc

SEQ ID NO: 1751831 - RNA, 19 nt, Artificial Sequence
  Description of Artificial Sequence: Synthetic oligonucleotide
  Sense strand starting at position 158 of SEQ ID NO: 1562500
gcgagucaggucugauuaa

SEQ ID NO: 1751832 - RNA, 19 nt, Artificial Sequence
  Description of Artificial Sequence: Synthetic oligonucleotide
  Antisense strand to SEQ ID NO: 1751831
uuaaucagaccugacucgc

SEQ ID NO: 1751833 - RNA, 19 nt, Artificial Sequence
  Description of Artificial Sequence: Synthetic oligonucleotide
  Sense strand starting at position 159 of SEQ ID NO: 1562500
cgagucaggucugauuaac

SEQ ID NO: 1751834 - RNA, 19 nt, Artificial Sequence
  Description of Artificial Sequence: Synthetic oligonucleotide
  Antisense strand to SEQ ID NO: 1751833
guuaaucagaccugacucg

SEQ ID NO: 1751835 - RNA, 19 nt, Artificial Sequence
  Description of Artificial Sequence: Synthetic oligonucleotide
  Sense strand starting at position 165 of SEQ ID NO: 1562500
aggucugauuaacaccuua

SEQ ID NO: 1751836 - RNA, 19 nt, Artificial Sequence
  Description of Artificial Sequence: Synthetic oligonucleotide
  Antisense strand to SEQ ID NO: 1751835
uaagguguuaaucagaccu

SEQ ID NO: 1751837 - RNA, 19 nt, Artificial Sequence
  Description of Artificial Sequence: Synthetic oligonucleotide
  Sense strand starting at position 431 of SEQ ID NO: 1562500
gagugaacccugggcacuu

SEQ ID NO: 1751838 - RNA, 19 nt, Artificial Sequence
  Description of Artificial Sequence: Synthetic oligonucleotide
  Antisense strand to SEQ ID NO: 1751837
aagugcccaggguucacuc

SEQ ID NO: 1751839 - RNA, 19 nt, Artificial Sequence
  Description of Artificial Sequence: Synthetic oligonucleotide
  Sense strand starting at position 475 of SEQ ID NO: 1562500
gagcuauucuuaguuccag

SEQ ID NO: 1751840 - RNA, 19 nt, Artificial Sequence
  Description of Artificial Sequence: Synthetic oligonucleotide
  Antisense strand to SEQ ID NO: 1751839
cuggaacuaagaauagcuc

SEQ ID NO: 1751841 - RNA, 19 nt, Artificial Sequence
  Description of Artificial Sequence: Synthetic oligonucleotide
  Sense strand starting at position 476 of SEQ ID NO: 1562500
agcuauucuuaguuccagu

SEQ ID NO: 1751842 - RNA, 19 nt, Artificial Sequence
  Description of Artificial Sequence: Synthetic oligonucleotide
  Antisense strand to SEQ ID NO: 1751841
acuggaacuaagaauagcu

SEQ ID NO: 1751843 - RNA, 19 nt, Artificial Sequence
  Description of Artificial Sequence: Synthetic oligonucleotide
  Sense strand starting at position 525 of SEQ ID NO: 1562500
caggaacuuucccuggagu

SEQ ID NO: 1751844 - RNA, 19 nt, Artificial Sequence
  Description of Artificial Sequence: Synthetic oligonucleotide
  Antisense strand to SEQ ID NO: 1751843
acuccagggaaaguuccug

SEQ ID NO: 1751845 - RNA, 19 nt, Artificial Sequence
  Description of Artificial Sequence: Synthetic oligonucleotide
  Sense strand starting at position 526 of SEQ ID NO: 1562500
aggaacuuucccuggaguu

SEQ ID NO: 1751846 - RNA, 19 nt, Artificial Sequence
  Description of Artificial Sequence: Synthetic oligonucleotide
  Antisense strand to SEQ ID NO: 1751845
aacuccagggaaaguuccu

SEQ ID NO: 1751847 - RNA, 19 nt, Artificial Sequence
  Description of Artificial Sequence: Synthetic oligonucleotide
  Sense strand starting at position 527 of SEQ ID NO: 1562500
ggaacuuucccuggaguuc

SEQ ID NO: 1751848 - RNA, 19 nt, Artificial Sequence
  Description of Artificial Sequence: Synthetic oligonucleotide
  Antisense strand to SEQ ID NO: 1751847
gaacuccagggaaaguucc

SEQ ID NO: 1751849 - RNA, 19 nt, Artificial Sequence
  Description of Artificial Sequence: Synthetic oligonucleotide
  Sense strand starting at position 543 of SEQ ID NO: 1562500
uucucagggcuguggauaa

SEQ ID NO: 1751850 - RNA, 19 nt, Artificial Sequence
  Description of Artificial Sequence: Synthetic oligonucleotide
  Antisense strand to SEQ ID NO: 1751849
uuauccacagcccugagaa

SEQ ID NO: 1751851 - RNA, 19 nt, Artificial Sequence
  Description of Artificial Sequence: Synthetic oligonucleotide
  Sense strand starting at position 554 of SEQ ID NO: 1562500
guggauaaauuacugucau

SEQ ID NO: 1751852 - RNA, 19 nt, Artificial Sequence
  Description of Artificial Sequence: Synthetic oligonucleotide
  Antisense strand to SEQ ID NO: 1751851
augacaguaauuuauccac

SEQ ID NO: 1751853 - RNA, 19 nt, Artificial Sequence
  Description of Artificial Sequence: Synthetic oligonucleotide
  Sense strand starting at position 602 of SEQ ID NO: 1562500
aguucucugucuccaguua

SEQ ID NO: 1751854 - RNA, 19 nt, Artificial Sequence
  Description of Artificial Sequence: Synthetic oligonucleotide
  Antisense strand to SEQ ID NO: 1751853
uaacuggagacagagaacu

SEQ ID NO: 1751855 - RNA, 19 nt, Artificial Sequence
  Description of Artificial Sequence: Synthetic oligonucleotide
  Sense strand starting at position 603 of SEQ ID NO: 1562500
guucucugucuccaguuaa

SEQ ID NO: 1751856 - RNA, 19 nt, Artificial Sequence
  Description of Artificial Sequence: Synthetic oligonucleotide
  Antisense strand to SEQ ID NO: 1751855
uuaacuggagacagagaac

SEQ ID NO: 1751857 - RNA, 19 nt, Artificial Sequence
  Description of Artificial Sequence: Synthetic oligonucleotide
  Sense strand starting at position 614 of SEQ ID NO: 1562500
ccaguuaagcuuugagaag

SEQ ID NO: 1751858 - RNA, 19 nt, Artificial Sequence
  Description of Artificial Sequence: Synthetic oligonucleotide
  Antisense strand to SEQ ID NO: 1751857
cuucucaaagcuuaacugg

SEQ ID NO: 1751859 - RNA, 19 nt, Artificial Sequence
  Description of Artificial Sequence: Synthetic oligonucleotide
  Sense strand starting at position 666 of SEQ ID NO: 1562500
cccauuaguugagagauuu

SEQ ID NO: 1751860 - RNA, 19 nt, Artificial Sequence
  Description of Artificial Sequence: Synthetic oligonucleotide
  Antisense strand to SEQ ID NO: 1751859
aaaucucucaacuaauggg

SEQ ID NO: 1751861 - RNA, 19 nt, Artificial Sequence
  Description of Artificial Sequence: Synthetic oligonucleotide
  Sense strand starting at position 690 of SEQ ID NO: 1562500
ccugcaaauccuggcugaa

SEQ ID NO: 1751862 - RNA, 19 nt, Artificial Sequence
  Description of Artificial Sequence: Synthetic oligonucleotide
  Antisense strand to SEQ ID NO: 1751861
uucagccaggauuugcagg

SEQ ID NO: 1751863 - RNA, 19 nt, Artificial Sequence
  Description of Artificial Sequence: Synthetic oligonucleotide
  Sense strand starting at position 692 of SEQ ID NO: 1562500
ugcaaauccuggcugaauu

SEQ ID NO: 1751864 - RNA, 19 nt, Artificial Sequence
  Description of Artificial Sequence: Synthetic oligonucleotide
  Antisense strand to SEQ ID NO: 1751863
aauucagccaggauuugca

SEQ ID NO: 1751865 - RNA, 19 nt, Artificial Sequence
  Description of Artificial Sequence: Synthetic oligonucleotide
  Sense strand starting at position 693 of SEQ ID NO: 1562500
gcaaauccuggcugaauug

SEQ ID NO: 1751866 - RNA, 19 nt, Artificial Sequence
  Description of Artificial Sequence: Synthetic oligonucleotide
  Antisense strand to SEQ ID NO: 1751865
caauucagccaggauuugc

SEQ ID NO: 1751867 - RNA, 19 nt, Artificial Sequence
  Description of Artificial Sequence: Synthetic oligonucleotide
  Sense strand starting at position 789 of SEQ ID NO: 1562500
ggagauugauucuacagag

SEQ ID NO: 1751868 - RNA, 19 nt, Artificial Sequence
  Description of Artificial Sequence: Synthetic oligonucleotide
  Antisense strand to SEQ ID NO: 1751867
cucuguagaaucaaucucc

SEQ ID NO: 1751869 - RNA, 19 nt, Artificial Sequence
  Description of Artificial Sequence: Synthetic oligonucleotide
  Sense strand starting at position 815 of SEQ ID NO: 1562500
uacagaguuguaggaugaa

SEQ ID NO: 1751870 - RNA, 19 nt, Artificial Sequence
  Description of Artificial Sequence: Synthetic oligonucleotide
  Antisense strand to SEQ ID NO: 1751869
uucauccuacaacucugua

SEQ ID NO: 1751871 - RNA, 19 nt, Artificial Sequence
  Description of Artificial Sequence: Synthetic oligonucleotide
  Sense strand starting at position 900 of SEQ ID NO: 1562500
ggcugagguuacuggauca

SEQ ID NO: 1751872 - RNA, 19 nt, Artificial Sequence
  Description of Artificial Sequence: Synthetic oligonucleotide
  Antisense strand to SEQ ID NO: 1751871
ugauccaguaaccucagcc

SEQ ID NO: 1751873 - RNA, 19 nt, Artificial Sequence
  Description of Artificial Sequence: Synthetic oligonucleotide
  Sense strand starting at position 1009 of SEQ ID NO: 1562500
gcgcguguaaucccugcua

SEQ ID NO: 1751874 - RNA, 19 nt, Artificial Sequence
  Description of Artificial Sequence: Synthetic oligonucleotide
  Antisense strand to SEQ ID NO: 1751873
uagcagggauuacacgcgc

SEQ ID NO: 1751875 - RNA, 19 nt, Artificial Sequence
  Description of Artificial Sequence: Synthetic oligonucleotide
  Sense strand starting at position 1346 of SEQ ID NO: 1562500
gugagagauugccuuugca

SEQ ID NO: 1751876 - RNA, 19 nt, Artificial Sequence
  Description of Artificial Sequence: Synthetic oligonucleotide
  Antisense strand to SEQ ID NO: 1751875
ugcaaaggcaaucucucac

SEQ ID NO: 1751877 - RNA, 19 nt, Artificial Sequence
  Description of Artificial Sequence: Synthetic oligonucleotide
  Sense strand starting at position 2407 of SEQ ID NO: 1562500
gggcuuugguccugugcga

SEQ ID NO: 1751878 - RNA, 19 nt, Artificial Sequence
  Description of Artificial Sequence: Synthetic oligonucleotide
  Antisense strand to SEQ ID NO: 1751877
ucgcacaggaccaaagccc

SEQ ID NO: 1751879 - RNA, 19 nt, Artificial Sequence
  Description of Artificial Sequence: Synthetic oligonucleotide
  Sense strand starting at position 2447 of SEQ ID NO: 1562500
cggagaaucucgcuuccac

SEQ ID NO: 1751880 - RNA, 19 nt, Artificial Sequence
  Description of Artificial Sequence: Synthetic oligonucleotide
  Antisense strand to SEQ ID NO: 1751879
guggaagcgagauucuccg

SEQ ID NO: 1751881 - RNA, 19 nt, Artificial Sequence
  Description of Artificial Sequence: Synthetic oligonucleotide
  Sense strand starting at position 2737 of SEQ ID NO: 1562500
cgggcuucuccuucgguua

SEQ ID NO: 1751882 - RNA, 19 nt, Artificial Sequence
  Description of Artificial Sequence: Synthetic oligonucleotide
  Antisense strand to SEQ ID NO: 1751881
uaaccgaaggagaagcccg

SEQ ID NO: 1751883 - RNA, 19 nt, Artificial Sequence
  Description of Artificial Sequence: Synthetic oligonucleotide
  Sense strand starting at position 2884 of SEQ ID NO: 1562500
agcgguuucacacguagag

SEQ ID NO: 1751884 - RNA, 19 nt, Artificial Sequence
  Description of Artificial Sequence: Synthetic oligonucleotide
  Antisense strand to SEQ ID NO: 1751883
cucuacgugugaaaccgcu

SEQ ID NO: 1751885 - RNA, 19 nt, Artificial Sequence
  Description of Artificial Sequence: Synthetic oligonucleotide
  Sense strand starting at position 2977 of SEQ ID NO: 1562500
aauuuaaguuacugugaug

SEQ ID NO: 1751886 - RNA, 19 nt, Artificial Sequence
  Description of Artificial Sequence: Synthetic oligonucleotide
  Antisense strand to SEQ ID NO: 1751885
caucacaguaacuuaaauu

SEQ ID NO: 1751887 - RNA, 19 nt, Artificial Sequence
  Description of Artificial Sequence: Synthetic oligonucleotide
  Sense strand starting at position 2980 of SEQ ID NO: 1562500
uuaaguuacugugauggau

SEQ ID NO: 1751888 - RNA, 19 nt, Artificial Sequence
  Description of Artificial Sequence: Synthetic oligonucleotide
  Antisense strand to SEQ ID NO: 1751887
auccaucacaguaacuuaa

SEQ ID NO: 1751889 - RNA, 19 nt, Artificial Sequence
  Description of Artificial Sequence: Synthetic oligonucleotide
  Sense strand starting at position 2982 of SEQ ID NO: 1562500
aaguuacugugauggaugu

SEQ ID NO: 1751890 - RNA, 19 nt, Artificial Sequence
  Description of Artificial Sequence: Synthetic oligonucleotide
  Antisense strand to SEQ ID NO: 1751889
acauccaucacaguaacuu

SEQ ID NO: 1751891 - RNA, 19 nt, Artificial Sequence
  Description of Artificial Sequence: Synthetic oligonucleotide
  Sense strand starting at position 2984 of SEQ ID NO: 1562500
guuacugugauggauguua

SEQ ID NO: 1751892 - RNA, 19 nt, Artificial Sequence
  Description of Artificial Sequence: Synthetic oligonucleotide
  Antisense strand to SEQ ID NO: 1751891
uaacauccaucacaguaac

SEQ ID NO: 1751893 - RNA, 19 nt, Artificial Sequence
  Description of Artificial Sequence: Synthetic oligonucleotide
  Sense strand starting at position 2986 of SEQ ID NO: 1562500
uacugugauggauguuaaa

SEQ ID NO: 1751894 - RNA, 19 nt, Artificial Sequence
  Description of Artificial Sequence: Synthetic oligonucleotide
  Antisense strand to SEQ ID NO: 1751893
uuuaacauccaucacagua

SEQ ID NO: 1751895 - RNA, 19 nt, Artificial Sequence
  Description of Artificial Sequence: Synthetic oligonucleotide
  Sense strand starting at position 3773 of SEQ ID NO: 1562500
agaacauuagugggccaua

SEQ ID NO: 1751896 - RNA, 19 nt, Artificial Sequence
  Description of Artificial Sequence: Synthetic oligonucleotide
  Antisense strand to SEQ ID NO: 1751895
uauggcccacuaauguucu

SEQ ID NO: 1751897 - RNA, 19 nt, Artificial Sequence
  Description of Artificial Sequence: Synthetic oligonucleotide
  Sense strand starting at position 3774 of SEQ ID NO: 1562500
gaacauuagugggccauau

SEQ ID NO: 1751898 - RNA, 19 nt, Artificial Sequence
  Description of Artificial Sequence: Synthetic oligonucleotide
  Antisense strand to SEQ ID NO: 1751897
auauggcccacuaauguuc

SEQ ID NO: 1751899 - RNA, 19 nt, Artificial Sequence
  Description of Artificial Sequence: Synthetic oligonucleotide
  Sense strand starting at position 3783 of SEQ ID NO: 1562500
ugggccauauugcaacaau

SEQ ID NO: 1751900 - RNA, 19 nt, Artificial Sequence
  Description of Artificial Sequence: Synthetic oligonucleotide
  Antisense strand to SEQ ID NO: 1751899
auuguugcaauauggccca

SEQ ID NO: 1751901 - RNA, 19 nt, Artificial Sequence
  Description of Artificial Sequence: Synthetic oligonucleotide
  Sense strand starting at position 3786 of SEQ ID NO: 1562500
gccauauugcaacaauaag

SEQ ID NO: 1751902 - RNA, 19 nt, Artificial Sequence
  Description of Artificial Sequence: Synthetic oligonucleotide
  Antisense strand to SEQ ID NO: 1751901
cuuauuguugcaauauggc

SEQ ID NO: 1751903 - RNA, 19 nt, Artificial Sequence
  Description of Artificial Sequence: Synthetic oligonucleotide
  Sense strand starting at position 3865 of SEQ ID NO: 1562500
ggcucaauccuguaaucug

SEQ ID NO: 1751904 - RNA, 19 nt, Artificial Sequence
  Description of Artificial Sequence: Synthetic oligonucleotide
  Antisense strand to SEQ ID NO: 1751903
cagauuacaggauugagcc

SEQ ID NO: 1751905 - RNA, 19 nt, Artificial Sequence
  Description of Artificial Sequence: Synthetic oligonucleotide
  Sense strand starting at position 2 of SEQ ID NO: 1562501
gagcgaaacuccgacuuaa

SEQ ID NO: 1751906 - RNA, 19 nt, Artificial Sequence
  Description of Artificial Sequence: Synthetic oligonucleotide
  Antisense strand to SEQ ID NO: 1751905
uuaagucggaguuucgcuc

SEQ ID NO: 1751907 - RNA, 19 nt, Artificial Sequence
  Description of Artificial Sequence: Synthetic oligonucleotide
  Sense strand starting at position 378 of SEQ ID NO: 1562501
gcggcuacuccagguaacu

SEQ ID NO: 1751908 - RNA, 19 nt, Artificial Sequence
  Description of Artificial Sequence: Synthetic oligonucleotide
  Antisense strand to SEQ ID NO: 1751907
aguuaccuggaguagccgc

SEQ ID NO: 1751909 - RNA, 19 nt, Artificial Sequence
  Description of Artificial Sequence: Synthetic oligonucleotide
  Sense strand starting at position 425 of SEQ ID NO: 1562501
ugagaucuacaagguauca

SEQ ID NO: 1751910 - RNA, 19 nt, Artificial Sequence
  Description of Artificial Sequence: Synthetic oligonucleotide
  Antisense strand to SEQ ID NO: 1751909
ugauaccuuguagaucuca

SEQ ID NO: 1751911 - RNA, 19 nt, Artificial Sequence
  Description of Artificial Sequence: Synthetic oligonucleotide
  Sense strand starting at position 515 of SEQ ID NO: 1562501
agguuaaucuguuggugau

SEQ ID NO: 1751912 - RNA, 19 nt, Artificial Sequence
  Description of Artificial Sequence: Synthetic oligonucleotide
  Antisense strand to SEQ ID NO: 1751911
aucaccaacagauuaaccu

SEQ ID NO: 1751913 - RNA, 19 nt, Artificial Sequence
  Description of Artificial Sequence: Synthetic oligonucleotide
  Sense strand starting at position 516 of SEQ ID NO: 1562501
gguuaaucuguuggugaua

SEQ ID NO: 1751914 - RNA, 19 nt, Artificial Sequence
  Description of Artificial Sequence: Synthetic oligonucleotide
  Antisense strand to SEQ ID NO: 1751913
uaucaccaacagauuaacc

SEQ ID NO: 1751915 - RNA, 19 nt, Artificial Sequence
  Description of Artificial Sequence: Synthetic oligonucleotide
  Sense strand starting at position 517 of SEQ ID NO: 1562501
guuaaucuguuggugauaa

SEQ ID NO: 1751916 - RNA, 19 nt, Artificial Sequence
  Description of Artificial Sequence: Synthetic oligonucleotide
  Antisense strand to SEQ ID NO: 1751915
uuaucaccaacagauuaac

SEQ ID NO: 1751917 - RNA, 19 nt, Artificial Sequence
  Description of Artificial Sequence: Synthetic oligonucleotide
  Sense strand starting at position 518 of SEQ ID NO: 1562501
uuaaucuguuggugauaau

SEQ ID NO: 1751918 - RNA, 19 nt, Artificial Sequence
  Description of Artificial Sequence: Synthetic oligonucleotide
  Antisense strand to SEQ ID NO: 1751917
auuaucaccaacagauuaa

SEQ ID NO: 1751919 - RNA, 19 nt, Artificial Sequence
  Description of Artificial Sequence: Synthetic oligonucleotide
  Sense strand starting at position 519 of SEQ ID NO: 1562501
uaaucuguuggugauaauu

SEQ ID NO: 1751920 - RNA, 19 nt, Artificial Sequence
  Description of Artificial Sequence: Synthetic oligonucleotide
  Antisense strand to SEQ ID NO: 1751919
aauuaucaccaacagauua

SEQ ID NO: 1751921 - RNA, 19 nt, Artificial Sequence
  Description of Artificial Sequence: Synthetic oligonucleotide
  Sense strand starting at position 544 of SEQ ID NO: 1562501
gcauuauacugagggcuuc

SEQ ID NO: 1751922 - RNA, 19 nt, Artificial Sequence
  Description of Artificial Sequence: Synthetic oligonucleotide
  Antisense strand to SEQ ID NO: 1751921
gaagcccucaguauaaugc

SEQ ID NO: 1751923 - RNA, 19 nt, Artificial Sequence
  Description of Artificial Sequence: Synthetic oligonucleotide
  Sense strand starting at position 688 of SEQ ID NO: 1562501
ggaauugagugcugaggca

SEQ ID NO: 1751924 - RNA, 19 nt, Artificial Sequence
  Description of Artificial Sequence: Synthetic oligonucleotide
  Antisense strand to SEQ ID NO: 1751923
ugccucagcacucaauucc

SEQ ID NO: 1751925 - RNA, 19 nt, Artificial Sequence
  Description of Artificial Sequence: Synthetic oligonucleotide
  Sense strand starting at position 880 of SEQ ID NO: 1562501
cuguaaucgugccaaugca

SEQ ID NO: 1751926 - RNA, 19 nt, Artificial Sequence
  Description of Artificial Sequence: Synthetic oligonucleotide
  Antisense strand to SEQ ID NO: 1751925
ugcauuggcacgauuacag

SEQ ID NO: 1751927 - RNA, 19 nt, Artificial Sequence
  Description of Artificial Sequence: Synthetic oligonucleotide
  Sense strand starting at position 915 of SEQ ID NO: 1562501
gacagugaggucugucuca

SEQ ID NO: 1751928 - RNA, 19 nt, Artificial Sequence
  Description of Artificial Sequence: Synthetic oligonucleotide
  Antisense strand to SEQ ID NO: 1751927
ugagacagaccucacuguc

SEQ ID NO: 1751929 - RNA, 19 nt, Artificial Sequence
  Description of Artificial Sequence: Synthetic oligonucleotide
  Sense strand starting at position 922 of SEQ ID NO: 1562501
aggucugucucacucagaa

SEQ ID NO: 1751930 - RNA, 19 nt, Artificial Sequence
  Description of Artificial Sequence: Synthetic oligonucleotide
  Antisense strand to SEQ ID NO: 1751929
uucugagugagacagaccu

SEQ ID NO: 1751931 - RNA, 19 nt, Artificial Sequence
  Description of Artificial Sequence: Synthetic oligonucleotide
  Sense strand starting at position 986 of SEQ ID NO: 1562501
acugaaguccuaugugucu

SEQ ID NO: 1751932 - RNA, 19 nt, Artificial Sequence
  Description of Artificial Sequence: Synthetic oligonucleotide
  Antisense strand to SEQ ID NO: 1751931
agacacauaggacuucagu

SEQ ID NO: 1751933 - RNA, 19 nt, Artificial Sequence
  Description of Artificial Sequence: Synthetic oligonucleotide
  Sense strand starting at position 991 of SEQ ID NO: 1562501
aguccuaugugucuggcaa

SEQ ID NO: 1751934 - RNA, 19 nt, Artificial Sequence
  Description of Artificial Sequence: Synthetic oligonucleotide
  Antisense strand to SEQ ID NO: 1751933
uugccagacacauaggacu

SEQ ID NO: 1751935 - RNA, 19 nt, Artificial Sequence
  Description of Artificial Sequence: Synthetic oligonucleotide
  Sense strand starting at position 992 of SEQ ID NO: 1562501
guccuaugugucuggcaac

SEQ ID NO: 1751936 - RNA, 19 nt, Artificial Sequence
  Description of Artificial Sequence: Synthetic oligonucleotide
  Antisense strand to SEQ ID NO: 1751935
guugccagacacauaggac

SEQ ID NO: 1751937 - RNA, 19 nt, Artificial Sequence
  Description of Artificial Sequence: Synthetic oligonucleotide
  Sense strand starting at position 1079 of SEQ ID NO: 1562501
agaugccaguccugauuua

SEQ ID NO: 1751938 - RNA, 19 nt, Artificial Sequence
  Description of Artificial Sequence: Synthetic oligonucleotide
  Antisense strand to SEQ ID NO: 1751937
uaaaucaggacuggcaucu

SEQ ID NO: 1751939 - RNA, 19 nt, Artificial Sequence
  Description of Artificial Sequence: Synthetic oligonucleotide
  Sense strand starting at position 1252 of SEQ ID NO: 1562501
cggcauagaacguguauuu

SEQ ID NO: 1751940 - RNA, 19 nt, Artificial Sequence
  Description of Artificial Sequence: Synthetic oligonucleotide
  Antisense strand to SEQ ID NO: 1751939
aaauacacguucuaugccg

SEQ ID NO: 1751941 - RNA, 19 nt, Artificial Sequence
  Description of Artificial Sequence: Synthetic oligonucleotide
  Sense strand starting at position 1345 of SEQ ID NO: 1562501
aguagauucucggcccuca

SEQ ID NO: 1751942 - RNA, 19 nt, Artificial Sequence
  Description of Artificial Sequence: Synthetic oligonucleotide
  Antisense strand to SEQ ID NO: 1751941
ugagggccgagaaucuacu

SEQ ID NO: 1751943 - RNA, 19 nt, Artificial Sequence
  Description of Artificial Sequence: Synthetic oligonucleotide
  Sense strand starting at position 1365 of SEQ ID NO: 1562501
agagguacucucgagugga

SEQ ID NO: 1751944 - RNA, 19 nt, Artificial Sequence
  Description of Artificial Sequence: Synthetic oligonucleotide
  Antisense strand to SEQ ID NO: 1751943
uccacucgagaguaccucu

SEQ ID NO: 1751945 - RNA, 19 nt, Artificial Sequence
  Description of Artificial Sequence: Synthetic oligonucleotide
  Sense strand starting at position 1368 of SEQ ID NO: 1562501
gguacucucgaguggaaau

SEQ ID NO: 1751946 - RNA, 19 nt, Artificial Sequence
  Description of Artificial Sequence: Synthetic oligonucleotide
  Antisense strand to SEQ ID NO: 1751945
auuuccacucgagaguacc

SEQ ID NO: 1751947 - RNA, 19 nt, Artificial Sequence
  Description of Artificial Sequence: Synthetic oligonucleotide
  Sense strand starting at position 1369 of SEQ ID NO: 1562501
guacucucgaguggaaauc

SEQ ID NO: 1751948 - RNA, 19 nt, Artificial Sequence
  Description of Artificial Sequence: Synthetic oligonucleotide
  Antisense strand to SEQ ID NO: 1751947
gauuuccacucgagaguac

SEQ ID NO: 1751949 - RNA, 19 nt, Artificial Sequence
  Description of Artificial Sequence: Synthetic oligonucleotide
  Sense strand starting at position 1422 of SEQ ID NO: 1562501
acugcaaacagugggaaau

SEQ ID NO: 1751950 - RNA, 19 nt, Artificial Sequence
  Description of Artificial Sequence: Synthetic oligonucleotide
  Antisense strand to SEQ ID NO: 1751949
auuucccacuguuugcagu

SEQ ID NO: 1751951 - RNA, 19 nt, Artificial Sequence
  Description of Artificial Sequence: Synthetic oligonucleotide
  Sense strand starting at position 1513 of SEQ ID NO: 1562501
ggacgccugagcuaggaaa

SEQ ID NO: 1751952 - RNA, 19 nt, Artificial Sequence
  Description of Artificial Sequence: Synthetic oligonucleotide
  Antisense strand to SEQ ID NO: 1751951
uuuccuagcucaggcgucc

SEQ ID NO: 1751953 - RNA, 19 nt, Artificial Sequence
  Description of Artificial Sequence: Synthetic oligonucleotide
  Sense strand starting at position 1548 of SEQ ID NO: 1562501
ggaggagcguucucgcaga

SEQ ID NO: 1751954 - RNA, 19 nt, Artificial Sequence
  Description of Artificial Sequence: Synthetic oligonucleotide
  Antisense strand to SEQ ID NO: 1751953
ucugcgagaacgcuccucc

SEQ ID NO: 1751955 - RNA, 19 nt, Artificial Sequence
  Description of Artificial Sequence: Synthetic oligonucleotide
  Sense strand starting at position 1552 of SEQ ID NO: 1562501
gagcguucucgcagaggga

SEQ ID NO: 1751956 - RNA, 19 nt, Artificial Sequence
  Description of Artificial Sequence: Synthetic oligonucleotide
  Antisense strand to SEQ ID NO: 1751955
ucccucugcgagaacgcuc

SEQ ID NO: 1751957 - RNA, 19 nt, Artificial Sequence
  Description of Artificial Sequence: Synthetic oligonucleotide
  Sense strand starting at position 2195 of SEQ ID NO: 1562501
ucgggauucugaggcaaag

SEQ ID NO: 1751958 - RNA, 19 nt, Artificial Sequence
  Description of Artificial Sequence: Synthetic oligonucleotide
  Antisense strand to SEQ ID NO: 1751957
cuuugccucagaaucccga

SEQ ID NO: 1751959 - RNA, 19 nt, Artificial Sequence
  Description of Artificial Sequence: Synthetic oligonucleotide
  Sense strand starting at position 2205 of SEQ ID NO: 1562501
gaggcaaagaucuguuguu

SEQ ID NO: 1751960 - RNA, 19 nt, Artificial Sequence
  Description of Artificial Sequence: Synthetic oligonucleotide
  Antisense strand to SEQ ID NO: 1751959
aacaacagaucuuugccuc

SEQ ID NO: 1751961 - RNA, 19 nt, Artificial Sequence
  Description of Artificial Sequence: Synthetic oligonucleotide
  Sense strand starting at position 2206 of SEQ ID NO: 1562501
aggcaaagaucuguuguuu

SEQ ID NO: 1751962 - RNA, 19 nt, Artificial Sequence
  Description of Artificial Sequence: Synthetic oligonucleotide
  Antisense strand to SEQ ID NO: 1751961
aaacaacagaucuuugccu

SEQ ID NO: 1751963 - RNA, 19 nt, Artificial Sequence
  Description of Artificial Sequence: Synthetic oligonucleotide
  Sense strand starting at position 2773 of SEQ ID NO: 1562501
uuugacauacccugaagua

SEQ ID NO: 1751964 - RNA, 19 nt, Artificial Sequence
  Description of Artificial Sequence: Synthetic oligonucleotide
  Antisense strand to SEQ ID NO: 1751963
uacuucaggguaugucaaa

SEQ ID NO: 1751965 - RNA, 19 nt, Artificial Sequence
  Description of Artificial Sequence: Synthetic oligonucleotide
  Sense strand starting at position 2821 of SEQ ID NO: 1562501
ugcagaacucuuugguaaa

SEQ ID NO: 1751966 - RNA, 19 nt, Artificial Sequence
  Description of Artificial Sequence: Synthetic oligonucleotide
  Antisense strand to SEQ ID NO: 1751965
uuuaccaaagaguucugca

SEQ ID NO: 1751967 - RNA, 19 nt, Artificial Sequence
  Description of Artificial Sequence: Synthetic oligonucleotide
  Sense strand starting at position 2822 of SEQ ID NO: 1562501
gcagaacucuuugguaaag

SEQ ID NO: 1751968 - RNA, 19 nt, Artificial Sequence
  Description of Artificial Sequence: Synthetic oligonucleotide
  Antisense strand to SEQ ID NO: 1751967
cuuuaccaaagaguucugc

SEQ ID NO: 1751969 - RNA, 19 nt, Artificial Sequence
  Description of Artificial Sequence: Synthetic oligonucleotide
  Sense strand starting at position 2824 of SEQ ID NO: 1562501
agaacucuuugguaaaggu

SEQ ID NO: 1751970 - RNA, 19 nt, Artificial Sequence
  Description of Artificial Sequence: Synthetic oligonucleotide
  Antisense strand to SEQ ID NO: 1751969
accuuuaccaaagaguucu

SEQ ID NO: 1751971 - RNA, 19 nt, Artificial Sequence
  Description of Artificial Sequence: Synthetic oligonucleotide
  Sense strand starting at position 2895 of SEQ ID NO: 1562501
cacauauguguaugcagau

SEQ ID NO: 1751972 - RNA, 19 nt, Artificial Sequence
  Description of Artificial Sequence: Synthetic oligonucleotide
  Antisense strand to SEQ ID NO: 1751971
aucugcauacacauaugug

SEQ ID NO: 1751973 - RNA, 19 nt, Artificial Sequence
  Description of Artificial Sequence: Synthetic oligonucleotide
  Sense strand starting at position 2901 of SEQ ID NO: 1562501
uguguaugcagauaagcaa

SEQ ID NO: 1751974 - RNA, 19 nt, Artificial Sequence
  Description of Artificial Sequence: Synthetic oligonucleotide
  Antisense strand to SEQ ID NO: 1751973
uugcuuaucugcauacaca

SEQ ID NO: 1751975 - RNA, 19 nt, Artificial Sequence
  Description of Artificial Sequence: Synthetic oligonucleotide
  Sense strand starting at position 3663 of SEQ ID NO: 1562501
cugaauuaguucuuguugu

SEQ ID NO: 1751976 - RNA, 19 nt, Artificial Sequence
  Description of Artificial Sequence: Synthetic oligonucleotide
  Antisense strand to SEQ ID NO: 1751975
acaacaagaacuaauucag

SEQ ID NO: 1751977 - RNA, 19 nt, Artificial Sequence
  Description of Artificial Sequence: Synthetic oligonucleotide
  Sense strand starting at position 3664 of SEQ ID NO: 1562501
ugaauuaguucuuguuguu

SEQ ID NO: 1751978 - RNA, 19 nt, Artificial Sequence
  Description of Artificial Sequence: Synthetic oligonucleotide
  Antisense strand to SEQ ID NO: 1751977
aacaacaagaacuaauuca

SEQ ID NO: 1751979 - RNA, 19 nt, Artificial Sequence
  Description of Artificial Sequence: Synthetic oligonucleotide
  Sense strand starting at position 3936 of SEQ ID NO: 1562501
uucuuaugaggacgucagu

SEQ ID NO: 1751980 - RNA, 19 nt, Artificial Sequence
  Description of Artificial Sequence: Synthetic oligonucleotide
  Antisense strand to SEQ ID NO: 1751979
acugacguccucauaagaa

SEQ ID NO: 1751981 - RNA, 19 nt, Artificial Sequence
  Description of Artificial Sequence: Synthetic oligonucleotide
  Sense strand starting at position 3949 of SEQ ID NO: 1562501
gucagucaguguggacuua

SEQ ID NO: 1751982 - RNA, 19 nt, Artificial Sequence
  Description of Artificial Sequence: Synthetic oligonucleotide
  Antisense strand to SEQ ID NO: 1751981
uaaguccacacugacugac

SEQ ID NO: 1751983 - RNA, 19 nt, Artificial Sequence
  Description of Artificial Sequence: Synthetic oligonucleotide
  Sense strand starting at position 3981 of SEQ ID NO: 1562501
uuagcaugaccucauguua

SEQ ID NO: 1751984 - RNA, 19 nt, Artificial Sequence
  Description of Artificial Sequence: Synthetic oligonucleotide
  Antisense strand to SEQ ID NO: 1751983
uaacaugaggucaugcuaa

SEQ ID NO: 1751985 - RNA, 19 nt, Artificial Sequence
  Description of Artificial Sequence: Synthetic oligonucleotide
  Sense strand starting at position 3 of SEQ ID NO: 1562502
uuaugucaucaggagguga

SEQ ID NO: 1751986 - RNA, 19 nt, Artificial Sequence
  Description of Artificial Sequence: Synthetic oligonucleotide
  Antisense strand to SEQ ID NO: 1751985
ucaccuccugaugacauaa

SEQ ID NO: 1751987 - RNA, 19 nt, Artificial Sequence
  Description of Artificial Sequence: Synthetic oligonucleotide
  Sense strand starting at position 101 of SEQ ID NO: 1562502
ccguguguccggcuggaau

SEQ ID NO: 1751988 - RNA, 19 nt, Artificial Sequence
  Description of Artificial Sequence: Synthetic oligonucleotide
  Antisense strand to SEQ ID NO: 1751987
auuccagccggacacacgg

SEQ ID NO: 1751989 - RNA, 19 nt, Artificial Sequence
  Description of Artificial Sequence: Synthetic oligonucleotide
  Sense strand starting at position 236 of SEQ ID NO: 1562502
ugaggugccagguagagaa

SEQ ID NO: 1751990 - RNA, 19 nt, Artificial Sequence
  Description of Artificial Sequence: Synthetic oligonucleotide
  Antisense strand to SEQ ID NO: 1751989
uucucuaccuggcaccuca

SEQ ID NO: 1751991 - RNA, 19 nt, Artificial Sequence
  Description of Artificial Sequence: Synthetic oligonucleotide
  Sense strand starting at position 344 of SEQ ID NO: 1562502
cuggaacugugagacuaaa

SEQ ID NO: 1751992 - RNA, 19 nt, Artificial Sequence
  Description of Artificial Sequence: Synthetic oligonucleotide
  Antisense strand to SEQ ID NO: 1751991
uuuagucucacaguuccag

SEQ ID NO: 1751993 - RNA, 19 nt, Artificial Sequence
  Description of Artificial Sequence: Synthetic oligonucleotide
  Sense strand starting at position 376 of SEQ ID NO: 1562502
ggagauucuuaacagaauc

SEQ ID NO: 1751994 - RNA, 19 nt, Artificial Sequence
  Description of Artificial Sequence: Synthetic oligonucleotide
  Antisense strand to SEQ ID NO: 1751993
gauucuguuaagaaucucc

SEQ ID NO: 1751995 - RNA, 19 nt, Artificial Sequence
  Description of Artificial Sequence: Synthetic oligonucleotide
  Sense strand starting at position 430 of SEQ ID NO: 1562502
ucagacuucccaggaaagu

SEQ ID NO: 1751996 - RNA, 19 nt, Artificial Sequence
  Description of Artificial Sequence: Synthetic oligonucleotide
  Antisense strand to SEQ ID NO: 1751995
acuuuccugggaagucuga

SEQ ID NO: 1751997 - RNA, 19 nt, Artificial Sequence
  Description of Artificial Sequence: Synthetic oligonucleotide
  Sense strand starting at position 559 of SEQ ID NO: 1562502
uuaguaccaucaguaacua

SEQ ID NO: 1751998 - RNA, 19 nt, Artificial Sequence
  Description of Artificial Sequence: Synthetic oligonucleotide
  Antisense strand to SEQ ID NO: 1751997
uaguuacugaugguacuaa

SEQ ID NO: 1751999 - RNA, 19 nt, Artificial Sequence
  Description of Artificial Sequence: Synthetic oligonucleotide
  Sense strand starting at position 600 of SEQ ID NO: 1562502
ucuauuacacauuguaguu

SEQ ID NO: 1752000 - RNA, 19 nt, Artificial Sequence
  Description of Artificial Sequence: Synthetic oligonucleotide
  Antisense strand to SEQ ID NO: 1751999
aacuacaauguguaauaga

SEQ ID NO: 1752001 - RNA, 19 nt, Artificial Sequence
  Description of Artificial Sequence: Synthetic oligonucleotide
  Sense strand starting at position 622 of SEQ ID NO: 1562502
auuguaugggcucacucaa

SEQ ID NO: 1752002 - RNA, 19 nt, Artificial Sequence
  Description of Artificial Sequence: Synthetic oligonucleotide
  Antisense strand to SEQ ID NO: 1752001
uugagugagcccauacaau

SEQ ID NO: 1752003 - RNA, 19 nt, Artificial Sequence
  Description of Artificial Sequence: Synthetic oligonucleotide
  Sense strand starting at position 629 of SEQ ID NO: 1562502
gggcucacucaagaguuua

SEQ ID NO: 1752004 - RNA, 19 nt, Artificial Sequence
  Description of Artificial Sequence: Synthetic oligonucleotide
  Antisense strand to SEQ ID NO: 1752003
uaaacucuugagugagccc

SEQ ID NO: 1752005 - RNA, 19 nt, Artificial Sequence
  Description of Artificial Sequence: Synthetic oligonucleotide
  Sense strand starting at position 711 of SEQ ID NO: 1562502
uacaaagcccugugugauc

SEQ ID NO: 1752006 - RNA, 19 nt, Artificial Sequence
  Description of Artificial Sequence: Synthetic oligonucleotide
  Antisense strand to SEQ ID NO: 1752005
gaucacacagggcuuugua

SEQ ID NO: 1752007 - RNA, 19 nt, Artificial Sequence
  Description of Artificial Sequence: Synthetic oligonucleotide
  Sense strand starting at position 875 of SEQ ID NO: 1562502
agcugauuaucagcccaga

SEQ ID NO: 1752008 - RNA, 19 nt, Artificial Sequence
  Description of Artificial Sequence: Synthetic oligonucleotide
  Antisense strand to SEQ ID NO: 1752007
ucugggcugauaaucagcu

SEQ ID NO: 1752009 - RNA, 19 nt, Artificial Sequence
  Description of Artificial Sequence: Synthetic oligonucleotide
  Sense strand starting at position 1349 of SEQ ID NO: 1562502
cuaauagauccucgagggu

SEQ ID NO: 1752010 - RNA, 19 nt, Artificial Sequence
  Description of Artificial Sequence: Synthetic oligonucleotide
  Antisense strand to SEQ ID NO: 1752009
acccucgaggaucuauuag

SEQ ID NO: 1752011 - RNA, 19 nt, Artificial Sequence
  Description of Artificial Sequence: Synthetic oligonucleotide
  Sense strand starting at position 1405 of SEQ ID NO: 1562502
cguaaaggugcuggucaaa

SEQ ID NO: 1752012 - RNA, 19 nt, Artificial Sequence
  Description of Artificial Sequence: Synthetic oligonucleotide
  Antisense strand to SEQ ID NO: 1752011
uuugaccagcaccuuuacg

SEQ ID NO: 1752013 - RNA, 19 nt, Artificial Sequence
  Description of Artificial Sequence: Synthetic oligonucleotide
  Sense strand starting at position 1467 of SEQ ID NO: 1562502
agcccagugauucgagaug

SEQ ID NO: 1752014 - RNA, 19 nt, Artificial Sequence
  Description of Artificial Sequence: Synthetic oligonucleotide
  Antisense strand to SEQ ID NO: 1752013
caucucgaaucacugggcu

SEQ ID NO: 1752015 - RNA, 19 nt, Artificial Sequence
  Description of Artificial Sequence: Synthetic oligonucleotide
  Sense strand starting at position 1570 of SEQ ID NO: 1562502
ccguuuccuuaaguguaaa

SEQ ID NO: 1752016 - RNA, 19 nt, Artificial Sequence
  Description of Artificial Sequence: Synthetic oligonucleotide
  Antisense strand to SEQ ID NO: 1752015
uuuacacuuaaggaaacgg

SEQ ID NO: 1752017 - RNA, 19 nt, Artificial Sequence
  Description of Artificial Sequence: Synthetic oligonucleotide
  Sense strand starting at position 2199 of SEQ ID NO: 1562502
acggaaggcuguuuguaaa

SEQ ID NO: 1752018 - RNA, 19 nt, Artificial Sequence
  Description of Artificial Sequence: Synthetic oligonucleotide
  Antisense strand to SEQ ID NO: 1752017
uuuacaaacagccuuccgu

SEQ ID NO: 1752019 - RNA, 19 nt, Artificial Sequence
  Description of Artificial Sequence: Synthetic oligonucleotide
  Sense strand starting at position 2211 of SEQ ID NO: 1562502
uuguaaacggucuaggauu

SEQ ID NO: 1752020 - RNA, 19 nt, Artificial Sequence
  Description of Artificial Sequence: Synthetic oligonucleotide
  Antisense strand to SEQ ID NO: 1752019
aauccuagaccguuuacaa

SEQ ID NO: 1752021 - RNA, 19 nt, Artificial Sequence
  Description of Artificial Sequence: Synthetic oligonucleotide
  Sense strand starting at position 2492 of SEQ ID NO: 1562502
cucccugaucgcugggauu

SEQ ID NO: 1752022 - RNA, 19 nt, Artificial Sequence
  Description of Artificial Sequence: Synthetic oligonucleotide
  Antisense strand to SEQ ID NO: 1752021
aaucccagcgaucagggag

SEQ ID NO: 1752023 - RNA, 19 nt, Artificial Sequence
  Description of Artificial Sequence: Synthetic oligonucleotide
  Sense strand starting at position 2494 of SEQ ID NO: 1562502
cccugaucgcugggauuac

SEQ ID NO: 1752024 - RNA, 19 nt, Artificial Sequence
  Description of Artificial Sequence: Synthetic oligonucleotide
  Antisense strand to SEQ ID NO: 1752023
guaaucccagcgaucaggg

SEQ ID NO: 1752025 - RNA, 19 nt, Artificial Sequence
  Description of Artificial Sequence: Synthetic oligonucleotide
  Sense strand starting at position 2843 of SEQ ID NO: 1562502
gcugcuugcuaauuccaga

SEQ ID NO: 1752026 - RNA, 19 nt, Artificial Sequence
  Description of Artificial Sequence: Synthetic oligonucleotide
  Antisense strand to SEQ ID NO: 1752025
ucuggaauuagcaagcagc

SEQ ID NO: 1752027 - RNA, 19 nt, Artificial Sequence
  Description of Artificial Sequence: Synthetic oligonucleotide
  Sense strand starting at position 3096 of SEQ ID NO: 1562502
cgagguuuccagcaaagac

SEQ ID NO: 1752028 - RNA, 19 nt, Artificial Sequence
  Description of Artificial Sequence: Synthetic oligonucleotide
  Antisense strand to SEQ ID NO: 1752027
gucuuugcuggaaaccucg

SEQ ID NO: 1752029 - RNA, 19 nt, Artificial Sequence
  Description of Artificial Sequence: Synthetic oligonucleotide
  Sense strand starting at position 3215 of SEQ ID NO: 1562502
uuccuucugcuuugcagau

SEQ ID NO: 1752030 - RNA, 19 nt, Artificial Sequence
  Description of Artificial Sequence: Synthetic oligonucleotide
  Antisense strand to SEQ ID NO: 1752029
aucugcaaagcagaaggaa

SEQ ID NO: 1752031 - RNA, 19 nt, Artificial Sequence
  Description of Artificial Sequence: Synthetic oligonucleotide
  Sense strand starting at position 3216 of SEQ ID NO: 1562502
uccuucugcuuugcagaua

SEQ ID NO: 1752032 - RNA, 19 nt, Artificial Sequence
  Description of Artificial Sequence: Synthetic oligonucleotide
  Antisense strand to SEQ ID NO: 1752031
uaucugcaaagcagaagga

SEQ ID NO: 1752033 - RNA, 19 nt, Artificial Sequence
  Description of Artificial Sequence: Synthetic oligonucleotide
  Sense strand starting at position 3219 of SEQ ID NO: 1562502
uucugcuuugcagauaaca

SEQ ID NO: 1752034 - RNA, 19 nt, Artificial Sequence
  Description of Artificial Sequence: Synthetic oligonucleotide
  Antisense strand to SEQ ID NO: 1752033
uguuaucugcaaagcagaa

SEQ ID NO: 1752035 - RNA, 19 nt, Artificial Sequence
  Description of Artificial Sequence: Synthetic oligonucleotide
  Sense strand starting at position 3297 of SEQ ID NO: 1562502
cgcucucuaggccgagaau

SEQ ID NO: 1752036 - RNA, 19 nt, Artificial Sequence
  Description of Artificial Sequence: Synthetic oligonucleotide
  Antisense strand to SEQ ID NO: 1752035
auucucggccuagagagcg

SEQ ID NO: 1752037 - RNA, 19 nt, Artificial Sequence
  Description of Artificial Sequence: Synthetic oligonucleotide
  Sense strand starting at position 3298 of SEQ ID NO: 1562502
gcucucuaggccgagaaua

SEQ ID NO: 1752038 - RNA, 19 nt, Artificial Sequence
  Description of Artificial Sequence: Synthetic oligonucleotide
  Antisense strand to SEQ ID NO: 1752037
uauucucggccuagagagc

SEQ ID NO: 1752039 - RNA, 19 nt, Artificial Sequence
  Description of Artificial Sequence: Synthetic oligonucleotide
  Sense strand starting at position 3300 of SEQ ID NO: 1562502
ucucuaggccgagaauacu

SEQ ID NO: 1752040 - RNA, 19 nt, Artificial Sequence
  Description of Artificial Sequence: Synthetic oligonucleotide
  Antisense strand to SEQ ID NO: 1752039
aguauucucggccuagaga

SEQ ID NO: 1752041 - RNA, 19 nt, Artificial Sequence
  Description of Artificial Sequence: Synthetic oligonucleotide
  Sense strand starting at position 3308 of SEQ ID NO: 1562502
ccgagaauacugcgcaaau

SEQ ID NO: 1752042 - RNA, 19 nt, Artificial Sequence
  Description of Artificial Sequence: Synthetic oligonucleotide
  Antisense strand to SEQ ID NO: 1752041
auuugcgcaguauucucgg

SEQ ID NO: 1752043 - RNA, 19 nt, Artificial Sequence
  Description of Artificial Sequence: Synthetic oligonucleotide
  Sense strand starting at position 3309 of SEQ ID NO: 1562502
cgagaauacugcgcaaauu

SEQ ID NO: 1752044 - RNA, 19 nt, Artificial Sequence
  Description of Artificial Sequence: Synthetic oligonucleotide
  Antisense strand to SEQ ID NO: 1752043
aauuugcgcaguauucucg

SEQ ID NO: 1752045 - RNA, 19 nt, Artificial Sequence
  Description of Artificial Sequence: Synthetic oligonucleotide
  Sense strand starting at position 3310 of SEQ ID NO: 1562502
gagaauacugcgcaaauuc

SEQ ID NO: 1752046 - RNA, 19 nt, Artificial Sequence
  Description of Artificial Sequence: Synthetic oligonucleotide
  Antisense strand to SEQ ID NO: 1752045
gaauuugcgcaguauucuc

SEQ ID NO: 1752047 - RNA, 19 nt, Artificial Sequence
  Description of Artificial Sequence: Synthetic oligonucleotide
  Sense strand starting at position 3319 of SEQ ID NO: 1562502
gcgcaaauucugggagguu

SEQ ID NO: 1752048 - RNA, 19 nt, Artificial Sequence
  Description of Artificial Sequence: Synthetic oligonucleotide
  Antisense strand to SEQ ID NO: 1752047
aaccucccagaauuugcgc

SEQ ID NO: 1752049 - RNA, 19 nt, Artificial Sequence
  Description of Artificial Sequence: Synthetic oligonucleotide
  Sense strand starting at position 3522 of SEQ ID NO: 1562502
guguuugaaccgucgccau

SEQ ID NO: 1752050 - RNA, 19 nt, Artificial Sequence
  Description of Artificial Sequence: Synthetic oligonucleotide
  Antisense strand to SEQ ID NO: 1752049
auggcgacgguucaaacac

SEQ ID NO: 1752051 - RNA, 19 nt, Artificial Sequence
  Description of Artificial Sequence: Synthetic oligonucleotide
  Sense strand starting at position 3836 of SEQ ID NO: 1562502
gggacuuagcgucaggcuu

SEQ ID NO: 1752052 - RNA, 19 nt, Artificial Sequence
  Description of Artificial Sequence: Synthetic oligonucleotide
  Antisense strand to SEQ ID NO: 1752051
aagccugacgcuaaguccc

SEQ ID NO: 1752053 - RNA, 19 nt, Artificial Sequence
  Description of Artificial Sequence: Synthetic oligonucleotide
  Sense strand starting at position 3891 of SEQ ID NO: 1562502
acugauugcaugcgaugga

SEQ ID NO: 1752054 - RNA, 19 nt, Artificial Sequence
  Description of Artificial Sequence: Synthetic oligonucleotide
  Antisense strand to SEQ ID NO: 1752053
uccaucgcaugcaaucagu

SEQ ID NO: 1752055 - RNA, 19 nt, Artificial Sequence
  Description of Artificial Sequence: Synthetic oligonucleotide
  Sense strand starting at position 3894 of SEQ ID NO: 1562502
gauugcaugcgauggagaa

SEQ ID NO: 1752056 - RNA, 19 nt, Artificial Sequence
  Description of Artificial Sequence: Synthetic oligonucleotide
  Antisense strand to SEQ ID NO: 1752055
uucuccaucgcaugcaauc

SEQ ID NO: 1752057 - RNA, 19 nt, Artificial Sequence
  Description of Artificial Sequence: Synthetic oligonucleotide
  Sense strand starting at position 3926 of SEQ ID NO: 1562502
gggccagauccguguucac

SEQ ID NO: 1752058 - RNA, 19 nt, Artificial Sequence
  Description of Artificial Sequence: Synthetic oligonucleotide
  Antisense strand to SEQ ID NO: 1752057
gugaacacggaucuggccc

SEQ ID NO: 1752059 - RNA, 19 nt, Artificial Sequence
  Description of Artificial Sequence: Synthetic oligonucleotide
  Sense strand starting at position 3950 of SEQ ID NO: 1562502
gcuuccacccguuauuaau

SEQ ID NO: 1752060 - RNA, 19 nt, Artificial Sequence
  Description of Artificial Sequence: Synthetic oligonucleotide
  Antisense strand to SEQ ID NO: 1752059
auuaauaacggguggaagc

SEQ ID NO: 1752061 - RNA, 19 nt, Artificial Sequence
  Description of Artificial Sequence: Synthetic oligonucleotide
  Sense strand starting at position 3974 of SEQ ID NO: 1562502
ugcauugagagucaucuag

SEQ ID NO: 1752062 - RNA, 19 nt, Artificial Sequence
  Description of Artificial Sequence: Synthetic oligonucleotide
  Antisense strand to SEQ ID NO: 1752061
cuagaugacucucaaugca

SEQ ID NO: 1752063 - RNA, 19 nt, Artificial Sequence
  Description of Artificial Sequence: Synthetic oligonucleotide
  Sense strand starting at position 3976 of SEQ ID NO: 1562502
cauugagagucaucuagcu

SEQ ID NO: 1752064 - RNA, 19 nt, Artificial Sequence
  Description of Artificial Sequence: Synthetic oligonucleotide
  Antisense strand to SEQ ID NO: 1752063
agcuagaugacucucaaug

SEQ ID NO: 1752065 - RNA, 19 nt, Artificial Sequence
  Description of Artificial Sequence: Synthetic oligonucleotide
  Sense strand starting at position 129 of SEQ ID NO: 1562503
ccuucuauccaagaggcuu

SEQ ID NO: 1752066 - RNA, 19 nt, Artificial Sequence
  Description of Artificial Sequence: Synthetic oligonucleotide
  Antisense strand to SEQ ID NO: 1752065
aagccucuuggauagaagg

SEQ ID NO: 1752067 - RNA, 19 nt, Artificial Sequence
  Description of Artificial Sequence: Synthetic oligonucleotide
  Sense strand starting at position 286 of SEQ ID NO: 1562503
cuagaaaucuugcugguca

SEQ ID NO: 1752068 - RNA, 19 nt, Artificial Sequence
  Description of Artificial Sequence: Synthetic oligonucleotide
  Antisense strand to SEQ ID NO: 1752067
ugaccagcaagauuucuag

SEQ ID NO: 1752069 - RNA, 19 nt, Artificial Sequence
  Description of Artificial Sequence: Synthetic oligonucleotide
  Sense strand starting at position 288 of SEQ ID NO: 1562503
agaaaucuugcuggucaag

SEQ ID NO: 1752070 - RNA, 19 nt, Artificial Sequence
  Description of Artificial Sequence: Synthetic oligonucleotide
  Antisense strand to SEQ ID NO: 1752069
cuugaccagcaagauuucu

SEQ ID NO: 1752071 - RNA, 19 nt, Artificial Sequence
  Description of Artificial Sequence: Synthetic oligonucleotide
  Sense strand starting at position 656 of SEQ ID NO: 1562503
aagugcucuccugggagaa

SEQ ID NO: 1752072 - RNA, 19 nt, Artificial Sequence
  Description of Artificial Sequence: Synthetic oligonucleotide
  Antisense strand to SEQ ID NO: 1752071
uucucccaggagagcacuu

SEQ ID NO: 1752073 - RNA, 19 nt, Artificial Sequence
  Description of Artificial Sequence: Synthetic oligonucleotide
  Sense strand starting at position 657 of SEQ ID NO: 1562503
agugcucuccugggagaaa

SEQ ID NO: 1752074 - RNA, 19 nt, Artificial Sequence
  Description of Artificial Sequence: Synthetic oligonucleotide
  Antisense strand to SEQ ID NO: 1752073
uuucucccaggagagcacu

SEQ ID NO: 1752075 - RNA, 19 nt, Artificial Sequence
  Description of Artificial Sequence: Synthetic oligonucleotide
  Sense strand starting at position 660 of SEQ ID NO: 1562503
gcucuccugggagaaagua

SEQ ID NO: 1752076 - RNA, 19 nt, Artificial Sequence
  Description of Artificial Sequence: Synthetic oligonucleotide
  Antisense strand to SEQ ID NO: 1752075
uacuuucucccaggagagc

SEQ ID NO: 1752077 - RNA, 19 nt, Artificial Sequence
  Description of Artificial Sequence: Synthetic oligonucleotide
  Sense strand starting at position 745 of SEQ ID NO: 1562503
gucccagacuuggccuaau

SEQ ID NO: 1752078 - RNA, 19 nt, Artificial Sequence
  Description of Artificial Sequence: Synthetic oligonucleotide
  Antisense strand to SEQ ID NO: 1752077
auuaggccaagucugggac

SEQ ID NO: 1752079 - RNA, 19 nt, Artificial Sequence
  Description of Artificial Sequence: Synthetic oligonucleotide
  Sense strand starting at position 748 of SEQ ID NO: 1562503
ccagacuuggccuaaucca

SEQ ID NO: 1752080 - RNA, 19 nt, Artificial Sequence
  Description of Artificial Sequence: Synthetic oligonucleotide
  Antisense strand to SEQ ID NO: 1752079
uggauuaggccaagucugg

SEQ ID NO: 1752081 - RNA, 19 nt, Artificial Sequence
  Description of Artificial Sequence: Synthetic oligonucleotide
  Sense strand starting at position 1092 of SEQ ID NO: 1562503
gaggucacucucuggagua

SEQ ID NO: 1752082 - RNA, 19 nt, Artificial Sequence
  Description of Artificial Sequence: Synthetic oligonucleotide
  Antisense strand to SEQ ID NO: 1752081
uacuccagagagugaccuc

SEQ ID NO: 1752083 - RNA, 19 nt, Artificial Sequence
  Description of Artificial Sequence: Synthetic oligonucleotide
  Sense strand starting at position 1115 of SEQ ID NO: 1562503
ggaacuacucucuggguga

SEQ ID NO: 1752084 - RNA, 19 nt, Artificial Sequence
  Description of Artificial Sequence: Synthetic oligonucleotide
  Antisense strand to SEQ ID NO: 1752083
ucacccagagaguaguucc

SEQ ID NO: 1752085 - RNA, 19 nt, Artificial Sequence
  Description of Artificial Sequence: Synthetic oligonucleotide
  Sense strand starting at position 1117 of SEQ ID NO: 1562503
aacuacucucugggugaua

SEQ ID NO: 1752086 - RNA, 19 nt, Artificial Sequence
  Description of Artificial Sequence: Synthetic oligonucleotide
  Antisense strand to SEQ ID NO: 1752085
uaucacccagagaguaguu

SEQ ID NO: 1752087 - RNA, 19 nt, Artificial Sequence
  Description of Artificial Sequence: Synthetic oligonucleotide
  Sense strand starting at position 1119 of SEQ ID NO: 1562503
cuacucucugggugauaga

SEQ ID NO: 1752088 - RNA, 19 nt, Artificial Sequence
  Description of Artificial Sequence: Synthetic oligonucleotide
  Antisense strand to SEQ ID NO: 1752087
ucuaucacccagagaguag

SEQ ID NO: 1752089 - RNA, 19 nt, Artificial Sequence
  Description of Artificial Sequence: Synthetic oligonucleotide
  Sense strand starting at position 1264 of SEQ ID NO: 1562503
aggauacgccuauaaggua

SEQ ID NO: 1752090 - RNA, 19 nt, Artificial Sequence
  Description of Artificial Sequence: Synthetic oligonucleotide
  Antisense strand to SEQ ID NO: 1752089
uaccuuauaggcguauccu

SEQ ID NO: 1752091 - RNA, 19 nt, Artificial Sequence
  Description of Artificial Sequence: Synthetic oligonucleotide
  Sense strand starting at position 1428 of SEQ ID NO: 1562503
gugggaugaucugcucauc

SEQ ID NO: 1752092 - RNA, 19 nt, Artificial Sequence
  Description of Artificial Sequence: Synthetic oligonucleotide
  Antisense strand to SEQ ID NO: 1752091
gaugagcagaucaucccac

SEQ ID NO: 1752093 - RNA, 19 nt, Artificial Sequence
  Description of Artificial Sequence: Synthetic oligonucleotide
  Sense strand starting at position 1431 of SEQ ID NO: 1562503
ggaugaucugcucauccga

SEQ ID NO: 1752094 - RNA, 19 nt, Artificial Sequence
  Description of Artificial Sequence: Synthetic oligonucleotide
  Antisense strand to SEQ ID NO: 1752093
ucggaugagcagaucaucc

SEQ ID NO: 1752095 - RNA, 19 nt, Artificial Sequence
  Description of Artificial Sequence: Synthetic oligonucleotide
  Sense strand starting at position 1433 of SEQ ID NO: 1562503
augaucugcucauccgaga

SEQ ID NO: 1752096 - RNA, 19 nt, Artificial Sequence
  Description of Artificial Sequence: Synthetic oligonucleotide
  Antisense strand to SEQ ID NO: 1752095
ucucggaugagcagaucau

SEQ ID NO: 1752097 - RNA, 19 nt, Artificial Sequence
  Description of Artificial Sequence: Synthetic oligonucleotide
  Sense strand starting at position 1506 of SEQ ID NO: 1562503
cugggaaaucuuugccuuu

SEQ ID NO: 1752098 - RNA, 19 nt, Artificial Sequence
  Description of Artificial Sequence: Synthetic oligonucleotide
  Antisense strand to SEQ ID NO: 1752097
aaaggcaaagauuucccag

SEQ ID NO: 1752099 - RNA, 19 nt, Artificial Sequence
  Description of Artificial Sequence: Synthetic oligonucleotide
  Sense strand starting at position 1507 of SEQ ID NO: 1562503
ugggaaaucuuugccuuua

SEQ ID NO: 1752100 - RNA, 19 nt, Artificial Sequence
  Description of Artificial Sequence: Synthetic oligonucleotide
  Antisense strand to SEQ ID NO: 1752099
uaaaggcaaagauuuccca

SEQ ID NO: 1752101 - RNA, 19 nt, Artificial Sequence
  Description of Artificial Sequence: Synthetic oligonucleotide
  Sense strand starting at position 1508 of SEQ ID NO: 1562503
gggaaaucuuugccuuuaa

SEQ ID NO: 1752102 - RNA, 19 nt, Artificial Sequence
  Description of Artificial Sequence: Synthetic oligonucleotide
  Antisense strand to SEQ ID NO: 1752101
uuaaaggcaaagauuuccc

SEQ ID NO: 1752103 - RNA, 19 nt, Artificial Sequence
  Description of Artificial Sequence: Synthetic oligonucleotide
  Sense strand starting at position 1509 of SEQ ID NO: 1562503
ggaaaucuuugccuuuaau

SEQ ID NO: 1752104 - RNA, 19 nt, Artificial Sequence
  Description of Artificial Sequence: Synthetic oligonucleotide
  Antisense strand to SEQ ID NO: 1752103
auuaaaggcaaagauuucc

SEQ ID NO: 1752105 - RNA, 19 nt, Artificial Sequence
  Description of Artificial Sequence: Synthetic oligonucleotide
  Sense strand starting at position 2006 of SEQ ID NO: 1562503
agccuuugcguacugucau

SEQ ID NO: 1752106 - RNA, 19 nt, Artificial Sequence
  Description of Artificial Sequence: Synthetic oligonucleotide
  Antisense strand to SEQ ID NO: 1752105
augacaguacgcaaaggcu

SEQ ID NO: 1752107 - RNA, 19 nt, Artificial Sequence
  Description of Artificial Sequence: Synthetic oligonucleotide
  Sense strand starting at position 2354 of SEQ ID NO: 1562503
gccaacucucgagaggguu

SEQ ID NO: 1752108 - RNA, 19 nt, Artificial Sequence
  Description of Artificial Sequence: Synthetic oligonucleotide
  Antisense strand to SEQ ID NO: 1752107
aacccucucgagaguuggc

SEQ ID NO: 1752109 - RNA, 19 nt, Artificial Sequence
  Description of Artificial Sequence: Synthetic oligonucleotide
  Sense strand starting at position 2524 of SEQ ID NO: 1562503
uucucuugucuguaaacaa

SEQ ID NO: 1752110 - RNA, 19 nt, Artificial Sequence
  Description of Artificial Sequence: Synthetic oligonucleotide
  Antisense strand to SEQ ID NO: 1752109
uuguuuacagacaagagaa

SEQ ID NO: 1752111 - RNA, 19 nt, Artificial Sequence
  Description of Artificial Sequence: Synthetic oligonucleotide
  Sense strand starting at position 2590 of SEQ ID NO: 1562503
cagugauguccguccgggu

SEQ ID NO: 1752112 - RNA, 19 nt, Artificial Sequence
  Description of Artificial Sequence: Synthetic oligonucleotide
  Antisense strand to SEQ ID NO: 1752111
acccggacggacaucacug

SEQ ID NO: 1752113 - RNA, 19 nt, Artificial Sequence
  Description of Artificial Sequence: Synthetic oligonucleotide
  Sense strand starting at position 2768 of SEQ ID NO: 1562503
uuggaaaucugcuuuaccu

SEQ ID NO: 1752114 - RNA, 19 nt, Artificial Sequence
  Description of Artificial Sequence: Synthetic oligonucleotide
  Antisense strand to SEQ ID NO: 1752113
agguaaagcagauuuccaa

SEQ ID NO: 1752115 - RNA, 19 nt, Artificial Sequence
  Description of Artificial Sequence: Synthetic oligonucleotide
  Sense strand starting at position 2770 of SEQ ID NO: 1562503
ggaaaucugcuuuaccuga

SEQ ID NO: 1752116 - RNA, 19 nt, Artificial Sequence
  Description of Artificial Sequence: Synthetic oligonucleotide
  Antisense strand to SEQ ID NO: 1752115
ucagguaaagcagauuucc

SEQ ID NO: 1752117 - RNA, 19 nt, Artificial Sequence
  Description of Artificial Sequence: Synthetic oligonucleotide
  Sense strand starting at position 2847 of SEQ ID NO: 1562503
cugcaaagcuguguuauuu

SEQ ID NO: 1752118 - RNA, 19 nt, Artificial Sequence
  Description of Artificial Sequence: Synthetic oligonucleotide
  Antisense strand to SEQ ID NO: 1752117
aaauaacacagcuuugcag

SEQ ID NO: 1752119 - RNA, 19 nt, Artificial Sequence
  Description of Artificial Sequence: Synthetic oligonucleotide
  Sense strand starting at position 2913 of SEQ ID NO: 1562503
uuggucuugaugggagaau

SEQ ID NO: 1752120 - RNA, 19 nt, Artificial Sequence
  Description of Artificial Sequence: Synthetic oligonucleotide
  Antisense strand to SEQ ID NO: 1752119
auucucccaucaagaccaa

SEQ ID NO: 1752121 - RNA, 19 nt, Artificial Sequence
  Description of Artificial Sequence: Synthetic oligonucleotide
  Sense strand starting at position 2964 of SEQ ID NO: 1562503
gcugaucuuccagagcaca

SEQ ID NO: 1752122 - RNA, 19 nt, Artificial Sequence
  Description of Artificial Sequence: Synthetic oligonucleotide
  Antisense strand to SEQ ID NO: 1752121
ugugcucuggaagaucagc

SEQ ID NO: 1752123 - RNA, 19 nt, Artificial Sequence
  Description of Artificial Sequence: Synthetic oligonucleotide
  Sense strand starting at position 3314 of SEQ ID NO: 1562503
guaacauaaguauaugcaa

SEQ ID NO: 1752124 - RNA, 19 nt, Artificial Sequence
  Description of Artificial Sequence: Synthetic oligonucleotide
  Antisense strand to SEQ ID NO: 1752123
uugcauauacuuauguuac

SEQ ID NO: 1752125 - RNA, 19 nt, Artificial Sequence
  Description of Artificial Sequence: Synthetic oligonucleotide
  Sense strand starting at position 3396 of SEQ ID NO: 1562503
gacaguaaccaguguuuac

SEQ ID NO: 1752126 - RNA, 19 nt, Artificial Sequence
  Description of Artificial Sequence: Synthetic oligonucleotide
  Antisense strand to SEQ ID NO: 1752125
guaaacacugguuacuguc

SEQ ID NO: 1752127 - RNA, 19 nt, Artificial Sequence
  Description of Artificial Sequence: Synthetic oligonucleotide
  Sense strand starting at position 3399 of SEQ ID NO: 1562503
aguaaccaguguuuacuaa

SEQ ID NO: 1752128 - RNA, 19 nt, Artificial Sequence
  Description of Artificial Sequence: Synthetic oligonucleotide
  Antisense strand to SEQ ID NO: 1752127
uuaguaaacacugguuacu

SEQ ID NO: 1752129 - RNA, 19 nt, Artificial Sequence
  Description of Artificial Sequence: Synthetic oligonucleotide
  Sense strand starting at position 3406 of SEQ ID NO: 1562503
aguguuuacuaaguucuga

SEQ ID NO: 1752130 - RNA, 19 nt, Artificial Sequence
  Description of Artificial Sequence: Synthetic oligonucleotide
  Antisense strand to SEQ ID NO: 1752129
ucagaacuuaguaaacacu

SEQ ID NO: 1752131 - RNA, 19 nt, Artificial Sequence
  Description of Artificial Sequence: Synthetic oligonucleotide
  Sense strand starting at position 3613 of SEQ ID NO: 1562503
cugcguucucagccaugau

SEQ ID NO: 1752132 - RNA, 19 nt, Artificial Sequence
  Description of Artificial Sequence: Synthetic oligonucleotide
  Antisense strand to SEQ ID NO: 1752131
aucauggcugagaacgcag

SEQ ID NO: 1752133 - RNA, 19 nt, Artificial Sequence
  Description of Artificial Sequence: Synthetic oligonucleotide
  Sense strand starting at position 3643 of SEQ ID NO: 1562503
ucgaacaugccucacuaau

SEQ ID NO: 1752134 - RNA, 19 nt, Artificial Sequence
  Description of Artificial Sequence: Synthetic oligonucleotide
  Antisense strand to SEQ ID NO: 1752133
auuagugaggcauguucga

SEQ ID NO: 1752135 - RNA, 19 nt, Artificial Sequence
  Description of Artificial Sequence: Synthetic oligonucleotide
  Sense strand starting at position 3734 of SEQ ID NO: 1562503
ggacgcuguggcaguaaga

SEQ ID NO: 1752136 - RNA, 19 nt, Artificial Sequence
  Description of Artificial Sequence: Synthetic oligonucleotide
  Antisense strand to SEQ ID NO: 1752135
ucuuacugccacagcgucc

SEQ ID NO: 1752137 - RNA, 19 nt, Artificial Sequence
  Description of Artificial Sequence: Synthetic oligonucleotide
  Sense strand starting at position 3784 of SEQ ID NO: 1562503
ccaggcaugaguuaaguca

SEQ ID NO: 1752138 - RNA, 19 nt, Artificial Sequence
  Description of Artificial Sequence: Synthetic oligonucleotide
  Antisense strand to SEQ ID NO: 1752137
ugacuuaacucaugccugg

SEQ ID NO: 1752139 - RNA, 19 nt, Artificial Sequence
  Description of Artificial Sequence: Synthetic oligonucleotide
  Sense strand starting at position 3875 of SEQ ID NO: 1562503
uccuguacuugagcaaaca

SEQ ID NO: 1752140 - RNA, 19 nt, Artificial Sequence
  Description of Artificial Sequence: Synthetic oligonucleotide
  Antisense strand to SEQ ID NO: 1752139
uguuugcucaaguacagga

SEQ ID NO: 1752141 - RNA, 19 nt, Artificial Sequence
  Description of Artificial Sequence: Synthetic oligonucleotide
  Sense strand starting at position 3876 of SEQ ID NO: 1562503
ccuguacuugagcaaacaa

SEQ ID NO: 1752142 - RNA, 19 nt, Artificial Sequence
  Description of Artificial Sequence: Synthetic oligonucleotide
  Antisense strand to SEQ ID NO: 1752141
uuguuugcucaaguacagg

SEQ ID NO: 1752143 - RNA, 19 nt, Artificial Sequence
  Description of Artificial Sequence: Synthetic oligonucleotide
  Sense strand starting at position 3921 of SEQ ID NO: 1562503
ucaugaguuccucagacug

SEQ ID NO: 1752144 - RNA, 19 nt, Artificial Sequence
  Description of Artificial Sequence: Synthetic oligonucleotide
  Antisense strand to SEQ ID NO: 1752143
cagucugaggaacucauga

SEQ ID NO: 1752145 - RNA, 19 nt, Artificial Sequence
  Description of Artificial Sequence: Synthetic oligonucleotide
  Sense strand starting at position 425 of SEQ ID NO: 1562504
caacaagccgauugaguua

SEQ ID NO: 1752146 - RNA, 19 nt, Artificial Sequence
  Description of Artificial Sequence: Synthetic oligonucleotide
  Antisense strand to SEQ ID NO: 1752145
uaacucaaucggcuuguug

SEQ ID NO: 1752147 - RNA, 19 nt, Artificial Sequence
  Description of Artificial Sequence: Synthetic oligonucleotide
  Sense strand starting at position 438 of SEQ ID NO: 1562504
gaguuaggacccugcaaac

SEQ ID NO: 1752148 - RNA, 19 nt, Artificial Sequence
  Description of Artificial Sequence: Synthetic oligonucleotide
  Antisense strand to SEQ ID NO: 1752147
guuugcaggguccuaacuc

SEQ ID NO: 1752149 - RNA, 19 nt, Artificial Sequence
  Description of Artificial Sequence: Synthetic oligonucleotide
  Sense strand starting at position 585 of SEQ ID NO: 1562504
agacuaaguuacuaacagu

SEQ ID NO: 1752150 - RNA, 19 nt, Artificial Sequence
  Description of Artificial Sequence: Synthetic oligonucleotide
  Antisense strand to SEQ ID NO: 1752149
acuguuaguaacuuagucu

SEQ ID NO: 1752151 - RNA, 19 nt, Artificial Sequence
  Description of Artificial Sequence: Synthetic oligonucleotide
  Sense strand starting at position 666 of SEQ ID NO: 1562504
accgauugcuuagugcauu

SEQ ID NO: 1752152 - RNA, 19 nt, Artificial Sequence
  Description of Artificial Sequence: Synthetic oligonucleotide
  Antisense strand to SEQ ID NO: 1752151
aaugcacuaagcaaucggu

SEQ ID NO: 1752153 - RNA, 19 nt, Artificial Sequence
  Description of Artificial Sequence: Synthetic oligonucleotide
  Sense strand starting at position 669 of SEQ ID NO: 1562504
gauugcuuagugcauuaaa

SEQ ID NO: 1752154 - RNA, 19 nt, Artificial Sequence
  Description of Artificial Sequence: Synthetic oligonucleotide
  Antisense strand to SEQ ID NO: 1752153
uuuaaugcacuaagcaauc

SEQ ID NO: 1752155 - RNA, 19 nt, Artificial Sequence
  Description of Artificial Sequence: Synthetic oligonucleotide
  Sense strand starting at position 705 of SEQ ID NO: 1562504
cacgaaucuugcuugcaga

SEQ ID NO: 1752156 - RNA, 19 nt, Artificial Sequence
  Description of Artificial Sequence: Synthetic oligonucleotide
  Antisense strand to SEQ ID NO: 1752155
ucugcaagcaagauucgug

SEQ ID NO: 1752157 - RNA, 19 nt, Artificial Sequence
  Description of Artificial Sequence: Synthetic oligonucleotide
  Sense strand starting at position 706 of SEQ ID NO: 1562504
acgaaucuugcuugcagag

SEQ ID NO: 1752158 - RNA, 19 nt, Artificial Sequence
  Description of Artificial Sequence: Synthetic oligonucleotide
  Antisense strand to SEQ ID NO: 1752157
cucugcaagcaagauucgu

SEQ ID NO: 1752159 - RNA, 19 nt, Artificial Sequence
  Description of Artificial Sequence: Synthetic oligonucleotide
  Sense strand starting at position 708 of SEQ ID NO: 1562504
gaaucuugcuugcagaggu

SEQ ID NO: 1752160 - RNA, 19 nt, Artificial Sequence
  Description of Artificial Sequence: Synthetic oligonucleotide
  Antisense strand to SEQ ID NO: 1752159
accucugcaagcaagauuc

SEQ ID NO: 1752161 - RNA, 19 nt, Artificial Sequence
  Description of Artificial Sequence: Synthetic oligonucleotide
  Sense strand starting at position 722 of SEQ ID NO: 1562504
gagguuaaguucugucuuu

SEQ ID NO: 1752162 - RNA, 19 nt, Artificial Sequence
  Description of Artificial Sequence: Synthetic oligonucleotide
  Antisense strand to SEQ ID NO: 1752161
aaagacagaacuuaaccuc

SEQ ID NO: 1752163 - RNA, 19 nt, Artificial Sequence
  Description of Artificial Sequence: Synthetic oligonucleotide
  Sense strand starting at position 732 of SEQ ID NO: 1562504
ucugucuuuggcuguuaga

SEQ ID NO: 1752164 - RNA, 19 nt, Artificial Sequence
  Description of Artificial Sequence: Synthetic oligonucleotide
  Antisense strand to SEQ ID NO: 1752163
ucuaacagccaaagacaga

SEQ ID NO: 1752165 - RNA, 19 nt, Artificial Sequence
  Description of Artificial Sequence: Synthetic oligonucleotide
  Sense strand starting at position 787 of SEQ ID NO: 1562504
aaauauuuaugcgaagagu

SEQ ID NO: 1752166 - RNA, 19 nt, Artificial Sequence
  Description of Artificial Sequence: Synthetic oligonucleotide
  Antisense strand to SEQ ID NO: 1752165
acucuucgcauaaauauuu

SEQ ID NO: 1752167 - RNA, 19 nt, Artificial Sequence
  Description of Artificial Sequence: Synthetic oligonucleotide
  Sense strand starting at position 841 of SEQ ID NO: 1562504
guaguuaaugccugucagu

SEQ ID NO: 1752168 - RNA, 19 nt, Artificial Sequence
  Description of Artificial Sequence: Synthetic oligonucleotide
  Antisense strand to SEQ ID NO: 1752167
acugacaggcauuaacuac

SEQ ID NO: 1752169 - RNA, 19 nt, Artificial Sequence
  Description of Artificial Sequence: Synthetic oligonucleotide
  Sense strand starting at position 877 of SEQ ID NO: 1562504
ugucuaaagucccaacaga

SEQ ID NO: 1752170 - RNA, 19 nt, Artificial Sequence
  Description of Artificial Sequence: Synthetic oligonucleotide
  Antisense strand to SEQ ID NO: 1752169
ucuguugggacuuuagaca

SEQ ID NO: 1752171 - RNA, 19 nt, Artificial Sequence
  Description of Artificial Sequence: Synthetic oligonucleotide
  Sense strand starting at position 963 of SEQ ID NO: 1562504
agcugagacuuccaaaggu

SEQ ID NO: 1752172 - RNA, 19 nt, Artificial Sequence
  Description of Artificial Sequence: Synthetic oligonucleotide
  Antisense strand to SEQ ID NO: 1752171
accuuuggaagucucagcu

SEQ ID NO: 1752173 - RNA, 19 nt, Artificial Sequence
  Description of Artificial Sequence: Synthetic oligonucleotide
  Sense strand starting at position 991 of SEQ ID NO: 1562504
aauguaugugcacguauau

SEQ ID NO: 1752174 - RNA, 19 nt, Artificial Sequence
  Description of Artificial Sequence: Synthetic oligonucleotide
  Antisense strand to SEQ ID NO: 1752173
auauacgugcacauacauu

SEQ ID NO: 1752175 - RNA, 19 nt, Artificial Sequence
  Description of Artificial Sequence: Synthetic oligonucleotide
  Sense strand starting at position 1087 of SEQ ID NO: 1562504
auuaauguacgcugcagau

SEQ ID NO: 1752176 - RNA, 19 nt, Artificial Sequence
  Description of Artificial Sequence: Synthetic oligonucleotide
  Antisense strand to SEQ ID NO: 1752175
aucugcagcguacauuaau

SEQ ID NO: 1752177 - RNA, 19 nt, Artificial Sequence
  Description of Artificial Sequence: Synthetic oligonucleotide
  Sense strand starting at position 1089 of SEQ ID NO: 1562504
uaauguacgcugcagauuu

SEQ ID NO: 1752178 - RNA, 19 nt, Artificial Sequence
  Description of Artificial Sequence: Synthetic oligonucleotide
  Antisense strand to SEQ ID NO: 1752177
aaaucugcagcguacauua

SEQ ID NO: 1752179 - RNA, 19 nt, Artificial Sequence
  Description of Artificial Sequence: Synthetic oligonucleotide
  Sense strand starting at position 1155 of SEQ ID NO: 1562504
gcuagaaguacuugucaug

SEQ ID NO: 1752180 - RNA, 19 nt, Artificial Sequence
  Description of Artificial Sequence: Synthetic oligonucleotide
  Antisense strand to SEQ ID NO: 1752179
caugacaaguacuucuagc

SEQ ID NO: 1752181 - RNA, 19 nt, Artificial Sequence
  Description of Artificial Sequence: Synthetic oligonucleotide
  Sense strand starting at position 1172 of SEQ ID NO: 1562504
uguucucuguucucucaau

SEQ ID NO: 1752182 - RNA, 19 nt, Artificial Sequence
  Description of Artificial Sequence: Synthetic oligonucleotide
  Antisense strand to SEQ ID NO: 1752181
auugagagaacagagaaca

SEQ ID NO: 1752183 - RNA, 19 nt, Artificial Sequence
  Description of Artificial Sequence: Synthetic oligonucleotide
  Sense strand starting at position 1280 of SEQ ID NO: 1562504
gaugacacucaggguucua

SEQ ID NO: 1752184 - RNA, 19 nt, Artificial Sequence
  Description of Artificial Sequence: Synthetic oligonucleotide
  Antisense strand to SEQ ID NO: 1752183
uagaacccugagugucauc

SEQ ID NO: 1752185 - RNA, 19 nt, Artificial Sequence
  Description of Artificial Sequence: Synthetic oligonucleotide
  Sense strand starting at position 1331 of SEQ ID NO: 1562504
ggauguugguuaaguuugu

SEQ ID NO: 1752186 - RNA, 19 nt, Artificial Sequence
  Description of Artificial Sequence: Synthetic oligonucleotide
  Antisense strand to SEQ ID NO: 1752185
acaaacuuaaccaacaucc

SEQ ID NO: 1752187 - RNA, 19 nt, Artificial Sequence
  Description of Artificial Sequence: Synthetic oligonucleotide
  Sense strand starting at position 1360 of SEQ ID NO: 1562504
cugguuuguugggaguuga

SEQ ID NO: 1752188 - RNA, 19 nt, Artificial Sequence
  Description of Artificial Sequence: Synthetic oligonucleotide
  Antisense strand to SEQ ID NO: 1752187
ucaacucccaacaaaccag

SEQ ID NO: 1752189 - RNA, 19 nt, Artificial Sequence
  Description of Artificial Sequence: Synthetic oligonucleotide
  Sense strand starting at position 1985 of SEQ ID NO: 1562504
gcccgcuggcucuaugaau

SEQ ID NO: 1752190 - RNA, 19 nt, Artificial Sequence
  Description of Artificial Sequence: Synthetic oligonucleotide
  Antisense strand to SEQ ID NO: 1752189
auucauagagccagcgggc

SEQ ID NO: 1752191 - RNA, 19 nt, Artificial Sequence
  Description of Artificial Sequence: Synthetic oligonucleotide
  Sense strand starting at position 1991 of SEQ ID NO: 1562504
uggcucuaugaaugagagu

SEQ ID NO: 1752192 - RNA, 19 nt, Artificial Sequence
  Description of Artificial Sequence: Synthetic oligonucleotide
  Antisense strand to SEQ ID NO: 1752191
acucucauucauagagcca

SEQ ID NO: 1752193 - RNA, 19 nt, Artificial Sequence
  Description of Artificial Sequence: Synthetic oligonucleotide
  Sense strand starting at position 2000 of SEQ ID NO: 1562504
gaaugagagugccuggaaa

SEQ ID NO: 1752194 - RNA, 19 nt, Artificial Sequence
  Description of Artificial Sequence: Synthetic oligonucleotide
  Antisense strand to SEQ ID NO: 1752193
uuuccaggcacucucauuc

SEQ ID NO: 1752195 - RNA, 19 nt, Artificial Sequence
  Description of Artificial Sequence: Synthetic oligonucleotide
  Sense strand starting at position 2002 of SEQ ID NO: 1562504
augagagugccuggaaaug

SEQ ID NO: 1752196 - RNA, 19 nt, Artificial Sequence
  Description of Artificial Sequence: Synthetic oligonucleotide
  Antisense strand to SEQ ID NO: 1752195
cauuuccaggcacucucau

SEQ ID NO: 1752197 - RNA, 19 nt, Artificial Sequence
  Description of Artificial Sequence: Synthetic oligonucleotide
  Sense strand starting at position 2061 of SEQ ID NO: 1562504
cccucagcucguuugcaua

SEQ ID NO: 1752198 - RNA, 19 nt, Artificial Sequence
  Description of Artificial Sequence: Synthetic oligonucleotide
  Antisense strand to SEQ ID NO: 1752197
uaugcaaacgagcugaggg

SEQ ID NO: 1752199 - RNA, 19 nt, Artificial Sequence
  Description of Artificial Sequence: Synthetic oligonucleotide
  Sense strand starting at position 2674 of SEQ ID NO: 1562504
uugggucgguuucuguaau

SEQ ID NO: 1752200 - RNA, 19 nt, Artificial Sequence
  Description of Artificial Sequence: Synthetic oligonucleotide
  Antisense strand to SEQ ID NO: 1752199
auuacagaaaccgacccaa

SEQ ID NO: 1752201 - RNA, 19 nt, Artificial Sequence
  Description of Artificial Sequence: Synthetic oligonucleotide
  Sense strand starting at position 2678 of SEQ ID NO: 1562504
gucgguuucuguaaugggu

SEQ ID NO: 1752202 - RNA, 19 nt, Artificial Sequence
  Description of Artificial Sequence: Synthetic oligonucleotide
  Antisense strand to SEQ ID NO: 1752201
acccauuacagaaaccgac

SEQ ID NO: 1752203 - RNA, 19 nt, Artificial Sequence
  Description of Artificial Sequence: Synthetic oligonucleotide
  Sense strand starting at position 2769 of SEQ ID NO: 1562504
agcgaagaguuuccuaguc

SEQ ID NO: 1752204 - RNA, 19 nt, Artificial Sequence
  Description of Artificial Sequence: Synthetic oligonucleotide
  Antisense strand to SEQ ID NO: 1752203
gacuaggaaacucuucgcu

SEQ ID NO: 1752205 - RNA, 19 nt, Artificial Sequence
  Description of Artificial Sequence: Synthetic oligonucleotide
  Sense strand starting at position 2771 of SEQ ID NO: 1562504
cgaagaguuuccuagucag

SEQ ID NO: 1752206 - RNA, 19 nt, Artificial Sequence
  Description of Artificial Sequence: Synthetic oligonucleotide
  Antisense strand to SEQ ID NO: 1752205
cugacuaggaaacucuucg

SEQ ID NO: 1752207 - RNA, 19 nt, Artificial Sequence
  Description of Artificial Sequence: Synthetic oligonucleotide
  Sense strand starting at position 2774 of SEQ ID NO: 1562504
agaguuuccuagucaggaa

SEQ ID NO: 1752208 - RNA, 19 nt, Artificial Sequence
  Description of Artificial Sequence: Synthetic oligonucleotide
  Antisense strand to SEQ ID NO: 1752207
uuccugacuaggaaacucu

SEQ ID NO: 1752209 - RNA, 19 nt, Artificial Sequence
  Description of Artificial Sequence: Synthetic oligonucleotide
  Sense strand starting at position 2777 of SEQ ID NO: 1562504
guuuccuagucaggaaaga

SEQ ID NO: 1752210 - RNA, 19 nt, Artificial Sequence
  Description of Artificial Sequence: Synthetic oligonucleotide
  Antisense strand to SEQ ID NO: 1752209
ucuuuccugacuaggaaac

SEQ ID NO: 1752211 - RNA, 19 nt, Artificial Sequence
  Description of Artificial Sequence: Synthetic oligonucleotide
  Sense strand starting at position 3631 of SEQ ID NO: 1562504
agaacuagcguucgaggau

SEQ ID NO: 1752212 - RNA, 19 nt, Artificial Sequence
  Description of Artificial Sequence: Synthetic oligonucleotide
  Antisense strand to SEQ ID NO: 1752211
auccucgaacgcuaguucu

SEQ ID NO: 1752213 - RNA, 19 nt, Artificial Sequence
  Description of Artificial Sequence: Synthetic oligonucleotide
  Sense strand starting at position 3632 of SEQ ID NO: 1562504
gaacuagcguucgaggaua

SEQ ID NO: 1752214 - RNA, 19 nt, Artificial Sequence
  Description of Artificial Sequence: Synthetic oligonucleotide
  Antisense strand to SEQ ID NO: 1752213
uauccucgaacgcuaguuc

SEQ ID NO: 1752215 - RNA, 19 nt, Artificial Sequence
  Description of Artificial Sequence: Synthetic oligonucleotide
  Sense strand starting at position 3634 of SEQ ID NO: 1562504
acuagcguucgaggauaaa

SEQ ID NO: 1752216 - RNA, 19 nt, Artificial Sequence
  Description of Artificial Sequence: Synthetic oligonucleotide
  Antisense strand to SEQ ID NO: 1752215
uuuauccucgaacgcuagu

SEQ ID NO: 1752217 - RNA, 19 nt, Artificial Sequence
  Description of Artificial Sequence: Synthetic oligonucleotide
  Sense strand starting at position 3698 of SEQ ID NO: 1562504
gcgcguuuccgagguucca

SEQ ID NO: 1752218 - RNA, 19 nt, Artificial Sequence
  Description of Artificial Sequence: Synthetic oligonucleotide
  Antisense strand to SEQ ID NO: 1752217
uggaaccucggaaacgcgc

SEQ ID NO: 1752219 - RNA, 19 nt, Artificial Sequence
  Description of Artificial Sequence: Synthetic oligonucleotide
  Sense strand starting at position 3699 of SEQ ID NO: 1562504
cgcguuuccgagguuccaa

SEQ ID NO: 1752220 - RNA, 19 nt, Artificial Sequence
  Description of Artificial Sequence: Synthetic oligonucleotide
  Antisense strand to SEQ ID NO: 1752219
uuggaaccucggaaacgcg

SEQ ID NO: 1752221 - RNA, 19 nt, Artificial Sequence
  Description of Artificial Sequence: Synthetic oligonucleotide
  Sense strand starting at position 3700 of SEQ ID NO: 1562504
gcguuuccgagguuccaau

SEQ ID NO: 1752222 - RNA, 19 nt, Artificial Sequence
  Description of Artificial Sequence: Synthetic oligonucleotide
  Antisense strand to SEQ ID NO: 1752221
auuggaaccucggaaacgc

SEQ ID NO: 1752223 - RNA, 19 nt, Artificial Sequence
  Description of Artificial Sequence: Synthetic oligonucleotide
  Sense strand starting at position 3833 of SEQ ID NO: 1562504
ggcuaucugugcuucagga

SEQ ID NO: 1752224 - RNA, 19 nt, Artificial Sequence
  Description of Artificial Sequence: Synthetic oligonucleotide
  Antisense strand to SEQ ID NO: 1752223
uccugaagcacagauagcc

SEQ ID NO: 1752225 - RNA, 19 nt, Artificial Sequence
  Description of Artificial Sequence: Synthetic oligonucleotide
  Sense strand starting at position 150 of SEQ ID NO: 1562505
gaaacuugagcuugguuaa

SEQ ID NO: 1752226 - RNA, 19 nt, Artificial Sequence
  Description of Artificial Sequence: Synthetic oligonucleotide
  Antisense strand to SEQ ID NO: 1752225
uuaaccaagcucaaguuuc

SEQ ID NO: 1752227 - RNA, 19 nt, Artificial Sequence
  Description of Artificial Sequence: Synthetic oligonucleotide
  Sense strand starting at position 151 of SEQ ID NO: 1562505
aaacuugagcuugguuaau

SEQ ID NO: 1752228 - RNA, 19 nt, Artificial Sequence
  Description of Artificial Sequence: Synthetic oligonucleotide
  Antisense strand to SEQ ID NO: 1752227
auuaaccaagcucaaguuu

SEQ ID NO: 1752229 - RNA, 19 nt, Artificial Sequence
  Description of Artificial Sequence: Synthetic oligonucleotide
  Sense strand starting at position 355 of SEQ ID NO: 1562505
uagcauuugcugugauaaa

SEQ ID NO: 1752230 - RNA, 19 nt, Artificial Sequence
  Description of Artificial Sequence: Synthetic oligonucleotide
  Antisense strand to SEQ ID NO: 1752229
uuuaucacagcaaaugcua

SEQ ID NO: 1752231 - RNA, 19 nt, Artificial Sequence
  Description of Artificial Sequence: Synthetic oligonucleotide
  Sense strand starting at position 403 of SEQ ID NO: 1562505
cucacuuagcuguaugaau

SEQ ID NO: 1752232 - RNA, 19 nt, Artificial Sequence
  Description of Artificial Sequence: Synthetic oligonucleotide
  Antisense strand to SEQ ID NO: 1752231
auucauacagcuaagugag

SEQ ID NO: 1752233 - RNA, 19 nt, Artificial Sequence
  Description of Artificial Sequence: Synthetic oligonucleotide
  Sense strand starting at position 445 of SEQ ID NO: 1562505
uugggugcucaagagaguu

SEQ ID NO: 1752234 - RNA, 19 nt, Artificial Sequence
  Description of Artificial Sequence: Synthetic oligonucleotide
  Antisense strand to SEQ ID NO: 1752233
aacucucuugagcacccaa

SEQ ID NO: 1752235 - RNA, 19 nt, Artificial Sequence
  Description of Artificial Sequence: Synthetic oligonucleotide
  Sense strand starting at position 457 of SEQ ID NO: 1562505
gagaguuuguagccagaaa

SEQ ID NO: 1752236 - RNA, 19 nt, Artificial Sequence
  Description of Artificial Sequence: Synthetic oligonucleotide
  Antisense strand to SEQ ID NO: 1752235
uuucuggcuacaaacucuc

SEQ ID NO: 1752237 - RNA, 19 nt, Artificial Sequence
  Description of Artificial Sequence: Synthetic oligonucleotide
  Sense strand starting at position 801 of SEQ ID NO: 1562505
aaugcuuaacucgggaaac

SEQ ID NO: 1752238 - RNA, 19 nt, Artificial Sequence
  Description of Artificial Sequence: Synthetic oligonucleotide
  Antisense strand to SEQ ID NO: 1752237
guuucccgaguuaagcauu

SEQ ID NO: 1752239 - RNA, 19 nt, Artificial Sequence
  Description of Artificial Sequence: Synthetic oligonucleotide
  Sense strand starting at position 803 of SEQ ID NO: 1562505
ugcuuaacucgggaaacuu

SEQ ID NO: 1752240 - RNA, 19 nt, Artificial Sequence
  Description of Artificial Sequence: Synthetic oligonucleotide
  Antisense strand to SEQ ID NO: 1752239
aaguuucccgaguuaagca

SEQ ID NO: 1752241 - RNA, 19 nt, Artificial Sequence
  Description of Artificial Sequence: Synthetic oligonucleotide
  Sense strand starting at position 811 of SEQ ID NO: 1562505
ucgggaaacuucucuauug

SEQ ID NO: 1752242 - RNA, 19 nt, Artificial Sequence
  Description of Artificial Sequence: Synthetic oligonucleotide
  Antisense strand to SEQ ID NO: 1752241
caauagagaaguuucccga

SEQ ID NO: 1752243 - RNA, 19 nt, Artificial Sequence
  Description of Artificial Sequence: Synthetic oligonucleotide
  Sense strand starting at position 840 of SEQ ID NO: 1562505
gagagaccucgguaugcca

SEQ ID NO: 1752244 - RNA, 19 nt, Artificial Sequence
  Description of Artificial Sequence: Synthetic oligonucleotide
  Antisense strand to SEQ ID NO: 1752243
uggcauaccgaggucucuc

SEQ ID NO: 1752245 - RNA, 19 nt, Artificial Sequence
  Description of Artificial Sequence: Synthetic oligonucleotide
  Sense strand starting at position 888 of SEQ ID NO: 1562505
gcugguugucucuuugcau

SEQ ID NO: 1752246 - RNA, 19 nt, Artificial Sequence
  Description of Artificial Sequence: Synthetic oligonucleotide
  Antisense strand to SEQ ID NO: 1752245
augcaaagagacaaccagc

SEQ ID NO: 1752247 - RNA, 19 nt, Artificial Sequence
  Description of Artificial Sequence: Synthetic oligonucleotide
  Sense strand starting at position 1157 of SEQ ID NO: 1562505
ugccgaguuaaggauaacu

SEQ ID NO: 1752248 - RNA, 19 nt, Artificial Sequence
  Description of Artificial Sequence: Synthetic oligonucleotide
  Antisense strand to SEQ ID NO: 1752247
aguuauccuuaacucggca

SEQ ID NO: 1752249 - RNA, 19 nt, Artificial Sequence
  Description of Artificial Sequence: Synthetic oligonucleotide
  Sense strand starting at position 1358 of SEQ ID NO: 1562505
cuuccaucugauuaguaag

SEQ ID NO: 1752250 - RNA, 19 nt, Artificial Sequence
  Description of Artificial Sequence: Synthetic oligonucleotide
  Antisense strand to SEQ ID NO: 1752249
cuuacuaaucagauggaag

SEQ ID NO: 1752251 - RNA, 19 nt, Artificial Sequence
  Description of Artificial Sequence: Synthetic oligonucleotide
  Sense strand starting at position 1360 of SEQ ID NO: 1562505
uccaucugauuaguaagua

SEQ ID NO: 1752252 - RNA, 19 nt, Artificial Sequence
  Description of Artificial Sequence: Synthetic oligonucleotide
  Antisense strand to SEQ ID NO: 1752251
uacuuacuaaucagaugga

SEQ ID NO: 1752253 - RNA, 19 nt, Artificial Sequence
  Description of Artificial Sequence: Synthetic oligonucleotide
  Sense strand starting at position 1384 of SEQ ID NO: 1562505
auagacuuguaaucauaug

SEQ ID NO: 1752254 - RNA, 19 nt, Artificial Sequence
  Description of Artificial Sequence: Synthetic oligonucleotide
  Antisense strand to SEQ ID NO: 1752253
cauaugauuacaagucuau

SEQ ID NO: 1752255 - RNA, 19 nt, Artificial Sequence
  Description of Artificial Sequence: Synthetic oligonucleotide
  Sense strand starting at position 1739 of SEQ ID NO: 1562505
gcuggauaccucugggacu

SEQ ID NO: 1752256 - RNA, 19 nt, Artificial Sequence
  Description of Artificial Sequence: Synthetic oligonucleotide
  Antisense strand to SEQ ID NO: 1752255
agucccagagguauccagc

SEQ ID NO: 1752257 - RNA, 19 nt, Artificial Sequence
  Description of Artificial Sequence: Synthetic oligonucleotide
  Sense strand starting at position 1885 of SEQ ID NO: 1562505
ugugguuugcauucagugu

SEQ ID NO: 1752258 - RNA, 19 nt, Artificial Sequence
  Description of Artificial Sequence: Synthetic oligonucleotide
  Antisense strand to SEQ ID NO: 1752257
acacugaaugcaaaccaca

SEQ ID NO: 1752259 - RNA, 19 nt, Artificial Sequence
  Description of Artificial Sequence: Synthetic oligonucleotide
  Sense strand starting at position 1900 of SEQ ID NO: 1562505
gugugauucguccugccug

SEQ ID NO: 1752260 - RNA, 19 nt, Artificial Sequence
  Description of Artificial Sequence: Synthetic oligonucleotide
  Antisense strand to SEQ ID NO: 1752259
caggcaggacgaaucacac

SEQ ID NO: 1752261 - RNA, 19 nt, Artificial Sequence
  Description of Artificial Sequence: Synthetic oligonucleotide
  Sense strand starting at position 2071 of SEQ ID NO: 1562505
ccaaucaugugacuuaagu

SEQ ID NO: 1752262 - RNA, 19 nt, Artificial Sequence
  Description of Artificial Sequence: Synthetic oligonucleotide
  Antisense strand to SEQ ID NO: 1752261
acuuaagucacaugauugg

SEQ ID NO: 1752263 - RNA, 19 nt, Artificial Sequence
  Description of Artificial Sequence: Synthetic oligonucleotide
  Sense strand starting at position 2238 of SEQ ID NO: 1562505
ggucuuugcugauuuagua

SEQ ID NO: 1752264 - RNA, 19 nt, Artificial Sequence
  Description of Artificial Sequence: Synthetic oligonucleotide
  Antisense strand to SEQ ID NO: 1752263
uacuaaaucagcaaagacc

SEQ ID NO: 1752265 - RNA, 19 nt, Artificial Sequence
  Description of Artificial Sequence: Synthetic oligonucleotide
  Sense strand starting at position 2438 of SEQ ID NO: 1562505
ucuaucauggcauaaguga

SEQ ID NO: 1752266 - RNA, 19 nt, Artificial Sequence
  Description of Artificial Sequence: Synthetic oligonucleotide
  Antisense strand to SEQ ID NO: 1752265
ucacuuaugccaugauaga

SEQ ID NO: 1752267 - RNA, 19 nt, Artificial Sequence
  Description of Artificial Sequence: Synthetic oligonucleotide
  Sense strand starting at position 2630 of SEQ ID NO: 1562505
uggacaacuuuaguaugua

SEQ ID NO: 1752268 - RNA, 19 nt, Artificial Sequence
  Description of Artificial Sequence: Synthetic oligonucleotide
  Antisense strand to SEQ ID NO: 1752267
uacauacuaaaguugucca

SEQ ID NO: 1752269 - RNA, 19 nt, Artificial Sequence
  Description of Artificial Sequence: Synthetic oligonucleotide
  Sense strand starting at position 2763 of SEQ ID NO: 1562505
auuucuguauuugggacaa

SEQ ID NO: 1752270 - RNA, 19 nt, Artificial Sequence
  Description of Artificial Sequence: Synthetic oligonucleotide
  Antisense strand to SEQ ID NO: 1752269
uugucccaaauacagaaau

SEQ ID NO: 1752271 - RNA, 19 nt, Artificial Sequence
  Description of Artificial Sequence: Synthetic oligonucleotide
  Sense strand starting at position 2765 of SEQ ID NO: 1562505
uucuguauuugggacaaag

SEQ ID NO: 1752272 - RNA, 19 nt, Artificial Sequence
  Description of Artificial Sequence: Synthetic oligonucleotide
  Antisense strand to SEQ ID NO: 1752271
cuuugucccaaauacagaa

SEQ ID NO: 1752273 - RNA, 19 nt, Artificial Sequence
  Description of Artificial Sequence: Synthetic oligonucleotide
  Sense strand starting at position 2797 of SEQ ID NO: 1562505
gcagauguuuauuuguauu

SEQ ID NO: 1752274 - RNA, 19 nt, Artificial Sequence
  Description of Artificial Sequence: Synthetic oligonucleotide
  Antisense strand to SEQ ID NO: 1752273
aauacaaauaaacaucugc

SEQ ID NO: 1752275 - RNA, 19 nt, Artificial Sequence
  Description of Artificial Sequence: Synthetic oligonucleotide
  Sense strand starting at position 2810 of SEQ ID NO: 1562505
uguauugucacuugggaaa

SEQ ID NO: 1752276 - RNA, 19 nt, Artificial Sequence
  Description of Artificial Sequence: Synthetic oligonucleotide
  Antisense strand to SEQ ID NO: 1752275
uuucccaagugacaauaca

SEQ ID NO: 1752277 - RNA, 19 nt, Artificial Sequence
  Description of Artificial Sequence: Synthetic oligonucleotide
  Sense strand starting at position 2975 of SEQ ID NO: 1562505
uuauauagcgcguccucua

SEQ ID NO: 1752278 - RNA, 19 nt, Artificial Sequence
  Description of Artificial Sequence: Synthetic oligonucleotide
  Antisense strand to SEQ ID NO: 1752277
uagaggacgcgcuauauaa

SEQ ID NO: 1752279 - RNA, 19 nt, Artificial Sequence
  Description of Artificial Sequence: Synthetic oligonucleotide
  Sense strand starting at position 2982 of SEQ ID NO: 1562505
gcgcguccucuaccuuaga

SEQ ID NO: 1752280 - RNA, 19 nt, Artificial Sequence
  Description of Artificial Sequence: Synthetic oligonucleotide
  Antisense strand to SEQ ID NO: 1752279
ucuaagguagaggacgcgc

SEQ ID NO: 1752281 - RNA, 19 nt, Artificial Sequence
  Description of Artificial Sequence: Synthetic oligonucleotide
  Sense strand starting at position 2985 of SEQ ID NO: 1562505
cguccucuaccuuagaaag

SEQ ID NO: 1752282 - RNA, 19 nt, Artificial Sequence
  Description of Artificial Sequence: Synthetic oligonucleotide
  Antisense strand to SEQ ID NO: 1752281
cuuucuaagguagaggacg

SEQ ID NO: 1752283 - RNA, 19 nt, Artificial Sequence
  Description of Artificial Sequence: Synthetic oligonucleotide
  Sense strand starting at position 2999 of SEQ ID NO: 1562505
gaaagacaugccuguuuga

SEQ ID NO: 1752284 - RNA, 19 nt, Artificial Sequence
  Description of Artificial Sequence: Synthetic oligonucleotide
  Antisense strand to SEQ ID NO: 1752283
ucaaacaggcaugucuuuc

SEQ ID NO: 1752285 - RNA, 19 nt, Artificial Sequence
  Description of Artificial Sequence: Synthetic oligonucleotide
  Sense strand starting at position 3002 of SEQ ID NO: 1562505
agacaugccuguuugaaga

SEQ ID NO: 1752286 - RNA, 19 nt, Artificial Sequence
  Description of Artificial Sequence: Synthetic oligonucleotide
  Antisense strand to SEQ ID NO: 1752285
ucuucaaacaggcaugucu

SEQ ID NO: 1752287 - RNA, 19 nt, Artificial Sequence
  Description of Artificial Sequence: Synthetic oligonucleotide
  Sense strand starting at position 3131 of SEQ ID NO: 1562505
guaguuccaagaugaagaa

SEQ ID NO: 1752288 - RNA, 19 nt, Artificial Sequence
  Description of Artificial Sequence: Synthetic oligonucleotide
  Antisense strand to SEQ ID NO: 1752287
uucuucaucuuggaacuac

SEQ ID NO: 1752289 - RNA, 19 nt, Artificial Sequence
  Description of Artificial Sequence: Synthetic oligonucleotide
  Sense strand starting at position 3213 of SEQ ID NO: 1562505
cacucugcgcacgugaaau

SEQ ID NO: 1752290 - RNA, 19 nt, Artificial Sequence
  Description of Artificial Sequence: Synthetic oligonucleotide
  Antisense strand to SEQ ID NO: 1752289
auuucacgugcgcagagug

SEQ ID NO: 1752291 - RNA, 19 nt, Artificial Sequence
  Description of Artificial Sequence: Synthetic oligonucleotide
  Sense strand starting at position 3248 of SEQ ID NO: 1562505
aagagaaccugugugauga

SEQ ID NO: 1752292 - RNA, 19 nt, Artificial Sequence
  Description of Artificial Sequence: Synthetic oligonucleotide
  Antisense strand to SEQ ID NO: 1752291
ucaucacacagguucucuu

SEQ ID NO: 1752293 - RNA, 19 nt, Artificial Sequence
  Description of Artificial Sequence: Synthetic oligonucleotide
  Sense strand starting at position 3249 of SEQ ID NO: 1562505
agagaaccugugugaugau

SEQ ID NO: 1752294 - RNA, 19 nt, Artificial Sequence
  Description of Artificial Sequence: Synthetic oligonucleotide
  Antisense strand to SEQ ID NO: 1752293
aucaucacacagguucucu

SEQ ID NO: 1752295 - RNA, 19 nt, Artificial Sequence
  Description of Artificial Sequence: Synthetic oligonucleotide
  Sense strand starting at position 3277 of SEQ ID NO: 1562505
augccaguccuggauucua

SEQ ID NO: 1752296 - RNA, 19 nt, Artificial Sequence
  Description of Artificial Sequence: Synthetic oligonucleotide
  Antisense strand to SEQ ID NO: 1752295
uagaauccaggacuggcau

SEQ ID NO: 1752297 - RNA, 19 nt, Artificial Sequence
  Description of Artificial Sequence: Synthetic oligonucleotide
  Sense strand starting at position 3692 of SEQ ID NO: 1562505
aaagucaagccugaguuga

SEQ ID NO: 1752298 - RNA, 19 nt, Artificial Sequence
  Description of Artificial Sequence: Synthetic oligonucleotide
  Antisense strand to SEQ ID NO: 1752297
ucaacucaggcuugacuuu

SEQ ID NO: 1752299 - RNA, 19 nt, Artificial Sequence
  Description of Artificial Sequence: Synthetic oligonucleotide
  Sense strand starting at position 3743 of SEQ ID NO: 1562505
cuuaauauucccuggaagg

SEQ ID NO: 1752300 - RNA, 19 nt, Artificial Sequence
  Description of Artificial Sequence: Synthetic oligonucleotide
  Antisense strand to SEQ ID NO: 1752299
ccuuccagggaauauuaag

SEQ ID NO: 1752301 - RNA, 19 nt, Artificial Sequence
  Description of Artificial Sequence: Synthetic oligonucleotide
  Sense strand starting at position 3851 of SEQ ID NO: 1562505
gaauauccuugggagauuu

SEQ ID NO: 1752302 - RNA, 19 nt, Artificial Sequence
  Description of Artificial Sequence: Synthetic oligonucleotide
  Antisense strand to SEQ ID NO: 1752301
aaaucucccaaggauauuc

SEQ ID NO: 1752303 - RNA, 19 nt, Artificial Sequence
  Description of Artificial Sequence: Synthetic oligonucleotide
  Sense strand starting at position 3906 of SEQ ID NO: 1562505
uguccagaugcuuaggaga

SEQ ID NO: 1752304 - RNA, 19 nt, Artificial Sequence
  Description of Artificial Sequence: Synthetic oligonucleotide
  Antisense strand to SEQ ID NO: 1752303
ucuccuaagcaucuggaca

SEQ ID NO: 1752305 - RNA, 19 nt, Artificial Sequence
  Description of Artificial Sequence: Synthetic oligonucleotide
  Sense strand starting at position 553 of SEQ ID NO: 1562506
gaguuuaguaaggaaaugu

SEQ ID NO: 1752306 - RNA, 19 nt, Artificial Sequence
  Description of Artificial Sequence: Synthetic oligonucleotide
  Antisense strand to SEQ ID NO: 1752305
acauuuccuuacuaaacuc

SEQ ID NO: 1752307 - RNA, 19 nt, Artificial Sequence
  Description of Artificial Sequence: Synthetic oligonucleotide
  Sense strand starting at position 593 of SEQ ID NO: 1562506
aguaaagcauggccagaau

SEQ ID NO: 1752308 - RNA, 19 nt, Artificial Sequence
  Description of Artificial Sequence: Synthetic oligonucleotide
  Antisense strand to SEQ ID NO: 1752307
auucuggccaugcuuuacu

SEQ ID NO: 1752309 - RNA, 19 nt, Artificial Sequence
  Description of Artificial Sequence: Synthetic oligonucleotide
  Sense strand starting at position 623 of SEQ ID NO: 1562506
ucccgacugacauguaaga

SEQ ID NO: 1752310 - RNA, 19 nt, Artificial Sequence
  Description of Artificial Sequence: Synthetic oligonucleotide
  Antisense strand to SEQ ID NO: 1752309
ucuuacaugucagucggga

SEQ ID NO: 1752311 - RNA, 19 nt, Artificial Sequence
  Description of Artificial Sequence: Synthetic oligonucleotide
  Sense strand starting at position 720 of SEQ ID NO: 1562506
agauauagacaccgcaaua

SEQ ID NO: 1752312 - RNA, 19 nt, Artificial Sequence
  Description of Artificial Sequence: Synthetic oligonucleotide
  Antisense strand to SEQ ID NO: 1752311
uauugcggugucuauaucu

SEQ ID NO: 1752313 - RNA, 19 nt, Artificial Sequence
  Description of Artificial Sequence: Synthetic oligonucleotide
  Sense strand starting at position 756 of SEQ ID NO: 1562506
guggcuuugauaggauuau

SEQ ID NO: 1752314 - RNA, 19 nt, Artificial Sequence
  Description of Artificial Sequence: Synthetic oligonucleotide
  Antisense strand to SEQ ID NO: 1752313
auaauccuaucaaagccac

SEQ ID NO: 1752315 - RNA, 19 nt, Artificial Sequence
  Description of Artificial Sequence: Synthetic oligonucleotide
  Sense strand starting at position 766 of SEQ ID NO: 1562506
uaggauuauaguggucaag

SEQ ID NO: 1752316 - RNA, 19 nt, Artificial Sequence
  Description of Artificial Sequence: Synthetic oligonucleotide
  Antisense strand to SEQ ID NO: 1752315
cuugaccacuauaauccua

SEQ ID NO: 1752317 - RNA, 19 nt, Artificial Sequence
  Description of Artificial Sequence: Synthetic oligonucleotide
  Sense strand starting at position 768 of SEQ ID NO: 1562506
ggauuauaguggucaaguu

SEQ ID NO: 1752318 - RNA, 19 nt, Artificial Sequence
  Description of Artificial Sequence: Synthetic oligonucleotide
  Antisense strand to SEQ ID NO: 1752317
aacuugaccacuauaaucc

SEQ ID NO: 1752319 - RNA, 19 nt, Artificial Sequence
  Description of Artificial Sequence: Synthetic oligonucleotide
  Sense strand starting at position 769 of SEQ ID NO: 1562506
gauuauaguggucaaguug

SEQ ID NO: 1752320 - RNA, 19 nt, Artificial Sequence
  Description of Artificial Sequence: Synthetic oligonucleotide
  Antisense strand to SEQ ID NO: 1752319
caacuugaccacuauaauc

SEQ ID NO: 1752321 - RNA, 19 nt, Artificial Sequence
  Description of Artificial Sequence: Synthetic oligonucleotide
  Sense strand starting at position 837 of SEQ ID NO: 1562506
acagaugaauuacaugaga

SEQ ID NO: 1752322 - RNA, 19 nt, Artificial Sequence
  Description of Artificial Sequence: Synthetic oligonucleotide
  Antisense strand to SEQ ID NO: 1752321
ucucauguaauucaucugu

SEQ ID NO: 1752323 - RNA, 19 nt, Artificial Sequence
  Description of Artificial Sequence: Synthetic oligonucleotide
  Sense strand starting at position 908 of SEQ ID NO: 1562506
uuauuuagacguugauggu

SEQ ID NO: 1752324 - RNA, 19 nt, Artificial Sequence
  Description of Artificial Sequence: Synthetic oligonucleotide
  Antisense strand to SEQ ID NO: 1752323
accaucaacgucuaaauaa

SEQ ID NO: 1752325 - RNA, 19 nt, Artificial Sequence
  Description of Artificial Sequence: Synthetic oligonucleotide
  Sense strand starting at position 985 of SEQ ID NO: 1562506
guuaaauagagaggucuag

SEQ ID NO: 1752326 - RNA, 19 nt, Artificial Sequence
  Description of Artificial Sequence: Synthetic oligonucleotide
  Antisense strand to SEQ ID NO: 1752325
cuagaccucucuauuuaac

SEQ ID NO: 1752327 - RNA, 19 nt, Artificial Sequence
  Description of Artificial Sequence: Synthetic oligonucleotide
  Sense strand starting at position 1004 of SEQ ID NO: 1562506
caggcaguuagauguauag

SEQ ID NO: 1752328 - RNA, 19 nt, Artificial Sequence
  Description of Artificial Sequence: Synthetic oligonucleotide
  Antisense strand to SEQ ID NO: 1752327
cuauacaucuaacugccug

SEQ ID NO: 1752329 - RNA, 19 nt, Artificial Sequence
  Description of Artificial Sequence: Synthetic oligonucleotide
  Sense strand starting at position 1006 of SEQ ID NO: 1562506
ggcaguuagauguauaguu

SEQ ID NO: 1752330 - RNA, 19 nt, Artificial Sequence
  Description of Artificial Sequence: Synthetic oligonucleotide
  Antisense strand to SEQ ID NO: 1752329
aacuauacaucuaacugcc

SEQ ID NO: 1752331 - RNA, 19 nt, Artificial Sequence
  Description of Artificial Sequence: Synthetic oligonucleotide
  Sense strand starting at position 1034 of SEQ ID NO: 1562506
acgagagacucagcuagau

SEQ ID NO: 1752332 - RNA, 19 nt, Artificial Sequence
  Description of Artificial Sequence: Synthetic oligonucleotide
  Antisense strand to SEQ ID NO: 1752331
aucuagcugagucucucgu

SEQ ID NO: 1752333 - RNA, 19 nt, Artificial Sequence
  Description of Artificial Sequence: Synthetic oligonucleotide
  Sense strand starting at position 1051 of SEQ ID NO: 1562506
auauauaaucuugggaguc

SEQ ID NO: 1752334 - RNA, 19 nt, Artificial Sequence
  Description of Artificial Sequence: Synthetic oligonucleotide
  Antisense strand to SEQ ID NO: 1752333
gacucccaagauuauauau

SEQ ID NO: 1752335 - RNA, 19 nt, Artificial Sequence
  Description of Artificial Sequence: Synthetic oligonucleotide
  Sense strand starting at position 1134 of SEQ ID NO: 1562506
gugcuauugaauuggaggu

SEQ ID NO: 1752336 - RNA, 19 nt, Artificial Sequence
  Description of Artificial Sequence: Synthetic oligonucleotide
  Antisense strand to SEQ ID NO: 1752335
accuccaauucaauagcac

SEQ ID NO: 1752337 - RNA, 19 nt, Artificial Sequence
  Description of Artificial Sequence: Synthetic oligonucleotide
  Sense strand starting at position 1135 of SEQ ID NO: 1562506
ugcuauugaauuggaggua

SEQ ID NO: 1752338 - RNA, 19 nt, Artificial Sequence
  Description of Artificial Sequence: Synthetic oligonucleotide
  Antisense strand to SEQ ID NO: 1752337
uaccuccaauucaauagca

SEQ ID NO: 1752339 - RNA, 19 nt, Artificial Sequence
  Description of Artificial Sequence: Synthetic oligonucleotide
  Sense strand starting at position 1220 of SEQ ID NO: 1562506
agugaugucacaggucauu

SEQ ID NO: 1752340 - RNA, 19 nt, Artificial Sequence
  Description of Artificial Sequence: Synthetic oligonucleotide
  Antisense strand to SEQ ID NO: 1752339
aaugaccugugacaucacu

SEQ ID NO: 1752341 - RNA, 19 nt, Artificial Sequence
  Description of Artificial Sequence: Synthetic oligonucleotide
  Sense strand starting at position 1317 of SEQ ID NO: 1562506
cagcgaaugcuguaagaua

SEQ ID NO: 1752342 - RNA, 19 nt, Artificial Sequence
  Description of Artificial Sequence: Synthetic oligonucleotide
  Antisense strand to SEQ ID NO: 1752341
uaucuuacagcauucgcug

SEQ ID NO: 1752343 - RNA, 19 nt, Artificial Sequence
  Description of Artificial Sequence: Synthetic oligonucleotide
  Sense strand starting at position 1503 of SEQ ID NO: 1562506
acugaaacuugagauuucu

SEQ ID NO: 1752344 - RNA, 19 nt, Artificial Sequence
  Description of Artificial Sequence: Synthetic oligonucleotide
  Antisense strand to SEQ ID NO: 1752343
agaaaucucaaguuucagu

SEQ ID NO: 1752345 - RNA, 19 nt, Artificial Sequence
  Description of Artificial Sequence: Synthetic oligonucleotide
  Sense strand starting at position 2105 of SEQ ID NO: 1562506
gaaugcguugucccugcua

SEQ ID NO: 1752346 - RNA, 19 nt, Artificial Sequence
  Description of Artificial Sequence: Synthetic oligonucleotide
  Antisense strand to SEQ ID NO: 1752345
uagcagggacaacgcauuc

SEQ ID NO: 1752347 - RNA, 19 nt, Artificial Sequence
  Description of Artificial Sequence: Synthetic oligonucleotide
  Sense strand starting at position 2552 of SEQ ID NO: 1562506
aaagaauugguccguuaau

SEQ ID NO: 1752348 - RNA, 19 nt, Artificial Sequence
  Description of Artificial Sequence: Synthetic oligonucleotide
  Antisense strand to SEQ ID NO: 1752347
auuaacggaccaauucuuu

SEQ ID NO: 1752349 - RNA, 19 nt, Artificial Sequence
  Description of Artificial Sequence: Synthetic oligonucleotide
  Sense strand starting at position 2553 of SEQ ID NO: 1562506
aagaauugguccguuaaug

SEQ ID NO: 1752350 - RNA, 19 nt, Artificial Sequence
  Description of Artificial Sequence: Synthetic oligonucleotide
  Antisense strand to SEQ ID NO: 1752349
cauuaacggaccaauucuu

SEQ ID NO: 1752351 - RNA, 19 nt, Artificial Sequence
  Description of Artificial Sequence: Synthetic oligonucleotide
  Sense strand starting at position 2565 of SEQ ID NO: 1562506
guuaauguuccucaaauuc

SEQ ID NO: 1752352 - RNA, 19 nt, Artificial Sequence
  Description of Artificial Sequence: Synthetic oligonucleotide
  Antisense strand to SEQ ID NO: 1752351
gaauuugaggaacauuaac

SEQ ID NO: 1752353 - RNA, 19 nt, Artificial Sequence
  Description of Artificial Sequence: Synthetic oligonucleotide
  Sense strand starting at position 2773 of SEQ ID NO: 1562506
gguguucuugcccauuaac

SEQ ID NO: 1752354 - RNA, 19 nt, Artificial Sequence
  Description of Artificial Sequence: Synthetic oligonucleotide
  Antisense strand to SEQ ID NO: 1752353
guuaaugggcaagaacacc

SEQ ID NO: 1752355 - RNA, 19 nt, Artificial Sequence
  Description of Artificial Sequence: Synthetic oligonucleotide
  Sense strand starting at position 2839 of SEQ ID NO: 1562506
aggguaguuugaaggagau

SEQ ID NO: 1752356 - RNA, 19 nt, Artificial Sequence
  Description of Artificial Sequence: Synthetic oligonucleotide
  Antisense strand to SEQ ID NO: 1752355
aucuccuucaaacuacccu

SEQ ID NO: 1752357 - RNA, 19 nt, Artificial Sequence
  Description of Artificial Sequence: Synthetic oligonucleotide
  Sense strand starting at position 2840 of SEQ ID NO: 1562506
ggguaguuugaaggagaug

SEQ ID NO: 1752358 - RNA, 19 nt, Artificial Sequence
  Description of Artificial Sequence: Synthetic oligonucleotide
  Antisense strand to SEQ ID NO: 1752357
caucuccuucaaacuaccc

SEQ ID NO: 1752359 - RNA, 19 nt, Artificial Sequence
  Description of Artificial Sequence: Synthetic oligonucleotide
  Sense strand starting at position 2865 of SEQ ID NO: 1562506
ggagaauaauuagaaaugu

SEQ ID NO: 1752360 - RNA, 19 nt, Artificial Sequence
  Description of Artificial Sequence: Synthetic oligonucleotide
  Antisense strand to SEQ ID NO: 1752359
acauuucuaauuauucucc

SEQ ID NO: 1752361 - RNA, 19 nt, Artificial Sequence
  Description of Artificial Sequence: Synthetic oligonucleotide
  Sense strand starting at position 2938 of SEQ ID NO: 1562506
ugucauagauaagauuugu

SEQ ID NO: 1752362 - RNA, 19 nt, Artificial Sequence
  Description of Artificial Sequence: Synthetic oligonucleotide
  Antisense strand to SEQ ID NO: 1752361
acaaaucuuaucuaugaca

SEQ ID NO: 1752363 - RNA, 19 nt, Artificial Sequence
  Description of Artificial Sequence: Synthetic oligonucleotide
  Sense strand starting at position 3149 of SEQ ID NO: 1562506
aagcgaagucgagagaauu

SEQ ID NO: 1752364 - RNA, 19 nt, Artificial Sequence
  Description of Artificial Sequence: Synthetic oligonucleotide
  Antisense strand to SEQ ID NO: 1752363
aauucucucgacuucgcuu

SEQ ID NO: 1752365 - RNA, 19 nt, Artificial Sequence
  Description of Artificial Sequence: Synthetic oligonucleotide
  Sense strand starting at position 3214 of SEQ ID NO: 1562506
ucuauuuagcagugucuga

SEQ ID NO: 1752366 - RNA, 19 nt, Artificial Sequence
  Description of Artificial Sequence: Synthetic oligonucleotide
  Antisense strand to SEQ ID NO: 1752365
ucagacacugcuaaauaga

SEQ ID NO: 1752367 - RNA, 19 nt, Artificial Sequence
  Description of Artificial Sequence: Synthetic oligonucleotide
  Sense strand starting at position 3290 of SEQ ID NO: 1562506
cagggauguuccucaacuu

SEQ ID NO: 1752368 - RNA, 19 nt, Artificial Sequence
  Description of Artificial Sequence: Synthetic oligonucleotide
  Antisense strand to SEQ ID NO: 1752367
aaguugaggaacaucccug

SEQ ID NO: 1752369 - RNA, 19 nt, Artificial Sequence
  Description of Artificial Sequence: Synthetic oligonucleotide
  Sense strand starting at position 3291 of SEQ ID NO: 1562506
agggauguuccucaacuuc

SEQ ID NO: 1752370 - RNA, 19 nt, Artificial Sequence
  Description of Artificial Sequence: Synthetic oligonucleotide
  Antisense strand to SEQ ID NO: 1752369
gaaguugaggaacaucccu

SEQ ID NO: 1752371 - RNA, 19 nt, Artificial Sequence
  Description of Artificial Sequence: Synthetic oligonucleotide
  Sense strand starting at position 3414 of SEQ ID NO: 1562506
cuaccagcuuugucacaua

SEQ ID NO: 1752372 - RNA, 19 nt, Artificial Sequence
  Description of Artificial Sequence: Synthetic oligonucleotide
  Antisense strand to SEQ ID NO: 1752371
uaugugacaaagcugguag

SEQ ID NO: 1752373 - RNA, 19 nt, Artificial Sequence
  Description of Artificial Sequence: Synthetic oligonucleotide
  Sense strand starting at position 3731 of SEQ ID NO: 1562506
cuuguuauagaacgucaua

SEQ ID NO: 1752374 - RNA, 19 nt, Artificial Sequence
  Description of Artificial Sequence: Synthetic oligonucleotide
  Antisense strand to SEQ ID NO: 1752373
uaugacguucuauaacaag

SEQ ID NO: 1752375 - RNA, 19 nt, Artificial Sequence
  Description of Artificial Sequence: Synthetic oligonucleotide
  Sense strand starting at position 3748 of SEQ ID NO: 1562506
uaugguuggagucaugcaa

SEQ ID NO: 1752376 - RNA, 19 nt, Artificial Sequence
  Description of Artificial Sequence: Synthetic oligonucleotide
  Antisense strand to SEQ ID NO: 1752375
uugcaugacuccaaccaua

SEQ ID NO: 1752377 - RNA, 19 nt, Artificial Sequence
  Description of Artificial Sequence: Synthetic oligonucleotide
  Sense strand starting at position 3752 of SEQ ID NO: 1562506
guuggagucaugcaauaga

SEQ ID NO: 1752378 - RNA, 19 nt, Artificial Sequence
  Description of Artificial Sequence: Synthetic oligonucleotide
  Antisense strand to SEQ ID NO: 1752377
ucuauugcaugacuccaac

SEQ ID NO: 1752379 - RNA, 19 nt, Artificial Sequence
  Description of Artificial Sequence: Synthetic oligonucleotide
  Sense strand starting at position 3814 of SEQ ID NO: 1562506
cugauaucauguguaucac

SEQ ID NO: 1752380 - RNA, 19 nt, Artificial Sequence
  Description of Artificial Sequence: Synthetic oligonucleotide
  Antisense strand to SEQ ID NO: 1752379
gugauacacaugauaucag

SEQ ID NO: 1752381 - RNA, 19 nt, Artificial Sequence
  Description of Artificial Sequence: Synthetic oligonucleotide
  Sense strand starting at position 3815 of SEQ ID NO: 1562506
ugauaucauguguaucacu

SEQ ID NO: 1752382 - RNA, 19 nt, Artificial Sequence
  Description of Artificial Sequence: Synthetic oligonucleotide
  Antisense strand to SEQ ID NO: 1752381
agugauacacaugauauca

SEQ ID NO: 1752383 - RNA, 19 nt, Artificial Sequence
  Description of Artificial Sequence: Synthetic oligonucleotide
  Sense strand starting at position 3939 of SEQ ID NO: 1562506
gcugcugugaacguucuua

SEQ ID NO: 1752384 - RNA, 19 nt, Artificial Sequence
  Description of Artificial Sequence: Synthetic oligonucleotide
  Antisense strand to SEQ ID NO: 1752383
uaagaacguucacagcagc

SEQ ID NO: 1752385 - RNA, 19 nt, Artificial Sequence
  Description of Artificial Sequence: Synthetic oligonucleotide
  Sense strand starting at position 125 of SEQ ID NO: 1562507
guauccuaaguuuaacuga

SEQ ID NO: 1752386 - RNA, 19 nt, Artificial Sequence
  Description of Artificial Sequence: Synthetic oligonucleotide
  Antisense strand to SEQ ID NO: 1752385
ucaguuaaacuuaggauac

SEQ ID NO: 1752387 - RNA, 19 nt, Artificial Sequence
  Description of Artificial Sequence: Synthetic oligonucleotide
  Sense strand starting at position 141 of SEQ ID NO: 1562507
ugaucaaaugggugugguu

SEQ ID NO: 1752388 - RNA, 19 nt, Artificial Sequence
  Description of Artificial Sequence: Synthetic oligonucleotide
  Antisense strand to SEQ ID NO: 1752387
aaccacacccauuugauca

SEQ ID NO: 1752389 - RNA, 19 nt, Artificial Sequence
  Description of Artificial Sequence: Synthetic oligonucleotide
  Sense strand starting at position 371 of SEQ ID NO: 1562507
ggaaauaucuggucagucu

SEQ ID NO: 1752390 - RNA, 19 nt, Artificial Sequence
  Description of Artificial Sequence: Synthetic oligonucleotide
  Antisense strand to SEQ ID NO: 1752389
agacugaccagauauuucc

SEQ ID NO: 1752391 - RNA, 19 nt, Artificial Sequence
  Description of Artificial Sequence: Synthetic oligonucleotide
  Sense strand starting at position 372 of SEQ ID NO: 1562507
gaaauaucuggucagucug

SEQ ID NO: 1752392 - RNA, 19 nt, Artificial Sequence
  Description of Artificial Sequence: Synthetic oligonucleotide
  Antisense strand to SEQ ID NO: 1752391
cagacugaccagauauuuc

SEQ ID NO: 1752393 - RNA, 19 nt, Artificial Sequence
  Description of Artificial Sequence: Synthetic oligonucleotide
  Sense strand starting at position 379 of SEQ ID NO: 1562507
cuggucagucugggaauga

SEQ ID NO: 1752394 - RNA, 19 nt, Artificial Sequence
  Description of Artificial Sequence: Synthetic oligonucleotide
  Antisense strand to SEQ ID NO: 1752393
ucauucccagacugaccag

SEQ ID NO: 1752395 - RNA, 19 nt, Artificial Sequence
  Description of Artificial Sequence: Synthetic oligonucleotide
  Sense strand starting at position 453 of SEQ ID NO: 1562507
agagaaauuuaccagcuuu

SEQ ID NO: 1752396 - RNA, 19 nt, Artificial Sequence
  Description of Artificial Sequence: Synthetic oligonucleotide
  Antisense strand to SEQ ID NO: 1752395
aaagcugguaaauuucucu

SEQ ID NO: 1752397 - RNA, 19 nt, Artificial Sequence
  Description of Artificial Sequence: Synthetic oligonucleotide
  Sense strand starting at position 500 of SEQ ID NO: 1562507
aacguuugcgcugucauaa

SEQ ID NO: 1752398 - RNA, 19 nt, Artificial Sequence
  Description of Artificial Sequence: Synthetic oligonucleotide
  Antisense strand to SEQ ID NO: 1752397
uuaugacagcgcaaacguu

SEQ ID NO: 1752399 - RNA, 19 nt, Artificial Sequence
  Description of Artificial Sequence: Synthetic oligonucleotide
  Sense strand starting at position 501 of SEQ ID NO: 1562507
acguuugcgcugucauaau

SEQ ID NO: 1752400 - RNA, 19 nt, Artificial Sequence
  Description of Artificial Sequence: Synthetic oligonucleotide
  Antisense strand to SEQ ID NO: 1752399
auuaugacagcgcaaacgu

SEQ ID NO: 1752401 - RNA, 19 nt, Artificial Sequence
  Description of Artificial Sequence: Synthetic oligonucleotide
  Sense strand starting at position 654 of SEQ ID NO: 1562507
uuauacuggccagaucuuu

SEQ ID NO: 1752402 - RNA, 19 nt, Artificial Sequence
  Description of Artificial Sequence: Synthetic oligonucleotide
  Antisense strand to SEQ ID NO: 1752401
aaagaucuggccaguauaa

SEQ ID NO: 1752403 - RNA, 19 nt, Artificial Sequence
  Description of Artificial Sequence: Synthetic oligonucleotide
  Sense strand starting at position 893 of SEQ ID NO: 1562507
ccucaaaguccaugaugau

SEQ ID NO: 1752404 - RNA, 19 nt, Artificial Sequence
  Description of Artificial Sequence: Synthetic oligonucleotide
  Antisense strand to SEQ ID NO: 1752403
aucaucauggacuuugagg

SEQ ID NO: 1752405 - RNA, 19 nt, Artificial Sequence
  Description of Artificial Sequence: Synthetic oligonucleotide
  Sense strand starting at position 947 of SEQ ID NO: 1562507
uugugacuaaugggauuau

SEQ ID NO: 1752406 - RNA, 19 nt, Artificial Sequence
  Description of Artificial Sequence: Synthetic oligonucleotide
  Antisense strand to SEQ ID NO: 1752405
auaaucccauuagucacaa

SEQ ID NO: 1752407 - RNA, 19 nt, Artificial Sequence
  Description of Artificial Sequence: Synthetic oligonucleotide
  Sense strand starting at position 1093 of SEQ ID NO: 1562507
cuaagaaauaguugauggu

SEQ ID NO: 1752408 - RNA, 19 nt, Artificial Sequence
  Description of Artificial Sequence: Synthetic oligonucleotide
  Antisense strand to SEQ ID NO: 1752407
accaucaacuauuucuuag

SEQ ID NO: 1752409 - RNA, 19 nt, Artificial Sequence
  Description of Artificial Sequence: Synthetic oligonucleotide
  Sense strand starting at position 1097 of SEQ ID NO: 1562507
gaaauaguugaugguuuau

SEQ ID NO: 1752410 - RNA, 19 nt, Artificial Sequence
  Description of Artificial Sequence: Synthetic oligonucleotide
  Antisense strand to SEQ ID NO: 1752409
auaaaccaucaacuauuuc

SEQ ID NO: 1752411 - RNA, 19 nt, Artificial Sequence
  Description of Artificial Sequence: Synthetic oligonucleotide
  Sense strand starting at position 1106 of SEQ ID NO: 1562507
gaugguuuauaguuuaucu

SEQ ID NO: 1752412 - RNA, 19 nt, Artificial Sequence
  Description of Artificial Sequence: Synthetic oligonucleotide
  Antisense strand to SEQ ID NO: 1752411
agauaaacuauaaaccauc

SEQ ID NO: 1752413 - RNA, 19 nt, Artificial Sequence
  Description of Artificial Sequence: Synthetic oligonucleotide
  Sense strand starting at position 1252 of SEQ ID NO: 1562507
gugugaggaucccucuaaa

SEQ ID NO: 1752414 - RNA, 19 nt, Artificial Sequence
  Description of Artificial Sequence: Synthetic oligonucleotide
  Antisense strand to SEQ ID NO: 1752413
uuuagagggauccucacac

SEQ ID NO: 1752415 - RNA, 19 nt, Artificial Sequence
  Description of Artificial Sequence: Synthetic oligonucleotide
  Sense strand starting at position 1277 of SEQ ID NO: 1562507
guucgaccucccugagaaa

SEQ ID NO: 1752416 - RNA, 19 nt, Artificial Sequence
  Description of Artificial Sequence: Synthetic oligonucleotide
  Antisense strand to SEQ ID NO: 1752415
uuucucagggaggucgaac

SEQ ID NO: 1752417 - RNA, 19 nt, Artificial Sequence
  Description of Artificial Sequence: Synthetic oligonucleotide
  Sense strand starting at position 1360 of SEQ ID NO: 1562507
auuguuacguaauuucuga

SEQ ID NO: 1752418 - RNA, 19 nt, Artificial Sequence
  Description of Artificial Sequence: Synthetic oligonucleotide
  Antisense strand to SEQ ID NO: 1752417
ucagaaauuacguaacaau

SEQ ID NO: 1752419 - RNA, 19 nt, Artificial Sequence
  Description of Artificial Sequence: Synthetic oligonucleotide
  Sense strand starting at position 1584 of SEQ ID NO: 1562507
agaggcaguauuuguagua

SEQ ID NO: 1752420 - RNA, 19 nt, Artificial Sequence
  Description of Artificial Sequence: Synthetic oligonucleotide
  Antisense strand to SEQ ID NO: 1752419
uacuacaaauacugccucu

SEQ ID NO: 1752421 - RNA, 19 nt, Artificial Sequence
  Description of Artificial Sequence: Synthetic oligonucleotide
  Sense strand starting at position 1624 of SEQ ID NO: 1562507
ucacuucugggccaugaaa

SEQ ID NO: 1752422 - RNA, 19 nt, Artificial Sequence
  Description of Artificial Sequence: Synthetic oligonucleotide
  Antisense strand to SEQ ID NO: 1752421
uuucauggcccagaaguga

SEQ ID NO: 1752423 - RNA, 19 nt, Artificial Sequence
  Description of Artificial Sequence: Synthetic oligonucleotide
  Sense strand starting at position 1643 of SEQ ID NO: 1562507
ccugacguuucucugauuu

SEQ ID NO: 1752424 - RNA, 19 nt, Artificial Sequence
  Description of Artificial Sequence: Synthetic oligonucleotide
  Antisense strand to SEQ ID NO: 1752423
aaaucagagaaacgucagg

SEQ ID NO: 1752425 - RNA, 19 nt, Artificial Sequence
  Description of Artificial Sequence: Synthetic oligonucleotide
  Sense strand starting at position 1718 of SEQ ID NO: 1562507
agcaguaauguggagauua

SEQ ID NO: 1752426 - RNA, 19 nt, Artificial Sequence
  Description of Artificial Sequence: Synthetic oligonucleotide
  Antisense strand to SEQ ID NO: 1752425
uaaucuccacauuacugcu

SEQ ID NO: 1752427 - RNA, 19 nt, Artificial Sequence
  Description of Artificial Sequence: Synthetic oligonucleotide
  Sense strand starting at position 2203 of SEQ ID NO: 1562507
uugugcgauuucuuuauua

SEQ ID NO: 1752428 - RNA, 19 nt, Artificial Sequence
  Description of Artificial Sequence: Synthetic oligonucleotide
  Antisense strand to SEQ ID NO: 1752427
uaauaaagaaaucgcacaa

SEQ ID NO: 1752429 - RNA, 19 nt, Artificial Sequence
  Description of Artificial Sequence: Synthetic oligonucleotide
  Sense strand starting at position 2207 of SEQ ID NO: 1562507
gcgauuucuuuauuacaug

SEQ ID NO: 1752430 - RNA, 19 nt, Artificial Sequence
  Description of Artificial Sequence: Synthetic oligonucleotide
  Antisense strand to SEQ ID NO: 1752429
cauguaauaaagaaaucgc

SEQ ID NO: 1752431 - RNA, 19 nt, Artificial Sequence
  Description of Artificial Sequence: Synthetic oligonucleotide
  Sense strand starting at position 2351 of SEQ ID NO: 1562507
gagauuaaguggccugcaa

SEQ ID NO: 1752432 - RNA, 19 nt, Artificial Sequence
  Description of Artificial Sequence: Synthetic oligonucleotide
  Antisense strand to SEQ ID NO: 1752431
uugcaggccacuuaaucuc

SEQ ID NO: 1752433 - RNA, 19 nt, Artificial Sequence
  Description of Artificial Sequence: Synthetic oligonucleotide
  Sense strand starting at position 2441 of SEQ ID NO: 1562507
ugaaguucuguggacagua

SEQ ID NO: 1752434 - RNA, 19 nt, Artificial Sequence
  Description of Artificial Sequence: Synthetic oligonucleotide
  Antisense strand to SEQ ID NO: 1752433
uacuguccacagaacuuca

SEQ ID NO: 1752435 - RNA, 19 nt, Artificial Sequence
  Description of Artificial Sequence: Synthetic oligonucleotide
  Sense strand starting at position 2563 of SEQ ID NO: 1562507
cgugauguguggacuguau

SEQ ID NO: 1752436 - RNA, 19 nt, Artificial Sequence
  Description of Artificial Sequence: Synthetic oligonucleotide
  Antisense strand to SEQ ID NO: 1752435
auacaguccacacaucacg

SEQ ID NO: 1752437 - RNA, 19 nt, Artificial Sequence
  Description of Artificial Sequence: Synthetic oligonucleotide
  Sense strand starting at position 2943 of SEQ ID NO: 1562507
gugaaaggguuucccacaa

SEQ ID NO: 1752438 - RNA, 19 nt, Artificial Sequence
  Description of Artificial Sequence: Synthetic oligonucleotide
  Antisense strand to SEQ ID NO: 1752437
uugugggaaacccuuucac

SEQ ID NO: 1752439 - RNA, 19 nt, Artificial Sequence
  Description of Artificial Sequence: Synthetic oligonucleotide
  Sense strand starting at position 2955 of SEQ ID NO: 1562507
cccacaagauaucugugua

SEQ ID NO: 1752440 - RNA, 19 nt, Artificial Sequence
  Description of Artificial Sequence: Synthetic oligonucleotide
  Antisense strand to SEQ ID NO: 1752439
uacacagauaucuuguggg

SEQ ID NO: 1752441 - RNA, 19 nt, Artificial Sequence
  Description of Artificial Sequence: Synthetic oligonucleotide
  Sense strand starting at position 2958 of SEQ ID NO: 1562507
acaagauaucuguguacau

SEQ ID NO: 1752442 - RNA, 19 nt, Artificial Sequence
  Description of Artificial Sequence: Synthetic oligonucleotide
  Antisense strand to SEQ ID NO: 1752441
auguacacagauaucuugu

SEQ ID NO: 1752443 - RNA, 19 nt, Artificial Sequence
  Description of Artificial Sequence: Synthetic oligonucleotide
  Sense strand starting at position 2959 of SEQ ID NO: 1562507
caagauaucuguguacaug

SEQ ID NO: 1752444 - RNA, 19 nt, Artificial Sequence
  Description of Artificial Sequence: Synthetic oligonucleotide
  Antisense strand to SEQ ID NO: 1752443
cauguacacagauaucuug

SEQ ID NO: 1752445 - RNA, 19 nt, Artificial Sequence
  Description of Artificial Sequence: Synthetic oligonucleotide
  Sense strand starting at position 2978 of SEQ ID NO: 1562507
gcugucuugcugucauugu

SEQ ID NO: 1752446 - RNA, 19 nt, Artificial Sequence
  Description of Artificial Sequence: Synthetic oligonucleotide
  Antisense strand to SEQ ID NO: 1752445
acaaugacagcaagacagc

SEQ ID NO: 1752447 - RNA, 19 nt, Artificial Sequence
  Description of Artificial Sequence: Synthetic oligonucleotide
  Sense strand starting at position 3003 of SEQ ID NO: 1562507
caggacguucucuaccauu

SEQ ID NO: 1752448 - RNA, 19 nt, Artificial Sequence
  Description of Artificial Sequence: Synthetic oligonucleotide
  Antisense strand to SEQ ID NO: 1752447
aaugguagagaacguccug

SEQ ID NO: 1752449 - RNA, 19 nt, Artificial Sequence
  Description of Artificial Sequence: Synthetic oligonucleotide
  Sense strand starting at position 3032 of SEQ ID NO: 1562507
aagugugcccuggaaauag

SEQ ID NO: 1752450 - RNA, 19 nt, Artificial Sequence
  Description of Artificial Sequence: Synthetic oligonucleotide
  Antisense strand to SEQ ID NO: 1752449
cuauuuccagggcacacuu

SEQ ID NO: 1752451 - RNA, 19 nt, Artificial Sequence
  Description of Artificial Sequence: Synthetic oligonucleotide
  Sense strand starting at position 3166 of SEQ ID NO: 1562507
guggucucugcugaaggau

SEQ ID NO: 1752452 - RNA, 19 nt, Artificial Sequence
  Description of Artificial Sequence: Synthetic oligonucleotide
  Antisense strand to SEQ ID NO: 1752451
auccuucagcagagaccac

SEQ ID NO: 1752453 - RNA, 19 nt, Artificial Sequence
  Description of Artificial Sequence: Synthetic oligonucleotide
  Sense strand starting at position 3174 of SEQ ID NO: 1562507
ugcugaaggaucugacaca

SEQ ID NO: 1752454 - RNA, 19 nt, Artificial Sequence
  Description of Artificial Sequence: Synthetic oligonucleotide
  Antisense strand to SEQ ID NO: 1752453
ugugucagauccuucagca

SEQ ID NO: 1752455 - RNA, 19 nt, Artificial Sequence
  Description of Artificial Sequence: Synthetic oligonucleotide
  Sense strand starting at position 3320 of SEQ ID NO: 1562507
gccugagcucuggauuaac

SEQ ID NO: 1752456 - RNA, 19 nt, Artificial Sequence
  Description of Artificial Sequence: Synthetic oligonucleotide
  Antisense strand to SEQ ID NO: 1752455
guuaauccagagcucaggc

SEQ ID NO: 1752457 - RNA, 19 nt, Artificial Sequence
  Description of Artificial Sequence: Synthetic oligonucleotide
  Sense strand starting at position 3675 of SEQ ID NO: 1562507
uacaauugcugggucugaa

SEQ ID NO: 1752458 - RNA, 19 nt, Artificial Sequence
  Description of Artificial Sequence: Synthetic oligonucleotide
  Antisense strand to SEQ ID NO: 1752457
uucagacccagcaauugua

SEQ ID NO: 1752459 - RNA, 19 nt, Artificial Sequence
  Description of Artificial Sequence: Synthetic oligonucleotide
  Sense strand starting at position 3715 of SEQ ID NO: 1562507
gugguuugacuuuggauaa

SEQ ID NO: 1752460 - RNA, 19 nt, Artificial Sequence
  Description of Artificial Sequence: Synthetic oligonucleotide
  Antisense strand to SEQ ID NO: 1752459
uuauccaaagucaaaccac

SEQ ID NO: 1752461 - RNA, 19 nt, Artificial Sequence
  Description of Artificial Sequence: Synthetic oligonucleotide
  Sense strand starting at position 3738 of SEQ ID NO: 1562507
cuaagccuuucugugaaag

SEQ ID NO: 1752462 - RNA, 19 nt, Artificial Sequence
  Description of Artificial Sequence: Synthetic oligonucleotide
  Antisense strand to SEQ ID NO: 1752461
cuuucacagaaaggcuuag

SEQ ID NO: 1752463 - RNA, 19 nt, Artificial Sequence
  Description of Artificial Sequence: Synthetic oligonucleotide
  Sense strand starting at position 3955 of SEQ ID NO: 1562507
ucgcuaaguaaugagaaau

SEQ ID NO: 1752464 - RNA, 19 nt, Artificial Sequence
  Description of Artificial Sequence: Synthetic oligonucleotide
  Antisense strand to SEQ ID NO: 1752463
auuucucauuacuuagcga

SEQ ID NO: 1752465 - RNA, 19 nt, Artificial Sequence
  Description of Artificial Sequence: Synthetic oligonucleotide
  Sense strand starting at position 671 of SEQ ID NO: 1562508
uuucuuucccgacaguaca

SEQ ID NO: 1752466 - RNA, 19 nt, Artificial Sequence
  Description of Artificial Sequence: Synthetic oligonucleotide
  Antisense strand to SEQ ID NO: 1752465
uguacugucgggaaagaaa

SEQ ID NO: 1752467 - RNA, 19 nt, Artificial Sequence
  Description of Artificial Sequence: Synthetic oligonucleotide
  Sense strand starting at position 705 of SEQ ID NO: 1562508
ugacacauuuccguagucu

SEQ ID NO: 1752468 - RNA, 19 nt, Artificial Sequence
  Description of Artificial Sequence: Synthetic oligonucleotide
  Antisense strand to SEQ ID NO: 1752467
agacuacggaaauguguca

SEQ ID NO: 1752469 - RNA, 19 nt, Artificial Sequence
  Description of Artificial Sequence: Synthetic oligonucleotide
  Sense strand starting at position 749 of SEQ ID NO: 1562508
auccauaucugagcaggaa

SEQ ID NO: 1752470 - RNA, 19 nt, Artificial Sequence
  Description of Artificial Sequence: Synthetic oligonucleotide
  Antisense strand to SEQ ID NO: 1752469
uuccugcucagauauggau

SEQ ID NO: 1752471 - RNA, 19 nt, Artificial Sequence
  Description of Artificial Sequence: Synthetic oligonucleotide
  Sense strand starting at position 928 of SEQ ID NO: 1562508
aguugcaguuauuuaaagu

SEQ ID NO: 1752472 - RNA, 19 nt, Artificial Sequence
  Description of Artificial Sequence: Synthetic oligonucleotide
  Antisense strand to SEQ ID NO: 1752471
acuuuaaauaacugcaacu

SEQ ID NO: 1752473 - RNA, 19 nt, Artificial Sequence
  Description of Artificial Sequence: Synthetic oligonucleotide
  Sense strand starting at position 947 of SEQ ID NO: 1562508
gcuggaucuacccagugau

SEQ ID NO: 1752474 - RNA, 19 nt, Artificial Sequence
  Description of Artificial Sequence: Synthetic oligonucleotide
  Antisense strand to SEQ ID NO: 1752473
aucacuggguagauccagc

SEQ ID NO: 1752475 - RNA, 19 nt, Artificial Sequence
  Description of Artificial Sequence: Synthetic oligonucleotide
  Sense strand starting at position 950 of SEQ ID NO: 1562508
ggaucuacccagugaugca

SEQ ID NO: 1752476 - RNA, 19 nt, Artificial Sequence
  Description of Artificial Sequence: Synthetic oligonucleotide
  Antisense strand to SEQ ID NO: 1752475
ugcaucacuggguagaucc

SEQ ID NO: 1752477 - RNA, 19 nt, Artificial Sequence
  Description of Artificial Sequence: Synthetic oligonucleotide
  Sense strand starting at position 1327 of SEQ ID NO: 1562508
auucuaucucacuggaaag

SEQ ID NO: 1752478 - RNA, 19 nt, Artificial Sequence
  Description of Artificial Sequence: Synthetic oligonucleotide
  Antisense strand to SEQ ID NO: 1752477
cuuuccagugagauagaau

SEQ ID NO: 1752479 - RNA, 19 nt, Artificial Sequence
  Description of Artificial Sequence: Synthetic oligonucleotide
  Sense strand starting at position 1450 of SEQ ID NO: 1562508
uaaggucauguguauaaua

SEQ ID NO: 1752480 - RNA, 19 nt, Artificial Sequence
  Description of Artificial Sequence: Synthetic oligonucleotide
  Antisense strand to SEQ ID NO: 1752479
uauuauacacaugaccuua

SEQ ID NO: 1752481 - RNA, 19 nt, Artificial Sequence
  Description of Artificial Sequence: Synthetic oligonucleotide
  Sense strand starting at position 1452 of SEQ ID NO: 1562508
aggucauguguauaauaaa

SEQ ID NO: 1752482 - RNA, 19 nt, Artificial Sequence
  Description of Artificial Sequence: Synthetic oligonucleotide
  Antisense strand to SEQ ID NO: 1752481
uuuauuauacacaugaccu

SEQ ID NO: 1752483 - RNA, 19 nt, Artificial Sequence
  Description of Artificial Sequence: Synthetic oligonucleotide
  Sense strand starting at position 1525 of SEQ ID NO: 1562508
agugguuuggacugaaauc

SEQ ID NO: 1752484 - RNA, 19 nt, Artificial Sequence
  Description of Artificial Sequence: Synthetic oligonucleotide
  Antisense strand to SEQ ID NO: 1752483
gauuucaguccaaaccacu

SEQ ID NO: 1752485 - RNA, 19 nt, Artificial Sequence
  Description of Artificial Sequence: Synthetic oligonucleotide
  Sense strand starting at position 1666 of SEQ ID NO: 1562508
ucuguaauaccauaaaguu

SEQ ID NO: 1752486 - RNA, 19 nt, Artificial Sequence
  Description of Artificial Sequence: Synthetic oligonucleotide
  Antisense strand to SEQ ID NO: 1752485
aacuuuaugguauuacaga

SEQ ID NO: 1752487 - RNA, 19 nt, Artificial Sequence
  Description of Artificial Sequence: Synthetic oligonucleotide
  Sense strand starting at position 1713 of SEQ ID NO: 1562508
uggcaaagacucugaugaa

SEQ ID NO: 1752488 - RNA, 19 nt, Artificial Sequence
  Description of Artificial Sequence: Synthetic oligonucleotide
  Antisense strand to SEQ ID NO: 1752487
uucaucagagucuuugcca

SEQ ID NO: 1752489 - RNA, 19 nt, Artificial Sequence
  Description of Artificial Sequence: Synthetic oligonucleotide
  Sense strand starting at position 1785 of SEQ ID NO: 1562508
agucaauugcucuauguca

SEQ ID NO: 1752490 - RNA, 19 nt, Artificial Sequence
  Description of Artificial Sequence: Synthetic oligonucleotide
  Antisense strand to SEQ ID NO: 1752489
ugacauagagcaauugacu

SEQ ID NO: 1752491 - RNA, 19 nt, Artificial Sequence
  Description of Artificial Sequence: Synthetic oligonucleotide
  Sense strand starting at position 2199 of SEQ ID NO: 1562508
uuaguucucccucaaagga

SEQ ID NO: 1752492 - RNA, 19 nt, Artificial Sequence
  Description of Artificial Sequence: Synthetic oligonucleotide
  Antisense strand to SEQ ID NO: 1752491
uccuuugagggagaacuaa

SEQ ID NO: 1752493 - RNA, 19 nt, Artificial Sequence
  Description of Artificial Sequence: Synthetic oligonucleotide
  Sense strand starting at position 2228 of SEQ ID NO: 1562508
cuuauugaguucuuacuua

SEQ ID NO: 1752494 - RNA, 19 nt, Artificial Sequence
  Description of Artificial Sequence: Synthetic oligonucleotide
  Antisense strand to SEQ ID NO: 1752493
uaaguaagaacucaauaag

SEQ ID NO: 1752495 - RNA, 19 nt, Artificial Sequence
  Description of Artificial Sequence: Synthetic oligonucleotide
  Sense strand starting at position 2233 of SEQ ID NO: 1562508
ugaguucuuacuuacggag

SEQ ID NO: 1752496 - RNA, 19 nt, Artificial Sequence
  Description of Artificial Sequence: Synthetic oligonucleotide
  Antisense strand to SEQ ID NO: 1752495
cuccguaaguaagaacuca

SEQ ID NO: 1752497 - RNA, 19 nt, Artificial Sequence
  Description of Artificial Sequence: Synthetic oligonucleotide
  Sense strand starting at position 2314 of SEQ ID NO: 1562508
guuucuguagucgcuuuaa

SEQ ID NO: 1752498 - RNA, 19 nt, Artificial Sequence
  Description of Artificial Sequence: Synthetic oligonucleotide
  Antisense strand to SEQ ID NO: 1752497
uuaaagcgacuacagaaac

SEQ ID NO: 1752499 - RNA, 19 nt, Artificial Sequence
  Description of Artificial Sequence: Synthetic oligonucleotide
  Sense strand starting at position 2317 of SEQ ID NO: 1562508
ucuguagucgcuuuaaugu

SEQ ID NO: 1752500 - RNA, 19 nt, Artificial Sequence
  Description of Artificial Sequence: Synthetic oligonucleotide
  Antisense strand to SEQ ID NO: 1752499
acauuaaagcgacuacaga

SEQ ID NO: 1752501 - RNA, 19 nt, Artificial Sequence
  Description of Artificial Sequence: Synthetic oligonucleotide
  Sense strand starting at position 2483 of SEQ ID NO: 1562508
ccugaagccugagucaauu

SEQ ID NO: 1752502 - RNA, 19 nt, Artificial Sequence
  Description of Artificial Sequence: Synthetic oligonucleotide
  Antisense strand to SEQ ID NO: 1752501
aauugacucaggcuucagg

SEQ ID NO: 1752503 - RNA, 19 nt, Artificial Sequence
  Description of Artificial Sequence: Synthetic oligonucleotide
  Sense strand starting at position 2698 of SEQ ID NO: 1562508
aucuuugcaguguaauaua

SEQ ID NO: 1752504 - RNA, 19 nt, Artificial Sequence
  Description of Artificial Sequence: Synthetic oligonucleotide
  Antisense strand to SEQ ID NO: 1752503
uauauuacacugcaaagau

SEQ ID NO: 1752505 - RNA, 19 nt, Artificial Sequence
  Description of Artificial Sequence: Synthetic oligonucleotide
  Sense strand starting at position 2707 of SEQ ID NO: 1562508
guguaauauagauggaaca

SEQ ID NO: 1752506 - RNA, 19 nt, Artificial Sequence
  Description of Artificial Sequence: Synthetic oligonucleotide
  Antisense strand to SEQ ID NO: 1752505
uguuccaucuauauuacac

SEQ ID NO: 1752507 - RNA, 19 nt, Artificial Sequence
  Description of Artificial Sequence: Synthetic oligonucleotide
  Sense strand starting at position 2736 of SEQ ID NO: 1562508
aguugcuauuugcuaguau

SEQ ID NO: 1752508 - RNA, 19 nt, Artificial Sequence
  Description of Artificial Sequence: Synthetic oligonucleotide
  Antisense strand to SEQ ID NO: 1752507
auacuagcaaauagcaacu

SEQ ID NO: 1752509 - RNA, 19 nt, Artificial Sequence
  Description of Artificial Sequence: Synthetic oligonucleotide
  Sense strand starting at position 2832 of SEQ ID NO: 1562508
uuggaaauuuguggacaaa

SEQ ID NO: 1752510 - RNA, 19 nt, Artificial Sequence
  Description of Artificial Sequence: Synthetic oligonucleotide
  Antisense strand to SEQ ID NO: 1752509
uuuguccacaaauuuccaa

SEQ ID NO: 1752511 - RNA, 19 nt, Artificial Sequence
  Description of Artificial Sequence: Synthetic oligonucleotide
  Sense strand starting at position 2908 of SEQ ID NO: 1562508
ucuugcuuucuagaagaua

SEQ ID NO: 1752512 - RNA, 19 nt, Artificial Sequence
  Description of Artificial Sequence: Synthetic oligonucleotide
  Antisense strand to SEQ ID NO: 1752511
uaucuucuagaaagcaaga

SEQ ID NO: 1752513 - RNA, 19 nt, Artificial Sequence
  Description of Artificial Sequence: Synthetic oligonucleotide
  Sense strand starting at position 2916 of SEQ ID NO: 1562508
ucuagaagauaugcacuaa

SEQ ID NO: 1752514 - RNA, 19 nt, Artificial Sequence
  Description of Artificial Sequence: Synthetic oligonucleotide
  Antisense strand to SEQ ID NO: 1752513
uuagugcauaucuucuaga

SEQ ID NO: 1752515 - RNA, 19 nt, Artificial Sequence
  Description of Artificial Sequence: Synthetic oligonucleotide
  Sense strand starting at position 2972 of SEQ ID NO: 1562508
uuuagaauaugugucacuu

SEQ ID NO: 1752516 - RNA, 19 nt, Artificial Sequence
  Description of Artificial Sequence: Synthetic oligonucleotide
  Antisense strand to SEQ ID NO: 1752515
aagugacacauauucuaaa

SEQ ID NO: 1752517 - RNA, 19 nt, Artificial Sequence
  Description of Artificial Sequence: Synthetic oligonucleotide
  Sense strand starting at position 3062 of SEQ ID NO: 1562508
ucaggaauguuucccacua

SEQ ID NO: 1752518 - RNA, 19 nt, Artificial Sequence
  Description of Artificial Sequence: Synthetic oligonucleotide
  Antisense strand to SEQ ID NO: 1752517
uagugggaaacauuccuga

SEQ ID NO: 1752519 - RNA, 19 nt, Artificial Sequence
  Description of Artificial Sequence: Synthetic oligonucleotide
  Sense strand starting at position 3063 of SEQ ID NO: 1562508
caggaauguuucccacuag

SEQ ID NO: 1752520 - RNA, 19 nt, Artificial Sequence
  Description of Artificial Sequence: Synthetic oligonucleotide
  Antisense strand to SEQ ID NO: 1752519
cuagugggaaacauuccug

SEQ ID NO: 1752521 - RNA, 19 nt, Artificial Sequence
  Description of Artificial Sequence: Synthetic oligonucleotide
  Sense strand starting at position 3162 of SEQ ID NO: 1562508
gaaauuaacucuuugugug

SEQ ID NO: 1752522 - RNA, 19 nt, Artificial Sequence
  Description of Artificial Sequence: Synthetic oligonucleotide
  Antisense strand to SEQ ID NO: 1752521
cacacaaagaguuaauuuc

SEQ ID NO: 1752523 - RNA, 19 nt, Artificial Sequence
  Description of Artificial Sequence: Synthetic oligonucleotide
  Sense strand starting at position 3373 of SEQ ID NO: 1562508
gugaauauuugcuuccuca

SEQ ID NO: 1752524 - RNA, 19 nt, Artificial Sequence
  Description of Artificial Sequence: Synthetic oligonucleotide
  Antisense strand to SEQ ID NO: 1752523
ugaggaagcaaauauucac

SEQ ID NO: 1752525 - RNA, 19 nt, Artificial Sequence
  Description of Artificial Sequence: Synthetic oligonucleotide
  Sense strand starting at position 3387 of SEQ ID NO: 1562508
ccucauuaauguuugaaug

SEQ ID NO: 1752526 - RNA, 19 nt, Artificial Sequence
  Description of Artificial Sequence: Synthetic oligonucleotide
  Antisense strand to SEQ ID NO: 1752525
cauucaaacauuaaugagg

SEQ ID NO: 1752527 - RNA, 19 nt, Artificial Sequence
  Description of Artificial Sequence: Synthetic oligonucleotide
  Sense strand starting at position 3388 of SEQ ID NO: 1562508
cucauuaauguuugaauga

SEQ ID NO: 1752528 - RNA, 19 nt, Artificial Sequence
  Description of Artificial Sequence: Synthetic oligonucleotide
  Antisense strand to SEQ ID NO: 1752527
ucauucaaacauuaaugag

SEQ ID NO: 1752529 - RNA, 19 nt, Artificial Sequence
  Description of Artificial Sequence: Synthetic oligonucleotide
  Sense strand starting at position 3456 of SEQ ID NO: 1562508
caaauaaauguuuggaagu

SEQ ID NO: 1752530 - RNA, 19 nt, Artificial Sequence
  Description of Artificial Sequence: Synthetic oligonucleotide
  Antisense strand to SEQ ID NO: 1752529
acuuccaaacauuuauuug

SEQ ID NO: 1752531 - RNA, 19 nt, Artificial Sequence
  Description of Artificial Sequence: Synthetic oligonucleotide
  Sense strand starting at position 3528 of SEQ ID NO: 1562508
guucuuuaagaaugacuuu

SEQ ID NO: 1752532 - RNA, 19 nt, Artificial Sequence
  Description of Artificial Sequence: Synthetic oligonucleotide
  Antisense strand to SEQ ID NO: 1752531
aaagucauucuuaaagaac

SEQ ID NO: 1752533 - RNA, 19 nt, Artificial Sequence
  Description of Artificial Sequence: Synthetic oligonucleotide
  Sense strand starting at position 3555 of SEQ ID NO: 1562508
aguauaaacuuguugaucu

SEQ ID NO: 1752534 - RNA, 19 nt, Artificial Sequence
  Description of Artificial Sequence: Synthetic oligonucleotide
  Antisense strand to SEQ ID NO: 1752533
agaucaacaaguuuauacu

SEQ ID NO: 1752535 - RNA, 19 nt, Artificial Sequence
  Description of Artificial Sequence: Synthetic oligonucleotide
  Sense strand starting at position 3585 of SEQ ID NO: 1562508
auagcacuuacguaggaaa

SEQ ID NO: 1752536 - RNA, 19 nt, Artificial Sequence
  Description of Artificial Sequence: Synthetic oligonucleotide
  Antisense strand to SEQ ID NO: 1752535
uuuccuacguaagugcuau

SEQ ID NO: 1752537 - RNA, 19 nt, Artificial Sequence
  Description of Artificial Sequence: Synthetic oligonucleotide
  Sense strand starting at position 3638 of SEQ ID NO: 1562508
gcauuaaauaagugggaaa

SEQ ID NO: 1752538 - RNA, 19 nt, Artificial Sequence
  Description of Artificial Sequence: Synthetic oligonucleotide
  Antisense strand to SEQ ID NO: 1752537
uuucccacuuauuuaaugc

SEQ ID NO: 1752539 - RNA, 19 nt, Artificial Sequence
  Description of Artificial Sequence: Synthetic oligonucleotide
  Sense strand starting at position 3694 of SEQ ID NO: 1562508
augagauaugcuuagaagc

SEQ ID NO: 1752540 - RNA, 19 nt, Artificial Sequence
  Description of Artificial Sequence: Synthetic oligonucleotide
  Antisense strand to SEQ ID NO: 1752539
gcuucuaagcauaucucau

SEQ ID NO: 1752541 - RNA, 19 nt, Artificial Sequence
  Description of Artificial Sequence: Synthetic oligonucleotide
  Sense strand starting at position 3781 of SEQ ID NO: 1562508
uuguauuauuucucagugu

SEQ ID NO: 1752542 - RNA, 19 nt, Artificial Sequence
  Description of Artificial Sequence: Synthetic oligonucleotide
  Antisense strand to SEQ ID NO: 1752541
acacugagaaauaauacaa

SEQ ID NO: 1752543 - RNA, 19 nt, Artificial Sequence
  Description of Artificial Sequence: Synthetic oligonucleotide
  Sense strand starting at position 3811 of SEQ ID NO: 1562508
cuuucugaguuacuugauu

SEQ ID NO: 1752544 - RNA, 19 nt, Artificial Sequence
  Description of Artificial Sequence: Synthetic oligonucleotide
  Antisense strand to SEQ ID NO: 1752543
aaucaaguaacucagaaag

SEQ ID NO: 1752545 - RNA, 19 nt, Artificial Sequence
  Description of Artificial Sequence: Synthetic oligonucleotide
  Sense strand starting at position 497 of SEQ ID NO: 1562509
ugagguauaucauucucca

SEQ ID NO: 1752546 - RNA, 19 nt, Artificial Sequence
  Description of Artificial Sequence: Synthetic oligonucleotide
  Antisense strand to SEQ ID NO: 1752545
uggagaaugauauaccuca

SEQ ID NO: 1752547 - RNA, 19 nt, Artificial Sequence
  Description of Artificial Sequence: Synthetic oligonucleotide
  Sense strand starting at position 500 of SEQ ID NO: 1562509
gguauaucauucuccauau

SEQ ID NO: 1752548 - RNA, 19 nt, Artificial Sequence
  Description of Artificial Sequence: Synthetic oligonucleotide
  Antisense strand to SEQ ID NO: 1752547
auauggagaaugauauacc

SEQ ID NO: 1752549 - RNA, 19 nt, Artificial Sequence
  Description of Artificial Sequence: Synthetic oligonucleotide
  Sense strand starting at position 551 of SEQ ID NO: 1562509
guuaacuauuuguuguacu

SEQ ID NO: 1752550 - RNA, 19 nt, Artificial Sequence
  Description of Artificial Sequence: Synthetic oligonucleotide
  Antisense strand to SEQ ID NO: 1752549
aguacaacaaauaguuaac

SEQ ID NO: 1752551 - RNA, 19 nt, Artificial Sequence
  Description of Artificial Sequence: Synthetic oligonucleotide
  Sense strand starting at position 561 of SEQ ID NO: 1562509
uguuguacuuaaucaagua

SEQ ID NO: 1752552 - RNA, 19 nt, Artificial Sequence
  Description of Artificial Sequence: Synthetic oligonucleotide
  Antisense strand to SEQ ID NO: 1752551
uacuugauuaaguacaaca

SEQ ID NO: 1752553 - RNA, 19 nt, Artificial Sequence
  Description of Artificial Sequence: Synthetic oligonucleotide
  Sense strand starting at position 721 of SEQ ID NO: 1562509
acuaaagaugcuugucuau

SEQ ID NO: 1752554 - RNA, 19 nt, Artificial Sequence
  Description of Artificial Sequence: Synthetic oligonucleotide
  Antisense strand to SEQ ID NO: 1752553
auagacaagcaucuuuagu

SEQ ID NO: 1752555 - RNA, 19 nt, Artificial Sequence
  Description of Artificial Sequence: Synthetic oligonucleotide
  Sense strand starting at position 732 of SEQ ID NO: 1562509
uugucuauccauuauuaug

SEQ ID NO: 1752556 - RNA, 19 nt, Artificial Sequence
  Description of Artificial Sequence: Synthetic oligonucleotide
  Antisense strand to SEQ ID NO: 1752555
cauaauaauggauagacaa

SEQ ID NO: 1752557 - RNA, 19 nt, Artificial Sequence
  Description of Artificial Sequence: Synthetic oligonucleotide
  Sense strand starting at position 746 of SEQ ID NO: 1562509
uuaugcauaugugucagaa

SEQ ID NO: 1752558 - RNA, 19 nt, Artificial Sequence
  Description of Artificial Sequence: Synthetic oligonucleotide
  Antisense strand to SEQ ID NO: 1752557
uucugacacauaugcauaa

SEQ ID NO: 1752559 - RNA, 19 nt, Artificial Sequence
  Description of Artificial Sequence: Synthetic oligonucleotide
  Sense strand starting at position 1008 of SEQ ID NO: 1562509
ucagcuauuguuuaucuca

SEQ ID NO: 1752560 - RNA, 19 nt, Artificial Sequence
  Description of Artificial Sequence: Synthetic oligonucleotide
  Antisense strand to SEQ ID NO: 1752559
ugagauaaacaauagcuga

SEQ ID NO: 1752561 - RNA, 19 nt, Artificial Sequence
  Description of Artificial Sequence: Synthetic oligonucleotide
  Sense strand starting at position 1010 of SEQ ID NO: 1562509
agcuauuguuuaucucaga

SEQ ID NO: 1752562 - RNA, 19 nt, Artificial Sequence
  Description of Artificial Sequence: Synthetic oligonucleotide
  Antisense strand to SEQ ID NO: 1752561
ucugagauaaacaauagcu

SEQ ID NO: 1752563 - RNA, 19 nt, Artificial Sequence
  Description of Artificial Sequence: Synthetic oligonucleotide
  Sense strand starting at position 1011 of SEQ ID NO: 1562509
gcuauuguuuaucucagaa

SEQ ID NO: 1752564 - RNA, 19 nt, Artificial Sequence
  Description of Artificial Sequence: Synthetic oligonucleotide
  Antisense strand to SEQ ID NO: 1752563
uucugagauaaacaauagc

SEQ ID NO: 1752565 - RNA, 19 nt, Artificial Sequence
  Description of Artificial Sequence: Synthetic oligonucleotide
  Sense strand starting at position 1065 of SEQ ID NO: 1562509
uguacaaguauuggagaaa

SEQ ID NO: 1752566 - RNA, 19 nt, Artificial Sequence
  Description of Artificial Sequence: Synthetic oligonucleotide
  Antisense strand to SEQ ID NO: 1752565
uuucuccaauacuuguaca

SEQ ID NO: 1752567 - RNA, 19 nt, Artificial Sequence
  Description of Artificial Sequence: Synthetic oligonucleotide
  Sense strand starting at position 1089 of SEQ ID NO: 1562509
ugacauugguacuuuguaa

SEQ ID NO: 1752568 - RNA, 19 nt, Artificial Sequence
  Description of Artificial Sequence: Synthetic oligonucleotide
  Antisense strand to SEQ ID NO: 1752567
uuacaaaguaccaauguca

SEQ ID NO: 1752569 - RNA, 19 nt, Artificial Sequence
  Description of Artificial Sequence: Synthetic oligonucleotide
  Sense strand starting at position 1310 of SEQ ID NO: 1562509
uaauaacauuaguucgaga

SEQ ID NO: 1752570 - RNA, 19 nt, Artificial Sequence
  Description of Artificial Sequence: Synthetic oligonucleotide
  Antisense strand to SEQ ID NO: 1752569
ucucgaacuaauguuauua

SEQ ID NO: 1752571 - RNA, 19 nt, Artificial Sequence
  Description of Artificial Sequence: Synthetic oligonucleotide
  Sense strand starting at position 1312 of SEQ ID NO: 1562509
auaacauuaguucgagaga

SEQ ID NO: 1752572 - RNA, 19 nt, Artificial Sequence
  Description of Artificial Sequence: Synthetic oligonucleotide
  Antisense strand to SEQ ID NO: 1752571
ucucucgaacuaauguuau

SEQ ID NO: 1752573 - RNA, 19 nt, Artificial Sequence
  Description of Artificial Sequence: Synthetic oligonucleotide
  Sense strand starting at position 1342 of SEQ ID NO: 1562509
acaucuuuacaacgagcua

SEQ ID NO: 1752574 - RNA, 19 nt, Artificial Sequence
  Description of Artificial Sequence: Synthetic oligonucleotide
  Antisense strand to SEQ ID NO: 1752573
uagcucguuguaaagaugu

SEQ ID NO: 1752575 - RNA, 19 nt, Artificial Sequence
  Description of Artificial Sequence: Synthetic oligonucleotide
  Sense strand starting at position 1489 of SEQ ID NO: 1562509
ucaauagacguugacaauc

SEQ ID NO: 1752576 - RNA, 19 nt, Artificial Sequence
  Description of Artificial Sequence: Synthetic oligonucleotide
  Antisense strand to SEQ ID NO: 1752575
gauugucaacgucuauuga

SEQ ID NO: 1752577 - RNA, 19 nt, Artificial Sequence
  Description of Artificial Sequence: Synthetic oligonucleotide
  Sense strand starting at position 1610 of SEQ ID NO: 1562509
agauguaaauguuccaaua

SEQ ID NO: 1752578 - RNA, 19 nt, Artificial Sequence
  Description of Artificial Sequence: Synthetic oligonucleotide
  Antisense strand to SEQ ID NO: 1752577
uauuggaacauuuacaucu

SEQ ID NO: 1752579 - RNA, 19 nt, Artificial Sequence
  Description of Artificial Sequence: Synthetic oligonucleotide
  Sense strand starting at position 1655 of SEQ ID NO: 1562509
caauaauugcuagguguga

SEQ ID NO: 1752580 - RNA, 19 nt, Artificial Sequence
  Description of Artificial Sequence: Synthetic oligonucleotide
  Antisense strand to SEQ ID NO: 1752579
ucacaccuagcaauuauug

SEQ ID NO: 1752581 - RNA, 19 nt, Artificial Sequence
  Description of Artificial Sequence: Synthetic oligonucleotide
  Sense strand starting at position 1656 of SEQ ID NO: 1562509
aauaauugcuaggugugau

SEQ ID NO: 1752582 - RNA, 19 nt, Artificial Sequence
  Description of Artificial Sequence: Synthetic oligonucleotide
  Antisense strand to SEQ ID NO: 1752581
aucacaccuagcaauuauu

SEQ ID NO: 1752583 - RNA, 19 nt, Artificial Sequence
  Description of Artificial Sequence: Synthetic oligonucleotide
  Sense strand starting at position 1657 of SEQ ID NO: 1562509
auaauugcuaggugugauu

SEQ ID NO: 1752584 - RNA, 19 nt, Artificial Sequence
  Description of Artificial Sequence: Synthetic oligonucleotide
  Antisense strand to SEQ ID NO: 1752583
aaucacaccuagcaauuau

SEQ ID NO: 1752585 - RNA, 19 nt, Artificial Sequence
  Description of Artificial Sequence: Synthetic oligonucleotide
  Sense strand starting at position 1704 of SEQ ID NO: 1562509
ccguauuugccaugaggca

SEQ ID NO: 1752586 - RNA, 19 nt, Artificial Sequence
  Description of Artificial Sequence: Synthetic oligonucleotide
  Antisense strand to SEQ ID NO: 1752585
ugccucauggcaaauacgg

SEQ ID NO: 1752587 - RNA, 19 nt, Artificial Sequence
  Description of Artificial Sequence: Synthetic oligonucleotide
  Sense strand starting at position 1705 of SEQ ID NO: 1562509
cguauuugccaugaggcau

SEQ ID NO: 1752588 - RNA, 19 nt, Artificial Sequence
  Description of Artificial Sequence: Synthetic oligonucleotide
  Antisense strand to SEQ ID NO: 1752587
augccucauggcaaauacg

SEQ ID NO: 1752589 - RNA, 19 nt, Artificial Sequence
  Description of Artificial Sequence: Synthetic oligonucleotide
  Sense strand starting at position 1719 of SEQ ID NO: 1562509
ggcauuaaacccuauguuu

SEQ ID NO: 1752590 - RNA, 19 nt, Artificial Sequence
  Description of Artificial Sequence: Synthetic oligonucleotide
  Antisense strand to SEQ ID NO: 1752589
aaacauaggguuuaaugcc

SEQ ID NO: 1752591 - RNA, 19 nt, Artificial Sequence
  Description of Artificial Sequence: Synthetic oligonucleotide
  Sense strand starting at position 1728 of SEQ ID NO: 1562509
cccuauguuugacuuauga

SEQ ID NO: 1752592 - RNA, 19 nt, Artificial Sequence
  Description of Artificial Sequence: Synthetic oligonucleotide
  Antisense strand to SEQ ID NO: 1752591
ucauaagucaaacauaggg

SEQ ID NO: 1752593 - RNA, 19 nt, Artificial Sequence
  Description of Artificial Sequence: Synthetic oligonucleotide
  Sense strand starting at position 1752 of SEQ ID NO: 1562509
agaugagaacauuguaugu

SEQ ID NO: 1752594 - RNA, 19 nt, Artificial Sequence
  Description of Artificial Sequence: Synthetic oligonucleotide
  Antisense strand to SEQ ID NO: 1752593
acauacaauguucucaucu

SEQ ID NO: 1752595 - RNA, 19 nt, Artificial Sequence
  Description of Artificial Sequence: Synthetic oligonucleotide
  Sense strand starting at position 1884 of SEQ ID NO: 1562509
uggcuuucucuugagcauu

SEQ ID NO: 1752596 - RNA, 19 nt, Artificial Sequence
  Description of Artificial Sequence: Synthetic oligonucleotide
  Antisense strand to SEQ ID NO: 1752595
aaugcucaagagaaagcca

SEQ ID NO: 1752597 - RNA, 19 nt, Artificial Sequence
  Description of Artificial Sequence: Synthetic oligonucleotide
  Sense strand starting at position 2079 of SEQ ID NO: 1562509
acaguaauucuuugguaac

SEQ ID NO: 1752598 - RNA, 19 nt, Artificial Sequence
  Description of Artificial Sequence: Synthetic oligonucleotide
  Antisense strand to SEQ ID NO: 1752597
guuaccaaagaauuacugu

SEQ ID NO: 1752599 - RNA, 19 nt, Artificial Sequence
  Description of Artificial Sequence: Synthetic oligonucleotide
  Sense strand starting at position 2229 of SEQ ID NO: 1562509
aaugcauuccauggguaga

SEQ ID NO: 1752600 - RNA, 19 nt, Artificial Sequence
  Description of Artificial Sequence: Synthetic oligonucleotide
  Antisense strand to SEQ ID NO: 1752599
ucuacccauggaaugcauu

SEQ ID NO: 1752601 - RNA, 19 nt, Artificial Sequence
  Description of Artificial Sequence: Synthetic oligonucleotide
  Sense strand starting at position 2230 of SEQ ID NO: 1562509
augcauuccauggguagaa

SEQ ID NO: 1752602 - RNA, 19 nt, Artificial Sequence
  Description of Artificial Sequence: Synthetic oligonucleotide
  Antisense strand to SEQ ID NO: 1752601
uucuacccauggaaugcau

SEQ ID NO: 1752603 - RNA, 19 nt, Artificial Sequence
  Description of Artificial Sequence: Synthetic oligonucleotide
  Sense strand starting at position 2618 of SEQ ID NO: 1562509
ggauuacaggcaugguaua

SEQ ID NO: 1752604 - RNA, 19 nt, Artificial Sequence
  Description of Artificial Sequence: Synthetic oligonucleotide
  Antisense strand to SEQ ID NO: 1752603
uauaccaugccuguaaucc

SEQ ID NO: 1752605 - RNA, 19 nt, Artificial Sequence
  Description of Artificial Sequence: Synthetic oligonucleotide
  Sense strand starting at position 2619 of SEQ ID NO: 1562509
gauuacaggcaugguauau

SEQ ID NO: 1752606 - RNA, 19 nt, Artificial Sequence
  Description of Artificial Sequence: Synthetic oligonucleotide
  Antisense strand to SEQ ID NO: 1752605
auauaccaugccuguaauc

SEQ ID NO: 1752607 - RNA, 19 nt, Artificial Sequence
  Description of Artificial Sequence: Synthetic oligonucleotide
  Sense strand starting at position 2896 of SEQ ID NO: 1562509
gucuuugugcuacaaacga

SEQ ID NO: 1752608 - RNA, 19 nt, Artificial Sequence
  Description of Artificial Sequence: Synthetic oligonucleotide
  Antisense strand to SEQ ID NO: 1752607
ucguuuguagcacaaagac

SEQ ID NO: 1752609 - RNA, 19 nt, Artificial Sequence
  Description of Artificial Sequence: Synthetic oligonucleotide
  Sense strand starting at position 2995 of SEQ ID NO: 1562509
uuuaauaguccugguagag

SEQ ID NO: 1752610 - RNA, 19 nt, Artificial Sequence
  Description of Artificial Sequence: Synthetic oligonucleotide
  Antisense strand to SEQ ID NO: 1752609
cucuaccaggacuauuaaa

SEQ ID NO: 1752611 - RNA, 19 nt, Artificial Sequence
  Description of Artificial Sequence: Synthetic oligonucleotide
  Sense strand starting at position 3154 of SEQ ID NO: 1562509
augaaacucugguuccauu

SEQ ID NO: 1752612 - RNA, 19 nt, Artificial Sequence
  Description of Artificial Sequence: Synthetic oligonucleotide
  Antisense strand to SEQ ID NO: 1752611
aauggaaccagaguuucau

SEQ ID NO: 1752613 - RNA, 19 nt, Artificial Sequence
  Description of Artificial Sequence: Synthetic oligonucleotide
  Sense strand starting at position 3406 of SEQ ID NO: 1562509
ugucuauuaugugcaauuu

SEQ ID NO: 1752614 - RNA, 19 nt, Artificial Sequence
  Description of Artificial Sequence: Synthetic oligonucleotide
  Antisense strand to SEQ ID NO: 1752613
aaauugcacauaauagaca

SEQ ID NO: 1752615 - RNA, 19 nt, Artificial Sequence
  Description of Artificial Sequence: Synthetic oligonucleotide
  Sense strand starting at position 3510 of SEQ ID NO: 1562509
ugguuaauaugccuauuau

SEQ ID NO: 1752616 - RNA, 19 nt, Artificial Sequence
  Description of Artificial Sequence: Synthetic oligonucleotide
  Antisense strand to SEQ ID NO: 1752615
auaauaggcauauuaacca

SEQ ID NO: 1752617 - RNA, 19 nt, Artificial Sequence
  Description of Artificial Sequence: Synthetic oligonucleotide
  Sense strand starting at position 3565 of SEQ ID NO: 1562509
gagaauuauugaguuagug

SEQ ID NO: 1752618 - RNA, 19 nt, Artificial Sequence
  Description of Artificial Sequence: Synthetic oligonucleotide
  Antisense strand to SEQ ID NO: 1752617
cacuaacucaauaauucuc

SEQ ID NO: 1752619 - RNA, 19 nt, Artificial Sequence
  Description of Artificial Sequence: Synthetic oligonucleotide
  Sense strand starting at position 3678 of SEQ ID NO: 1562509
uugggcuuggguuaagaaa

SEQ ID NO: 1752620 - RNA, 19 nt, Artificial Sequence
  Description of Artificial Sequence: Synthetic oligonucleotide
  Antisense strand to SEQ ID NO: 1752619
uuucuuaacccaagcccaa

SEQ ID NO: 1752621 - RNA, 19 nt, Artificial Sequence
  Description of Artificial Sequence: Synthetic oligonucleotide
  Sense strand starting at position 3693 of SEQ ID NO: 1562509
gaaaguuggcuaggcagau

SEQ ID NO: 1752622 - RNA, 19 nt, Artificial Sequence
  Description of Artificial Sequence: Synthetic oligonucleotide
  Antisense strand to SEQ ID NO: 1752621
aucugccuagccaacuuuc

SEQ ID NO: 1752623 - RNA, 19 nt, Artificial Sequence
  Description of Artificial Sequence: Synthetic oligonucleotide
  Sense strand starting at position 3860 of SEQ ID NO: 1562509
gcacuuaguacaugguaga

SEQ ID NO: 1752624 - RNA, 19 nt, Artificial Sequence
  Description of Artificial Sequence: Synthetic oligonucleotide
  Antisense strand to SEQ ID NO: 1752623
ucuaccauguacuaagugc

SEQ ID NO: 1752625 - RNA, 19 nt, Artificial Sequence
  Description of Artificial Sequence: Synthetic oligonucleotide
  Sense strand starting at position 79 of SEQ ID NO: 1562510
ccaacaugccagugaauuc

SEQ ID NO: 1752626 - RNA, 19 nt, Artificial Sequence
  Description of Artificial Sequence: Synthetic oligonucleotide
  Antisense strand to SEQ ID NO: 1752625
gaauucacuggcauguugg

SEQ ID NO: 1752627 - RNA, 19 nt, Artificial Sequence
  Description of Artificial Sequence: Synthetic oligonucleotide
  Sense strand starting at position 125 of SEQ ID NO: 1562510
cccugaaauguuuggagca

SEQ ID NO: 1752628 - RNA, 19 nt, Artificial Sequence
  Description of Artificial Sequence: Synthetic oligonucleotide
  Antisense strand to SEQ ID NO: 1752627
ugcuccaaacauuucaggg

SEQ ID NO: 1752629 - RNA, 19 nt, Artificial Sequence
  Description of Artificial Sequence: Synthetic oligonucleotide
  Sense strand starting at position 130 of SEQ ID NO: 1562510
aaauguuuggagcauuauc

SEQ ID NO: 1752630 - RNA, 19 nt, Artificial Sequence
  Description of Artificial Sequence: Synthetic oligonucleotide
  Antisense strand to SEQ ID NO: 1752629
gauaaugcuccaaacauuu

SEQ ID NO: 1752631 - RNA, 19 nt, Artificial Sequence
  Description of Artificial Sequence: Synthetic oligonucleotide
  Sense strand starting at position 135 of SEQ ID NO: 1562510
uuuggagcauuaucacaaa

SEQ ID NO: 1752632 - RNA, 19 nt, Artificial Sequence
  Description of Artificial Sequence: Synthetic oligonucleotide
  Antisense strand to SEQ ID NO: 1752631
uuugugauaaugcuccaaa

SEQ ID NO: 1752633 - RNA, 19 nt, Artificial Sequence
  Description of Artificial Sequence: Synthetic oligonucleotide
  Sense strand starting at position 147 of SEQ ID NO: 1562510
ucacaaauucucuggcgau

SEQ ID NO: 1752634 - RNA, 19 nt, Artificial Sequence
  Description of Artificial Sequence: Synthetic oligonucleotide
  Antisense strand to SEQ ID NO: 1752633
aucgccagagaauuuguga

SEQ ID NO: 1752635 - RNA, 19 nt, Artificial Sequence
  Description of Artificial Sequence: Synthetic oligonucleotide
  Sense strand starting at position 316 of SEQ ID NO: 1562510
ggcaauaaauugucucaac

SEQ ID NO: 1752636 - RNA, 19 nt, Artificial Sequence
  Description of Artificial Sequence: Synthetic oligonucleotide
  Antisense strand to SEQ ID NO: 1752635
guugagacaauuuauugcc

SEQ ID NO: 1752637 - RNA, 19 nt, Artificial Sequence
  Description of Artificial Sequence: Synthetic oligonucleotide
  Sense strand starting at position 335 of SEQ ID NO: 1562510
ugcaguguaauuggaaagu

SEQ ID NO: 1752638 - RNA, 19 nt, Artificial Sequence
  Description of Artificial Sequence: Synthetic oligonucleotide
  Antisense strand to SEQ ID NO: 1752637
acuuuccaauuacacugca

SEQ ID NO: 1752639 - RNA, 19 nt, Artificial Sequence
  Description of Artificial Sequence: Synthetic oligonucleotide
  Sense strand starting at position 359 of SEQ ID NO: 1562510
auauuauggcacugcaaau

SEQ ID NO: 1752640 - RNA, 19 nt, Artificial Sequence
  Description of Artificial Sequence: Synthetic oligonucleotide
  Antisense strand to SEQ ID NO: 1752639
auuugcagugccauaauau

SEQ ID NO: 1752641 - RNA, 19 nt, Artificial Sequence
  Description of Artificial Sequence: Synthetic oligonucleotide
  Sense strand starting at position 388 of SEQ ID NO: 1562510
guuauugcaccauaauugu

SEQ ID NO: 1752642 - RNA, 19 nt, Artificial Sequence
  Description of Artificial Sequence: Synthetic oligonucleotide
  Antisense strand to SEQ ID NO: 1752641
acaauuauggugcaauaac

SEQ ID NO: 1752643 - RNA, 19 nt, Artificial Sequence
  Description of Artificial Sequence: Synthetic oligonucleotide
  Sense strand starting at position 394 of SEQ ID NO: 1562510
gcaccauaauuguuacaag

SEQ ID NO: 1752644 - RNA, 19 nt, Artificial Sequence
  Description of Artificial Sequence: Synthetic oligonucleotide
  Antisense strand to SEQ ID NO: 1752643
cuuguaacaauuauggugc

SEQ ID NO: 1752645 - RNA, 19 nt, Artificial Sequence
  Description of Artificial Sequence: Synthetic oligonucleotide
  Sense strand starting at position 498 of SEQ ID NO: 1562510
gcuuuaucuuugguauuug

SEQ ID NO: 1752646 - RNA, 19 nt, Artificial Sequence
  Description of Artificial Sequence: Synthetic oligonucleotide
  Antisense strand to SEQ ID NO: 1752645
caaauaccaaagauaaagc

SEQ ID NO: 1752647 - RNA, 19 nt, Artificial Sequence
  Description of Artificial Sequence: Synthetic oligonucleotide
  Sense strand starting at position 659 of SEQ ID NO: 1562510
cuggaaugaucagagaaac

SEQ ID NO: 1752648 - RNA, 19 nt, Artificial Sequence
  Description of Artificial Sequence: Synthetic oligonucleotide
  Antisense strand to SEQ ID NO: 1752647
guuucucugaucauuccag

SEQ ID NO: 1752649 - RNA, 19 nt, Artificial Sequence
  Description of Artificial Sequence: Synthetic oligonucleotide
  Sense strand starting at position 886 of SEQ ID NO: 1562510
ggccauagagccuauaaga

SEQ ID NO: 1752650 - RNA, 19 nt, Artificial Sequence
  Description of Artificial Sequence: Synthetic oligonucleotide
  Antisense strand to SEQ ID NO: 1752649
ucuuauaggcucuauggcc

SEQ ID NO: 1752651 - RNA, 19 nt, Artificial Sequence
  Description of Artificial Sequence: Synthetic oligonucleotide
  Sense strand starting at position 897 of SEQ ID NO: 1562510
cuauaagaggguuauguuc

SEQ ID NO: 1752652 - RNA, 19 nt, Artificial Sequence
  Description of Artificial Sequence: Synthetic oligonucleotide
  Antisense strand to SEQ ID NO: 1752651
gaacauaacccucuuauag

SEQ ID NO: 1752653 - RNA, 19 nt, Artificial Sequence
  Description of Artificial Sequence: Synthetic oligonucleotide
  Sense strand starting at position 903 of SEQ ID NO: 1562510
gaggguuauguucacgacu

SEQ ID NO: 1752654 - RNA, 19 nt, Artificial Sequence
  Description of Artificial Sequence: Synthetic oligonucleotide
  Antisense strand to SEQ ID NO: 1752653
agucgugaacauaacccuc

SEQ ID NO: 1752655 - RNA, 19 nt, Artificial Sequence
  Description of Artificial Sequence: Synthetic oligonucleotide
  Sense strand starting at position 1538 of SEQ ID NO: 1562510
cccuuaccuccugguugaa

SEQ ID NO: 1752656 - RNA, 19 nt, Artificial Sequence
  Description of Artificial Sequence: Synthetic oligonucleotide
  Antisense strand to SEQ ID NO: 1752655
uucaaccaggagguaaggg

SEQ ID NO: 1752657 - RNA, 19 nt, Artificial Sequence
  Description of Artificial Sequence: Synthetic oligonucleotide
  Sense strand starting at position 2670 of SEQ ID NO: 1562510
ucuuuauguugaucacuuu

SEQ ID NO: 1752658 - RNA, 19 nt, Artificial Sequence
  Description of Artificial Sequence: Synthetic oligonucleotide
  Antisense strand to SEQ ID NO: 1752657
aaagugaucaacauaaaga

SEQ ID NO: 1752659 - RNA, 19 nt, Artificial Sequence
  Description of Artificial Sequence: Synthetic oligonucleotide
  Sense strand starting at position 2678 of SEQ ID NO: 1562510
uugaucacuuuccuugagu

SEQ ID NO: 1752660 - RNA, 19 nt, Artificial Sequence
  Description of Artificial Sequence: Synthetic oligonucleotide
  Antisense strand to SEQ ID NO: 1752659
acucaaggaaagugaucaa

SEQ ID NO: 1752661 - RNA, 19 nt, Artificial Sequence
  Description of Artificial Sequence: Synthetic oligonucleotide
  Sense strand starting at position 2679 of SEQ ID NO: 1562510
ugaucacuuuccuugagua

SEQ ID NO: 1752662 - RNA, 19 nt, Artificial Sequence
  Description of Artificial Sequence: Synthetic oligonucleotide
  Antisense strand to SEQ ID NO: 1752661
uacucaaggaaagugauca

SEQ ID NO: 1752663 - RNA, 19 nt, Artificial Sequence
  Description of Artificial Sequence: Synthetic oligonucleotide
  Sense strand starting at position 2706 of SEQ ID NO: 1562510
cugccuaguguuggagaca

SEQ ID NO: 1752664 - RNA, 19 nt, Artificial Sequence
  Description of Artificial Sequence: Synthetic oligonucleotide
  Antisense strand to SEQ ID NO: 1752663
ugucuccaacacuaggcag

SEQ ID NO: 1752665 - RNA, 19 nt, Artificial Sequence
  Description of Artificial Sequence: Synthetic oligonucleotide
  Sense strand starting at position 3068 of SEQ ID NO: 1562510
gagugauggaugcaguguu

SEQ ID NO: 1752666 - RNA, 19 nt, Artificial Sequence
  Description of Artificial Sequence: Synthetic oligonucleotide
  Antisense strand to SEQ ID NO: 1752665
aacacugcauccaucacuc

SEQ ID NO: 1752667 - RNA, 19 nt, Artificial Sequence
  Description of Artificial Sequence: Synthetic oligonucleotide
  Sense strand starting at position 3295 of SEQ ID NO: 1562510
gggugguggguuuaugagu

SEQ ID NO: 1752668 - RNA, 19 nt, Artificial Sequence
  Description of Artificial Sequence: Synthetic oligonucleotide
  Antisense strand to SEQ ID NO: 1752667
acucauaaacccaccaccc

SEQ ID NO: 1752669 - RNA, 19 nt, Artificial Sequence
  Description of Artificial Sequence: Synthetic oligonucleotide
  Sense strand starting at position 3302 of SEQ ID NO: 1562510
ggguuuaugagucaacgua

SEQ ID NO: 1752670 - RNA, 19 nt, Artificial Sequence
  Description of Artificial Sequence: Synthetic oligonucleotide
  Antisense strand to SEQ ID NO: 1752669
uacguugacucauaaaccc

SEQ ID NO: 1752671 - RNA, 19 nt, Artificial Sequence
  Description of Artificial Sequence: Synthetic oligonucleotide
  Sense strand starting at position 3442 of SEQ ID NO: 1562510
gggugagguguccauuagu

SEQ ID NO: 1752672 - RNA, 19 nt, Artificial Sequence
  Description of Artificial Sequence: Synthetic oligonucleotide
  Antisense strand to SEQ ID NO: 1752671
acuaauggacaccucaccc

SEQ ID NO: 1752673 - RNA, 19 nt, Artificial Sequence
  Description of Artificial Sequence: Synthetic oligonucleotide
  Sense strand starting at position 3445 of SEQ ID NO: 1562510
ugagguguccauuaguaau

SEQ ID NO: 1752674 - RNA, 19 nt, Artificial Sequence
  Description of Artificial Sequence: Synthetic oligonucleotide
  Antisense strand to SEQ ID NO: 1752673
auuacuaauggacaccuca

SEQ ID NO: 1752675 - RNA, 19 nt, Artificial Sequence
  Description of Artificial Sequence: Synthetic oligonucleotide
  Sense strand starting at position 3485 of SEQ ID NO: 1562510
gagugaguuaauuaaugug

SEQ ID NO: 1752676 - RNA, 19 nt, Artificial Sequence
  Description of Artificial Sequence: Synthetic oligonucleotide
  Antisense strand to SEQ ID NO: 1752675
cacauuaauuaacucacuc

SEQ ID NO: 1752677 - RNA, 19 nt, Artificial Sequence
  Description of Artificial Sequence: Synthetic oligonucleotide
  Sense strand starting at position 3493 of SEQ ID NO: 1562510
uaauuaaugugcccaaggu

SEQ ID NO: 1752678 - RNA, 19 nt, Artificial Sequence
  Description of Artificial Sequence: Synthetic oligonucleotide
  Antisense strand to SEQ ID NO: 1752677
accuugggcacauuaauua

SEQ ID NO: 1752679 - RNA, 19 nt, Artificial Sequence
  Description of Artificial Sequence: Synthetic oligonucleotide
  Sense strand starting at position 3510 of SEQ ID NO: 1562510
gucacacagcuggaucauu

SEQ ID NO: 1752680 - RNA, 19 nt, Artificial Sequence
  Description of Artificial Sequence: Synthetic oligonucleotide
  Antisense strand to SEQ ID NO: 1752679
aaugauccagcugugugac

SEQ ID NO: 1752681 - RNA, 19 nt, Artificial Sequence
  Description of Artificial Sequence: Synthetic oligonucleotide
  Sense strand starting at position 3618 of SEQ ID NO: 1562510
ggagcgauggcugagauga

SEQ ID NO: 1752682 - RNA, 19 nt, Artificial Sequence
  Description of Artificial Sequence: Synthetic oligonucleotide
  Antisense strand to SEQ ID NO: 1752681
ucaucucagccaucgcucc

SEQ ID NO: 1752683 - RNA, 19 nt, Artificial Sequence
  Description of Artificial Sequence: Synthetic oligonucleotide
  Sense strand starting at position 3648 of SEQ ID NO: 1562510
gagucauuagugcacagcu

SEQ ID NO: 1752684 - RNA, 19 nt, Artificial Sequence
  Description of Artificial Sequence: Synthetic oligonucleotide
  Antisense strand to SEQ ID NO: 1752683
agcugugcacuaaugacuc

SEQ ID NO: 1752685 - RNA, 19 nt, Artificial Sequence
  Description of Artificial Sequence: Synthetic oligonucleotide
  Sense strand starting at position 3714 of SEQ ID NO: 1562510
cggguauguaagggauaag

SEQ ID NO: 1752686 - RNA, 19 nt, Artificial Sequence
  Description of Artificial Sequence: Synthetic oligonucleotide
  Antisense strand to SEQ ID NO: 1752685
cuuaucccuuacauacccg

SEQ ID NO: 1752687 - RNA, 19 nt, Artificial Sequence
  Description of Artificial Sequence: Synthetic oligonucleotide
  Sense strand starting at position 3717 of SEQ ID NO: 1562510
guauguaagggauaaguug

SEQ ID NO: 1752688 - RNA, 19 nt, Artificial Sequence
  Description of Artificial Sequence: Synthetic oligonucleotide
  Antisense strand to SEQ ID NO: 1752687
caacuuaucccuuacauac

SEQ ID NO: 1752689 - RNA, 19 nt, Artificial Sequence
  Description of Artificial Sequence: Synthetic oligonucleotide
  Sense strand starting at position 3726 of SEQ ID NO: 1562510
ggauaaguuggaggcaaga

SEQ ID NO: 1752690 - RNA, 19 nt, Artificial Sequence
  Description of Artificial Sequence: Synthetic oligonucleotide
  Antisense strand to SEQ ID NO: 1752689
ucuugccuccaacuuaucc

SEQ ID NO: 1752691 - RNA, 19 nt, Artificial Sequence
  Description of Artificial Sequence: Synthetic oligonucleotide
  Sense strand starting at position 3783 of SEQ ID NO: 1562510
uggugcuuggaguagaagu

SEQ ID NO: 1752692 - RNA, 19 nt, Artificial Sequence
  Description of Artificial Sequence: Synthetic oligonucleotide
  Antisense strand to SEQ ID NO: 1752691
acuucuacuccaagcacca

SEQ ID NO: 1752693 - RNA, 19 nt, Artificial Sequence
  Description of Artificial Sequence: Synthetic oligonucleotide
  Sense strand starting at position 3794 of SEQ ID NO: 1562510
guagaaguccagcaagaua

SEQ ID NO: 1752694 - RNA, 19 nt, Artificial Sequence
  Description of Artificial Sequence: Synthetic oligonucleotide
  Antisense strand to SEQ ID NO: 1752693
uaucuugcuggacuucuac

SEQ ID NO: 1752695 - RNA, 19 nt, Artificial Sequence
  Description of Artificial Sequence: Synthetic oligonucleotide
  Sense strand starting at position 3848 of SEQ ID NO: 1562510
ggagcuuguccugcgugua

SEQ ID NO: 1752696 - RNA, 19 nt, Artificial Sequence
  Description of Artificial Sequence: Synthetic oligonucleotide
  Antisense strand to SEQ ID NO: 1752695
uacacgcaggacaagcucc

SEQ ID NO: 1752697 - RNA, 19 nt, Artificial Sequence
  Description of Artificial Sequence: Synthetic oligonucleotide
  Sense strand starting at position 3890 of SEQ ID NO: 1562510
cuagacugauguguaucaa

SEQ ID NO: 1752698 - RNA, 19 nt, Artificial Sequence
  Description of Artificial Sequence: Synthetic oligonucleotide
  Antisense strand to SEQ ID NO: 1752697
uugauacacaucagucuag

SEQ ID NO: 1752699 - RNA, 19 nt, Artificial Sequence
  Description of Artificial Sequence: Synthetic oligonucleotide
  Sense strand starting at position 3926 of SEQ ID NO: 1562510
ggagaaaguuuauagaaac

SEQ ID NO: 1752700 - RNA, 19 nt, Artificial Sequence
  Description of Artificial Sequence: Synthetic oligonucleotide
  Antisense strand to SEQ ID NO: 1752699
guuucuauaaacuuucucc

SEQ ID NO: 1752701 - RNA, 19 nt, Artificial Sequence
  Description of Artificial Sequence: Synthetic oligonucleotide
  Sense strand starting at position 3936 of SEQ ID NO: 1562510
uauagaaacuuggcuguga

SEQ ID NO: 1752702 - RNA, 19 nt, Artificial Sequence
  Description of Artificial Sequence: Synthetic oligonucleotide
  Antisense strand to SEQ ID NO: 1752701
ucacagccaaguuucuaua

SEQ ID NO: 1752703 - RNA, 19 nt, Artificial Sequence
  Description of Artificial Sequence: Synthetic oligonucleotide
  Sense strand starting at position 3937 of SEQ ID NO: 1562510
auagaaacuuggcugugaa

SEQ ID NO: 1752704 - RNA, 19 nt, Artificial Sequence
  Description of Artificial Sequence: Synthetic oligonucleotide
  Antisense strand to SEQ ID NO: 1752703
uucacagccaaguuucuau

SEQ ID NO: 1752705 - RNA, 19 nt, Artificial Sequence
  Description of Artificial Sequence: Synthetic oligonucleotide
  Sense strand starting at position 463 of SEQ ID NO: 1562511
ucagaacuuccgcagaguu

SEQ ID NO: 1752706 - RNA, 19 nt, Artificial Sequence
  Description of Artificial Sequence: Synthetic oligonucleotide
  Antisense strand to SEQ ID NO: 1752705
aacucugcggaaguucuga

SEQ ID NO: 1752707 - RNA, 19 nt, Artificial Sequence
  Description of Artificial Sequence: Synthetic oligonucleotide
  Sense strand starting at position 582 of SEQ ID NO: 1562511
aacuguaauuucuguggaa

SEQ ID NO: 1752708 - RNA, 19 nt, Artificial Sequence
  Description of Artificial Sequence: Synthetic oligonucleotide
  Antisense strand to SEQ ID NO: 1752707
uuccacagaaauuacaguu

SEQ ID NO: 1752709 - RNA, 19 nt, Artificial Sequence
  Description of Artificial Sequence: Synthetic oligonucleotide
  Sense strand starting at position 585 of SEQ ID NO: 1562511
uguaauuucuguggaaaug

SEQ ID NO: 1752710 - RNA, 19 nt, Artificial Sequence
  Description of Artificial Sequence: Synthetic oligonucleotide
  Antisense strand to SEQ ID NO: 1752709
cauuuccacagaaauuaca

SEQ ID NO: 1752711 - RNA, 19 nt, Artificial Sequence
  Description of Artificial Sequence: Synthetic oligonucleotide
  Sense strand starting at position 594 of SEQ ID NO: 1562511
uguggaaaugcucaaucua

SEQ ID NO: 1752712 - RNA, 19 nt, Artificial Sequence
  Description of Artificial Sequence: Synthetic oligonucleotide
  Antisense strand to SEQ ID NO: 1752711
uagauugagcauuuccaca

SEQ ID NO: 1752713 - RNA, 19 nt, Artificial Sequence
  Description of Artificial Sequence: Synthetic oligonucleotide
  Sense strand starting at position 631 of SEQ ID NO: 1562511
ugauuuacuuuccaguuau

SEQ ID NO: 1752714 - RNA, 19 nt, Artificial Sequence
  Description of Artificial Sequence: Synthetic oligonucleotide
  Antisense strand to SEQ ID NO: 1752713
auaacuggaaaguaaauca

SEQ ID NO: 1752715 - RNA, 19 nt, Artificial Sequence
  Description of Artificial Sequence: Synthetic oligonucleotide
  Sense strand starting at position 637 of SEQ ID NO: 1562511
acuuuccaguuauaugaua

SEQ ID NO: 1752716 - RNA, 19 nt, Artificial Sequence
  Description of Artificial Sequence: Synthetic oligonucleotide
  Antisense strand to SEQ ID NO: 1752715
uaucauauaacuggaaagu

SEQ ID NO: 1752717 - RNA, 19 nt, Artificial Sequence
  Description of Artificial Sequence: Synthetic oligonucleotide
  Sense strand starting at position 645 of SEQ ID NO: 1562511
guuauaugauaaucacugu

SEQ ID NO: 1752718 - RNA, 19 nt, Artificial Sequence
  Description of Artificial Sequence: Synthetic oligonucleotide
  Antisense strand to SEQ ID NO: 1752717
acagugauuaucauauaac

SEQ ID NO: 1752719 - RNA, 19 nt, Artificial Sequence
  Description of Artificial Sequence: Synthetic oligonucleotide
  Sense strand starting at position 698 of SEQ ID NO: 1562511
gguaaacuguuucucucaa

SEQ ID NO: 1752720 - RNA, 19 nt, Artificial Sequence
  Description of Artificial Sequence: Synthetic oligonucleotide
  Antisense strand to SEQ ID NO: 1752719
uugagagaaacaguuuacc

SEQ ID NO: 1752721 - RNA, 19 nt, Artificial Sequence
  Description of Artificial Sequence: Synthetic oligonucleotide
  Sense strand starting at position 699 of SEQ ID NO: 1562511
guaaacuguuucucucaag

SEQ ID NO: 1752722 - RNA, 19 nt, Artificial Sequence
  Description of Artificial Sequence: Synthetic oligonucleotide
  Antisense strand to SEQ ID NO: 1752721
cuugagagaaacaguuuac

SEQ ID NO: 1752723 - RNA, 19 nt, Artificial Sequence
  Description of Artificial Sequence: Synthetic oligonucleotide
  Sense strand starting at position 727 of SEQ ID NO: 1562511
acaugaaacguuuauacug

SEQ ID NO: 1752724 - RNA, 19 nt, Artificial Sequence
  Description of Artificial Sequence: Synthetic oligonucleotide
  Antisense strand to SEQ ID NO: 1752723
caguauaaacguuucaugu

SEQ ID NO: 1752725 - RNA, 19 nt, Artificial Sequence
  Description of Artificial Sequence: Synthetic oligonucleotide
  Sense strand starting at position 734 of SEQ ID NO: 1562511
acguuuauacugugagcua

SEQ ID NO: 1752726 - RNA, 19 nt, Artificial Sequence
  Description of Artificial Sequence: Synthetic oligonucleotide
  Antisense strand to SEQ ID NO: 1752725
uagcucacaguauaaacgu

SEQ ID NO: 1752727 - RNA, 19 nt, Artificial Sequence
  Description of Artificial Sequence: Synthetic oligonucleotide
  Sense strand starting at position 737 of SEQ ID NO: 1562511
uuuauacugugagcuaaau

SEQ ID NO: 1752728 - RNA, 19 nt, Artificial Sequence
  Description of Artificial Sequence: Synthetic oligonucleotide
  Antisense strand to SEQ ID NO: 1752727
auuuagcucacaguauaaa

SEQ ID NO: 1752729 - RNA, 19 nt, Artificial Sequence
  Description of Artificial Sequence: Synthetic oligonucleotide
  Sense strand starting at position 825 of SEQ ID NO: 1562511
gugacuacagcuuaaucua

SEQ ID NO: 1752730 - RNA, 19 nt, Artificial Sequence
  Description of Artificial Sequence: Synthetic oligonucleotide
  Antisense strand to SEQ ID NO: 1752729
uagauuaagcuguagucac

SEQ ID NO: 1752731 - RNA, 19 nt, Artificial Sequence
  Description of Artificial Sequence: Synthetic oligonucleotide
  Sense strand starting at position 1423 of SEQ ID NO: 1562511
accgcacuuccgcaguaua

SEQ ID NO: 1752732 - RNA, 19 nt, Artificial Sequence
  Description of Artificial Sequence: Synthetic oligonucleotide
  Antisense strand to SEQ ID NO: 1752731
uauacugcggaagugcggu

SEQ ID NO: 1752733 - RNA, 19 nt, Artificial Sequence
  Description of Artificial Sequence: Synthetic oligonucleotide
  Sense strand starting at position 1886 of SEQ ID NO: 1562511
uacgcugaugaaugaaaga

SEQ ID NO: 1752734 - RNA, 19 nt, Artificial Sequence
  Description of Artificial Sequence: Synthetic oligonucleotide
  Antisense strand to SEQ ID NO: 1752733
ucuuucauucaucagcgua

SEQ ID NO: 1752735 - RNA, 19 nt, Artificial Sequence
  Description of Artificial Sequence: Synthetic oligonucleotide
  Sense strand starting at position 2357 of SEQ ID NO: 1562511
cggagucuuuccuuacgaa

SEQ ID NO: 1752736 - RNA, 19 nt, Artificial Sequence
  Description of Artificial Sequence: Synthetic oligonucleotide
  Antisense strand to SEQ ID NO: 1752735
uucguaaggaaagacuccg

SEQ ID NO: 1752737 - RNA, 19 nt, Artificial Sequence
  Description of Artificial Sequence: Synthetic oligonucleotide
  Sense strand starting at position 2358 of SEQ ID NO: 1562511
ggagucuuuccuuacgaag

SEQ ID NO: 1752738 - RNA, 19 nt, Artificial Sequence
  Description of Artificial Sequence: Synthetic oligonucleotide
  Antisense strand to SEQ ID NO: 1752737
cuucguaaggaaagacucc

SEQ ID NO: 1752739 - RNA, 19 nt, Artificial Sequence
  Description of Artificial Sequence: Synthetic oligonucleotide
  Sense strand starting at position 2450 of SEQ ID NO: 1562511
gagucacuuugcucgccaa

SEQ ID NO: 1752740 - RNA, 19 nt, Artificial Sequence
  Description of Artificial Sequence: Synthetic oligonucleotide
  Antisense strand to SEQ ID NO: 1752739
uuggcgagcaaagugacuc

SEQ ID NO: 1752741 - RNA, 19 nt, Artificial Sequence
  Description of Artificial Sequence: Synthetic oligonucleotide
  Sense strand starting at position 2451 of SEQ ID NO: 1562511
agucacuuugcucgccaau

SEQ ID NO: 1752742 - RNA, 19 nt, Artificial Sequence
  Description of Artificial Sequence: Synthetic oligonucleotide
  Antisense strand to SEQ ID NO: 1752741
auuggcgagcaaagugacu

SEQ ID NO: 1752743 - RNA, 19 nt, Artificial Sequence
  Description of Artificial Sequence: Synthetic oligonucleotide
  Sense strand starting at position 2592 of SEQ ID NO: 1562511
ccacuuugauuaugggcua

SEQ ID NO: 1752744 - RNA, 19 nt, Artificial Sequence
  Description of Artificial Sequence: Synthetic oligonucleotide
  Antisense strand to SEQ ID NO: 1752743
uagcccauaaucaaagugg

SEQ ID NO: 1752745 - RNA, 19 nt, Artificial Sequence
  Description of Artificial Sequence: Synthetic oligonucleotide
  Sense strand starting at position 2686 of SEQ ID NO: 1562511
uaccuuaccggguggucaa

SEQ ID NO: 1752746 - RNA, 19 nt, Artificial Sequence
  Description of Artificial Sequence: Synthetic oligonucleotide
  Antisense strand to SEQ ID NO: 1752745
uugaccacccgguaaggua

SEQ ID NO: 1752747 - RNA, 19 nt, Artificial Sequence
  Description of Artificial Sequence: Synthetic oligonucleotide
  Sense strand starting at position 2704 of SEQ ID NO: 1562511
aggauaacaucaggaagaa

SEQ ID NO: 1752748 - RNA, 19 nt, Artificial Sequence
  Description of Artificial Sequence: Synthetic oligonucleotide
  Antisense strand to SEQ ID NO: 1752747
uucuuccugauguuauccu

SEQ ID NO: 1752749 - RNA, 19 nt, Artificial Sequence
  Description of Artificial Sequence: Synthetic oligonucleotide
  Sense strand starting at position 2890 of SEQ ID NO: 1562511
ccagaauuagaaugcucaa

SEQ ID NO: 1752750 - RNA, 19 nt, Artificial Sequence
  Description of Artificial Sequence: Synthetic oligonucleotide
  Antisense strand to SEQ ID NO: 1752749
uugagcauucuaauucugg

SEQ ID NO: 1752751 - RNA, 19 nt, Artificial Sequence
  Description of Artificial Sequence: Synthetic oligonucleotide
  Sense strand starting at position 2912 of SEQ ID NO: 1562511
ccuuguauacaauggugua

SEQ ID NO: 1752752 - RNA, 19 nt, Artificial Sequence
  Description of Artificial Sequence: Synthetic oligonucleotide
  Antisense strand to SEQ ID NO: 1752751
uacaccauuguauacaagg

SEQ ID NO: 1752753 - RNA, 19 nt, Artificial Sequence
  Description of Artificial Sequence: Synthetic oligonucleotide
  Sense strand starting at position 2915 of SEQ ID NO: 1562511
uguauacaaugguguaaac

SEQ ID NO: 1752754 - RNA, 19 nt, Artificial Sequence
  Description of Artificial Sequence: Synthetic oligonucleotide
  Antisense strand to SEQ ID NO: 1752753
guuuacaccauuguauaca

SEQ ID NO: 1752755 - RNA, 19 nt, Artificial Sequence
  Description of Artificial Sequence: Synthetic oligonucleotide
  Sense strand starting at position 2926 of SEQ ID NO: 1562511
guguaaaccuaaguaacaa

SEQ ID NO: 1752756 - RNA, 19 nt, Artificial Sequence
  Description of Artificial Sequence: Synthetic oligonucleotide
  Antisense strand to SEQ ID NO: 1752755
uuguuacuuagguuuacac

SEQ ID NO: 1752757 - RNA, 19 nt, Artificial Sequence
  Description of Artificial Sequence: Synthetic oligonucleotide
  Sense strand starting at position 2966 of SEQ ID NO: 1562511
ugagauuuaucugggagua

SEQ ID NO: 1752758 - RNA, 19 nt, Artificial Sequence
  Description of Artificial Sequence: Synthetic oligonucleotide
  Antisense strand to SEQ ID NO: 1752757
uacucccagauaaaucuca

SEQ ID NO: 1752759 - RNA, 19 nt, Artificial Sequence
  Description of Artificial Sequence: Synthetic oligonucleotide
  Sense strand starting at position 2968 of SEQ ID NO: 1562511
agauuuaucugggaguagc

SEQ ID NO: 1752760 - RNA, 19 nt, Artificial Sequence
  Description of Artificial Sequence: Synthetic oligonucleotide
  Antisense strand to SEQ ID NO: 1752759
gcuacucccagauaaaucu

SEQ ID NO: 1752761 - RNA, 19 nt, Artificial Sequence
  Description of Artificial Sequence: Synthetic oligonucleotide
  Sense strand starting at position 2971 of SEQ ID NO: 1562511
uuuaucugggaguagcauu

SEQ ID NO: 1752762 - RNA, 19 nt, Artificial Sequence
  Description of Artificial Sequence: Synthetic oligonucleotide
  Antisense strand to SEQ ID NO: 1752761
aaugcuacucccagauaaa

SEQ ID NO: 1752763 - RNA, 19 nt, Artificial Sequence
  Description of Artificial Sequence: Synthetic oligonucleotide
  Sense strand starting at position 3011 of SEQ ID NO: 1562511
uaguaaacugugugcguuu

SEQ ID NO: 1752764 - RNA, 19 nt, Artificial Sequence
  Description of Artificial Sequence: Synthetic oligonucleotide
  Antisense strand to SEQ ID NO: 1752763
aaacgcacacaguuuacua

SEQ ID NO: 1752765 - RNA, 19 nt, Artificial Sequence
  Description of Artificial Sequence: Synthetic oligonucleotide
  Sense strand starting at position 3127 of SEQ ID NO: 1562511
aagguagcaucaguccaaa

SEQ ID NO: 1752766 - RNA, 19 nt, Artificial Sequence
  Description of Artificial Sequence: Synthetic oligonucleotide
  Antisense strand to SEQ ID NO: 1752765
uuuggacugaugcuaccuu

SEQ ID NO: 1752767 - RNA, 19 nt, Artificial Sequence
  Description of Artificial Sequence: Synthetic oligonucleotide
  Sense strand starting at position 3130 of SEQ ID NO: 1562511
guagcaucaguccaaaguu

SEQ ID NO: 1752768 - RNA, 19 nt, Artificial Sequence
  Description of Artificial Sequence: Synthetic oligonucleotide
  Antisense strand to SEQ ID NO: 1752767
aacuuuggacugaugcuac

SEQ ID NO: 1752769 - RNA, 19 nt, Artificial Sequence
  Description of Artificial Sequence: Synthetic oligonucleotide
  Sense strand starting at position 3219 of SEQ ID NO: 1562511
uugugacaauucuuguuau

SEQ ID NO: 1752770 - RNA, 19 nt, Artificial Sequence
  Description of Artificial Sequence: Synthetic oligonucleotide
  Antisense strand to SEQ ID NO: 1752769
auaacaagaauugucacaa

SEQ ID NO: 1752771 - RNA, 19 nt, Artificial Sequence
  Description of Artificial Sequence: Synthetic oligonucleotide
  Sense strand starting at position 3222 of SEQ ID NO: 1562511
ugacaauucuuguuaugag

SEQ ID NO: 1752772 - RNA, 19 nt, Artificial Sequence
  Description of Artificial Sequence: Synthetic oligonucleotide
  Antisense strand to SEQ ID NO: 1752771
cucauaacaagaauuguca

SEQ ID NO: 1752773 - RNA, 19 nt, Artificial Sequence
  Description of Artificial Sequence: Synthetic oligonucleotide
  Sense strand starting at position 3223 of SEQ ID NO: 1562511
gacaauucuuguuaugagg

SEQ ID NO: 1752774 - RNA, 19 nt, Artificial Sequence
  Description of Artificial Sequence: Synthetic oligonucleotide
  Antisense strand to SEQ ID NO: 1752773
ccucauaacaagaauuguc

SEQ ID NO: 1752775 - RNA, 19 nt, Artificial Sequence
  Description of Artificial Sequence: Synthetic oligonucleotide
  Sense strand starting at position 3239 of SEQ ID NO: 1562511
aggcguagugcaugagaac

SEQ ID NO: 1752776 - RNA, 19 nt, Artificial Sequence
  Description of Artificial Sequence: Synthetic oligonucleotide
  Antisense strand to SEQ ID NO: 1752775
guucucaugcacuacgccu

SEQ ID NO: 1752777 - RNA, 19 nt, Artificial Sequence
  Description of Artificial Sequence: Synthetic oligonucleotide
  Sense strand starting at position 3779 of SEQ ID NO: 1562511
gauggaaugugaggucaga

SEQ ID NO: 1752778 - RNA, 19 nt, Artificial Sequence
  Description of Artificial Sequence: Synthetic oligonucleotide
  Antisense strand to SEQ ID NO: 1752777
ucugaccucacauuccauc

SEQ ID NO: 1752779 - RNA, 19 nt, Artificial Sequence
  Description of Artificial Sequence: Synthetic oligonucleotide
  Sense strand starting at position 3868 of SEQ ID NO: 1562511
ccaugagacugauggaaca

SEQ ID NO: 1752780 - RNA, 19 nt, Artificial Sequence
  Description of Artificial Sequence: Synthetic oligonucleotide
  Antisense strand to SEQ ID NO: 1752779
uguuccaucagucucaugg

SEQ ID NO: 1752781 - RNA, 19 nt, Artificial Sequence
  Description of Artificial Sequence: Synthetic oligonucleotide
  Sense strand starting at position 3974 of SEQ ID NO: 1562511
uguucuaaugguuacaagu

SEQ ID NO: 1752782 - RNA, 19 nt, Artificial Sequence
  Description of Artificial Sequence: Synthetic oligonucleotide
  Antisense strand to SEQ ID NO: 1752781
acuuguaaccauuagaaca

SEQ ID NO: 1752783 - RNA, 19 nt, Artificial Sequence
  Description of Artificial Sequence: Synthetic oligonucleotide
  Sense strand starting at position 3976 of SEQ ID NO: 1562511
uucuaaugguuacaaguuu

SEQ ID NO: 1752784 - RNA, 19 nt, Artificial Sequence
  Description of Artificial Sequence: Synthetic oligonucleotide
  Antisense strand to SEQ ID NO: 1752783
aaacuuguaaccauuagaa

SEQ ID NO: 1752785 - RNA, 19 nt, Artificial Sequence
  Description of Artificial Sequence: Synthetic oligonucleotide
  Sense strand starting at position 9 of SEQ ID NO: 1562512
ucagaacuuccgcagaguu

SEQ ID NO: 1752786 - RNA, 19 nt, Artificial Sequence
  Description of Artificial Sequence: Synthetic oligonucleotide
  Antisense strand to SEQ ID NO: 1752785
aacucugcggaaguucuga

SEQ ID NO: 1752787 - RNA, 19 nt, Artificial Sequence
  Description of Artificial Sequence: Synthetic oligonucleotide
  Sense strand starting at position 128 of SEQ ID NO: 1562512
aacuguaauuucuguggaa

SEQ ID NO: 1752788 - RNA, 19 nt, Artificial Sequence
  Description of Artificial Sequence: Synthetic oligonucleotide
  Antisense strand to SEQ ID NO: 1752787
uuccacagaaauuacaguu

SEQ ID NO: 1752789 - RNA, 19 nt, Artificial Sequence
  Description of Artificial Sequence: Synthetic oligonucleotide
  Sense strand starting at position 131 of SEQ ID NO: 1562512
uguaauuucuguggaaaug

SEQ ID NO: 1752790 - RNA, 19 nt, Artificial Sequence
  Description of Artificial Sequence: Synthetic oligonucleotide
  Antisense strand to SEQ ID NO: 1752789
cauuuccacagaaauuaca

SEQ ID NO: 1752791 - RNA, 19 nt, Artificial Sequence
  Description of Artificial Sequence: Synthetic oligonucleotide
  Sense strand starting at position 140 of SEQ ID NO: 1562512
uguggaaaugcucaaucua

SEQ ID NO: 1752792 - RNA, 19 nt, Artificial Sequence
  Description of Artificial Sequence: Synthetic oligonucleotide
  Antisense strand to SEQ ID NO: 1752791
uagauugagcauuuccaca

SEQ ID NO: 1752793 - RNA, 19 nt, Artificial Sequence
  Description of Artificial Sequence: Synthetic oligonucleotide
  Sense strand starting at position 177 of SEQ ID NO: 1562512
ugauuuacuuuccaguuau

SEQ ID NO: 1752794 - RNA, 19 nt, Artificial Sequence
  Description of Artificial Sequence: Synthetic oligonucleotide
  Antisense strand to SEQ ID NO: 1752793
auaacuggaaaguaaauca

SEQ ID NO: 1752795 - RNA, 19 nt, Artificial Sequence
  Description of Artificial Sequence: Synthetic oligonucleotide
  Sense strand starting at position 183 of SEQ ID NO: 1562512
acuuuccaguuauaugaua

SEQ ID NO: 1752796 - RNA, 19 nt, Artificial Sequence
  Description of Artificial Sequence: Synthetic oligonucleotide
  Antisense strand to SEQ ID NO: 1752795
uaucauauaacuggaaagu

SEQ ID NO: 1752797 - RNA, 19 nt, Artificial Sequence
  Description of Artificial Sequence: Synthetic oligonucleotide
  Sense strand starting at position 191 of SEQ ID NO: 1562512
guuauaugauaaucacugu

SEQ ID NO: 1752798 - RNA, 19 nt, Artificial Sequence
  Description of Artificial Sequence: Synthetic oligonucleotide
  Antisense strand to SEQ ID NO: 1752797
acagugauuaucauauaac

SEQ ID NO: 1752799 - RNA, 19 nt, Artificial Sequence
  Description of Artificial Sequence: Synthetic oligonucleotide
  Sense strand starting at position 244 of SEQ ID NO: 1562512
gguaaacuguuucucucaa

SEQ ID NO: 1752800 - RNA, 19 nt, Artificial Sequence
  Description of Artificial Sequence: Synthetic oligonucleotide
  Antisense strand to SEQ ID NO: 1752799
uugagagaaacaguuuacc

SEQ ID NO: 1752801 - RNA, 19 nt, Artificial Sequence
  Description of Artificial Sequence: Synthetic oligonucleotide
  Sense strand starting at position 245 of SEQ ID NO: 1562512
guaaacuguuucucucaag

SEQ ID NO: 1752802 - RNA, 19 nt, Artificial Sequence
  Description of Artificial Sequence: Synthetic oligonucleotide
  Antisense strand to SEQ ID NO: 1752801
cuugagagaaacaguuuac

SEQ ID NO: 1752803 - RNA, 19 nt, Artificial Sequence
  Description of Artificial Sequence: Synthetic oligonucleotide
  Sense strand starting at position 273 of SEQ ID NO: 1562512
acaugaaacguuuauacug

SEQ ID NO: 1752804 - RNA, 19 nt, Artificial Sequence
  Description of Artificial Sequence: Synthetic oligonucleotide
  Antisense strand to SEQ ID NO: 1752803
caguauaaacguuucaugu

SEQ ID NO: 1752805 - RNA, 19 nt, Artificial Sequence
  Description of Artificial Sequence: Synthetic oligonucleotide
  Sense strand starting at position 280 of SEQ ID NO: 1562512
acguuuauacugugagcua

SEQ ID NO: 1752806 - RNA, 19 nt, Artificial Sequence
  Description of Artificial Sequence: Synthetic oligonucleotide
  Antisense strand to SEQ ID NO: 1752805
uagcucacaguauaaacgu

SEQ ID NO: 1752807 - RNA, 19 nt, Artificial Sequence
  Description of Artificial Sequence: Synthetic oligonucleotide
  Sense strand starting at position 283 of SEQ ID NO: 1562512
uuuauacugugagcuaaau

SEQ ID NO: 1752808 - RNA, 19 nt, Artificial Sequence
  Description of Artificial Sequence: Synthetic oligonucleotide
  Antisense strand to SEQ ID NO: 1752807
auuuagcucacaguauaaa

SEQ ID NO: 1752809 - RNA, 19 nt, Artificial Sequence
  Description of Artificial Sequence: Synthetic oligonucleotide
  Sense strand starting at position 371 of SEQ ID NO: 1562512
gugacuacagcuuaaucua

SEQ ID NO: 1752810 - RNA, 19 nt, Artificial Sequence
  Description of Artificial Sequence: Synthetic oligonucleotide
  Antisense strand to SEQ ID NO: 1752809
uagauuaagcuguagucac

SEQ ID NO: 1752811 - RNA, 19 nt, Artificial Sequence
  Description of Artificial Sequence: Synthetic oligonucleotide
  Sense strand starting at position 969 of SEQ ID NO: 1562512
accgcacuuccgcaguaua

SEQ ID NO: 1752812 - RNA, 19 nt, Artificial Sequence
  Description of Artificial Sequence: Synthetic oligonucleotide
  Antisense strand to SEQ ID NO: 1752811
uauacugcggaagugcggu

SEQ ID NO: 1752813 - RNA, 19 nt, Artificial Sequence
  Description of Artificial Sequence: Synthetic oligonucleotide
  Sense strand starting at position 1432 of SEQ ID NO: 1562512
uacgcugaugaaugaaaga

SEQ ID NO: 1752814 - RNA, 19 nt, Artificial Sequence
  Description of Artificial Sequence: Synthetic oligonucleotide
  Antisense strand to SEQ ID NO: 1752813
ucuuucauucaucagcgua

SEQ ID NO: 1752815 - RNA, 19 nt, Artificial Sequence
  Description of Artificial Sequence: Synthetic oligonucleotide
  Sense strand starting at position 1903 of SEQ ID NO: 1562512
cggagucuuuccuuacgaa

SEQ ID NO: 1752816 - RNA, 19 nt, Artificial Sequence
  Description of Artificial Sequence: Synthetic oligonucleotide
  Antisense strand to SEQ ID NO: 1752815
uucguaaggaaagacuccg

SEQ ID NO: 1752817 - RNA, 19 nt, Artificial Sequence
  Description of Artificial Sequence: Synthetic oligonucleotide
  Sense strand starting at position 1904 of SEQ ID NO: 1562512
ggagucuuuccuuacgaag

SEQ ID NO: 1752818 - RNA, 19 nt, Artificial Sequence
  Description of Artificial Sequence: Synthetic oligonucleotide
  Antisense strand to SEQ ID NO: 1752817
cuucguaaggaaagacucc

SEQ ID NO: 1752819 - RNA, 19 nt, Artificial Sequence
  Description of Artificial Sequence: Synthetic oligonucleotide
  Sense strand starting at position 1996 of SEQ ID NO: 1562512
gagucacuuugcucgccaa

SEQ ID NO: 1752820 - RNA, 19 nt, Artificial Sequence
  Description of Artificial Sequence: Synthetic oligonucleotide
  Antisense strand to SEQ ID NO: 1752819
uuggcgagcaaagugacuc

SEQ ID NO: 1752821 - RNA, 19 nt, Artificial Sequence
  Description of Artificial Sequence: Synthetic oligonucleotide
  Sense strand starting at position 1997 of SEQ ID NO: 1562512
agucacuuugcucgccaau

SEQ ID NO: 1752822 - RNA, 19 nt, Artificial Sequence
  Description of Artificial Sequence: Synthetic oligonucleotide
  Antisense strand to SEQ ID NO: 1752821
auuggcgagcaaagugacu

SEQ ID NO: 1752823 - RNA, 19 nt, Artificial Sequence
  Description of Artificial Sequence: Synthetic oligonucleotide
  Sense strand starting at position 2138 of SEQ ID NO: 1562512
ccacuuugauuaugggcua

SEQ ID NO: 1752824 - RNA, 19 nt, Artificial Sequence
  Description of Artificial Sequence: Synthetic oligonucleotide
  Antisense strand to SEQ ID NO: 1752823
uagcccauaaucaaagugg

SEQ ID NO: 1752825 - RNA, 19 nt, Artificial Sequence
  Description of Artificial Sequence: Synthetic oligonucleotide
  Sense strand starting at position 2232 of SEQ ID NO: 1562512
uaccuuaccggguggucaa

SEQ ID NO: 1752826 - RNA, 19 nt, Artificial Sequence
  Description of Artificial Sequence: Synthetic oligonucleotide
  Antisense strand to SEQ ID NO: 1752825
uugaccacccgguaaggua

SEQ ID NO: 1752827 - RNA, 19 nt, Artificial Sequence
  Description of Artificial Sequence: Synthetic oligonucleotide
  Sense strand starting at position 2250 of SEQ ID NO: 1562512
aggauaacaucaggaagaa

SEQ ID NO: 1752828 - RNA, 19 nt, Artificial Sequence
  Description of Artificial Sequence: Synthetic oligonucleotide
  Antisense strand to SEQ ID NO: 1752827
uucuuccugauguuauccu

SEQ ID NO: 1752829 - RNA, 19 nt, Artificial Sequence
  Description of Artificial Sequence: Synthetic oligonucleotide
  Sense strand starting at position 2436 of SEQ ID NO: 1562512
ccagaauuagaaugcucaa

SEQ ID NO: 1752830 - RNA, 19 nt, Artificial Sequence
  Description of Artificial Sequence: Synthetic oligonucleotide
  Antisense strand to SEQ ID NO: 1752829
uugagcauucuaauucugg

SEQ ID NO: 1752831 - RNA, 19 nt, Artificial Sequence
  Description of Artificial Sequence: Synthetic oligonucleotide
  Sense strand starting at position 2458 of SEQ ID NO: 1562512
ccuuguauacaauggugua

SEQ ID NO: 1752832 - RNA, 19 nt, Artificial Sequence
  Description of Artificial Sequence: Synthetic oligonucleotide
  Antisense strand to SEQ ID NO: 1752831
uacaccauuguauacaagg

SEQ ID NO: 1752833 - RNA, 19 nt, Artificial Sequence
  Description of Artificial Sequence: Synthetic oligonucleotide
  Sense strand starting at position 2472 of SEQ ID NO: 1562512
guguaaaccuaaguaacaa

SEQ ID NO: 1752834 - RNA, 19 nt, Artificial Sequence
  Description of Artificial Sequence: Synthetic oligonucleotide
  Antisense strand to SEQ ID NO: 1752833
uuguuacuuagguuuacac

SEQ ID NO: 1752835 - RNA, 19 nt, Artificial Sequence
  Description of Artificial Sequence: Synthetic oligonucleotide
  Sense strand starting at position 2512 of SEQ ID NO: 1562512
ugagauuuaucugggagua

SEQ ID NO: 1752836 - RNA, 19 nt, Artificial Sequence
  Description of Artificial Sequence: Synthetic oligonucleotide
  Antisense strand to SEQ ID NO: 1752835
uacucccagauaaaucuca

SEQ ID NO: 1752837 - RNA, 19 nt, Artificial Sequence
  Description of Artificial Sequence: Synthetic oligonucleotide
  Sense strand starting at position 2514 of SEQ ID NO: 1562512
agauuuaucugggaguagc

SEQ ID NO: 1752838 - RNA, 19 nt, Artificial Sequence
  Description of Artificial Sequence: Synthetic oligonucleotide
  Antisense strand to SEQ ID NO: 1752837
gcuacucccagauaaaucu

SEQ ID NO: 1752839 - RNA, 19 nt, Artificial Sequence
  Description of Artificial Sequence: Synthetic oligonucleotide
  Sense strand starting at position 2517 of SEQ ID NO: 1562512
uuuaucugggaguagcauu

SEQ ID NO: 1752840 - RNA, 19 nt, Artificial Sequence
  Description of Artificial Sequence: Synthetic oligonucleotide
  Antisense strand to SEQ ID NO: 1752839
aaugcuacucccagauaaa

SEQ ID NO: 1752841 - RNA, 19 nt, Artificial Sequence
  Description of Artificial Sequence: Synthetic oligonucleotide
  Sense strand starting at position 2557 of SEQ ID NO: 1562512
uaguaaacugugugcguuu

SEQ ID NO: 1752842 - RNA, 19 nt, Artificial Sequence
  Description of Artificial Sequence: Synthetic oligonucleotide
  Antisense strand to SEQ ID NO: 1752841
aaacgcacacaguuuacua

SEQ ID NO: 1752843 - RNA, 19 nt, Artificial Sequence
  Description of Artificial Sequence: Synthetic oligonucleotide
  Sense strand starting at position 2673 of SEQ ID NO: 1562512
aagguagcaucaguccaaa

SEQ ID NO: 1752844 - RNA, 19 nt, Artificial Sequence
  Description of Artificial Sequence: Synthetic oligonucleotide
  Antisense strand to SEQ ID NO: 1752843
uuuggacugaugcuaccuu

SEQ ID NO: 1752845 - RNA, 19 nt, Artificial Sequence
  Description of Artificial Sequence: Synthetic oligonucleotide
  Sense strand starting at position 2676 of SEQ ID NO: 1562512
guagcaucaguccaaaguu

SEQ ID NO: 1752846 - RNA, 19 nt, Artificial Sequence
  Description of Artificial Sequence: Synthetic oligonucleotide
  Antisense strand to SEQ ID NO: 1752845
aacuuuggacugaugcuac

SEQ ID NO: 1752847 - RNA, 19 nt, Artificial Sequence
  Description of Artificial Sequence: Synthetic oligonucleotide
  Sense strand starting at position 2765 of SEQ ID NO: 1562512
uugugacaauucuuguuau

SEQ ID NO: 1752848 - RNA, 19 nt, Artificial Sequence
  Description of Artificial Sequence: Synthetic oligonucleotide
  Antisense strand to SEQ ID NO: 1752847
auaacaagaauugucacaa

SEQ ID NO: 1752849 - RNA, 19 nt, Artificial Sequence
  Description of Artificial Sequence: Synthetic oligonucleotide
  Sense strand starting at position 2768 of SEQ ID NO: 1562512
ugacaauucuuguuaugag

SEQ ID NO: 1752850 - RNA, 19 nt, Artificial Sequence
  Description of Artificial Sequence: Synthetic oligonucleotide
  Antisense strand to SEQ ID NO: 1752849
cucauaacaagaauuguca

SEQ ID NO: 1752851 - RNA, 19 nt, Artificial Sequence
  Description of Artificial Sequence: Synthetic oligonucleotide
  Sense strand starting at position 2769 of SEQ ID NO: 1562512
gacaauucuuguuaugagg

SEQ ID NO: 1752852 - RNA, 19 nt, Artificial Sequence
  Description of Artificial Sequence: Synthetic oligonucleotide
  Antisense strand to SEQ ID NO: 1752851
ccucauaacaagaauuguc

SEQ ID NO: 1752853 - RNA, 19 nt, Artificial Sequence
  Description of Artificial Sequence: Synthetic oligonucleotide
  Sense strand starting at position 2785 of SEQ ID NO: 1562512
aggcguagugcaugagaac

SEQ ID NO: 1752854 - RNA, 19 nt, Artificial Sequence
  Description of Artificial Sequence: Synthetic oligonucleotide
  Antisense strand to SEQ ID NO: 1752853
guucucaugcacuacgccu

SEQ ID NO: 1752855 - RNA, 19 nt, Artificial Sequence
  Description of Artificial Sequence: Synthetic oligonucleotide
  Sense strand starting at position 3325 of SEQ ID NO: 1562512
gauggaaugugaggucaga

SEQ ID NO: 1752856 - RNA, 19 nt, Artificial Sequence
  Description of Artificial Sequence: Synthetic oligonucleotide
  Antisense strand to SEQ ID NO: 1752855
ucugaccucacauuccauc

SEQ ID NO: 1752857 - RNA, 19 nt, Artificial Sequence
  Description of Artificial Sequence: Synthetic oligonucleotide
  Sense strand starting at position 3414 of SEQ ID NO: 1562512
ccaugagacugauggaaca

SEQ ID NO: 1752858 - RNA, 19 nt, Artificial Sequence
  Description of Artificial Sequence: Synthetic oligonucleotide
  Antisense strand to SEQ ID NO: 1752857
uguuccaucagucucaugg

SEQ ID NO: 1752859 - RNA, 19 nt, Artificial Sequence
  Description of Artificial Sequence: Synthetic oligonucleotide
  Sense strand starting at position 3520 of SEQ ID NO: 1562512
uguucuaaugguuacaagu

SEQ ID NO: 1752860 - RNA, 19 nt, Artificial Sequence
  Description of Artificial Sequence: Synthetic oligonucleotide
  Antisense strand to SEQ ID NO: 1752859
acuuguaaccauuagaaca

SEQ ID NO: 1752861 - RNA, 19 nt, Artificial Sequence
  Description of Artificial Sequence: Synthetic oligonucleotide
  Sense strand starting at position 3522 of SEQ ID NO: 1562512
uucuaaugguuacaaguuu

SEQ ID NO: 1752862 - RNA, 19 nt, Artificial Sequence
  Description of Artificial Sequence: Synthetic oligonucleotide
  Antisense strand to SEQ ID NO: 1752861
aaacuuguaaccauuagaa

SEQ ID NO: 1752863 - RNA, 19 nt, Artificial Sequence
  Description of Artificial Sequence: Synthetic oligonucleotide
  Sense strand starting at position 3635 of SEQ ID NO: 1562512
ccuguuccacaaugacaga

SEQ ID NO: 1752864 - RNA, 19 nt, Artificial Sequence
  Description of Artificial Sequence: Synthetic oligonucleotide
  Antisense strand to SEQ ID NO: 1752863
ucugucauuguggaacagg

SEQ ID NO: 1752865 - RNA, 19 nt, Artificial Sequence
  Description of Artificial Sequence: Synthetic oligonucleotide
  Sense strand starting at position 31 of SEQ ID NO: 1562513
agaaauaaaggcuaugcuu

SEQ ID NO: 1752866 - RNA, 19 nt, Artificial Sequence
  Description of Artificial Sequence: Synthetic oligonucleotide
  Antisense strand to SEQ ID NO: 1752865
aagcauagccuuuauuucu

SEQ ID NO: 1752867 - RNA, 19 nt, Artificial Sequence
  Description of Artificial Sequence: Synthetic oligonucleotide
  Sense strand starting at position 106 of SEQ ID NO: 1562513
uuccauuguguacacagaa

SEQ ID NO: 1752868 - RNA, 19 nt, Artificial Sequence
  Description of Artificial Sequence: Synthetic oligonucleotide
  Antisense strand to SEQ ID NO: 1752867
uucuguguacacaauggaa

SEQ ID NO: 1752869 - RNA, 19 nt, Artificial Sequence
  Description of Artificial Sequence: Synthetic oligonucleotide
  Sense strand starting at position 410 of SEQ ID NO: 1562513
gccugagcgauagagugau

SEQ ID NO: 1752870 - RNA, 19 nt, Artificial Sequence
  Description of Artificial Sequence: Synthetic oligonucleotide
  Antisense strand to SEQ ID NO: 1752869
aucacucuaucgcucaggc

SEQ ID NO: 1752871 - RNA, 19 nt, Artificial Sequence
  Description of Artificial Sequence: Synthetic oligonucleotide
  Sense strand starting at position 414 of SEQ ID NO: 1562513
gagcgauagagugauacgu

SEQ ID NO: 1752872 - RNA, 19 nt, Artificial Sequence
  Description of Artificial Sequence: Synthetic oligonucleotide
  Antisense strand to SEQ ID NO: 1752871
acguaucacucuaucgcuc

SEQ ID NO: 1752873 - RNA, 19 nt, Artificial Sequence
  Description of Artificial Sequence: Synthetic oligonucleotide
  Sense strand starting at position 418 of SEQ ID NO: 1562513
gauagagugauacgucuca

SEQ ID NO: 1752874 - RNA, 19 nt, Artificial Sequence
  Description of Artificial Sequence: Synthetic oligonucleotide
  Antisense strand to SEQ ID NO: 1752873
ugagacguaucacucuauc

SEQ ID NO: 1752875 - RNA, 19 nt, Artificial Sequence
  Description of Artificial Sequence: Synthetic oligonucleotide
  Sense strand starting at position 486 of SEQ ID NO: 1562513
gcagauuugcagugacuua

SEQ ID NO: 1752876 - RNA, 19 nt, Artificial Sequence
  Description of Artificial Sequence: Synthetic oligonucleotide
  Antisense strand to SEQ ID NO: 1752875
uaagucacugcaaaucugc

SEQ ID NO: 1752877 - RNA, 19 nt, Artificial Sequence
  Description of Artificial Sequence: Synthetic oligonucleotide
  Sense strand starting at position 583 of SEQ ID NO: 1562513
agucaugagcuccaggguu

SEQ ID NO: 1752878 - RNA, 19 nt, Artificial Sequence
  Description of Artificial Sequence: Synthetic oligonucleotide
  Antisense strand to SEQ ID NO: 1752877
aacccuggagcucaugacu

SEQ ID NO: 1752879 - RNA, 19 nt, Artificial Sequence
  Description of Artificial Sequence: Synthetic oligonucleotide
  Sense strand starting at position 690 of SEQ ID NO: 1562513
ucaagucuagagugacauu

SEQ ID NO: 1752880 - RNA, 19 nt, Artificial Sequence
  Description of Artificial Sequence: Synthetic oligonucleotide
  Antisense strand to SEQ ID NO: 1752879
aaugucacucuagacuuga

SEQ ID NO: 1752881 - RNA, 19 nt, Artificial Sequence
  Description of Artificial Sequence: Synthetic oligonucleotide
  Sense strand starting at position 783 of SEQ ID NO: 1562513
acggauaauucccuaccua

SEQ ID NO: 1752882 - RNA, 19 nt, Artificial Sequence
  Description of Artificial Sequence: Synthetic oligonucleotide
  Antisense strand to SEQ ID NO: 1752881
uagguagggaauuauccgu

SEQ ID NO: 1752883 - RNA, 19 nt, Artificial Sequence
  Description of Artificial Sequence: Synthetic oligonucleotide
  Sense strand starting at position 878 of SEQ ID NO: 1562513
agagaaagcuuguccuaac

SEQ ID NO: 1752884 - RNA, 19 nt, Artificial Sequence
  Description of Artificial Sequence: Synthetic oligonucleotide
  Antisense strand to SEQ ID NO: 1752883
guuaggacaagcuuucucu

SEQ ID NO: 1752885 - RNA, 19 nt, Artificial Sequence
  Description of Artificial Sequence: Synthetic oligonucleotide
  Sense strand starting at position 879 of SEQ ID NO: 1562513
gagaaagcuuguccuaacc

SEQ ID NO: 1752886 - RNA, 19 nt, Artificial Sequence
  Description of Artificial Sequence: Synthetic oligonucleotide
  Antisense strand to SEQ ID NO: 1752885
gguuaggacaagcuuucuc

SEQ ID NO: 1752887 - RNA, 19 nt, Artificial Sequence
  Description of Artificial Sequence: Synthetic oligonucleotide
  Sense strand starting at position 988 of SEQ ID NO: 1562513
auguaauaagcuugacucu

SEQ ID NO: 1752888 - RNA, 19 nt, Artificial Sequence
  Description of Artificial Sequence: Synthetic oligonucleotide
  Antisense strand to SEQ ID NO: 1752887
agagucaagcuuauuacau

SEQ ID NO: 1752889 - RNA, 19 nt, Artificial Sequence
  Description of Artificial Sequence: Synthetic oligonucleotide
  Sense strand starting at position 989 of SEQ ID NO: 1562513
uguaauaagcuugacucua

SEQ ID NO: 1752890 - RNA, 19 nt, Artificial Sequence
  Description of Artificial Sequence: Synthetic oligonucleotide
  Antisense strand to SEQ ID NO: 1752889
uagagucaagcuuauuaca

SEQ ID NO: 1752891 - RNA, 19 nt, Artificial Sequence
  Description of Artificial Sequence: Synthetic oligonucleotide
  Sense strand starting at position 1369 of SEQ ID NO: 1562513
uuuagaaagccucaaagug

SEQ ID NO: 1752892 - RNA, 19 nt, Artificial Sequence
  Description of Artificial Sequence: Synthetic oligonucleotide
  Antisense strand to SEQ ID NO: 1752891
cacuuugaggcuuucuaaa

SEQ ID NO: 1752893 - RNA, 19 nt, Artificial Sequence
  Description of Artificial Sequence: Synthetic oligonucleotide
  Sense strand starting at position 1484 of SEQ ID NO: 1562513
auggcuuugaugcaggaaa

SEQ ID NO: 1752894 - RNA, 19 nt, Artificial Sequence
  Description of Artificial Sequence: Synthetic oligonucleotide
  Antisense strand to SEQ ID NO: 1752893
uuuccugcaucaaagccau

SEQ ID NO: 1752895 - RNA, 19 nt, Artificial Sequence
  Description of Artificial Sequence: Synthetic oligonucleotide
  Sense strand starting at position 1528 of SEQ ID NO: 1562513
auguaagucuuccuaaauu

SEQ ID NO: 1752896 - RNA, 19 nt, Artificial Sequence
  Description of Artificial Sequence: Synthetic oligonucleotide
  Antisense strand to SEQ ID NO: 1752895
aauuuaggaagacuuacau

SEQ ID NO: 1752897 - RNA, 19 nt, Artificial Sequence
  Description of Artificial Sequence: Synthetic oligonucleotide
  Sense strand starting at position 1586 of SEQ ID NO: 1562513
cuccaucaucuaggugauu

SEQ ID NO: 1752898 - RNA, 19 nt, Artificial Sequence
  Description of Artificial Sequence: Synthetic oligonucleotide
  Antisense strand to SEQ ID NO: 1752897
aaucaccuagaugauggag

SEQ ID NO: 1752899 - RNA, 19 nt, Artificial Sequence
  Description of Artificial Sequence: Synthetic oligonucleotide
  Sense strand starting at position 1737 of SEQ ID NO: 1562513
ugugcuucccaggaauuga

SEQ ID NO: 1752900 - RNA, 19 nt, Artificial Sequence
  Description of Artificial Sequence: Synthetic oligonucleotide
  Antisense strand to SEQ ID NO: 1752899
ucaauuccugggaagcaca

SEQ ID NO: 1752901 - RNA, 19 nt, Artificial Sequence
  Description of Artificial Sequence: Synthetic oligonucleotide
  Sense strand starting at position 1778 of SEQ ID NO: 1562513
ugacucaaguuaccuaaga

SEQ ID NO: 1752902 - RNA, 19 nt, Artificial Sequence
  Description of Artificial Sequence: Synthetic oligonucleotide
  Antisense strand to SEQ ID NO: 1752901
ucuuagguaacuugaguca

SEQ ID NO: 1752903 - RNA, 19 nt, Artificial Sequence
  Description of Artificial Sequence: Synthetic oligonucleotide
  Sense strand starting at position 1786 of SEQ ID NO: 1562513
guuaccuaagacugacaga

SEQ ID NO: 1752904 - RNA, 19 nt, Artificial Sequence
  Description of Artificial Sequence: Synthetic oligonucleotide
  Antisense strand to SEQ ID NO: 1752903
ucugucagucuuagguaac

SEQ ID NO: 1752905 - RNA, 19 nt, Artificial Sequence
  Description of Artificial Sequence: Synthetic oligonucleotide
  Sense strand starting at position 1903 of SEQ ID NO: 1562513
gcaggaggaucguuuacag

SEQ ID NO: 1752906 - RNA, 19 nt, Artificial Sequence
  Description of Artificial Sequence: Synthetic oligonucleotide
  Antisense strand to SEQ ID NO: 1752905
cuguaaacgauccuccugc

SEQ ID NO: 1752907 - RNA, 19 nt, Artificial Sequence
  Description of Artificial Sequence: Synthetic oligonucleotide
  Sense strand starting at position 1915 of SEQ ID NO: 1562513
uuuacagacgucuacacaa

SEQ ID NO: 1752908 - RNA, 19 nt, Artificial Sequence
  Description of Artificial Sequence: Synthetic oligonucleotide
  Antisense strand to SEQ ID NO: 1752907
uuguguagacgucuguaaa

SEQ ID NO: 1752909 - RNA, 19 nt, Artificial Sequence
  Description of Artificial Sequence: Synthetic oligonucleotide
  Sense strand starting at position 2781 of SEQ ID NO: 1562513
gaaugugagcuugagccuu

SEQ ID NO: 1752910 - RNA, 19 nt, Artificial Sequence
  Description of Artificial Sequence: Synthetic oligonucleotide
  Antisense strand to SEQ ID NO: 1752909
aaggcucaagcucacauuc

SEQ ID NO: 1752911 - RNA, 19 nt, Artificial Sequence
  Description of Artificial Sequence: Synthetic oligonucleotide
  Sense strand starting at position 2845 of SEQ ID NO: 1562513
guacucagagccuaucuga

SEQ ID NO: 1752912 - RNA, 19 nt, Artificial Sequence
  Description of Artificial Sequence: Synthetic oligonucleotide
  Antisense strand to SEQ ID NO: 1752911
ucagauaggcucugaguac

SEQ ID NO: 1752913 - RNA, 19 nt, Artificial Sequence
  Description of Artificial Sequence: Synthetic oligonucleotide
  Sense strand starting at position 2848 of SEQ ID NO: 1562513
cucagagccuaucugaauu

SEQ ID NO: 1752914 - RNA, 19 nt, Artificial Sequence
  Description of Artificial Sequence: Synthetic oligonucleotide
  Antisense strand to SEQ ID NO: 1752913
aauucagauaggcucugag

SEQ ID NO: 1752915 - RNA, 19 nt, Artificial Sequence
  Description of Artificial Sequence: Synthetic oligonucleotide
  Sense strand starting at position 3041 of SEQ ID NO: 1562513
ccaucauaguugcuggaaa

SEQ ID NO: 1752916 - RNA, 19 nt, Artificial Sequence
  Description of Artificial Sequence: Synthetic oligonucleotide
  Antisense strand to SEQ ID NO: 1752915
uuuccagcaacuaugaugg

SEQ ID NO: 1752917 - RNA, 19 nt, Artificial Sequence
  Description of Artificial Sequence: Synthetic oligonucleotide
  Sense strand starting at position 3043 of SEQ ID NO: 1562513
aucauaguugcuggaaauu

SEQ ID NO: 1752918 - RNA, 19 nt, Artificial Sequence
  Description of Artificial Sequence: Synthetic oligonucleotide
  Antisense strand to SEQ ID NO: 1752917
aauuuccagcaacuaugau

SEQ ID NO: 1752919 - RNA, 19 nt, Artificial Sequence
  Description of Artificial Sequence: Synthetic oligonucleotide
  Sense strand starting at position 3077 of SEQ ID NO: 1562513
ccgagucuugcauccuguu

SEQ ID NO: 1752920 - RNA, 19 nt, Artificial Sequence
  Description of Artificial Sequence: Synthetic oligonucleotide
  Antisense strand to SEQ ID NO: 1752919
aacaggaugcaagacucgg

SEQ ID NO: 1752921 - RNA, 19 nt, Artificial Sequence
  Description of Artificial Sequence: Synthetic oligonucleotide
  Sense strand starting at position 3078 of SEQ ID NO: 1562513
cgagucuugcauccuguuu

SEQ ID NO: 1752922 - RNA, 19 nt, Artificial Sequence
  Description of Artificial Sequence: Synthetic oligonucleotide
  Antisense strand to SEQ ID NO: 1752921
aaacaggaugcaagacucg

SEQ ID NO: 1752923 - RNA, 19 nt, Artificial Sequence
  Description of Artificial Sequence: Synthetic oligonucleotide
  Sense strand starting at position 3254 of SEQ ID NO: 1562513
cuaauugguuucccugagu

SEQ ID NO: 1752924 - RNA, 19 nt, Artificial Sequence
  Description of Artificial Sequence: Synthetic oligonucleotide
  Antisense strand to SEQ ID NO: 1752923
acucagggaaaccaauuag

SEQ ID NO: 1752925 - RNA, 19 nt, Artificial Sequence
  Description of Artificial Sequence: Synthetic oligonucleotide
  Sense strand starting at position 3319 of SEQ ID NO: 1562513
guucucuguuauuucguau

SEQ ID NO: 1752926 - RNA, 19 nt, Artificial Sequence
  Description of Artificial Sequence: Synthetic oligonucleotide
  Antisense strand to SEQ ID NO: 1752925
auacgaaauaacagagaac

SEQ ID NO: 1752927 - RNA, 19 nt, Artificial Sequence
  Description of Artificial Sequence: Synthetic oligonucleotide
  Sense strand starting at position 3322 of SEQ ID NO: 1562513
cucuguuauuucguaugag

SEQ ID NO: 1752928 - RNA, 19 nt, Artificial Sequence
  Description of Artificial Sequence: Synthetic oligonucleotide
  Antisense strand to SEQ ID NO: 1752927
cucauacgaaauaacagag

SEQ ID NO: 1752929 - RNA, 19 nt, Artificial Sequence
  Description of Artificial Sequence: Synthetic oligonucleotide
  Sense strand starting at position 3325 of SEQ ID NO: 1562513
uguuauuucguaugaguaa

SEQ ID NO: 1752930 - RNA, 19 nt, Artificial Sequence
  Description of Artificial Sequence: Synthetic oligonucleotide
  Antisense strand to SEQ ID NO: 1752929
uuacucauacgaaauaaca

SEQ ID NO: 1752931 - RNA, 19 nt, Artificial Sequence
  Description of Artificial Sequence: Synthetic oligonucleotide
  Sense strand starting at position 3328 of SEQ ID NO: 1562513
uauuucguaugaguaaguu

SEQ ID NO: 1752932 - RNA, 19 nt, Artificial Sequence
  Description of Artificial Sequence: Synthetic oligonucleotide
  Antisense strand to SEQ ID NO: 1752931
aacuuacucauacgaaaua

SEQ ID NO: 1752933 - RNA, 19 nt, Artificial Sequence
  Description of Artificial Sequence: Synthetic oligonucleotide
  Sense strand starting at position 3511 of SEQ ID NO: 1562513
uagcuuuguuagguauaaa

SEQ ID NO: 1752934 - RNA, 19 nt, Artificial Sequence
  Description of Artificial Sequence: Synthetic oligonucleotide
  Antisense strand to SEQ ID NO: 1752933
uuuauaccuaacaaagcua

SEQ ID NO: 1752935 - RNA, 19 nt, Artificial Sequence
  Description of Artificial Sequence: Synthetic oligonucleotide
  Sense strand starting at position 3551 of SEQ ID NO: 1562513
gaacuauggcaagagcuuu

SEQ ID NO: 1752936 - RNA, 19 nt, Artificial Sequence
  Description of Artificial Sequence: Synthetic oligonucleotide
  Antisense strand to SEQ ID NO: 1752935
aaagcucuugccauaguuc

SEQ ID NO: 1752937 - RNA, 19 nt, Artificial Sequence
  Description of Artificial Sequence: Synthetic oligonucleotide
  Sense strand starting at position 3605 of SEQ ID NO: 1562513
gccuucuucccagcgcaaa

SEQ ID NO: 1752938 - RNA, 19 nt, Artificial Sequence
  Description of Artificial Sequence: Synthetic oligonucleotide
  Antisense strand to SEQ ID NO: 1752937
uuugcgcugggaagaaggc

SEQ ID NO: 1752939 - RNA, 19 nt, Artificial Sequence
  Description of Artificial Sequence: Synthetic oligonucleotide
  Sense strand starting at position 3617 of SEQ ID NO: 1562513
gcgcaaagacaggaaucau

SEQ ID NO: 1752940 - RNA, 19 nt, Artificial Sequence
  Description of Artificial Sequence: Synthetic oligonucleotide
  Antisense strand to SEQ ID NO: 1752939
augauuccugucuuugcgc

SEQ ID NO: 1752941 - RNA, 19 nt, Artificial Sequence
  Description of Artificial Sequence: Synthetic oligonucleotide
  Sense strand starting at position 3627 of SEQ ID NO: 1562513
aggaaucauguaggaguuu

SEQ ID NO: 1752942 - RNA, 19 nt, Artificial Sequence
  Description of Artificial Sequence: Synthetic oligonucleotide
  Antisense strand to SEQ ID NO: 1752941
aaacuccuacaugauuccu

SEQ ID NO: 1752943 - RNA, 19 nt, Artificial Sequence
  Description of Artificial Sequence: Synthetic oligonucleotide
  Sense strand starting at position 3702 of SEQ ID NO: 1562513
gacaaaugaucauccguau

SEQ ID NO: 1752944 - RNA, 19 nt, Artificial Sequence
  Description of Artificial Sequence: Synthetic oligonucleotide
  Antisense strand to SEQ ID NO: 1752943
auacggaugaucauuuguc

SEQ ID NO: 1752945 - RNA, 19 nt, Artificial Sequence
  Description of Artificial Sequence: Synthetic oligonucleotide
  Sense strand starting at position 104 of SEQ ID NO: 1562514
gaggcuuaacaaggugaaa

SEQ ID NO: 1752946 - RNA, 19 nt, Artificial Sequence
  Description of Artificial Sequence: Synthetic oligonucleotide
  Antisense strand to SEQ ID NO: 1752945
uuucaccuuguuaagccuc

SEQ ID NO: 1752947 - RNA, 19 nt, Artificial Sequence
  Description of Artificial Sequence: Synthetic oligonucleotide
  Sense strand starting at position 106 of SEQ ID NO: 1562514
ggcuuaacaaggugaaaua

SEQ ID NO: 1752948 - RNA, 19 nt, Artificial Sequence
  Description of Artificial Sequence: Synthetic oligonucleotide
  Antisense strand to SEQ ID NO: 1752947
uauuucaccuuguuaagcc

SEQ ID NO: 1752949 - RNA, 19 nt, Artificial Sequence
  Description of Artificial Sequence: Synthetic oligonucleotide
  Sense strand starting at position 134 of SEQ ID NO: 1562514
aggucauacaguuacaagu

SEQ ID NO: 1752950 - RNA, 19 nt, Artificial Sequence
  Description of Artificial Sequence: Synthetic oligonucleotide
  Antisense strand to SEQ ID NO: 1752949
acuuguaacuguaugaccu

SEQ ID NO: 1752951 - RNA, 19 nt, Artificial Sequence
  Description of Artificial Sequence: Synthetic oligonucleotide
  Sense strand starting at position 242 of SEQ ID NO: 1562514
acuaaauuaugggcccaaa

SEQ ID NO: 1752952 - RNA, 19 nt, Artificial Sequence
  Description of Artificial Sequence: Synthetic oligonucleotide
  Antisense strand to SEQ ID NO: 1752951
uuugggcccauaauuuagu

SEQ ID NO: 1752953 - RNA, 19 nt, Artificial Sequence
  Description of Artificial Sequence: Synthetic oligonucleotide
  Sense strand starting at position 305 of SEQ ID NO: 1562514
cuuauugauugucuucuga

SEQ ID NO: 1752954 - RNA, 19 nt, Artificial Sequence
  Description of Artificial Sequence: Synthetic oligonucleotide
  Antisense strand to SEQ ID NO: 1752953
ucagaagacaaucaauaag

SEQ ID NO: 1752955 - RNA, 19 nt, Artificial Sequence
  Description of Artificial Sequence: Synthetic oligonucleotide
  Sense strand starting at position 307 of SEQ ID NO: 1562514
uauugauugucuucugaag

SEQ ID NO: 1752956 - RNA, 19 nt, Artificial Sequence
  Description of Artificial Sequence: Synthetic oligonucleotide
  Antisense strand to SEQ ID NO: 1752955
cuucagaagacaaucaaua

SEQ ID NO: 1752957 - RNA, 19 nt, Artificial Sequence
  Description of Artificial Sequence: Synthetic oligonucleotide
  Sense strand starting at position 364 of SEQ ID NO: 1562514
gcugguaagagguaaaguu

SEQ ID NO: 1752958 - RNA, 19 nt, Artificial Sequence
  Description of Artificial Sequence: Synthetic oligonucleotide
  Antisense strand to SEQ ID NO: 1752957
aacuuuaccucuuaccagc

SEQ ID NO: 1752959 - RNA, 19 nt, Artificial Sequence
  Description of Artificial Sequence: Synthetic oligonucleotide
  Sense strand starting at position 565 of SEQ ID NO: 1562514
ucggcuaauuuguucuaga

SEQ ID NO: 1752960 - RNA, 19 nt, Artificial Sequence
  Description of Artificial Sequence: Synthetic oligonucleotide
  Antisense strand to SEQ ID NO: 1752959
ucuagaacaaauuagccga

SEQ ID NO: 1752961 - RNA, 19 nt, Artificial Sequence
  Description of Artificial Sequence: Synthetic oligonucleotide
  Sense strand starting at position 566 of SEQ ID NO: 1562514
cggcuaauuuguucuagag

SEQ ID NO: 1752962 - RNA, 19 nt, Artificial Sequence
  Description of Artificial Sequence: Synthetic oligonucleotide
  Antisense strand to SEQ ID NO: 1752961
cucuagaacaaauuagccg

SEQ ID NO: 1752963 - RNA, 19 nt, Artificial Sequence
  Description of Artificial Sequence: Synthetic oligonucleotide
  Sense strand starting at position 568 of SEQ ID NO: 1562514
gcuaauuuguucuagagau

SEQ ID NO: 1752964 - RNA, 19 nt, Artificial Sequence
  Description of Artificial Sequence: Synthetic oligonucleotide
  Antisense strand to SEQ ID NO: 1752963
aucucuagaacaaauuagc

SEQ ID NO: 1752965 - RNA, 19 nt, Artificial Sequence
  Description of Artificial Sequence: Synthetic oligonucleotide
  Sense strand starting at position 846 of SEQ ID NO: 1562514
ucucuaacucuuggguuua

SEQ ID NO: 1752966 - RNA, 19 nt, Artificial Sequence
  Description of Artificial Sequence: Synthetic oligonucleotide
  Antisense strand to SEQ ID NO: 1752965
uaaacccaagaguuagaga

SEQ ID NO: 1752967 - RNA, 19 nt, Artificial Sequence
  Description of Artificial Sequence: Synthetic oligonucleotide
  Sense strand starting at position 848 of SEQ ID NO: 1562514
ucuaacucuuggguuuaau

SEQ ID NO: 1752968 - RNA, 19 nt, Artificial Sequence
  Description of Artificial Sequence: Synthetic oligonucleotide
  Antisense strand to SEQ ID NO: 1752967
auuaaacccaagaguuaga

SEQ ID NO: 1752969 - RNA, 19 nt, Artificial Sequence
  Description of Artificial Sequence: Synthetic oligonucleotide
  Sense strand starting at position 916 of SEQ ID NO: 1562514
gucgaaauaucaguuccag

SEQ ID NO: 1752970 - RNA, 19 nt, Artificial Sequence
  Description of Artificial Sequence: Synthetic oligonucleotide
  Antisense strand to SEQ ID NO: 1752969
cuggaacugauauuucgac

SEQ ID NO: 1752971 - RNA, 19 nt, Artificial Sequence
  Description of Artificial Sequence: Synthetic oligonucleotide
  Sense strand starting at position 1103 of SEQ ID NO: 1562514
uuaugaaggucggcuuuca

SEQ ID NO: 1752972 - RNA, 19 nt, Artificial Sequence
  Description of Artificial Sequence: Synthetic oligonucleotide
  Antisense strand to SEQ ID NO: 1752971
ugaaagccgaccuucauaa

SEQ ID NO: 1752973 - RNA, 19 nt, Artificial Sequence
  Description of Artificial Sequence: Synthetic oligonucleotide
  Sense strand starting at position 1140 of SEQ ID NO: 1562514
ucugaaugccuggaguguu

SEQ ID NO: 1752974 - RNA, 19 nt, Artificial Sequence
  Description of Artificial Sequence: Synthetic oligonucleotide
  Antisense strand to SEQ ID NO: 1752973
aacacuccaggcauucaga

SEQ ID NO: 1752975 - RNA, 19 nt, Artificial Sequence
  Description of Artificial Sequence: Synthetic oligonucleotide
  Sense strand starting at position 1143 of SEQ ID NO: 1562514
gaaugccuggaguguuuau

SEQ ID NO: 1752976 - RNA, 19 nt, Artificial Sequence
  Description of Artificial Sequence: Synthetic oligonucleotide
  Antisense strand to SEQ ID NO: 1752975
auaaacacuccaggcauuc

SEQ ID NO: 1752977 - RNA, 19 nt, Artificial Sequence
  Description of Artificial Sequence: Synthetic oligonucleotide
  Sense strand starting at position 1158 of SEQ ID NO: 1562514
uuauaacuguggccugaga

SEQ ID NO: 1752978 - RNA, 19 nt, Artificial Sequence
  Description of Artificial Sequence: Synthetic oligonucleotide
  Antisense strand to SEQ ID NO: 1752977
ucucaggccacaguuauaa

SEQ ID NO: 1752979 - RNA, 19 nt, Artificial Sequence
  Description of Artificial Sequence: Synthetic oligonucleotide
  Sense strand starting at position 1160 of SEQ ID NO: 1562514
auaacuguggccugagaga

SEQ ID NO: 1752980 - RNA, 19 nt, Artificial Sequence
  Description of Artificial Sequence: Synthetic oligonucleotide
  Antisense strand to SEQ ID NO: 1752979
ucucucaggccacaguuau

SEQ ID NO: 1752981 - RNA, 19 nt, Artificial Sequence
  Description of Artificial Sequence: Synthetic oligonucleotide
  Sense strand starting at position 1251 of SEQ ID NO: 1562514
augguuacaucauuacaug

SEQ ID NO: 1752982 - RNA, 19 nt, Artificial Sequence
  Description of Artificial Sequence: Synthetic oligonucleotide
  Antisense strand to SEQ ID NO: 1752981
cauguaaugauguaaccau

SEQ ID NO: 1752983 - RNA, 19 nt, Artificial Sequence
  Description of Artificial Sequence: Synthetic oligonucleotide
  Sense strand starting at position 1371 of SEQ ID NO: 1562514
uaguuuaagccuugcagaa

SEQ ID NO: 1752984 - RNA, 19 nt, Artificial Sequence
  Description of Artificial Sequence: Synthetic oligonucleotide
  Antisense strand to SEQ ID NO: 1752983
uucugcaaggcuuaaacua

SEQ ID NO: 1752985 - RNA, 19 nt, Artificial Sequence
  Description of Artificial Sequence: Synthetic oligonucleotide
  Sense strand starting at position 1375 of SEQ ID NO: 1562514
uuaagccuugcagaaugaa

SEQ ID NO: 1752986 - RNA, 19 nt, Artificial Sequence
  Description of Artificial Sequence: Synthetic oligonucleotide
  Antisense strand to SEQ ID NO: 1752985
uucauucugcaaggcuuaa

SEQ ID NO: 1752987 - RNA, 19 nt, Artificial Sequence
  Description of Artificial Sequence: Synthetic oligonucleotide
  Sense strand starting at position 1584 of SEQ ID NO: 1562514
cgcacauacuuauugcaga

SEQ ID NO: 1752988 - RNA, 19 nt, Artificial Sequence
  Description of Artificial Sequence: Synthetic oligonucleotide
  Antisense strand to SEQ ID NO: 1752987
ucugcaauaaguaugugcg

SEQ ID NO: 1752989 - RNA, 19 nt, Artificial Sequence
  Description of Artificial Sequence: Synthetic oligonucleotide
  Sense strand starting at position 2100 of SEQ ID NO: 1562514
cggagaccugugcagagau

SEQ ID NO: 1752990 - RNA, 19 nt, Artificial Sequence
  Description of Artificial Sequence: Synthetic oligonucleotide
  Antisense strand to SEQ ID NO: 1752989
aucucugcacaggucuccg

SEQ ID NO: 1752991 - RNA, 19 nt, Artificial Sequence
  Description of Artificial Sequence: Synthetic oligonucleotide
  Sense strand starting at position 2230 of SEQ ID NO: 1562514
ggaggaggcuggguuuaaa

SEQ ID NO: 1752992 - RNA, 19 nt, Artificial Sequence
  Description of Artificial Sequence: Synthetic oligonucleotide
  Antisense strand to SEQ ID NO: 1752991
uuuaaacccagccuccucc

SEQ ID NO: 1752993 - RNA, 19 nt, Artificial Sequence
  Description of Artificial Sequence: Synthetic oligonucleotide
  Sense strand starting at position 2290 of SEQ ID NO: 1562514
cacagaggccuuuaaguaa

SEQ ID NO: 1752994 - RNA, 19 nt, Artificial Sequence
  Description of Artificial Sequence: Synthetic oligonucleotide
  Antisense strand to SEQ ID NO: 1752993
uuacuuaaaggccucugug

SEQ ID NO: 1752995 - RNA, 19 nt, Artificial Sequence
  Description of Artificial Sequence: Synthetic oligonucleotide
  Sense strand starting at position 2293 of SEQ ID NO: 1562514
agaggccuuuaaguaaaga

SEQ ID NO: 1752996 - RNA, 19 nt, Artificial Sequence
  Description of Artificial Sequence: Synthetic oligonucleotide
  Antisense strand to SEQ ID NO: 1752995
ucuuuacuuaaaggccucu

SEQ ID NO: 1752997 - RNA, 19 nt, Artificial Sequence
  Description of Artificial Sequence: Synthetic oligonucleotide
  Sense strand starting at position 2372 of SEQ ID NO: 1562514
uagaaaugccuuuaagagu

SEQ ID NO: 1752998 - RNA, 19 nt, Artificial Sequence
  Description of Artificial Sequence: Synthetic oligonucleotide
  Antisense strand to SEQ ID NO: 1752997
acucuuaaaggcauuucua

SEQ ID NO: 1752999 - RNA, 19 nt, Artificial Sequence
  Description of Artificial Sequence: Synthetic oligonucleotide
  Sense strand starting at position 2626 of SEQ ID NO: 1562514
auaacaggcucuuuguuua

SEQ ID NO: 1753000 - RNA, 19 nt, Artificial Sequence
  Description of Artificial Sequence: Synthetic oligonucleotide
  Antisense strand to SEQ ID NO: 1752999
uaaacaaagagccuguuau

SEQ ID NO: 1753001 - RNA, 19 nt, Artificial Sequence
  Description of Artificial Sequence: Synthetic oligonucleotide
  Sense strand starting at position 2906 of SEQ ID NO: 1562514
cuguauuuccagcgacuug

SEQ ID NO: 1753002 - RNA, 19 nt, Artificial Sequence
  Description of Artificial Sequence: Synthetic oligonucleotide
  Antisense strand to SEQ ID NO: 1753001
caagucgcuggaaauacag

SEQ ID NO: 1753003 - RNA, 19 nt, Artificial Sequence
  Description of Artificial Sequence: Synthetic oligonucleotide
  Sense strand starting at position 3211 of SEQ ID NO: 1562514
uuagauaacugagucucuu

SEQ ID NO: 1753004 - RNA, 19 nt, Artificial Sequence
  Description of Artificial Sequence: Synthetic oligonucleotide
  Antisense strand to SEQ ID NO: 1753003
aagagacucaguuaucuaa

SEQ ID NO: 1753005 - RNA, 19 nt, Artificial Sequence
  Description of Artificial Sequence: Synthetic oligonucleotide
  Sense strand starting at position 3440 of SEQ ID NO: 1562514
aucccaguuccuggaauau

SEQ ID NO: 1753006 - RNA, 19 nt, Artificial Sequence
  Description of Artificial Sequence: Synthetic oligonucleotide
  Antisense strand to SEQ ID NO: 1753005
auauuccaggaacugggau

SEQ ID NO: 1753007 - RNA, 19 nt, Artificial Sequence
  Description of Artificial Sequence: Synthetic oligonucleotide
  Sense strand starting at position 3449 of SEQ ID NO: 1562514
ccuggaauaucgcuuaaau

SEQ ID NO: 1753008 - RNA, 19 nt, Artificial Sequence
  Description of Artificial Sequence: Synthetic oligonucleotide
  Antisense strand to SEQ ID NO: 1753007
auuuaagcgauauuccagg

SEQ ID NO: 1753009 - RNA, 19 nt, Artificial Sequence
  Description of Artificial Sequence: Synthetic oligonucleotide
  Sense strand starting at position 3451 of SEQ ID NO: 1562514
uggaauaucgcuuaaaugc

SEQ ID NO: 1753010 - RNA, 19 nt, Artificial Sequence
  Description of Artificial Sequence: Synthetic oligonucleotide
  Antisense strand to SEQ ID NO: 1753009
gcauuuaagcgauauucca

SEQ ID NO: 1753011 - RNA, 19 nt, Artificial Sequence
  Description of Artificial Sequence: Synthetic oligonucleotide
  Sense strand starting at position 3783 of SEQ ID NO: 1562514
uucuaaugacuuuguaagu

SEQ ID NO: 1753012 - RNA, 19 nt, Artificial Sequence
  Description of Artificial Sequence: Synthetic oligonucleotide
  Antisense strand to SEQ ID NO: 1753011
acuuacaaagucauuagaa

SEQ ID NO: 1753013 - RNA, 19 nt, Artificial Sequence
  Description of Artificial Sequence: Synthetic oligonucleotide
  Sense strand starting at position 3784 of SEQ ID NO: 1562514
ucuaaugacuuuguaaguu

SEQ ID NO: 1753014 - RNA, 19 nt, Artificial Sequence
  Description of Artificial Sequence: Synthetic oligonucleotide
  Antisense strand to SEQ ID NO: 1753013
aacuuacaaagucauuaga

SEQ ID NO: 1753015 - RNA, 19 nt, Artificial Sequence
  Description of Artificial Sequence: Synthetic oligonucleotide
  Sense strand starting at position 3788 of SEQ ID NO: 1562514
augacuuuguaaguuagua

SEQ ID NO: 1753016 - RNA, 19 nt, Artificial Sequence
  Description of Artificial Sequence: Synthetic oligonucleotide
  Antisense strand to SEQ ID NO: 1753015
uacuaacuuacaaagucau

SEQ ID NO: 1753017 - RNA, 19 nt, Artificial Sequence
  Description of Artificial Sequence: Synthetic oligonucleotide
  Sense strand starting at position 3821 of SEQ ID NO: 1562514
uggauucucaggugcucua

SEQ ID NO: 1753018 - RNA, 19 nt, Artificial Sequence
  Description of Artificial Sequence: Synthetic oligonucleotide
  Antisense strand to SEQ ID NO: 1753017
uagagcaccugagaaucca

SEQ ID NO: 1753019 - RNA, 19 nt, Artificial Sequence
  Description of Artificial Sequence: Synthetic oligonucleotide
  Sense strand starting at position 3828 of SEQ ID NO: 1562514
ucaggugcucuagagaaua

SEQ ID NO: 1753020 - RNA, 19 nt, Artificial Sequence
  Description of Artificial Sequence: Synthetic oligonucleotide
  Antisense strand to SEQ ID NO: 1753019
uauucucuagagcaccuga

SEQ ID NO: 1753021 - RNA, 19 nt, Artificial Sequence
  Description of Artificial Sequence: Synthetic oligonucleotide
  Sense strand starting at position 3847 of SEQ ID NO: 1562514
cgcaucucuugauuauauc

SEQ ID NO: 1753022 - RNA, 19 nt, Artificial Sequence
  Description of Artificial Sequence: Synthetic oligonucleotide
  Antisense strand to SEQ ID NO: 1753021
gauauaaucaagagaugcg

SEQ ID NO: 1753023 - RNA, 19 nt, Artificial Sequence
  Description of Artificial Sequence: Synthetic oligonucleotide
  Sense strand starting at position 3982 of SEQ ID NO: 1562514
gcucuaggugcuuugcaua

SEQ ID NO: 1753024 - RNA, 19 nt, Artificial Sequence
  Description of Artificial Sequence: Synthetic oligonucleotide
  Antisense strand to SEQ ID NO: 1753023
uaugcaaagcaccuagagc

SEQ ID NO: 1753025 - RNA, 19 nt, Artificial Sequence
  Description of Artificial Sequence: Synthetic oligonucleotide
  Sense strand starting at position 33 of SEQ ID NO: 1562515
ggaucagguuaggauacua

SEQ ID NO: 1753026 - RNA, 19 nt, Artificial Sequence
  Description of Artificial Sequence: Synthetic oligonucleotide
  Antisense strand to SEQ ID NO: 1753025
uaguauccuaaccugaucc

SEQ ID NO: 1753027 - RNA, 19 nt, Artificial Sequence
  Description of Artificial Sequence: Synthetic oligonucleotide
  Sense strand starting at position 38 of SEQ ID NO: 1562515
agguuaggauacuaaauaa

SEQ ID NO: 1753028 - RNA, 19 nt, Artificial Sequence
  Description of Artificial Sequence: Synthetic oligonucleotide
  Antisense strand to SEQ ID NO: 1753027
uuauuuaguauccuaaccu

SEQ ID NO: 1753029 - RNA, 19 nt, Artificial Sequence
  Description of Artificial Sequence: Synthetic oligonucleotide
  Sense strand starting at position 210 of SEQ ID NO: 1562515
gcagacuuaugcuguugga

SEQ ID NO: 1753030 - RNA, 19 nt, Artificial Sequence
  Description of Artificial Sequence: Synthetic oligonucleotide
  Antisense strand to SEQ ID NO: 1753029
uccaacagcauaagucugc

SEQ ID NO: 1753031 - RNA, 19 nt, Artificial Sequence
  Description of Artificial Sequence: Synthetic oligonucleotide
  Sense strand starting at position 213 of SEQ ID NO: 1562515
gacuuaugcuguuggaaau

SEQ ID NO: 1753032 - RNA, 19 nt, Artificial Sequence
  Description of Artificial Sequence: Synthetic oligonucleotide
  Antisense strand to SEQ ID NO: 1753031
auuuccaacagcauaaguc

SEQ ID NO: 1753033 - RNA, 19 nt, Artificial Sequence
  Description of Artificial Sequence: Synthetic oligonucleotide
  Sense strand starting at position 214 of SEQ ID NO: 1562515
acuuaugcuguuggaaaua

SEQ ID NO: 1753034 - RNA, 19 nt, Artificial Sequence
  Description of Artificial Sequence: Synthetic oligonucleotide
  Antisense strand to SEQ ID NO: 1753033
uauuuccaacagcauaagu

SEQ ID NO: 1753035 - RNA, 19 nt, Artificial Sequence
  Description of Artificial Sequence: Synthetic oligonucleotide
  Sense strand starting at position 285 of SEQ ID NO: 1562515
cugguaaagcuuuaugaug

SEQ ID NO: 1753036 - RNA, 19 nt, Artificial Sequence
  Description of Artificial Sequence: Synthetic oligonucleotide
  Antisense strand to SEQ ID NO: 1753035
caucauaaagcuuuaccag

SEQ ID NO: 1753037 - RNA, 19 nt, Artificial Sequence
  Description of Artificial Sequence: Synthetic oligonucleotide
  Sense strand starting at position 287 of SEQ ID NO: 1562515
gguaaagcuuuaugaugug

SEQ ID NO: 1753038 - RNA, 19 nt, Artificial Sequence
  Description of Artificial Sequence: Synthetic oligonucleotide
  Antisense strand to SEQ ID NO: 1753037
cacaucauaaagcuuuacc

SEQ ID NO: 1753039 - RNA, 19 nt, Artificial Sequence
  Description of Artificial Sequence: Synthetic oligonucleotide
  Sense strand starting at position 292 of SEQ ID NO: 1562515
agcuuuaugauguguggau

SEQ ID NO: 1753040 - RNA, 19 nt, Artificial Sequence
  Description of Artificial Sequence: Synthetic oligonucleotide
  Antisense strand to SEQ ID NO: 1753039
auccacacaucauaaagcu

SEQ ID NO: 1753041 - RNA, 19 nt, Artificial Sequence
  Description of Artificial Sequence: Synthetic oligonucleotide
  Sense strand starting at position 293 of SEQ ID NO: 1562515
gcuuuaugauguguggaug

SEQ ID NO: 1753042 - RNA, 19 nt, Artificial Sequence
  Description of Artificial Sequence: Synthetic oligonucleotide
  Antisense strand to SEQ ID NO: 1753041
cauccacacaucauaaagc

SEQ ID NO: 1753043 - RNA, 19 nt, Artificial Sequence
  Description of Artificial Sequence: Synthetic oligonucleotide
  Sense strand starting at position 296 of SEQ ID NO: 1562515
uuaugauguguggaugguu

SEQ ID NO: 1753044 - RNA, 19 nt, Artificial Sequence
  Description of Artificial Sequence: Synthetic oligonucleotide
  Antisense strand to SEQ ID NO: 1753043
aaccauccacacaucauaa

SEQ ID NO: 1753045 - RNA, 19 nt, Artificial Sequence
  Description of Artificial Sequence: Synthetic oligonucleotide
  Sense strand starting at position 301 of SEQ ID NO: 1562515
auguguggaugguucagaa

SEQ ID NO: 1753046 - RNA, 19 nt, Artificial Sequence
  Description of Artificial Sequence: Synthetic oligonucleotide
  Antisense strand to SEQ ID NO: 1753045
uucugaaccauccacacau

SEQ ID NO: 1753047 - RNA, 19 nt, Artificial Sequence
  Description of Artificial Sequence: Synthetic oligonucleotide
  Sense strand starting at position 305 of SEQ ID NO: 1562515
guggaugguucagaagcuu

SEQ ID NO: 1753048 - RNA, 19 nt, Artificial Sequence
  Description of Artificial Sequence: Synthetic oligonucleotide
  Antisense strand to SEQ ID NO: 1753047
aagcuucugaaccauccac

SEQ ID NO: 1753049 - RNA, 19 nt, Artificial Sequence
  Description of Artificial Sequence: Synthetic oligonucleotide
  Sense strand starting at position 328 of SEQ ID NO: 1562515
agcugaaccucacgauaga

SEQ ID NO: 1753050 - RNA, 19 nt, Artificial Sequence
  Description of Artificial Sequence: Synthetic oligonucleotide
  Antisense strand to SEQ ID NO: 1753049
ucuaucgugagguucagcu

SEQ ID NO: 1753051 - RNA, 19 nt, Artificial Sequence
  Description of Artificial Sequence: Synthetic oligonucleotide
  Sense strand starting at position 329 of SEQ ID NO: 1562515
gcugaaccucacgauagau

SEQ ID NO: 1753052 - RNA, 19 nt, Artificial Sequence
  Description of Artificial Sequence: Synthetic oligonucleotide
  Antisense strand to SEQ ID NO: 1753051
aucuaucgugagguucagc

SEQ ID NO: 1753053 - RNA, 19 nt, Artificial Sequence
  Description of Artificial Sequence: Synthetic oligonucleotide
  Sense strand starting at position 360 of SEQ ID NO: 1562515
gcuugaaucuaaucguguu

SEQ ID NO: 1753054 - RNA, 19 nt, Artificial Sequence
  Description of Artificial Sequence: Synthetic oligonucleotide
  Antisense strand to SEQ ID NO: 1753053
aacacgauuagauucaagc

SEQ ID NO: 1753055 - RNA, 19 nt, Artificial Sequence
  Description of Artificial Sequence: Synthetic oligonucleotide
  Sense strand starting at position 420 of SEQ ID NO: 1562515
aaaggauauucuguggguu

SEQ ID NO: 1753056 - RNA, 19 nt, Artificial Sequence
  Description of Artificial Sequence: Synthetic oligonucleotide
  Antisense strand to SEQ ID NO: 1753055
aacccacagaauauccuuu

SEQ ID NO: 1753057 - RNA, 19 nt, Artificial Sequence
  Description of Artificial Sequence: Synthetic oligonucleotide
  Sense strand starting at position 421 of SEQ ID NO: 1562515
aaggauauucuguggguuu

SEQ ID NO: 1753058 - RNA, 19 nt, Artificial Sequence
  Description of Artificial Sequence: Synthetic oligonucleotide
  Antisense strand to SEQ ID NO: 1753057
aaacccacagaauauccuu

SEQ ID NO: 1753059 - RNA, 19 nt, Artificial Sequence
  Description of Artificial Sequence: Synthetic oligonucleotide
  Sense strand starting at position 554 of SEQ ID NO: 1562515
aguaaccacuaauguuauu

SEQ ID NO: 1753060 - RNA, 19 nt, Artificial Sequence
  Description of Artificial Sequence: Synthetic oligonucleotide
  Antisense strand to SEQ ID NO: 1753059
aauaacauuagugguuacu

SEQ ID NO: 1753061 - RNA, 19 nt, Artificial Sequence
  Description of Artificial Sequence: Synthetic oligonucleotide
  Sense strand starting at position 583 of SEQ ID NO: 1562515
agaguuaaguaagugacuu

SEQ ID NO: 1753062 - RNA, 19 nt, Artificial Sequence
  Description of Artificial Sequence: Synthetic oligonucleotide
  Antisense strand to SEQ ID NO: 1753061
aagucacuuacuuaacucu

SEQ ID NO: 1753063 - RNA, 19 nt, Artificial Sequence
  Description of Artificial Sequence: Synthetic oligonucleotide
  Sense strand starting at position 587 of SEQ ID NO: 1562515
uuaaguaagugacuuaagu

SEQ ID NO: 1753064 - RNA, 19 nt, Artificial Sequence
  Description of Artificial Sequence: Synthetic oligonucleotide
  Antisense strand to SEQ ID NO: 1753063
acuuaagucacuuacuuaa

SEQ ID NO: 1753065 - RNA, 19 nt, Artificial Sequence
  Description of Artificial Sequence: Synthetic oligonucleotide
  Sense strand starting at position 626 of SEQ ID NO: 1562515
ggguuuagcucugagucca

SEQ ID NO: 1753066 - RNA, 19 nt, Artificial Sequence
  Description of Artificial Sequence: Synthetic oligonucleotide
  Antisense strand to SEQ ID NO: 1753065
uggacucagagcuaaaccc

SEQ ID NO: 1753067 - RNA, 19 nt, Artificial Sequence
  Description of Artificial Sequence: Synthetic oligonucleotide
  Sense strand starting at position 962 of SEQ ID NO: 1562515
guccgcucgaugucguaaa

SEQ ID NO: 1753068 - RNA, 19 nt, Artificial Sequence
  Description of Artificial Sequence: Synthetic oligonucleotide
  Antisense strand to SEQ ID NO: 1753067
uuuacgacaucgagcggac

SEQ ID NO: 1753069 - RNA, 19 nt, Artificial Sequence
  Description of Artificial Sequence: Synthetic oligonucleotide
  Sense strand starting at position 1033 of SEQ ID NO: 1562515
gcugaacuccgacaugaua

SEQ ID NO: 1753070 - RNA, 19 nt, Artificial Sequence
  Description of Artificial Sequence: Synthetic oligonucleotide
  Antisense strand to SEQ ID NO: 1753069
uaucaugucggaguucagc

SEQ ID NO: 1753071 - RNA, 19 nt, Artificial Sequence
  Description of Artificial Sequence: Synthetic oligonucleotide
  Sense strand starting at position 2940 of SEQ ID NO: 1562515
ggcugugggcgaagguauu

SEQ ID NO: 1753072 - RNA, 19 nt, Artificial Sequence
  Description of Artificial Sequence: Synthetic oligonucleotide
  Antisense strand to SEQ ID NO: 1753071
aauaccuucgcccacagcc

SEQ ID NO: 1753073 - RNA, 19 nt, Artificial Sequence
  Description of Artificial Sequence: Synthetic oligonucleotide
  Sense strand starting at position 2983 of SEQ ID NO: 1562515
gaguuagauucuggaucga

SEQ ID NO: 1753074 - RNA, 19 nt, Artificial Sequence
  Description of Artificial Sequence: Synthetic oligonucleotide
  Antisense strand to SEQ ID NO: 1753073
ucgauccagaaucuaacuc

SEQ ID NO: 1753075 - RNA, 19 nt, Artificial Sequence
  Description of Artificial Sequence: Synthetic oligonucleotide
  Sense strand starting at position 3149 of SEQ ID NO: 1562515
ggaugagcuucuccucauu

SEQ ID NO: 1753076 - RNA, 19 nt, Artificial Sequence
  Description of Artificial Sequence: Synthetic oligonucleotide
  Antisense strand to SEQ ID NO: 1753075
aaugaggagaagcucaucc

SEQ ID NO: 1753077 - RNA, 19 nt, Artificial Sequence
  Description of Artificial Sequence: Synthetic oligonucleotide
  Sense strand starting at position 3241 of SEQ ID NO: 1562515
acggguuguuugggaguca

SEQ ID NO: 1753078 - RNA, 19 nt, Artificial Sequence
  Description of Artificial Sequence: Synthetic oligonucleotide
  Antisense strand to SEQ ID NO: 1753077
ugacucccaaacaacccgu

SEQ ID NO: 1753079 - RNA, 19 nt, Artificial Sequence
  Description of Artificial Sequence: Synthetic oligonucleotide
  Sense strand starting at position 3285 of SEQ ID NO: 1562515
aaugaagagucccaaaguu

SEQ ID NO: 1753080 - RNA, 19 nt, Artificial Sequence
  Description of Artificial Sequence: Synthetic oligonucleotide
  Antisense strand to SEQ ID NO: 1753079
aacuuugggacucuucauu

SEQ ID NO: 1753081 - RNA, 19 nt, Artificial Sequence
  Description of Artificial Sequence: Synthetic oligonucleotide
  Sense strand starting at position 3327 of SEQ ID NO: 1562515
uucuuugucccagguuuau

SEQ ID NO: 1753082 - RNA, 19 nt, Artificial Sequence
  Description of Artificial Sequence: Synthetic oligonucleotide
  Antisense strand to SEQ ID NO: 1753081
auaaaccugggacaaagaa

SEQ ID NO: 1753083 - RNA, 19 nt, Artificial Sequence
  Description of Artificial Sequence: Synthetic oligonucleotide
  Sense strand starting at position 3338 of SEQ ID NO: 1562515
agguuuauauaccaagaau

SEQ ID NO: 1753084 - RNA, 19 nt, Artificial Sequence
  Description of Artificial Sequence: Synthetic oligonucleotide
  Antisense strand to SEQ ID NO: 1753083
auucuugguauauaaaccu

SEQ ID NO: 1753085 - RNA, 19 nt, Artificial Sequence
  Description of Artificial Sequence: Synthetic oligonucleotide
  Sense strand starting at position 3421 of SEQ ID NO: 1562515
gucccaacacccuguuaau

SEQ ID NO: 1753086 - RNA, 19 nt, Artificial Sequence
  Description of Artificial Sequence: Synthetic oligonucleotide
  Antisense strand to SEQ ID NO: 1753085
auuaacaggguguugggac

SEQ ID NO: 1753087 - RNA, 19 nt, Artificial Sequence
  Description of Artificial Sequence: Synthetic oligonucleotide
  Sense strand starting at position 3430 of SEQ ID NO: 1562515
cccuguuaauccgcuccua

SEQ ID NO: 1753088 - RNA, 19 nt, Artificial Sequence
  Description of Artificial Sequence: Synthetic oligonucleotide
  Antisense strand to SEQ ID NO: 1753087
uaggagcggauuaacaggg

SEQ ID NO: 1753089 - RNA, 19 nt, Artificial Sequence
  Description of Artificial Sequence: Synthetic oligonucleotide
  Sense strand starting at position 3479 of SEQ ID NO: 1562515
cgugucucccgccuguaau

SEQ ID NO: 1753090 - RNA, 19 nt, Artificial Sequence
  Description of Artificial Sequence: Synthetic oligonucleotide
  Antisense strand to SEQ ID NO: 1753089
auuacaggcgggagacacg

SEQ ID NO: 1753091 - RNA, 19 nt, Artificial Sequence
  Description of Artificial Sequence: Synthetic oligonucleotide
  Sense strand starting at position 3547 of SEQ ID NO: 1562515
uugagaccggcuugguuaa

SEQ ID NO: 1753092 - RNA, 19 nt, Artificial Sequence
  Description of Artificial Sequence: Synthetic oligonucleotide
  Antisense strand to SEQ ID NO: 1753091
uuaaccaagccggucucaa

SEQ ID NO: 1753093 - RNA, 19 nt, Artificial Sequence
  Description of Artificial Sequence: Synthetic oligonucleotide
  Sense strand starting at position 3821 of SEQ ID NO: 1562515
cucagccugugacuugaaa

SEQ ID NO: 1753094 - RNA, 19 nt, Artificial Sequence
  Description of Artificial Sequence: Synthetic oligonucleotide
  Antisense strand to SEQ ID NO: 1753093
uuucaagucacaggcugag

SEQ ID NO: 1753095 - RNA, 19 nt, Artificial Sequence
  Description of Artificial Sequence: Synthetic oligonucleotide
  Sense strand starting at position 3928 of SEQ ID NO: 1562515
cuggcuggcuguuuggaaa

SEQ ID NO: 1753096 - RNA, 19 nt, Artificial Sequence
  Description of Artificial Sequence: Synthetic oligonucleotide
  Antisense strand to SEQ ID NO: 1753095
uuuccaaacagccagccag

SEQ ID NO: 1753097 - RNA, 19 nt, Artificial Sequence
  Description of Artificial Sequence: Synthetic oligonucleotide
  Sense strand starting at position 3931 of SEQ ID NO: 1562515
gcuggcuguuuggaaacau

SEQ ID NO: 1753098 - RNA, 19 nt, Artificial Sequence
  Description of Artificial Sequence: Synthetic oligonucleotide
  Antisense strand to SEQ ID NO: 1753097
auguuuccaaacagccagc

SEQ ID NO: 1753099 - RNA, 19 nt, Artificial Sequence
  Description of Artificial Sequence: Synthetic oligonucleotide
  Sense strand starting at position 34 of SEQ ID NO: 1562516
ggaucagguuaggauacua

SEQ ID NO: 1753100 - RNA, 19 nt, Artificial Sequence
  Description of Artificial Sequence: Synthetic oligonucleotide
  Antisense strand to SEQ ID NO: 1753099
uaguauccuaaccugaucc

SEQ ID NO: 1753101 - RNA, 19 nt, Artificial Sequence
  Description of Artificial Sequence: Synthetic oligonucleotide
  Sense strand starting at position 39 of SEQ ID NO: 1562516
agguuaggauacuaaauaa

SEQ ID NO: 1753102 - RNA, 19 nt, Artificial Sequence
  Description of Artificial Sequence: Synthetic oligonucleotide
  Antisense strand to SEQ ID NO: 1753101
uuauuuaguauccuaaccu

SEQ ID NO: 1753103 - RNA, 19 nt, Artificial Sequence
  Description of Artificial Sequence: Synthetic oligonucleotide
  Sense strand starting at position 211 of SEQ ID NO: 1562516
gcagacuuaugcuguugga

SEQ ID NO: 1753104 - RNA, 19 nt, Artificial Sequence
  Description of Artificial Sequence: Synthetic oligonucleotide
  Antisense strand to SEQ ID NO: 1753103
uccaacagcauaagucugc

SEQ ID NO: 1753105 - RNA, 19 nt, Artificial Sequence
  Description of Artificial Sequence: Synthetic oligonucleotide
  Sense strand starting at position 214 of SEQ ID NO: 1562516
gacuuaugcuguuggaaau

SEQ ID NO: 1753106 - RNA, 19 nt, Artificial Sequence
  Description of Artificial Sequence: Synthetic oligonucleotide
  Antisense strand to SEQ ID NO: 1753105
auuuccaacagcauaaguc

SEQ ID NO: 1753107 - RNA, 19 nt, Artificial Sequence
  Description of Artificial Sequence: Synthetic oligonucleotide
  Sense strand starting at position 215 of SEQ ID NO: 1562516
acuuaugcuguuggaaaua

SEQ ID NO: 1753108 - RNA, 19 nt, Artificial Sequence
  Description of Artificial Sequence: Synthetic oligonucleotide
  Antisense strand to SEQ ID NO: 1753107
uauuuccaacagcauaagu

SEQ ID NO: 1753109 - RNA, 19 nt, Artificial Sequence
  Description of Artificial Sequence: Synthetic oligonucleotide
  Sense strand starting at position 421 of SEQ ID NO: 1562516
aaaggauauucuguggguu

SEQ ID NO: 1753110 - RNA, 19 nt, Artificial Sequence
  Description of Artificial Sequence: Synthetic oligonucleotide
  Antisense strand to SEQ ID NO: 1753109
aacccacagaauauccuuu

SEQ ID NO: 1753111 - RNA, 19 nt, Artificial Sequence
  Description of Artificial Sequence: Synthetic oligonucleotide
  Sense strand starting at position 422 of SEQ ID NO: 1562516
aaggauauucuguggguuu

SEQ ID NO: 1753112 - RNA, 19 nt, Artificial Sequence
  Description of Artificial Sequence: Synthetic oligonucleotide
  Antisense strand to SEQ ID NO: 1753111
aaacccacagaauauccuu

SEQ ID NO: 1753113 - RNA, 19 nt, Artificial Sequence
  Description of Artificial Sequence: Synthetic oligonucleotide
  Sense strand starting at position 584 of SEQ ID NO: 1562516
agaguuaaguaagugacuu

SEQ ID NO: 1753114 - RNA, 19 nt, Artificial Sequence
  Description of Artificial Sequence: Synthetic oligonucleotide
  Antisense strand to SEQ ID NO: 1753113
aagucacuuacuuaacucu

SEQ ID NO: 1753115 - RNA, 19 nt, Artificial Sequence
  Description of Artificial Sequence: Synthetic oligonucleotide
  Sense strand starting at position 588 of SEQ ID NO: 1562516
uuaaguaagugacuuaagu

SEQ ID NO: 1753116 - RNA, 19 nt, Artificial Sequence
  Description of Artificial Sequence: Synthetic oligonucleotide
  Antisense strand to SEQ ID NO: 1753115
acuuaagucacuuacuuaa

SEQ ID NO: 1753117 - RNA, 19 nt, Artificial Sequence
  Description of Artificial Sequence: Synthetic oligonucleotide
  Sense strand starting at position 627 of SEQ ID NO: 1562516
ggguuuagcucugagucca

SEQ ID NO: 1753118 - RNA, 19 nt, Artificial Sequence
  Description of Artificial Sequence: Synthetic oligonucleotide
  Antisense strand to SEQ ID NO: 1753117
uggacucagagcuaaaccc

SEQ ID NO: 1753119 - RNA, 19 nt, Artificial Sequence
  Description of Artificial Sequence: Synthetic oligonucleotide
  Sense strand starting at position 2941 of SEQ ID NO: 1562516
ggcugugggcgaagguauu

SEQ ID NO: 1753120 - RNA, 19 nt, Artificial Sequence
  Description of Artificial Sequence: Synthetic oligonucleotide
  Antisense strand to SEQ ID NO: 1753119
aauaccuucgcccacagcc

SEQ ID NO: 1753121 - RNA, 19 nt, Artificial Sequence
  Description of Artificial Sequence: Synthetic oligonucleotide
  Sense strand starting at position 2984 of SEQ ID NO: 1562516
gaguuagauucuggaucga

SEQ ID NO: 1753122 - RNA, 19 nt, Artificial Sequence
  Description of Artificial Sequence: Synthetic oligonucleotide
  Antisense strand to SEQ ID NO: 1753121
ucgauccagaaucuaacuc

SEQ ID NO: 1753123 - RNA, 19 nt, Artificial Sequence
  Description of Artificial Sequence: Synthetic oligonucleotide
  Sense strand starting at position 3055 of SEQ ID NO: 1562516
acgagaauucagggaaguu

SEQ ID NO: 1753124 - RNA, 19 nt, Artificial Sequence
  Description of Artificial Sequence: Synthetic oligonucleotide
  Antisense strand to SEQ ID NO: 1753123
aacuucccugaauucucgu

SEQ ID NO: 1753125 - RNA, 19 nt, Artificial Sequence
  Description of Artificial Sequence: Synthetic oligonucleotide
  Sense strand starting at position 3150 of SEQ ID NO: 1562516
ggaugagcuucuccucauu

SEQ ID NO: 1753126 - RNA, 19 nt, Artificial Sequence
  Description of Artificial Sequence: Synthetic oligonucleotide
  Antisense strand to SEQ ID NO: 1753125
aaugaggagaagcucaucc

SEQ ID NO: 1753127 - RNA, 19 nt, Artificial Sequence
  Description of Artificial Sequence: Synthetic oligonucleotide
  Sense strand starting at position 3244 of SEQ ID NO: 1562516
acggguuguuugggaguca

SEQ ID NO: 1753128 - RNA, 19 nt, Artificial Sequence
  Description of Artificial Sequence: Synthetic oligonucleotide
  Antisense strand to SEQ ID NO: 1753127
ugacucccaaacaacccgu

SEQ ID NO: 1753129 - RNA, 19 nt, Artificial Sequence
  Description of Artificial Sequence: Synthetic oligonucleotide
  Sense strand starting at position 3288 of SEQ ID NO: 1562516
aaugaagagucccaaaguu

SEQ ID NO: 1753130 - RNA, 19 nt, Artificial Sequence
  Description of Artificial Sequence: Synthetic oligonucleotide
  Antisense strand to SEQ ID NO: 1753129
aacuuugggacucuucauu

SEQ ID NO: 1753131 - RNA, 19 nt, Artificial Sequence
  Description of Artificial Sequence: Synthetic oligonucleotide
  Sense strand starting at position 3330 of SEQ ID NO: 1562516
uucuuugucccagguuuau

SEQ ID NO: 1753132 - RNA, 19 nt, Artificial Sequence
  Description of Artificial Sequence: Synthetic oligonucleotide
  Antisense strand to SEQ ID NO: 1753131
auaaaccugggacaaagaa

SEQ ID NO: 1753133 - RNA, 19 nt, Artificial Sequence
  Description of Artificial Sequence: Synthetic oligonucleotide
  Sense strand starting at position 3341 of SEQ ID NO: 1562516
agguuuauauaccaagaau

SEQ ID NO: 1753134 - RNA, 19 nt, Artificial Sequence
  Description of Artificial Sequence: Synthetic oligonucleotide
  Antisense strand to SEQ ID NO: 1753133
auucuugguauauaaaccu

SEQ ID NO: 1753135 - RNA, 19 nt, Artificial Sequence
  Description of Artificial Sequence: Synthetic oligonucleotide
  Sense strand starting at position 3424 of SEQ ID NO: 1562516
gucccaacacccuguuaau

SEQ ID NO: 1753136 - RNA, 19 nt, Artificial Sequence
  Description of Artificial Sequence: Synthetic oligonucleotide
  Antisense strand to SEQ ID NO: 1753135
auuaacaggguguugggac

SEQ ID NO: 1753137 - RNA, 19 nt, Artificial Sequence
  Description of Artificial Sequence: Synthetic oligonucleotide
  Sense strand starting at position 3550 of SEQ ID NO: 1562516
uugagaccggcuugguuaa

SEQ ID NO: 1753138 - RNA, 19 nt, Artificial Sequence
  Description of Artificial Sequence: Synthetic oligonucleotide
  Antisense strand to SEQ ID NO: 1753137
uuaaccaagccggucucaa

SEQ ID NO: 1753139 - RNA, 19 nt, Artificial Sequence
  Description of Artificial Sequence: Synthetic oligonucleotide
  Sense strand starting at position 3824 of SEQ ID NO: 1562516
cucagccugugacuugaaa

SEQ ID NO: 1753140 - RNA, 19 nt, Artificial Sequence
  Description of Artificial Sequence: Synthetic oligonucleotide
  Antisense strand to SEQ ID NO: 1753139
uuucaagucacaggcugag

SEQ ID NO: 1753141 - RNA, 19 nt, Artificial Sequence
  Description of Artificial Sequence: Synthetic oligonucleotide
  Sense strand starting at position 3931 of SEQ ID NO: 1562516
cuggcuggcuguuuggaaa

SEQ ID NO: 1753142 - RNA, 19 nt, Artificial Sequence
  Description of Artificial Sequence: Synthetic oligonucleotide
  Antisense strand to SEQ ID NO: 1753141
uuuccaaacagccagccag

SEQ ID NO: 1753143 - RNA, 19 nt, Artificial Sequence
  Description of Artificial Sequence: Synthetic oligonucleotide
  Sense strand starting at position 3934 of SEQ ID NO: 1562516
gcuggcuguuuggaaacau

SEQ ID NO: 1753144 - RNA, 19 nt, Artificial Sequence
  Description of Artificial Sequence: Synthetic oligonucleotide
  Antisense strand to SEQ ID NO: 1753143
auguuuccaaacagccagc

SEQ ID NO: 1753145 - RNA, 19 nt, Artificial Sequence
  Description of Artificial Sequence: Synthetic oligonucleotide
  Sense strand starting at position 3938 of SEQ ID NO: 1562516
gcuguuuggaaacauugca

SEQ ID NO: 1753146 - RNA, 19 nt, Artificial Sequence
  Description of Artificial Sequence: Synthetic oligonucleotide
  Antisense strand to SEQ ID NO: 1753145
ugcaauguuuccaaacagc

SEQ ID NO: 1753147 - RNA, 19 nt, Artificial Sequence
  Description of Artificial Sequence: Synthetic oligonucleotide
  Sense strand starting at position 442 of SEQ ID NO: 1562517
gcacaaguguucgcucugu

SEQ ID NO: 1753148 - RNA, 19 nt, Artificial Sequence
  Description of Artificial Sequence: Synthetic oligonucleotide
  Antisense strand to SEQ ID NO: 1753147
acagagcgaacacuugugc

SEQ ID NO: 1753149 - RNA, 19 nt, Artificial Sequence
  Description of Artificial Sequence: Synthetic oligonucleotide
  Sense strand starting at position 2007 of SEQ ID NO: 1562517
cgcguuuguuuauggcaga

SEQ ID NO: 1753150 - RNA, 19 nt, Artificial Sequence
  Description of Artificial Sequence: Synthetic oligonucleotide
  Antisense strand to SEQ ID NO: 1753149
ucugccauaaacaaacgcg

SEQ ID NO: 1753151 - RNA, 19 nt, Artificial Sequence
  Description of Artificial Sequence: Synthetic oligonucleotide
  Sense strand starting at position 2107 of SEQ ID NO: 1562517
cggcgaaucuugccuccga

SEQ ID NO: 1753152 - RNA, 19 nt, Artificial Sequence
  Description of Artificial Sequence: Synthetic oligonucleotide
  Antisense strand to SEQ ID NO: 1753151
ucggaggcaagauucgccg

SEQ ID NO: 1753153 - RNA, 19 nt, Artificial Sequence
  Description of Artificial Sequence: Synthetic oligonucleotide
  Sense strand starting at position 2176 of SEQ ID NO: 1562517
gggacucucccgggagaga

SEQ ID NO: 1753154 - RNA, 19 nt, Artificial Sequence
  Description of Artificial Sequence: Synthetic oligonucleotide
  Antisense strand to SEQ ID NO: 1753153
ucucucccgggagaguccc

SEQ ID NO: 1753155 - RNA, 19 nt, Artificial Sequence
  Description of Artificial Sequence: Synthetic oligonucleotide
  Sense strand starting at position 2543 of SEQ ID NO: 1562517
gcgaguggcuccgaaguga

SEQ ID NO: 1753156 - RNA, 19 nt, Artificial Sequence
  Description of Artificial Sequence: Synthetic oligonucleotide
  Antisense strand to SEQ ID NO: 1753155
ucacuucggagccacucgc

SEQ ID NO: 1753157 - RNA, 19 nt, Artificial Sequence
  Description of Artificial Sequence: Synthetic oligonucleotide
  Sense strand starting at position 2568 of SEQ ID NO: 1562517
ugcccuuucuguccucgaa

SEQ ID NO: 1753158 - RNA, 19 nt, Artificial Sequence
  Description of Artificial Sequence: Synthetic oligonucleotide
  Antisense strand to SEQ ID NO: 1753157
uucgaggacagaaagggca

SEQ ID NO: 1753159 - RNA, 19 nt, Artificial Sequence
  Description of Artificial Sequence: Synthetic oligonucleotide
  Sense strand starting at position 2570 of SEQ ID NO: 1562517
cccuuucuguccucgaaac

SEQ ID NO: 1753160 - RNA, 19 nt, Artificial Sequence
  Description of Artificial Sequence: Synthetic oligonucleotide
  Antisense strand to SEQ ID NO: 1753159
guuucgaggacagaaaggg

SEQ ID NO: 1753161 - RNA, 19 nt, Artificial Sequence
  Description of Artificial Sequence: Synthetic oligonucleotide
  Sense strand starting at position 2571 of SEQ ID NO: 1562517
ccuuucuguccucgaaaca

SEQ ID NO: 1753162 - RNA, 19 nt, Artificial Sequence
  Description of Artificial Sequence: Synthetic oligonucleotide
  Antisense strand to SEQ ID NO: 1753161
uguuucgaggacagaaagg

SEQ ID NO: 1753163 - RNA, 19 nt, Artificial Sequence
  Description of Artificial Sequence: Synthetic oligonucleotide
  Sense strand starting at position 2600 of SEQ ID NO: 1562517
aagagauugucgccuucuc

SEQ ID NO: 1753164 - RNA, 19 nt, Artificial Sequence
  Description of Artificial Sequence: Synthetic oligonucleotide
  Antisense strand to SEQ ID NO: 1753163
gagaaggcgacaaucucuu

SEQ ID NO: 1753165 - RNA, 19 nt, Artificial Sequence
  Description of Artificial Sequence: Synthetic oligonucleotide
  Sense strand starting at position 2886 of SEQ ID NO: 1562517
gaaagaagacuccguugca

SEQ ID NO: 1753166 - RNA, 19 nt, Artificial Sequence
  Description of Artificial Sequence: Synthetic oligonucleotide
  Antisense strand to SEQ ID NO: 1753165
ugcaacggagucuucuuuc

SEQ ID NO: 1753167 - RNA, 19 nt, Artificial Sequence
  Description of Artificial Sequence: Synthetic oligonucleotide
  Sense strand starting at position 3276 of SEQ ID NO: 1562517
uuggguucucggugucacu

SEQ ID NO: 1753168 - RNA, 19 nt, Artificial Sequence
  Description of Artificial Sequence: Synthetic oligonucleotide
  Antisense strand to SEQ ID NO: 1753167
agugacaccgagaacccaa

SEQ ID NO: 1753169 - RNA, 19 nt, Artificial Sequence
  Description of Artificial Sequence: Synthetic oligonucleotide
  Sense strand starting at position 3450 of SEQ ID NO: 1562517
cagggacuccuuugaaggu

SEQ ID NO: 1753170 - RNA, 19 nt, Artificial Sequence
  Description of Artificial Sequence: Synthetic oligonucleotide
  Antisense strand to SEQ ID NO: 1753169
accuucaaaggagucccug

SEQ ID NO: 1753171 - RNA, 19 nt, Artificial Sequence
  Description of Artificial Sequence: Synthetic oligonucleotide
  Sense strand starting at position 3454 of SEQ ID NO: 1562517
gacuccuuugaaggucaaa

SEQ ID NO: 1753172 - RNA, 19 nt, Artificial Sequence
  Description of Artificial Sequence: Synthetic oligonucleotide
  Antisense strand to SEQ ID NO: 1753171
uuugaccuucaaaggaguc

SEQ ID NO: 1753173 - RNA, 19 nt, Artificial Sequence
  Description of Artificial Sequence: Synthetic oligonucleotide
  Sense strand starting at position 3594 of SEQ ID NO: 1562517
caggcuuggugcuccgaaa

SEQ ID NO: 1753174 - RNA, 19 nt, Artificial Sequence
  Description of Artificial Sequence: Synthetic oligonucleotide
  Antisense strand to SEQ ID NO: 1753173
uuucggagcaccaagccug

SEQ ID NO: 1753175 - RNA, 19 nt, Artificial Sequence
  Description of Artificial Sequence: Synthetic oligonucleotide
  Sense strand starting at position 3673 of SEQ ID NO: 1562517
ccaggagcgcuuuccuguu

SEQ ID NO: 1753176 - RNA, 19 nt, Artificial Sequence
  Description of Artificial Sequence: Synthetic oligonucleotide
  Antisense strand to SEQ ID NO: 1753175
aacaggaaagcgcuccugg

SEQ ID NO: 1753177 - RNA, 19 nt, Artificial Sequence
  Description of Artificial Sequence: Synthetic oligonucleotide
  Sense strand starting at position 3953 of SEQ ID NO: 1562517
gcuuccgacccucaauuau

SEQ ID NO: 1753178 - RNA, 19 nt, Artificial Sequence
  Description of Artificial Sequence: Synthetic oligonucleotide
  Antisense strand to SEQ ID NO: 1753177
auaauugagggucggaagc

SEQ ID NO: 1753179 - RNA, 19 nt, Artificial Sequence
  Description of Artificial Sequence: Synthetic oligonucleotide
  Sense strand starting at position 3980 of SEQ ID NO: 1562517
gagaauuccuccugggcuu

SEQ ID NO: 1753180 - RNA, 19 nt, Artificial Sequence
  Description of Artificial Sequence: Synthetic oligonucleotide
  Antisense strand to SEQ ID NO: 1753179
aagcccaggaggaauucuc

SEQ ID NO: 1753181 - RNA, 19 nt, Artificial Sequence
  Description of Artificial Sequence: Synthetic oligonucleotide
  Sense strand starting at position 46 of SEQ ID NO: 1562518
ugcugcuggucuuaacagu

SEQ ID NO: 1753182 - RNA, 19 nt, Artificial Sequence
  Description of Artificial Sequence: Synthetic oligonucleotide
  Antisense strand to SEQ ID NO: 1753181
acuguuaagaccagcagca

SEQ ID NO: 1753183 - RNA, 19 nt, Artificial Sequence
  Description of Artificial Sequence: Synthetic oligonucleotide
  Sense strand starting at position 87 of SEQ ID NO: 1562518
caacuuaugugccgugaac

SEQ ID NO: 1753184 - RNA, 19 nt, Artificial Sequence
  Description of Artificial Sequence: Synthetic oligonucleotide
  Antisense strand to SEQ ID NO: 1753183
guucacggcacauaaguug

SEQ ID NO: 1753185 - RNA, 19 nt, Artificial Sequence
  Description of Artificial Sequence: Synthetic oligonucleotide
  Sense strand starting at position 89 of SEQ ID NO: 1562518
acuuaugugccgugaacgu

SEQ ID NO: 1753186 - RNA, 19 nt, Artificial Sequence
  Description of Artificial Sequence: Synthetic oligonucleotide
  Antisense strand to SEQ ID NO: 1753185
acguucacggcacauaagu

SEQ ID NO: 1753187 - RNA, 19 nt, Artificial Sequence
  Description of Artificial Sequence: Synthetic oligonucleotide
  Sense strand starting at position 163 of SEQ ID NO: 1562518
uagggaacuuggucaccau

SEQ ID NO: 1753188 - RNA, 19 nt, Artificial Sequence
  Description of Artificial Sequence: Synthetic oligonucleotide
  Antisense strand to SEQ ID NO: 1753187
auggugaccaaguucccua

SEQ ID NO: 1753189 - RNA, 19 nt, Artificial Sequence
  Description of Artificial Sequence: Synthetic oligonucleotide
  Sense strand starting at position 166 of SEQ ID NO: 1562518
ggaacuuggucaccaucau

SEQ ID NO: 1753190 - RNA, 19 nt, Artificial Sequence
  Description of Artificial Sequence: Synthetic oligonucleotide
  Antisense strand to SEQ ID NO: 1753189
augauggugaccaaguucc

SEQ ID NO: 1753191 - RNA, 19 nt, Artificial Sequence
  Description of Artificial Sequence: Synthetic oligonucleotide
  Sense strand starting at position 430 of SEQ ID NO: 1562518
gccagagacccgcaaucaa

SEQ ID NO: 1753192 - RNA, 19 nt, Artificial Sequence
  Description of Artificial Sequence: Synthetic oligonucleotide
  Antisense strand to SEQ ID NO: 1753191
uugauugcgggucucuggc

SEQ ID NO: 1753193 - RNA, 19 nt, Artificial Sequence
  Description of Artificial Sequence: Synthetic oligonucleotide
  Sense strand starting at position 465 of SEQ ID NO: 1562518
accuaucauuccguguuua

SEQ ID NO: 1753194 - RNA, 19 nt, Artificial Sequence
  Description of Artificial Sequence: Synthetic oligonucleotide
  Antisense strand to SEQ ID NO: 1753193
uaaacacggaaugauaggu

SEQ ID NO: 1753195 - RNA, 19 nt, Artificial Sequence
  Description of Artificial Sequence: Synthetic oligonucleotide
  Sense strand starting at position 466 of SEQ ID NO: 1562518
ccuaucauuccguguuuaa

SEQ ID NO: 1753196 - RNA, 19 nt, Artificial Sequence
  Description of Artificial Sequence: Synthetic oligonucleotide
  Antisense strand to SEQ ID NO: 1753195
uuaaacacggaaugauagg

SEQ ID NO: 1753197 - RNA, 19 nt, Artificial Sequence
  Description of Artificial Sequence: Synthetic oligonucleotide
  Sense strand starting at position 508 of SEQ ID NO: 1562518
aaccaagaauguucguuau

SEQ ID NO: 1753198 - RNA, 19 nt, Artificial Sequence
  Description of Artificial Sequence: Synthetic oligonucleotide
  Antisense strand to SEQ ID NO: 1753197
auaacgaacauucuugguu

SEQ ID NO: 1753199 - RNA, 19 nt, Artificial Sequence
  Description of Artificial Sequence: Synthetic oligonucleotide
  Sense strand starting at position 510 of SEQ ID NO: 1562518
ccaagaauguucguuaugu

SEQ ID NO: 1753200 - RNA, 19 nt, Artificial Sequence
  Description of Artificial Sequence: Synthetic oligonucleotide
  Antisense strand to SEQ ID NO: 1753199
acauaacgaacauucuugg

SEQ ID NO: 1753201 - RNA, 19 nt, Artificial Sequence
  Description of Artificial Sequence: Synthetic oligonucleotide
  Sense strand starting at position 511 of SEQ ID NO: 1562518
caagaauguucguuauguu

SEQ ID NO: 1753202 - RNA, 19 nt, Artificial Sequence
  Description of Artificial Sequence: Synthetic oligonucleotide
  Antisense strand to SEQ ID NO: 1753201
aacauaacgaacauucuug

SEQ ID NO: 1753203 - RNA, 19 nt, Artificial Sequence
  Description of Artificial Sequence: Synthetic oligonucleotide
  Sense strand starting at position 512 of SEQ ID NO: 1562518
aagaauguucguuauguuu

SEQ ID NO: 1753204 - RNA, 19 nt, Artificial Sequence
  Description of Artificial Sequence: Synthetic oligonucleotide
  Antisense strand to SEQ ID NO: 1753203
aaacauaacgaacauucuu

SEQ ID NO: 1753205 - RNA, 19 nt, Artificial Sequence
  Description of Artificial Sequence: Synthetic oligonucleotide
  Sense strand starting at position 609 of SEQ ID NO: 1562518
caggguuccuaacagcaua

SEQ ID NO: 1753206 - RNA, 19 nt, Artificial Sequence
  Description of Artificial Sequence: Synthetic oligonucleotide
  Antisense strand to SEQ ID NO: 1753205
uaugcuguuaggaacccug

SEQ ID NO: 1753207 - RNA, 19 nt, Artificial Sequence
  Description of Artificial Sequence: Synthetic oligonucleotide
  Sense strand starting at position 612 of SEQ ID NO: 1562518
gguuccuaacagcauaauu

SEQ ID NO: 1753208 - RNA, 19 nt, Artificial Sequence
  Description of Artificial Sequence: Synthetic oligonucleotide
  Antisense strand to SEQ ID NO: 1753207
aauuaugcuguuaggaacc

SEQ ID NO: 1753209 - RNA, 19 nt, Artificial Sequence
  Description of Artificial Sequence: Synthetic oligonucleotide
  Sense strand starting at position 686 of SEQ ID NO: 1562518
aucuguguccagcagagau

SEQ ID NO: 1753210 - RNA, 19 nt, Artificial Sequence
  Description of Artificial Sequence: Synthetic oligonucleotide
  Antisense strand to SEQ ID NO: 1753209
aucucugcuggacacagau

SEQ ID NO: 1753211 - RNA, 19 nt, Artificial Sequence
  Description of Artificial Sequence: Synthetic oligonucleotide
  Sense strand starting at position 688 of SEQ ID NO: 1562518
cuguguccagcagagauaa

SEQ ID NO: 1753212 - RNA, 19 nt, Artificial Sequence
  Description of Artificial Sequence: Synthetic oligonucleotide
  Antisense strand to SEQ ID NO: 1753211
uuaucucugcuggacacag

SEQ ID NO: 1753213 - RNA, 19 nt, Artificial Sequence
  Description of Artificial Sequence: Synthetic oligonucleotide
  Sense strand starting at position 706 of SEQ ID NO: 1562518
acuguacuaucuggaauua

SEQ ID NO: 1753214 - RNA, 19 nt, Artificial Sequence
  Description of Artificial Sequence: Synthetic oligonucleotide
  Antisense strand to SEQ ID NO: 1753213
uaauuccagauaguacagu

SEQ ID NO: 1753215 - RNA, 19 nt, Artificial Sequence
  Description of Artificial Sequence: Synthetic oligonucleotide
  Sense strand starting at position 707 of SEQ ID NO: 1562518
cuguacuaucuggaauuau

SEQ ID NO: 1753216 - RNA, 19 nt, Artificial Sequence
  Description of Artificial Sequence: Synthetic oligonucleotide
  Antisense strand to SEQ ID NO: 1753215
auaauuccagauaguacag

SEQ ID NO: 1753217 - RNA, 19 nt, Artificial Sequence
  Description of Artificial Sequence: Synthetic oligonucleotide
  Sense strand starting at position 874 of SEQ ID NO: 1562518
cucggcucugcugauugaa

SEQ ID NO: 1753218 - RNA, 19 nt, Artificial Sequence
  Description of Artificial Sequence: Synthetic oligonucleotide
  Antisense strand to SEQ ID NO: 1753217
uucaaucagcagagccgag

SEQ ID NO: 1753219 - RNA, 19 nt, Artificial Sequence
  Description of Artificial Sequence: Synthetic oligonucleotide
  Sense strand starting at position 877 of SEQ ID NO: 1562518
ggcucugcugauugaaucu

SEQ ID NO: 1753220 - RNA, 19 nt, Artificial Sequence
  Description of Artificial Sequence: Synthetic oligonucleotide
  Antisense strand to SEQ ID NO: 1753219
agauucaaucagcagagcc

SEQ ID NO: 1753221 - RNA, 19 nt, Artificial Sequence
  Description of Artificial Sequence: Synthetic oligonucleotide
  Sense strand starting at position 991 of SEQ ID NO: 1562518
cuggaugcauucuggauuu

SEQ ID NO: 1753222 - RNA, 19 nt, Artificial Sequence
  Description of Artificial Sequence: Synthetic oligonucleotide
  Antisense strand to SEQ ID NO: 1753221
aaauccagaaugcauccag

SEQ ID NO: 1753223 - RNA, 19 nt, Artificial Sequence
  Description of Artificial Sequence: Synthetic oligonucleotide
  Sense strand starting at position 1065 of SEQ ID NO: 1562518
acaggaguuuccgauggac

SEQ ID NO: 1753224 - RNA, 19 nt, Artificial Sequence
  Description of Artificial Sequence: Synthetic oligonucleotide
  Antisense strand to SEQ ID NO: 1753223
guccaucggaaacuccugu

SEQ ID NO: 1753225 - RNA, 19 nt, Artificial Sequence
  Description of Artificial Sequence: Synthetic oligonucleotide
  Sense strand starting at position 1067 of SEQ ID NO: 1562518
aggaguuuccgauggacag

SEQ ID NO: 1753226 - RNA, 19 nt, Artificial Sequence
  Description of Artificial Sequence: Synthetic oligonucleotide
  Antisense strand to SEQ ID NO: 1753225
cuguccaucggaaacuccu

SEQ ID NO: 1753227 - RNA, 19 nt, Artificial Sequence
  Description of Artificial Sequence: Synthetic oligonucleotide
  Sense strand starting at position 1108 of SEQ ID NO: 1562518
ugcuguagcgguguuggaa

SEQ ID NO: 1753228 - RNA, 19 nt, Artificial Sequence
  Description of Artificial Sequence: Synthetic oligonucleotide
  Antisense strand to SEQ ID NO: 1753227
uuccaacaccgcuacagca

SEQ ID NO: 1753229 - RNA, 19 nt, Artificial Sequence
  Description of Artificial Sequence: Synthetic oligonucleotide
  Sense strand starting at position 1179 of SEQ ID NO: 1562518
ucgggauugcuccgcugga

SEQ ID NO: 1753230 - RNA, 19 nt, Artificial Sequence
  Description of Artificial Sequence: Synthetic oligonucleotide
  Antisense strand to SEQ ID NO: 1753229
uccagcggagcaaucccga

SEQ ID NO: 1753231 - RNA, 19 nt, Artificial Sequence
  Description of Artificial Sequence: Synthetic oligonucleotide
  Sense strand starting at position 1180 of SEQ ID NO: 1562518
cgggauugcuccgcuggau

SEQ ID NO: 1753232 - RNA, 19 nt, Artificial Sequence
  Description of Artificial Sequence: Synthetic oligonucleotide
  Antisense strand to SEQ ID NO: 1753231
auccagcggagcaaucccg

SEQ ID NO: 1753233 - RNA, 19 nt, Artificial Sequence
  Description of Artificial Sequence: Synthetic oligonucleotide
  Sense strand starting at position 1254 of SEQ ID NO: 1562518
agacaauggucuggagaug

SEQ ID NO: 1753234 - RNA, 19 nt, Artificial Sequence
  Description of Artificial Sequence: Synthetic oligonucleotide
  Antisense strand to SEQ ID NO: 1753233
caucuccagaccauugucu

SEQ ID NO: 1753235 - RNA, 19 nt, Artificial Sequence
  Description of Artificial Sequence: Synthetic oligonucleotide
  Sense strand starting at position 3172 of SEQ ID NO: 1562518
uuuccagaguccugagugu

SEQ ID NO: 1753236 - RNA, 19 nt, Artificial Sequence
  Description of Artificial Sequence: Synthetic oligonucleotide
  Antisense strand to SEQ ID NO: 1753235
acacucaggacucuggaaa

SEQ ID NO: 1753237 - RNA, 19 nt, Artificial Sequence
  Description of Artificial Sequence: Synthetic oligonucleotide
  Sense strand starting at position 3176 of SEQ ID NO: 1562518
cagaguccugaguguagca

SEQ ID NO: 1753238 - RNA, 19 nt, Artificial Sequence
  Description of Artificial Sequence: Synthetic oligonucleotide
  Antisense strand to SEQ ID NO: 1753237
ugcuacacucaggacucug

SEQ ID NO: 1753239 - RNA, 19 nt, Artificial Sequence
  Description of Artificial Sequence: Synthetic oligonucleotide
  Sense strand starting at position 3266 of SEQ ID NO: 1562518
ugcagaauuuaagggaaca

SEQ ID NO: 1753240 - RNA, 19 nt, Artificial Sequence
  Description of Artificial Sequence: Synthetic oligonucleotide
  Antisense strand to SEQ ID NO: 1753239
uguucccuuaaauucugca

SEQ ID NO: 1753241 - RNA, 19 nt, Artificial Sequence
  Description of Artificial Sequence: Synthetic oligonucleotide
  Sense strand starting at position 3750 of SEQ ID NO: 1562518
ggcaggaguccugggaguu

SEQ ID NO: 1753242 - RNA, 19 nt, Artificial Sequence
  Description of Artificial Sequence: Synthetic oligonucleotide
  Antisense strand to SEQ ID NO: 1753241
aacucccaggacuccugcc

SEQ ID NO: 1753243 - RNA, 19 nt, Artificial Sequence
  Description of Artificial Sequence: Synthetic oligonucleotide
  Sense strand starting at position 3751 of SEQ ID NO: 1562518
gcaggaguccugggaguuc

SEQ ID NO: 1753244 - RNA, 19 nt, Artificial Sequence
  Description of Artificial Sequence: Synthetic oligonucleotide
  Antisense strand to SEQ ID NO: 1753243
gaacucccaggacuccugc

SEQ ID NO: 1753245 - RNA, 19 nt, Artificial Sequence
  Description of Artificial Sequence: Synthetic oligonucleotide
  Sense strand starting at position 3843 of SEQ ID NO: 1562518
gcacuuggcaguuguaauc

SEQ ID NO: 1753246 - RNA, 19 nt, Artificial Sequence
  Description of Artificial Sequence: Synthetic oligonucleotide
  Antisense strand to SEQ ID NO: 1753245
gauuacaacugccaagugc

SEQ ID NO: 1753247 - RNA, 19 nt, Artificial Sequence
  Description of Artificial Sequence: Synthetic oligonucleotide
  Sense strand starting at position 3888 of SEQ ID NO: 1562518
ccaggagacucgugaagaa

SEQ ID NO: 1753248 - RNA, 19 nt, Artificial Sequence
  Description of Artificial Sequence: Synthetic oligonucleotide
  Antisense strand to SEQ ID NO: 1753247
uucuucacgagucuccugg

SEQ ID NO: 1753249 - RNA, 19 nt, Artificial Sequence
  Description of Artificial Sequence: Synthetic oligonucleotide
  Sense strand starting at position 537 of SEQ ID NO: 1562519
aucacauguuaugugggaa

SEQ ID NO: 1753250 - RNA, 19 nt, Artificial Sequence
  Description of Artificial Sequence: Synthetic oligonucleotide
  Antisense strand to SEQ ID NO: 1753249
uucccacauaacaugugau

SEQ ID NO: 1753251 - RNA, 19 nt, Artificial Sequence
  Description of Artificial Sequence: Synthetic oligonucleotide
  Sense strand starting at position 538 of SEQ ID NO: 1562519
ucacauguuaugugggaac

SEQ ID NO: 1753252 - RNA, 19 nt, Artificial Sequence
  Description of Artificial Sequence: Synthetic oligonucleotide
  Antisense strand to SEQ ID NO: 1753251
guucccacauaacauguga

SEQ ID NO: 1753253 - RNA, 19 nt, Artificial Sequence
  Description of Artificial Sequence: Synthetic oligonucleotide
  Sense strand starting at position 541 of SEQ ID NO: 1562519
cauguuaugugggaaccca

SEQ ID NO: 1753254 - RNA, 19 nt, Artificial Sequence
  Description of Artificial Sequence: Synthetic oligonucleotide
  Antisense strand to SEQ ID NO: 1753253
uggguucccacauaacaug

SEQ ID NO: 1753255 - RNA, 19 nt, Artificial Sequence
  Description of Artificial Sequence: Synthetic oligonucleotide
  Sense strand starting at position 973 of SEQ ID NO: 1562519
ggagguugguaccagauga

SEQ ID NO: 1753256 - RNA, 19 nt, Artificial Sequence
  Description of Artificial Sequence: Synthetic oligonucleotide
  Antisense strand to SEQ ID NO: 1753255
ucaucugguaccaaccucc

SEQ ID NO: 1753257 - RNA, 19 nt, Artificial Sequence
  Description of Artificial Sequence: Synthetic oligonucleotide
  Sense strand starting at position 1285 of SEQ ID NO: 1562519
ccggcaugcugagaagcuu

SEQ ID NO: 1753258 - RNA, 19 nt, Artificial Sequence
  Description of Artificial Sequence: Synthetic oligonucleotide
  Antisense strand to SEQ ID NO: 1753257
aagcuucucagcaugccgg

SEQ ID NO: 1753259 - RNA, 19 nt, Artificial Sequence
  Description of Artificial Sequence: Synthetic oligonucleotide
  Sense strand starting at position 1550 of SEQ ID NO: 1562519
ggcuucugcacuguguuua

SEQ ID NO: 1753260 - RNA, 19 nt, Artificial Sequence
  Description of Artificial Sequence: Synthetic oligonucleotide
  Antisense strand to SEQ ID NO: 1753259
uaaacacagugcagaagcc

SEQ ID NO: 1753261 - RNA, 19 nt, Artificial Sequence
  Description of Artificial Sequence: Synthetic oligonucleotide
  Sense strand starting at position 1607 of SEQ ID NO: 1562519
gcaagcucuccuggcugau

SEQ ID NO: 1753262 - RNA, 19 nt, Artificial Sequence
  Description of Artificial Sequence: Synthetic oligonucleotide
  Antisense strand to SEQ ID NO: 1753261
aucagccaggagagcuugc

SEQ ID NO: 1753263 - RNA, 19 nt, Artificial Sequence
  Description of Artificial Sequence: Synthetic oligonucleotide
  Sense strand starting at position 1675 of SEQ ID NO: 1562519
ccugcagauuccgaaagaa

SEQ ID NO: 1753264 - RNA, 19 nt, Artificial Sequence
  Description of Artificial Sequence: Synthetic oligonucleotide
  Antisense strand to SEQ ID NO: 1753263
uucuuucggaaucugcagg

SEQ ID NO: 1753265 - RNA, 19 nt, Artificial Sequence
  Description of Artificial Sequence: Synthetic oligonucleotide
  Sense strand starting at position 1992 of SEQ ID NO: 1562519
gucuuaguugagggucuga

SEQ ID NO: 1753266 - RNA, 19 nt, Artificial Sequence
  Description of Artificial Sequence: Synthetic oligonucleotide
  Antisense strand to SEQ ID NO: 1753265
ucagacccucaacuaagac

SEQ ID NO: 1753267 - RNA, 19 nt, Artificial Sequence
  Description of Artificial Sequence: Synthetic oligonucleotide
  Sense strand starting at position 2330 of SEQ ID NO: 1562519
gcccaaaucuacguccaga

SEQ ID NO: 1753268 - RNA, 19 nt, Artificial Sequence
  Description of Artificial Sequence: Synthetic oligonucleotide
  Antisense strand to SEQ ID NO: 1753267
ucuggacguagauuugggc

SEQ ID NO: 1753269 - RNA, 19 nt, Artificial Sequence
  Description of Artificial Sequence: Synthetic oligonucleotide
  Sense strand starting at position 2998 of SEQ ID NO: 1562519
ccaggagugaacuggaagu

SEQ ID NO: 1753270 - RNA, 19 nt, Artificial Sequence
  Description of Artificial Sequence: Synthetic oligonucleotide
  Antisense strand to SEQ ID NO: 1753269
acuuccaguucacuccugg

SEQ ID NO: 1753271 - RNA, 19 nt, Artificial Sequence
  Description of Artificial Sequence: Synthetic oligonucleotide
  Sense strand starting at position 3137 of SEQ ID NO: 1562519
agauaagcaccuuguaguu

SEQ ID NO: 1753272 - RNA, 19 nt, Artificial Sequence
  Description of Artificial Sequence: Synthetic oligonucleotide
  Antisense strand to SEQ ID NO: 1753271
aacuacaaggugcuuaucu

SEQ ID NO: 1753273 - RNA, 19 nt, Artificial Sequence
  Description of Artificial Sequence: Synthetic oligonucleotide
  Sense strand starting at position 3195 of SEQ ID NO: 1562519
cguggaacgucucucaagu

SEQ ID NO: 1753274 - RNA, 19 nt, Artificial Sequence
  Description of Artificial Sequence: Synthetic oligonucleotide
  Antisense strand to SEQ ID NO: 1753273
acuugagagacguuccacg

SEQ ID NO: 1753275 - RNA, 19 nt, Artificial Sequence
  Description of Artificial Sequence: Synthetic oligonucleotide
  Sense strand starting at position 3235 of SEQ ID NO: 1562519
uugcgaaagcugggucaca

SEQ ID NO: 1753276 - RNA, 19 nt, Artificial Sequence
  Description of Artificial Sequence: Synthetic oligonucleotide
  Antisense strand to SEQ ID NO: 1753275
ugugacccagcuuucgcaa

SEQ ID NO: 1753277 - RNA, 19 nt, Artificial Sequence
  Description of Artificial Sequence: Synthetic oligonucleotide
  Sense strand starting at position 3236 of SEQ ID NO: 1562519
ugcgaaagcugggucacaa

SEQ ID NO: 1753278 - RNA, 19 nt, Artificial Sequence
  Description of Artificial Sequence: Synthetic oligonucleotide
  Antisense strand to SEQ ID NO: 1753277
uugugacccagcuuucgca

SEQ ID NO: 1753279 - RNA, 19 nt, Artificial Sequence
  Description of Artificial Sequence: Synthetic oligonucleotide
  Sense strand starting at position 3265 of SEQ ID NO: 1562519
acgugaacuuccuagacac

SEQ ID NO: 1753280 - RNA, 19 nt, Artificial Sequence
  Description of Artificial Sequence: Synthetic oligonucleotide
  Antisense strand to SEQ ID NO: 1753279
gugucuaggaaguucacgu

SEQ ID NO: 1753281 - RNA, 19 nt, Artificial Sequence
  Description of Artificial Sequence: Synthetic oligonucleotide
  Sense strand starting at position 3531 of SEQ ID NO: 1562519
caucgucccucugaugaua

SEQ ID NO: 1753282 - RNA, 19 nt, Artificial Sequence
  Description of Artificial Sequence: Synthetic oligonucleotide
  Antisense strand to SEQ ID NO: 1753281
uaucaucagagggacgaug

SEQ ID NO: 1753283 - RNA, 19 nt, Artificial Sequence
  Description of Artificial Sequence: Synthetic oligonucleotide
  Sense strand starting at position 3567 of SEQ ID NO: 1562519
uggcuuaauuucuggaauc

SEQ ID NO: 1753284 - RNA, 19 nt, Artificial Sequence
  Description of Artificial Sequence: Synthetic oligonucleotide
  Antisense strand to SEQ ID NO: 1753283
gauuccagaaauuaagcca

SEQ ID NO: 1753285 - RNA, 19 nt, Artificial Sequence
  Description of Artificial Sequence: Synthetic oligonucleotide
  Sense strand starting at position 3568 of SEQ ID NO: 1562519
ggcuuaauuucuggaaucu

SEQ ID NO: 1753286 - RNA, 19 nt, Artificial Sequence
  Description of Artificial Sequence: Synthetic oligonucleotide
  Antisense strand to SEQ ID NO: 1753285
agauuccagaaauuaagcc

SEQ ID NO: 1753287 - RNA, 19 nt, Artificial Sequence
  Description of Artificial Sequence: Synthetic oligonucleotide
  Sense strand starting at position 3592 of SEQ ID NO: 1562519
uuaauccguuaauguacaa

SEQ ID NO: 1753288 - RNA, 19 nt, Artificial Sequence
  Description of Artificial Sequence: Synthetic oligonucleotide
  Antisense strand to SEQ ID NO: 1753287
uuguacauuaacggauuaa

SEQ ID NO: 1753289 - RNA, 19 nt, Artificial Sequence
  Description of Artificial Sequence: Synthetic oligonucleotide
  Sense strand starting at position 220 of SEQ ID NO: 1562520
aacaguguagauuaaugua

SEQ ID NO: 1753290 - RNA, 19 nt, Artificial Sequence
  Description of Artificial Sequence: Synthetic oligonucleotide
  Antisense strand to SEQ ID NO: 1753289
uacauuaaucuacacuguu

SEQ ID NO: 1753291 - RNA, 19 nt, Artificial Sequence
  Description of Artificial Sequence: Synthetic oligonucleotide
  Sense strand starting at position 313 of SEQ ID NO: 1562520
cucagacguaguuaagcaa

SEQ ID NO: 1753292 - RNA, 19 nt, Artificial Sequence
  Description of Artificial Sequence: Synthetic oligonucleotide
  Antisense strand to SEQ ID NO: 1753291
uugcuuaacuacgucugag

SEQ ID NO: 1753293 - RNA, 19 nt, Artificial Sequence
  Description of Artificial Sequence: Synthetic oligonucleotide
  Sense strand starting at position 327 of SEQ ID NO: 1562520
agcaacugauauccugaga

SEQ ID NO: 1753294 - RNA, 19 nt, Artificial Sequence
  Description of Artificial Sequence: Synthetic oligonucleotide
  Antisense strand to SEQ ID NO: 1753293
ucucaggauaucaguugcu

SEQ ID NO: 1753295 - RNA, 19 nt, Artificial Sequence
  Description of Artificial Sequence: Synthetic oligonucleotide
  Sense strand starting at position 553 of SEQ ID NO: 1562520
gaaauucgagucuauccaa

SEQ ID NO: 1753296 - RNA, 19 nt, Artificial Sequence
  Description of Artificial Sequence: Synthetic oligonucleotide
  Antisense strand to SEQ ID NO: 1753295
uuggauagacucgaauuuc

SEQ ID NO: 1753297 - RNA, 19 nt, Artificial Sequence
  Description of Artificial Sequence: Synthetic oligonucleotide
  Sense strand starting at position 627 of SEQ ID NO: 1562520
uuugaugcaucacugaaua

SEQ ID NO: 1753298 - RNA, 19 nt, Artificial Sequence
  Description of Artificial Sequence: Synthetic oligonucleotide
  Antisense strand to SEQ ID NO: 1753297
uauucagugaugcaucaaa

SEQ ID NO: 1753299 - RNA, 19 nt, Artificial Sequence
  Description of Artificial Sequence: Synthetic oligonucleotide
  Sense strand starting at position 646 of SEQ ID NO: 1562520
aucucacuuccugggugaa

SEQ ID NO: 1753300 - RNA, 19 nt, Artificial Sequence
  Description of Artificial Sequence: Synthetic oligonucleotide
  Antisense strand to SEQ ID NO: 1753299
uucacccaggaagugagau

SEQ ID NO: 1753301 - RNA, 19 nt, Artificial Sequence
  Description of Artificial Sequence: Synthetic oligonucleotide
  Sense strand starting at position 812 of SEQ ID NO: 1562520
ccuacuuacgcuuaagaau

SEQ ID NO: 1753302 - RNA, 19 nt, Artificial Sequence
  Description of Artificial Sequence: Synthetic oligonucleotide
  Antisense strand to SEQ ID NO: 1753301
auucuuaagcguaaguagg

SEQ ID NO: 1753303 - RNA, 19 nt, Artificial Sequence
  Description of Artificial Sequence: Synthetic oligonucleotide
  Sense strand starting at position 913 of SEQ ID NO: 1562520
uaaucuguucgucacagac

SEQ ID NO: 1753304 - RNA, 19 nt, Artificial Sequence
  Description of Artificial Sequence: Synthetic oligonucleotide
  Antisense strand to SEQ ID NO: 1753303
gucugugacgaacagauua

SEQ ID NO: 1753305 - RNA, 19 nt, Artificial Sequence
  Description of Artificial Sequence: Synthetic oligonucleotide
  Sense strand starting at position 959 of SEQ ID NO: 1562520
cagaaucaucuuuggcagu

SEQ ID NO: 1753306 - RNA, 19 nt, Artificial Sequence
  Description of Artificial Sequence: Synthetic oligonucleotide
  Antisense strand to SEQ ID NO: 1753305
acugccaaagaugauucug

SEQ ID NO: 1753307 - RNA, 19 nt, Artificial Sequence
  Description of Artificial Sequence: Synthetic oligonucleotide
  Sense strand starting at position 1275 of SEQ ID NO: 1562520
acuaaauggcaauguguga

SEQ ID NO: 1753308 - RNA, 19 nt, Artificial Sequence
  Description of Artificial Sequence: Synthetic oligonucleotide
  Antisense strand to SEQ ID NO: 1753307
ucacacauugccauuuagu

SEQ ID NO: 1753309 - RNA, 19 nt, Artificial Sequence
  Description of Artificial Sequence: Synthetic oligonucleotide
  Sense strand starting at position 1279 of SEQ ID NO: 1562520
aauggcaaugugugauacu

SEQ ID NO: 1753310 - RNA, 19 nt, Artificial Sequence
  Description of Artificial Sequence: Synthetic oligonucleotide
  Antisense strand to SEQ ID NO: 1753309
aguaucacacauugccauu

SEQ ID NO: 1753311 - RNA, 19 nt, Artificial Sequence
  Description of Artificial Sequence: Synthetic oligonucleotide
  Sense strand starting at position 1322 of SEQ ID NO: 1562520
cgauucuacauguagauag

SEQ ID NO: 1753312 - RNA, 19 nt, Artificial Sequence
  Description of Artificial Sequence: Synthetic oligonucleotide
  Antisense strand to SEQ ID NO: 1753311
cuaucuacauguagaaucg

SEQ ID NO: 1753313 - RNA, 19 nt, Artificial Sequence
  Description of Artificial Sequence: Synthetic oligonucleotide
  Sense strand starting at position 1400 of SEQ ID NO: 1562520
ugguaaauuuaccagagua

SEQ ID NO: 1753314 - RNA, 19 nt, Artificial Sequence
  Description of Artificial Sequence: Synthetic oligonucleotide
  Antisense strand to SEQ ID NO: 1753313
uacucugguaaauuuacca

SEQ ID NO: 1753315 - RNA, 19 nt, Artificial Sequence
  Description of Artificial Sequence: Synthetic oligonucleotide
  Sense strand starting at position 1439 of SEQ ID NO: 1562520
cucauaguucuauaguuaa

SEQ ID NO: 1753316 - RNA, 19 nt, Artificial Sequence
  Description of Artificial Sequence: Synthetic oligonucleotide
  Antisense strand to SEQ ID NO: 1753315
uuaacuauagaacuaugag

SEQ ID NO: 1753317 - RNA, 19 nt, Artificial Sequence
  Description of Artificial Sequence: Synthetic oligonucleotide
  Sense strand starting at position 1837 of SEQ ID NO: 1562520
ggaaauggaucgcuccauu

SEQ ID NO: 1753318 - RNA, 19 nt, Artificial Sequence
  Description of Artificial Sequence: Synthetic oligonucleotide
  Antisense strand to SEQ ID NO: 1753317
aauggagcgauccauuucc

SEQ ID NO: 1753319 - RNA, 19 nt, Artificial Sequence
  Description of Artificial Sequence: Synthetic oligonucleotide
  Sense strand starting at position 1878 of SEQ ID NO: 1562520
aucauuucuuacggaagaa

SEQ ID NO: 1753320 - RNA, 19 nt, Artificial Sequence
  Description of Artificial Sequence: Synthetic oligonucleotide
  Antisense strand to SEQ ID NO: 1753319
uucuuccguaagaaaugau

SEQ ID NO: 1753321 - RNA, 19 nt, Artificial Sequence
  Description of Artificial Sequence: Synthetic oligonucleotide
  Sense strand starting at position 2362 of SEQ ID NO: 1562520
aucgacuuggcuugaugaa

SEQ ID NO: 1753322 - RNA, 19 nt, Artificial Sequence
  Description of Artificial Sequence: Synthetic oligonucleotide
  Antisense strand to SEQ ID NO: 1753321
uucaucaagccaagucgau

SEQ ID NO: 1753323 - RNA, 19 nt, Artificial Sequence
  Description of Artificial Sequence: Synthetic oligonucleotide
  Sense strand starting at position 2363 of SEQ ID NO: 1562520
ucgacuuggcuugaugaag

SEQ ID NO: 1753324 - RNA, 19 nt, Artificial Sequence
  Description of Artificial Sequence: Synthetic oligonucleotide
  Antisense strand to SEQ ID NO: 1753323
cuucaucaagccaagucga

SEQ ID NO: 1753325 - RNA, 19 nt, Artificial Sequence
  Description of Artificial Sequence: Synthetic oligonucleotide
  Sense strand starting at position 2644 of SEQ ID NO: 1562520
gagggaagacccuggcuaa

SEQ ID NO: 1753326 - RNA, 19 nt, Artificial Sequence
  Description of Artificial Sequence: Synthetic oligonucleotide
  Antisense strand to SEQ ID NO: 1753325
uuagccagggucuucccuc

SEQ ID NO: 1753327 - RNA, 19 nt, Artificial Sequence
  Description of Artificial Sequence: Synthetic oligonucleotide
  Sense strand starting at position 2645 of SEQ ID NO: 1562520
agggaagacccuggcuaau

SEQ ID NO: 1753328 - RNA, 19 nt, Artificial Sequence
  Description of Artificial Sequence: Synthetic oligonucleotide
  Antisense strand to SEQ ID NO: 1753327
auuagccagggucuucccu

SEQ ID NO: 1753329 - RNA, 19 nt, Artificial Sequence
  Description of Artificial Sequence: Synthetic oligonucleotide
  Sense strand starting at position 2657 of SEQ ID NO: 1562520
ggcuaauucguaugggaua

SEQ ID NO: 1753330 - RNA, 19 nt, Artificial Sequence
  Description of Artificial Sequence: Synthetic oligonucleotide
  Antisense strand to SEQ ID NO: 1753329
uaucccauacgaauuagcc

SEQ ID NO: 1753331 - RNA, 19 nt, Artificial Sequence
  Description of Artificial Sequence: Synthetic oligonucleotide
  Sense strand starting at position 2659 of SEQ ID NO: 1562520
cuaauucguaugggauaga

SEQ ID NO: 1753332 - RNA, 19 nt, Artificial Sequence
  Description of Artificial Sequence: Synthetic oligonucleotide
  Antisense strand to SEQ ID NO: 1753331
ucuaucccauacgaauuag

SEQ ID NO: 1753333 - RNA, 19 nt, Artificial Sequence
  Description of Artificial Sequence: Synthetic oligonucleotide
  Sense strand starting at position 2686 of SEQ ID NO: 1562520
uguaaaccuuaggauuuaa

SEQ ID NO: 1753334 - RNA, 19 nt, Artificial Sequence
  Description of Artificial Sequence: Synthetic oligonucleotide
  Antisense strand to SEQ ID NO: 1753333
uuaaauccuaagguuuaca

SEQ ID NO: 1753335 - RNA, 19 nt, Artificial Sequence
  Description of Artificial Sequence: Synthetic oligonucleotide
  Sense strand starting at position 2713 of SEQ ID NO: 1562520
gcuagacgucuagcugcua

SEQ ID NO: 1753336 - RNA, 19 nt, Artificial Sequence
  Description of Artificial Sequence: Synthetic oligonucleotide
  Antisense strand to SEQ ID NO: 1753335
uagcagcuagacgucuagc

SEQ ID NO: 1753337 - RNA, 19 nt, Artificial Sequence
  Description of Artificial Sequence: Synthetic oligonucleotide
  Sense strand starting at position 2793 of SEQ ID NO: 1562520
uuugcaauccaaggcauuu

SEQ ID NO: 1753338 - RNA, 19 nt, Artificial Sequence
  Description of Artificial Sequence: Synthetic oligonucleotide
  Antisense strand to SEQ ID NO: 1753337
aaaugccuuggauugcaaa

SEQ ID NO: 1753339 - RNA, 19 nt, Artificial Sequence
  Description of Artificial Sequence: Synthetic oligonucleotide
  Sense strand starting at position 2955 of SEQ ID NO: 1562520
cuguaugaucuuggguaag

SEQ ID NO: 1753340 - RNA, 19 nt, Artificial Sequence
  Description of Artificial Sequence: Synthetic oligonucleotide
  Antisense strand to SEQ ID NO: 1753339
cuuacccaagaucauacag

SEQ ID NO: 1753341 - RNA, 19 nt, Artificial Sequence
  Description of Artificial Sequence: Synthetic oligonucleotide
  Sense strand starting at position 2957 of SEQ ID NO: 1562520
guaugaucuuggguaagga

SEQ ID NO: 1753342 - RNA, 19 nt, Artificial Sequence
  Description of Artificial Sequence: Synthetic oligonucleotide
  Antisense strand to SEQ ID NO: 1753341
uccuuacccaagaucauac

SEQ ID NO: 1753343 - RNA, 19 nt, Artificial Sequence
  Description of Artificial Sequence: Synthetic oligonucleotide
  Sense strand starting at position 2978 of SEQ ID NO: 1562520
uuaacugcugucgaccaaa

SEQ ID NO: 1753344 - RNA, 19 nt, Artificial Sequence
  Description of Artificial Sequence: Synthetic oligonucleotide
  Antisense strand to SEQ ID NO: 1753343
uuuggucgacagcaguuaa

SEQ ID NO: 1753345 - RNA, 19 nt, Artificial Sequence
  Description of Artificial Sequence: Synthetic oligonucleotide
  Sense strand starting at position 3008 of SEQ ID NO: 1562520
ugaggcggaaauugauaaa

SEQ ID NO: 1753346 - RNA, 19 nt, Artificial Sequence
  Description of Artificial Sequence: Synthetic oligonucleotide
  Antisense strand to SEQ ID NO: 1753345
uuuaucaauuuccgccuca

SEQ ID NO: 1753347 - RNA, 19 nt, Artificial Sequence
  Description of Artificial Sequence: Synthetic oligonucleotide
  Sense strand starting at position 3265 of SEQ ID NO: 1562520
gugaaacgucaugauucag

SEQ ID NO: 1753348 - RNA, 19 nt, Artificial Sequence
  Description of Artificial Sequence: Synthetic oligonucleotide
  Antisense strand to SEQ ID NO: 1753347
cugaaucaugacguuucac

SEQ ID NO: 1753349 - RNA, 19 nt, Artificial Sequence
  Description of Artificial Sequence: Synthetic oligonucleotide
  Sense strand starting at position 3355 of SEQ ID NO: 1562520
augauacgauuugagagau

SEQ ID NO: 1753350 - RNA, 19 nt, Artificial Sequence
  Description of Artificial Sequence: Synthetic oligonucleotide
  Antisense strand to SEQ ID NO: 1753349
aucucucaaaucguaucau

SEQ ID NO: 1753351 - RNA, 19 nt, Artificial Sequence
  Description of Artificial Sequence: Synthetic oligonucleotide
  Sense strand starting at position 3381 of SEQ ID NO: 1562520
aagauuguuugcucaagua

SEQ ID NO: 1753352 - RNA, 19 nt, Artificial Sequence
  Description of Artificial Sequence: Synthetic oligonucleotide
  Antisense strand to SEQ ID NO: 1753351
uacuugagcaaacaaucuu

SEQ ID NO: 1753353 - RNA, 19 nt, Artificial Sequence
  Description of Artificial Sequence: Synthetic oligonucleotide
  Sense strand starting at position 3420 of SEQ ID NO: 1562520
auaagaccuucuccaggua

SEQ ID NO: 1753354 - RNA, 19 nt, Artificial Sequence
  Description of Artificial Sequence: Synthetic oligonucleotide
  Antisense strand to SEQ ID NO: 1753353
uaccuggagaaggucuuau

SEQ ID NO: 1753355 - RNA, 19 nt, Artificial Sequence
  Description of Artificial Sequence: Synthetic oligonucleotide
  Sense strand starting at position 3423 of SEQ ID NO: 1562520
agaccuucuccagguaguu

SEQ ID NO: 1753356 - RNA, 19 nt, Artificial Sequence
  Description of Artificial Sequence: Synthetic oligonucleotide
  Antisense strand to SEQ ID NO: 1753355
aacuaccuggagaaggucu

SEQ ID NO: 1753357 - RNA, 19 nt, Artificial Sequence
  Description of Artificial Sequence: Synthetic oligonucleotide
  Sense strand starting at position 3585 of SEQ ID NO: 1562520
uuguuaguuguugugucua

SEQ ID NO: 1753358 - RNA, 19 nt, Artificial Sequence
  Description of Artificial Sequence: Synthetic oligonucleotide
  Antisense strand to SEQ ID NO: 1753357
uagacacaacaacuaacaa

SEQ ID NO: 1753359 - RNA, 19 nt, Artificial Sequence
  Description of Artificial Sequence: Synthetic oligonucleotide
  Sense strand starting at position 3612 of SEQ ID NO: 1562520
aaggguauuagugaggcau

SEQ ID NO: 1753360 - RNA, 19 nt, Artificial Sequence
  Description of Artificial Sequence: Synthetic oligonucleotide
  Antisense strand to SEQ ID NO: 1753359
augccucacuaauacccuu

SEQ ID NO: 1753361 - RNA, 19 nt, Artificial Sequence
  Description of Artificial Sequence: Synthetic oligonucleotide
  Sense strand starting at position 3616 of SEQ ID NO: 1562520
guauuagugaggcauguuc

SEQ ID NO: 1753362 - RNA, 19 nt, Artificial Sequence
  Description of Artificial Sequence: Synthetic oligonucleotide
  Antisense strand to SEQ ID NO: 1753361
gaacaugccucacuaauac

SEQ ID NO: 1753363 - RNA, 19 nt, Artificial Sequence
  Description of Artificial Sequence: Synthetic oligonucleotide
  Sense strand starting at position 3643 of SEQ ID NO: 1562520
uucccaucauggcugagaa

SEQ ID NO: 1753364 - RNA, 19 nt, Artificial Sequence
  Description of Artificial Sequence: Synthetic oligonucleotide
  Antisense strand to SEQ ID NO: 1753363
uucucagccaugaugggaa

SEQ ID NO: 1753365 - RNA, 19 nt, Artificial Sequence
  Description of Artificial Sequence: Synthetic oligonucleotide
  Sense strand starting at position 3791 of SEQ ID NO: 1562520
gaaugauagugaggauuua

SEQ ID NO: 1753366 - RNA, 19 nt, Artificial Sequence
  Description of Artificial Sequence: Synthetic oligonucleotide
  Antisense strand to SEQ ID NO: 1753365
uaaauccucacuaucauuc

SEQ ID NO: 1753367 - RNA, 19 nt, Artificial Sequence
  Description of Artificial Sequence: Synthetic oligonucleotide
  Sense strand starting at position 3959 of SEQ ID NO: 1562520
auguuaccauucuagauuu

SEQ ID NO: 1753368 - RNA, 19 nt, Artificial Sequence
  Description of Artificial Sequence: Synthetic oligonucleotide
  Antisense strand to SEQ ID NO: 1753367
aaaucuagaaugguaacau

SEQ ID NO: 1753369 - RNA, 19 nt, Artificial Sequence
  Description of Artificial Sequence: Synthetic oligonucleotide
  Sense strand starting at position 32 of SEQ ID NO: 1562521
caaauuacgcucuguugau

SEQ ID NO: 1753370 - RNA, 19 nt, Artificial Sequence
  Description of Artificial Sequence: Synthetic oligonucleotide
  Antisense strand to SEQ ID NO: 1753369
aucaacagagcguaauuug

SEQ ID NO: 1753371 - RNA, 19 nt, Artificial Sequence
  Description of Artificial Sequence: Synthetic oligonucleotide
  Sense strand starting at position 33 of SEQ ID NO: 1562521
aaauuacgcucuguugauc

SEQ ID NO: 1753372 - RNA, 19 nt, Artificial Sequence
  Description of Artificial Sequence: Synthetic oligonucleotide
  Antisense strand to SEQ ID NO: 1753371
gaucaacagagcguaauuu

SEQ ID NO: 1753373 - RNA, 19 nt, Artificial Sequence
  Description of Artificial Sequence: Synthetic oligonucleotide
  Sense strand starting at position 68 of SEQ ID NO: 1562521
augggugcuccacauccaa

SEQ ID NO: 1753374 - RNA, 19 nt, Artificial Sequence
  Description of Artificial Sequence: Synthetic oligonucleotide
  Antisense strand to SEQ ID NO: 1753373
uuggauguggagcacccau

SEQ ID NO: 1753375 - RNA, 19 nt, Artificial Sequence
  Description of Artificial Sequence: Synthetic oligonucleotide
  Sense strand starting at position 81 of SEQ ID NO: 1562521
auccaaaggcuauguuauu

SEQ ID NO: 1753376 - RNA, 19 nt, Artificial Sequence
  Description of Artificial Sequence: Synthetic oligonucleotide
  Antisense strand to SEQ ID NO: 1753375
aauaacauagccuuuggau

SEQ ID NO: 1753377 - RNA, 19 nt, Artificial Sequence
  Description of Artificial Sequence: Synthetic oligonucleotide
  Sense strand starting at position 82 of SEQ ID NO: 1562521
uccaaaggcuauguuauua

SEQ ID NO: 1753378 - RNA, 19 nt, Artificial Sequence
  Description of Artificial Sequence: Synthetic oligonucleotide
  Antisense strand to SEQ ID NO: 1753377
uaauaacauagccuuugga

SEQ ID NO: 1753379 - RNA, 19 nt, Artificial Sequence
  Description of Artificial Sequence: Synthetic oligonucleotide
  Sense strand starting at position 157 of SEQ ID NO: 1562521
ccaagauacuuggcaacua

SEQ ID NO: 1753380 - RNA, 19 nt, Artificial Sequence
  Description of Artificial Sequence: Synthetic oligonucleotide
  Antisense strand to SEQ ID NO: 1753379
uaguugccaaguaucuugg

SEQ ID NO: 1753381 - RNA, 19 nt, Artificial Sequence
  Description of Artificial Sequence: Synthetic oligonucleotide
  Sense strand starting at position 225 of SEQ ID NO: 1562521
guuacagaaugagcaaaua

SEQ ID NO: 1753382 - RNA, 19 nt, Artificial Sequence
  Description of Artificial Sequence: Synthetic oligonucleotide
  Antisense strand to SEQ ID NO: 1753381
uauuugcucauucuguaac

SEQ ID NO: 1753383 - RNA, 19 nt, Artificial Sequence
  Description of Artificial Sequence: Synthetic oligonucleotide
  Sense strand starting at position 447 of SEQ ID NO: 1562521
ggaguuacauaugcuggua

SEQ ID NO: 1753384 - RNA, 19 nt, Artificial Sequence
  Description of Artificial Sequence: Synthetic oligonucleotide
  Antisense strand to SEQ ID NO: 1753383
uaccagcauauguaacucc

SEQ ID NO: 1753385 - RNA, 19 nt, Artificial Sequence
  Description of Artificial Sequence: Synthetic oligonucleotide
  Sense strand starting at position 705 of SEQ ID NO: 1562521
ugguaauacuccucgcaau

SEQ ID NO: 1753386 - RNA, 19 nt, Artificial Sequence
  Description of Artificial Sequence: Synthetic oligonucleotide
  Antisense strand to SEQ ID NO: 1753385
auugcgaggaguauuacca

SEQ ID NO: 1753387 - RNA, 19 nt, Artificial Sequence
  Description of Artificial Sequence: Synthetic oligonucleotide
  Sense strand starting at position 706 of SEQ ID NO: 1562521
gguaauacuccucgcaauu

SEQ ID NO: 1753388 - RNA, 19 nt, Artificial Sequence
  Description of Artificial Sequence: Synthetic oligonucleotide
  Antisense strand to SEQ ID NO: 1753387
aauugcgaggaguauuacc

SEQ ID NO: 1753389 - RNA, 19 nt, Artificial Sequence
  Description of Artificial Sequence: Synthetic oligonucleotide
  Sense strand starting at position 719 of SEQ ID NO: 1562521
gcaauugaccuggagccua

SEQ ID NO: 1753390 - RNA, 19 nt, Artificial Sequence
  Description of Artificial Sequence: Synthetic oligonucleotide
  Antisense strand to SEQ ID NO: 1753389
uaggcuccaggucaauugc

SEQ ID NO: 1753391 - RNA, 19 nt, Artificial Sequence
  Description of Artificial Sequence: Synthetic oligonucleotide
  Sense strand starting at position 778 of SEQ ID NO: 1562521
ggaagcugugcuuacaaag

SEQ ID NO: 1753392 - RNA, 19 nt, Artificial Sequence
  Description of Artificial Sequence: Synthetic oligonucleotide
  Antisense strand to SEQ ID NO: 1753391
cuuuguaagcacagcuucc

SEQ ID NO: 1753393 - RNA, 19 nt, Artificial Sequence
  Description of Artificial Sequence: Synthetic oligonucleotide
  Sense strand starting at position 859 of SEQ ID NO: 1562521
caaacuacguuaccgaauu

SEQ ID NO: 1753394 - RNA, 19 nt, Artificial Sequence
  Description of Artificial Sequence: Synthetic oligonucleotide
  Antisense strand to SEQ ID NO: 1753393
aauucgguaacguaguuug

SEQ ID NO: 1753395 - RNA, 19 nt, Artificial Sequence
  Description of Artificial Sequence: Synthetic oligonucleotide
  Sense strand starting at position 876 of SEQ ID NO: 1562521
uuccgaauucacgggagaa

SEQ ID NO: 1753396 - RNA, 19 nt, Artificial Sequence
  Description of Artificial Sequence: Synthetic oligonucleotide
  Antisense strand to SEQ ID NO: 1753395
uucucccgugaauucggaa

SEQ ID NO: 1753397 - RNA, 19 nt, Artificial Sequence
  Description of Artificial Sequence: Synthetic oligonucleotide
  Sense strand starting at position 2727 of SEQ ID NO: 1562521
gcgcgauacgggcauuugu

SEQ ID NO: 1753398 - RNA, 19 nt, Artificial Sequence
  Description of Artificial Sequence: Synthetic oligonucleotide
  Antisense strand to SEQ ID NO: 1753397
acaaaugcccguaucgcgc

SEQ ID NO: 1753399 - RNA, 19 nt, Artificial Sequence
  Description of Artificial Sequence: Synthetic oligonucleotide
  Sense strand starting at position 3054 of SEQ ID NO: 1562521
guacguggaguguuuguca

SEQ ID NO: 1753400 - RNA, 19 nt, Artificial Sequence
  Description of Artificial Sequence: Synthetic oligonucleotide
  Antisense strand to SEQ ID NO: 1753399
ugacaaacacuccacguac

SEQ ID NO: 1753401 - RNA, 19 nt, Artificial Sequence
  Description of Artificial Sequence: Synthetic oligonucleotide
  Sense strand starting at position 3074 of SEQ ID NO: 1562521
cuuaaagugcuuuaacguu

SEQ ID NO: 1753402 - RNA, 19 nt, Artificial Sequence
  Description of Artificial Sequence: Synthetic oligonucleotide
  Antisense strand to SEQ ID NO: 1753401
aacguuaaagcacuuuaag

SEQ ID NO: 1753403 - RNA, 19 nt, Artificial Sequence
  Description of Artificial Sequence: Synthetic oligonucleotide
  Sense strand starting at position 3080 of SEQ ID NO: 1562521
gugcuuuaacguuaauagg

SEQ ID NO: 1753404 - RNA, 19 nt, Artificial Sequence
  Description of Artificial Sequence: Synthetic oligonucleotide
  Antisense strand to SEQ ID NO: 1753403
ccuauuaacguuaaagcac

SEQ ID NO: 1753405 - RNA, 19 nt, Artificial Sequence
  Description of Artificial Sequence: Synthetic oligonucleotide
  Sense strand starting at position 3086 of SEQ ID NO: 1562521
uaacguuaauagguaaagu

SEQ ID NO: 1753406 - RNA, 19 nt, Artificial Sequence
  Description of Artificial Sequence: Synthetic oligonucleotide
  Antisense strand to SEQ ID NO: 1753405
acuuuaccuauuaacguua

SEQ ID NO: 1753407 - RNA, 19 nt, Artificial Sequence
  Description of Artificial Sequence: Synthetic oligonucleotide
  Sense strand starting at position 3096 of SEQ ID NO: 1562521
agguaaaguuuagugaaca

SEQ ID NO: 1753408 - RNA, 19 nt, Artificial Sequence
  Description of Artificial Sequence: Synthetic oligonucleotide
  Antisense strand to SEQ ID NO: 1753407
uguucacuaaacuuuaccu

SEQ ID NO: 1753409 - RNA, 19 nt, Artificial Sequence
  Description of Artificial Sequence: Synthetic oligonucleotide
  Sense strand starting at position 3108 of SEQ ID NO: 1562521
gugaacacuuacucugcau

SEQ ID NO: 1753410 - RNA, 19 nt, Artificial Sequence
  Description of Artificial Sequence: Synthetic oligonucleotide
  Antisense strand to SEQ ID NO: 1753409
augcagaguaaguguucac

SEQ ID NO: 1753411 - RNA, 19 nt, Artificial Sequence
  Description of Artificial Sequence: Synthetic oligonucleotide
  Sense strand starting at position 3304 of SEQ ID NO: 1562521
agaucagguuccucaucuu

SEQ ID NO: 1753412 - RNA, 19 nt, Artificial Sequence
  Description of Artificial Sequence: Synthetic oligonucleotide
  Antisense strand to SEQ ID NO: 1753411
aagaugaggaaccugaucu

SEQ ID NO: 1753413 - RNA, 19 nt, Artificial Sequence
  Description of Artificial Sequence: Synthetic oligonucleotide
  Sense strand starting at position 3355 of SEQ ID NO: 1562521
gccugaguucuacaagaau

SEQ ID NO: 1753414 - RNA, 19 nt, Artificial Sequence
  Description of Artificial Sequence: Synthetic oligonucleotide
  Antisense strand to SEQ ID NO: 1753413
auucuuguagaacucaggc

SEQ ID NO: 1753415 - RNA, 19 nt, Artificial Sequence
  Description of Artificial Sequence: Synthetic oligonucleotide
  Sense strand starting at position 3371 of SEQ ID NO: 1562521
aauccuuuagaucgguuga

SEQ ID NO: 1753416 - RNA, 19 nt, Artificial Sequence
  Description of Artificial Sequence: Synthetic oligonucleotide
  Antisense strand to SEQ ID NO: 1753415
ucaaccgaucuaaaggauu

SEQ ID NO: 1753417 - RNA, 19 nt, Artificial Sequence
  Description of Artificial Sequence: Synthetic oligonucleotide
  Sense strand starting at position 3407 of SEQ ID NO: 1562521
cccgaugguuacucuuagu

SEQ ID NO: 1753418 - RNA, 19 nt, Artificial Sequence
  Description of Artificial Sequence: Synthetic oligonucleotide
  Antisense strand to SEQ ID NO: 1753417
acuaagaguaaccaucggg

SEQ ID NO: 1753419 - RNA, 19 nt, Artificial Sequence
  Description of Artificial Sequence: Synthetic oligonucleotide
  Sense strand starting at position 3520 of SEQ ID NO: 1562521
cgcguugguccugaauaaa

SEQ ID NO: 1753420 - RNA, 19 nt, Artificial Sequence
  Description of Artificial Sequence: Synthetic oligonucleotide
  Antisense strand to SEQ ID NO: 1753419
uuuauucaggaccaacgcg

SEQ ID NO: 1753421 - RNA, 19 nt, Artificial Sequence
  Description of Artificial Sequence: Synthetic oligonucleotide
  Sense strand starting at position 3543 of SEQ ID NO: 1562521
uucuuaccaugcuuuagua

SEQ ID NO: 1753422 - RNA, 19 nt, Artificial Sequence
  Description of Artificial Sequence: Synthetic oligonucleotide
  Antisense strand to SEQ ID NO: 1753421
uacuaaagcaugguaagaa

SEQ ID NO: 1753423 - RNA, 19 nt, Artificial Sequence
  Description of Artificial Sequence: Synthetic oligonucleotide
  Sense strand starting at position 3557 of SEQ ID NO: 1562521
uaguaagcaucacugagua

SEQ ID NO: 1753424 - RNA, 19 nt, Artificial Sequence
  Description of Artificial Sequence: Synthetic oligonucleotide
  Antisense strand to SEQ ID NO: 1753423
uacucagugaugcuuacua

SEQ ID NO: 1753425 - RNA, 19 nt, Artificial Sequence
  Description of Artificial Sequence: Synthetic oligonucleotide
  Sense strand starting at position 3621 of SEQ ID NO: 1562521
uaggaaauguaggcacaaa

SEQ ID NO: 1753426 - RNA, 19 nt, Artificial Sequence
  Description of Artificial Sequence: Synthetic oligonucleotide
  Antisense strand to SEQ ID NO: 1753425
uuugugccuacauuuccua

SEQ ID NO: 1753427 - RNA, 19 nt, Artificial Sequence
  Description of Artificial Sequence: Synthetic oligonucleotide
  Sense strand starting at position 3735 of SEQ ID NO: 1562521
gaugaagaugcugauuguu

SEQ ID NO: 1753428 - RNA, 19 nt, Artificial Sequence
  Description of Artificial Sequence: Synthetic oligonucleotide
  Antisense strand to SEQ ID NO: 1753427
aacaaucagcaucuucauc

SEQ ID NO: 1753429 - RNA, 19 nt, Artificial Sequence
  Description of Artificial Sequence: Synthetic oligonucleotide
  Sense strand starting at position 3737 of SEQ ID NO: 1562521
ugaagaugcugauuguuau

SEQ ID NO: 1753430 - RNA, 19 nt, Artificial Sequence
  Description of Artificial Sequence: Synthetic oligonucleotide
  Antisense strand to SEQ ID NO: 1753429
auaacaaucagcaucuuca

SEQ ID NO: 1753431 - RNA, 19 nt, Artificial Sequence
  Description of Artificial Sequence: Synthetic oligonucleotide
  Sense strand starting at position 3738 of SEQ ID NO: 1562521
gaagaugcugauuguuauu

SEQ ID NO: 1753432 - RNA, 19 nt, Artificial Sequence
  Description of Artificial Sequence: Synthetic oligonucleotide
  Antisense strand to SEQ ID NO: 1753431
aauaacaaucagcaucuuc

SEQ ID NO: 1753433 - RNA, 19 nt, Artificial Sequence
  Description of Artificial Sequence: Synthetic oligonucleotide
  Sense strand starting at position 3761 of SEQ ID NO: 1562521
ggauuaaccguguagucca

SEQ ID NO: 1753434 - RNA, 19 nt, Artificial Sequence
  Description of Artificial Sequence: Synthetic oligonucleotide
  Antisense strand to SEQ ID NO: 1753433
uggacuacacgguuaaucc

SEQ ID NO: 1753435 - RNA, 19 nt, Artificial Sequence
  Description of Artificial Sequence: Synthetic oligonucleotide
  Sense strand starting at position 3778 of SEQ ID NO: 1562521
cacguaagccaagauuaga

SEQ ID NO: 1753436 - RNA, 19 nt, Artificial Sequence
  Description of Artificial Sequence: Synthetic oligonucleotide
  Antisense strand to SEQ ID NO: 1753435
ucuaaucuuggcuuacgug

SEQ ID NO: 1753437 - RNA, 19 nt, Artificial Sequence
  Description of Artificial Sequence: Synthetic oligonucleotide
  Sense strand starting at position 3794 of SEQ ID NO: 1562521
agaguaccuuugucaccuu

SEQ ID NO: 1753438 - RNA, 19 nt, Artificial Sequence
  Description of Artificial Sequence: Synthetic oligonucleotide
  Antisense strand to SEQ ID NO: 1753437
aaggugacaaagguacucu

SEQ ID NO: 1753439 - RNA, 19 nt, Artificial Sequence
  Description of Artificial Sequence: Synthetic oligonucleotide
  Sense strand starting at position 3806 of SEQ ID NO: 1562521
ucaccuuacccagagguua

SEQ ID NO: 1753440 - RNA, 19 nt, Artificial Sequence
  Description of Artificial Sequence: Synthetic oligonucleotide
  Antisense strand to SEQ ID NO: 1753439
uaaccucuggguaagguga

SEQ ID NO: 1753441 - RNA, 19 nt, Artificial Sequence
  Description of Artificial Sequence: Synthetic oligonucleotide
  Sense strand starting at position 3839 of SEQ ID NO: 1562521
augcgucuauuugugacau

SEQ ID NO: 1753442 - RNA, 19 nt, Artificial Sequence
  Description of Artificial Sequence: Synthetic oligonucleotide
  Antisense strand to SEQ ID NO: 1753441
augucacaaauagacgcau

SEQ ID NO: 1753443 - RNA, 19 nt, Artificial Sequence
  Description of Artificial Sequence: Synthetic oligonucleotide
  Sense strand starting at position 3849 of SEQ ID NO: 1562521
uugugacauaugggaggua

SEQ ID NO: 1753444 - RNA, 19 nt, Artificial Sequence
  Description of Artificial Sequence: Synthetic oligonucleotide
  Antisense strand to SEQ ID NO: 1753443
uaccucccauaugucacaa

SEQ ID NO: 1753445 - RNA, 19 nt, Artificial Sequence
  Description of Artificial Sequence: Synthetic oligonucleotide
  Sense strand starting at position 3940 of SEQ ID NO: 1562521
aacccauaccugugugaag

SEQ ID NO: 1753446 - RNA, 19 nt, Artificial Sequence
  Description of Artificial Sequence: Synthetic oligonucleotide
  Antisense strand to SEQ ID NO: 1753445
cuucacacagguauggguu

SEQ ID NO: 1753447 - RNA, 19 nt, Artificial Sequence
  Description of Artificial Sequence: Synthetic oligonucleotide
  Sense strand starting at position 3970 of SEQ ID NO: 1562521
auccaaauugccuggcuaa

SEQ ID NO: 1753448 - RNA, 19 nt, Artificial Sequence
  Description of Artificial Sequence: Synthetic oligonucleotide
  Antisense strand to SEQ ID NO: 1753447
uuagccaggcaauuuggau

SEQ ID NO: 1753449 - RNA, 19 nt, Artificial Sequence
  Description of Artificial Sequence: Synthetic oligonucleotide
  Sense strand starting at position 3204 of SEQ ID NO: 1562522
aguggauccuagggugaca

SEQ ID NO: 1753450 - RNA, 19 nt, Artificial Sequence
  Description of Artificial Sequence: Synthetic oligonucleotide
  Antisense strand to SEQ ID NO: 1753449
ugucacccuaggauccacu

SEQ ID NO: 1753451 - RNA, 19 nt, Artificial Sequence
  Description of Artificial Sequence: Synthetic oligonucleotide
  Sense strand starting at position 3215 of SEQ ID NO: 1562522
gggugacaaucuuggcaaa

SEQ ID NO: 1753452 - RNA, 19 nt, Artificial Sequence
  Description of Artificial Sequence: Synthetic oligonucleotide
  Antisense strand to SEQ ID NO: 1753451
uuugccaagauugucaccc

SEQ ID NO: 1753453 - RNA, 19 nt, Artificial Sequence
  Description of Artificial Sequence: Synthetic oligonucleotide
  Sense strand starting at position 3216 of SEQ ID NO: 1562522
ggugacaaucuuggcaaau

SEQ ID NO: 1753454 - RNA, 19 nt, Artificial Sequence
  Description of Artificial Sequence: Synthetic oligonucleotide
  Antisense strand to SEQ ID NO: 1753453
auuugccaagauugucacc

SEQ ID NO: 1753455 - RNA, 19 nt, Artificial Sequence
  Description of Artificial Sequence: Synthetic oligonucleotide
  Sense strand starting at position 3217 of SEQ ID NO: 1562522
gugacaaucuuggcaaaug

SEQ ID NO: 1753456 - RNA, 19 nt, Artificial Sequence
  Description of Artificial Sequence: Synthetic oligonucleotide
  Antisense strand to SEQ ID NO: 1753455
cauuugccaagauugucac

SEQ ID NO: 1753457 - RNA, 19 nt, Artificial Sequence
  Description of Artificial Sequence: Synthetic oligonucleotide
  Sense strand starting at position 3262 of SEQ ID NO: 1562522
cuuggagagagucagcauu

SEQ ID NO: 1753458 - RNA, 19 nt, Artificial Sequence
  Description of Artificial Sequence: Synthetic oligonucleotide
  Antisense strand to SEQ ID NO: 1753457
aaugcugacucucuccaag

SEQ ID NO: 1753459 - RNA, 19 nt, Artificial Sequence
  Description of Artificial Sequence: Synthetic oligonucleotide
  Sense strand starting at position 3296 of SEQ ID NO: 1562522
aagugaaguuggcugauaa

SEQ ID NO: 1753460 - RNA, 19 nt, Artificial Sequence
  Description of Artificial Sequence: Synthetic oligonucleotide
  Antisense strand to SEQ ID NO: 1753459
uuaucagccaacuucacuu

SEQ ID NO: 1753461 - RNA, 19 nt, Artificial Sequence
  Description of Artificial Sequence: Synthetic oligonucleotide
  Sense strand starting at position 3297 of SEQ ID NO: 1562522
agugaaguuggcugauaac

SEQ ID NO: 1753462 - RNA, 19 nt, Artificial Sequence
  Description of Artificial Sequence: Synthetic oligonucleotide
  Antisense strand to SEQ ID NO: 1753461
guuaucagccaacuucacu

SEQ ID NO: 1753463 - RNA, 19 nt, Artificial Sequence
  Description of Artificial Sequence: Synthetic oligonucleotide
  Sense strand starting at position 3708 of SEQ ID NO: 1562522
uguguuuaccugugucaaa

SEQ ID NO: 1753464 - RNA, 19 nt, Artificial Sequence
  Description of Artificial Sequence: Synthetic oligonucleotide
  Antisense strand to SEQ ID NO: 1753463
uuugacacagguaaacaca

SEQ ID NO: 1753465 - RNA, 19 nt, Artificial Sequence
  Description of Artificial Sequence: Synthetic oligonucleotide
  Sense strand starting at position 3709 of SEQ ID NO: 1562522
guguuuaccugugucaaag

SEQ ID NO: 1753466 - RNA, 19 nt, Artificial Sequence
  Description of Artificial Sequence: Synthetic oligonucleotide
  Antisense strand to SEQ ID NO: 1753465
cuuugacacagguaaacac

SEQ ID NO: 1753467 - RNA, 19 nt, Artificial Sequence
  Description of Artificial Sequence: Synthetic oligonucleotide
  Sense strand starting at position 3715 of SEQ ID NO: 1562522
accugugucaaagguaaag

SEQ ID NO: 1753468 - RNA, 19 nt, Artificial Sequence
  Description of Artificial Sequence: Synthetic oligonucleotide
  Antisense strand to SEQ ID NO: 1753467
cuuuaccuuugacacaggu

SEQ ID NO: 1753469 - RNA, 19 nt, Artificial Sequence
  Description of Artificial Sequence: Synthetic oligonucleotide
  Sense strand starting at position 3739 of SEQ ID NO: 1562522
caguuaaagcaguaaggau

SEQ ID NO: 1753470 - RNA, 19 nt, Artificial Sequence
  Description of Artificial Sequence: Synthetic oligonucleotide
  Antisense strand to SEQ ID NO: 1753469
auccuuacugcuuuaacug

SEQ ID NO: 1753471 - RNA, 19 nt, Artificial Sequence
  Description of Artificial Sequence: Synthetic oligonucleotide
  Sense strand starting at position 3746 of SEQ ID NO: 1562522
agcaguaaggauugacuga

SEQ ID NO: 1753472 - RNA, 19 nt, Artificial Sequence
  Description of Artificial Sequence: Synthetic oligonucleotide
  Antisense strand to SEQ ID NO: 1753471
ucagucaauccuuacugcu

SEQ ID NO: 1753473 - RNA, 19 nt, Artificial Sequence
  Description of Artificial Sequence: Synthetic oligonucleotide
  Sense strand starting at position 3761 of SEQ ID NO: 1562522
cugaaaucauuagcuauug

SEQ ID NO: 1753474 - RNA, 19 nt, Artificial Sequence
  Description of Artificial Sequence: Synthetic oligonucleotide
  Antisense strand to SEQ ID NO: 1753473
caauagcuaaugauuucag

SEQ ID NO: 1753475 - RNA, 19 nt, Artificial Sequence
  Description of Artificial Sequence: Synthetic oligonucleotide
  Sense strand starting at position 3766 of SEQ ID NO: 1562522
aucauuagcuauugccaga

SEQ ID NO: 1753476 - RNA, 19 nt, Artificial Sequence
  Description of Artificial Sequence: Synthetic oligonucleotide
  Antisense strand to SEQ ID NO: 1753475
ucuggcaauagcuaaugau

SEQ ID NO: 1753477 - RNA, 19 nt, Artificial Sequence
  Description of Artificial Sequence: Synthetic oligonucleotide
  Sense strand starting at position 3771 of SEQ ID NO: 1562522
uagcuauugccagagggaa

SEQ ID NO: 1753478 - RNA, 19 nt, Artificial Sequence
  Description of Artificial Sequence: Synthetic oligonucleotide
  Antisense strand to SEQ ID NO: 1753477
uucccucuggcaauagcua

SEQ ID NO: 1753479 - RNA, 19 nt, Artificial Sequence
  Description of Artificial Sequence: Synthetic oligonucleotide
  Sense strand starting at position 3891 of SEQ ID NO: 1562522
gucagugugaucuggguuu

SEQ ID NO: 1753480 - RNA, 19 nt, Artificial Sequence
  Description of Artificial Sequence: Synthetic oligonucleotide
  Antisense strand to SEQ ID NO: 1753479
aaacccagaucacacugac

SEQ ID NO: 1753481 - RNA, 19 nt, Artificial Sequence
  Description of Artificial Sequence: Synthetic oligonucleotide
  Sense strand starting at position 3893 of SEQ ID NO: 1562522
cagugugaucuggguuugu

SEQ ID NO: 1753482 - RNA, 19 nt, Artificial Sequence
  Description of Artificial Sequence: Synthetic oligonucleotide
  Antisense strand to SEQ ID NO: 1753481
acaaacccagaucacacug

SEQ ID NO: 1753483 - RNA, 19 nt, Artificial Sequence
  Description of Artificial Sequence: Synthetic oligonucleotide
  Sense strand starting at position 3897 of SEQ ID NO: 1562522
gugaucuggguuuguuaau

SEQ ID NO: 1753484 - RNA, 19 nt, Artificial Sequence
  Description of Artificial Sequence: Synthetic oligonucleotide
  Antisense strand to SEQ ID NO: 1753483
auuaacaaacccagaucac

SEQ ID NO: 1753485 - RNA, 19 nt, Artificial Sequence
  Description of Artificial Sequence: Synthetic oligonucleotide
  Sense strand starting at position 3898 of SEQ ID NO: 1562522
ugaucuggguuuguuaauu

SEQ ID NO: 1753486 - RNA, 19 nt, Artificial Sequence
  Description of Artificial Sequence: Synthetic oligonucleotide
  Antisense strand to SEQ ID NO: 1753485
aauuaacaaacccagauca

SEQ ID NO: 1753487 - RNA, 19 nt, Artificial Sequence
  Description of Artificial Sequence: Synthetic oligonucleotide
  Sense strand starting at position 3906 of SEQ ID NO: 1562522
guuuguuaauuggcuccua

SEQ ID NO: 1753488 - RNA, 19 nt, Artificial Sequence
  Description of Artificial Sequence: Synthetic oligonucleotide
  Antisense strand to SEQ ID NO: 1753487
uaggagccaauuaacaaac

SEQ ID NO: 1753489 - RNA, 19 nt, Artificial Sequence
  Description of Artificial Sequence: Synthetic oligonucleotide
  Sense strand starting at position 3907 of SEQ ID NO: 1562522
uuuguuaauuggcuccuau

SEQ ID NO: 1753490 - RNA, 19 nt, Artificial Sequence
  Description of Artificial Sequence: Synthetic oligonucleotide
  Antisense strand to SEQ ID NO: 1753489
auaggagccaauuaacaaa

SEQ ID NO: 1753491 - RNA, 19 nt, Artificial Sequence
  Description of Artificial Sequence: Synthetic oligonucleotide
  Sense strand starting at position 3917 of SEQ ID NO: 1562522
ggcuccuaucuagaguaga

SEQ ID NO: 1753492 - RNA, 19 nt, Artificial Sequence
  Description of Artificial Sequence: Synthetic oligonucleotide
  Antisense strand to SEQ ID NO: 1753491
ucuacucuagauaggagcc

SEQ ID NO: 1753493 - RNA, 19 nt, Artificial Sequence
  Description of Artificial Sequence: Synthetic oligonucleotide
  Sense strand starting at position 3938 of SEQ ID NO: 1562522
caaacuucugucugugaug

SEQ ID NO: 1753494 - RNA, 19 nt, Artificial Sequence
  Description of Artificial Sequence: Synthetic oligonucleotide
  Antisense strand to SEQ ID NO: 1753493
caucacagacagaaguuug

SEQ ID NO: 1753495 - RNA, 19 nt, Artificial Sequence
  Description of Artificial Sequence: Synthetic oligonucleotide
  Sense strand starting at position 225 of SEQ ID NO: 1562524
gagcgagacuuggucugaa

SEQ ID NO: 1753496 - RNA, 19 nt, Artificial Sequence
  Description of Artificial Sequence: Synthetic oligonucleotide
  Antisense strand to SEQ ID NO: 1753495
uucagaccaagucucgcuc

SEQ ID NO: 1753497 - RNA, 19 nt, Artificial Sequence
  Description of Artificial Sequence: Synthetic oligonucleotide
  Sense strand starting at position 253 of SEQ ID NO: 1562524
acuaguacuggugaauuau

SEQ ID NO: 1753498 - RNA, 19 nt, Artificial Sequence
  Description of Artificial Sequence: Synthetic oligonucleotide
  Antisense strand to SEQ ID NO: 1753497
auaauucaccaguacuagu

SEQ ID NO: 1753499 - RNA, 19 nt, Artificial Sequence
  Description of Artificial Sequence: Synthetic oligonucleotide
  Sense strand starting at position 473 of SEQ ID NO: 1562524
gacugaaucucauucguau

SEQ ID NO: 1753500 - RNA, 19 nt, Artificial Sequence
  Description of Artificial Sequence: Synthetic oligonucleotide
  Antisense strand to SEQ ID NO: 1753499
auacgaaugagauucaguc

SEQ ID NO: 1753501 - RNA, 19 nt, Artificial Sequence
  Description of Artificial Sequence: Synthetic oligonucleotide
  Sense strand starting at position 476 of SEQ ID NO: 1562524
ugaaucucauucguauagu

SEQ ID NO: 1753502 - RNA, 19 nt, Artificial Sequence
  Description of Artificial Sequence: Synthetic oligonucleotide
  Antisense strand to SEQ ID NO: 1753501
acuauacgaaugagauuca

SEQ ID NO: 1753503 - RNA, 19 nt, Artificial Sequence
  Description of Artificial Sequence: Synthetic oligonucleotide
  Sense strand starting at position 479 of SEQ ID NO: 1562524
aucucauucguauaguaaa

SEQ ID NO: 1753504 - RNA, 19 nt, Artificial Sequence
  Description of Artificial Sequence: Synthetic oligonucleotide
  Antisense strand to SEQ ID NO: 1753503
uuuacuauacgaaugagau

SEQ ID NO: 1753505 - RNA, 19 nt, Artificial Sequence
  Description of Artificial Sequence: Synthetic oligonucleotide
  Sense strand starting at position 570 of SEQ ID NO: 1562524
gggacaguguuaucacaag

SEQ ID NO: 1753506 - RNA, 19 nt, Artificial Sequence
  Description of Artificial Sequence: Synthetic oligonucleotide
  Antisense strand to SEQ ID NO: 1753505
cuugugauaacacuguccc

SEQ ID NO: 1753507 - RNA, 19 nt, Artificial Sequence
  Description of Artificial Sequence: Synthetic oligonucleotide
  Sense strand starting at position 655 of SEQ ID NO: 1562524
acaagagucguucagaagu

SEQ ID NO: 1753508 - RNA, 19 nt, Artificial Sequence
  Description of Artificial Sequence: Synthetic oligonucleotide
  Antisense strand to SEQ ID NO: 1753507
acuucugaacgacucuugu

SEQ ID NO: 1753509 - RNA, 19 nt, Artificial Sequence
  Description of Artificial Sequence: Synthetic oligonucleotide
  Sense strand starting at position 666 of SEQ ID NO: 1562524
ucagaaguuugucucugac

SEQ ID NO: 1753510 - RNA, 19 nt, Artificial Sequence
  Description of Artificial Sequence: Synthetic oligonucleotide
  Antisense strand to SEQ ID NO: 1753509
gucagagacaaacuucuga

SEQ ID NO: 1753511 - RNA, 19 nt, Artificial Sequence
  Description of Artificial Sequence: Synthetic oligonucleotide
  Sense strand starting at position 668 of SEQ ID NO: 1562524
agaaguuugucucugacca

SEQ ID NO: 1753512 - RNA, 19 nt, Artificial Sequence
  Description of Artificial Sequence: Synthetic oligonucleotide
  Antisense strand to SEQ ID NO: 1753511
uggucagagacaaacuucu

SEQ ID NO: 1753513 - RNA, 19 nt, Artificial Sequence
  Description of Artificial Sequence: Synthetic oligonucleotide
  Sense strand starting at position 669 of SEQ ID NO: 1562524
gaaguuugucucugaccau

SEQ ID NO: 1753514 - RNA, 19 nt, Artificial Sequence
  Description of Artificial Sequence: Synthetic oligonucleotide
  Antisense strand to SEQ ID NO: 1753513
auggucagagacaaacuuc

SEQ ID NO: 1753515 - RNA, 19 nt, Artificial Sequence
  Description of Artificial Sequence: Synthetic oligonucleotide
  Sense strand starting at position 698 of SEQ ID NO: 1562524
ugccuacuggcagagcaau

SEQ ID NO: 1753516 - RNA, 19 nt, Artificial Sequence
  Description of Artificial Sequence: Synthetic oligonucleotide
  Antisense strand to SEQ ID NO: 1753515
auugcucugccaguaggca

SEQ ID NO: 1753517 - RNA, 19 nt, Artificial Sequence
  Description of Artificial Sequence: Synthetic oligonucleotide
  Sense strand starting at position 775 of SEQ ID NO: 1562524
gccaauucgguguaaugga

SEQ ID NO: 1753518 - RNA, 19 nt, Artificial Sequence
  Description of Artificial Sequence: Synthetic oligonucleotide
  Antisense strand to SEQ ID NO: 1753517
uccauuacaccgaauuggc

SEQ ID NO: 1753519 - RNA, 19 nt, Artificial Sequence
  Description of Artificial Sequence: Synthetic oligonucleotide
  Sense strand starting at position 935 of SEQ ID NO: 1562524
gauguaauuggucggaggu

SEQ ID NO: 1753520 - RNA, 19 nt, Artificial Sequence
  Description of Artificial Sequence: Synthetic oligonucleotide
  Antisense strand to SEQ ID NO: 1753519
accuccgaccaauuacauc

SEQ ID NO: 1753521 - RNA, 19 nt, Artificial Sequence
  Description of Artificial Sequence: Synthetic oligonucleotide
  Sense strand starting at position 1121 of SEQ ID NO: 1562524
gcccaaucaugaccuagaa

SEQ ID NO: 1753522 - RNA, 19 nt, Artificial Sequence
  Description of Artificial Sequence: Synthetic oligonucleotide
  Antisense strand to SEQ ID NO: 1753521
uucuaggucaugauugggc

SEQ ID NO: 1753523 - RNA, 19 nt, Artificial Sequence
  Description of Artificial Sequence: Synthetic oligonucleotide
  Sense strand starting at position 2244 of SEQ ID NO: 1562524
gaagucacuuugucuagaa

SEQ ID NO: 1753524 - RNA, 19 nt, Artificial Sequence
  Description of Artificial Sequence: Synthetic oligonucleotide
  Antisense strand to SEQ ID NO: 1753523
uucuagacaaagugacuuc

SEQ ID NO: 1753525 - RNA, 19 nt, Artificial Sequence
  Description of Artificial Sequence: Synthetic oligonucleotide
  Sense strand starting at position 2246 of SEQ ID NO: 1562524
agucacuuugucuagaaau

SEQ ID NO: 1753526 - RNA, 19 nt, Artificial Sequence
  Description of Artificial Sequence: Synthetic oligonucleotide
  Antisense strand to SEQ ID NO: 1753525
auuucuagacaaagugacu

SEQ ID NO: 1753527 - RNA, 19 nt, Artificial Sequence
  Description of Artificial Sequence: Synthetic oligonucleotide
  Sense strand starting at position 2248 of SEQ ID NO: 1562524
ucacuuugucuagaaaugu

SEQ ID NO: 1753528 - RNA, 19 nt, Artificial Sequence
  Description of Artificial Sequence: Synthetic oligonucleotide
  Antisense strand to SEQ ID NO: 1753527
acauuucuagacaaaguga

SEQ ID NO: 1753529 - RNA, 19 nt, Artificial Sequence
  Description of Artificial Sequence: Synthetic oligonucleotide
  Sense strand starting at position 2257 of SEQ ID NO: 1562524
cuagaaaugucauuaguua

SEQ ID NO: 1753530 - RNA, 19 nt, Artificial Sequence
  Description of Artificial Sequence: Synthetic oligonucleotide
  Antisense strand to SEQ ID NO: 1753529
uaacuaaugacauuucuag

SEQ ID NO: 1753531 - RNA, 19 nt, Artificial Sequence
  Description of Artificial Sequence: Synthetic oligonucleotide
  Sense strand starting at position 2268 of SEQ ID NO: 1562524
auuaguuaugacugaguuu

SEQ ID NO: 1753532 - RNA, 19 nt, Artificial Sequence
  Description of Artificial Sequence: Synthetic oligonucleotide
  Antisense strand to SEQ ID NO: 1753531
aaacucagucauaacuaau

SEQ ID NO: 1753533 - RNA, 19 nt, Artificial Sequence
  Description of Artificial Sequence: Synthetic oligonucleotide
  Sense strand starting at position 2269 of SEQ ID NO: 1562524
uuaguuaugacugaguuug

SEQ ID NO: 1753534 - RNA, 19 nt, Artificial Sequence
  Description of Artificial Sequence: Synthetic oligonucleotide
  Antisense strand to SEQ ID NO: 1753533
caaacucagucauaacuaa

SEQ ID NO: 1753535 - RNA, 19 nt, Artificial Sequence
  Description of Artificial Sequence: Synthetic oligonucleotide
  Sense strand starting at position 2290 of SEQ ID NO: 1562524
cacagcgucucauuuguua

SEQ ID NO: 1753536 - RNA, 19 nt, Artificial Sequence
  Description of Artificial Sequence: Synthetic oligonucleotide
  Antisense strand to SEQ ID NO: 1753535
uaacaaaugagacgcugug

SEQ ID NO: 1753537 - RNA, 19 nt, Artificial Sequence
  Description of Artificial Sequence: Synthetic oligonucleotide
  Sense strand starting at position 2294 of SEQ ID NO: 1562524
gcgucucauuuguuacuca

SEQ ID NO: 1753538 - RNA, 19 nt, Artificial Sequence
  Description of Artificial Sequence: Synthetic oligonucleotide
  Antisense strand to SEQ ID NO: 1753537
ugaguaacaaaugagacgc

SEQ ID NO: 1753539 - RNA, 19 nt, Artificial Sequence
  Description of Artificial Sequence: Synthetic oligonucleotide
  Sense strand starting at position 2402 of SEQ ID NO: 1562524
accucaaucccgggacuua

SEQ ID NO: 1753540 - RNA, 19 nt, Artificial Sequence
  Description of Artificial Sequence: Synthetic oligonucleotide
  Antisense strand to SEQ ID NO: 1753539
uaagucccgggauugaggu

SEQ ID NO: 1753541 - RNA, 19 nt, Artificial Sequence
  Description of Artificial Sequence: Synthetic oligonucleotide
  Sense strand starting at position 2440 of SEQ ID NO: 1562524
uuucuuaguccuuaguaua

SEQ ID NO: 1753542 - RNA, 19 nt, Artificial Sequence
  Description of Artificial Sequence: Synthetic oligonucleotide
  Antisense strand to SEQ ID NO: 1753541
uauacuaaggacuaagaaa

SEQ ID NO: 1753543 - RNA, 19 nt, Artificial Sequence
  Description of Artificial Sequence: Synthetic oligonucleotide
  Sense strand starting at position 2476 of SEQ ID NO: 1562524
ggcagaauucgguauucuu

SEQ ID NO: 1753544 - RNA, 19 nt, Artificial Sequence
  Description of Artificial Sequence: Synthetic oligonucleotide
  Antisense strand to SEQ ID NO: 1753543
aagaauaccgaauucugcc

SEQ ID NO: 1753545 - RNA, 19 nt, Artificial Sequence
  Description of Artificial Sequence: Synthetic oligonucleotide
  Sense strand starting at position 3058 of SEQ ID NO: 1562524
cuuaauauugaguauggca

SEQ ID NO: 1753546 - RNA, 19 nt, Artificial Sequence
  Description of Artificial Sequence: Synthetic oligonucleotide
  Antisense strand to SEQ ID NO: 1753545
ugccauacucaauauuaag

SEQ ID NO: 1753547 - RNA, 19 nt, Artificial Sequence
  Description of Artificial Sequence: Synthetic oligonucleotide
  Sense strand starting at position 3060 of SEQ ID NO: 1562524
uaauauugaguauggcaaa

SEQ ID NO: 1753548 - RNA, 19 nt, Artificial Sequence
  Description of Artificial Sequence: Synthetic oligonucleotide
  Antisense strand to SEQ ID NO: 1753547
uuugccauacucaauauua

SEQ ID NO: 1753549 - RNA, 19 nt, Artificial Sequence
  Description of Artificial Sequence: Synthetic oligonucleotide
  Sense strand starting at position 3092 of SEQ ID NO: 1562524
auugaaguccagugugaaa

SEQ ID NO: 1753550 - RNA, 19 nt, Artificial Sequence
  Description of Artificial Sequence: Synthetic oligonucleotide
  Antisense strand to SEQ ID NO: 1753549
uuucacacuggacuucaau

SEQ ID NO: 1753551 - RNA, 19 nt, Artificial Sequence
  Description of Artificial Sequence: Synthetic oligonucleotide
  Sense strand starting at position 3094 of SEQ ID NO: 1562524
ugaaguccagugugaaaca

SEQ ID NO: 1753552 - RNA, 19 nt, Artificial Sequence
  Description of Artificial Sequence: Synthetic oligonucleotide
  Antisense strand to SEQ ID NO: 1753551
uguuucacacuggacuuca

SEQ ID NO: 1753553 - RNA, 19 nt, Artificial Sequence
  Description of Artificial Sequence: Synthetic oligonucleotide
  Sense strand starting at position 3132 of SEQ ID NO: 1562524
ccucguuuggaguacacua

SEQ ID NO: 1753554 - RNA, 19 nt, Artificial Sequence
  Description of Artificial Sequence: Synthetic oligonucleotide
  Antisense strand to SEQ ID NO: 1753553
uaguguacuccaaacgagg

SEQ ID NO: 1753555 - RNA, 19 nt, Artificial Sequence
  Description of Artificial Sequence: Synthetic oligonucleotide
  Sense strand starting at position 3279 of SEQ ID NO: 1562524
gccuguuguauuugguagu

SEQ ID NO: 1753556 - RNA, 19 nt, Artificial Sequence
  Description of Artificial Sequence: Synthetic oligonucleotide
  Antisense strand to SEQ ID NO: 1753555
acuaccaaauacaacaggc

SEQ ID NO: 1753557 - RNA, 19 nt, Artificial Sequence
  Description of Artificial Sequence: Synthetic oligonucleotide
  Sense strand starting at position 3292 of SEQ ID NO: 1562524
gguaguagucuccagauaa

SEQ ID NO: 1753558 - RNA, 19 nt, Artificial Sequence
  Description of Artificial Sequence: Synthetic oligonucleotide
  Antisense strand to SEQ ID NO: 1753557
uuaucuggagacuacuacc

SEQ ID NO: 1753559 - RNA, 19 nt, Artificial Sequence
  Description of Artificial Sequence: Synthetic oligonucleotide
  Sense strand starting at position 3299 of SEQ ID NO: 1562524
gucuccagauaauucguau

SEQ ID NO: 1753560 - RNA, 19 nt, Artificial Sequence
  Description of Artificial Sequence: Synthetic oligonucleotide
  Antisense strand to SEQ ID NO: 1753559
auacgaauuaucuggagac

SEQ ID NO: 1753561 - RNA, 19 nt, Artificial Sequence
  Description of Artificial Sequence: Synthetic oligonucleotide
  Sense strand starting at position 3302 of SEQ ID NO: 1562524
uccagauaauucguauauu

SEQ ID NO: 1753562 - RNA, 19 nt, Artificial Sequence
  Description of Artificial Sequence: Synthetic oligonucleotide
  Antisense strand to SEQ ID NO: 1753561
aauauacgaauuaucugga

SEQ ID NO: 1753563 - RNA, 19 nt, Artificial Sequence
  Description of Artificial Sequence: Synthetic oligonucleotide
  Sense strand starting at position 3318 of SEQ ID NO: 1562524
auucuaaacgguugcauaa

SEQ ID NO: 1753564 - RNA, 19 nt, Artificial Sequence
  Description of Artificial Sequence: Synthetic oligonucleotide
  Antisense strand to SEQ ID NO: 1753563
uuaugcaaccguuuagaau

SEQ ID NO: 1753565 - RNA, 19 nt, Artificial Sequence
  Description of Artificial Sequence: Synthetic oligonucleotide
  Sense strand starting at position 3392 of SEQ ID NO: 1562524
ccaggaaguucggcagauu

SEQ ID NO: 1753566 - RNA, 19 nt, Artificial Sequence
  Description of Artificial Sequence: Synthetic oligonucleotide
  Antisense strand to SEQ ID NO: 1753565
aaucugccgaacuuccugg

SEQ ID NO: 1753567 - RNA, 19 nt, Artificial Sequence
  Description of Artificial Sequence: Synthetic oligonucleotide
  Sense strand starting at position 3459 of SEQ ID NO: 1562524
gcugcuuugggacagugaa

SEQ ID NO: 1753568 - RNA, 19 nt, Artificial Sequence
  Description of Artificial Sequence: Synthetic oligonucleotide
  Antisense strand to SEQ ID NO: 1753567
uucacugucccaaagcagc

SEQ ID NO: 1753569 - RNA, 19 nt, Artificial Sequence
  Description of Artificial Sequence: Synthetic oligonucleotide
  Sense strand starting at position 3531 of SEQ ID NO: 1562524
ggucgucacaccugaacaa

SEQ ID NO: 1753570 - RNA, 19 nt, Artificial Sequence
  Description of Artificial Sequence: Synthetic oligonucleotide
  Antisense strand to SEQ ID NO: 1753569
uuguucaggugugacgacc

SEQ ID NO: 1753571 - RNA, 19 nt, Artificial Sequence
  Description of Artificial Sequence: Synthetic oligonucleotide
  Sense strand starting at position 3664 of SEQ ID NO: 1562524
agaauaucaucucugcuag

SEQ ID NO: 1753572 - RNA, 19 nt, Artificial Sequence
  Description of Artificial Sequence: Synthetic oligonucleotide
  Antisense strand to SEQ ID NO: 1753571
cuagcagagaugauauucu

SEQ ID NO: 1753573 - RNA, 19 nt, Artificial Sequence
  Description of Artificial Sequence: Synthetic oligonucleotide
  Sense strand starting at position 3814 of SEQ ID NO: 1562524
guaggauguucaguagaau

SEQ ID NO: 1753574 - RNA, 19 nt, Artificial Sequence
  Description of Artificial Sequence: Synthetic oligonucleotide
  Antisense strand to SEQ ID NO: 1753573
auucuacugaacauccuac

SEQ ID NO: 1753575 - RNA, 19 nt, Artificial Sequence
  Description of Artificial Sequence: Synthetic oligonucleotide
  Sense strand starting at position 61 of SEQ ID NO: 1562525
uuguuugcagacugauaac

SEQ ID NO: 1753576 - RNA, 19 nt, Artificial Sequence
  Description of Artificial Sequence: Synthetic oligonucleotide
  Antisense strand to SEQ ID NO: 1753575
guuaucagucugcaaacaa

SEQ ID NO: 1753577 - RNA, 19 nt, Artificial Sequence
  Description of Artificial Sequence: Synthetic oligonucleotide
  Sense strand starting at position 72 of SEQ ID NO: 1562525
cugauaacgcauuaugugu

SEQ ID NO: 1753578 - RNA, 19 nt, Artificial Sequence
  Description of Artificial Sequence: Synthetic oligonucleotide
  Antisense strand to SEQ ID NO: 1753577
acacauaaugcguuaucag

SEQ ID NO: 1753579 - RNA, 19 nt, Artificial Sequence
  Description of Artificial Sequence: Synthetic oligonucleotide
  Sense strand starting at position 80 of SEQ ID NO: 1562525
gcauuauguguugaagaga

SEQ ID NO: 1753580 - RNA, 19 nt, Artificial Sequence
  Description of Artificial Sequence: Synthetic oligonucleotide
  Antisense strand to SEQ ID NO: 1753579
ucucuucaacacauaaugc

SEQ ID NO: 1753581 - RNA, 19 nt, Artificial Sequence
  Description of Artificial Sequence: Synthetic oligonucleotide
  Sense strand starting at position 119 of SEQ ID NO: 1562525
auaaacugcuucgucuaau

SEQ ID NO: 1753582 - RNA, 19 nt, Artificial Sequence
  Description of Artificial Sequence: Synthetic oligonucleotide
  Antisense strand to SEQ ID NO: 1753581
auuagacgaagcaguuuau

SEQ ID NO: 1753583 - RNA, 19 nt, Artificial Sequence
  Description of Artificial Sequence: Synthetic oligonucleotide
  Sense strand starting at position 144 of SEQ ID NO: 1562525
uuuagauauuccuucugua

SEQ ID NO: 1753584 - RNA, 19 nt, Artificial Sequence
  Description of Artificial Sequence: Synthetic oligonucleotide
  Antisense strand to SEQ ID NO: 1753583
uacagaaggaauaucuaaa

SEQ ID NO: 1753585 - RNA, 19 nt, Artificial Sequence
  Description of Artificial Sequence: Synthetic oligonucleotide
  Sense strand starting at position 246 of SEQ ID NO: 1562525
guuaaucuacaaggaagua

SEQ ID NO: 1753586 - RNA, 19 nt, Artificial Sequence
  Description of Artificial Sequence: Synthetic oligonucleotide
  Antisense strand to SEQ ID NO: 1753585
uacuuccuuguagauuaac

SEQ ID NO: 1753587 - RNA, 19 nt, Artificial Sequence
  Description of Artificial Sequence: Synthetic oligonucleotide
  Sense strand starting at position 349 of SEQ ID NO: 1562525
auauuccuacaaugggauu

SEQ ID NO: 1753588 - RNA, 19 nt, Artificial Sequence
  Description of Artificial Sequence: Synthetic oligonucleotide
  Antisense strand to SEQ ID NO: 1753587
aaucccauuguaggaauau

SEQ ID NO: 1753589 - RNA, 19 nt, Artificial Sequence
  Description of Artificial Sequence: Synthetic oligonucleotide
  Sense strand starting at position 742 of SEQ ID NO: 1562525
aagcaaugugaguggaucu

SEQ ID NO: 1753590 - RNA, 19 nt, Artificial Sequence
  Description of Artificial Sequence: Synthetic oligonucleotide
  Antisense strand to SEQ ID NO: 1753589
agauccacucacauugcuu

SEQ ID NO: 1753591 - RNA, 19 nt, Artificial Sequence
  Description of Artificial Sequence: Synthetic oligonucleotide
  Sense strand starting at position 743 of SEQ ID NO: 1562525
agcaaugugaguggaucua

SEQ ID NO: 1753592 - RNA, 19 nt, Artificial Sequence
  Description of Artificial Sequence: Synthetic oligonucleotide
  Antisense strand to SEQ ID NO: 1753591
uagauccacucacauugcu

SEQ ID NO: 1753593 - RNA, 19 nt, Artificial Sequence
  Description of Artificial Sequence: Synthetic oligonucleotide
  Sense strand starting at position 836 of SEQ ID NO: 1562525
guauuacuuugggcacuua

SEQ ID NO: 1753594 - RNA, 19 nt, Artificial Sequence
  Description of Artificial Sequence: Synthetic oligonucleotide
  Antisense strand to SEQ ID NO: 1753593
uaagugcccaaaguaauac

SEQ ID NO: 1753595 - RNA, 19 nt, Artificial Sequence
  Description of Artificial Sequence: Synthetic oligonucleotide
  Sense strand starting at position 1105 of SEQ ID NO: 1562525
gcgcaaauuauguaaaguc

SEQ ID NO: 1753596 - RNA, 19 nt, Artificial Sequence
  Description of Artificial Sequence: Synthetic oligonucleotide
  Antisense strand to SEQ ID NO: 1753595
gacuuuacauaauuugcgc

SEQ ID NO: 1753597 - RNA, 19 nt, Artificial Sequence
  Description of Artificial Sequence: Synthetic oligonucleotide
  Sense strand starting at position 1396 of SEQ ID NO: 1562525
ugaagcucgcaauaauaaa

SEQ ID NO: 1753598 - RNA, 19 nt, Artificial Sequence
  Description of Artificial Sequence: Synthetic oligonucleotide
  Antisense strand to SEQ ID NO: 1753597
uuuauuauugcgagcuuca

SEQ ID NO: 1753599 - RNA, 19 nt, Artificial Sequence
  Description of Artificial Sequence: Synthetic oligonucleotide
  Sense strand starting at position 1622 of SEQ ID NO: 1562525
caucuuaacucgguucuga

SEQ ID NO: 1753600 - RNA, 19 nt, Artificial Sequence
  Description of Artificial Sequence: Synthetic oligonucleotide
  Antisense strand to SEQ ID NO: 1753599
ucagaaccgaguuaagaug

SEQ ID NO: 1753601 - RNA, 19 nt, Artificial Sequence
  Description of Artificial Sequence: Synthetic oligonucleotide
  Sense strand starting at position 1670 of SEQ ID NO: 1562525
ggcgaaguuccucgaggga

SEQ ID NO: 1753602 - RNA, 19 nt, Artificial Sequence
  Description of Artificial Sequence: Synthetic oligonucleotide
  Antisense strand to SEQ ID NO: 1753601
ucccucgaggaacuucgcc

SEQ ID NO: 1753603 - RNA, 19 nt, Artificial Sequence
  Description of Artificial Sequence: Synthetic oligonucleotide
  Sense strand starting at position 1795 of SEQ ID NO: 1562525
gaagaaaggugccaaagaa

SEQ ID NO: 1753604 - RNA, 19 nt, Artificial Sequence
  Description of Artificial Sequence: Synthetic oligonucleotide
  Antisense strand to SEQ ID NO: 1753603
uucuuuggcaccuuucuuc

SEQ ID NO: 1753605 - RNA, 19 nt, Artificial Sequence
  Description of Artificial Sequence: Synthetic oligonucleotide
  Sense strand starting at position 1858 of SEQ ID NO: 1562525
ggaggcguuuaccuggaaa

SEQ ID NO: 1753606 - RNA, 19 nt, Artificial Sequence
  Description of Artificial Sequence: Synthetic oligonucleotide
  Antisense strand to SEQ ID NO: 1753605
uuuccagguaaacgccucc

SEQ ID NO: 1753607 - RNA, 19 nt, Artificial Sequence
  Description of Artificial Sequence: Synthetic oligonucleotide
  Sense strand starting at position 1861 of SEQ ID NO: 1562525
ggcguuuaccuggaaagcu

SEQ ID NO: 1753608 - RNA, 19 nt, Artificial Sequence
  Description of Artificial Sequence: Synthetic oligonucleotide
  Antisense strand to SEQ ID NO: 1753607
agcuuuccagguaaacgcc

SEQ ID NO: 1753609 - RNA, 19 nt, Artificial Sequence
  Description of Artificial Sequence: Synthetic oligonucleotide
  Sense strand starting at position 2041 of SEQ ID NO: 1562525
cuuccugauuggcuccaaa

SEQ ID NO: 1753610 - RNA, 19 nt, Artificial Sequence
  Description of Artificial Sequence: Synthetic oligonucleotide
  Antisense strand to SEQ ID NO: 1753609
uuuggagccaaucaggaag

SEQ ID NO: 1753611 - RNA, 19 nt, Artificial Sequence
  Description of Artificial Sequence: Synthetic oligonucleotide
  Sense strand starting at position 2173 of SEQ ID NO: 1562525
cgacuauguccgccauguu

SEQ ID NO: 1753612 - RNA, 19 nt, Artificial Sequence
  Description of Artificial Sequence: Synthetic oligonucleotide
  Antisense strand to SEQ ID NO: 1753611
aacauggcggacauagucg

SEQ ID NO: 1753613 - RNA, 19 nt, Artificial Sequence
  Description of Artificial Sequence: Synthetic oligonucleotide
  Sense strand starting at position 2174 of SEQ ID NO: 1562525
gacuauguccgccauguua

SEQ ID NO: 1753614 - RNA, 19 nt, Artificial Sequence
  Description of Artificial Sequence: Synthetic oligonucleotide
  Antisense strand to SEQ ID NO: 1753613
uaacauggcggacauaguc

SEQ ID NO: 1753615 - RNA, 19 nt, Artificial Sequence
  Description of Artificial Sequence: Synthetic oligonucleotide
  Sense strand starting at position 2293 of SEQ ID NO: 1562525
ugcuaagugccugagauua

SEQ ID NO: 1753616 - RNA, 19 nt, Artificial Sequence
  Description of Artificial Sequence: Synthetic oligonucleotide
  Antisense strand to SEQ ID NO: 1753615
uaaucucaggcacuuagca

SEQ ID NO: 1753617 - RNA, 19 nt, Artificial Sequence
  Description of Artificial Sequence: Synthetic oligonucleotide
  Sense strand starting at position 2392 of SEQ ID NO: 1562525
ucaguuucgacagggauau

SEQ ID NO: 1753618 - RNA, 19 nt, Artificial Sequence
  Description of Artificial Sequence: Synthetic oligonucleotide
  Antisense strand to SEQ ID NO: 1753617
auaucccugucgaaacuga

SEQ ID NO: 1753619 - RNA, 19 nt, Artificial Sequence
  Description of Artificial Sequence: Synthetic oligonucleotide
  Sense strand starting at position 2393 of SEQ ID NO: 1562525
caguuucgacagggauaug

SEQ ID NO: 1753620 - RNA, 19 nt, Artificial Sequence
  Description of Artificial Sequence: Synthetic oligonucleotide
  Antisense strand to SEQ ID NO: 1753619
cauaucccugucgaaacug

SEQ ID NO: 1753621 - RNA, 19 nt, Artificial Sequence
  Description of Artificial Sequence: Synthetic oligonucleotide
  Sense strand starting at position 2404 of SEQ ID NO: 1562525
gggauaugcauccgggaga

SEQ ID NO: 1753622 - RNA, 19 nt, Artificial Sequence
  Description of Artificial Sequence: Synthetic oligonucleotide
  Antisense strand to SEQ ID NO: 1753621
ucucccggaugcauauccc

SEQ ID NO: 1753623 - RNA, 19 nt, Artificial Sequence
  Description of Artificial Sequence: Synthetic oligonucleotide
  Sense strand starting at position 2647 of SEQ ID NO: 1562525
cgcacaauuggcuaagaau

SEQ ID NO: 1753624 - RNA, 19 nt, Artificial Sequence
  Description of Artificial Sequence: Synthetic oligonucleotide
  Antisense strand to SEQ ID NO: 1753623
auucuuagccaauugugcg

SEQ ID NO: 1753625 - RNA, 19 nt, Artificial Sequence
  Description of Artificial Sequence: Synthetic oligonucleotide
  Sense strand starting at position 2659 of SEQ ID NO: 1562525
uaagaauggguuuagcauu

SEQ ID NO: 1753626 - RNA, 19 nt, Artificial Sequence
  Description of Artificial Sequence: Synthetic oligonucleotide
  Antisense strand to SEQ ID NO: 1753625
aaugcuaaacccauucuua

SEQ ID NO: 1753627 - RNA, 19 nt, Artificial Sequence
  Description of Artificial Sequence: Synthetic oligonucleotide
  Sense strand starting at position 2965 of SEQ ID NO: 1562525
cccggugucggugcguaaa

SEQ ID NO: 1753628 - RNA, 19 nt, Artificial Sequence
  Description of Artificial Sequence: Synthetic oligonucleotide
  Antisense strand to SEQ ID NO: 1753627
uuuacgcaccgacaccggg

SEQ ID NO: 1753629 - RNA, 19 nt, Artificial Sequence
  Description of Artificial Sequence: Synthetic oligonucleotide
  Sense strand starting at position 3059 of SEQ ID NO: 1562525
gaaacugauuuguagaaau

SEQ ID NO: 1753630 - RNA, 19 nt, Artificial Sequence
  Description of Artificial Sequence: Synthetic oligonucleotide
  Antisense strand to SEQ ID NO: 1753629
auuucuacaaaucaguuuc

SEQ ID NO: 1753631 - RNA, 19 nt, Artificial Sequence
  Description of Artificial Sequence: Synthetic oligonucleotide
  Sense strand starting at position 3178 of SEQ ID NO: 1562525
cuaagaugucaaggccuuu

SEQ ID NO: 1753632 - RNA, 19 nt, Artificial Sequence
  Description of Artificial Sequence: Synthetic oligonucleotide
  Antisense strand to SEQ ID NO: 1753631
aaaggccuugacaucuuag

SEQ ID NO: 1753633 - RNA, 19 nt, Artificial Sequence
  Description of Artificial Sequence: Synthetic oligonucleotide
  Sense strand starting at position 3235 of SEQ ID NO: 1562525
gguguacuuucucuuuaug

SEQ ID NO: 1753634 - RNA, 19 nt, Artificial Sequence
  Description of Artificial Sequence: Synthetic oligonucleotide
  Antisense strand to SEQ ID NO: 1753633
cauaaagagaaaguacacc

SEQ ID NO: 1753635 - RNA, 19 nt, Artificial Sequence
  Description of Artificial Sequence: Synthetic oligonucleotide
  Sense strand starting at position 3260 of SEQ ID NO: 1562525
uugucucuggcagauuacu

SEQ ID NO: 1753636 - RNA, 19 nt, Artificial Sequence
  Description of Artificial Sequence: Synthetic oligonucleotide
  Antisense strand to SEQ ID NO: 1753635
aguaaucugccagagacaa

SEQ ID NO: 1753637 - RNA, 19 nt, Artificial Sequence
  Description of Artificial Sequence: Synthetic oligonucleotide
  Sense strand starting at position 3266 of SEQ ID NO: 1562525
cuggcagauuacuugguua

SEQ ID NO: 1753638 - RNA, 19 nt, Artificial Sequence
  Description of Artificial Sequence: Synthetic oligonucleotide
  Antisense strand to SEQ ID NO: 1753637
uaaccaaguaaucugccag

SEQ ID NO: 1753639 - RNA, 19 nt, Artificial Sequence
  Description of Artificial Sequence: Synthetic oligonucleotide
  Sense strand starting at position 3268 of SEQ ID NO: 1562525
ggcagauuacuugguuaau

SEQ ID NO: 1753640 - RNA, 19 nt, Artificial Sequence
  Description of Artificial Sequence: Synthetic oligonucleotide
  Antisense strand to SEQ ID NO: 1753639
auuaaccaaguaaucugcc

SEQ ID NO: 1753641 - RNA, 19 nt, Artificial Sequence
  Description of Artificial Sequence: Synthetic oligonucleotide
  Sense strand starting at position 3269 of SEQ ID NO: 1562525
gcagauuacuugguuaauu

SEQ ID NO: 1753642 - RNA, 19 nt, Artificial Sequence
  Description of Artificial Sequence: Synthetic oligonucleotide
  Antisense strand to SEQ ID NO: 1753641
aauuaaccaaguaaucugc

SEQ ID NO: 1753643 - RNA, 19 nt, Artificial Sequence
  Description of Artificial Sequence: Synthetic oligonucleotide
  Sense strand starting at position 3329 of SEQ ID NO: 1562525
ggcuuuauuugccugucuu

SEQ ID NO: 1753644 - RNA, 19 nt, Artificial Sequence
  Description of Artificial Sequence: Synthetic oligonucleotide
  Antisense strand to SEQ ID NO: 1753643
aagacaggcaaauaaagcc

SEQ ID NO: 1753645 - RNA, 19 nt, Artificial Sequence
  Description of Artificial Sequence: Synthetic oligonucleotide
  Sense strand starting at position 3330 of SEQ ID NO: 1562525
gcuuuauuugccugucuua

SEQ ID NO: 1753646 - RNA, 19 nt, Artificial Sequence
  Description of Artificial Sequence: Synthetic oligonucleotide
  Antisense strand to SEQ ID NO: 1753645
uaagacaggcaaauaaagc

SEQ ID NO: 1753647 - RNA, 19 nt, Artificial Sequence
  Description of Artificial Sequence: Synthetic oligonucleotide
  Sense strand starting at position 3344 of SEQ ID NO: 1562525
ucuuauucugcuuauguua

SEQ ID NO: 1753648 - RNA, 19 nt, Artificial Sequence
  Description of Artificial Sequence: Synthetic oligonucleotide
  Antisense strand to SEQ ID NO: 1753647
uaacauaagcagaauaaga

SEQ ID NO: 1753649 - RNA, 19 nt, Artificial Sequence
  Description of Artificial Sequence: Synthetic oligonucleotide
  Sense strand starting at position 3965 of SEQ ID NO: 1562525
uguuccuuccgagacugua

SEQ ID NO: 1753650 - RNA, 19 nt, Artificial Sequence
  Description of Artificial Sequence: Synthetic oligonucleotide
  Antisense strand to SEQ ID NO: 1753649
uacagucucggaaggaaca

SEQ ID NO: 1753651 - RNA, 19 nt, Artificial Sequence
  Description of Artificial Sequence: Synthetic oligonucleotide
  Sense strand starting at position 3968 of SEQ ID NO: 1562525
uccuuccgagacuguaauu

SEQ ID NO: 1753652 - RNA, 19 nt, Artificial Sequence
  Description of Artificial Sequence: Synthetic oligonucleotide
  Antisense strand to SEQ ID NO: 1753651
aauuacagucucggaagga

SEQ ID NO: 1753653 - RNA, 19 nt, Artificial Sequence
  Description of Artificial Sequence: Synthetic oligonucleotide
  Sense strand starting at position 3978 of SEQ ID NO: 1562525
acuguaauuuaacaggguu

SEQ ID NO: 1753654 - RNA, 19 nt, Artificial Sequence
  Description of Artificial Sequence: Synthetic oligonucleotide
  Antisense strand to SEQ ID NO: 1753653
aacccuguuaaauuacagu

SEQ ID NO: 1753655 - RNA, 19 nt, Artificial Sequence
  Description of Artificial Sequence: Synthetic oligonucleotide
  Sense strand starting at position 24 of SEQ ID NO: 1562526
uugcuuuacucagaccuga

SEQ ID NO: 1753656 - RNA, 19 nt, Artificial Sequence
  Description of Artificial Sequence: Synthetic oligonucleotide
  Antisense strand to SEQ ID NO: 1753655
ucaggucugaguaaagcaa

SEQ ID NO: 1753657 - RNA, 19 nt, Artificial Sequence
  Description of Artificial Sequence: Synthetic oligonucleotide
  Sense strand starting at position 34 of SEQ ID NO: 1562526
cagaccugagggugugaaa

SEQ ID NO: 1753658 - RNA, 19 nt, Artificial Sequence
  Description of Artificial Sequence: Synthetic oligonucleotide
  Antisense strand to SEQ ID NO: 1753657
uuucacacccucaggucug

SEQ ID NO: 1753659 - RNA, 19 nt, Artificial Sequence
  Description of Artificial Sequence: Synthetic oligonucleotide
  Sense strand starting at position 484 of SEQ ID NO: 1562526
uugugaugucacugcccua

SEQ ID NO: 1753660 - RNA, 19 nt, Artificial Sequence
  Description of Artificial Sequence: Synthetic oligonucleotide
  Antisense strand to SEQ ID NO: 1753659
uagggcagugacaucacaa

SEQ ID NO: 1753661 - RNA, 19 nt, Artificial Sequence
  Description of Artificial Sequence: Synthetic oligonucleotide
  Sense strand starting at position 489 of SEQ ID NO: 1562526
augucacugcccuagugau

SEQ ID NO: 1753662 - RNA, 19 nt, Artificial Sequence
  Description of Artificial Sequence: Synthetic oligonucleotide
  Antisense strand to SEQ ID NO: 1753661
aucacuagggcagugacau

SEQ ID NO: 1753663 - RNA, 19 nt, Artificial Sequence
  Description of Artificial Sequence: Synthetic oligonucleotide
  Sense strand starting at position 620 of SEQ ID NO: 1562526
cgagaaugccaaggacauu

SEQ ID NO: 1753664 - RNA, 19 nt, Artificial Sequence
  Description of Artificial Sequence: Synthetic oligonucleotide
  Antisense strand to SEQ ID NO: 1753663
aauguccuuggcauucucg

SEQ ID NO: 1753665 - RNA, 19 nt, Artificial Sequence
  Description of Artificial Sequence: Synthetic oligonucleotide
  Sense strand starting at position 1628 of SEQ ID NO: 1562526
cucacucccugaugagaag

SEQ ID NO: 1753666 - RNA, 19 nt, Artificial Sequence
  Description of Artificial Sequence: Synthetic oligonucleotide
  Antisense strand to SEQ ID NO: 1753665
cuucucaucagggagugag

SEQ ID NO: 1753667 - RNA, 19 nt, Artificial Sequence
  Description of Artificial Sequence: Synthetic oligonucleotide
  Sense strand starting at position 1700 of SEQ ID NO: 1562526
ccaauuguuccugacugca

SEQ ID NO: 1753668 - RNA, 19 nt, Artificial Sequence
  Description of Artificial Sequence: Synthetic oligonucleotide
  Antisense strand to SEQ ID NO: 1753667
ugcagucaggaacaauugg

SEQ ID NO: 1753669 - RNA, 19 nt, Artificial Sequence
  Description of Artificial Sequence: Synthetic oligonucleotide
  Sense strand starting at position 1817 of SEQ ID NO: 1562526
aggcgucuguccucaguca

SEQ ID NO: 1753670 - RNA, 19 nt, Artificial Sequence
  Description of Artificial Sequence: Synthetic oligonucleotide
  Antisense strand to SEQ ID NO: 1753669
ugacugaggacagacgccu

SEQ ID NO: 1753671 - RNA, 19 nt, Artificial Sequence
  Description of Artificial Sequence: Synthetic oligonucleotide
  Sense strand starting at position 1872 of SEQ ID NO: 1562526
ucaauuacuugggaaagua

SEQ ID NO: 1753672 - RNA, 19 nt, Artificial Sequence
  Description of Artificial Sequence: Synthetic oligonucleotide
  Antisense strand to SEQ ID NO: 1753671
uacuuucccaaguaauuga

SEQ ID NO: 1753673 - RNA, 19 nt, Artificial Sequence
  Description of Artificial Sequence: Synthetic oligonucleotide
  Sense strand starting at position 1887 of SEQ ID NO: 1562526
aguaaaucaccucaguguu

SEQ ID NO: 1753674 - RNA, 19 nt, Artificial Sequence
  Description of Artificial Sequence: Synthetic oligonucleotide
  Antisense strand to SEQ ID NO: 1753673
aacacugaggugauuuacu

SEQ ID NO: 1753675 - RNA, 19 nt, Artificial Sequence
  Description of Artificial Sequence: Synthetic oligonucleotide
  Sense strand starting at position 1951 of SEQ ID NO: 1562526
acagaugggucaucucauc

SEQ ID NO: 1753676 - RNA, 19 nt, Artificial Sequence
  Description of Artificial Sequence: Synthetic oligonucleotide
  Antisense strand to SEQ ID NO: 1753675
gaugagaugacccaucugu

SEQ ID NO: 1753677 - RNA, 19 nt, Artificial Sequence
  Description of Artificial Sequence: Synthetic oligonucleotide
  Sense strand starting at position 1956 of SEQ ID NO: 1562526
ugggucaucucauccucau

SEQ ID NO: 1753678 - RNA, 19 nt, Artificial Sequence
  Description of Artificial Sequence: Synthetic oligonucleotide
  Antisense strand to SEQ ID NO: 1753677
augaggaugagaugaccca

SEQ ID NO: 1753679 - RNA, 19 nt, Artificial Sequence
  Description of Artificial Sequence: Synthetic oligonucleotide
  Sense strand starting at position 2391 of SEQ ID NO: 1562526
gaagguugcuucuaggaga

SEQ ID NO: 1753680 - RNA, 19 nt, Artificial Sequence
  Description of Artificial Sequence: Synthetic oligonucleotide
  Antisense strand to SEQ ID NO: 1753679
ucuccuagaagcaaccuuc

SEQ ID NO: 1753681 - RNA, 19 nt, Artificial Sequence
  Description of Artificial Sequence: Synthetic oligonucleotide
  Sense strand starting at position 2394 of SEQ ID NO: 1562526
gguugcuucuaggagagaa

SEQ ID NO: 1753682 - RNA, 19 nt, Artificial Sequence
  Description of Artificial Sequence: Synthetic oligonucleotide
  Antisense strand to SEQ ID NO: 1753681
uucucuccuagaagcaacc

SEQ ID NO: 1753683 - RNA, 19 nt, Artificial Sequence
  Description of Artificial Sequence: Synthetic oligonucleotide
  Sense strand starting at position 2406 of SEQ ID NO: 1562526
gagagaaagucuugaguca

SEQ ID NO: 1753684 - RNA, 19 nt, Artificial Sequence
  Description of Artificial Sequence: Synthetic oligonucleotide
  Antisense strand to SEQ ID NO: 1753683
ugacucaagacuuucucuc

SEQ ID NO: 1753685 - RNA, 19 nt, Artificial Sequence
  Description of Artificial Sequence: Synthetic oligonucleotide
  Sense strand starting at position 2419 of SEQ ID NO: 1562526
gagucaggcuuuguggaga

SEQ ID NO: 1753686 - RNA, 19 nt, Artificial Sequence
  Description of Artificial Sequence: Synthetic oligonucleotide
  Antisense strand to SEQ ID NO: 1753685
ucuccacaaagccugacuc

SEQ ID NO: 1753687 - RNA, 19 nt, Artificial Sequence
  Description of Artificial Sequence: Synthetic oligonucleotide
  Sense strand starting at position 2455 of SEQ ID NO: 1562526
ccaagcguuccugacacaa

SEQ ID NO: 1753688 - RNA, 19 nt, Artificial Sequence
  Description of Artificial Sequence: Synthetic oligonucleotide
  Antisense strand to SEQ ID NO: 1753687
uugugucaggaacgcuugg

SEQ ID NO: 1753689 - RNA, 19 nt, Artificial Sequence
  Description of Artificial Sequence: Synthetic oligonucleotide
  Sense strand starting at position 2792 of SEQ ID NO: 1562526
uuaauauagcgcuggauuc

SEQ ID NO: 1753690 - RNA, 19 nt, Artificial Sequence
  Description of Artificial Sequence: Synthetic oligonucleotide
  Antisense strand to SEQ ID NO: 1753689
gaauccagcgcuauauuaa

SEQ ID NO: 1753691 - RNA, 19 nt, Artificial Sequence
  Description of Artificial Sequence: Synthetic oligonucleotide
  Sense strand starting at position 2921 of SEQ ID NO: 1562526
cgcagagauucugcgccau

SEQ ID NO: 1753692 - RNA, 19 nt, Artificial Sequence
  Description of Artificial Sequence: Synthetic oligonucleotide
  Antisense strand to SEQ ID NO: 1753691
auggcgcagaaucucugcg

SEQ ID NO: 1753693 - RNA, 19 nt, Artificial Sequence
  Description of Artificial Sequence: Synthetic oligonucleotide
  Sense strand starting at position 2923 of SEQ ID NO: 1562526
cagagauucugcgccauuu

SEQ ID NO: 1753694 - RNA, 19 nt, Artificial Sequence
  Description of Artificial Sequence: Synthetic oligonucleotide
  Antisense strand to SEQ ID NO: 1753693
aaauggcgcagaaucucug

SEQ ID NO: 1753695 - RNA, 19 nt, Artificial Sequence
  Description of Artificial Sequence: Synthetic oligonucleotide
  Sense strand starting at position 2945 of SEQ ID NO: 1562526
ggguguuccuucuuaaacg

SEQ ID NO: 1753696 - RNA, 19 nt, Artificial Sequence
  Description of Artificial Sequence: Synthetic oligonucleotide
  Antisense strand to SEQ ID NO: 1753695
cguuuaagaaggaacaccc

SEQ ID NO: 1753697 - RNA, 19 nt, Artificial Sequence
  Description of Artificial Sequence: Synthetic oligonucleotide
  Sense strand starting at position 2946 of SEQ ID NO: 1562526
gguguuccuucuuaaacgu

SEQ ID NO: 1753698 - RNA, 19 nt, Artificial Sequence
  Description of Artificial Sequence: Synthetic oligonucleotide
  Antisense strand to SEQ ID NO: 1753697
acguuuaagaaggaacacc

SEQ ID NO: 1753699 - RNA, 19 nt, Artificial Sequence
  Description of Artificial Sequence: Synthetic oligonucleotide
  Sense strand starting at position 2954 of SEQ ID NO: 1562526
uucuuaaacgucggauaga

SEQ ID NO: 1753700 - RNA, 19 nt, Artificial Sequence
  Description of Artificial Sequence: Synthetic oligonucleotide
  Antisense strand to SEQ ID NO: 1753699
ucuauccgacguuuaagaa

SEQ ID NO: 1753701 - RNA, 19 nt, Artificial Sequence
  Description of Artificial Sequence: Synthetic oligonucleotide
  Sense strand starting at position 2955 of SEQ ID NO: 1562526
ucuuaaacgucggauagaa

SEQ ID NO: 1753702 - RNA, 19 nt, Artificial Sequence
  Description of Artificial Sequence: Synthetic oligonucleotide
  Antisense strand to SEQ ID NO: 1753701
uucuauccgacguuuaaga

SEQ ID NO: 1753703 - RNA, 19 nt, Artificial Sequence
  Description of Artificial Sequence: Synthetic oligonucleotide
  Sense strand starting at position 2957 of SEQ ID NO: 1562526
uuaaacgucggauagaauu

SEQ ID NO: 1753704 - RNA, 19 nt, Artificial Sequence
  Description of Artificial Sequence: Synthetic oligonucleotide
  Antisense strand to SEQ ID NO: 1753703
aauucuauccgacguuuaa

SEQ ID NO: 1753705 - RNA, 19 nt, Artificial Sequence
  Description of Artificial Sequence: Synthetic oligonucleotide
  Sense strand starting at position 2979 of SEQ ID NO: 1562526
cugugaagcuaucuagaac

SEQ ID NO: 1753706 - RNA, 19 nt, Artificial Sequence
  Description of Artificial Sequence: Synthetic oligonucleotide
  Antisense strand to SEQ ID NO: 1753705
guucuagauagcuucacag

SEQ ID NO: 1753707 - RNA, 19 nt, Artificial Sequence
  Description of Artificial Sequence: Synthetic oligonucleotide
  Sense strand starting at position 3110 of SEQ ID NO: 1562526
ucagguaguuuguugauaa

SEQ ID NO: 1753708 - RNA, 19 nt, Artificial Sequence
  Description of Artificial Sequence: Synthetic oligonucleotide
  Antisense strand to SEQ ID NO: 1753707
uuaucaacaaacuaccuga

SEQ ID NO: 1753709 - RNA, 19 nt, Artificial Sequence
  Description of Artificial Sequence: Synthetic oligonucleotide
  Sense strand starting at position 3111 of SEQ ID NO: 1562526
cagguaguuuguugauaau

SEQ ID NO: 1753710 - RNA, 19 nt, Artificial Sequence
  Description of Artificial Sequence: Synthetic oligonucleotide
  Antisense strand to SEQ ID NO: 1753709
auuaucaacaaacuaccug

SEQ ID NO: 1753711 - RNA, 19 nt, Artificial Sequence
  Description of Artificial Sequence: Synthetic oligonucleotide
  Sense strand starting at position 3407 of SEQ ID NO: 1562526
gucagaagauuaggcagau

SEQ ID NO: 1753712 - RNA, 19 nt, Artificial Sequence
  Description of Artificial Sequence: Synthetic oligonucleotide
  Antisense strand to SEQ ID NO: 1753711
aucugccuaaucuucugac

SEQ ID NO: 1753713 - RNA, 19 nt, Artificial Sequence
  Description of Artificial Sequence: Synthetic oligonucleotide
  Sense strand starting at position 3529 of SEQ ID NO: 1562526
ugcucuaacuugcgugaca

SEQ ID NO: 1753714 - RNA, 19 nt, Artificial Sequence
  Description of Artificial Sequence: Synthetic oligonucleotide
  Antisense strand to SEQ ID NO: 1753713
ugucacgcaaguuagagca

SEQ ID NO: 1753715 - RNA, 19 nt, Artificial Sequence
  Description of Artificial Sequence: Synthetic oligonucleotide
  Sense strand starting at position 3530 of SEQ ID NO: 1562526
gcucuaacuugcgugacaa

SEQ ID NO: 1753716 - RNA, 19 nt, Artificial Sequence
  Description of Artificial Sequence: Synthetic oligonucleotide
  Antisense strand to SEQ ID NO: 1753715
uugucacgcaaguuagagc

SEQ ID NO: 1753717 - RNA, 19 nt, Artificial Sequence
  Description of Artificial Sequence: Synthetic oligonucleotide
  Sense strand starting at position 3531 of SEQ ID NO: 1562526
cucuaacuugcgugacaaa

SEQ ID NO: 1753718 - RNA, 19 nt, Artificial Sequence
  Description of Artificial Sequence: Synthetic oligonucleotide
  Antisense strand to SEQ ID NO: 1753717
uuugucacgcaaguuagag

SEQ ID NO: 1753719 - RNA, 19 nt, Artificial Sequence
  Description of Artificial Sequence: Synthetic oligonucleotide
  Sense strand starting at position 3595 of SEQ ID NO: 1562526
cuuucugcucugcaaagaa

SEQ ID NO: 1753720 - RNA, 19 nt, Artificial Sequence
  Description of Artificial Sequence: Synthetic oligonucleotide
  Antisense strand to SEQ ID NO: 1753719
uucuuugcagagcagaaag

SEQ ID NO: 1753721 - RNA, 19 nt, Artificial Sequence
  Description of Artificial Sequence: Synthetic oligonucleotide
  Sense strand starting at position 3636 of SEQ ID NO: 1562526
gucagagacugggagaaua

SEQ ID NO: 1753722 - RNA, 19 nt, Artificial Sequence
  Description of Artificial Sequence: Synthetic oligonucleotide
  Antisense strand to SEQ ID NO: 1753721
uauucucccagucucugac

SEQ ID NO: 1753723 - RNA, 19 nt, Artificial Sequence
  Description of Artificial Sequence: Synthetic oligonucleotide
  Sense strand starting at position 3657 of SEQ ID NO: 1562526
uuugaaacguccugcagca

SEQ ID NO: 1753724 - RNA, 19 nt, Artificial Sequence
  Description of Artificial Sequence: Synthetic oligonucleotide
  Antisense strand to SEQ ID NO: 1753723
ugcugcaggacguuucaaa

SEQ ID NO: 1753725 - RNA, 19 nt, Artificial Sequence
  Description of Artificial Sequence: Synthetic oligonucleotide
  Sense strand starting at position 3847 of SEQ ID NO: 1562526
guccauuuguuacagcuga

SEQ ID NO: 1753726 - RNA, 19 nt, Artificial Sequence
  Description of Artificial Sequence: Synthetic oligonucleotide
  Antisense strand to SEQ ID NO: 1753725
ucagcuguaacaaauggac

SEQ ID NO: 1753727 - RNA, 19 nt, Artificial Sequence
  Description of Artificial Sequence: Synthetic oligonucleotide
  Sense strand starting at position 3854 of SEQ ID NO: 1562526
uguuacagcugaugaaucu

SEQ ID NO: 1753728 - RNA, 19 nt, Artificial Sequence
  Description of Artificial Sequence: Synthetic oligonucleotide
  Antisense strand to SEQ ID NO: 1753727
agauucaucagcuguaaca

SEQ ID NO: 1753729 - RNA, 19 nt, Artificial Sequence
  Description of Artificial Sequence: Synthetic oligonucleotide
  Sense strand starting at position 3939 of SEQ ID NO: 1562526
uucucuggcuuuggacaaa

SEQ ID NO: 1753730 - RNA, 19 nt, Artificial Sequence
  Description of Artificial Sequence: Synthetic oligonucleotide
  Antisense strand to SEQ ID NO: 1753729
uuuguccaaagccagagaa

SEQ ID NO: 1753731 - RNA, 19 nt, Artificial Sequence
  Description of Artificial Sequence: Synthetic oligonucleotide
  Sense strand starting at position 7 of SEQ ID NO: 1562527
gccugagauugaccacaug

SEQ ID NO: 1753732 - RNA, 19 nt, Artificial Sequence
  Description of Artificial Sequence: Synthetic oligonucleotide
  Antisense strand to SEQ ID NO: 1753731
cauguggucaaucucaggc

SEQ ID NO: 1753733 - RNA, 19 nt, Artificial Sequence
  Description of Artificial Sequence: Synthetic oligonucleotide
  Sense strand starting at position 37 of SEQ ID NO: 1562527
uguaaauacugcugagaaa

SEQ ID NO: 1753734 - RNA, 19 nt, Artificial Sequence
  Description of Artificial Sequence: Synthetic oligonucleotide
  Antisense strand to SEQ ID NO: 1753733
uuucucagcaguauuuaca

SEQ ID NO: 1753735 - RNA, 19 nt, Artificial Sequence
  Description of Artificial Sequence: Synthetic oligonucleotide
  Sense strand starting at position 180 of SEQ ID NO: 1562527
gugggagaacuuugacuuc

SEQ ID NO: 1753736 - RNA, 19 nt, Artificial Sequence
  Description of Artificial Sequence: Synthetic oligonucleotide
  Antisense strand to SEQ ID NO: 1753735
gaagucaaaguucucccac

SEQ ID NO: 1753737 - RNA, 19 nt, Artificial Sequence
  Description of Artificial Sequence: Synthetic oligonucleotide
  Sense strand starting at position 252 of SEQ ID NO: 1562527
gcagguuucccuggagucu

SEQ ID NO: 1753738 - RNA, 19 nt, Artificial Sequence
  Description of Artificial Sequence: Synthetic oligonucleotide
  Antisense strand to SEQ ID NO: 1753737
agacuccagggaaaccugc

SEQ ID NO: 1753739 - RNA, 19 nt, Artificial Sequence
  Description of Artificial Sequence: Synthetic oligonucleotide
  Sense strand starting at position 453 of SEQ ID NO: 1562527
caucuuccacugggaugua

SEQ ID NO: 1753740 - RNA, 19 nt, Artificial Sequence
  Description of Artificial Sequence: Synthetic oligonucleotide
  Antisense strand to SEQ ID NO: 1753739
uacaucccaguggaagaug

SEQ ID NO: 1753741 - RNA, 19 nt, Artificial Sequence
  Description of Artificial Sequence: Synthetic oligonucleotide
  Sense strand starting at position 1231 of SEQ ID NO: 1562527
ugcggagaagugggugaau

SEQ ID NO: 1753742 - RNA, 19 nt, Artificial Sequence
  Description of Artificial Sequence: Synthetic oligonucleotide
  Antisense strand to SEQ ID NO: 1753741
auucacccacuucuccgca

SEQ ID NO: 1753743 - RNA, 19 nt, Artificial Sequence
  Description of Artificial Sequence: Synthetic oligonucleotide
  Sense strand starting at position 1232 of SEQ ID NO: 1562527
gcggagaagugggugaaua

SEQ ID NO: 1753744 - RNA, 19 nt, Artificial Sequence
  Description of Artificial Sequence: Synthetic oligonucleotide
  Antisense strand to SEQ ID NO: 1753743
uauucacccacuucuccgc

SEQ ID NO: 1753745 - RNA, 19 nt, Artificial Sequence
  Description of Artificial Sequence: Synthetic oligonucleotide
  Sense strand starting at position 1821 of SEQ ID NO: 1562527
ugggcuucuccucggacau

SEQ ID NO: 1753746 - RNA, 19 nt, Artificial Sequence
  Description of Artificial Sequence: Synthetic oligonucleotide
  Antisense strand to SEQ ID NO: 1753745
auguccgaggagaagccca

SEQ ID NO: 1753747 - RNA, 19 nt, Artificial Sequence
  Description of Artificial Sequence: Synthetic oligonucleotide
  Sense strand starting at position 2869 of SEQ ID NO: 1562527
ggaggucucaucugauggu

SEQ ID NO: 1753748 - RNA, 19 nt, Artificial Sequence
  Description of Artificial Sequence: Synthetic oligonucleotide
  Antisense strand to SEQ ID NO: 1753747
accaucagaugagaccucc

SEQ ID NO: 1753749 - RNA, 19 nt, Artificial Sequence
  Description of Artificial Sequence: Synthetic oligonucleotide
  Sense strand starting at position 2975 of SEQ ID NO: 1562527
uucuguccugccugggaaa

SEQ ID NO: 1753750 - RNA, 19 nt, Artificial Sequence
  Description of Artificial Sequence: Synthetic oligonucleotide
  Antisense strand to SEQ ID NO: 1753749
uuucccaggcaggacagaa

SEQ ID NO: 1753751 - RNA, 19 nt, Artificial Sequence
  Description of Artificial Sequence: Synthetic oligonucleotide
  Sense strand starting at position 3319 of SEQ ID NO: 1562527
gauugcuggcccuggaagu

SEQ ID NO: 1753752 - RNA, 19 nt, Artificial Sequence
  Description of Artificial Sequence: Synthetic oligonucleotide
  Antisense strand to SEQ ID NO: 1753751
acuuccagggccagcaauc

SEQ ID NO: 1753753 - RNA, 19 nt, Artificial Sequence
  Description of Artificial Sequence: Synthetic oligonucleotide
  Sense strand starting at position 3363 of SEQ ID NO: 1562527
aguuaucgacuccaagaca

SEQ ID NO: 1753754 - RNA, 19 nt, Artificial Sequence
  Description of Artificial Sequence: Synthetic oligonucleotide
  Antisense strand to SEQ ID NO: 1753753
ugucuuggagucgauaacu

SEQ ID NO: 1753755 - RNA, 19 nt, Artificial Sequence
  Description of Artificial Sequence: Synthetic oligonucleotide
  Sense strand starting at position 3371 of SEQ ID NO: 1562527
acuccaagacaccguuaau

SEQ ID NO: 1753756 - RNA, 19 nt, Artificial Sequence
  Description of Artificial Sequence: Synthetic oligonucleotide
  Antisense strand to SEQ ID NO: 1753755
auuaacggugucuuggagu

SEQ ID NO: 1753757 - RNA, 19 nt, Artificial Sequence
  Description of Artificial Sequence: Synthetic oligonucleotide
  Sense strand starting at position 3374 of SEQ ID NO: 1562527
ccaagacaccguuaaucau

SEQ ID NO: 1753758 - RNA, 19 nt, Artificial Sequence
  Description of Artificial Sequence: Synthetic oligonucleotide
  Antisense strand to SEQ ID NO: 1753757
augauuaacggugucuugg

SEQ ID NO: 1753759 - RNA, 19 nt, Artificial Sequence
  Description of Artificial Sequence: Synthetic oligonucleotide
  Sense strand starting at position 3377 of SEQ ID NO: 1562527
agacaccguuaaucauaaa

SEQ ID NO: 1753760 - RNA, 19 nt, Artificial Sequence
  Description of Artificial Sequence: Synthetic oligonucleotide
  Antisense strand to SEQ ID NO: 1753759
uuuaugauuaacggugucu

SEQ ID NO: 1753761 - RNA, 19 nt, Artificial Sequence
  Description of Artificial Sequence: Synthetic oligonucleotide
  Sense strand starting at position 3457 of SEQ ID NO: 1562527
ccgcuucaguguuguggaa

SEQ ID NO: 1753762 - RNA, 19 nt, Artificial Sequence
  Description of Artificial Sequence: Synthetic oligonucleotide
  Antisense strand to SEQ ID NO: 1753761
uuccacaacacugaagcgg

SEQ ID NO: 1753763 - RNA, 19 nt, Artificial Sequence
  Description of Artificial Sequence: Synthetic oligonucleotide
  Sense strand starting at position 3459 of SEQ ID NO: 1562527
gcuucaguguuguggaagu

SEQ ID NO: 1753764 - RNA, 19 nt, Artificial Sequence
  Description of Artificial Sequence: Synthetic oligonucleotide
  Antisense strand to SEQ ID NO: 1753763
acuuccacaacacugaagc

SEQ ID NO: 1753765 - RNA, 19 nt, Artificial Sequence
  Description of Artificial Sequence: Synthetic oligonucleotide
  Sense strand starting at position 3461 of SEQ ID NO: 1562527
uucaguguuguggaaguga

SEQ ID NO: 1753766 - RNA, 19 nt, Artificial Sequence
  Description of Artificial Sequence: Synthetic oligonucleotide
  Antisense strand to SEQ ID NO: 1753765
ucacuuccacaacacugaa

SEQ ID NO: 1753767 - RNA, 19 nt, Artificial Sequence
  Description of Artificial Sequence: Synthetic oligonucleotide
  Sense strand starting at position 3476 of SEQ ID NO: 1562527
gugagaaacacgcagcuua

SEQ ID NO: 1753768 - RNA, 19 nt, Artificial Sequence
  Description of Artificial Sequence: Synthetic oligonucleotide
  Antisense strand to SEQ ID NO: 1753767
uaagcugcguguuucucac

SEQ ID NO: 1753769 - RNA, 19 nt, Artificial Sequence
  Description of Artificial Sequence: Synthetic oligonucleotide
  Sense strand starting at position 3520 of SEQ ID NO: 1562527
uguguuaccgcucgaaauu

SEQ ID NO: 1753770 - RNA, 19 nt, Artificial Sequence
  Description of Artificial Sequence: Synthetic oligonucleotide
  Antisense strand to SEQ ID NO: 1753769
aauuucgagcgguaacaca

SEQ ID NO: 1753771 - RNA, 19 nt, Artificial Sequence
  Description of Artificial Sequence: Synthetic oligonucleotide
  Sense strand starting at position 3521 of SEQ ID NO: 1562527
guguuaccgcucgaaauua

SEQ ID NO: 1753772 - RNA, 19 nt, Artificial Sequence
  Description of Artificial Sequence: Synthetic oligonucleotide
  Antisense strand to SEQ ID NO: 1753771
uaauuucgagcgguaacac

SEQ ID NO: 1753773 - RNA, 19 nt, Artificial Sequence
  Description of Artificial Sequence: Synthetic oligonucleotide
  Sense strand starting at position 3529 of SEQ ID NO: 1562527
gcucgaaauuacgccaguu

SEQ ID NO: 1753774 - RNA, 19 nt, Artificial Sequence
  Description of Artificial Sequence: Synthetic oligonucleotide
  Antisense strand to SEQ ID NO: 1753773
aacuggcguaauuucgagc

SEQ ID NO: 1753775 - RNA, 19 nt, Artificial Sequence
  Description of Artificial Sequence: Synthetic oligonucleotide
  Sense strand starting at position 3557 of SEQ ID NO: 1562527
cgaagugaugcgugacuac

SEQ ID NO: 1753776 - RNA, 19 nt, Artificial Sequence
  Description of Artificial Sequence: Synthetic oligonucleotide
  Antisense strand to SEQ ID NO: 1753775
guagucacgcaucacuucg

SEQ ID NO: 1753777 - RNA, 19 nt, Artificial Sequence
  Description of Artificial Sequence: Synthetic oligonucleotide
  Sense strand starting at position 3567 of SEQ ID NO: 1562527
cgugacuacagucauggau

SEQ ID NO: 1753778 - RNA, 19 nt, Artificial Sequence
  Description of Artificial Sequence: Synthetic oligonucleotide
  Antisense strand to SEQ ID NO: 1753777
auccaugacuguagucacg

SEQ ID NO: 1753779 - RNA, 19 nt, Artificial Sequence
  Description of Artificial Sequence: Synthetic oligonucleotide
  Sense strand starting at position 3569 of SEQ ID NO: 1562527
ugacuacagucauggauaa

SEQ ID NO: 1753780 - RNA, 19 nt, Artificial Sequence
  Description of Artificial Sequence: Synthetic oligonucleotide
  Antisense strand to SEQ ID NO: 1753779
uuauccaugacuguaguca

SEQ ID NO: 1753781 - RNA, 19 nt, Artificial Sequence
  Description of Artificial Sequence: Synthetic oligonucleotide
  Sense strand starting at position 3636 of SEQ ID NO: 1562527
agacaaugguggucugaau

SEQ ID NO: 1753782 - RNA, 19 nt, Artificial Sequence
  Description of Artificial Sequence: Synthetic oligonucleotide
  Antisense strand to SEQ ID NO: 1753781
auucagaccaccauugucu

SEQ ID NO: 1753783 - RNA, 19 nt, Artificial Sequence
  Description of Artificial Sequence: Synthetic oligonucleotide
  Sense strand starting at position 3780 of SEQ ID NO: 1562527
ccaagagguuucugaagga

SEQ ID NO: 1753784 - RNA, 19 nt, Artificial Sequence
  Description of Artificial Sequence: Synthetic oligonucleotide
  Antisense strand to SEQ ID NO: 1753783
uccuucagaaaccucuugg

SEQ ID NO: 1753785 - RNA, 19 nt, Artificial Sequence
  Description of Artificial Sequence: Synthetic oligonucleotide
  Sense strand starting at position 3932 of SEQ ID NO: 1562527
caagaagacucaugagaag

SEQ ID NO: 1753786 - RNA, 19 nt, Artificial Sequence
  Description of Artificial Sequence: Synthetic oligonucleotide
  Antisense strand to SEQ ID NO: 1753785
cuucucaugagucuucuug

SEQ ID NO: 1753787 - RNA, 19 nt, Artificial Sequence
  Description of Artificial Sequence: Synthetic oligonucleotide
  Sense strand starting at position 3955 of SEQ ID NO: 1562527
ggaacuggcaaaugaguaa

SEQ ID NO: 1753788 - RNA, 19 nt, Artificial Sequence
  Description of Artificial Sequence: Synthetic oligonucleotide
  Antisense strand to SEQ ID NO: 1753787
uuacucauuugccaguucc

SEQ ID NO: 1753789 - RNA, 19 nt, Artificial Sequence
  Description of Artificial Sequence: Synthetic oligonucleotide
  Sense strand starting at position 3962 of SEQ ID NO: 1562527
gcaaaugaguaacagcauu

SEQ ID NO: 1753790 - RNA, 19 nt, Artificial Sequence
  Description of Artificial Sequence: Synthetic oligonucleotide
  Antisense strand to SEQ ID NO: 1753789
aaugcuguuacucauuugc

SEQ ID NO: 1753791 - RNA, 19 nt, Artificial Sequence
  Description of Artificial Sequence: Synthetic oligonucleotide
  Sense strand starting at position 196 of SEQ ID NO: 1562528
uggcauaucuuacauuaag

SEQ ID NO: 1753792 - RNA, 19 nt, Artificial Sequence
  Description of Artificial Sequence: Synthetic oligonucleotide
  Antisense strand to SEQ ID NO: 1753791
cuuaauguaagauaugcca

SEQ ID NO: 1753793 - RNA, 19 nt, Artificial Sequence
  Description of Artificial Sequence: Synthetic oligonucleotide
  Sense strand starting at position 289 of SEQ ID NO: 1562528
uuucuugugguacaauagu

SEQ ID NO: 1753794 - RNA, 19 nt, Artificial Sequence
  Description of Artificial Sequence: Synthetic oligonucleotide
  Antisense strand to SEQ ID NO: 1753793
acuauuguaccacaagaaa

SEQ ID NO: 1753795 - RNA, 19 nt, Artificial Sequence
  Description of Artificial Sequence: Synthetic oligonucleotide
  Sense strand starting at position 381 of SEQ ID NO: 1562528
ucuagagguuguuuacaau

SEQ ID NO: 1753796 - RNA, 19 nt, Artificial Sequence
  Description of Artificial Sequence: Synthetic oligonucleotide
  Antisense strand to SEQ ID NO: 1753795
auuguaaacaaccucuaga

SEQ ID NO: 1753797 - RNA, 19 nt, Artificial Sequence
  Description of Artificial Sequence: Synthetic oligonucleotide
  Sense strand starting at position 511 of SEQ ID NO: 1562528
acuguauggguuuauguga

SEQ ID NO: 1753798 - RNA, 19 nt, Artificial Sequence
  Description of Artificial Sequence: Synthetic oligonucleotide
  Antisense strand to SEQ ID NO: 1753797
ucacauaaacccauacagu

SEQ ID NO: 1753799 - RNA, 19 nt, Artificial Sequence
  Description of Artificial Sequence: Synthetic oligonucleotide
  Sense strand starting at position 525 of SEQ ID NO: 1562528
ugugauacaugauacaaac

SEQ ID NO: 1753800 - RNA, 19 nt, Artificial Sequence
  Description of Artificial Sequence: Synthetic oligonucleotide
  Antisense strand to SEQ ID NO: 1753799
guuuguaucauguaucaca

SEQ ID NO: 1753801 - RNA, 19 nt, Artificial Sequence
  Description of Artificial Sequence: Synthetic oligonucleotide
  Sense strand starting at position 707 of SEQ ID NO: 1562528
agcauaaucugcuagagga

SEQ ID NO: 1753802 - RNA, 19 nt, Artificial Sequence
  Description of Artificial Sequence: Synthetic oligonucleotide
  Antisense strand to SEQ ID NO: 1753801
uccucuagcagauuaugcu

SEQ ID NO: 1753803 - RNA, 19 nt, Artificial Sequence
  Description of Artificial Sequence: Synthetic oligonucleotide
  Sense strand starting at position 802 of SEQ ID NO: 1562528
augacaaauugggcucuaa

SEQ ID NO: 1753804 - RNA, 19 nt, Artificial Sequence
  Description of Artificial Sequence: Synthetic oligonucleotide
  Antisense strand to SEQ ID NO: 1753803
uuagagcccaauuugucau

SEQ ID NO: 1753805 - RNA, 19 nt, Artificial Sequence
  Description of Artificial Sequence: Synthetic oligonucleotide
  Sense strand starting at position 913 of SEQ ID NO: 1562528
ggauccaauuugugauaga

SEQ ID NO: 1753806 - RNA, 19 nt, Artificial Sequence
  Description of Artificial Sequence: Synthetic oligonucleotide
  Antisense strand to SEQ ID NO: 1753805
ucuaucacaaauuggaucc

SEQ ID NO: 1753807 - RNA, 19 nt, Artificial Sequence
  Description of Artificial Sequence: Synthetic oligonucleotide
  Sense strand starting at position 914 of SEQ ID NO: 1562528
gauccaauuugugauagau

SEQ ID NO: 1753808 - RNA, 19 nt, Artificial Sequence
  Description of Artificial Sequence: Synthetic oligonucleotide
  Antisense strand to SEQ ID NO: 1753807
aucuaucacaaauuggauc

SEQ ID NO: 1753809 - RNA, 19 nt, Artificial Sequence
  Description of Artificial Sequence: Synthetic oligonucleotide
  Sense strand starting at position 922 of SEQ ID NO: 1562528
uugugauagauccggaauc

SEQ ID NO: 1753810 - RNA, 19 nt, Artificial Sequence
  Description of Artificial Sequence: Synthetic oligonucleotide
  Antisense strand to SEQ ID NO: 1753809
gauuccggaucuaucacaa

SEQ ID NO: 1753811 - RNA, 19 nt, Artificial Sequence
  Description of Artificial Sequence: Synthetic oligonucleotide
  Sense strand starting at position 924 of SEQ ID NO: 1562528
gugauagauccggaauccu

SEQ ID NO: 1753812 - RNA, 19 nt, Artificial Sequence
  Description of Artificial Sequence: Synthetic oligonucleotide
  Antisense strand to SEQ ID NO: 1753811
aggauuccggaucuaucac

SEQ ID NO: 1753813 - RNA, 19 nt, Artificial Sequence
  Description of Artificial Sequence: Synthetic oligonucleotide
  Sense strand starting at position 932 of SEQ ID NO: 1562528
uccggaauccuuuacugaa

SEQ ID NO: 1753814 - RNA, 19 nt, Artificial Sequence
  Description of Artificial Sequence: Synthetic oligonucleotide
  Antisense strand to SEQ ID NO: 1753813
uucaguaaaggauuccgga

SEQ ID NO: 1753815 - RNA, 19 nt, Artificial Sequence
  Description of Artificial Sequence: Synthetic oligonucleotide
  Sense strand starting at position 1002 of SEQ ID NO: 1562528
gcaaaugaagcugauguuu

SEQ ID NO: 1753816 - RNA, 19 nt, Artificial Sequence
  Description of Artificial Sequence: Synthetic oligonucleotide
  Antisense strand to SEQ ID NO: 1753815
aaacaucagcuucauuugc

SEQ ID NO: 1753817 - RNA, 19 nt, Artificial Sequence
  Description of Artificial Sequence: Synthetic oligonucleotide
  Sense strand starting at position 1014 of SEQ ID NO: 1562528
gauguuuccuucugcagca

SEQ ID NO: 1753818 - RNA, 19 nt, Artificial Sequence
  Description of Artificial Sequence: Synthetic oligonucleotide
  Antisense strand to SEQ ID NO: 1753817
ugcugcagaaggaaacauc

SEQ ID NO: 1753819 - RNA, 19 nt, Artificial Sequence
  Description of Artificial Sequence: Synthetic oligonucleotide
  Sense strand starting at position 1015 of SEQ ID NO: 1562528
auguuuccuucugcagcaa

SEQ ID NO: 1753820 - RNA, 19 nt, Artificial Sequence
  Description of Artificial Sequence: Synthetic oligonucleotide
  Antisense strand to SEQ ID NO: 1753819
uugcugcagaaggaaacau

SEQ ID NO: 1753821 - RNA, 19 nt, Artificial Sequence
  Description of Artificial Sequence: Synthetic oligonucleotide
  Sense strand starting at position 1131 of SEQ ID NO: 1562528
aaagauaagucgucacuua

SEQ ID NO: 1753822 - RNA, 19 nt, Artificial Sequence
  Description of Artificial Sequence: Synthetic oligonucleotide
  Antisense strand to SEQ ID NO: 1753821
uaagugacgacuuaucuuu

SEQ ID NO: 1753823 - RNA, 19 nt, Artificial Sequence
  Description of Artificial Sequence: Synthetic oligonucleotide
  Sense strand starting at position 1132 of SEQ ID NO: 1562528
aagauaagucgucacuuaa

SEQ ID NO: 1753824 - RNA, 19 nt, Artificial Sequence
  Description of Artificial Sequence: Synthetic oligonucleotide
  Antisense strand to SEQ ID NO: 1753823
uuaagugacgacuuaucuu

SEQ ID NO: 1753825 - RNA, 19 nt, Artificial Sequence
  Description of Artificial Sequence: Synthetic oligonucleotide
  Sense strand starting at position 1223 of SEQ ID NO: 1562528
caaucaacggucugguuga

SEQ ID NO: 1753826 - RNA, 19 nt, Artificial Sequence
  Description of Artificial Sequence: Synthetic oligonucleotide
  Antisense strand to SEQ ID NO: 1753825
ucaaccagaccguugauug

SEQ ID NO: 1753827 - RNA, 19 nt, Artificial Sequence
  Description of Artificial Sequence: Synthetic oligonucleotide
  Sense strand starting at position 1236 of SEQ ID NO: 1562528
gguugaguuucccguuuaa

SEQ ID NO: 1753828 - RNA, 19 nt, Artificial Sequence
  Description of Artificial Sequence: Synthetic oligonucleotide
  Antisense strand to SEQ ID NO: 1753827
uuaaacgggaaacucaacc

SEQ ID NO: 1753829 - RNA, 19 nt, Artificial Sequence
  Description of Artificial Sequence: Synthetic oligonucleotide
  Sense strand starting at position 1284 of SEQ ID NO: 1562528
gcguauuucguccggagcu

SEQ ID NO: 1753830 - RNA, 19 nt, Artificial Sequence
  Description of Artificial Sequence: Synthetic oligonucleotide
  Antisense strand to SEQ ID NO: 1753829
agcuccggacgaaauacgc

SEQ ID NO: 1753831 - RNA, 19 nt, Artificial Sequence
  Description of Artificial Sequence: Synthetic oligonucleotide
  Sense strand starting at position 1296 of SEQ ID NO: 1562528
cggagcuguuuaucagcuu

SEQ ID NO: 1753832 - RNA, 19 nt, Artificial Sequence
  Description of Artificial Sequence: Synthetic oligonucleotide
  Antisense strand to SEQ ID NO: 1753831
aagcugauaaacagcuccg

SEQ ID NO: 1753833 - RNA, 19 nt, Artificial Sequence
  Description of Artificial Sequence: Synthetic oligonucleotide
  Sense strand starting at position 1322 of SEQ ID NO: 1562528
caagaucugucacuacguu

SEQ ID NO: 1753834 - RNA, 19 nt, Artificial Sequence
  Description of Artificial Sequence: Synthetic oligonucleotide
  Antisense strand to SEQ ID NO: 1753833
aacguagugacagaucuug

SEQ ID NO: 1753835 - RNA, 19 nt, Artificial Sequence
  Description of Artificial Sequence: Synthetic oligonucleotide
  Sense strand starting at position 1326 of SEQ ID NO: 1562528
aucugucacuacguugaaa

SEQ ID NO: 1753836 - RNA, 19 nt, Artificial Sequence
  Description of Artificial Sequence: Synthetic oligonucleotide
  Antisense strand to SEQ ID NO: 1753835
uuucaacguagugacagau

SEQ ID NO: 1753837 - RNA, 19 nt, Artificial Sequence
  Description of Artificial Sequence: Synthetic oligonucleotide
  Sense strand starting at position 1346 of SEQ ID NO: 1562528
ggaaccuauuuggaaacuu

SEQ ID NO: 1753838 - RNA, 19 nt, Artificial Sequence
  Description of Artificial Sequence: Synthetic oligonucleotide
  Antisense strand to SEQ ID NO: 1753837
aaguuuccaaauagguucc

SEQ ID NO: 1753839 - RNA, 19 nt, Artificial Sequence
  Description of Artificial Sequence: Synthetic oligonucleotide
  Sense strand starting at position 1369 of SEQ ID NO: 1562528
caguuccuucgaggugaaa

SEQ ID NO: 1753840 - RNA, 19 nt, Artificial Sequence
  Description of Artificial Sequence: Synthetic oligonucleotide
  Antisense strand to SEQ ID NO: 1753839
uuucaccucgaaggaacug

SEQ ID NO: 1753841 - RNA, 19 nt, Artificial Sequence
  Description of Artificial Sequence: Synthetic oligonucleotide
  Sense strand starting at position 1409 of SEQ ID NO: 1562528
ggugacaaggcugguucaa

SEQ ID NO: 1753842 - RNA, 19 nt, Artificial Sequence
  Description of Artificial Sequence: Synthetic oligonucleotide
  Antisense strand to SEQ ID NO: 1753841
uugaaccagccuugucacc

SEQ ID NO: 1753843 - RNA, 19 nt, Artificial Sequence
  Description of Artificial Sequence: Synthetic oligonucleotide
  Sense strand starting at position 1453 of SEQ ID NO: 1562528
aaaggauuaucccacgcga

SEQ ID NO: 1753844 - RNA, 19 nt, Artificial Sequence
  Description of Artificial Sequence: Synthetic oligonucleotide
  Antisense strand to SEQ ID NO: 1753843
ucgcgugggauaauccuuu

SEQ ID NO: 1753845 - RNA, 19 nt, Artificial Sequence
  Description of Artificial Sequence: Synthetic oligonucleotide
  Sense strand starting at position 1455 of SEQ ID NO: 1562528
aggauuaucccacgcgaca

SEQ ID NO: 1753846 - RNA, 19 nt, Artificial Sequence
  Description of Artificial Sequence: Synthetic oligonucleotide
  Antisense strand to SEQ ID NO: 1753845
ugucgcgugggauaauccu

SEQ ID NO: 1753847 - RNA, 19 nt, Artificial Sequence
  Description of Artificial Sequence: Synthetic oligonucleotide
  Sense strand starting at position 1717 of SEQ ID NO: 1562528
cuccauuuaugcgccagaa

SEQ ID NO: 1753848 - RNA, 19 nt, Artificial Sequence
  Description of Artificial Sequence: Synthetic oligonucleotide
  Antisense strand to SEQ ID NO: 1753847
uucuggcgcauaaauggag

SEQ ID NO: 1753849 - RNA, 19 nt, Artificial Sequence
  Description of Artificial Sequence: Synthetic oligonucleotide
  Sense strand starting at position 95 of SEQ ID NO: 1562529
uggcauaucuuacauuaag

SEQ ID NO: 1753850 - RNA, 19 nt, Artificial Sequence
  Description of Artificial Sequence: Synthetic oligonucleotide
  Antisense strand to SEQ ID NO: 1753849
cuuaauguaagauaugcca

SEQ ID NO: 1753851 - RNA, 19 nt, Artificial Sequence
  Description of Artificial Sequence: Synthetic oligonucleotide
  Sense strand starting at position 188 of SEQ ID NO: 1562529
uuucuugugguacaauagu

SEQ ID NO: 1753852 - RNA, 19 nt, Artificial Sequence
  Description of Artificial Sequence: Synthetic oligonucleotide
  Antisense strand to SEQ ID NO: 1753851
acuauuguaccacaagaaa

SEQ ID NO: 1753853 - RNA, 19 nt, Artificial Sequence
  Description of Artificial Sequence: Synthetic oligonucleotide
  Sense strand starting at position 280 of SEQ ID NO: 1562529
ucuagagguuguuuacaau

SEQ ID NO: 1753854 - RNA, 19 nt, Artificial Sequence
  Description of Artificial Sequence: Synthetic oligonucleotide
  Antisense strand to SEQ ID NO: 1753853
auuguaaacaaccucuaga

SEQ ID NO: 1753855 - RNA, 19 nt, Artificial Sequence
  Description of Artificial Sequence: Synthetic oligonucleotide
  Sense strand starting at position 410 of SEQ ID NO: 1562529
acuguauggguuuauguga

SEQ ID NO: 1753856 - RNA, 19 nt, Artificial Sequence
  Description of Artificial Sequence: Synthetic oligonucleotide
  Antisense strand to SEQ ID NO: 1753855
ucacauaaacccauacagu

SEQ ID NO: 1753857 - RNA, 19 nt, Artificial Sequence
  Description of Artificial Sequence: Synthetic oligonucleotide
  Sense strand starting at position 424 of SEQ ID NO: 1562529
ugugauacaugauacaaac

SEQ ID NO: 1753858 - RNA, 19 nt, Artificial Sequence
  Description of Artificial Sequence: Synthetic oligonucleotide
  Antisense strand to SEQ ID NO: 1753857
guuuguaucauguaucaca

SEQ ID NO: 1753859 - RNA, 19 nt, Artificial Sequence
  Description of Artificial Sequence: Synthetic oligonucleotide
  Sense strand starting at position 606 of SEQ ID NO: 1562529
agcauaaucugcuagagga

SEQ ID NO: 1753860 - RNA, 19 nt, Artificial Sequence
  Description of Artificial Sequence: Synthetic oligonucleotide
  Antisense strand to SEQ ID NO: 1753859
uccucuagcagauuaugcu

SEQ ID NO: 1753861 - RNA, 19 nt, Artificial Sequence
  Description of Artificial Sequence: Synthetic oligonucleotide
  Sense strand starting at position 701 of SEQ ID NO: 1562529
augacaaauugggcucuaa

SEQ ID NO: 1753862 - RNA, 19 nt, Artificial Sequence
  Description of Artificial Sequence: Synthetic oligonucleotide
  Antisense strand to SEQ ID NO: 1753861
uuagagcccaauuugucau

SEQ ID NO: 1753863 - RNA, 19 nt, Artificial Sequence
  Description of Artificial Sequence: Synthetic oligonucleotide
  Sense strand starting at position 812 of SEQ ID NO: 1562529
ggauccaauuugugauaga

SEQ ID NO: 1753864 - RNA, 19 nt, Artificial Sequence
  Description of Artificial Sequence: Synthetic oligonucleotide
  Antisense strand to SEQ ID NO: 1753863
ucuaucacaaauuggaucc

SEQ ID NO: 1753865 - RNA, 19 nt, Artificial Sequence
  Description of Artificial Sequence: Synthetic oligonucleotide
  Sense strand starting at position 813 of SEQ ID NO: 1562529
gauccaauuugugauagau

SEQ ID NO: 1753866 - RNA, 19 nt, Artificial Sequence
  Description of Artificial Sequence: Synthetic oligonucleotide
  Antisense strand to SEQ ID NO: 1753865
aucuaucacaaauuggauc

SEQ ID NO: 1753867 - RNA, 19 nt, Artificial Sequence
  Description of Artificial Sequence: Synthetic oligonucleotide
  Sense strand starting at position 821 of SEQ ID NO: 1562529
uugugauagauccggaauc

SEQ ID NO: 1753868 - RNA, 19 nt, Artificial Sequence
  Description of Artificial Sequence: Synthetic oligonucleotide
  Antisense strand to SEQ ID NO: 1753867
gauuccggaucuaucacaa

SEQ ID NO: 1753869 - RNA, 19 nt, Artificial Sequence
  Description of Artificial Sequence: Synthetic oligonucleotide
  Sense strand starting at position 823 of SEQ ID NO: 1562529
gugauagauccggaauccu

SEQ ID NO: 1753870 - RNA, 19 nt, Artificial Sequence
  Description of Artificial Sequence: Synthetic oligonucleotide
  Antisense strand to SEQ ID NO: 1753869
aggauuccggaucuaucac

SEQ ID NO: 1753871 - RNA, 19 nt, Artificial Sequence
  Description of Artificial Sequence: Synthetic oligonucleotide
  Sense strand starting at position 831 of SEQ ID NO: 1562529
uccggaauccuuuacugaa

SEQ ID NO: 1753872 - RNA, 19 nt, Artificial Sequence
  Description of Artificial Sequence: Synthetic oligonucleotide
  Antisense strand to SEQ ID NO: 1753871
uucaguaaaggauuccgga

SEQ ID NO: 1753873 - RNA, 19 nt, Artificial Sequence
  Description of Artificial Sequence: Synthetic oligonucleotide
  Sense strand starting at position 901 of SEQ ID NO: 1562529
gcaaaugaagcugauguuu

SEQ ID NO: 1753874 - RNA, 19 nt, Artificial Sequence
  Description of Artificial Sequence: Synthetic oligonucleotide
  Antisense strand to SEQ ID NO: 1753873
aaacaucagcuucauuugc

SEQ ID NO: 1753875 - RNA, 19 nt, Artificial Sequence
  Description of Artificial Sequence: Synthetic oligonucleotide
  Sense strand starting at position 913 of SEQ ID NO: 1562529
gauguuuccuucugcagca

SEQ ID NO: 1753876 - RNA, 19 nt, Artificial Sequence
  Description of Artificial Sequence: Synthetic oligonucleotide
  Antisense strand to SEQ ID NO: 1753875
ugcugcagaaggaaacauc

SEQ ID NO: 1753877 - RNA, 19 nt, Artificial Sequence
  Description of Artificial Sequence: Synthetic oligonucleotide
  Sense strand starting at position 914 of SEQ ID NO: 1562529
auguuuccuucugcagcaa

SEQ ID NO: 1753878 - RNA, 19 nt, Artificial Sequence
  Description of Artificial Sequence: Synthetic oligonucleotide
  Antisense strand to SEQ ID NO: 1753877
uugcugcagaaggaaacau

SEQ ID NO: 1753879 - RNA, 19 nt, Artificial Sequence
  Description of Artificial Sequence: Synthetic oligonucleotide
  Sense strand starting at position 1030 of SEQ ID NO: 1562529
aaagauaagucgucacuua

SEQ ID NO: 1753880 - RNA, 19 nt, Artificial Sequence
  Description of Artificial Sequence: Synthetic oligonucleotide
  Antisense strand to SEQ ID NO: 1753879
uaagugacgacuuaucuuu

SEQ ID NO: 1753881 - RNA, 19 nt, Artificial Sequence
  Description of Artificial Sequence: Synthetic oligonucleotide
  Sense strand starting at position 1031 of SEQ ID NO: 1562529
aagauaagucgucacuuaa

SEQ ID NO: 1753882 - RNA, 19 nt, Artificial Sequence
  Description of Artificial Sequence: Synthetic oligonucleotide
  Antisense strand to SEQ ID NO: 1753881
uuaagugacgacuuaucuu

SEQ ID NO: 1753883 - RNA, 19 nt, Artificial Sequence
  Description of Artificial Sequence: Synthetic oligonucleotide
  Sense strand starting at position 1122 of SEQ ID NO: 1562529
caaucaacggucugguuga

SEQ ID NO: 1753884 - RNA, 19 nt, Artificial Sequence
  Description of Artificial Sequence: Synthetic oligonucleotide
  Antisense strand to SEQ ID NO: 1753883
ucaaccagaccguugauug

SEQ ID NO: 1753885 - RNA, 19 nt, Artificial Sequence
  Description of Artificial Sequence: Synthetic oligonucleotide
  Sense strand starting at position 1135 of SEQ ID NO: 1562529
gguugaguuucccguuuaa

SEQ ID NO: 1753886 - RNA, 19 nt, Artificial Sequence
  Description of Artificial Sequence: Synthetic oligonucleotide
  Antisense strand to SEQ ID NO: 1753885
uuaaacgggaaacucaacc

SEQ ID NO: 1753887 - RNA, 19 nt, Artificial Sequence
  Description of Artificial Sequence: Synthetic oligonucleotide
  Sense strand starting at position 1183 of SEQ ID NO: 1562529
gcguauuucguccggagcu

SEQ ID NO: 1753888 - RNA, 19 nt, Artificial Sequence
  Description of Artificial Sequence: Synthetic oligonucleotide
  Antisense strand to SEQ ID NO: 1753887
agcuccggacgaaauacgc

SEQ ID NO: 1753889 - RNA, 19 nt, Artificial Sequence
  Description of Artificial Sequence: Synthetic oligonucleotide
  Sense strand starting at position 1195 of SEQ ID NO: 1562529
cggagcuguuuaucagcuu

SEQ ID NO: 1753890 - RNA, 19 nt, Artificial Sequence
  Description of Artificial Sequence: Synthetic oligonucleotide
  Antisense strand to SEQ ID NO: 1753889
aagcugauaaacagcuccg

SEQ ID NO: 1753891 - RNA, 19 nt, Artificial Sequence
  Description of Artificial Sequence: Synthetic oligonucleotide
  Sense strand starting at position 1221 of SEQ ID NO: 1562529
caagaucugucacuacguu

SEQ ID NO: 1753892 - RNA, 19 nt, Artificial Sequence
  Description of Artificial Sequence: Synthetic oligonucleotide
  Antisense strand to SEQ ID NO: 1753891
aacguagugacagaucuug

SEQ ID NO: 1753893 - RNA, 19 nt, Artificial Sequence
  Description of Artificial Sequence: Synthetic oligonucleotide
  Sense strand starting at position 1225 of SEQ ID NO: 1562529
aucugucacuacguugaaa

SEQ ID NO: 1753894 - RNA, 19 nt, Artificial Sequence
  Description of Artificial Sequence: Synthetic oligonucleotide
  Antisense strand to SEQ ID NO: 1753893
uuucaacguagugacagau

SEQ ID NO: 1753895 - RNA, 19 nt, Artificial Sequence
  Description of Artificial Sequence: Synthetic oligonucleotide
  Sense strand starting at position 1245 of SEQ ID NO: 1562529
ggaaccuauuuggaaacuu

SEQ ID NO: 1753896 - RNA, 19 nt, Artificial Sequence
  Description of Artificial Sequence: Synthetic oligonucleotide
  Antisense strand to SEQ ID NO: 1753895
aaguuuccaaauagguucc

SEQ ID NO: 1753897 - RNA, 19 nt, Artificial Sequence
  Description of Artificial Sequence: Synthetic oligonucleotide
  Sense strand starting at position 1268 of SEQ ID NO: 1562529
caguuccuucgaggugaaa

SEQ ID NO: 1753898 - RNA, 19 nt, Artificial Sequence
  Description of Artificial Sequence: Synthetic oligonucleotide
  Antisense strand to SEQ ID NO: 1753897
uuucaccucgaaggaacug

SEQ ID NO: 1753899 - RNA, 19 nt, Artificial Sequence
  Description of Artificial Sequence: Synthetic oligonucleotide
  Sense strand starting at position 1308 of SEQ ID NO: 1562529
ggugacaaggcugguucaa

SEQ ID NO: 1753900 - RNA, 19 nt, Artificial Sequence
  Description of Artificial Sequence: Synthetic oligonucleotide
  Antisense strand to SEQ ID NO: 1753899
uugaaccagccuugucacc

SEQ ID NO: 1753901 - RNA, 19 nt, Artificial Sequence
  Description of Artificial Sequence: Synthetic oligonucleotide
  Sense strand starting at position 1352 of SEQ ID NO: 1562529
aaaggauuaucccacgcga

SEQ ID NO: 1753902 - RNA, 19 nt, Artificial Sequence
  Description of Artificial Sequence: Synthetic oligonucleotide
  Antisense strand to SEQ ID NO: 1753901
ucgcgugggauaauccuuu

SEQ ID NO: 1753903 - RNA, 19 nt, Artificial Sequence
  Description of Artificial Sequence: Synthetic oligonucleotide
  Sense strand starting at position 1354 of SEQ ID NO: 1562529
aggauuaucccacgcgaca

SEQ ID NO: 1753904 - RNA, 19 nt, Artificial Sequence
  Description of Artificial Sequence: Synthetic oligonucleotide
  Antisense strand to SEQ ID NO: 1753903
ugucgcgugggauaauccu

SEQ ID NO: 1753905 - RNA, 19 nt, Artificial Sequence
  Description of Artificial Sequence: Synthetic oligonucleotide
  Sense strand starting at position 1616 of SEQ ID NO: 1562529
cuccauuuaugcgccagaa

SEQ ID NO: 1753906 - RNA, 19 nt, Artificial Sequence
  Description of Artificial Sequence: Synthetic oligonucleotide
  Antisense strand to SEQ ID NO: 1753905
uucuggcgcauaaauggag

SEQ ID NO: 1753907 - RNA, 19 nt, Artificial Sequence
  Description of Artificial Sequence: Synthetic oligonucleotide
  Sense strand starting at position 294 of SEQ ID NO: 1562530
ggaaacuugcugggaugau

SEQ ID NO: 1753908 - RNA, 19 nt, Artificial Sequence
  Description of Artificial Sequence: Synthetic oligonucleotide
  Antisense strand to SEQ ID NO: 1753907
aucaucccagcaaguuucc

SEQ ID NO: 1753909 - RNA, 19 nt, Artificial Sequence
  Description of Artificial Sequence: Synthetic oligonucleotide
  Sense strand starting at position 981 of SEQ ID NO: 1562530
ccaccauccuccguggaaa

SEQ ID NO: 1753910 - RNA, 19 nt, Artificial Sequence
  Description of Artificial Sequence: Synthetic oligonucleotide
  Antisense strand to SEQ ID NO: 1753909
uuuccacggaggauggugg

SEQ ID NO: 1753911 - RNA, 19 nt, Artificial Sequence
  Description of Artificial Sequence: Synthetic oligonucleotide
  Sense strand starting at position 1098 of SEQ ID NO: 1562530
guggguugugagcaggaua

SEQ ID NO: 1753912 - RNA, 19 nt, Artificial Sequence
  Description of Artificial Sequence: Synthetic oligonucleotide
  Antisense strand to SEQ ID NO: 1753911
uauccugcucacaacccac

SEQ ID NO: 1753913 - RNA, 19 nt, Artificial Sequence
  Description of Artificial Sequence: Synthetic oligonucleotide
  Sense strand starting at position 1101 of SEQ ID NO: 1562530
gguugugagcaggauauga

SEQ ID NO: 1753914 - RNA, 19 nt, Artificial Sequence
  Description of Artificial Sequence: Synthetic oligonucleotide
  Antisense strand to SEQ ID NO: 1753913
ucauauccugcucacaacc

SEQ ID NO: 1753915 - RNA, 19 nt, Artificial Sequence
  Description of Artificial Sequence: Synthetic oligonucleotide
  Sense strand starting at position 1114 of SEQ ID NO: 1562530
auaugagcggaaugugaau

SEQ ID NO: 1753916 - RNA, 19 nt, Artificial Sequence
  Description of Artificial Sequence: Synthetic oligonucleotide
  Antisense strand to SEQ ID NO: 1753915
auucacauuccgcucauau

SEQ ID NO: 1753917 - RNA, 19 nt, Artificial Sequence
  Description of Artificial Sequence: Synthetic oligonucleotide
  Sense strand starting at position 1120 of SEQ ID NO: 1562530
gcggaaugugaauggaugu

SEQ ID NO: 1753918 - RNA, 19 nt, Artificial Sequence
  Description of Artificial Sequence: Synthetic oligonucleotide
  Antisense strand to SEQ ID NO: 1753917
acauccauucacauuccgc

SEQ ID NO: 1753919 - RNA, 19 nt, Artificial Sequence
  Description of Artificial Sequence: Synthetic oligonucleotide
  Sense strand starting at position 1238 of SEQ ID NO: 1562530
agggaauucucagcccuuu

SEQ ID NO: 1753920 - RNA, 19 nt, Artificial Sequence
  Description of Artificial Sequence: Synthetic oligonucleotide
  Antisense strand to SEQ ID NO: 1753919
aaagggcugagaauucccu

SEQ ID NO: 1753921 - RNA, 19 nt, Artificial Sequence
  Description of Artificial Sequence: Synthetic oligonucleotide
  Sense strand starting at position 1301 of SEQ ID NO: 1562530
uugaguaugugucuugaac

SEQ ID NO: 1753922 - RNA, 19 nt, Artificial Sequence
  Description of Artificial Sequence: Synthetic oligonucleotide
  Antisense strand to SEQ ID NO: 1753921
guucaagacacauacucaa

SEQ ID NO: 1753923 - RNA, 19 nt, Artificial Sequence
  Description of Artificial Sequence: Synthetic oligonucleotide
  Sense strand starting at position 1316 of SEQ ID NO: 1562530
gaaccaucagggugacauu

SEQ ID NO: 1753924 - RNA, 19 nt, Artificial Sequence
  Description of Artificial Sequence: Synthetic oligonucleotide
  Antisense strand to SEQ ID NO: 1753923
aaugucacccugaugguuc

SEQ ID NO: 1753925 - RNA, 19 nt, Artificial Sequence
  Description of Artificial Sequence: Synthetic oligonucleotide
  Sense strand starting at position 1391 of SEQ ID NO: 1562530
augccaguucuaggaaguu

SEQ ID NO: 1753926 - RNA, 19 nt, Artificial Sequence
  Description of Artificial Sequence: Synthetic oligonucleotide
  Antisense strand to SEQ ID NO: 1753925
aacuuccuagaacuggcau

SEQ ID NO: 1753927 - RNA, 19 nt, Artificial Sequence
  Description of Artificial Sequence: Synthetic oligonucleotide
  Sense strand starting at position 1564 of SEQ ID NO: 1562530
aacuucuaacugugugaga

SEQ ID NO: 1753928 - RNA, 19 nt, Artificial Sequence
  Description of Artificial Sequence: Synthetic oligonucleotide
  Antisense strand to SEQ ID NO: 1753927
ucucacacaguuagaaguu

SEQ ID NO: 1753929 - RNA, 19 nt, Artificial Sequence
  Description of Artificial Sequence: Synthetic oligonucleotide
  Sense strand starting at position 1565 of SEQ ID NO: 1562530
acuucuaacugugugagaa

SEQ ID NO: 1753930 - RNA, 19 nt, Artificial Sequence
  Description of Artificial Sequence: Synthetic oligonucleotide
  Antisense strand to SEQ ID NO: 1753929
uucucacacaguuagaagu

SEQ ID NO: 1753931 - RNA, 19 nt, Artificial Sequence
  Description of Artificial Sequence: Synthetic oligonucleotide
  Sense strand starting at position 1566 of SEQ ID NO: 1562530
cuucuaacugugugagaag

SEQ ID NO: 1753932 - RNA, 19 nt, Artificial Sequence
  Description of Artificial Sequence: Synthetic oligonucleotide
  Antisense strand to SEQ ID NO: 1753931
cuucucacacaguuagaag

SEQ ID NO: 1753933 - RNA, 19 nt, Artificial Sequence
  Description of Artificial Sequence: Synthetic oligonucleotide
  Sense strand starting at position 1584 of SEQ ID NO: 1562530
ggaacaguuuaaccacagu

SEQ ID NO: 1753934 - RNA, 19 nt, Artificial Sequence
  Description of Artificial Sequence: Synthetic oligonucleotide
  Antisense strand to SEQ ID NO: 1753933
acugugguuaaacuguucc

SEQ ID NO: 1753935 - RNA, 19 nt, Artificial Sequence
  Description of Artificial Sequence: Synthetic oligonucleotide
  Sense strand starting at position 1595 of SEQ ID NO: 1562530
accacagugaucggagaaa

SEQ ID NO: 1753936 - RNA, 19 nt, Artificial Sequence
  Description of Artificial Sequence: Synthetic oligonucleotide
  Antisense strand to SEQ ID NO: 1753935
uuucuccgaucacuguggu

SEQ ID NO: 1753937 - RNA, 19 nt, Artificial Sequence
  Description of Artificial Sequence: Synthetic oligonucleotide
  Sense strand starting at position 1712 of SEQ ID NO: 1562530
gggaauguuucugcggaag

SEQ ID NO: 1753938 - RNA, 19 nt, Artificial Sequence
  Description of Artificial Sequence: Synthetic oligonucleotide
  Antisense strand to SEQ ID NO: 1753937
cuuccgcagaaacauuccc

SEQ ID NO: 1753939 - RNA, 19 nt, Artificial Sequence
  Description of Artificial Sequence: Synthetic oligonucleotide
  Sense strand starting at position 1759 of SEQ ID NO: 1562530
ugagaaagcuccuucuuuc

SEQ ID NO: 1753940 - RNA, 19 nt, Artificial Sequence
  Description of Artificial Sequence: Synthetic oligonucleotide
  Antisense strand to SEQ ID NO: 1753939
gaaagaaggagcuuucuca

SEQ ID NO: 1753941 - RNA, 19 nt, Artificial Sequence
  Description of Artificial Sequence: Synthetic oligonucleotide
  Sense strand starting at position 1961 of SEQ ID NO: 1562530
gccucauauccagagacca

SEQ ID NO: 1753942 - RNA, 19 nt, Artificial Sequence
  Description of Artificial Sequence: Synthetic oligonucleotide
  Antisense strand to SEQ ID NO: 1753941
uggucucuggauaugaggc

SEQ ID NO: 1753943 - RNA, 19 nt, Artificial Sequence
  Description of Artificial Sequence: Synthetic oligonucleotide
  Sense strand starting at position 2048 of SEQ ID NO: 1562530
acuguaccagcucagauaa

SEQ ID NO: 1753944 - RNA, 19 nt, Artificial Sequence
  Description of Artificial Sequence: Synthetic oligonucleotide
  Antisense strand to SEQ ID NO: 1753943
uuaucugagcugguacagu

SEQ ID NO: 1753945 - RNA, 19 nt, Artificial Sequence
  Description of Artificial Sequence: Synthetic oligonucleotide
  Sense strand starting at position 2239 of SEQ ID NO: 1562530
gagcauacauucuuggaga

SEQ ID NO: 1753946 - RNA, 19 nt, Artificial Sequence
  Description of Artificial Sequence: Synthetic oligonucleotide
  Antisense strand to SEQ ID NO: 1753945
ucuccaagaauguaugcuc

SEQ ID NO: 1753947 - RNA, 19 nt, Artificial Sequence
  Description of Artificial Sequence: Synthetic oligonucleotide
  Sense strand starting at position 2241 of SEQ ID NO: 1562530
gcauacauucuuggagaaa

SEQ ID NO: 1753948 - RNA, 19 nt, Artificial Sequence
  Description of Artificial Sequence: Synthetic oligonucleotide
  Antisense strand to SEQ ID NO: 1753947
uuucuccaagaauguaugc

SEQ ID NO: 1753949 - RNA, 19 nt, Artificial Sequence
  Description of Artificial Sequence: Synthetic oligonucleotide
  Sense strand starting at position 2259 of SEQ ID NO: 1562530
auacaaacuuucuucggau

SEQ ID NO: 1753950 - RNA, 19 nt, Artificial Sequence
  Description of Artificial Sequence: Synthetic oligonucleotide
  Antisense strand to SEQ ID NO: 1753949
auccgaagaaaguuuguau

SEQ ID NO: 1753951 - RNA, 19 nt, Artificial Sequence
  Description of Artificial Sequence: Synthetic oligonucleotide
  Sense strand starting at position 2261 of SEQ ID NO: 1562530
acaaacuuucuucggauau

SEQ ID NO: 1753952 - RNA, 19 nt, Artificial Sequence
  Description of Artificial Sequence: Synthetic oligonucleotide
  Antisense strand to SEQ ID NO: 1753951
auauccgaagaaaguuugu

SEQ ID NO: 1753953 - RNA, 19 nt, Artificial Sequence
  Description of Artificial Sequence: Synthetic oligonucleotide
  Sense strand starting at position 2545 of SEQ ID NO: 1562530
uggauaguucugcaagcga

SEQ ID NO: 1753954 - RNA, 19 nt, Artificial Sequence
  Description of Artificial Sequence: Synthetic oligonucleotide
  Antisense strand to SEQ ID NO: 1753953
ucgcuugcagaacuaucca

SEQ ID NO: 1753955 - RNA, 19 nt, Artificial Sequence
  Description of Artificial Sequence: Synthetic oligonucleotide
  Sense strand starting at position 2583 of SEQ ID NO: 1562530
aaaugccgacgucaugaau

SEQ ID NO: 1753956 - RNA, 19 nt, Artificial Sequence
  Description of Artificial Sequence: Synthetic oligonucleotide
  Antisense strand to SEQ ID NO: 1753955
auucaugacgucggcauuu

SEQ ID NO: 1753957 - RNA, 19 nt, Artificial Sequence
  Description of Artificial Sequence: Synthetic oligonucleotide
  Sense strand starting at position 2586 of SEQ ID NO: 1562530
ugccgacgucaugaaugaa

SEQ ID NO: 1753958 - RNA, 19 nt, Artificial Sequence
  Description of Artificial Sequence: Synthetic oligonucleotide
  Antisense strand to SEQ ID NO: 1753957
uucauucaugacgucggca

SEQ ID NO: 1753959 - RNA, 19 nt, Artificial Sequence
  Description of Artificial Sequence: Synthetic oligonucleotide
  Sense strand starting at position 2589 of SEQ ID NO: 1562530
cgacgucaugaaugaauga

SEQ ID NO: 1753960 - RNA, 19 nt, Artificial Sequence
  Description of Artificial Sequence: Synthetic oligonucleotide
  Antisense strand to SEQ ID NO: 1753959
ucauucauucaugacgucg

SEQ ID NO: 1753961 - RNA, 19 nt, Artificial Sequence
  Description of Artificial Sequence: Synthetic oligonucleotide
  Sense strand starting at position 2652 of SEQ ID NO: 1562530
gugucauucuaacugugag

SEQ ID NO: 1753962 - RNA, 19 nt, Artificial Sequence
  Description of Artificial Sequence: Synthetic oligonucleotide
  Antisense strand to SEQ ID NO: 1753961
cucacaguuagaaugacac

SEQ ID NO: 1753963 - RNA, 19 nt, Artificial Sequence
  Description of Artificial Sequence: Synthetic oligonucleotide
  Sense strand starting at position 2655 of SEQ ID NO: 1562530
ucauucuaacugugagagu

SEQ ID NO: 1753964 - RNA, 19 nt, Artificial Sequence
  Description of Artificial Sequence: Synthetic oligonucleotide
  Antisense strand to SEQ ID NO: 1753963
acucucacaguuagaauga

SEQ ID NO: 1753965 - RNA, 19 nt, Artificial Sequence
  Description of Artificial Sequence: Synthetic oligonucleotide
  Sense strand starting at position 2724 of SEQ ID NO: 1562530
gcgugagagguuguauguu

SEQ ID NO: 1753966 - RNA, 19 nt, Artificial Sequence
  Description of Artificial Sequence: Synthetic oligonucleotide
  Antisense strand to SEQ ID NO: 1753965
aacauacaaccucucacgc

SEQ ID NO: 1753967 - RNA, 19 nt, Artificial Sequence
  Description of Artificial Sequence: Synthetic oligonucleotide
  Sense strand starting at position 2919 of SEQ ID NO: 1562530
gguccuaaggugugugaga

SEQ ID NO: 1753968 - RNA, 19 nt, Artificial Sequence
  Description of Artificial Sequence: Synthetic oligonucleotide
  Antisense strand to SEQ ID NO: 1753967
ucucacacaccuuaggacc

SEQ ID NO: 1753969 - RNA, 19 nt, Artificial Sequence
  Description of Artificial Sequence: Synthetic oligonucleotide
  Sense strand starting at position 3002 of SEQ ID NO: 1562530
gugugaguccugaggugug

SEQ ID NO: 1753970 - RNA, 19 nt, Artificial Sequence
  Description of Artificial Sequence: Synthetic oligonucleotide
  Antisense strand to SEQ ID NO: 1753969
cacaccucaggacucacac

SEQ ID NO: 1753971 - RNA, 19 nt, Artificial Sequence
  Description of Artificial Sequence: Synthetic oligonucleotide
  Sense strand starting at position 3007 of SEQ ID NO: 1562530
aguccugaggugugugaga

SEQ ID NO: 1753972 - RNA, 19 nt, Artificial Sequence
  Description of Artificial Sequence: Synthetic oligonucleotide
  Antisense strand to SEQ ID NO: 1753971
ucucacacaccucaggacu

SEQ ID NO: 1753973 - RNA, 19 nt, Artificial Sequence
  Description of Artificial Sequence: Synthetic oligonucleotide
  Sense strand starting at position 3101 of SEQ ID NO: 1562530
uccugagaagugugaugaa

SEQ ID NO: 1753974 - RNA, 19 nt, Artificial Sequence
  Description of Artificial Sequence: Synthetic oligonucleotide
  Antisense strand to SEQ ID NO: 1753973
uucaucacacuucucagga

SEQ ID NO: 1753975 - RNA, 19 nt, Artificial Sequence
  Description of Artificial Sequence: Synthetic oligonucleotide
  Sense strand starting at position 3116 of SEQ ID NO: 1562530
ugaauuguguggguccuga

SEQ ID NO: 1753976 - RNA, 19 nt, Artificial Sequence
  Description of Artificial Sequence: Synthetic oligonucleotide
  Antisense strand to SEQ ID NO: 1753975
ucaggacccacacaauuca

SEQ ID NO: 1753977 - RNA, 19 nt, Artificial Sequence
  Description of Artificial Sequence: Synthetic oligonucleotide
  Sense strand starting at position 3217 of SEQ ID NO: 1562530
ggauuccugagguguguga

SEQ ID NO: 1753978 - RNA, 19 nt, Artificial Sequence
  Description of Artificial Sequence: Synthetic oligonucleotide
  Antisense strand to SEQ ID NO: 1753977
ucacacaccucaggaaucc

SEQ ID NO: 1753979 - RNA, 19 nt, Artificial Sequence
  Description of Artificial Sequence: Synthetic oligonucleotide
  Sense strand starting at position 3230 of SEQ ID NO: 1562530
gugugagggcuugugugua

SEQ ID NO: 1753980 - RNA, 19 nt, Artificial Sequence
  Description of Artificial Sequence: Synthetic oligonucleotide
  Antisense strand to SEQ ID NO: 1753979
uacacacaagcccucacac

SEQ ID NO: 1753981 - RNA, 19 nt, Artificial Sequence
  Description of Artificial Sequence: Synthetic oligonucleotide
  Sense strand starting at position 3405 of SEQ ID NO: 1562530
gugugugagaguuugcgua

SEQ ID NO: 1753982 - RNA, 19 nt, Artificial Sequence
  Description of Artificial Sequence: Synthetic oligonucleotide
  Antisense strand to SEQ ID NO: 1753981
uacgcaaacucucacacac

SEQ ID NO: 1753983 - RNA, 19 nt, Artificial Sequence
  Description of Artificial Sequence: Synthetic oligonucleotide
  Sense strand starting at position 3540 of SEQ ID NO: 1562530
cuuccugaggugugugaga

SEQ ID NO: 1753984 - RNA, 19 nt, Artificial Sequence
  Description of Artificial Sequence: Synthetic oligonucleotide
  Antisense strand to SEQ ID NO: 1753983
ucucacacaccucaggaag

SEQ ID NO: 1753985 - RNA, 19 nt, Artificial Sequence
  Description of Artificial Sequence: Synthetic oligonucleotide
  Sense strand starting at position 3923 of SEQ ID NO: 1562530
ggcccucuggucugaacau

SEQ ID NO: 1753986 - RNA, 19 nt, Artificial Sequence
  Description of Artificial Sequence: Synthetic oligonucleotide
  Antisense strand to SEQ ID NO: 1753985
auguucagaccagagggcc

SEQ ID NO: 1753987 - RNA, 19 nt, Artificial Sequence
  Description of Artificial Sequence: Synthetic oligonucleotide
  Sense strand starting at position 243 of SEQ ID NO: 1562531
ucgagaugucuuuggagaa

SEQ ID NO: 1753988 - RNA, 19 nt, Artificial Sequence
  Description of Artificial Sequence: Synthetic oligonucleotide
  Antisense strand to SEQ ID NO: 1753987
uucuccaaagacaucucga

SEQ ID NO: 1753989 - RNA, 19 nt, Artificial Sequence
  Description of Artificial Sequence: Synthetic oligonucleotide
  Sense strand starting at position 523 of SEQ ID NO: 1562531
uuugucuuugucgcaugau

SEQ ID NO: 1753990 - RNA, 19 nt, Artificial Sequence
  Description of Artificial Sequence: Synthetic oligonucleotide
  Antisense strand to SEQ ID NO: 1753989
aucaugcgacaaagacaaa

SEQ ID NO: 1753991 - RNA, 19 nt, Artificial Sequence
  Description of Artificial Sequence: Synthetic oligonucleotide
  Sense strand starting at position 531 of SEQ ID NO: 1562531
ugucgcaugauggaaauaa

SEQ ID NO: 1753992 - RNA, 19 nt, Artificial Sequence
  Description of Artificial Sequence: Synthetic oligonucleotide
  Antisense strand to SEQ ID NO: 1753991
uuauuuccaucaugcgaca

SEQ ID NO: 1753993 - RNA, 19 nt, Artificial Sequence
  Description of Artificial Sequence: Synthetic oligonucleotide
  Sense strand starting at position 551 of SEQ ID NO: 1562531
uggaaaugguuuccacaca

SEQ ID NO: 1753994 - RNA, 19 nt, Artificial Sequence
  Description of Artificial Sequence: Synthetic oligonucleotide
  Antisense strand to SEQ ID NO: 1753993
uguguggaaaccauuucca

SEQ ID NO: 1753995 - RNA, 19 nt, Artificial Sequence
  Description of Artificial Sequence: Synthetic oligonucleotide
  Sense strand starting at position 618 of SEQ ID NO: 1562531
ggaucauggaccugaguga

SEQ ID NO: 1753996 - RNA, 19 nt, Artificial Sequence
  Description of Artificial Sequence: Synthetic oligonucleotide
  Antisense strand to SEQ ID NO: 1753995
ucacucagguccaugaucc

SEQ ID NO: 1753997 - RNA, 19 nt, Artificial Sequence
  Description of Artificial Sequence: Synthetic oligonucleotide
  Sense strand starting at position 1028 of SEQ ID NO: 1562531
ggaaacccuugcuuuggaa

SEQ ID NO: 1753998 - RNA, 19 nt, Artificial Sequence
  Description of Artificial Sequence: Synthetic oligonucleotide
  Antisense strand to SEQ ID NO: 1753997
uuccaaagcaaggguuucc

SEQ ID NO: 1753999 - RNA, 19 nt, Artificial Sequence
  Description of Artificial Sequence: Synthetic oligonucleotide
  Sense strand starting at position 1036 of SEQ ID NO: 1562531
uugcuuuggaaacguagaa

SEQ ID NO: 1754000 - RNA, 19 nt, Artificial Sequence
  Description of Artificial Sequence: Synthetic oligonucleotide
  Antisense strand to SEQ ID NO: 1753999
uucuacguuuccaaagcaa

SEQ ID NO: 1754001 - RNA, 19 nt, Artificial Sequence
  Description of Artificial Sequence: Synthetic oligonucleotide
  Sense strand starting at position 1189 of SEQ ID NO: 1562531
ugauccauucugcagguaa

SEQ ID NO: 1754002 - RNA, 19 nt, Artificial Sequence
  Description of Artificial Sequence: Synthetic oligonucleotide
  Antisense strand to SEQ ID NO: 1754001
uuaccugcagaauggauca

SEQ ID NO: 1754003 - RNA, 19 nt, Artificial Sequence
  Description of Artificial Sequence: Synthetic oligonucleotide
  Sense strand starting at position 1191 of SEQ ID NO: 1562531
auccauucugcagguaaag

SEQ ID NO: 1754004 - RNA, 19 nt, Artificial Sequence
  Description of Artificial Sequence: Synthetic oligonucleotide
  Antisense strand to SEQ ID NO: 1754003
cuuuaccugcagaauggau

SEQ ID NO: 1754005 - RNA, 19 nt, Artificial Sequence
  Description of Artificial Sequence: Synthetic oligonucleotide
  Sense strand starting at position 1193 of SEQ ID NO: 1562531
ccauucugcagguaaagga

SEQ ID NO: 1754006 - RNA, 19 nt, Artificial Sequence
  Description of Artificial Sequence: Synthetic oligonucleotide
  Antisense strand to SEQ ID NO: 1754005
uccuuuaccugcagaaugg

SEQ ID NO: 1754007 - RNA, 19 nt, Artificial Sequence
  Description of Artificial Sequence: Synthetic oligonucleotide
  Sense strand starting at position 1331 of SEQ ID NO: 1562531
ucaugagagagguggcuuu

SEQ ID NO: 1754008 - RNA, 19 nt, Artificial Sequence
  Description of Artificial Sequence: Synthetic oligonucleotide
  Antisense strand to SEQ ID NO: 1754007
aaagccaccucucucauga

SEQ ID NO: 1754009 - RNA, 19 nt, Artificial Sequence
  Description of Artificial Sequence: Synthetic oligonucleotide
  Sense strand starting at position 1525 of SEQ ID NO: 1562531
agauguuggcaugaacagu

SEQ ID NO: 1754010 - RNA, 19 nt, Artificial Sequence
  Description of Artificial Sequence: Synthetic oligonucleotide
  Antisense strand to SEQ ID NO: 1754009
acuguucaugccaacaucu

SEQ ID NO: 1754011 - RNA, 19 nt, Artificial Sequence
  Description of Artificial Sequence: Synthetic oligonucleotide
  Sense strand starting at position 1606 of SEQ ID NO: 1562531
auuguauagucuuccuaac

SEQ ID NO: 1754012 - RNA, 19 nt, Artificial Sequence
  Description of Artificial Sequence: Synthetic oligonucleotide
  Antisense strand to SEQ ID NO: 1754011
guuaggaagacuauacaau

SEQ ID NO: 1754013 - RNA, 19 nt, Artificial Sequence
  Description of Artificial Sequence: Synthetic oligonucleotide
  Sense strand starting at position 2046 of SEQ ID NO: 1562531
cuuaaagagcguuagauaa

SEQ ID NO: 1754014 - RNA, 19 nt, Artificial Sequence
  Description of Artificial Sequence: Synthetic oligonucleotide
  Antisense strand to SEQ ID NO: 1754013
uuaucuaacgcucuuuaag

SEQ ID NO: 1754015 - RNA, 19 nt, Artificial Sequence
  Description of Artificial Sequence: Synthetic oligonucleotide
  Sense strand starting at position 2125 of SEQ ID NO: 1562531
agguguuuccuagacaugg

SEQ ID NO: 1754016 - RNA, 19 nt, Artificial Sequence
  Description of Artificial Sequence: Synthetic oligonucleotide
  Antisense strand to SEQ ID NO: 1754015
ccaugucuaggaaacaccu

SEQ ID NO: 1754017 - RNA, 19 nt, Artificial Sequence
  Description of Artificial Sequence: Synthetic oligonucleotide
  Sense strand starting at position 2133 of SEQ ID NO: 1562531
ccuagacauggucaagcua

SEQ ID NO: 1754018 - RNA, 19 nt, Artificial Sequence
  Description of Artificial Sequence: Synthetic oligonucleotide
  Antisense strand to SEQ ID NO: 1754017
uagcuugaccaugucuagg

SEQ ID NO: 1754019 - RNA, 19 nt, Artificial Sequence
  Description of Artificial Sequence: Synthetic oligonucleotide
  Sense strand starting at position 2158 of SEQ ID NO: 1562531
aggauuugcugauagacag

SEQ ID NO: 1754020 - RNA, 19 nt, Artificial Sequence
  Description of Artificial Sequence: Synthetic oligonucleotide
  Antisense strand to SEQ ID NO: 1754019
cugucuaucagcaaauccu

SEQ ID NO: 1754021 - RNA, 19 nt, Artificial Sequence
  Description of Artificial Sequence: Synthetic oligonucleotide
  Sense strand starting at position 2193 of SEQ ID NO: 1562531
ggucaucuuggcugaggga

SEQ ID NO: 1754022 - RNA, 19 nt, Artificial Sequence
  Description of Artificial Sequence: Synthetic oligonucleotide
  Antisense strand to SEQ ID NO: 1754021
ucccucagccaagaugacc

SEQ ID NO: 1754023 - RNA, 19 nt, Artificial Sequence
  Description of Artificial Sequence: Synthetic oligonucleotide
  Sense strand starting at position 2194 of SEQ ID NO: 1562531
gucaucuuggcugagggau

SEQ ID NO: 1754024 - RNA, 19 nt, Artificial Sequence
  Description of Artificial Sequence: Synthetic oligonucleotide
  Antisense strand to SEQ ID NO: 1754023
aucccucagccaagaugac

SEQ ID NO: 1754025 - RNA, 19 nt, Artificial Sequence
  Description of Artificial Sequence: Synthetic oligonucleotide
  Sense strand starting at position 2202 of SEQ ID NO: 1562531
ggcugagggaucugagauu

SEQ ID NO: 1754026 - RNA, 19 nt, Artificial Sequence
  Description of Artificial Sequence: Synthetic oligonucleotide
  Antisense strand to SEQ ID NO: 1754025
aaucucagaucccucagcc

SEQ ID NO: 1754027 - RNA, 19 nt, Artificial Sequence
  Description of Artificial Sequence: Synthetic oligonucleotide
  Sense strand starting at position 2229 of SEQ ID NO: 1562531
cccucuuucccaugggagu

SEQ ID NO: 1754028 - RNA, 19 nt, Artificial Sequence
  Description of Artificial Sequence: Synthetic oligonucleotide
  Antisense strand to SEQ ID NO: 1754027
acucccaugggaaagaggg

SEQ ID NO: 1754029 - RNA, 19 nt, Artificial Sequence
  Description of Artificial Sequence: Synthetic oligonucleotide
  Sense strand starting at position 2305 of SEQ ID NO: 1562531
ggguaaauacuguacucac

SEQ ID NO: 1754030 - RNA, 19 nt, Artificial Sequence
  Description of Artificial Sequence: Synthetic oligonucleotide
  Antisense strand to SEQ ID NO: 1754029
gugaguacaguauuuaccc

SEQ ID NO: 1754031 - RNA, 19 nt, Artificial Sequence
  Description of Artificial Sequence: Synthetic oligonucleotide
  Sense strand starting at position 2316 of SEQ ID NO: 1562531
guacucacugcagaaguga

SEQ ID NO: 1754032 - RNA, 19 nt, Artificial Sequence
  Description of Artificial Sequence: Synthetic oligonucleotide
  Antisense strand to SEQ ID NO: 1754031
ucacuucugcagugaguac

SEQ ID NO: 1754033 - RNA, 19 nt, Artificial Sequence
  Description of Artificial Sequence: Synthetic oligonucleotide
  Sense strand starting at position 2670 of SEQ ID NO: 1562531
cuagcuacucuggagguua

SEQ ID NO: 1754034 - RNA, 19 nt, Artificial Sequence
  Description of Artificial Sequence: Synthetic oligonucleotide
  Antisense strand to SEQ ID NO: 1754033
uaaccuccagaguagcuag

SEQ ID NO: 1754035 - RNA, 19 nt, Artificial Sequence
  Description of Artificial Sequence: Synthetic oligonucleotide
  Sense strand starting at position 3015 of SEQ ID NO: 1562531
uuauuaccuccugguggau

SEQ ID NO: 1754036 - RNA, 19 nt, Artificial Sequence
  Description of Artificial Sequence: Synthetic oligonucleotide
  Antisense strand to SEQ ID NO: 1754035
auccaccaggagguaauaa

SEQ ID NO: 1754037 - RNA, 19 nt, Artificial Sequence
  Description of Artificial Sequence: Synthetic oligonucleotide
  Sense strand starting at position 3018 of SEQ ID NO: 1562531
uuaccuccugguggauaaa

SEQ ID NO: 1754038 - RNA, 19 nt, Artificial Sequence
  Description of Artificial Sequence: Synthetic oligonucleotide
  Antisense strand to SEQ ID NO: 1754037
uuuauccaccaggagguaa

SEQ ID NO: 1754039 - RNA, 19 nt, Artificial Sequence
  Description of Artificial Sequence: Synthetic oligonucleotide
  Sense strand starting at position 3048 of SEQ ID NO: 1562531
acacauuauguugguuauu

SEQ ID NO: 1754040 - RNA, 19 nt, Artificial Sequence
  Description of Artificial Sequence: Synthetic oligonucleotide
  Antisense strand to SEQ ID NO: 1754039
aauaaccaacauaaugugu

SEQ ID NO: 1754041 - RNA, 19 nt, Artificial Sequence
  Description of Artificial Sequence: Synthetic oligonucleotide
  Sense strand starting at position 3155 of SEQ ID NO: 1562531
cuagaacaguggcuuugau

SEQ ID NO: 1754042 - RNA, 19 nt, Artificial Sequence
  Description of Artificial Sequence: Synthetic oligonucleotide
  Antisense strand to SEQ ID NO: 1754041
aucaaagccacuguucuag

SEQ ID NO: 1754043 - RNA, 19 nt, Artificial Sequence
  Description of Artificial Sequence: Synthetic oligonucleotide
  Sense strand starting at position 3169 of SEQ ID NO: 1562531
uugauuggcauucgagaaa

SEQ ID NO: 1754044 - RNA, 19 nt, Artificial Sequence
  Description of Artificial Sequence: Synthetic oligonucleotide
  Antisense strand to SEQ ID NO: 1754043
uuucucgaaugccaaucaa

SEQ ID NO: 1754045 - RNA, 19 nt, Artificial Sequence
  Description of Artificial Sequence: Synthetic oligonucleotide
  Sense strand starting at position 3180 of SEQ ID NO: 1562531
ucgagaaacagcuguugaa

SEQ ID NO: 1754046 - RNA, 19 nt, Artificial Sequence
  Description of Artificial Sequence: Synthetic oligonucleotide
  Antisense strand to SEQ ID NO: 1754045
uucaacagcuguuucucga

SEQ ID NO: 1754047 - RNA, 19 nt, Artificial Sequence
  Description of Artificial Sequence: Synthetic oligonucleotide
  Sense strand starting at position 3195 of SEQ ID NO: 1562531
ugaagagcugcaugaagaa

SEQ ID NO: 1754048 - RNA, 19 nt, Artificial Sequence
  Description of Artificial Sequence: Synthetic oligonucleotide
  Antisense strand to SEQ ID NO: 1754047
uucuucaugcagcucuuca

SEQ ID NO: 1754049 - RNA, 19 nt, Artificial Sequence
  Description of Artificial Sequence: Synthetic oligonucleotide
  Sense strand starting at position 3245 of SEQ ID NO: 1562531
gugagaaauuaggcccuga

SEQ ID NO: 1754050 - RNA, 19 nt, Artificial Sequence
  Description of Artificial Sequence: Synthetic oligonucleotide
  Antisense strand to SEQ ID NO: 1754049
ucagggccuaauuucucac

SEQ ID NO: 1754051 - RNA, 19 nt, Artificial Sequence
  Description of Artificial Sequence: Synthetic oligonucleotide
  Sense strand starting at position 3305 of SEQ ID NO: 1562531
gggugaccuagucaguaca

SEQ ID NO: 1754052 - RNA, 19 nt, Artificial Sequence
  Description of Artificial Sequence: Synthetic oligonucleotide
  Antisense strand to SEQ ID NO: 1754051
uguacugacuaggucaccc

SEQ ID NO: 1754053 - RNA, 19 nt, Artificial Sequence
  Description of Artificial Sequence: Synthetic oligonucleotide
  Sense strand starting at position 3519 of SEQ ID NO: 1562531
ucagcuuaaguuuauugaa

SEQ ID NO: 1754054 - RNA, 19 nt, Artificial Sequence
  Description of Artificial Sequence: Synthetic oligonucleotide
  Antisense strand to SEQ ID NO: 1754053
uucaauaaacuuaagcuga

SEQ ID NO: 1754055 - RNA, 19 nt, Artificial Sequence
  Description of Artificial Sequence: Synthetic oligonucleotide
  Sense strand starting at position 3596 of SEQ ID NO: 1562531
ucuaauuucucggaucaaa

SEQ ID NO: 1754056 - RNA, 19 nt, Artificial Sequence
  Description of Artificial Sequence: Synthetic oligonucleotide
  Antisense strand to SEQ ID NO: 1754055
uuugauccgagaaauuaga

SEQ ID NO: 1754057 - RNA, 19 nt, Artificial Sequence
  Description of Artificial Sequence: Synthetic oligonucleotide
  Sense strand starting at position 3632 of SEQ ID NO: 1562531
ugggauguaaauugcacaa

SEQ ID NO: 1754058 - RNA, 19 nt, Artificial Sequence
  Description of Artificial Sequence: Synthetic oligonucleotide
  Antisense strand to SEQ ID NO: 1754057
uugugcaauuuacauccca

SEQ ID NO: 1754059 - RNA, 19 nt, Artificial Sequence
  Description of Artificial Sequence: Synthetic oligonucleotide
  Sense strand starting at position 3645 of SEQ ID NO: 1562531
gcacaaucauuuggagaaa

SEQ ID NO: 1754060 - RNA, 19 nt, Artificial Sequence
  Description of Artificial Sequence: Synthetic oligonucleotide
  Antisense strand to SEQ ID NO: 1754059
uuucuccaaaugauugugc

SEQ ID NO: 1754061 - RNA, 19 nt, Artificial Sequence
  Description of Artificial Sequence: Synthetic oligonucleotide
  Sense strand starting at position 3683 of SEQ ID NO: 1562531
agguuuaagccauacagau

SEQ ID NO: 1754062 - RNA, 19 nt, Artificial Sequence
  Description of Artificial Sequence: Synthetic oligonucleotide
  Antisense strand to SEQ ID NO: 1754061
aucuguauggcuuaaaccu

SEQ ID NO: 1754063 - RNA, 19 nt, Artificial Sequence
  Description of Artificial Sequence: Synthetic oligonucleotide
  Sense strand starting at position 3735 of SEQ ID NO: 1562531
cuggucucuuaaucccaga

SEQ ID NO: 1754064 - RNA, 19 nt, Artificial Sequence
  Description of Artificial Sequence: Synthetic oligonucleotide
  Antisense strand to SEQ ID NO: 1754063
ucugggauuaagagaccag

SEQ ID NO: 1754065 - RNA, 19 nt, Artificial Sequence
  Description of Artificial Sequence: Synthetic oligonucleotide
  Sense strand starting at position 3810 of SEQ ID NO: 1562531
guuuguaacagcuggaaac

SEQ ID NO: 1754066 - RNA, 19 nt, Artificial Sequence
  Description of Artificial Sequence: Synthetic oligonucleotide
  Antisense strand to SEQ ID NO: 1754065
guuuccagcuguuacaaac

SEQ ID NO: 1754067 - RNA, 19 nt, Artificial Sequence
  Description of Artificial Sequence: Synthetic oligonucleotide
  Sense strand starting at position 4 of SEQ ID NO: 1562532
cugggcuagcuccgauuaa

SEQ ID NO: 1754068 - RNA, 19 nt, Artificial Sequence
  Description of Artificial Sequence: Synthetic oligonucleotide
  Antisense strand to SEQ ID NO: 1754067
uuaaucggagcuagcccag

SEQ ID NO: 1754069 - RNA, 19 nt, Artificial Sequence
  Description of Artificial Sequence: Synthetic oligonucleotide
  Sense strand starting at position 8 of SEQ ID NO: 1562532
gcuagcuccgauuaaccaa

SEQ ID NO: 1754070 - RNA, 19 nt, Artificial Sequence
  Description of Artificial Sequence: Synthetic oligonucleotide
  Antisense strand to SEQ ID NO: 1754069
uugguuaaucggagcuagc

SEQ ID NO: 1754071 - RNA, 19 nt, Artificial Sequence
  Description of Artificial Sequence: Synthetic oligonucleotide
  Sense strand starting at position 131 of SEQ ID NO: 1562532
cuaugcuagcccuagacua

SEQ ID NO: 1754072 - RNA, 19 nt, Artificial Sequence
  Description of Artificial Sequence: Synthetic oligonucleotide
  Antisense strand to SEQ ID NO: 1754071
uagucuagggcuagcauag

SEQ ID NO: 1754073 - RNA, 19 nt, Artificial Sequence
  Description of Artificial Sequence: Synthetic oligonucleotide
  Sense strand starting at position 209 of SEQ ID NO: 1562532
cugugcuagcuccaaacua

SEQ ID NO: 1754074 - RNA, 19 nt, Artificial Sequence
  Description of Artificial Sequence: Synthetic oligonucleotide
  Antisense strand to SEQ ID NO: 1754073
uaguuuggagcuagcacag

SEQ ID NO: 1754075 - RNA, 19 nt, Artificial Sequence
  Description of Artificial Sequence: Synthetic oligonucleotide
  Sense strand starting at position 339 of SEQ ID NO: 1562532
gggcuagcuccagacuaac

SEQ ID NO: 1754076 - RNA, 19 nt, Artificial Sequence
  Description of Artificial Sequence: Synthetic oligonucleotide
  Antisense strand to SEQ ID NO: 1754075
guuagucuggagcuagccc

SEQ ID NO: 1754077 - RNA, 19 nt, Artificial Sequence
  Description of Artificial Sequence: Synthetic oligonucleotide
  Sense strand starting at position 490 of SEQ ID NO: 1562532
cugggcuagccuuagacua

SEQ ID NO: 1754078 - RNA, 19 nt, Artificial Sequence
  Description of Artificial Sequence: Synthetic oligonucleotide
  Antisense strand to SEQ ID NO: 1754077
uagucuaaggcuagcccag

SEQ ID NO: 1754079 - RNA, 19 nt, Artificial Sequence
  Description of Artificial Sequence: Synthetic oligonucleotide
  Sense strand starting at position 590 of SEQ ID NO: 1562532
cugggcuagcucuagacua

SEQ ID NO: 1754080 - RNA, 19 nt, Artificial Sequence
  Description of Artificial Sequence: Synthetic oligonucleotide
  Antisense strand to SEQ ID NO: 1754079
uagucuagagcuagcccag

SEQ ID NO: 1754081 - RNA, 19 nt, Artificial Sequence
  Description of Artificial Sequence: Synthetic oligonucleotide
  Sense strand starting at position 592 of SEQ ID NO: 1562532
gggcuagcucuagacuaac

SEQ ID NO: 1754082 - RNA, 19 nt, Artificial Sequence
  Description of Artificial Sequence: Synthetic oligonucleotide
  Antisense strand to SEQ ID NO: 1754081
guuagucuagagcuagccc

SEQ ID NO: 1754083 - RNA, 19 nt, Artificial Sequence
  Description of Artificial Sequence: Synthetic oligonucleotide
  Sense strand starting at position 642 of SEQ ID NO: 1562532
gggcuagcucgagacuaac

SEQ ID NO: 1754084 - RNA, 19 nt, Artificial Sequence
  Description of Artificial Sequence: Synthetic oligonucleotide
  Antisense strand to SEQ ID NO: 1754083
guuagucucgagcuagccc

SEQ ID NO: 1754085 - RNA, 19 nt, Artificial Sequence
  Description of Artificial Sequence: Synthetic oligonucleotide
  Sense strand starting at position 772 of SEQ ID NO: 1562532
ggaagauuaccuugcuuug

SEQ ID NO: 1754086 - RNA, 19 nt, Artificial Sequence
  Description of Artificial Sequence: Synthetic oligonucleotide
  Antisense strand to SEQ ID NO: 1754085
caaagcaagguaaucuucc

SEQ ID NO: 1754087 - RNA, 19 nt, Artificial Sequence
  Description of Artificial Sequence: Synthetic oligonucleotide
  Sense strand starting at position 882 of SEQ ID NO: 1562532
gccgcaguucguccuguua

SEQ ID NO: 1754088 - RNA, 19 nt, Artificial Sequence
  Description of Artificial Sequence: Synthetic oligonucleotide
  Antisense strand to SEQ ID NO: 1754087
uaacaggacgaacugcggc

SEQ ID NO: 1754089 - RNA, 19 nt, Artificial Sequence
  Description of Artificial Sequence: Synthetic oligonucleotide
  Sense strand starting at position 1015 of SEQ ID NO: 1562532
acugucuuguugccacaua

SEQ ID NO: 1754090 - RNA, 19 nt, Artificial Sequence
  Description of Artificial Sequence: Synthetic oligonucleotide
  Antisense strand to SEQ ID NO: 1754089
uauguggcaacaagacagu

SEQ ID NO: 1754091 - RNA, 19 nt, Artificial Sequence
  Description of Artificial Sequence: Synthetic oligonucleotide
  Sense strand starting at position 1045 of SEQ ID NO: 1562532
agucuuaucuugcccauau

SEQ ID NO: 1754092 - RNA, 19 nt, Artificial Sequence
  Description of Artificial Sequence: Synthetic oligonucleotide
  Antisense strand to SEQ ID NO: 1754091
auaugggcaagauaagacu

SEQ ID NO: 1754093 - RNA, 19 nt, Artificial Sequence
  Description of Artificial Sequence: Synthetic oligonucleotide
  Sense strand starting at position 1046 of SEQ ID NO: 1562532
gucuuaucuugcccauauu

SEQ ID NO: 1754094 - RNA, 19 nt, Artificial Sequence
  Description of Artificial Sequence: Synthetic oligonucleotide
  Antisense strand to SEQ ID NO: 1754093
aauaugggcaagauaagac

SEQ ID NO: 1754095 - RNA, 19 nt, Artificial Sequence
  Description of Artificial Sequence: Synthetic oligonucleotide
  Sense strand starting at position 1092 of SEQ ID NO: 1562532
ccgauagggcuuugcugaa

SEQ ID NO: 1754096 - RNA, 19 nt, Artificial Sequence
  Description of Artificial Sequence: Synthetic oligonucleotide
  Antisense strand to SEQ ID NO: 1754095
uucagcaaagcccuaucgg

SEQ ID NO: 1754097 - RNA, 19 nt, Artificial Sequence
  Description of Artificial Sequence: Synthetic oligonucleotide
  Sense strand starting at position 1419 of SEQ ID NO: 1562532
gccagauccugucucggaa

SEQ ID NO: 1754098 - RNA, 19 nt, Artificial Sequence
  Description of Artificial Sequence: Synthetic oligonucleotide
  Antisense strand to SEQ ID NO: 1754097
uuccgagacaggaucuggc

SEQ ID NO: 1754099 - RNA, 19 nt, Artificial Sequence
  Description of Artificial Sequence: Synthetic oligonucleotide
  Sense strand starting at position 1503 of SEQ ID NO: 1562532
agaggugagugcucuggga

SEQ ID NO: 1754100 - RNA, 19 nt, Artificial Sequence
  Description of Artificial Sequence: Synthetic oligonucleotide
  Antisense strand to SEQ ID NO: 1754099
ucccagagcacucaccucu

SEQ ID NO: 1754101 - RNA, 19 nt, Artificial Sequence
  Description of Artificial Sequence: Synthetic oligonucleotide
  Sense strand starting at position 1505 of SEQ ID NO: 1562532
aggugagugcucugggacu

SEQ ID NO: 1754102 - RNA, 19 nt, Artificial Sequence
  Description of Artificial Sequence: Synthetic oligonucleotide
  Antisense strand to SEQ ID NO: 1754101
agucccagagcacucaccu

SEQ ID NO: 1754103 - RNA, 19 nt, Artificial Sequence
  Description of Artificial Sequence: Synthetic oligonucleotide
  Sense strand starting at position 1627 of SEQ ID NO: 1562532
ccuccugagcaguggcaaa

SEQ ID NO: 1754104 - RNA, 19 nt, Artificial Sequence
  Description of Artificial Sequence: Synthetic oligonucleotide
  Antisense strand to SEQ ID NO: 1754103
uuugccacugcucaggagg

SEQ ID NO: 1754105 - RNA, 19 nt, Artificial Sequence
  Description of Artificial Sequence: Synthetic oligonucleotide
  Sense strand starting at position 1639 of SEQ ID NO: 1562532
uggcaaaucccaugugaac

SEQ ID NO: 1754106 - RNA, 19 nt, Artificial Sequence
  Description of Artificial Sequence: Synthetic oligonucleotide
  Antisense strand to SEQ ID NO: 1754105
guucacaugggauuugcca

SEQ ID NO: 1754107 - RNA, 19 nt, Artificial Sequence
  Description of Artificial Sequence: Synthetic oligonucleotide
  Sense strand starting at position 1665 of SEQ ID NO: 1562532
auugccagaugccuuuaua

SEQ ID NO: 1754108 - RNA, 19 nt, Artificial Sequence
  Description of Artificial Sequence: Synthetic oligonucleotide
  Antisense strand to SEQ ID NO: 1754107
uauaaaggcaucuggcaau

SEQ ID NO: 1754109 - RNA, 19 nt, Artificial Sequence
  Description of Artificial Sequence: Synthetic oligonucleotide
  Sense strand starting at position 1702 of SEQ ID NO: 1562532
uuaauuuaugguugugcuu

SEQ ID NO: 1754110 - RNA, 19 nt, Artificial Sequence
  Description of Artificial Sequence: Synthetic oligonucleotide
  Antisense strand to SEQ ID NO: 1754109
aagcacaaccauaaauuaa

SEQ ID NO: 1754111 - RNA, 19 nt, Artificial Sequence
  Description of Artificial Sequence: Synthetic oligonucleotide
  Sense strand starting at position 1932 of SEQ ID NO: 1562532
cccucuguuuguccaacaa

SEQ ID NO: 1754112 - RNA, 19 nt, Artificial Sequence
  Description of Artificial Sequence: Synthetic oligonucleotide
  Antisense strand to SEQ ID NO: 1754111
uuguuggacaaacagaggg

SEQ ID NO: 1754113 - RNA, 19 nt, Artificial Sequence
  Description of Artificial Sequence: Synthetic oligonucleotide
  Sense strand starting at position 2201 of SEQ ID NO: 1562532
augcauuucuauugauaga

SEQ ID NO: 1754114 - RNA, 19 nt, Artificial Sequence
  Description of Artificial Sequence: Synthetic oligonucleotide
  Antisense strand to SEQ ID NO: 1754113
ucuaucaauagaaaugcau

SEQ ID NO: 1754115 - RNA, 19 nt, Artificial Sequence
  Description of Artificial Sequence: Synthetic oligonucleotide
  Sense strand starting at position 2246 of SEQ ID NO: 1562532
aaauauuagggccaaguuu

SEQ ID NO: 1754116 - RNA, 19 nt, Artificial Sequence
  Description of Artificial Sequence: Synthetic oligonucleotide
  Antisense strand to SEQ ID NO: 1754115
aaacuuggcccuaauauuu

SEQ ID NO: 1754117 - RNA, 19 nt, Artificial Sequence
  Description of Artificial Sequence: Synthetic oligonucleotide
  Sense strand starting at position 2420 of SEQ ID NO: 1562532
ggcugcucuccauggagau

SEQ ID NO: 1754118 - RNA, 19 nt, Artificial Sequence
  Description of Artificial Sequence: Synthetic oligonucleotide
  Antisense strand to SEQ ID NO: 1754117
aucuccauggagagcagcc

SEQ ID NO: 1754119 - RNA, 19 nt, Artificial Sequence
  Description of Artificial Sequence: Synthetic oligonucleotide
  Sense strand starting at position 2525 of SEQ ID NO: 1562532
guuccaugggaaugcucua

SEQ ID NO: 1754120 - RNA, 19 nt, Artificial Sequence
  Description of Artificial Sequence: Synthetic oligonucleotide
  Antisense strand to SEQ ID NO: 1754119
uagagcauucccauggaac

SEQ ID NO: 1754121 - RNA, 19 nt, Artificial Sequence
  Description of Artificial Sequence: Synthetic oligonucleotide
  Sense strand starting at position 2530 of SEQ ID NO: 1562532
augggaaugcucuacaucu

SEQ ID NO: 1754122 - RNA, 19 nt, Artificial Sequence
  Description of Artificial Sequence: Synthetic oligonucleotide
  Antisense strand to SEQ ID NO: 1754121
agauguagagcauucccau

SEQ ID NO: 1754123 - RNA, 19 nt, Artificial Sequence
  Description of Artificial Sequence: Synthetic oligonucleotide
  Sense strand starting at position 2592 of SEQ ID NO: 1562532
guaggaugugcuggagaag

SEQ ID NO: 1754124 - RNA, 19 nt, Artificial Sequence
  Description of Artificial Sequence: Synthetic oligonucleotide
  Antisense strand to SEQ ID NO: 1754123
cuucuccagcacauccuac

SEQ ID NO: 1754125 - RNA, 19 nt, Artificial Sequence
  Description of Artificial Sequence: Synthetic oligonucleotide
  Sense strand starting at position 3411 of SEQ ID NO: 1562532
ucaguuuccuuguucuaca

SEQ ID NO: 1754126 - RNA, 19 nt, Artificial Sequence
  Description of Artificial Sequence: Synthetic oligonucleotide
  Antisense strand to SEQ ID NO: 1754125
uguagaacaaggaaacuga

SEQ ID NO: 1754127 - RNA, 19 nt, Artificial Sequence
  Description of Artificial Sequence: Synthetic oligonucleotide
  Sense strand starting at position 3422 of SEQ ID NO: 1562532
guucuacaucccugucacu

SEQ ID NO: 1754128 - RNA, 19 nt, Artificial Sequence
  Description of Artificial Sequence: Synthetic oligonucleotide
  Antisense strand to SEQ ID NO: 1754127
agugacagggauguagaac

SEQ ID NO: 1754129 - RNA, 19 nt, Artificial Sequence
  Description of Artificial Sequence: Synthetic oligonucleotide
  Sense strand starting at position 3455 of SEQ ID NO: 1562532
gauauaagugacugaguca

SEQ ID NO: 1754130 - RNA, 19 nt, Artificial Sequence
  Description of Artificial Sequence: Synthetic oligonucleotide
  Antisense strand to SEQ ID NO: 1754129
ugacucagucacuuauauc

SEQ ID NO: 1754131 - RNA, 19 nt, Artificial Sequence
  Description of Artificial Sequence: Synthetic oligonucleotide
  Sense strand starting at position 3651 of SEQ ID NO: 1562532
uaggcaugcuucccuggaa

SEQ ID NO: 1754132 - RNA, 19 nt, Artificial Sequence
  Description of Artificial Sequence: Synthetic oligonucleotide
  Antisense strand to SEQ ID NO: 1754131
uuccagggaagcaugccua

SEQ ID NO: 1754133 - RNA, 19 nt, Artificial Sequence
  Description of Artificial Sequence: Synthetic oligonucleotide
  Sense strand starting at position 3652 of SEQ ID NO: 1562532
aggcaugcuucccuggaau

SEQ ID NO: 1754134 - RNA, 19 nt, Artificial Sequence
  Description of Artificial Sequence: Synthetic oligonucleotide
  Antisense strand to SEQ ID NO: 1754133
auuccagggaagcaugccu

SEQ ID NO: 1754135 - RNA, 19 nt, Artificial Sequence
  Description of Artificial Sequence: Synthetic oligonucleotide
  Sense strand starting at position 3733 of SEQ ID NO: 1562532
augggacgucugcaauaga

SEQ ID NO: 1754136 - RNA, 19 nt, Artificial Sequence
  Description of Artificial Sequence: Synthetic oligonucleotide
  Antisense strand to SEQ ID NO: 1754135
ucuauugcagacgucccau

SEQ ID NO: 1754137 - RNA, 19 nt, Artificial Sequence
  Description of Artificial Sequence: Synthetic oligonucleotide
  Sense strand starting at position 3736 of SEQ ID NO: 1562532
ggacgucugcaauagagug

SEQ ID NO: 1754138 - RNA, 19 nt, Artificial Sequence
  Description of Artificial Sequence: Synthetic oligonucleotide
  Antisense strand to SEQ ID NO: 1754137
cacucuauugcagacgucc

SEQ ID NO: 1754139 - RNA, 19 nt, Artificial Sequence
  Description of Artificial Sequence: Synthetic oligonucleotide
  Sense strand starting at position 3753 of SEQ ID NO: 1562532
uggcaucgcuaguugaaag

SEQ ID NO: 1754140 - RNA, 19 nt, Artificial Sequence
  Description of Artificial Sequence: Synthetic oligonucleotide
  Antisense strand to SEQ ID NO: 1754139
cuuucaacuagcgaugcca

SEQ ID NO: 1754141 - RNA, 19 nt, Artificial Sequence
  Description of Artificial Sequence: Synthetic oligonucleotide
  Sense strand starting at position 3966 of SEQ ID NO: 1562532
cagccugucccuuucguua

SEQ ID NO: 1754142 - RNA, 19 nt, Artificial Sequence
  Description of Artificial Sequence: Synthetic oligonucleotide
  Antisense strand to SEQ ID NO: 1754141
uaacgaaagggacaggcug

SEQ ID NO: 1754143 - RNA, 19 nt, Artificial Sequence
  Description of Artificial Sequence: Synthetic oligonucleotide
  Sense strand starting at position 3970 of SEQ ID NO: 1562532
cugucccuuucguuaagaa

SEQ ID NO: 1754144 - RNA, 19 nt, Artificial Sequence
  Description of Artificial Sequence: Synthetic oligonucleotide
  Antisense strand to SEQ ID NO: 1754143
uucuuaacgaaagggacag

SEQ ID NO: 1754145 - RNA, 19 nt, Artificial Sequence
  Description of Artificial Sequence: Synthetic oligonucleotide
  Sense strand starting at position 3971 of SEQ ID NO: 1562532
ugucccuuucguuaagaau

SEQ ID NO: 1754146 - RNA, 19 nt, Artificial Sequence
  Description of Artificial Sequence: Synthetic oligonucleotide
  Antisense strand to SEQ ID NO: 1754145
auucuuaacgaaagggaca

SEQ ID NO: 1754147 - RNA, 19 nt, Artificial Sequence
  Description of Artificial Sequence: Synthetic oligonucleotide
  Sense strand starting at position 179 of SEQ ID NO: 1562533
gaugcacuuucccugugaa

SEQ ID NO: 1754148 - RNA, 19 nt, Artificial Sequence
  Description of Artificial Sequence: Synthetic oligonucleotide
  Antisense strand to SEQ ID NO: 1754147
uucacagggaaagugcauc

SEQ ID NO: 1754149 - RNA, 19 nt, Artificial Sequence
  Description of Artificial Sequence: Synthetic oligonucleotide
  Sense strand starting at position 180 of SEQ ID NO: 1562533
augcacuuucccugugaau

SEQ ID NO: 1754150 - RNA, 19 nt, Artificial Sequence
  Description of Artificial Sequence: Synthetic oligonucleotide
  Antisense strand to SEQ ID NO: 1754149
auucacagggaaagugcau

SEQ ID NO: 1754151 - RNA, 19 nt, Artificial Sequence
  Description of Artificial Sequence: Synthetic oligonucleotide
  Sense strand starting at position 182 of SEQ ID NO: 1562533
gcacuuucccugugaauau

SEQ ID NO: 1754152 - RNA, 19 nt, Artificial Sequence
  Description of Artificial Sequence: Synthetic oligonucleotide
  Antisense strand to SEQ ID NO: 1754151
auauucacagggaaagugc

SEQ ID NO: 1754153 - RNA, 19 nt, Artificial Sequence
  Description of Artificial Sequence: Synthetic oligonucleotide
  Sense strand starting at position 242 of SEQ ID NO: 1562533
uggccauuugccuaagugu

SEQ ID NO: 1754154 - RNA, 19 nt, Artificial Sequence
  Description of Artificial Sequence: Synthetic oligonucleotide
  Antisense strand to SEQ ID NO: 1754153
acacuuaggcaaauggcca

SEQ ID NO: 1754155 - RNA, 19 nt, Artificial Sequence
  Description of Artificial Sequence: Synthetic oligonucleotide
  Sense strand starting at position 283 of SEQ ID NO: 1562533
ucaccuucucgggaaguca

SEQ ID NO: 1754156 - RNA, 19 nt, Artificial Sequence
  Description of Artificial Sequence: Synthetic oligonucleotide
  Antisense strand to SEQ ID NO: 1754155
ugacuucccgagaagguga

SEQ ID NO: 1754157 - RNA, 19 nt, Artificial Sequence
  Description of Artificial Sequence: Synthetic oligonucleotide
  Sense strand starting at position 448 of SEQ ID NO: 1562533
cgccauagagaucauugca

SEQ ID NO: 1754158 - RNA, 19 nt, Artificial Sequence
  Description of Artificial Sequence: Synthetic oligonucleotide
  Antisense strand to SEQ ID NO: 1754157
ugcaaugaucucuauggcg

SEQ ID NO: 1754159 - RNA, 19 nt, Artificial Sequence
  Description of Artificial Sequence: Synthetic oligonucleotide
  Sense strand starting at position 508 of SEQ ID NO: 1562533
uccugaauuguugagcaug

SEQ ID NO: 1754160 - RNA, 19 nt, Artificial Sequence
  Description of Artificial Sequence: Synthetic oligonucleotide
  Antisense strand to SEQ ID NO: 1754159
caugcucaacaauucagga

SEQ ID NO: 1754161 - RNA, 19 nt, Artificial Sequence
  Description of Artificial Sequence: Synthetic oligonucleotide
  Sense strand starting at position 590 of SEQ ID NO: 1562533
cuguaugugcagcagaagu

SEQ ID NO: 1754162 - RNA, 19 nt, Artificial Sequence
  Description of Artificial Sequence: Synthetic oligonucleotide
  Antisense strand to SEQ ID NO: 1754161
acuucugcugcacauacag

SEQ ID NO: 1754163 - RNA, 19 nt, Artificial Sequence
  Description of Artificial Sequence: Synthetic oligonucleotide
  Sense strand starting at position 659 of SEQ ID NO: 1562533
acgugcagugucuuacauu

SEQ ID NO: 1754164 - RNA, 19 nt, Artificial Sequence
  Description of Artificial Sequence: Synthetic oligonucleotide
  Antisense strand to SEQ ID NO: 1754163
aauguaagacacugcacgu

SEQ ID NO: 1754165 - RNA, 19 nt, Artificial Sequence
  Description of Artificial Sequence: Synthetic oligonucleotide
  Sense strand starting at position 1074 of SEQ ID NO: 1562533
ccuggaucuugccuggaga

SEQ ID NO: 1754166 - RNA, 19 nt, Artificial Sequence
  Description of Artificial Sequence: Synthetic oligonucleotide
  Antisense strand to SEQ ID NO: 1754165
ucuccaggcaagauccagg

SEQ ID NO: 1754167 - RNA, 19 nt, Artificial Sequence
  Description of Artificial Sequence: Synthetic oligonucleotide
  Sense strand starting at position 1075 of SEQ ID NO: 1562533
cuggaucuugccuggagau

SEQ ID NO: 1754168 - RNA, 19 nt, Artificial Sequence
  Description of Artificial Sequence: Synthetic oligonucleotide
  Antisense strand to SEQ ID NO: 1754167
aucuccaggcaagauccag

SEQ ID NO: 1754169 - RNA, 19 nt, Artificial Sequence
  Description of Artificial Sequence: Synthetic oligonucleotide
  Sense strand starting at position 1076 of SEQ ID NO: 1562533
uggaucuugccuggagaug

SEQ ID NO: 1754170 - RNA, 19 nt, Artificial Sequence
  Description of Artificial Sequence: Synthetic oligonucleotide
  Antisense strand to SEQ ID NO: 1754169
caucuccaggcaagaucca

SEQ ID NO: 1754171 - RNA, 19 nt, Artificial Sequence
  Description of Artificial Sequence: Synthetic oligonucleotide
  Sense strand starting at position 1087 of SEQ ID NO: 1562533
uggagaugcccugauguaa

SEQ ID NO: 1754172 - RNA, 19 nt, Artificial Sequence
  Description of Artificial Sequence: Synthetic oligonucleotide
  Antisense strand to SEQ ID NO: 1754171
uuacaucagggcaucucca

SEQ ID NO: 1754173 - RNA, 19 nt, Artificial Sequence
  Description of Artificial Sequence: Synthetic oligonucleotide
  Sense strand starting at position 1272 of SEQ ID NO: 1562533
guugcuaugcaauggcuaa

SEQ ID NO: 1754174 - RNA, 19 nt, Artificial Sequence
  Description of Artificial Sequence: Synthetic oligonucleotide
  Antisense strand to SEQ ID NO: 1754173
uuagccauugcauagcaac

SEQ ID NO: 1754175 - RNA, 19 nt, Artificial Sequence
  Description of Artificial Sequence: Synthetic oligonucleotide
  Sense strand starting at position 1276 of SEQ ID NO: 1562533
cuaugcaauggcuaaauga

SEQ ID NO: 1754176 - RNA, 19 nt, Artificial Sequence
  Description of Artificial Sequence: Synthetic oligonucleotide
  Antisense strand to SEQ ID NO: 1754175
ucauuuagccauugcauag

SEQ ID NO: 1754177 - RNA, 19 nt, Artificial Sequence
  Description of Artificial Sequence: Synthetic oligonucleotide
  Sense strand starting at position 1311 of SEQ ID NO: 1562533
uauugacaguguucugaag

SEQ ID NO: 1754178 - RNA, 19 nt, Artificial Sequence
  Description of Artificial Sequence: Synthetic oligonucleotide
  Antisense strand to SEQ ID NO: 1754177
cuucagaacacugucaaua

SEQ ID NO: 1754179 - RNA, 19 nt, Artificial Sequence
  Description of Artificial Sequence: Synthetic oligonucleotide
  Sense strand starting at position 1493 of SEQ ID NO: 1562533
uuggauaaguuguuaacuu

SEQ ID NO: 1754180 - RNA, 19 nt, Artificial Sequence
  Description of Artificial Sequence: Synthetic oligonucleotide
  Antisense strand to SEQ ID NO: 1754179
aaguuaacaacuuauccaa

SEQ ID NO: 1754181 - RNA, 19 nt, Artificial Sequence
  Description of Artificial Sequence: Synthetic oligonucleotide
  Sense strand starting at position 1595 of SEQ ID NO: 1562533
gugacagguggccauuauu

SEQ ID NO: 1754182 - RNA, 19 nt, Artificial Sequence
  Description of Artificial Sequence: Synthetic oligonucleotide
  Antisense strand to SEQ ID NO: 1754181
aauaauggccaccugucac

SEQ ID NO: 1754183 - RNA, 19 nt, Artificial Sequence
  Description of Artificial Sequence: Synthetic oligonucleotide
  Sense strand starting at position 1598 of SEQ ID NO: 1562533
acagguggccauuauuaaa

SEQ ID NO: 1754184 - RNA, 19 nt, Artificial Sequence
  Description of Artificial Sequence: Synthetic oligonucleotide
  Antisense strand to SEQ ID NO: 1754183
uuuaauaauggccaccugu

SEQ ID NO: 1754185 - RNA, 19 nt, Artificial Sequence
  Description of Artificial Sequence: Synthetic oligonucleotide
  Sense strand starting at position 1703 of SEQ ID NO: 1562533
ccacguacuccucagcaga

SEQ ID NO: 1754186 - RNA, 19 nt, Artificial Sequence
  Description of Artificial Sequence: Synthetic oligonucleotide
  Antisense strand to SEQ ID NO: 1754185
ucugcugaggaguacgugg

SEQ ID NO: 1754187 - RNA, 19 nt, Artificial Sequence
  Description of Artificial Sequence: Synthetic oligonucleotide
  Sense strand starting at position 1922 of SEQ ID NO: 1562533
ccugcaugccuuugucaag

SEQ ID NO: 1754188 - RNA, 19 nt, Artificial Sequence
  Description of Artificial Sequence: Synthetic oligonucleotide
  Antisense strand to SEQ ID NO: 1754187
cuugacaaaggcaugcagg

SEQ ID NO: 1754189 - RNA, 19 nt, Artificial Sequence
  Description of Artificial Sequence: Synthetic oligonucleotide
  Sense strand starting at position 2050 of SEQ ID NO: 1562533
ggagcggaugugugucaau

SEQ ID NO: 1754190 - RNA, 19 nt, Artificial Sequence
  Description of Artificial Sequence: Synthetic oligonucleotide
  Antisense strand to SEQ ID NO: 1754189
auugacacacauccgcucc

SEQ ID NO: 1754191 - RNA, 19 nt, Artificial Sequence
  Description of Artificial Sequence: Synthetic oligonucleotide
  Sense strand starting at position 2158 of SEQ ID NO: 1562533
gccagaagcccucagaaca

SEQ ID NO: 1754192 - RNA, 19 nt, Artificial Sequence
  Description of Artificial Sequence: Synthetic oligonucleotide
  Antisense strand to SEQ ID NO: 1754191
uguucugagggcuucuggc

SEQ ID NO: 1754193 - RNA, 19 nt, Artificial Sequence
  Description of Artificial Sequence: Synthetic oligonucleotide
  Sense strand starting at position 2237 of SEQ ID NO: 1562533
ggcagcucugagugaguca

SEQ ID NO: 1754194 - RNA, 19 nt, Artificial Sequence
  Description of Artificial Sequence: Synthetic oligonucleotide
  Antisense strand to SEQ ID NO: 1754193
ugacucacucagagcugcc

SEQ ID NO: 1754195 - RNA, 19 nt, Artificial Sequence
  Description of Artificial Sequence: Synthetic oligonucleotide
  Sense strand starting at position 2437 of SEQ ID NO: 1562533
cuuuccuauccagaggcau

SEQ ID NO: 1754196 - RNA, 19 nt, Artificial Sequence
  Description of Artificial Sequence: Synthetic oligonucleotide
  Antisense strand to SEQ ID NO: 1754195
augccucuggauaggaaag

SEQ ID NO: 1754197 - RNA, 19 nt, Artificial Sequence
  Description of Artificial Sequence: Synthetic oligonucleotide
  Sense strand starting at position 2972 of SEQ ID NO: 1562533
augagacagcgaugauucu

SEQ ID NO: 1754198 - RNA, 19 nt, Artificial Sequence
  Description of Artificial Sequence: Synthetic oligonucleotide
  Antisense strand to SEQ ID NO: 1754197
agaaucaucgcugucucau

SEQ ID NO: 1754199 - RNA, 19 nt, Artificial Sequence
  Description of Artificial Sequence: Synthetic oligonucleotide
  Sense strand starting at position 2973 of SEQ ID NO: 1562533
ugagacagcgaugauucua

SEQ ID NO: 1754200 - RNA, 19 nt, Artificial Sequence
  Description of Artificial Sequence: Synthetic oligonucleotide
  Antisense strand to SEQ ID NO: 1754199
uagaaucaucgcugucuca

SEQ ID NO: 1754201 - RNA, 19 nt, Artificial Sequence
  Description of Artificial Sequence: Synthetic oligonucleotide
  Sense strand starting at position 3005 of SEQ ID NO: 1562533
ggaagaaacuaagacucaa

SEQ ID NO: 1754202 - RNA, 19 nt, Artificial Sequence
  Description of Artificial Sequence: Synthetic oligonucleotide
  Antisense strand to SEQ ID NO: 1754201
uugagucuuaguuucuucc

SEQ ID NO: 1754203 - RNA, 19 nt, Artificial Sequence
  Description of Artificial Sequence: Synthetic oligonucleotide
  Sense strand starting at position 3021 of SEQ ID NO: 1562533
caacauuuccggugccuau

SEQ ID NO: 1754204 - RNA, 19 nt, Artificial Sequence
  Description of Artificial Sequence: Synthetic oligonucleotide
  Antisense strand to SEQ ID NO: 1754203
auaggcaccggaaauguug

SEQ ID NO: 1754205 - RNA, 19 nt, Artificial Sequence
  Description of Artificial Sequence: Synthetic oligonucleotide
  Sense strand starting at position 3032 of SEQ ID NO: 1562533
gugccuaucagagguuacu

SEQ ID NO: 1754206 - RNA, 19 nt, Artificial Sequence
  Description of Artificial Sequence: Synthetic oligonucleotide
  Antisense strand to SEQ ID NO: 1754205
aguaaccucugauaggcac

SEQ ID NO: 1754207 - RNA, 19 nt, Artificial Sequence
  Description of Artificial Sequence: Synthetic oligonucleotide
  Sense strand starting at position 3048 of SEQ ID NO: 1562533
acuccagugucccugguau

SEQ ID NO: 1754208 - RNA, 19 nt, Artificial Sequence
  Description of Artificial Sequence: Synthetic oligonucleotide
  Antisense strand to SEQ ID NO: 1754207
auaccagggacacuggagu

SEQ ID NO: 1754209 - RNA, 19 nt, Artificial Sequence
  Description of Artificial Sequence: Synthetic oligonucleotide
  Sense strand starting at position 3059 of SEQ ID NO: 1562533
ccugguauagcugguauuu

SEQ ID NO: 1754210 - RNA, 19 nt, Artificial Sequence
  Description of Artificial Sequence: Synthetic oligonucleotide
  Antisense strand to SEQ ID NO: 1754209
aaauaccagcuauaccagg

SEQ ID NO: 1754211 - RNA, 19 nt, Artificial Sequence
  Description of Artificial Sequence: Synthetic oligonucleotide
  Sense strand starting at position 3061 of SEQ ID NO: 1562533
ugguauagcugguauuuaa

SEQ ID NO: 1754212 - RNA, 19 nt, Artificial Sequence
  Description of Artificial Sequence: Synthetic oligonucleotide
  Antisense strand to SEQ ID NO: 1754211
uuaaauaccagcuauacca

SEQ ID NO: 1754213 - RNA, 19 nt, Artificial Sequence
  Description of Artificial Sequence: Synthetic oligonucleotide
  Sense strand starting at position 3168 of SEQ ID NO: 1562533
gcaagagacuaaucucauu

SEQ ID NO: 1754214 - RNA, 19 nt, Artificial Sequence
  Description of Artificial Sequence: Synthetic oligonucleotide
  Antisense strand to SEQ ID NO: 1754213
aaugagauuagucucuugc

SEQ ID NO: 1754215 - RNA, 19 nt, Artificial Sequence
  Description of Artificial Sequence: Synthetic oligonucleotide
  Sense strand starting at position 3211 of SEQ ID NO: 1562533
uguguucuccguguuucuu

SEQ ID NO: 1754216 - RNA, 19 nt, Artificial Sequence
  Description of Artificial Sequence: Synthetic oligonucleotide
  Antisense strand to SEQ ID NO: 1754215
aagaaacacggagaacaca

SEQ ID NO: 1754217 - RNA, 19 nt, Artificial Sequence
  Description of Artificial Sequence: Synthetic oligonucleotide
  Sense strand starting at position 3212 of SEQ ID NO: 1562533
guguucuccguguuucuuu

SEQ ID NO: 1754218 - RNA, 19 nt, Artificial Sequence
  Description of Artificial Sequence: Synthetic oligonucleotide
  Antisense strand to SEQ ID NO: 1754217
aaagaaacacggagaacac

SEQ ID NO: 1754219 - RNA, 19 nt, Artificial Sequence
  Description of Artificial Sequence: Synthetic oligonucleotide
  Sense strand starting at position 3267 of SEQ ID NO: 1562533
ccaggagccucugucugaa

SEQ ID NO: 1754220 - RNA, 19 nt, Artificial Sequence
  Description of Artificial Sequence: Synthetic oligonucleotide
  Antisense strand to SEQ ID NO: 1754219
uucagacagaggcuccugg

SEQ ID NO: 1754221 - RNA, 19 nt, Artificial Sequence
  Description of Artificial Sequence: Synthetic oligonucleotide
  Sense strand starting at position 3511 of SEQ ID NO: 1562533
gcccuuuguggauggauuu

SEQ ID NO: 1754222 - RNA, 19 nt, Artificial Sequence
  Description of Artificial Sequence: Synthetic oligonucleotide
  Antisense strand to SEQ ID NO: 1754221
aaauccauccacaaagggc

SEQ ID NO: 1754223 - RNA, 19 nt, Artificial Sequence
  Description of Artificial Sequence: Synthetic oligonucleotide
  Sense strand starting at position 3743 of SEQ ID NO: 1562533
gugagaucucccugccuuc

SEQ ID NO: 1754224 - RNA, 19 nt, Artificial Sequence
  Description of Artificial Sequence: Synthetic oligonucleotide
  Antisense strand to SEQ ID NO: 1754223
gaaggcagggagaucucac

SEQ ID NO: 1754225 - RNA, 19 nt, Artificial Sequence
  Description of Artificial Sequence: Synthetic oligonucleotide
  Sense strand starting at position 3806 of SEQ ID NO: 1562533
ggcugaguuccaggagggu

SEQ ID NO: 1754226 - RNA, 19 nt, Artificial Sequence
  Description of Artificial Sequence: Synthetic oligonucleotide
  Antisense strand to SEQ ID NO: 1754225
acccuccuggaacucagcc

SEQ ID NO: 1754227 - RNA, 19 nt, Artificial Sequence
  Description of Artificial Sequence: Synthetic oligonucleotide
  Sense strand starting at position 129 of SEQ ID NO: 1562534
ccagcagaaucuugaagaa

SEQ ID NO: 1754228 - RNA, 19 nt, Artificial Sequence
  Description of Artificial Sequence: Synthetic oligonucleotide
  Antisense strand to SEQ ID NO: 1754227
uucuucaagauucugcugg

SEQ ID NO: 1754229 - RNA, 19 nt, Artificial Sequence
  Description of Artificial Sequence: Synthetic oligonucleotide
  Sense strand starting at position 200 of SEQ ID NO: 1562534
gcugcaagcgauuagauaa

SEQ ID NO: 1754230 - RNA, 19 nt, Artificial Sequence
  Description of Artificial Sequence: Synthetic oligonucleotide
  Antisense strand to SEQ ID NO: 1754229
uuaucuaaucgcuugcagc

SEQ ID NO: 1754231 - RNA, 19 nt, Artificial Sequence
  Description of Artificial Sequence: Synthetic oligonucleotide
  Sense strand starting at position 252 of SEQ ID NO: 1562534
ccuguuugaagcugagaac

SEQ ID NO: 1754232 - RNA, 19 nt, Artificial Sequence
  Description of Artificial Sequence: Synthetic oligonucleotide
  Antisense strand to SEQ ID NO: 1754231
guucucagcuucaaacagg

SEQ ID NO: 1754233 - RNA, 19 nt, Artificial Sequence
  Description of Artificial Sequence: Synthetic oligonucleotide
  Sense strand starting at position 253 of SEQ ID NO: 1562534
cuguuugaagcugagaaca

SEQ ID NO: 1754234 - RNA, 19 nt, Artificial Sequence
  Description of Artificial Sequence: Synthetic oligonucleotide
  Antisense strand to SEQ ID NO: 1754233
uguucucagcuucaaacag

SEQ ID NO: 1754235 - RNA, 19 nt, Artificial Sequence
  Description of Artificial Sequence: Synthetic oligonucleotide
  Sense strand starting at position 423 of SEQ ID NO: 1562534
gugcuuugagguuaaucua

SEQ ID NO: 1754236 - RNA, 19 nt, Artificial Sequence
  Description of Artificial Sequence: Synthetic oligonucleotide
  Antisense strand to SEQ ID NO: 1754235
uagauuaaccucaaagcac

SEQ ID NO: 1754237 - RNA, 19 nt, Artificial Sequence
  Description of Artificial Sequence: Synthetic oligonucleotide
  Sense strand starting at position 426 of SEQ ID NO: 1562534
cuuugagguuaaucuauau

SEQ ID NO: 1754238 - RNA, 19 nt, Artificial Sequence
  Description of Artificial Sequence: Synthetic oligonucleotide
  Antisense strand to SEQ ID NO: 1754237
auauagauuaaccucaaag

SEQ ID NO: 1754239 - RNA, 19 nt, Artificial Sequence
  Description of Artificial Sequence: Synthetic oligonucleotide
  Sense strand starting at position 430 of SEQ ID NO: 1562534
gagguuaaucuauaugguc

SEQ ID NO: 1754240 - RNA, 19 nt, Artificial Sequence
  Description of Artificial Sequence: Synthetic oligonucleotide
  Antisense strand to SEQ ID NO: 1754239
gaccauauagauuaaccuc

SEQ ID NO: 1754241 - RNA, 19 nt, Artificial Sequence
  Description of Artificial Sequence: Synthetic oligonucleotide
  Sense strand starting at position 432 of SEQ ID NO: 1562534
gguuaaucuauauggucgu

SEQ ID NO: 1754242 - RNA, 19 nt, Artificial Sequence
  Description of Artificial Sequence: Synthetic oligonucleotide
  Antisense strand to SEQ ID NO: 1754241
acgaccauauagauuaacc

SEQ ID NO: 1754243 - RNA, 19 nt, Artificial Sequence
  Description of Artificial Sequence: Synthetic oligonucleotide
  Sense strand starting at position 435 of SEQ ID NO: 1562534
uaaucuauauggucguuua

SEQ ID NO: 1754244 - RNA, 19 nt, Artificial Sequence
  Description of Artificial Sequence: Synthetic oligonucleotide
  Antisense strand to SEQ ID NO: 1754243
uaaacgaccauauagauua

SEQ ID NO: 1754245 - RNA, 19 nt, Artificial Sequence
  Description of Artificial Sequence: Synthetic oligonucleotide
  Sense strand starting at position 436 of SEQ ID NO: 1562534
aaucuauauggucguuuaa

SEQ ID NO: 1754246 - RNA, 19 nt, Artificial Sequence
  Description of Artificial Sequence: Synthetic oligonucleotide
  Antisense strand to SEQ ID NO: 1754245
uuaaacgaccauauagauu

SEQ ID NO: 1754247 - RNA, 19 nt, Artificial Sequence
  Description of Artificial Sequence: Synthetic oligonucleotide
  Sense strand starting at position 438 of SEQ ID NO: 1562534
ucuauauggucguuuaagc

SEQ ID NO: 1754248 - RNA, 19 nt, Artificial Sequence
  Description of Artificial Sequence: Synthetic oligonucleotide
  Antisense strand to SEQ ID NO: 1754247
gcuuaaacgaccauauaga

SEQ ID NO: 1754249 - RNA, 19 nt, Artificial Sequence
  Description of Artificial Sequence: Synthetic oligonucleotide
  Sense strand starting at position 465 of SEQ ID NO: 1562534
ccuagagguuauuccuuau

SEQ ID NO: 1754250 - RNA, 19 nt, Artificial Sequence
  Description of Artificial Sequence: Synthetic oligonucleotide
  Antisense strand to SEQ ID NO: 1754249
auaaggaauaaccucuagg

SEQ ID NO: 1754251 - RNA, 19 nt, Artificial Sequence
  Description of Artificial Sequence: Synthetic oligonucleotide
  Sense strand starting at position 629 of SEQ ID NO: 1562534
caaaguaugcgccaaguca

SEQ ID NO: 1754252 - RNA, 19 nt, Artificial Sequence
  Description of Artificial Sequence: Synthetic oligonucleotide
  Antisense strand to SEQ ID NO: 1754251
ugacuuggcgcauacuuug

SEQ ID NO: 1754253 - RNA, 19 nt, Artificial Sequence
  Description of Artificial Sequence: Synthetic oligonucleotide
  Sense strand starting at position 1060 of SEQ ID NO: 1562534
gcaacaacuucuccagguu

SEQ ID NO: 1754254 - RNA, 19 nt, Artificial Sequence
  Description of Artificial Sequence: Synthetic oligonucleotide
  Antisense strand to SEQ ID NO: 1754253
aaccuggagaaguuguugc

SEQ ID NO: 1754255 - RNA, 19 nt, Artificial Sequence
  Description of Artificial Sequence: Synthetic oligonucleotide
  Sense strand starting at position 1140 of SEQ ID NO: 1562534
uggcgaggucuguaaacaa

SEQ ID NO: 1754256 - RNA, 19 nt, Artificial Sequence
  Description of Artificial Sequence: Synthetic oligonucleotide
  Antisense strand to SEQ ID NO: 1754255
uuguuuacagaccucgcca

SEQ ID NO: 1754257 - RNA, 19 nt, Artificial Sequence
  Description of Artificial Sequence: Synthetic oligonucleotide
  Sense strand starting at position 2501 of SEQ ID NO: 1562534
gcgauagguccgcgaagcu

SEQ ID NO: 1754258 - RNA, 19 nt, Artificial Sequence
  Description of Artificial Sequence: Synthetic oligonucleotide
  Antisense strand to SEQ ID NO: 1754257
agcuucgcggaccuaucgc

SEQ ID NO: 1754259 - RNA, 19 nt, Artificial Sequence
  Description of Artificial Sequence: Synthetic oligonucleotide
  Sense strand starting at position 2603 of SEQ ID NO: 1562534
gugggauuggucggaggua

SEQ ID NO: 1754260 - RNA, 19 nt, Artificial Sequence
  Description of Artificial Sequence: Synthetic oligonucleotide
  Antisense strand to SEQ ID NO: 1754259
uaccuccgaccaaucccac

SEQ ID NO: 1754261 - RNA, 19 nt, Artificial Sequence
  Description of Artificial Sequence: Synthetic oligonucleotide
  Sense strand starting at position 2604 of SEQ ID NO: 1562534
ugggauuggucggagguaa

SEQ ID NO: 1754262 - RNA, 19 nt, Artificial Sequence
  Description of Artificial Sequence: Synthetic oligonucleotide
  Antisense strand to SEQ ID NO: 1754261
uuaccuccgaccaauccca

SEQ ID NO: 1754263 - RNA, 19 nt, Artificial Sequence
  Description of Artificial Sequence: Synthetic oligonucleotide
  Sense strand starting at position 2606 of SEQ ID NO: 1562534
ggauuggucggagguaaag

SEQ ID NO: 1754264 - RNA, 19 nt, Artificial Sequence
  Description of Artificial Sequence: Synthetic oligonucleotide
  Antisense strand to SEQ ID NO: 1754263
cuuuaccuccgaccaaucc

SEQ ID NO: 1754265 - RNA, 19 nt, Artificial Sequence
  Description of Artificial Sequence: Synthetic oligonucleotide
  Sense strand starting at position 2688 of SEQ ID NO: 1562534
aaauguugugccugggaca

SEQ ID NO: 1754266 - RNA, 19 nt, Artificial Sequence
  Description of Artificial Sequence: Synthetic oligonucleotide
  Antisense strand to SEQ ID NO: 1754265
ugucccaggcacaacauuu

SEQ ID NO: 1754267 - RNA, 19 nt, Artificial Sequence
  Description of Artificial Sequence: Synthetic oligonucleotide
  Sense strand starting at position 2689 of SEQ ID NO: 1562534
aauguugugccugggacaa

SEQ ID NO: 1754268 - RNA, 19 nt, Artificial Sequence
  Description of Artificial Sequence: Synthetic oligonucleotide
  Antisense strand to SEQ ID NO: 1754267
uugucccaggcacaacauu

SEQ ID NO: 1754269 - RNA, 19 nt, Artificial Sequence
  Description of Artificial Sequence: Synthetic oligonucleotide
  Sense strand starting at position 2800 of SEQ ID NO: 1562534
gaugcuagaggauguuaga

SEQ ID NO: 1754270 - RNA, 19 nt, Artificial Sequence
  Description of Artificial Sequence: Synthetic oligonucleotide
  Antisense strand to SEQ ID NO: 1754269
ucuaacauccucuagcauc

SEQ ID NO: 1754271 - RNA, 19 nt, Artificial Sequence
  Description of Artificial Sequence: Synthetic oligonucleotide
  Sense strand starting at position 2895 of SEQ ID NO: 1562534
gcaagcgaacuuggaauaa

SEQ ID NO: 1754272 - RNA, 19 nt, Artificial Sequence
  Description of Artificial Sequence: Synthetic oligonucleotide
  Antisense strand to SEQ ID NO: 1754271
uuauuccaaguucgcuugc

SEQ ID NO: 1754273 - RNA, 19 nt, Artificial Sequence
  Description of Artificial Sequence: Synthetic oligonucleotide
  Sense strand starting at position 3072 of SEQ ID NO: 1562534
gguacagccucgagcgaaa

SEQ ID NO: 1754274 - RNA, 19 nt, Artificial Sequence
  Description of Artificial Sequence: Synthetic oligonucleotide
  Antisense strand to SEQ ID NO: 1754273
uuucgcucgaggcuguacc

SEQ ID NO: 1754275 - RNA, 19 nt, Artificial Sequence
  Description of Artificial Sequence: Synthetic oligonucleotide
  Sense strand starting at position 3084 of SEQ ID NO: 1562534
agcgaaaccuuucccuaca

SEQ ID NO: 1754276 - RNA, 19 nt, Artificial Sequence
  Description of Artificial Sequence: Synthetic oligonucleotide
  Antisense strand to SEQ ID NO: 1754275
uguagggaaagguuucgcu

SEQ ID NO: 1754277 - RNA, 19 nt, Artificial Sequence
  Description of Artificial Sequence: Synthetic oligonucleotide
  Sense strand starting at position 3125 of SEQ ID NO: 1562534
ccugaagagcucuagacuu

SEQ ID NO: 1754278 - RNA, 19 nt, Artificial Sequence
  Description of Artificial Sequence: Synthetic oligonucleotide
  Antisense strand to SEQ ID NO: 1754277
aagucuagagcucuucagg

SEQ ID NO: 1754279 - RNA, 19 nt, Artificial Sequence
  Description of Artificial Sequence: Synthetic oligonucleotide
  Sense strand starting at position 3165 of SEQ ID NO: 1562534
ggauguauguuccuuacac

SEQ ID NO: 1754280 - RNA, 19 nt, Artificial Sequence
  Description of Artificial Sequence: Synthetic oligonucleotide
  Antisense strand to SEQ ID NO: 1754279
guguaaggaacauacaucc

SEQ ID NO: 1754281 - RNA, 19 nt, Artificial Sequence
  Description of Artificial Sequence: Synthetic oligonucleotide
  Sense strand starting at position 3167 of SEQ ID NO: 1562534
auguauguuccuuacaccu

SEQ ID NO: 1754282 - RNA, 19 nt, Artificial Sequence
  Description of Artificial Sequence: Synthetic oligonucleotide
  Antisense strand to SEQ ID NO: 1754281
agguguaaggaacauacau

SEQ ID NO: 1754283 - RNA, 19 nt, Artificial Sequence
  Description of Artificial Sequence: Synthetic oligonucleotide
  Sense strand starting at position 3456 of SEQ ID NO: 1562534
cuccacuuugcagaaugau

SEQ ID NO: 1754284 - RNA, 19 nt, Artificial Sequence
  Description of Artificial Sequence: Synthetic oligonucleotide
  Antisense strand to SEQ ID NO: 1754283
aucauucugcaaaguggag

SEQ ID NO: 1754285 - RNA, 19 nt, Artificial Sequence
  Description of Artificial Sequence: Synthetic oligonucleotide
  Sense strand starting at position 3471 of SEQ ID NO: 1562534
ugauccuucuaagcagaaa

SEQ ID NO: 1754286 - RNA, 19 nt, Artificial Sequence
  Description of Artificial Sequence: Synthetic oligonucleotide
  Antisense strand to SEQ ID NO: 1754285
uuucugcuuagaaggauca

SEQ ID NO: 1754287 - RNA, 19 nt, Artificial Sequence
  Description of Artificial Sequence: Synthetic oligonucleotide
  Sense strand starting at position 3618 of SEQ ID NO: 1562534
ugcaguaggcauugcugaa

SEQ ID NO: 1754288 - RNA, 19 nt, Artificial Sequence
  Description of Artificial Sequence: Synthetic oligonucleotide
  Antisense strand to SEQ ID NO: 1754287
uucagcaaugccuacugca

SEQ ID NO: 1754289 - RNA, 19 nt, Artificial Sequence
  Description of Artificial Sequence: Synthetic oligonucleotide
  Sense strand starting at position 3669 of SEQ ID NO: 1562534
guacccugucaagguuaga

SEQ ID NO: 1754290 - RNA, 19 nt, Artificial Sequence
  Description of Artificial Sequence: Synthetic oligonucleotide
  Antisense strand to SEQ ID NO: 1754289
ucuaaccuugacaggguac

SEQ ID NO: 1754291 - RNA, 19 nt, Artificial Sequence
  Description of Artificial Sequence: Synthetic oligonucleotide
  Sense strand starting at position 3679 of SEQ ID NO: 1562534
aagguuagaugccacauuu

SEQ ID NO: 1754292 - RNA, 19 nt, Artificial Sequence
  Description of Artificial Sequence: Synthetic oligonucleotide
  Antisense strand to SEQ ID NO: 1754291
aaauguggcaucuaaccuu

SEQ ID NO: 1754293 - RNA, 19 nt, Artificial Sequence
  Description of Artificial Sequence: Synthetic oligonucleotide
  Sense strand starting at position 3753 of SEQ ID NO: 1562534
gcugaaguugccuguugca

SEQ ID NO: 1754294 - RNA, 19 nt, Artificial Sequence
  Description of Artificial Sequence: Synthetic oligonucleotide
  Antisense strand to SEQ ID NO: 1754293
ugcaacaggcaacuucagc

SEQ ID NO: 1754295 - RNA, 19 nt, Artificial Sequence
  Description of Artificial Sequence: Synthetic oligonucleotide
  Sense strand starting at position 3790 of SEQ ID NO: 1562534
gccggaaucuuaucuaucu

SEQ ID NO: 1754296 - RNA, 19 nt, Artificial Sequence
  Description of Artificial Sequence: Synthetic oligonucleotide
  Antisense strand to SEQ ID NO: 1754295
agauagauaagauuccggc

SEQ ID NO: 1754297 - RNA, 19 nt, Artificial Sequence
  Description of Artificial Sequence: Synthetic oligonucleotide
  Sense strand starting at position 3791 of SEQ ID NO: 1562534
ccggaaucuuaucuaucuu

SEQ ID NO: 1754298 - RNA, 19 nt, Artificial Sequence
  Description of Artificial Sequence: Synthetic oligonucleotide
  Antisense strand to SEQ ID NO: 1754297
aagauagauaagauuccgg

SEQ ID NO: 1754299 - RNA, 19 nt, Artificial Sequence
  Description of Artificial Sequence: Synthetic oligonucleotide
  Sense strand starting at position 3832 of SEQ ID NO: 1562534
cacaguguuuggcacauuu

SEQ ID NO: 1754300 - RNA, 19 nt, Artificial Sequence
  Description of Artificial Sequence: Synthetic oligonucleotide
  Antisense strand to SEQ ID NO: 1754299
aaaugugccaaacacugug

SEQ ID NO: 1754301 - RNA, 19 nt, Artificial Sequence
  Description of Artificial Sequence: Synthetic oligonucleotide
  Sense strand starting at position 3872 of SEQ ID NO: 1562534
auccaugaauuauagagga

SEQ ID NO: 1754302 - RNA, 19 nt, Artificial Sequence
  Description of Artificial Sequence: Synthetic oligonucleotide
  Antisense strand to SEQ ID NO: 1754301
uccucuauaauucauggau

SEQ ID NO: 1754303 - RNA, 19 nt, Artificial Sequence
  Description of Artificial Sequence: Synthetic oligonucleotide
  Sense strand starting at position 3935 of SEQ ID NO: 1562534
aaacaucaguuugagaaga

SEQ ID NO: 1754304 - RNA, 19 nt, Artificial Sequence
  Description of Artificial Sequence: Synthetic oligonucleotide
  Antisense strand to SEQ ID NO: 1754303
ucuucucaaacugauguuu

SEQ ID NO: 1754305 - RNA, 19 nt, Artificial Sequence
  Description of Artificial Sequence: Synthetic oligonucleotide
  Sense strand starting at position 3937 of SEQ ID NO: 1562534
acaucaguuugagaagaau

SEQ ID NO: 1754306 - RNA, 19 nt, Artificial Sequence
  Description of Artificial Sequence: Synthetic oligonucleotide
  Antisense strand to SEQ ID NO: 1754305
auucuucucaaacugaugu

SEQ ID NO: 1754307 - RNA, 19 nt, Artificial Sequence
  Description of Artificial Sequence: Synthetic oligonucleotide
  Sense strand starting at position 371 of SEQ ID NO: 1562535
ucccuuuaacccuagaggu

SEQ ID NO: 1754308 - RNA, 19 nt, Artificial Sequence
  Description of Artificial Sequence: Synthetic oligonucleotide
  Antisense strand to SEQ ID NO: 1754307
accucuaggguuaaaggga

SEQ ID NO: 1754309 - RNA, 19 nt, Artificial Sequence
  Description of Artificial Sequence: Synthetic oligonucleotide
  Sense strand starting at position 405 of SEQ ID NO: 1562535
cagagaucgggccacugua

SEQ ID NO: 1754310 - RNA, 19 nt, Artificial Sequence
  Description of Artificial Sequence: Synthetic oligonucleotide
  Antisense strand to SEQ ID NO: 1754309
uacaguggcccgaucucug

SEQ ID NO: 1754311 - RNA, 19 nt, Artificial Sequence
  Description of Artificial Sequence: Synthetic oligonucleotide
  Sense strand starting at position 421 of SEQ ID NO: 1562535
guacuuguagccuggucaa

SEQ ID NO: 1754312 - RNA, 19 nt, Artificial Sequence
  Description of Artificial Sequence: Synthetic oligonucleotide
  Antisense strand to SEQ ID NO: 1754311
uugaccaggcuacaaguac

SEQ ID NO: 1754313 - RNA, 19 nt, Artificial Sequence
  Description of Artificial Sequence: Synthetic oligonucleotide
  Sense strand starting at position 492 of SEQ ID NO: 1562535
cgauaaauucuuuaccuug

SEQ ID NO: 1754314 - RNA, 19 nt, Artificial Sequence
  Description of Artificial Sequence: Synthetic oligonucleotide
  Antisense strand to SEQ ID NO: 1754313
caagguaaagaauuuaucg

SEQ ID NO: 1754315 - RNA, 19 nt, Artificial Sequence
  Description of Artificial Sequence: Synthetic oligonucleotide
  Sense strand starting at position 614 of SEQ ID NO: 1562535
gugucuccggaagaagaaa

SEQ ID NO: 1754316 - RNA, 19 nt, Artificial Sequence
  Description of Artificial Sequence: Synthetic oligonucleotide
  Antisense strand to SEQ ID NO: 1754315
uuucuucuuccggagacac

SEQ ID NO: 1754317 - RNA, 19 nt, Artificial Sequence
  Description of Artificial Sequence: Synthetic oligonucleotide
  Sense strand starting at position 667 of SEQ ID NO: 1562535
uuuccagcgcgauaaauau

SEQ ID NO: 1754318 - RNA, 19 nt, Artificial Sequence
  Description of Artificial Sequence: Synthetic oligonucleotide
  Antisense strand to SEQ ID NO: 1754317
auauuuaucgcgcuggaaa

SEQ ID NO: 1754319 - RNA, 19 nt, Artificial Sequence
  Description of Artificial Sequence: Synthetic oligonucleotide
  Sense strand starting at position 757 of SEQ ID NO: 1562535
uaauguuugcucuacguuu

SEQ ID NO: 1754320 - RNA, 19 nt, Artificial Sequence
  Description of Artificial Sequence: Synthetic oligonucleotide
  Antisense strand to SEQ ID NO: 1754319
aaacguagagcaaacauua

SEQ ID NO: 1754321 - RNA, 19 nt, Artificial Sequence
  Description of Artificial Sequence: Synthetic oligonucleotide
  Sense strand starting at position 763 of SEQ ID NO: 1562535
uugcucuacguuugaaaug

SEQ ID NO: 1754322 - RNA, 19 nt, Artificial Sequence
  Description of Artificial Sequence: Synthetic oligonucleotide
  Antisense strand to SEQ ID NO: 1754321
cauuucaaacguagagcaa

SEQ ID NO: 1754323 - RNA, 19 nt, Artificial Sequence
  Description of Artificial Sequence: Synthetic oligonucleotide
  Sense strand starting at position 772 of SEQ ID NO: 1562535
guuugaaaugcaugcaggu

SEQ ID NO: 1754324 - RNA, 19 nt, Artificial Sequence
  Description of Artificial Sequence: Synthetic oligonucleotide
  Antisense strand to SEQ ID NO: 1754323
accugcaugcauuucaaac

SEQ ID NO: 1754325 - RNA, 19 nt, Artificial Sequence
  Description of Artificial Sequence: Synthetic oligonucleotide
  Sense strand starting at position 774 of SEQ ID NO: 1562535
uugaaaugcaugcagguuu

SEQ ID NO: 1754326 - RNA, 19 nt, Artificial Sequence
  Description of Artificial Sequence: Synthetic oligonucleotide
  Antisense strand to SEQ ID NO: 1754325
aaaccugcaugcauuucaa

SEQ ID NO: 1754327 - RNA, 19 nt, Artificial Sequence
  Description of Artificial Sequence: Synthetic oligonucleotide
  Sense strand starting at position 850 of SEQ ID NO: 1562535
ugaagugucaagggaucca

SEQ ID NO: 1754328 - RNA, 19 nt, Artificial Sequence
  Description of Artificial Sequence: Synthetic oligonucleotide
  Antisense strand to SEQ ID NO: 1754327
uggaucccuugacacuuca

SEQ ID NO: 1754329 - RNA, 19 nt, Artificial Sequence
  Description of Artificial Sequence: Synthetic oligonucleotide
  Sense strand starting at position 883 of SEQ ID NO: 1562535
ugaagagucugagaaggga

SEQ ID NO: 1754330 - RNA, 19 nt, Artificial Sequence
  Description of Artificial Sequence: Synthetic oligonucleotide
  Antisense strand to SEQ ID NO: 1754329
ucccuucucagacucuuca

SEQ ID NO: 1754331 - RNA, 19 nt, Artificial Sequence
  Description of Artificial Sequence: Synthetic oligonucleotide
  Sense strand starting at position 933 of SEQ ID NO: 1562535
cuuacagcgcgauguaaga

SEQ ID NO: 1754332 - RNA, 19 nt, Artificial Sequence
  Description of Artificial Sequence: Synthetic oligonucleotide
  Antisense strand to SEQ ID NO: 1754331
ucuuacaucgcgcuguaag

SEQ ID NO: 1754333 - RNA, 19 nt, Artificial Sequence
  Description of Artificial Sequence: Synthetic oligonucleotide
  Sense strand starting at position 1201 of SEQ ID NO: 1562535
ugacaaugcucugcugcua

SEQ ID NO: 1754334 - RNA, 19 nt, Artificial Sequence
  Description of Artificial Sequence: Synthetic oligonucleotide
  Antisense strand to SEQ ID NO: 1754333
uagcagcagagcauuguca

SEQ ID NO: 1754335 - RNA, 19 nt, Artificial Sequence
  Description of Artificial Sequence: Synthetic oligonucleotide
  Sense strand starting at position 1227 of SEQ ID NO: 1562535
aacggagcucaagguuuau

SEQ ID NO: 1754336 - RNA, 19 nt, Artificial Sequence
  Description of Artificial Sequence: Synthetic oligonucleotide
  Antisense strand to SEQ ID NO: 1754335
auaaaccuugagcuccguu

SEQ ID NO: 1754337 - RNA, 19 nt, Artificial Sequence
  Description of Artificial Sequence: Synthetic oligonucleotide
  Sense strand starting at position 1231 of SEQ ID NO: 1562535
gagcucaagguuuauaauu

SEQ ID NO: 1754338 - RNA, 19 nt, Artificial Sequence
  Description of Artificial Sequence: Synthetic oligonucleotide
  Antisense strand to SEQ ID NO: 1754337
aauuauaaaccuugagcuc

SEQ ID NO: 1754339 - RNA, 19 nt, Artificial Sequence
  Description of Artificial Sequence: Synthetic oligonucleotide
  Sense strand starting at position 1236 of SEQ ID NO: 1562535
caagguuuauaauucucga

SEQ ID NO: 1754340 - RNA, 19 nt, Artificial Sequence
  Description of Artificial Sequence: Synthetic oligonucleotide
  Antisense strand to SEQ ID NO: 1754339
ucgagaauuauaaaccuug

SEQ ID NO: 1754341 - RNA, 19 nt, Artificial Sequence
  Description of Artificial Sequence: Synthetic oligonucleotide
  Sense strand starting at position 1239 of SEQ ID NO: 1562535
gguuuauaauucucgaaag

SEQ ID NO: 1754342 - RNA, 19 nt, Artificial Sequence
  Description of Artificial Sequence: Synthetic oligonucleotide
  Antisense strand to SEQ ID NO: 1754341
cuuucgagaauuauaaacc

SEQ ID NO: 1754343 - RNA, 19 nt, Artificial Sequence
  Description of Artificial Sequence: Synthetic oligonucleotide
  Sense strand starting at position 2312 of SEQ ID NO: 1562535
agugcaguaccgugagauu

SEQ ID NO: 1754344 - RNA, 19 nt, Artificial Sequence
  Description of Artificial Sequence: Synthetic oligonucleotide
  Antisense strand to SEQ ID NO: 1754343
aaucucacgguacugcacu

SEQ ID NO: 1754345 - RNA, 19 nt, Artificial Sequence
  Description of Artificial Sequence: Synthetic oligonucleotide
  Sense strand starting at position 2389 of SEQ ID NO: 1562535
cagucuugucugucugcga

SEQ ID NO: 1754346 - RNA, 19 nt, Artificial Sequence
  Description of Artificial Sequence: Synthetic oligonucleotide
  Antisense strand to SEQ ID NO: 1754345
ucgcagacagacaagacug

SEQ ID NO: 1754347 - RNA, 19 nt, Artificial Sequence
  Description of Artificial Sequence: Synthetic oligonucleotide
  Sense strand starting at position 2436 of SEQ ID NO: 1562535
gaggguucucgggaacgga

SEQ ID NO: 1754348 - RNA, 19 nt, Artificial Sequence
  Description of Artificial Sequence: Synthetic oligonucleotide
  Antisense strand to SEQ ID NO: 1754347
uccguucccgagaacccuc

SEQ ID NO: 1754349 - RNA, 19 nt, Artificial Sequence
  Description of Artificial Sequence: Synthetic oligonucleotide
  Sense strand starting at position 2449 of SEQ ID NO: 1562535
aacggagggucuuuagaga

SEQ ID NO: 1754350 - RNA, 19 nt, Artificial Sequence
  Description of Artificial Sequence: Synthetic oligonucleotide
  Antisense strand to SEQ ID NO: 1754349
ucucuaaagacccuccguu

SEQ ID NO: 1754351 - RNA, 19 nt, Artificial Sequence
  Description of Artificial Sequence: Synthetic oligonucleotide
  Sense strand starting at position 2456 of SEQ ID NO: 1562535
ggucuuuagagaugccuuu

SEQ ID NO: 1754352 - RNA, 19 nt, Artificial Sequence
  Description of Artificial Sequence: Synthetic oligonucleotide
  Antisense strand to SEQ ID NO: 1754351
aaaggcaucucuaaagacc

SEQ ID NO: 1754353 - RNA, 19 nt, Artificial Sequence
  Description of Artificial Sequence: Synthetic oligonucleotide
  Sense strand starting at position 2546 of SEQ ID NO: 1562535
gcugguuacccgaggugau

SEQ ID NO: 1754354 - RNA, 19 nt, Artificial Sequence
  Description of Artificial Sequence: Synthetic oligonucleotide
  Antisense strand to SEQ ID NO: 1754353
aucaccucggguaaccagc

SEQ ID NO: 1754355 - RNA, 19 nt, Artificial Sequence
  Description of Artificial Sequence: Synthetic oligonucleotide
  Sense strand starting at position 2556 of SEQ ID NO: 1562535
cgaggugauccucacaaua

SEQ ID NO: 1754356 - RNA, 19 nt, Artificial Sequence
  Description of Artificial Sequence: Synthetic oligonucleotide
  Antisense strand to SEQ ID NO: 1754355
uauugugaggaucaccucg

SEQ ID NO: 1754357 - RNA, 19 nt, Artificial Sequence
  Description of Artificial Sequence: Synthetic oligonucleotide
  Sense strand starting at position 2558 of SEQ ID NO: 1562535
aggugauccucacaauaca

SEQ ID NO: 1754358 - RNA, 19 nt, Artificial Sequence
  Description of Artificial Sequence: Synthetic oligonucleotide
  Antisense strand to SEQ ID NO: 1754357
uguauugugaggaucaccu

SEQ ID NO: 1754359 - RNA, 19 nt, Artificial Sequence
  Description of Artificial Sequence: Synthetic oligonucleotide
  Sense strand starting at position 2649 of SEQ ID NO: 1562535
ucuuucuuauagucagaua

SEQ ID NO: 1754360 - RNA, 19 nt, Artificial Sequence
  Description of Artificial Sequence: Synthetic oligonucleotide
  Antisense strand to SEQ ID NO: 1754359
uaucugacuauaagaaaga

SEQ ID NO: 1754361 - RNA, 19 nt, Artificial Sequence
  Description of Artificial Sequence: Synthetic oligonucleotide
  Sense strand starting at position 3083 of SEQ ID NO: 1562535
caaguagaguuauuaucag

SEQ ID NO: 1754362 - RNA, 19 nt, Artificial Sequence
  Description of Artificial Sequence: Synthetic oligonucleotide
  Antisense strand to SEQ ID NO: 1754361
cugauaauaacucuacuug

SEQ ID NO: 1754363 - RNA, 19 nt, Artificial Sequence
  Description of Artificial Sequence: Synthetic oligonucleotide
  Sense strand starting at position 3089 of SEQ ID NO: 1562535
gaguuauuaucaguggaaa

SEQ ID NO: 1754364 - RNA, 19 nt, Artificial Sequence
  Description of Artificial Sequence: Synthetic oligonucleotide
  Antisense strand to SEQ ID NO: 1754363
uuuccacugauaauaacuc

SEQ ID NO: 1754365 - RNA, 19 nt, Artificial Sequence
  Description of Artificial Sequence: Synthetic oligonucleotide
  Sense strand starting at position 3090 of SEQ ID NO: 1562535
aguuauuaucaguggaaau

SEQ ID NO: 1754366 - RNA, 19 nt, Artificial Sequence
  Description of Artificial Sequence: Synthetic oligonucleotide
  Antisense strand to SEQ ID NO: 1754365
auuuccacugauaauaacu

SEQ ID NO: 1754367 - RNA, 19 nt, Artificial Sequence
  Description of Artificial Sequence: Synthetic oligonucleotide
  Sense strand starting at position 3176 of SEQ ID NO: 1562535
ugccauccuggauaauguu

SEQ ID NO: 1754368 - RNA, 19 nt, Artificial Sequence
  Description of Artificial Sequence: Synthetic oligonucleotide
  Antisense strand to SEQ ID NO: 1754367
aacauuauccaggauggca

SEQ ID NO: 1754369 - RNA, 19 nt, Artificial Sequence
  Description of Artificial Sequence: Synthetic oligonucleotide
  Sense strand starting at position 3182 of SEQ ID NO: 1562535
ccuggauaauguucuccua

SEQ ID NO: 1754370 - RNA, 19 nt, Artificial Sequence
  Description of Artificial Sequence: Synthetic oligonucleotide
  Antisense strand to SEQ ID NO: 1754369
uaggagaacauuauccagg

SEQ ID NO: 1754371 - RNA, 19 nt, Artificial Sequence
  Description of Artificial Sequence: Synthetic oligonucleotide
  Sense strand starting at position 3184 of SEQ ID NO: 1562535
uggauaauguucuccuaua

SEQ ID NO: 1754372 - RNA, 19 nt, Artificial Sequence
  Description of Artificial Sequence: Synthetic oligonucleotide
  Antisense strand to SEQ ID NO: 1754371
uauaggagaacauuaucca

SEQ ID NO: 1754373 - RNA, 19 nt, Artificial Sequence
  Description of Artificial Sequence: Synthetic oligonucleotide
  Sense strand starting at position 3185 of SEQ ID NO: 1562535
ggauaauguucuccuauag

SEQ ID NO: 1754374 - RNA, 19 nt, Artificial Sequence
  Description of Artificial Sequence: Synthetic oligonucleotide
  Antisense strand to SEQ ID NO: 1754373
cuauaggagaacauuaucc

SEQ ID NO: 1754375 - RNA, 19 nt, Artificial Sequence
  Description of Artificial Sequence: Synthetic oligonucleotide
  Sense strand starting at position 3215 of SEQ ID NO: 1562535
gggcuaggaucuagguguu

SEQ ID NO: 1754376 - RNA, 19 nt, Artificial Sequence
  Description of Artificial Sequence: Synthetic oligonucleotide
  Antisense strand to SEQ ID NO: 1754375
aacaccuagauccuagccc

SEQ ID NO: 1754377 - RNA, 19 nt, Artificial Sequence
  Description of Artificial Sequence: Synthetic oligonucleotide
  Sense strand starting at position 3261 of SEQ ID NO: 1562535
uuugaaauaugucacaaug

SEQ ID NO: 1754378 - RNA, 19 nt, Artificial Sequence
  Description of Artificial Sequence: Synthetic oligonucleotide
  Antisense strand to SEQ ID NO: 1754377
cauugugacauauuucaaa

SEQ ID NO: 1754379 - RNA, 19 nt, Artificial Sequence
  Description of Artificial Sequence: Synthetic oligonucleotide
  Sense strand starting at position 3535 of SEQ ID NO: 1562535
agggcagacugguuuauua

SEQ ID NO: 1754380 - RNA, 19 nt, Artificial Sequence
  Description of Artificial Sequence: Synthetic oligonucleotide
  Antisense strand to SEQ ID NO: 1754379
uaauaaaccagucugcccu

SEQ ID NO: 1754381 - RNA, 19 nt, Artificial Sequence
  Description of Artificial Sequence: Synthetic oligonucleotide
  Sense strand starting at position 3599 of SEQ ID NO: 1562535
agcucauccuucuuguuga

SEQ ID NO: 1754382 - RNA, 19 nt, Artificial Sequence
  Description of Artificial Sequence: Synthetic oligonucleotide
  Antisense strand to SEQ ID NO: 1754381
ucaacaagaaggaugagcu

SEQ ID NO: 1754383 - RNA, 19 nt, Artificial Sequence
  Description of Artificial Sequence: Synthetic oligonucleotide
  Sense strand starting at position 3681 of SEQ ID NO: 1562535
uggucuugauguuccagaa

SEQ ID NO: 1754384 - RNA, 19 nt, Artificial Sequence
  Description of Artificial Sequence: Synthetic oligonucleotide
  Antisense strand to SEQ ID NO: 1754383
uucuggaacaucaagacca

SEQ ID NO: 1754385 - RNA, 19 nt, Artificial Sequence
  Description of Artificial Sequence: Synthetic oligonucleotide
  Sense strand starting at position 3685 of SEQ ID NO: 1562535
cuugauguuccagaaggca

SEQ ID NO: 1754386 - RNA, 19 nt, Artificial Sequence
  Description of Artificial Sequence: Synthetic oligonucleotide
  Antisense strand to SEQ ID NO: 1754385
ugccuucuggaacaucaag

SEQ ID NO: 1754387 - RNA, 19 nt, Artificial Sequence
  Description of Artificial Sequence: Synthetic oligonucleotide
  Sense strand starting at position 120 of SEQ ID NO: 1562536
cucugauguauugguaaag

SEQ ID NO: 1754388 - RNA, 19 nt, Artificial Sequence
  Description of Artificial Sequence: Synthetic oligonucleotide
  Antisense strand to SEQ ID NO: 1754387
cuuuaccaauacaucagag

SEQ ID NO: 1754389 - RNA, 19 nt, Artificial Sequence
  Description of Artificial Sequence: Synthetic oligonucleotide
  Sense strand starting at position 174 of SEQ ID NO: 1562536
acuguuaaacaguauuauc

SEQ ID NO: 1754390 - RNA, 19 nt, Artificial Sequence
  Description of Artificial Sequence: Synthetic oligonucleotide
  Antisense strand to SEQ ID NO: 1754389
gauaauacuguuuaacagu

SEQ ID NO: 1754391 - RNA, 19 nt, Artificial Sequence
  Description of Artificial Sequence: Synthetic oligonucleotide
  Sense strand starting at position 1064 of SEQ ID NO: 1562536
gggauugucuaguuuggaa

SEQ ID NO: 1754392 - RNA, 19 nt, Artificial Sequence
  Description of Artificial Sequence: Synthetic oligonucleotide
  Antisense strand to SEQ ID NO: 1754391
uuccaaacuagacaauccc

SEQ ID NO: 1754393 - RNA, 19 nt, Artificial Sequence
  Description of Artificial Sequence: Synthetic oligonucleotide
  Sense strand starting at position 1163 of SEQ ID NO: 1562536
cgagcauaccaauaagcuu

SEQ ID NO: 1754394 - RNA, 19 nt, Artificial Sequence
  Description of Artificial Sequence: Synthetic oligonucleotide
  Antisense strand to SEQ ID NO: 1754393
aagcuuauugguaugcucg

SEQ ID NO: 1754395 - RNA, 19 nt, Artificial Sequence
  Description of Artificial Sequence: Synthetic oligonucleotide
  Sense strand starting at position 1574 of SEQ ID NO: 1562536
gcuuaaauucugcauuaag

SEQ ID NO: 1754396 - RNA, 19 nt, Artificial Sequence
  Description of Artificial Sequence: Synthetic oligonucleotide
  Antisense strand to SEQ ID NO: 1754395
cuuaaugcagaauuuaagc

SEQ ID NO: 1754397 - RNA, 19 nt, Artificial Sequence
  Description of Artificial Sequence: Synthetic oligonucleotide
  Sense strand starting at position 1721 of SEQ ID NO: 1562536
ugcauuuaguuggcaauga

SEQ ID NO: 1754398 - RNA, 19 nt, Artificial Sequence
  Description of Artificial Sequence: Synthetic oligonucleotide
  Antisense strand to SEQ ID NO: 1754397
ucauugccaacuaaaugca

SEQ ID NO: 1754399 - RNA, 19 nt, Artificial Sequence
  Description of Artificial Sequence: Synthetic oligonucleotide
  Sense strand starting at position 1725 of SEQ ID NO: 1562536
uuuaguuggcaaugaauaa

SEQ ID NO: 1754400 - RNA, 19 nt, Artificial Sequence
  Description of Artificial Sequence: Synthetic oligonucleotide
  Antisense strand to SEQ ID NO: 1754399
uuauucauugccaacuaaa

SEQ ID NO: 1754401 - RNA, 19 nt, Artificial Sequence
  Description of Artificial Sequence: Synthetic oligonucleotide
  Sense strand starting at position 1829 of SEQ ID NO: 1562536
uugggauuccuugauuguc

SEQ ID NO: 1754402 - RNA, 19 nt, Artificial Sequence
  Description of Artificial Sequence: Synthetic oligonucleotide
  Antisense strand to SEQ ID NO: 1754401
gacaaucaaggaaucccaa

SEQ ID NO: 1754403 - RNA, 19 nt, Artificial Sequence
  Description of Artificial Sequence: Synthetic oligonucleotide
  Sense strand starting at position 1831 of SEQ ID NO: 1562536
gggauuccuugauugucag

SEQ ID NO: 1754404 - RNA, 19 nt, Artificial Sequence
  Description of Artificial Sequence: Synthetic oligonucleotide
  Antisense strand to SEQ ID NO: 1754403
cugacaaucaaggaauccc

SEQ ID NO: 1754405 - RNA, 19 nt, Artificial Sequence
  Description of Artificial Sequence: Synthetic oligonucleotide
  Sense strand starting at position 1839 of SEQ ID NO: 1562536
uugauugucaggcaggaua

SEQ ID NO: 1754406 - RNA, 19 nt, Artificial Sequence
  Description of Artificial Sequence: Synthetic oligonucleotide
  Antisense strand to SEQ ID NO: 1754405
uauccugccugacaaucaa

SEQ ID NO: 1754407 - RNA, 19 nt, Artificial Sequence
  Description of Artificial Sequence: Synthetic oligonucleotide
  Sense strand starting at position 1977 of SEQ ID NO: 1562536
uuugaaggcuugcuaauuu

SEQ ID NO: 1754408 - RNA, 19 nt, Artificial Sequence
  Description of Artificial Sequence: Synthetic oligonucleotide
  Antisense strand to SEQ ID NO: 1754407
aaauuagcaagccuucaaa

SEQ ID NO: 1754409 - RNA, 19 nt, Artificial Sequence
  Description of Artificial Sequence: Synthetic oligonucleotide
  Sense strand starting at position 2054 of SEQ ID NO: 1562536
uuuaaagauguguaaagca

SEQ ID NO: 1754410 - RNA, 19 nt, Artificial Sequence
  Description of Artificial Sequence: Synthetic oligonucleotide
  Antisense strand to SEQ ID NO: 1754409
ugcuuuacacaucuuuaaa

SEQ ID NO: 1754411 - RNA, 19 nt, Artificial Sequence
  Description of Artificial Sequence: Synthetic oligonucleotide
  Sense strand starting at position 2141 of SEQ ID NO: 1562536
gucucuauacauuaaguau

SEQ ID NO: 1754412 - RNA, 19 nt, Artificial Sequence
  Description of Artificial Sequence: Synthetic oligonucleotide
  Antisense strand to SEQ ID NO: 1754411
auacuuaauguauagagac

SEQ ID NO: 1754413 - RNA, 19 nt, Artificial Sequence
  Description of Artificial Sequence: Synthetic oligonucleotide
  Sense strand starting at position 2166 of SEQ ID NO: 1562536
aaggguaguuaaucuuuaa

SEQ ID NO: 1754414 - RNA, 19 nt, Artificial Sequence
  Description of Artificial Sequence: Synthetic oligonucleotide
  Antisense strand to SEQ ID NO: 1754413
uuaaagauuaacuacccuu

SEQ ID NO: 1754415 - RNA, 19 nt, Artificial Sequence
  Description of Artificial Sequence: Synthetic oligonucleotide
  Sense strand starting at position 2169 of SEQ ID NO: 1562536
gguaguuaaucuuuaagaa

SEQ ID NO: 1754416 - RNA, 19 nt, Artificial Sequence
  Description of Artificial Sequence: Synthetic oligonucleotide
  Antisense strand to SEQ ID NO: 1754415
uucuuaaagauuaacuacc

SEQ ID NO: 1754417 - RNA, 19 nt, Artificial Sequence
  Description of Artificial Sequence: Synthetic oligonucleotide
  Sense strand starting at position 2197 of SEQ ID NO: 1562536
gaguaaagaugccuagagu

SEQ ID NO: 1754418 - RNA, 19 nt, Artificial Sequence
  Description of Artificial Sequence: Synthetic oligonucleotide
  Antisense strand to SEQ ID NO: 1754417
acucuaggcaucuuuacuc

SEQ ID NO: 1754419 - RNA, 19 nt, Artificial Sequence
  Description of Artificial Sequence: Synthetic oligonucleotide
  Sense strand starting at position 2198 of SEQ ID NO: 1562536
aguaaagaugccuagaguu

SEQ ID NO: 1754420 - RNA, 19 nt, Artificial Sequence
  Description of Artificial Sequence: Synthetic oligonucleotide
  Antisense strand to SEQ ID NO: 1754419
aacucuaggcaucuuuacu

SEQ ID NO: 1754421 - RNA, 19 nt, Artificial Sequence
  Description of Artificial Sequence: Synthetic oligonucleotide
  Sense strand starting at position 2200 of SEQ ID NO: 1562536
uaaagaugccuagaguugu

SEQ ID NO: 1754422 - RNA, 19 nt, Artificial Sequence
  Description of Artificial Sequence: Synthetic oligonucleotide
  Antisense strand to SEQ ID NO: 1754421
acaacucuaggcaucuuua

SEQ ID NO: 1754423 - RNA, 19 nt, Artificial Sequence
  Description of Artificial Sequence: Synthetic oligonucleotide
  Sense strand starting at position 2240 of SEQ ID NO: 1562536
gccauuugccaaggugaau

SEQ ID NO: 1754424 - RNA, 19 nt, Artificial Sequence
  Description of Artificial Sequence: Synthetic oligonucleotide
  Antisense strand to SEQ ID NO: 1754423
auucaccuuggcaaauggc

SEQ ID NO: 1754425 - RNA, 19 nt, Artificial Sequence
  Description of Artificial Sequence: Synthetic oligonucleotide
  Sense strand starting at position 2337 of SEQ ID NO: 1562536
acaaauuagucacuaggca

SEQ ID NO: 1754426 - RNA, 19 nt, Artificial Sequence
  Description of Artificial Sequence: Synthetic oligonucleotide
  Antisense strand to SEQ ID NO: 1754425
ugccuagugacuaauuugu

SEQ ID NO: 1754427 - RNA, 19 nt, Artificial Sequence
  Description of Artificial Sequence: Synthetic oligonucleotide
  Sense strand starting at position 2435 of SEQ ID NO: 1562536
cucuuauauguugauauag

SEQ ID NO: 1754428 - RNA, 19 nt, Artificial Sequence
  Description of Artificial Sequence: Synthetic oligonucleotide
  Antisense strand to SEQ ID NO: 1754427
cuauaucaacauauaagag

SEQ ID NO: 1754429 - RNA, 19 nt, Artificial Sequence
  Description of Artificial Sequence: Synthetic oligonucleotide
  Sense strand starting at position 2475 of SEQ ID NO: 1562536
ggugcagauguauauaaag

SEQ ID NO: 1754430 - RNA, 19 nt, Artificial Sequence
  Description of Artificial Sequence: Synthetic oligonucleotide
  Antisense strand to SEQ ID NO: 1754429
cuuuauauacaucugcacc

SEQ ID NO: 1754431 - RNA, 19 nt, Artificial Sequence
  Description of Artificial Sequence: Synthetic oligonucleotide
  Sense strand starting at position 2575 of SEQ ID NO: 1562536
uguuaugucacccagguga

SEQ ID NO: 1754432 - RNA, 19 nt, Artificial Sequence
  Description of Artificial Sequence: Synthetic oligonucleotide
  Antisense strand to SEQ ID NO: 1754431
ucaccugggugacauaaca

SEQ ID NO: 1754433 - RNA, 19 nt, Artificial Sequence
  Description of Artificial Sequence: Synthetic oligonucleotide
  Sense strand starting at position 2577 of SEQ ID NO: 1562536
uuaugucacccaggugaag

SEQ ID NO: 1754434 - RNA, 19 nt, Artificial Sequence
  Description of Artificial Sequence: Synthetic oligonucleotide
  Antisense strand to SEQ ID NO: 1754433
cuucaccugggugacauaa

SEQ ID NO: 1754435 - RNA, 19 nt, Artificial Sequence
  Description of Artificial Sequence: Synthetic oligonucleotide
  Sense strand starting at position 2592 of SEQ ID NO: 1562536
gaaguuaugcaauguaagg

SEQ ID NO: 1754436 - RNA, 19 nt, Artificial Sequence
  Description of Artificial Sequence: Synthetic oligonucleotide
  Antisense strand to SEQ ID NO: 1754435
ccuuacauugcauaacuuc

SEQ ID NO: 1754437 - RNA, 19 nt, Artificial Sequence
  Description of Artificial Sequence: Synthetic oligonucleotide
  Sense strand starting at position 2602 of SEQ ID NO: 1562536
aauguaaggcaguauuaca

SEQ ID NO: 1754438 - RNA, 19 nt, Artificial Sequence
  Description of Artificial Sequence: Synthetic oligonucleotide
  Antisense strand to SEQ ID NO: 1754437
uguaauacugccuuacauu

SEQ ID NO: 1754439 - RNA, 19 nt, Artificial Sequence
  Description of Artificial Sequence: Synthetic oligonucleotide
  Sense strand starting at position 2613 of SEQ ID NO: 1562536
guauuacauaagggaaagu

SEQ ID NO: 1754440 - RNA, 19 nt, Artificial Sequence
  Description of Artificial Sequence: Synthetic oligonucleotide
  Antisense strand to SEQ ID NO: 1754439
acuuucccuuauguaauac

SEQ ID NO: 1754441 - RNA, 19 nt, Artificial Sequence
  Description of Artificial Sequence: Synthetic oligonucleotide
  Sense strand starting at position 2675 of SEQ ID NO: 1562536
gcaguuauuaaugaauggu

SEQ ID NO: 1754442 - RNA, 19 nt, Artificial Sequence
  Description of Artificial Sequence: Synthetic oligonucleotide
  Antisense strand to SEQ ID NO: 1754441
accauucauuaauaacugc

SEQ ID NO: 1754443 - RNA, 19 nt, Artificial Sequence
  Description of Artificial Sequence: Synthetic oligonucleotide
  Sense strand starting at position 2754 of SEQ ID NO: 1562536
ggaagacauugcucacuug

SEQ ID NO: 1754444 - RNA, 19 nt, Artificial Sequence
  Description of Artificial Sequence: Synthetic oligonucleotide
  Antisense strand to SEQ ID NO: 1754443
caagugagcaaugucuucc

SEQ ID NO: 1754445 - RNA, 19 nt, Artificial Sequence
  Description of Artificial Sequence: Synthetic oligonucleotide
  Sense strand starting at position 2818 of SEQ ID NO: 1562536
agguuaagauaaucauagu

SEQ ID NO: 1754446 - RNA, 19 nt, Artificial Sequence
  Description of Artificial Sequence: Synthetic oligonucleotide
  Antisense strand to SEQ ID NO: 1754445
acuaugauuaucuuaaccu

SEQ ID NO: 1754447 - RNA, 19 nt, Artificial Sequence
  Description of Artificial Sequence: Synthetic oligonucleotide
  Sense strand starting at position 2991 of SEQ ID NO: 1562536
gaaguaaaccaaugugacu

SEQ ID NO: 1754448 - RNA, 19 nt, Artificial Sequence
  Description of Artificial Sequence: Synthetic oligonucleotide
  Antisense strand to SEQ ID NO: 1754447
agucacauugguuuacuuc

SEQ ID NO: 1754449 - RNA, 19 nt, Artificial Sequence
  Description of Artificial Sequence: Synthetic oligonucleotide
  Sense strand starting at position 3682 of SEQ ID NO: 1562536
guaucaagcaaaugaguga

SEQ ID NO: 1754450 - RNA, 19 nt, Artificial Sequence
  Description of Artificial Sequence: Synthetic oligonucleotide
  Antisense strand to SEQ ID NO: 1754449
ucacucauuugcuugauac

SEQ ID NO: 1754451 - RNA, 19 nt, Artificial Sequence
  Description of Artificial Sequence: Synthetic oligonucleotide
  Sense strand starting at position 3864 of SEQ ID NO: 1562536
gugauauaaagagaguguu

SEQ ID NO: 1754452 - RNA, 19 nt, Artificial Sequence
  Description of Artificial Sequence: Synthetic oligonucleotide
  Antisense strand to SEQ ID NO: 1754451
aacacucucuuuauaucac

SEQ ID NO: 1754453 - RNA, 19 nt, Artificial Sequence
  Description of Artificial Sequence: Synthetic oligonucleotide
  Sense strand starting at position 3867 of SEQ ID NO: 1562536
auauaaagagaguguugua

SEQ ID NO: 1754454 - RNA, 19 nt, Artificial Sequence
  Description of Artificial Sequence: Synthetic oligonucleotide
  Antisense strand to SEQ ID NO: 1754453
uacaacacucucuuuauau

SEQ ID NO: 1754455 - RNA, 19 nt, Artificial Sequence
  Description of Artificial Sequence: Synthetic oligonucleotide
  Sense strand starting at position 3904 of SEQ ID NO: 1562536
acugucucagcggaauuaa

SEQ ID NO: 1754456 - RNA, 19 nt, Artificial Sequence
  Description of Artificial Sequence: Synthetic oligonucleotide
  Antisense strand to SEQ ID NO: 1754455
uuaauuccgcugagacagu

SEQ ID NO: 1754457 - RNA, 19 nt, Artificial Sequence
  Description of Artificial Sequence: Synthetic oligonucleotide
  Sense strand starting at position 3915 of SEQ ID NO: 1562536
ggaauuaagugcccauaag

SEQ ID NO: 1754458 - RNA, 19 nt, Artificial Sequence
  Description of Artificial Sequence: Synthetic oligonucleotide
  Antisense strand to SEQ ID NO: 1754457
cuuaugggcacuuaauucc

SEQ ID NO: 1754459 - RNA, 19 nt, Artificial Sequence
  Description of Artificial Sequence: Synthetic oligonucleotide
  Sense strand starting at position 3916 of SEQ ID NO: 1562536
gaauuaagugcccauaagu

SEQ ID NO: 1754460 - RNA, 19 nt, Artificial Sequence
  Description of Artificial Sequence: Synthetic oligonucleotide
  Antisense strand to SEQ ID NO: 1754459
acuuaugggcacuuaauuc

SEQ ID NO: 1754461 - RNA, 19 nt, Artificial Sequence
  Description of Artificial Sequence: Synthetic oligonucleotide
  Sense strand starting at position 3924 of SEQ ID NO: 1562536
ugcccauaagugugauuug

SEQ ID NO: 1754462 - RNA, 19 nt, Artificial Sequence
  Description of Artificial Sequence: Synthetic oligonucleotide
  Antisense strand to SEQ ID NO: 1754461
caaaucacacuuaugggca

SEQ ID NO: 1754463 - RNA, 19 nt, Artificial Sequence
  Description of Artificial Sequence: Synthetic oligonucleotide
  Sense strand starting at position 3927 of SEQ ID NO: 1562536
ccauaagugugauuugcau

SEQ ID NO: 1754464 - RNA, 19 nt, Artificial Sequence
  Description of Artificial Sequence: Synthetic oligonucleotide
  Antisense strand to SEQ ID NO: 1754463
augcaaaucacacuuaugg

SEQ ID NO: 1754465 - RNA, 19 nt, Artificial Sequence
  Description of Artificial Sequence: Synthetic oligonucleotide
  Sense strand starting at position 3967 of SEQ ID NO: 1562536
aacguagggcauuaauaau

SEQ ID NO: 1754466 - RNA, 19 nt, Artificial Sequence
  Description of Artificial Sequence: Synthetic oligonucleotide
  Antisense strand to SEQ ID NO: 1754465
auuauuaaugcccuacguu

SEQ ID NO: 1754467 - RNA, 19 nt, Artificial Sequence
  Description of Artificial Sequence: Synthetic oligonucleotide
  Sense strand starting at position 35 of SEQ ID NO: 1562537
caauuaaggugacuugagu

SEQ ID NO: 1754468 - RNA, 19 nt, Artificial Sequence
  Description of Artificial Sequence: Synthetic oligonucleotide
  Antisense strand to SEQ ID NO: 1754467
acucaagucaccuuaauug

SEQ ID NO: 1754469 - RNA, 19 nt, Artificial Sequence
  Description of Artificial Sequence: Synthetic oligonucleotide
  Sense strand starting at position 134 of SEQ ID NO: 1562537
acaagcuuguuguuagaag

SEQ ID NO: 1754470 - RNA, 19 nt, Artificial Sequence
  Description of Artificial Sequence: Synthetic oligonucleotide
  Antisense strand to SEQ ID NO: 1754469
cuucuaacaacaagcuugu

SEQ ID NO: 1754471 - RNA, 19 nt, Artificial Sequence
  Description of Artificial Sequence: Synthetic oligonucleotide
  Sense strand starting at position 143 of SEQ ID NO: 1562537
uuguuagaagguuguccuu

SEQ ID NO: 1754472 - RNA, 19 nt, Artificial Sequence
  Description of Artificial Sequence: Synthetic oligonucleotide
  Antisense strand to SEQ ID NO: 1754471
aaggacaaccuucuaacaa

SEQ ID NO: 1754473 - RNA, 19 nt, Artificial Sequence
  Description of Artificial Sequence: Synthetic oligonucleotide
  Sense strand starting at position 230 of SEQ ID NO: 1562537
agcucaccagcugauaauu

SEQ ID NO: 1754474 - RNA, 19 nt, Artificial Sequence
  Description of Artificial Sequence: Synthetic oligonucleotide
  Antisense strand to SEQ ID NO: 1754473
aauuaucagcuggugagcu

SEQ ID NO: 1754475 - RNA, 19 nt, Artificial Sequence
  Description of Artificial Sequence: Synthetic oligonucleotide
  Sense strand starting at position 350 of SEQ ID NO: 1562537
ggguguugcuagguuucau

SEQ ID NO: 1754476 - RNA, 19 nt, Artificial Sequence
  Description of Artificial Sequence: Synthetic oligonucleotide
  Antisense strand to SEQ ID NO: 1754475
augaaaccuagcaacaccc

SEQ ID NO: 1754477 - RNA, 19 nt, Artificial Sequence
  Description of Artificial Sequence: Synthetic oligonucleotide
  Sense strand starting at position 384 of SEQ ID NO: 1562537
ccaguaguucuguagcgga

SEQ ID NO: 1754478 - RNA, 19 nt, Artificial Sequence
  Description of Artificial Sequence: Synthetic oligonucleotide
  Antisense strand to SEQ ID NO: 1754477
uccgcuacagaacuacugg

SEQ ID NO: 1754479 - RNA, 19 nt, Artificial Sequence
  Description of Artificial Sequence: Synthetic oligonucleotide
  Sense strand starting at position 567 of SEQ ID NO: 1562537
ggcccuuugcgcugguaaa

SEQ ID NO: 1754480 - RNA, 19 nt, Artificial Sequence
  Description of Artificial Sequence: Synthetic oligonucleotide
  Antisense strand to SEQ ID NO: 1754479
uuuaccagcgcaaagggcc

SEQ ID NO: 1754481 - RNA, 19 nt, Artificial Sequence
  Description of Artificial Sequence: Synthetic oligonucleotide
  Sense strand starting at position 568 of SEQ ID NO: 1562537
gcccuuugcgcugguaaac

SEQ ID NO: 1754482 - RNA, 19 nt, Artificial Sequence
  Description of Artificial Sequence: Synthetic oligonucleotide
  Antisense strand to SEQ ID NO: 1754481
guuuaccagcgcaaagggc

SEQ ID NO: 1754483 - RNA, 19 nt, Artificial Sequence
  Description of Artificial Sequence: Synthetic oligonucleotide
  Sense strand starting at position 569 of SEQ ID NO: 1562537
cccuuugcgcugguaaacu

SEQ ID NO: 1754484 - RNA, 19 nt, Artificial Sequence
  Description of Artificial Sequence: Synthetic oligonucleotide
  Antisense strand to SEQ ID NO: 1754483
aguuuaccagcgcaaaggg

SEQ ID NO: 1754485 - RNA, 19 nt, Artificial Sequence
  Description of Artificial Sequence: Synthetic oligonucleotide
  Sense strand starting at position 652 of SEQ ID NO: 1562537
ggaguaccuucccagaucu

SEQ ID NO: 1754486 - RNA, 19 nt, Artificial Sequence
  Description of Artificial Sequence: Synthetic oligonucleotide
  Antisense strand to SEQ ID NO: 1754485
agaucugggaagguacucc

SEQ ID NO: 1754487 - RNA, 19 nt, Artificial Sequence
  Description of Artificial Sequence: Synthetic oligonucleotide
  Sense strand starting at position 729 of SEQ ID NO: 1562537
ggcugcguagccuuuguaa

SEQ ID NO: 1754488 - RNA, 19 nt, Artificial Sequence
  Description of Artificial Sequence: Synthetic oligonucleotide
  Antisense strand to SEQ ID NO: 1754487
uuacaaaggcuacgcagcc

SEQ ID NO: 1754489 - RNA, 19 nt, Artificial Sequence
  Description of Artificial Sequence: Synthetic oligonucleotide
  Sense strand starting at position 731 of SEQ ID NO: 1562537
cugcguagccuuuguaauu

SEQ ID NO: 1754490 - RNA, 19 nt, Artificial Sequence
  Description of Artificial Sequence: Synthetic oligonucleotide
  Antisense strand to SEQ ID NO: 1754489
aauuacaaaggcuacgcag

SEQ ID NO: 1754491 - RNA, 19 nt, Artificial Sequence
  Description of Artificial Sequence: Synthetic oligonucleotide
  Sense strand starting at position 732 of SEQ ID NO: 1562537
ugcguagccuuuguaauuu

SEQ ID NO: 1754492 - RNA, 19 nt, Artificial Sequence
  Description of Artificial Sequence: Synthetic oligonucleotide
  Antisense strand to SEQ ID NO: 1754491
aaauuacaaaggcuacgca

SEQ ID NO: 1754493 - RNA, 19 nt, Artificial Sequence
  Description of Artificial Sequence: Synthetic oligonucleotide
  Sense strand starting at position 959 of SEQ ID NO: 1562537
caggauuccucgugauuag

SEQ ID NO: 1754494 - RNA, 19 nt, Artificial Sequence
  Description of Artificial Sequence: Synthetic oligonucleotide
  Antisense strand to SEQ ID NO: 1754493
cuaaucacgaggaauccug

SEQ ID NO: 1754495 - RNA, 19 nt, Artificial Sequence
  Description of Artificial Sequence: Synthetic oligonucleotide
  Sense strand starting at position 989 of SEQ ID NO: 1562537
gggcguucugaacaggauu

SEQ ID NO: 1754496 - RNA, 19 nt, Artificial Sequence
  Description of Artificial Sequence: Synthetic oligonucleotide
  Antisense strand to SEQ ID NO: 1754495
aauccuguucagaacgccc

SEQ ID NO: 1754497 - RNA, 19 nt, Artificial Sequence
  Description of Artificial Sequence: Synthetic oligonucleotide
  Sense strand starting at position 1082 of SEQ ID NO: 1562537
cgcacaaacuuucuggaca

SEQ ID NO: 1754498 - RNA, 19 nt, Artificial Sequence
  Description of Artificial Sequence: Synthetic oligonucleotide
  Antisense strand to SEQ ID NO: 1754497
uguccagaaaguuugugcg

SEQ ID NO: 1754499 - RNA, 19 nt, Artificial Sequence
  Description of Artificial Sequence: Synthetic oligonucleotide
  Sense strand starting at position 1083 of SEQ ID NO: 1562537
gcacaaacuuucuggacau

SEQ ID NO: 1754500 - RNA, 19 nt, Artificial Sequence
  Description of Artificial Sequence: Synthetic oligonucleotide
  Antisense strand to SEQ ID NO: 1754499
auguccagaaaguuugugc

SEQ ID NO: 1754501 - RNA, 19 nt, Artificial Sequence
  Description of Artificial Sequence: Synthetic oligonucleotide
  Sense strand starting at position 1475 of SEQ ID NO: 1562537
ccggcaucucagcgaguuu

SEQ ID NO: 1754502 - RNA, 19 nt, Artificial Sequence
  Description of Artificial Sequence: Synthetic oligonucleotide
  Antisense strand to SEQ ID NO: 1754501
aaacucgcugagaugccgg

SEQ ID NO: 1754503 - RNA, 19 nt, Artificial Sequence
  Description of Artificial Sequence: Synthetic oligonucleotide
  Sense strand starting at position 1528 of SEQ ID NO: 1562537
gcagaaggaguucagguaa

SEQ ID NO: 1754504 - RNA, 19 nt, Artificial Sequence
  Description of Artificial Sequence: Synthetic oligonucleotide
  Antisense strand to SEQ ID NO: 1754503
uuaccugaacuccuucugc

SEQ ID NO: 1754505 - RNA, 19 nt, Artificial Sequence
  Description of Artificial Sequence: Synthetic oligonucleotide
  Sense strand starting at position 2211 of SEQ ID NO: 1562537
ggaggcguuucccaaggga

SEQ ID NO: 1754506 - RNA, 19 nt, Artificial Sequence
  Description of Artificial Sequence: Synthetic oligonucleotide
  Antisense strand to SEQ ID NO: 1754505
ucccuugggaaacgccucc

SEQ ID NO: 1754507 - RNA, 19 nt, Artificial Sequence
  Description of Artificial Sequence: Synthetic oligonucleotide
  Sense strand starting at position 2214 of SEQ ID NO: 1562537
ggcguuucccaagggaagu

SEQ ID NO: 1754508 - RNA, 19 nt, Artificial Sequence
  Description of Artificial Sequence: Synthetic oligonucleotide
  Antisense strand to SEQ ID NO: 1754507
acuucccuugggaaacgcc

SEQ ID NO: 1754509 - RNA, 19 nt, Artificial Sequence
  Description of Artificial Sequence: Synthetic oligonucleotide
  Sense strand starting at position 2366 of SEQ ID NO: 1562537
ucgaguuuggguuaaggaa

SEQ ID NO: 1754510 - RNA, 19 nt, Artificial Sequence
  Description of Artificial Sequence: Synthetic oligonucleotide
  Antisense strand to SEQ ID NO: 1754509
uuccuuaacccaaacucga

SEQ ID NO: 1754511 - RNA, 19 nt, Artificial Sequence
  Description of Artificial Sequence: Synthetic oligonucleotide
  Sense strand starting at position 2741 of SEQ ID NO: 1562537
uugagagguucuuucuaau

SEQ ID NO: 1754512 - RNA, 19 nt, Artificial Sequence
  Description of Artificial Sequence: Synthetic oligonucleotide
  Antisense strand to SEQ ID NO: 1754511
auuagaaagaaccucucaa

SEQ ID NO: 1754513 - RNA, 19 nt, Artificial Sequence
  Description of Artificial Sequence: Synthetic oligonucleotide
  Sense strand starting at position 2744 of SEQ ID NO: 1562537
agagguucuuucuaauguu

SEQ ID NO: 1754514 - RNA, 19 nt, Artificial Sequence
  Description of Artificial Sequence: Synthetic oligonucleotide
  Antisense strand to SEQ ID NO: 1754513
aacauuagaaagaaccucu

SEQ ID NO: 1754515 - RNA, 19 nt, Artificial Sequence
  Description of Artificial Sequence: Synthetic oligonucleotide
  Sense strand starting at position 2870 of SEQ ID NO: 1562537
uccucuuuggcacauugau

SEQ ID NO: 1754516 - RNA, 19 nt, Artificial Sequence
  Description of Artificial Sequence: Synthetic oligonucleotide
  Antisense strand to SEQ ID NO: 1754515
aucaaugugccaaagagga

SEQ ID NO: 1754517 - RNA, 19 nt, Artificial Sequence
  Description of Artificial Sequence: Synthetic oligonucleotide
  Sense strand starting at position 2899 of SEQ ID NO: 1562537
ugguuauguugaggaacug

SEQ ID NO: 1754518 - RNA, 19 nt, Artificial Sequence
  Description of Artificial Sequence: Synthetic oligonucleotide
  Antisense strand to SEQ ID NO: 1754517
caguuccucaacauaacca

SEQ ID NO: 1754519 - RNA, 19 nt, Artificial Sequence
  Description of Artificial Sequence: Synthetic oligonucleotide
  Sense strand starting at position 2974 of SEQ ID NO: 1562537
aaaggaaauguuuguuagu

SEQ ID NO: 1754520 - RNA, 19 nt, Artificial Sequence
  Description of Artificial Sequence: Synthetic oligonucleotide
  Antisense strand to SEQ ID NO: 1754519
acuaacaaacauuuccuuu

SEQ ID NO: 1754521 - RNA, 19 nt, Artificial Sequence
  Description of Artificial Sequence: Synthetic oligonucleotide
  Sense strand starting at position 2975 of SEQ ID NO: 1562537
aaggaaauguuuguuaguc

SEQ ID NO: 1754522 - RNA, 19 nt, Artificial Sequence
  Description of Artificial Sequence: Synthetic oligonucleotide
  Antisense strand to SEQ ID NO: 1754521
gacuaacaaacauuuccuu

SEQ ID NO: 1754523 - RNA, 19 nt, Artificial Sequence
  Description of Artificial Sequence: Synthetic oligonucleotide
  Sense strand starting at position 2981 of SEQ ID NO: 1562537
auguuuguuagucagcaga

SEQ ID NO: 1754524 - RNA, 19 nt, Artificial Sequence
  Description of Artificial Sequence: Synthetic oligonucleotide
  Antisense strand to SEQ ID NO: 1754523
ucugcugacuaacaaacau

SEQ ID NO: 1754525 - RNA, 19 nt, Artificial Sequence
  Description of Artificial Sequence: Synthetic oligonucleotide
  Sense strand starting at position 2983 of SEQ ID NO: 1562537
guuuguuagucagcagauc

SEQ ID NO: 1754526 - RNA, 19 nt, Artificial Sequence
  Description of Artificial Sequence: Synthetic oligonucleotide
  Antisense strand to SEQ ID NO: 1754525
gaucugcugacuaacaaac

SEQ ID NO: 1754527 - RNA, 19 nt, Artificial Sequence
  Description of Artificial Sequence: Synthetic oligonucleotide
  Sense strand starting at position 2984 of SEQ ID NO: 1562537
uuuguuagucagcagaucu

SEQ ID NO: 1754528 - RNA, 19 nt, Artificial Sequence
  Description of Artificial Sequence: Synthetic oligonucleotide
  Antisense strand to SEQ ID NO: 1754527
agaucugcugacuaacaaa

SEQ ID NO: 1754529 - RNA, 19 nt, Artificial Sequence
  Description of Artificial Sequence: Synthetic oligonucleotide
  Sense strand starting at position 3014 of SEQ ID NO: 1562537
agagcuguucccggacaac

SEQ ID NO: 1754530 - RNA, 19 nt, Artificial Sequence
  Description of Artificial Sequence: Synthetic oligonucleotide
  Antisense strand to SEQ ID NO: 1754529
guuguccgggaacagcucu

SEQ ID NO: 1754531 - RNA, 19 nt, Artificial Sequence
  Description of Artificial Sequence: Synthetic oligonucleotide
  Sense strand starting at position 3017 of SEQ ID NO: 1562537
gcuguucccggacaacuuu

SEQ ID NO: 1754532 - RNA, 19 nt, Artificial Sequence
  Description of Artificial Sequence: Synthetic oligonucleotide
  Antisense strand to SEQ ID NO: 1754531
aaaguuguccgggaacagc

SEQ ID NO: 1754533 - RNA, 19 nt, Artificial Sequence
  Description of Artificial Sequence: Synthetic oligonucleotide
  Sense strand starting at position 3034 of SEQ ID NO: 1562537
uuuaucaccugggaaacuu

SEQ ID NO: 1754534 - RNA, 19 nt, Artificial Sequence
  Description of Artificial Sequence: Synthetic oligonucleotide
  Antisense strand to SEQ ID NO: 1754533
aaguuucccaggugauaaa

SEQ ID NO: 1754535 - RNA, 19 nt, Artificial Sequence
  Description of Artificial Sequence: Synthetic oligonucleotide
  Sense strand starting at position 3160 of SEQ ID NO: 1562537
cacucagagugacagauaa

SEQ ID NO: 1754536 - RNA, 19 nt, Artificial Sequence
  Description of Artificial Sequence: Synthetic oligonucleotide
  Antisense strand to SEQ ID NO: 1754535
uuaucugucacucugagug

SEQ ID NO: 1754537 - RNA, 19 nt, Artificial Sequence
  Description of Artificial Sequence: Synthetic oligonucleotide
  Sense strand starting at position 3540 of SEQ ID NO: 1562537
cucauauucuugugggauu

SEQ ID NO: 1754538 - RNA, 19 nt, Artificial Sequence
  Description of Artificial Sequence: Synthetic oligonucleotide
  Antisense strand to SEQ ID NO: 1754537
aaucccacaagaauaugag

SEQ ID NO: 1754539 - RNA, 19 nt, Artificial Sequence
  Description of Artificial Sequence: Synthetic oligonucleotide
  Sense strand starting at position 3541 of SEQ ID NO: 1562537
ucauauucuugugggauuc

SEQ ID NO: 1754540 - RNA, 19 nt, Artificial Sequence
  Description of Artificial Sequence: Synthetic oligonucleotide
  Antisense strand to SEQ ID NO: 1754539
gaaucccacaagaauauga

SEQ ID NO: 1754541 - RNA, 19 nt, Artificial Sequence
  Description of Artificial Sequence: Synthetic oligonucleotide
  Sense strand starting at position 3553 of SEQ ID NO: 1562537
gggauucccaucugugagu

SEQ ID NO: 1754542 - RNA, 19 nt, Artificial Sequence
  Description of Artificial Sequence: Synthetic oligonucleotide
  Antisense strand to SEQ ID NO: 1754541
acucacagaugggaauccc

SEQ ID NO: 1754543 - RNA, 19 nt, Artificial Sequence
  Description of Artificial Sequence: Synthetic oligonucleotide
  Sense strand starting at position 3554 of SEQ ID NO: 1562537
ggauucccaucugugagua

SEQ ID NO: 1754544 - RNA, 19 nt, Artificial Sequence
  Description of Artificial Sequence: Synthetic oligonucleotide
  Antisense strand to SEQ ID NO: 1754543
uacucacagaugggaaucc

SEQ ID NO: 1754545 - RNA, 19 nt, Artificial Sequence
  Description of Artificial Sequence: Synthetic oligonucleotide
  Sense strand starting at position 3558 of SEQ ID NO: 1562537
ucccaucugugaguacaua

SEQ ID NO: 1754546 - RNA, 19 nt, Artificial Sequence
  Description of Artificial Sequence: Synthetic oligonucleotide
  Antisense strand to SEQ ID NO: 1754545
uauguacucacagauggga

SEQ ID NO: 1754547 - RNA, 19 nt, Artificial Sequence
  Description of Artificial Sequence: Synthetic oligonucleotide
  Sense strand starting at position 41 of SEQ ID NO: 1562538
acaagcuuguuguuagaag

SEQ ID NO: 1754548 - RNA, 19 nt, Artificial Sequence
  Description of Artificial Sequence: Synthetic oligonucleotide
  Antisense strand to SEQ ID NO: 1754547
cuucuaacaacaagcuugu

SEQ ID NO: 1754549 - RNA, 19 nt, Artificial Sequence
  Description of Artificial Sequence: Synthetic oligonucleotide
  Sense strand starting at position 50 of SEQ ID NO: 1562538
uuguuagaagguuguccuu

SEQ ID NO: 1754550 - RNA, 19 nt, Artificial Sequence
  Description of Artificial Sequence: Synthetic oligonucleotide
  Antisense strand to SEQ ID NO: 1754549
aaggacaaccuucuaacaa

SEQ ID NO: 1754551 - RNA, 19 nt, Artificial Sequence
  Description of Artificial Sequence: Synthetic oligonucleotide
  Sense strand starting at position 137 of SEQ ID NO: 1562538
agcucaccagcugauaauu

SEQ ID NO: 1754552 - RNA, 19 nt, Artificial Sequence
  Description of Artificial Sequence: Synthetic oligonucleotide
  Antisense strand to SEQ ID NO: 1754551
aauuaucagcuggugagcu

SEQ ID NO: 1754553 - RNA, 19 nt, Artificial Sequence
  Description of Artificial Sequence: Synthetic oligonucleotide
  Sense strand starting at position 257 of SEQ ID NO: 1562538
ggguguugcuagguuucau

SEQ ID NO: 1754554 - RNA, 19 nt, Artificial Sequence
  Description of Artificial Sequence: Synthetic oligonucleotide
  Antisense strand to SEQ ID NO: 1754553
augaaaccuagcaacaccc

SEQ ID NO: 1754555 - RNA, 19 nt, Artificial Sequence
  Description of Artificial Sequence: Synthetic oligonucleotide
  Sense strand starting at position 291 of SEQ ID NO: 1562538
ccaguaguucuguagcgga

SEQ ID NO: 1754556 - RNA, 19 nt, Artificial Sequence
  Description of Artificial Sequence: Synthetic oligonucleotide
  Antisense strand to SEQ ID NO: 1754555
uccgcuacagaacuacugg

SEQ ID NO: 1754557 - RNA, 19 nt, Artificial Sequence
  Description of Artificial Sequence: Synthetic oligonucleotide
  Sense strand starting at position 474 of SEQ ID NO: 1562538
ggcccuuugcgcugguaaa

SEQ ID NO: 1754558 - RNA, 19 nt, Artificial Sequence
  Description of Artificial Sequence: Synthetic oligonucleotide
  Antisense strand to SEQ ID NO: 1754557
uuuaccagcgcaaagggcc

SEQ ID NO: 1754559 - RNA, 19 nt, Artificial Sequence
  Description of Artificial Sequence: Synthetic oligonucleotide
  Sense strand starting at position 475 of SEQ ID NO: 1562538
gcccuuugcgcugguaaac

SEQ ID NO: 1754560 - RNA, 19 nt, Artificial Sequence
  Description of Artificial Sequence: Synthetic oligonucleotide
  Antisense strand to SEQ ID NO: 1754559
guuuaccagcgcaaagggc

SEQ ID NO: 1754561 - RNA, 19 nt, Artificial Sequence
  Description of Artificial Sequence: Synthetic oligonucleotide
  Sense strand starting at position 476 of SEQ ID NO: 1562538
cccuuugcgcugguaaacu

SEQ ID NO: 1754562 - RNA, 19 nt, Artificial Sequence
  Description of Artificial Sequence: Synthetic oligonucleotide
  Antisense strand to SEQ ID NO: 1754561
aguuuaccagcgcaaaggg

SEQ ID NO: 1754563 - RNA, 19 nt, Artificial Sequence
  Description of Artificial Sequence: Synthetic oligonucleotide
  Sense strand starting at position 559 of SEQ ID NO: 1562538
ggaguaccuucccagaucu

SEQ ID NO: 1754564 - RNA, 19 nt, Artificial Sequence
  Description of Artificial Sequence: Synthetic oligonucleotide
  Antisense strand to SEQ ID NO: 1754563
agaucugggaagguacucc

SEQ ID NO: 1754565 - RNA, 19 nt, Artificial Sequence
  Description of Artificial Sequence: Synthetic oligonucleotide
  Sense strand starting at position 636 of SEQ ID NO: 1562538
ggcugcguagccuuuguaa

SEQ ID NO: 1754566 - RNA, 19 nt, Artificial Sequence
  Description of Artificial Sequence: Synthetic oligonucleotide
  Antisense strand to SEQ ID NO: 1754565
uuacaaaggcuacgcagcc

SEQ ID NO: 1754567 - RNA, 19 nt, Artificial Sequence
  Description of Artificial Sequence: Synthetic oligonucleotide
  Sense strand starting at position 638 of SEQ ID NO: 1562538
cugcguagccuuuguaauu

SEQ ID NO: 1754568 - RNA, 19 nt, Artificial Sequence
  Description of Artificial Sequence: Synthetic oligonucleotide
  Antisense strand to SEQ ID NO: 1754567
aauuacaaaggcuacgcag

SEQ ID NO: 1754569 - RNA, 19 nt, Artificial Sequence
  Description of Artificial Sequence: Synthetic oligonucleotide
  Sense strand starting at position 639 of SEQ ID NO: 1562538
ugcguagccuuuguaauuu

SEQ ID NO: 1754570 - RNA, 19 nt, Artificial Sequence
  Description of Artificial Sequence: Synthetic oligonucleotide
  Antisense strand to SEQ ID NO: 1754569
aaauuacaaaggcuacgca

SEQ ID NO: 1754571 - RNA, 19 nt, Artificial Sequence
  Description of Artificial Sequence: Synthetic oligonucleotide
  Sense strand starting at position 896 of SEQ ID NO: 1562538
gggcguucugaacaggauu

SEQ ID NO: 1754572 - RNA, 19 nt, Artificial Sequence
  Description of Artificial Sequence: Synthetic oligonucleotide
  Antisense strand to SEQ ID NO: 1754571
aauccuguucagaacgccc

SEQ ID NO: 1754573 - RNA, 19 nt, Artificial Sequence
  Description of Artificial Sequence: Synthetic oligonucleotide
  Sense strand starting at position 989 of SEQ ID NO: 1562538
cgcacaaacuuucuggaca

SEQ ID NO: 1754574 - RNA, 19 nt, Artificial Sequence
  Description of Artificial Sequence: Synthetic oligonucleotide
  Antisense strand to SEQ ID NO: 1754573
uguccagaaaguuugugcg

SEQ ID NO: 1754575 - RNA, 19 nt, Artificial Sequence
  Description of Artificial Sequence: Synthetic oligonucleotide
  Sense strand starting at position 1382 of SEQ ID NO: 1562538
ccggcaucucagcgaguuu

SEQ ID NO: 1754576 - RNA, 19 nt, Artificial Sequence
  Description of Artificial Sequence: Synthetic oligonucleotide
  Antisense strand to SEQ ID NO: 1754575
aaacucgcugagaugccgg

SEQ ID NO: 1754577 - RNA, 19 nt, Artificial Sequence
  Description of Artificial Sequence: Synthetic oligonucleotide
  Sense strand starting at position 1435 of SEQ ID NO: 1562538
gcagaaggaguucagguaa

SEQ ID NO: 1754578 - RNA, 19 nt, Artificial Sequence
  Description of Artificial Sequence: Synthetic oligonucleotide
  Antisense strand to SEQ ID NO: 1754577
uuaccugaacuccuucugc

SEQ ID NO: 1754579 - RNA, 19 nt, Artificial Sequence
  Description of Artificial Sequence: Synthetic oligonucleotide
  Sense strand starting at position 2121 of SEQ ID NO: 1562538
ggcguuucccaagggaagu

SEQ ID NO: 1754580 - RNA, 19 nt, Artificial Sequence
  Description of Artificial Sequence: Synthetic oligonucleotide
  Antisense strand to SEQ ID NO: 1754579
acuucccuugggaaacgcc

SEQ ID NO: 1754581 - RNA, 19 nt, Artificial Sequence
  Description of Artificial Sequence: Synthetic oligonucleotide
  Sense strand starting at position 2273 of SEQ ID NO: 1562538
ucgaguuuggguuaaggaa

SEQ ID NO: 1754582 - RNA, 19 nt, Artificial Sequence
  Description of Artificial Sequence: Synthetic oligonucleotide
  Antisense strand to SEQ ID NO: 1754581
uuccuuaacccaaacucga

SEQ ID NO: 1754583 - RNA, 19 nt, Artificial Sequence
  Description of Artificial Sequence: Synthetic oligonucleotide
  Sense strand starting at position 2648 of SEQ ID NO: 1562538
uugagagguucuuucuaau

SEQ ID NO: 1754584 - RNA, 19 nt, Artificial Sequence
  Description of Artificial Sequence: Synthetic oligonucleotide
  Antisense strand to SEQ ID NO: 1754583
auuagaaagaaccucucaa

SEQ ID NO: 1754585 - RNA, 19 nt, Artificial Sequence
  Description of Artificial Sequence: Synthetic oligonucleotide
  Sense strand starting at position 2651 of SEQ ID NO: 1562538
agagguucuuucuaauguu

SEQ ID NO: 1754586 - RNA, 19 nt, Artificial Sequence
  Description of Artificial Sequence: Synthetic oligonucleotide
  Antisense strand to SEQ ID NO: 1754585
aacauuagaaagaaccucu

SEQ ID NO: 1754587 - RNA, 19 nt, Artificial Sequence
  Description of Artificial Sequence: Synthetic oligonucleotide
  Sense strand starting at position 2777 of SEQ ID NO: 1562538
uccucuuuggcacauugau

SEQ ID NO: 1754588 - RNA, 19 nt, Artificial Sequence
  Description of Artificial Sequence: Synthetic oligonucleotide
  Antisense strand to SEQ ID NO: 1754587
aucaaugugccaaagagga

SEQ ID NO: 1754589 - RNA, 19 nt, Artificial Sequence
  Description of Artificial Sequence: Synthetic oligonucleotide
  Sense strand starting at position 2881 of SEQ ID NO: 1562538
aaaggaaauguuuguuagu

SEQ ID NO: 1754590 - RNA, 19 nt, Artificial Sequence
  Description of Artificial Sequence: Synthetic oligonucleotide
  Antisense strand to SEQ ID NO: 1754589
acuaacaaacauuuccuuu

SEQ ID NO: 1754591 - RNA, 19 nt, Artificial Sequence
  Description of Artificial Sequence: Synthetic oligonucleotide
  Sense strand starting at position 2882 of SEQ ID NO: 1562538
aaggaaauguuuguuaguc

SEQ ID NO: 1754592 - RNA, 19 nt, Artificial Sequence
  Description of Artificial Sequence: Synthetic oligonucleotide
  Antisense strand to SEQ ID NO: 1754591
gacuaacaaacauuuccuu

SEQ ID NO: 1754593 - RNA, 19 nt, Artificial Sequence
  Description of Artificial Sequence: Synthetic oligonucleotide
  Sense strand starting at position 2888 of SEQ ID NO: 1562538
auguuuguuagucagcaga

SEQ ID NO: 1754594 - RNA, 19 nt, Artificial Sequence
  Description of Artificial Sequence: Synthetic oligonucleotide
  Antisense strand to SEQ ID NO: 1754593
ucugcugacuaacaaacau

SEQ ID NO: 1754595 - RNA, 19 nt, Artificial Sequence
  Description of Artificial Sequence: Synthetic oligonucleotide
  Sense strand starting at position 2890 of SEQ ID NO: 1562538
guuuguuagucagcagauc

SEQ ID NO: 1754596 - RNA, 19 nt, Artificial Sequence
  Description of Artificial Sequence: Synthetic oligonucleotide
  Antisense strand to SEQ ID NO: 1754595
gaucugcugacuaacaaac

SEQ ID NO: 1754597 - RNA, 19 nt, Artificial Sequence
  Description of Artificial Sequence: Synthetic oligonucleotide
  Sense strand starting at position 2891 of SEQ ID NO: 1562538
uuuguuagucagcagaucu

SEQ ID NO: 1754598 - RNA, 19 nt, Artificial Sequence
  Description of Artificial Sequence: Synthetic oligonucleotide
  Antisense strand to SEQ ID NO: 1754597
agaucugcugacuaacaaa

SEQ ID NO: 1754599 - RNA, 19 nt, Artificial Sequence
  Description of Artificial Sequence: Synthetic oligonucleotide
  Sense strand starting at position 2921 of SEQ ID NO: 1562538
agagcuguucccggacaac

SEQ ID NO: 1754600 - RNA, 19 nt, Artificial Sequence
  Description of Artificial Sequence: Synthetic oligonucleotide
  Antisense strand to SEQ ID NO: 1754599
guuguccgggaacagcucu

SEQ ID NO: 1754601 - RNA, 19 nt, Artificial Sequence
  Description of Artificial Sequence: Synthetic oligonucleotide
  Sense strand starting at position 2924 of SEQ ID NO: 1562538
gcuguucccggacaacuuu

SEQ ID NO: 1754602 - RNA, 19 nt, Artificial Sequence
  Description of Artificial Sequence: Synthetic oligonucleotide
  Antisense strand to SEQ ID NO: 1754601
aaaguuguccgggaacagc

SEQ ID NO: 1754603 - RNA, 19 nt, Artificial Sequence
  Description of Artificial Sequence: Synthetic oligonucleotide
  Sense strand starting at position 2941 of SEQ ID NO: 1562538
uuuaucaccugggaaacuu

SEQ ID NO: 1754604 - RNA, 19 nt, Artificial Sequence
  Description of Artificial Sequence: Synthetic oligonucleotide
  Antisense strand to SEQ ID NO: 1754603
aaguuucccaggugauaaa

SEQ ID NO: 1754605 - RNA, 19 nt, Artificial Sequence
  Description of Artificial Sequence: Synthetic oligonucleotide
  Sense strand starting at position 3067 of SEQ ID NO: 1562538
cacucagagugacagauaa

SEQ ID NO: 1754606 - RNA, 19 nt, Artificial Sequence
  Description of Artificial Sequence: Synthetic oligonucleotide
  Antisense strand to SEQ ID NO: 1754605
uuaucugucacucugagug

SEQ ID NO: 1754607 - RNA, 19 nt, Artificial Sequence
  Description of Artificial Sequence: Synthetic oligonucleotide
  Sense strand starting at position 3460 of SEQ ID NO: 1562538
gggauucccaucugugagu

SEQ ID NO: 1754608 - RNA, 19 nt, Artificial Sequence
  Description of Artificial Sequence: Synthetic oligonucleotide
  Antisense strand to SEQ ID NO: 1754607
acucacagaugggaauccc

SEQ ID NO: 1754609 - RNA, 19 nt, Artificial Sequence
  Description of Artificial Sequence: Synthetic oligonucleotide
  Sense strand starting at position 3461 of SEQ ID NO: 1562538
ggauucccaucugugagua

SEQ ID NO: 1754610 - RNA, 19 nt, Artificial Sequence
  Description of Artificial Sequence: Synthetic oligonucleotide
  Antisense strand to SEQ ID NO: 1754609
uacucacagaugggaaucc

SEQ ID NO: 1754611 - RNA, 19 nt, Artificial Sequence
  Description of Artificial Sequence: Synthetic oligonucleotide
  Sense strand starting at position 3465 of SEQ ID NO: 1562538
ucccaucugugaguacaua

SEQ ID NO: 1754612 - RNA, 19 nt, Artificial Sequence
  Description of Artificial Sequence: Synthetic oligonucleotide
  Antisense strand to SEQ ID NO: 1754611
uauguacucacagauggga

SEQ ID NO: 1754613 - RNA, 19 nt, Artificial Sequence
  Description of Artificial Sequence: Synthetic oligonucleotide
  Sense strand starting at position 3907 of SEQ ID NO: 1562538
aguugucuuucagcggcaa

SEQ ID NO: 1754614 - RNA, 19 nt, Artificial Sequence
  Description of Artificial Sequence: Synthetic oligonucleotide
  Antisense strand to SEQ ID NO: 1754613
uugccgcugaaagacaacu

SEQ ID NO: 1754615 - RNA, 19 nt, Artificial Sequence
  Description of Artificial Sequence: Synthetic oligonucleotide
  Sense strand starting at position 3918 of SEQ ID NO: 1562538
agcggcaacucacuuauuu

SEQ ID NO: 1754616 - RNA, 19 nt, Artificial Sequence
  Description of Artificial Sequence: Synthetic oligonucleotide
  Antisense strand to SEQ ID NO: 1754615
aaauaagugaguugccgcu

SEQ ID NO: 1754617 - RNA, 19 nt, Artificial Sequence
  Description of Artificial Sequence: Synthetic oligonucleotide
  Sense strand starting at position 3931 of SEQ ID NO: 1562538
uuauuucugucuugacagu

SEQ ID NO: 1754618 - RNA, 19 nt, Artificial Sequence
  Description of Artificial Sequence: Synthetic oligonucleotide
  Antisense strand to SEQ ID NO: 1754617
acugucaagacagaaauaa

SEQ ID NO: 1754619 - RNA, 19 nt, Artificial Sequence
  Description of Artificial Sequence: Synthetic oligonucleotide
  Sense strand starting at position 3937 of SEQ ID NO: 1562538
cugucuugacaguguguuu

SEQ ID NO: 1754620 - RNA, 19 nt, Artificial Sequence
  Description of Artificial Sequence: Synthetic oligonucleotide
  Antisense strand to SEQ ID NO: 1754619
aaacacacugucaagacag

SEQ ID NO: 1754621 - RNA, 19 nt, Artificial Sequence
  Description of Artificial Sequence: Synthetic oligonucleotide
  Sense strand starting at position 3948 of SEQ ID NO: 1562538
guguguuuggugccuacua

SEQ ID NO: 1754622 - RNA, 19 nt, Artificial Sequence
  Description of Artificial Sequence: Synthetic oligonucleotide
  Antisense strand to SEQ ID NO: 1754621
uaguaggcaccaaacacac

SEQ ID NO: 1754623 - RNA, 19 nt, Artificial Sequence
  Description of Artificial Sequence: Synthetic oligonucleotide
  Sense strand starting at position 3949 of SEQ ID NO: 1562538
uguguuuggugccuacuaa

SEQ ID NO: 1754624 - RNA, 19 nt, Artificial Sequence
  Description of Artificial Sequence: Synthetic oligonucleotide
  Antisense strand to SEQ ID NO: 1754623
uuaguaggcaccaaacaca

SEQ ID NO: 1754625 - RNA, 19 nt, Artificial Sequence
  Description of Artificial Sequence: Synthetic oligonucleotide
  Sense strand starting at position 3950 of SEQ ID NO: 1562538
guguuuggugccuacuaau

SEQ ID NO: 1754626 - RNA, 19 nt, Artificial Sequence
  Description of Artificial Sequence: Synthetic oligonucleotide
  Antisense strand to SEQ ID NO: 1754625
auuaguaggcaccaaacac

SEQ ID NO: 1754627 - RNA, 19 nt, Artificial Sequence
  Description of Artificial Sequence: Synthetic oligonucleotide
  Sense strand starting at position 206 of SEQ ID NO: 1562539
guguaaauugcauaucuac

SEQ ID NO: 1754628 - RNA, 19 nt, Artificial Sequence
  Description of Artificial Sequence: Synthetic oligonucleotide
  Antisense strand to SEQ ID NO: 1754627
guagauaugcaauuuacac

SEQ ID NO: 1754629 - RNA, 19 nt, Artificial Sequence
  Description of Artificial Sequence: Synthetic oligonucleotide
  Sense strand starting at position 296 of SEQ ID NO: 1562539
aucuguacugugcaugaaa

SEQ ID NO: 1754630 - RNA, 19 nt, Artificial Sequence
  Description of Artificial Sequence: Synthetic oligonucleotide
  Antisense strand to SEQ ID NO: 1754629
uuucaugcacaguacagau

SEQ ID NO: 1754631 - RNA, 19 nt, Artificial Sequence
  Description of Artificial Sequence: Synthetic oligonucleotide
  Sense strand starting at position 376 of SEQ ID NO: 1562539
gagucaggugauugcaaga

SEQ ID NO: 1754632 - RNA, 19 nt, Artificial Sequence
  Description of Artificial Sequence: Synthetic oligonucleotide
  Antisense strand to SEQ ID NO: 1754631
ucuugcaaucaccugacuc

SEQ ID NO: 1754633 - RNA, 19 nt, Artificial Sequence
  Description of Artificial Sequence: Synthetic oligonucleotide
  Sense strand starting at position 682 of SEQ ID NO: 1562539
ccugacuaucucuggucaa

SEQ ID NO: 1754634 - RNA, 19 nt, Artificial Sequence
  Description of Artificial Sequence: Synthetic oligonucleotide
  Antisense strand to SEQ ID NO: 1754633
uugaccagagauagucagg

SEQ ID NO: 1754635 - RNA, 19 nt, Artificial Sequence
  Description of Artificial Sequence: Synthetic oligonucleotide
  Sense strand starting at position 755 of SEQ ID NO: 1562539
ugacuuauuuacgaaacca

SEQ ID NO: 1754636 - RNA, 19 nt, Artificial Sequence
  Description of Artificial Sequence: Synthetic oligonucleotide
  Antisense strand to SEQ ID NO: 1754635
ugguuucguaaauaaguca

SEQ ID NO: 1754637 - RNA, 19 nt, Artificial Sequence
  Description of Artificial Sequence: Synthetic oligonucleotide
  Sense strand starting at position 804 of SEQ ID NO: 1562539
ccgucaucugcugcuggau

SEQ ID NO: 1754638 - RNA, 19 nt, Artificial Sequence
  Description of Artificial Sequence: Synthetic oligonucleotide
  Antisense strand to SEQ ID NO: 1754637
auccagcagcagaugacgg

SEQ ID NO: 1754639 - RNA, 19 nt, Artificial Sequence
  Description of Artificial Sequence: Synthetic oligonucleotide
  Sense strand starting at position 805 of SEQ ID NO: 1562539
cgucaucugcugcuggauu

SEQ ID NO: 1754640 - RNA, 19 nt, Artificial Sequence
  Description of Artificial Sequence: Synthetic oligonucleotide
  Antisense strand to SEQ ID NO: 1754639
aauccagcagcagaugacg

SEQ ID NO: 1754641 - RNA, 19 nt, Artificial Sequence
  Description of Artificial Sequence: Synthetic oligonucleotide
  Sense strand starting at position 1031 of SEQ ID NO: 1562539
gagcaaagggcuuaacgaa

SEQ ID NO: 1754642 - RNA, 19 nt, Artificial Sequence
  Description of Artificial Sequence: Synthetic oligonucleotide
  Antisense strand to SEQ ID NO: 1754641
uucguuaagcccuuugcuc

SEQ ID NO: 1754643 - RNA, 19 nt, Artificial Sequence
  Description of Artificial Sequence: Synthetic oligonucleotide
  Sense strand starting at position 1168 of SEQ ID NO: 1562539
ucacauuggucaccuacau

SEQ ID NO: 1754644 - RNA, 19 nt, Artificial Sequence
  Description of Artificial Sequence: Synthetic oligonucleotide
  Antisense strand to SEQ ID NO: 1754643
auguaggugaccaauguga

SEQ ID NO: 1754645 - RNA, 19 nt, Artificial Sequence
  Description of Artificial Sequence: Synthetic oligonucleotide
  Sense strand starting at position 1273 of SEQ ID NO: 1562539
aagcgaucggaaugagaag

SEQ ID NO: 1754646 - RNA, 19 nt, Artificial Sequence
  Description of Artificial Sequence: Synthetic oligonucleotide
  Antisense strand to SEQ ID NO: 1754645
cuucucauuccgaucgcuu

SEQ ID NO: 1754647 - RNA, 19 nt, Artificial Sequence
  Description of Artificial Sequence: Synthetic oligonucleotide
  Sense strand starting at position 1375 of SEQ ID NO: 1562539
cuccuuagccgaggaagaa

SEQ ID NO: 1754648 - RNA, 19 nt, Artificial Sequence
  Description of Artificial Sequence: Synthetic oligonucleotide
  Antisense strand to SEQ ID NO: 1754647
uucuuccucggcuaaggag

SEQ ID NO: 1754649 - RNA, 19 nt, Artificial Sequence
  Description of Artificial Sequence: Synthetic oligonucleotide
  Sense strand starting at position 1441 of SEQ ID NO: 1562539
uuggucauacgguaaaucu

SEQ ID NO: 1754650 - RNA, 19 nt, Artificial Sequence
  Description of Artificial Sequence: Synthetic oligonucleotide
  Antisense strand to SEQ ID NO: 1754649
agauuuaccguaugaccaa

SEQ ID NO: 1754651 - RNA, 19 nt, Artificial Sequence
  Description of Artificial Sequence: Synthetic oligonucleotide
  Sense strand starting at position 1448 of SEQ ID NO: 1562539
uacgguaaaucuuugaaau

SEQ ID NO: 1754652 - RNA, 19 nt, Artificial Sequence
  Description of Artificial Sequence: Synthetic oligonucleotide
  Antisense strand to SEQ ID NO: 1754651
auuucaaagauuuaccgua

SEQ ID NO: 1754653 - RNA, 19 nt, Artificial Sequence
  Description of Artificial Sequence: Synthetic oligonucleotide
  Sense strand starting at position 1449 of SEQ ID NO: 1562539
acgguaaaucuuugaaauu

SEQ ID NO: 1754654 - RNA, 19 nt, Artificial Sequence
  Description of Artificial Sequence: Synthetic oligonucleotide
  Antisense strand to SEQ ID NO: 1754653
aauuucaaagauuuaccgu

SEQ ID NO: 1754655 - RNA, 19 nt, Artificial Sequence
  Description of Artificial Sequence: Synthetic oligonucleotide
  Sense strand starting at position 1459 of SEQ ID NO: 1562539
uuugaaauucgacagucca

SEQ ID NO: 1754656 - RNA, 19 nt, Artificial Sequence
  Description of Artificial Sequence: Synthetic oligonucleotide
  Antisense strand to SEQ ID NO: 1754655
uggacugucgaauuucaaa

SEQ ID NO: 1754657 - RNA, 19 nt, Artificial Sequence
  Description of Artificial Sequence: Synthetic oligonucleotide
  Sense strand starting at position 1484 of SEQ ID NO: 1562539
gcgcauucaguaucgauua

SEQ ID NO: 1754658 - RNA, 19 nt, Artificial Sequence
  Description of Artificial Sequence: Synthetic oligonucleotide
  Antisense strand to SEQ ID NO: 1754657
uaaucgauacugaaugcgc

SEQ ID NO: 1754659 - RNA, 19 nt, Artificial Sequence
  Description of Artificial Sequence: Synthetic oligonucleotide
  Sense strand starting at position 1511 of SEQ ID NO: 1562539
cagucaucuggugagaaug

SEQ ID NO: 1754660 - RNA, 19 nt, Artificial Sequence
  Description of Artificial Sequence: Synthetic oligonucleotide
  Antisense strand to SEQ ID NO: 1754659
cauucucaccagaugacug

SEQ ID NO: 1754661 - RNA, 19 nt, Artificial Sequence
  Description of Artificial Sequence: Synthetic oligonucleotide
  Sense strand starting at position 1614 of SEQ ID NO: 1562539
cugcuaagacaaugacuuu

SEQ ID NO: 1754662 - RNA, 19 nt, Artificial Sequence
  Description of Artificial Sequence: Synthetic oligonucleotide
  Antisense strand to SEQ ID NO: 1754661
aaagucauugucuuagcag

SEQ ID NO: 1754663 - RNA, 19 nt, Artificial Sequence
  Description of Artificial Sequence: Synthetic oligonucleotide
  Sense strand starting at position 1656 of SEQ ID NO: 1562539
ucaaaucgauugcuuuaga

SEQ ID NO: 1754664 - RNA, 19 nt, Artificial Sequence
  Description of Artificial Sequence: Synthetic oligonucleotide
  Antisense strand to SEQ ID NO: 1754663
ucuaaagcaaucgauuuga

SEQ ID NO: 1754665 - RNA, 19 nt, Artificial Sequence
  Description of Artificial Sequence: Synthetic oligonucleotide
  Sense strand starting at position 1893 of SEQ ID NO: 1562539
gauaguaggccacaguguu

SEQ ID NO: 1754666 - RNA, 19 nt, Artificial Sequence
  Description of Artificial Sequence: Synthetic oligonucleotide
  Antisense strand to SEQ ID NO: 1754665
aacacuguggccuacuauc

SEQ ID NO: 1754667 - RNA, 19 nt, Artificial Sequence
  Description of Artificial Sequence: Synthetic oligonucleotide
  Sense strand starting at position 1959 of SEQ ID NO: 1562539
ccuaauuaagaacgaaagu

SEQ ID NO: 1754668 - RNA, 19 nt, Artificial Sequence
  Description of Artificial Sequence: Synthetic oligonucleotide
  Antisense strand to SEQ ID NO: 1754667
acuuucguucuuaauuagg

SEQ ID NO: 1754669 - RNA, 19 nt, Artificial Sequence
  Description of Artificial Sequence: Synthetic oligonucleotide
  Sense strand starting at position 2129 of SEQ ID NO: 1562539
agucauucccuguaacucu

SEQ ID NO: 1754670 - RNA, 19 nt, Artificial Sequence
  Description of Artificial Sequence: Synthetic oligonucleotide
  Antisense strand to SEQ ID NO: 1754669
agaguuacagggaaugacu

SEQ ID NO: 1754671 - RNA, 19 nt, Artificial Sequence
  Description of Artificial Sequence: Synthetic oligonucleotide
  Sense strand starting at position 2173 of SEQ ID NO: 1562539
agcagaagauucccaauua

SEQ ID NO: 1754672 - RNA, 19 nt, Artificial Sequence
  Description of Artificial Sequence: Synthetic oligonucleotide
  Antisense strand to SEQ ID NO: 1754671
uaauugggaaucuucugcu

SEQ ID NO: 1754673 - RNA, 19 nt, Artificial Sequence
  Description of Artificial Sequence: Synthetic oligonucleotide
  Sense strand starting at position 2209 of SEQ ID NO: 1562539
ccagauaucaggcauggcu

SEQ ID NO: 1754674 - RNA, 19 nt, Artificial Sequence
  Description of Artificial Sequence: Synthetic oligonucleotide
  Antisense strand to SEQ ID NO: 1754673
agccaugccugauaucugg

SEQ ID NO: 1754675 - RNA, 19 nt, Artificial Sequence
  Description of Artificial Sequence: Synthetic oligonucleotide
  Sense strand starting at position 2385 of SEQ ID NO: 1562539
cguguuucccaagaucaua

SEQ ID NO: 1754676 - RNA, 19 nt, Artificial Sequence
  Description of Artificial Sequence: Synthetic oligonucleotide
  Antisense strand to SEQ ID NO: 1754675
uaugaucuugggaaacacg

SEQ ID NO: 1754677 - RNA, 19 nt, Artificial Sequence
  Description of Artificial Sequence: Synthetic oligonucleotide
  Sense strand starting at position 2530 of SEQ ID NO: 1562539
ugauaccucuguuuauuau

SEQ ID NO: 1754678 - RNA, 19 nt, Artificial Sequence
  Description of Artificial Sequence: Synthetic oligonucleotide
  Antisense strand to SEQ ID NO: 1754677
auaauaaacagagguauca

SEQ ID NO: 1754679 - RNA, 19 nt, Artificial Sequence
  Description of Artificial Sequence: Synthetic oligonucleotide
  Sense strand starting at position 2540 of SEQ ID NO: 1562539
guuuauuaucagcauguag

SEQ ID NO: 1754680 - RNA, 19 nt, Artificial Sequence
  Description of Artificial Sequence: Synthetic oligonucleotide
  Antisense strand to SEQ ID NO: 1754679
cuacaugcugauaauaaac

SEQ ID NO: 1754681 - RNA, 19 nt, Artificial Sequence
  Description of Artificial Sequence: Synthetic oligonucleotide
  Sense strand starting at position 2730 of SEQ ID NO: 1562539
uggagcugccaucauuaaa

SEQ ID NO: 1754682 - RNA, 19 nt, Artificial Sequence
  Description of Artificial Sequence: Synthetic oligonucleotide
  Antisense strand to SEQ ID NO: 1754681
uuuaaugauggcagcucca

SEQ ID NO: 1754683 - RNA, 19 nt, Artificial Sequence
  Description of Artificial Sequence: Synthetic oligonucleotide
  Sense strand starting at position 2971 of SEQ ID NO: 1562539
guggcuucccuuuaauuag

SEQ ID NO: 1754684 - RNA, 19 nt, Artificial Sequence
  Description of Artificial Sequence: Synthetic oligonucleotide
  Antisense strand to SEQ ID NO: 1754683
cuaauuaaagggaagccac

SEQ ID NO: 1754685 - RNA, 19 nt, Artificial Sequence
  Description of Artificial Sequence: Synthetic oligonucleotide
  Sense strand starting at position 2978 of SEQ ID NO: 1562539
cccuuuaauuagucaguaa

SEQ ID NO: 1754686 - RNA, 19 nt, Artificial Sequence
  Description of Artificial Sequence: Synthetic oligonucleotide
  Antisense strand to SEQ ID NO: 1754685
uuacugacuaauuaaaggg

SEQ ID NO: 1754687 - RNA, 19 nt, Artificial Sequence
  Description of Artificial Sequence: Synthetic oligonucleotide
  Sense strand starting at position 2981 of SEQ ID NO: 1562539
uuuaauuagucaguaaggu

SEQ ID NO: 1754688 - RNA, 19 nt, Artificial Sequence
  Description of Artificial Sequence: Synthetic oligonucleotide
  Antisense strand to SEQ ID NO: 1754687
accuuacugacuaauuaaa

SEQ ID NO: 1754689 - RNA, 19 nt, Artificial Sequence
  Description of Artificial Sequence: Synthetic oligonucleotide
  Sense strand starting at position 2982 of SEQ ID NO: 1562539
uuaauuagucaguaaggug

SEQ ID NO: 1754690 - RNA, 19 nt, Artificial Sequence
  Description of Artificial Sequence: Synthetic oligonucleotide
  Antisense strand to SEQ ID NO: 1754689
caccuuacugacuaauuaa

SEQ ID NO: 1754691 - RNA, 19 nt, Artificial Sequence
  Description of Artificial Sequence: Synthetic oligonucleotide
  Sense strand starting at position 3019 of SEQ ID NO: 1562539
cuuugcaucagggagugau

SEQ ID NO: 1754692 - RNA, 19 nt, Artificial Sequence
  Description of Artificial Sequence: Synthetic oligonucleotide
  Antisense strand to SEQ ID NO: 1754691
aucacucccugaugcaaag

SEQ ID NO: 1754693 - RNA, 19 nt, Artificial Sequence
  Description of Artificial Sequence: Synthetic oligonucleotide
  Sense strand starting at position 3208 of SEQ ID NO: 1562539
ccugaagaugcucaucaca

SEQ ID NO: 1754694 - RNA, 19 nt, Artificial Sequence
  Description of Artificial Sequence: Synthetic oligonucleotide
  Antisense strand to SEQ ID NO: 1754693
ugugaugagcaucuucagg

SEQ ID NO: 1754695 - RNA, 19 nt, Artificial Sequence
  Description of Artificial Sequence: Synthetic oligonucleotide
  Sense strand starting at position 3349 of SEQ ID NO: 1562539
gcaucuuugaagggcugaa

SEQ ID NO: 1754696 - RNA, 19 nt, Artificial Sequence
  Description of Artificial Sequence: Synthetic oligonucleotide
  Antisense strand to SEQ ID NO: 1754695
uucagcccuucaaagaugc

SEQ ID NO: 1754697 - RNA, 19 nt, Artificial Sequence
  Description of Artificial Sequence: Synthetic oligonucleotide
  Sense strand starting at position 3388 of SEQ ID NO: 1562539
cucgcaaauccaugcauuu

SEQ ID NO: 1754698 - RNA, 19 nt, Artificial Sequence
  Description of Artificial Sequence: Synthetic oligonucleotide
  Antisense strand to SEQ ID NO: 1754697
aaaugcauggauuugcgag

SEQ ID NO: 1754699 - RNA, 19 nt, Artificial Sequence
  Description of Artificial Sequence: Synthetic oligonucleotide
  Sense strand starting at position 3499 of SEQ ID NO: 1562539
gauguuaagcgcuaggaag

SEQ ID NO: 1754700 - RNA, 19 nt, Artificial Sequence
  Description of Artificial Sequence: Synthetic oligonucleotide
  Antisense strand to SEQ ID NO: 1754699
cuuccuagcgcuuaacauc

SEQ ID NO: 1754701 - RNA, 19 nt, Artificial Sequence
  Description of Artificial Sequence: Synthetic oligonucleotide
  Sense strand starting at position 3622 of SEQ ID NO: 1562539
gaccuuggugaccagugaa

SEQ ID NO: 1754702 - RNA, 19 nt, Artificial Sequence
  Description of Artificial Sequence: Synthetic oligonucleotide
  Antisense strand to SEQ ID NO: 1754701
uucacuggucaccaagguc

SEQ ID NO: 1754703 - RNA, 19 nt, Artificial Sequence
  Description of Artificial Sequence: Synthetic oligonucleotide
  Sense strand starting at position 3648 of SEQ ID NO: 1562539
uugugaaauuccuccaagg

SEQ ID NO: 1754704 - RNA, 19 nt, Artificial Sequence
  Description of Artificial Sequence: Synthetic oligonucleotide
  Antisense strand to SEQ ID NO: 1754703
ccuuggaggaauuucacaa

SEQ ID NO: 1754705 - RNA, 19 nt, Artificial Sequence
  Description of Artificial Sequence: Synthetic oligonucleotide
  Sense strand starting at position 3761 of SEQ ID NO: 1562539
gggaauagccgauggcaga

SEQ ID NO: 1754706 - RNA, 19 nt, Artificial Sequence
  Description of Artificial Sequence: Synthetic oligonucleotide
  Antisense strand to SEQ ID NO: 1754705
ucugccaucggcuauuccc

SEQ ID NO: 1754707 - RNA, 19 nt, Artificial Sequence
  Description of Artificial Sequence: Synthetic oligonucleotide
  Sense strand starting at position 20 of SEQ ID NO: 1562540
gagggauugagcugaguuu

SEQ ID NO: 1754708 - RNA, 19 nt, Artificial Sequence
  Description of Artificial Sequence: Synthetic oligonucleotide
  Antisense strand to SEQ ID NO: 1754707
aaacucagcucaaucccuc

SEQ ID NO: 1754709 - RNA, 19 nt, Artificial Sequence
  Description of Artificial Sequence: Synthetic oligonucleotide
  Sense strand starting at position 86 of SEQ ID NO: 1562540
ggugguccuccaggacaga

SEQ ID NO: 1754710 - RNA, 19 nt, Artificial Sequence
  Description of Artificial Sequence: Synthetic oligonucleotide
  Antisense strand to SEQ ID NO: 1754709
ucuguccuggaggaccacc

SEQ ID NO: 1754711 - RNA, 19 nt, Artificial Sequence
  Description of Artificial Sequence: Synthetic oligonucleotide
  Sense strand starting at position 281 of SEQ ID NO: 1562540
aucauuccugaagacguua

SEQ ID NO: 1754712 - RNA, 19 nt, Artificial Sequence
  Description of Artificial Sequence: Synthetic oligonucleotide
  Antisense strand to SEQ ID NO: 1754711
uaacgucuucaggaaugau

SEQ ID NO: 1754713 - RNA, 19 nt, Artificial Sequence
  Description of Artificial Sequence: Synthetic oligonucleotide
  Sense strand starting at position 293 of SEQ ID NO: 1562540
gacguuaguguggaugauu

SEQ ID NO: 1754714 - RNA, 19 nt, Artificial Sequence
  Description of Artificial Sequence: Synthetic oligonucleotide
  Antisense strand to SEQ ID NO: 1754713
aaucauccacacuaacguc

SEQ ID NO: 1754715 - RNA, 19 nt, Artificial Sequence
  Description of Artificial Sequence: Synthetic oligonucleotide
  Sense strand starting at position 516 of SEQ ID NO: 1562540
ccaucuacuugagugcaaa

SEQ ID NO: 1754716 - RNA, 19 nt, Artificial Sequence
  Description of Artificial Sequence: Synthetic oligonucleotide
  Antisense strand to SEQ ID NO: 1754715
uuugcacucaaguagaugg

SEQ ID NO: 1754717 - RNA, 19 nt, Artificial Sequence
  Description of Artificial Sequence: Synthetic oligonucleotide
  Sense strand starting at position 517 of SEQ ID NO: 1562540
caucuacuugagugcaaag

SEQ ID NO: 1754718 - RNA, 19 nt, Artificial Sequence
  Description of Artificial Sequence: Synthetic oligonucleotide
  Antisense strand to SEQ ID NO: 1754717
cuuugcacucaaguagaug

SEQ ID NO: 1754719 - RNA, 19 nt, Artificial Sequence
  Description of Artificial Sequence: Synthetic oligonucleotide
  Sense strand starting at position 889 of SEQ ID NO: 1562540
gcaggaaaguguccaggaa

SEQ ID NO: 1754720 - RNA, 19 nt, Artificial Sequence
  Description of Artificial Sequence: Synthetic oligonucleotide
  Antisense strand to SEQ ID NO: 1754719
uuccuggacacuuuccugc

SEQ ID NO: 1754721 - RNA, 19 nt, Artificial Sequence
  Description of Artificial Sequence: Synthetic oligonucleotide
  Sense strand starting at position 893 of SEQ ID NO: 1562540
gaaaguguccaggaagcua

SEQ ID NO: 1754722 - RNA, 19 nt, Artificial Sequence
  Description of Artificial Sequence: Synthetic oligonucleotide
  Antisense strand to SEQ ID NO: 1754721
uagcuuccuggacacuuuc

SEQ ID NO: 1754723 - RNA, 19 nt, Artificial Sequence
  Description of Artificial Sequence: Synthetic oligonucleotide
  Sense strand starting at position 1106 of SEQ ID NO: 1562540
gaugauaucgggcauccua

SEQ ID NO: 1754724 - RNA, 19 nt, Artificial Sequence
  Description of Artificial Sequence: Synthetic oligonucleotide
  Antisense strand to SEQ ID NO: 1754723
uaggaugcccgauaucauc

SEQ ID NO: 1754725 - RNA, 19 nt, Artificial Sequence
  Description of Artificial Sequence: Synthetic oligonucleotide
  Sense strand starting at position 1126 of SEQ ID NO: 1562540
gguggaugugaggauguaa

SEQ ID NO: 1754726 - RNA, 19 nt, Artificial Sequence
  Description of Artificial Sequence: Synthetic oligonucleotide
  Antisense strand to SEQ ID NO: 1754725
uuacauccucacauccacc

SEQ ID NO: 1754727 - RNA, 19 nt, Artificial Sequence
  Description of Artificial Sequence: Synthetic oligonucleotide
  Sense strand starting at position 1144 of SEQ ID NO: 1562540
aucugagagcguuaaagca

SEQ ID NO: 1754728 - RNA, 19 nt, Artificial Sequence
  Description of Artificial Sequence: Synthetic oligonucleotide
  Antisense strand to SEQ ID NO: 1754727
ugcuuuaacgcucucagau

SEQ ID NO: 1754729 - RNA, 19 nt, Artificial Sequence
  Description of Artificial Sequence: Synthetic oligonucleotide
  Sense strand starting at position 1221 of SEQ ID NO: 1562540
uugcccauggguuggaaau

SEQ ID NO: 1754730 - RNA, 19 nt, Artificial Sequence
  Description of Artificial Sequence: Synthetic oligonucleotide
  Antisense strand to SEQ ID NO: 1754729
auuuccaacccaugggcaa

SEQ ID NO: 1754731 - RNA, 19 nt, Artificial Sequence
  Description of Artificial Sequence: Synthetic oligonucleotide
  Sense strand starting at position 1233 of SEQ ID NO: 1562540
uggaaaugcucuuuaacuu

SEQ ID NO: 1754732 - RNA, 19 nt, Artificial Sequence
  Description of Artificial Sequence: Synthetic oligonucleotide
  Antisense strand to SEQ ID NO: 1754731
aaguuaaagagcauuucca

SEQ ID NO: 1754733 - RNA, 19 nt, Artificial Sequence
  Description of Artificial Sequence: Synthetic oligonucleotide
  Sense strand starting at position 1234 of SEQ ID NO: 1562540
ggaaaugcucuuuaacuua

SEQ ID NO: 1754734 - RNA, 19 nt, Artificial Sequence
  Description of Artificial Sequence: Synthetic oligonucleotide
  Antisense strand to SEQ ID NO: 1754733
uaaguuaaagagcauuucc

SEQ ID NO: 1754735 - RNA, 19 nt, Artificial Sequence
  Description of Artificial Sequence: Synthetic oligonucleotide
  Sense strand starting at position 1244 of SEQ ID NO: 1562540
uuuaacuuaccuugggaaa

SEQ ID NO: 1754736 - RNA, 19 nt, Artificial Sequence
  Description of Artificial Sequence: Synthetic oligonucleotide
  Antisense strand to SEQ ID NO: 1754735
uuucccaagguaaguuaaa

SEQ ID NO: 1754737 - RNA, 19 nt, Artificial Sequence
  Description of Artificial Sequence: Synthetic oligonucleotide
  Sense strand starting at position 1245 of SEQ ID NO: 1562540
uuaacuuaccuugggaaac

SEQ ID NO: 1754738 - RNA, 19 nt, Artificial Sequence
  Description of Artificial Sequence: Synthetic oligonucleotide
  Antisense strand to SEQ ID NO: 1754737
guuucccaagguaaguuaa

SEQ ID NO: 1754739 - RNA, 19 nt, Artificial Sequence
  Description of Artificial Sequence: Synthetic oligonucleotide
  Sense strand starting at position 1277 of SEQ ID NO: 1562540
ggcaacauuugcguaguga

SEQ ID NO: 1754740 - RNA, 19 nt, Artificial Sequence
  Description of Artificial Sequence: Synthetic oligonucleotide
  Antisense strand to SEQ ID NO: 1754739
ucacuacgcaaauguugcc

SEQ ID NO: 1754741 - RNA, 19 nt, Artificial Sequence
  Description of Artificial Sequence: Synthetic oligonucleotide
  Sense strand starting at position 1278 of SEQ ID NO: 1562540
gcaacauuugcguagugac

SEQ ID NO: 1754742 - RNA, 19 nt, Artificial Sequence
  Description of Artificial Sequence: Synthetic oligonucleotide
  Antisense strand to SEQ ID NO: 1754741
gucacuacgcaaauguugc

SEQ ID NO: 1754743 - RNA, 19 nt, Artificial Sequence
  Description of Artificial Sequence: Synthetic oligonucleotide
  Sense strand starting at position 1380 of SEQ ID NO: 1562540
ggccgaugugcagaaagaa

SEQ ID NO: 1754744 - RNA, 19 nt, Artificial Sequence
  Description of Artificial Sequence: Synthetic oligonucleotide
  Antisense strand to SEQ ID NO: 1754743
uucuuucugcacaucggcc

SEQ ID NO: 1754745 - RNA, 19 nt, Artificial Sequence
  Description of Artificial Sequence: Synthetic oligonucleotide
  Sense strand starting at position 1588 of SEQ ID NO: 1562540
gagccagagcuccauggaa

SEQ ID NO: 1754746 - RNA, 19 nt, Artificial Sequence
  Description of Artificial Sequence: Synthetic oligonucleotide
  Antisense strand to SEQ ID NO: 1754745
uuccauggagcucuggcuc

SEQ ID NO: 1754747 - RNA, 19 nt, Artificial Sequence
  Description of Artificial Sequence: Synthetic oligonucleotide
  Sense strand starting at position 1628 of SEQ ID NO: 1562540
ccaacaugucuuugggcaa

SEQ ID NO: 1754748 - RNA, 19 nt, Artificial Sequence
  Description of Artificial Sequence: Synthetic oligonucleotide
  Antisense strand to SEQ ID NO: 1754747
uugcccaaagacauguugg

SEQ ID NO: 1754749 - RNA, 19 nt, Artificial Sequence
  Description of Artificial Sequence: Synthetic oligonucleotide
  Sense strand starting at position 1834 of SEQ ID NO: 1562540
cuaucagcucgauacacuu

SEQ ID NO: 1754750 - RNA, 19 nt, Artificial Sequence
  Description of Artificial Sequence: Synthetic oligonucleotide
  Antisense strand to SEQ ID NO: 1754749
aaguguaucgagcugauag

SEQ ID NO: 1754751 - RNA, 19 nt, Artificial Sequence
  Description of Artificial Sequence: Synthetic oligonucleotide
  Sense strand starting at position 1840 of SEQ ID NO: 1562540
gcucgauacacuuaaagga

SEQ ID NO: 1754752 - RNA, 19 nt, Artificial Sequence
  Description of Artificial Sequence: Synthetic oligonucleotide
  Antisense strand to SEQ ID NO: 1754751
uccuuuaaguguaucgagc

SEQ ID NO: 1754753 - RNA, 19 nt, Artificial Sequence
  Description of Artificial Sequence: Synthetic oligonucleotide
  Sense strand starting at position 1886 of SEQ ID NO: 1562540
gucgaaguggacugggaaa

SEQ ID NO: 1754754 - RNA, 19 nt, Artificial Sequence
  Description of Artificial Sequence: Synthetic oligonucleotide
  Antisense strand to SEQ ID NO: 1754753
uuucccaguccacuucgac

SEQ ID NO: 1754755 - RNA, 19 nt, Artificial Sequence
  Description of Artificial Sequence: Synthetic oligonucleotide
  Sense strand starting at position 2399 of SEQ ID NO: 1562540
ccacaugcaccuuauugua

SEQ ID NO: 1754756 - RNA, 19 nt, Artificial Sequence
  Description of Artificial Sequence: Synthetic oligonucleotide
  Antisense strand to SEQ ID NO: 1754755
uacaauaaggugcaugugg

SEQ ID NO: 1754757 - RNA, 19 nt, Artificial Sequence
  Description of Artificial Sequence: Synthetic oligonucleotide
  Sense strand starting at position 2556 of SEQ ID NO: 1562540
gugacaaagccaugagcau

SEQ ID NO: 1754758 - RNA, 19 nt, Artificial Sequence
  Description of Artificial Sequence: Synthetic oligonucleotide
  Antisense strand to SEQ ID NO: 1754757
augcucauggcuuugucac

SEQ ID NO: 1754759 - RNA, 19 nt, Artificial Sequence
  Description of Artificial Sequence: Synthetic oligonucleotide
  Sense strand starting at position 2654 of SEQ ID NO: 1562540
gauguuugccuccaguaau

SEQ ID NO: 1754760 - RNA, 19 nt, Artificial Sequence
  Description of Artificial Sequence: Synthetic oligonucleotide
  Antisense strand to SEQ ID NO: 1754759
auuacuggaggcaaacauc

SEQ ID NO: 1754761 - RNA, 19 nt, Artificial Sequence
  Description of Artificial Sequence: Synthetic oligonucleotide
  Sense strand starting at position 2657 of SEQ ID NO: 1562540
guuugccuccaguaauuaa

SEQ ID NO: 1754762 - RNA, 19 nt, Artificial Sequence
  Description of Artificial Sequence: Synthetic oligonucleotide
  Antisense strand to SEQ ID NO: 1754761
uuaauuacuggaggcaaac

SEQ ID NO: 1754763 - RNA, 19 nt, Artificial Sequence
  Description of Artificial Sequence: Synthetic oligonucleotide
  Sense strand starting at position 2725 of SEQ ID NO: 1562540
uuaacuacuuggcuaggua

SEQ ID NO: 1754764 - RNA, 19 nt, Artificial Sequence
  Description of Artificial Sequence: Synthetic oligonucleotide
  Antisense strand to SEQ ID NO: 1754763
uaccuagccaaguaguuaa

SEQ ID NO: 1754765 - RNA, 19 nt, Artificial Sequence
  Description of Artificial Sequence: Synthetic oligonucleotide
  Sense strand starting at position 2726 of SEQ ID NO: 1562540
uaacuacuuggcuagguau

SEQ ID NO: 1754766 - RNA, 19 nt, Artificial Sequence
  Description of Artificial Sequence: Synthetic oligonucleotide
  Antisense strand to SEQ ID NO: 1754765
auaccuagccaaguaguua

SEQ ID NO: 1754767 - RNA, 19 nt, Artificial Sequence
  Description of Artificial Sequence: Synthetic oligonucleotide
  Sense strand starting at position 2737 of SEQ ID NO: 1562540
cuagguauuugagauccua

SEQ ID NO: 1754768 - RNA, 19 nt, Artificial Sequence
  Description of Artificial Sequence: Synthetic oligonucleotide
  Antisense strand to SEQ ID NO: 1754767
uaggaucucaaauaccuag

SEQ ID NO: 1754769 - RNA, 19 nt, Artificial Sequence
  Description of Artificial Sequence: Synthetic oligonucleotide
  Sense strand starting at position 2797 of SEQ ID NO: 1562540
ugcuaauaucaaugcaaug

SEQ ID NO: 1754770 - RNA, 19 nt, Artificial Sequence
  Description of Artificial Sequence: Synthetic oligonucleotide
  Antisense strand to SEQ ID NO: 1754769
cauugcauugauauuagca

SEQ ID NO: 1754771 - RNA, 19 nt, Artificial Sequence
  Description of Artificial Sequence: Synthetic oligonucleotide
  Sense strand starting at position 2932 of SEQ ID NO: 1562540
cuuggagugccaugaaacu

SEQ ID NO: 1754772 - RNA, 19 nt, Artificial Sequence
  Description of Artificial Sequence: Synthetic oligonucleotide
  Antisense strand to SEQ ID NO: 1754771
aguuucauggcacuccaag

SEQ ID NO: 1754773 - RNA, 19 nt, Artificial Sequence
  Description of Artificial Sequence: Synthetic oligonucleotide
  Sense strand starting at position 2988 of SEQ ID NO: 1562540
agagaagucucagcccaaa

SEQ ID NO: 1754774 - RNA, 19 nt, Artificial Sequence
  Description of Artificial Sequence: Synthetic oligonucleotide
  Antisense strand to SEQ ID NO: 1754773
uuugggcugagacuucucu

SEQ ID NO: 1754775 - RNA, 19 nt, Artificial Sequence
  Description of Artificial Sequence: Synthetic oligonucleotide
  Sense strand starting at position 3115 of SEQ ID NO: 1562540
gugcuauggguugaauagu

SEQ ID NO: 1754776 - RNA, 19 nt, Artificial Sequence
  Description of Artificial Sequence: Synthetic oligonucleotide
  Antisense strand to SEQ ID NO: 1754775
acuauucaacccauagcac

SEQ ID NO: 1754777 - RNA, 19 nt, Artificial Sequence
  Description of Artificial Sequence: Synthetic oligonucleotide
  Sense strand starting at position 3213 of SEQ ID NO: 1562540
uuuacagagucaucuaguu

SEQ ID NO: 1754778 - RNA, 19 nt, Artificial Sequence
  Description of Artificial Sequence: Synthetic oligonucleotide
  Antisense strand to SEQ ID NO: 1754777
aacuagaugacucuguaaa

SEQ ID NO: 1754779 - RNA, 19 nt, Artificial Sequence
  Description of Artificial Sequence: Synthetic oligonucleotide
  Sense strand starting at position 3722 of SEQ ID NO: 1562540
ugccaaagauuauuggcaa

SEQ ID NO: 1754780 - RNA, 19 nt, Artificial Sequence
  Description of Artificial Sequence: Synthetic oligonucleotide
  Antisense strand to SEQ ID NO: 1754779
uugccaauaaucuuuggca

SEQ ID NO: 1754781 - RNA, 19 nt, Artificial Sequence
  Description of Artificial Sequence: Synthetic oligonucleotide
  Sense strand starting at position 3779 of SEQ ID NO: 1562540
auggguuuaagagggagua

SEQ ID NO: 1754782 - RNA, 19 nt, Artificial Sequence
  Description of Artificial Sequence: Synthetic oligonucleotide
  Antisense strand to SEQ ID NO: 1754781
uacucccucuuaaacccau

SEQ ID NO: 1754783 - RNA, 19 nt, Artificial Sequence
  Description of Artificial Sequence: Synthetic oligonucleotide
  Sense strand starting at position 3780 of SEQ ID NO: 1562540
uggguuuaagagggaguau

SEQ ID NO: 1754784 - RNA, 19 nt, Artificial Sequence
  Description of Artificial Sequence: Synthetic oligonucleotide
  Antisense strand to SEQ ID NO: 1754783
auacucccucuuaaaccca

SEQ ID NO: 1754785 - RNA, 19 nt, Artificial Sequence
  Description of Artificial Sequence: Synthetic oligonucleotide
  Sense strand starting at position 3804 of SEQ ID NO: 1562540
ugaugacaccuuggaauuc

SEQ ID NO: 1754786 - RNA, 19 nt, Artificial Sequence
  Description of Artificial Sequence: Synthetic oligonucleotide
  Antisense strand to SEQ ID NO: 1754785
gaauuccaaggugucauca

SEQ ID NO: 1754787 - RNA, 19 nt, Artificial Sequence
  Description of Artificial Sequence: Synthetic oligonucleotide
  Sense strand starting at position 134 of SEQ ID NO: 1562541
augucacacguuuacauau

SEQ ID NO: 1754788 - RNA, 19 nt, Artificial Sequence
  Description of Artificial Sequence: Synthetic oligonucleotide
  Antisense strand to SEQ ID NO: 1754787
auauguaaacgugugacau

SEQ ID NO: 1754789 - RNA, 19 nt, Artificial Sequence
  Description of Artificial Sequence: Synthetic oligonucleotide
  Sense strand starting at position 314 of SEQ ID NO: 1562541
agcagagacuaucucucua

SEQ ID NO: 1754790 - RNA, 19 nt, Artificial Sequence
  Description of Artificial Sequence: Synthetic oligonucleotide
  Antisense strand to SEQ ID NO: 1754789
uagagagauagucucugcu

SEQ ID NO: 1754791 - RNA, 19 nt, Artificial Sequence
  Description of Artificial Sequence: Synthetic oligonucleotide
  Sense strand starting at position 319 of SEQ ID NO: 1562541
agacuaucucucuaguuau

SEQ ID NO: 1754792 - RNA, 19 nt, Artificial Sequence
  Description of Artificial Sequence: Synthetic oligonucleotide
  Antisense strand to SEQ ID NO: 1754791
auaacuagagagauagucu

SEQ ID NO: 1754793 - RNA, 19 nt, Artificial Sequence
  Description of Artificial Sequence: Synthetic oligonucleotide
  Sense strand starting at position 406 of SEQ ID NO: 1562541
gcuuccuuuguggguuaca

SEQ ID NO: 1754794 - RNA, 19 nt, Artificial Sequence
  Description of Artificial Sequence: Synthetic oligonucleotide
  Antisense strand to SEQ ID NO: 1754793
uguaacccacaaaggaagc

SEQ ID NO: 1754795 - RNA, 19 nt, Artificial Sequence
  Description of Artificial Sequence: Synthetic oligonucleotide
  Sense strand starting at position 411 of SEQ ID NO: 1562541
cuuuguggguuacagagaa

SEQ ID NO: 1754796 - RNA, 19 nt, Artificial Sequence
  Description of Artificial Sequence: Synthetic oligonucleotide
  Antisense strand to SEQ ID NO: 1754795
uucucuguaacccacaaag

SEQ ID NO: 1754797 - RNA, 19 nt, Artificial Sequence
  Description of Artificial Sequence: Synthetic oligonucleotide
  Sense strand starting at position 444 of SEQ ID NO: 1562541
aguuaugcucucugaauaa

SEQ ID NO: 1754798 - RNA, 19 nt, Artificial Sequence
  Description of Artificial Sequence: Synthetic oligonucleotide
  Antisense strand to SEQ ID NO: 1754797
uuauucagagagcauaacu

SEQ ID NO: 1754799 - RNA, 19 nt, Artificial Sequence
  Description of Artificial Sequence: Synthetic oligonucleotide
  Sense strand starting at position 532 of SEQ ID NO: 1562541
gggcauaacucauugacuc

SEQ ID NO: 1754800 - RNA, 19 nt, Artificial Sequence
  Description of Artificial Sequence: Synthetic oligonucleotide
  Antisense strand to SEQ ID NO: 1754799
gagucaaugaguuaugccc

SEQ ID NO: 1754801 - RNA, 19 nt, Artificial Sequence
  Description of Artificial Sequence: Synthetic oligonucleotide
  Sense strand starting at position 533 of SEQ ID NO: 1562541
ggcauaacucauugacuca

SEQ ID NO: 1754802 - RNA, 19 nt, Artificial Sequence
  Description of Artificial Sequence: Synthetic oligonucleotide
  Antisense strand to SEQ ID NO: 1754801
ugagucaaugaguuaugcc

SEQ ID NO: 1754803 - RNA, 19 nt, Artificial Sequence
  Description of Artificial Sequence: Synthetic oligonucleotide
  Sense strand starting at position 606 of SEQ ID NO: 1562541
cucauauucucgcuagaaa

SEQ ID NO: 1754804 - RNA, 19 nt, Artificial Sequence
  Description of Artificial Sequence: Synthetic oligonucleotide
  Antisense strand to SEQ ID NO: 1754803
uuucuagcgagaauaugag

SEQ ID NO: 1754805 - RNA, 19 nt, Artificial Sequence
  Description of Artificial Sequence: Synthetic oligonucleotide
  Sense strand starting at position 664 of SEQ ID NO: 1562541
uguuuaaggcaaugaauau

SEQ ID NO: 1754806 - RNA, 19 nt, Artificial Sequence
  Description of Artificial Sequence: Synthetic oligonucleotide
  Antisense strand to SEQ ID NO: 1754805
auauucauugccuuaaaca

SEQ ID NO: 1754807 - RNA, 19 nt, Artificial Sequence
  Description of Artificial Sequence: Synthetic oligonucleotide
  Sense strand starting at position 671 of SEQ ID NO: 1562541
ggcaaugaauaugcuaauu

SEQ ID NO: 1754808 - RNA, 19 nt, Artificial Sequence
  Description of Artificial Sequence: Synthetic oligonucleotide
  Antisense strand to SEQ ID NO: 1754807
aauuagcauauucauugcc

SEQ ID NO: 1754809 - RNA, 19 nt, Artificial Sequence
  Description of Artificial Sequence: Synthetic oligonucleotide
  Sense strand starting at position 909 of SEQ ID NO: 1562541
uggucaucaucacuaucua

SEQ ID NO: 1754810 - RNA, 19 nt, Artificial Sequence
  Description of Artificial Sequence: Synthetic oligonucleotide
  Antisense strand to SEQ ID NO: 1754809
uagauagugaugaugacca

SEQ ID NO: 1754811 - RNA, 19 nt, Artificial Sequence
  Description of Artificial Sequence: Synthetic oligonucleotide
  Sense strand starting at position 910 of SEQ ID NO: 1562541
ggucaucaucacuaucuau

SEQ ID NO: 1754812 - RNA, 19 nt, Artificial Sequence
  Description of Artificial Sequence: Synthetic oligonucleotide
  Antisense strand to SEQ ID NO: 1754811
auagauagugaugaugacc

SEQ ID NO: 1754813 - RNA, 19 nt, Artificial Sequence
  Description of Artificial Sequence: Synthetic oligonucleotide
  Sense strand starting at position 2380 of SEQ ID NO: 1562541
cgccauugcucgcggguua

SEQ ID NO: 1754814 - RNA, 19 nt, Artificial Sequence
  Description of Artificial Sequence: Synthetic oligonucleotide
  Antisense strand to SEQ ID NO: 1754813
uaacccgcgagcaauggcg

SEQ ID NO: 1754815 - RNA, 19 nt, Artificial Sequence
  Description of Artificial Sequence: Synthetic oligonucleotide
  Sense strand starting at position 2405 of SEQ ID NO: 1562541
agcugugcgugcucaggaa

SEQ ID NO: 1754816 - RNA, 19 nt, Artificial Sequence
  Description of Artificial Sequence: Synthetic oligonucleotide
  Antisense strand to SEQ ID NO: 1754815
uuccugagcacgcacagcu

SEQ ID NO: 1754817 - RNA, 19 nt, Artificial Sequence
  Description of Artificial Sequence: Synthetic oligonucleotide
  Sense strand starting at position 2555 of SEQ ID NO: 1562541
ucaccuaaacccgagaguu

SEQ ID NO: 1754818 - RNA, 19 nt, Artificial Sequence
  Description of Artificial Sequence: Synthetic oligonucleotide
  Antisense strand to SEQ ID NO: 1754817
aacucucggguuuagguga

SEQ ID NO: 1754819 - RNA, 19 nt, Artificial Sequence
  Description of Artificial Sequence: Synthetic oligonucleotide
  Sense strand starting at position 3137 of SEQ ID NO: 1562541
agcaauuagugaguacuuu

SEQ ID NO: 1754820 - RNA, 19 nt, Artificial Sequence
  Description of Artificial Sequence: Synthetic oligonucleotide
  Antisense strand to SEQ ID NO: 1754819
aaaguacucacuaauugcu

SEQ ID NO: 1754821 - RNA, 19 nt, Artificial Sequence
  Description of Artificial Sequence: Synthetic oligonucleotide
  Sense strand starting at position 3174 of SEQ ID NO: 1562541
gggaauaaauguuuguaaa

SEQ ID NO: 1754822 - RNA, 19 nt, Artificial Sequence
  Description of Artificial Sequence: Synthetic oligonucleotide
  Antisense strand to SEQ ID NO: 1754821
uuuacaaacauuuauuccc

SEQ ID NO: 1754823 - RNA, 19 nt, Artificial Sequence
  Description of Artificial Sequence: Synthetic oligonucleotide
  Sense strand starting at position 3198 of SEQ ID NO: 1562541
aauguucuacgcuagaaau

SEQ ID NO: 1754824 - RNA, 19 nt, Artificial Sequence
  Description of Artificial Sequence: Synthetic oligonucleotide
  Antisense strand to SEQ ID NO: 1754823
auuucuagcguagaacauu

SEQ ID NO: 1754825 - RNA, 19 nt, Artificial Sequence
  Description of Artificial Sequence: Synthetic oligonucleotide
  Sense strand starting at position 3200 of SEQ ID NO: 1562541
uguucuacgcuagaaauca

SEQ ID NO: 1754826 - RNA, 19 nt, Artificial Sequence
  Description of Artificial Sequence: Synthetic oligonucleotide
  Antisense strand to SEQ ID NO: 1754825
ugauuucuagcguagaaca

SEQ ID NO: 1754827 - RNA, 19 nt, Artificial Sequence
  Description of Artificial Sequence: Synthetic oligonucleotide
  Sense strand starting at position 3286 of SEQ ID NO: 1562541
uucugaucucucugaaaug

SEQ ID NO: 1754828 - RNA, 19 nt, Artificial Sequence
  Description of Artificial Sequence: Synthetic oligonucleotide
  Antisense strand to SEQ ID NO: 1754827
cauuucagagagaucagaa

SEQ ID NO: 1754829 - RNA, 19 nt, Artificial Sequence
  Description of Artificial Sequence: Synthetic oligonucleotide
  Sense strand starting at position 3287 of SEQ ID NO: 1562541
ucugaucucucugaaaugu

SEQ ID NO: 1754830 - RNA, 19 nt, Artificial Sequence
  Description of Artificial Sequence: Synthetic oligonucleotide
  Antisense strand to SEQ ID NO: 1754829
acauuucagagagaucaga

SEQ ID NO: 1754831 - RNA, 19 nt, Artificial Sequence
  Description of Artificial Sequence: Synthetic oligonucleotide
  Sense strand starting at position 3349 of SEQ ID NO: 1562541
uuccuucuagccuguguaa

SEQ ID NO: 1754832 - RNA, 19 nt, Artificial Sequence
  Description of Artificial Sequence: Synthetic oligonucleotide
  Antisense strand to SEQ ID NO: 1754831
uuacacaggcuagaaggaa

SEQ ID NO: 1754833 - RNA, 19 nt, Artificial Sequence
  Description of Artificial Sequence: Synthetic oligonucleotide
  Sense strand starting at position 3351 of SEQ ID NO: 1562541
ccuucuagccuguguaaua

SEQ ID NO: 1754834 - RNA, 19 nt, Artificial Sequence
  Description of Artificial Sequence: Synthetic oligonucleotide
  Antisense strand to SEQ ID NO: 1754833
uauuacacaggcuagaagg

SEQ ID NO: 1754835 - RNA, 19 nt, Artificial Sequence
  Description of Artificial Sequence: Synthetic oligonucleotide
  Sense strand starting at position 3352 of SEQ ID NO: 1562541
cuucuagccuguguaauaa

SEQ ID NO: 1754836 - RNA, 19 nt, Artificial Sequence
  Description of Artificial Sequence: Synthetic oligonucleotide
  Antisense strand to SEQ ID NO: 1754835
uuauuacacaggcuagaag

SEQ ID NO: 1754837 - RNA, 19 nt, Artificial Sequence
  Description of Artificial Sequence: Synthetic oligonucleotide
  Sense strand starting at position 3364 of SEQ ID NO: 1562541
guaauaaucucauaaucgc

SEQ ID NO: 1754838 - RNA, 19 nt, Artificial Sequence
  Description of Artificial Sequence: Synthetic oligonucleotide
  Antisense strand to SEQ ID NO: 1754837
gcgauuaugagauuauuac

SEQ ID NO: 1754839 - RNA, 19 nt, Artificial Sequence
  Description of Artificial Sequence: Synthetic oligonucleotide
  Sense strand starting at position 3447 of SEQ ID NO: 1562541
cugcuacugcuuuguguga

SEQ ID NO: 1754840 - RNA, 19 nt, Artificial Sequence
  Description of Artificial Sequence: Synthetic oligonucleotide
  Antisense strand to SEQ ID NO: 1754839
ucacacaaagcaguagcag

SEQ ID NO: 1754841 - RNA, 19 nt, Artificial Sequence
  Description of Artificial Sequence: Synthetic oligonucleotide
  Sense strand starting at position 3448 of SEQ ID NO: 1562541
ugcuacugcuuugugugaa

SEQ ID NO: 1754842 - RNA, 19 nt, Artificial Sequence
  Description of Artificial Sequence: Synthetic oligonucleotide
  Antisense strand to SEQ ID NO: 1754841
uucacacaaagcaguagca

SEQ ID NO: 1754843 - RNA, 19 nt, Artificial Sequence
  Description of Artificial Sequence: Synthetic oligonucleotide
  Sense strand starting at position 3449 of SEQ ID NO: 1562541
gcuacugcuuugugugaaa

SEQ ID NO: 1754844 - RNA, 19 nt, Artificial Sequence
  Description of Artificial Sequence: Synthetic oligonucleotide
  Antisense strand to SEQ ID NO: 1754843
uuucacacaaagcaguagc

SEQ ID NO: 1754845 - RNA, 19 nt, Artificial Sequence
  Description of Artificial Sequence: Synthetic oligonucleotide
  Sense strand starting at position 3451 of SEQ ID NO: 1562541
uacugcuuugugugaaauu

SEQ ID NO: 1754846 - RNA, 19 nt, Artificial Sequence
  Description of Artificial Sequence: Synthetic oligonucleotide
  Antisense strand to SEQ ID NO: 1754845
aauuucacacaaagcagua

SEQ ID NO: 1754847 - RNA, 19 nt, Artificial Sequence
  Description of Artificial Sequence: Synthetic oligonucleotide
  Sense strand starting at position 3452 of SEQ ID NO: 1562541
acugcuuugugugaaauuc

SEQ ID NO: 1754848 - RNA, 19 nt, Artificial Sequence
  Description of Artificial Sequence: Synthetic oligonucleotide
  Antisense strand to SEQ ID NO: 1754847
gaauuucacacaaagcagu

SEQ ID NO: 1754849 - RNA, 19 nt, Artificial Sequence
  Description of Artificial Sequence: Synthetic oligonucleotide
  Sense strand starting at position 3505 of SEQ ID NO: 1562541
ggcucccucucuuaggaua

SEQ ID NO: 1754850 - RNA, 19 nt, Artificial Sequence
  Description of Artificial Sequence: Synthetic oligonucleotide
  Antisense strand to SEQ ID NO: 1754849
uauccuaagagagggagcc

SEQ ID NO: 1754851 - RNA, 19 nt, Artificial Sequence
  Description of Artificial Sequence: Synthetic oligonucleotide
  Sense strand starting at position 3599 of SEQ ID NO: 1562541
ccaagcacuuggcuagaua

SEQ ID NO: 1754852 - RNA, 19 nt, Artificial Sequence
  Description of Artificial Sequence: Synthetic oligonucleotide
  Antisense strand to SEQ ID NO: 1754851
uaucuagccaagugcuugg

SEQ ID NO: 1754853 - RNA, 19 nt, Artificial Sequence
  Description of Artificial Sequence: Synthetic oligonucleotide
  Sense strand starting at position 3602 of SEQ ID NO: 1562541
agcacuuggcuagauaaua

SEQ ID NO: 1754854 - RNA, 19 nt, Artificial Sequence
  Description of Artificial Sequence: Synthetic oligonucleotide
  Antisense strand to SEQ ID NO: 1754853
uauuaucuagccaagugcu

SEQ ID NO: 1754855 - RNA, 19 nt, Artificial Sequence
  Description of Artificial Sequence: Synthetic oligonucleotide
  Sense strand starting at position 3738 of SEQ ID NO: 1562541
caguauguauccuagagaa

SEQ ID NO: 1754856 - RNA, 19 nt, Artificial Sequence
  Description of Artificial Sequence: Synthetic oligonucleotide
  Antisense strand to SEQ ID NO: 1754855
uucucuaggauacauacug

SEQ ID NO: 1754857 - RNA, 19 nt, Artificial Sequence
  Description of Artificial Sequence: Synthetic oligonucleotide
  Sense strand starting at position 3793 of SEQ ID NO: 1562541
cacuguuuccaauagcgaa

SEQ ID NO: 1754858 - RNA, 19 nt, Artificial Sequence
  Description of Artificial Sequence: Synthetic oligonucleotide
  Antisense strand to SEQ ID NO: 1754857
uucgcuauuggaaacagug

SEQ ID NO: 1754859 - RNA, 19 nt, Artificial Sequence
  Description of Artificial Sequence: Synthetic oligonucleotide
  Sense strand starting at position 110 of SEQ ID NO: 1562542
uuaguuaugguugaaucca

SEQ ID NO: 1754860 - RNA, 19 nt, Artificial Sequence
  Description of Artificial Sequence: Synthetic oligonucleotide
  Antisense strand to SEQ ID NO: 1754859
uggauucaaccauaacuaa

SEQ ID NO: 1754861 - RNA, 19 nt, Artificial Sequence
  Description of Artificial Sequence: Synthetic oligonucleotide
  Sense strand starting at position 118 of SEQ ID NO: 1562542
gguugaauccaauagagcu

SEQ ID NO: 1754862 - RNA, 19 nt, Artificial Sequence
  Description of Artificial Sequence: Synthetic oligonucleotide
  Antisense strand to SEQ ID NO: 1754861
agcucuauuggauucaacc

SEQ ID NO: 1754863 - RNA, 19 nt, Artificial Sequence
  Description of Artificial Sequence: Synthetic oligonucleotide
  Sense strand starting at position 226 of SEQ ID NO: 1562542
aaauuagauguguggaugu

SEQ ID NO: 1754864 - RNA, 19 nt, Artificial Sequence
  Description of Artificial Sequence: Synthetic oligonucleotide
  Antisense strand to SEQ ID NO: 1754863
acauccacacaucuaauuu

SEQ ID NO: 1754865 - RNA, 19 nt, Artificial Sequence
  Description of Artificial Sequence: Synthetic oligonucleotide
  Sense strand starting at position 256 of SEQ ID NO: 1562542
augaauguguauccagcau

SEQ ID NO: 1754866 - RNA, 19 nt, Artificial Sequence
  Description of Artificial Sequence: Synthetic oligonucleotide
  Antisense strand to SEQ ID NO: 1754865
augcuggauacacauucau

SEQ ID NO: 1754867 - RNA, 19 nt, Artificial Sequence
  Description of Artificial Sequence: Synthetic oligonucleotide
  Sense strand starting at position 360 of SEQ ID NO: 1562542
uucccugagcacugggaaa

SEQ ID NO: 1754868 - RNA, 19 nt, Artificial Sequence
  Description of Artificial Sequence: Synthetic oligonucleotide
  Antisense strand to SEQ ID NO: 1754867
uuucccagugcucagggaa

SEQ ID NO: 1754869 - RNA, 19 nt, Artificial Sequence
  Description of Artificial Sequence: Synthetic oligonucleotide
  Sense strand starting at position 562 of SEQ ID NO: 1562542
ucuaucaucucgucuaggu

SEQ ID NO: 1754870 - RNA, 19 nt, Artificial Sequence
  Description of Artificial Sequence: Synthetic oligonucleotide
  Antisense strand to SEQ ID NO: 1754869
accuagacgagaugauaga

SEQ ID NO: 1754871 - RNA, 19 nt, Artificial Sequence
  Description of Artificial Sequence: Synthetic oligonucleotide
  Sense strand starting at position 571 of SEQ ID NO: 1562542
ucgucuaggucucuguaga

SEQ ID NO: 1754872 - RNA, 19 nt, Artificial Sequence
  Description of Artificial Sequence: Synthetic oligonucleotide
  Antisense strand to SEQ ID NO: 1754871
ucuacagagaccuagacga

SEQ ID NO: 1754873 - RNA, 19 nt, Artificial Sequence
  Description of Artificial Sequence: Synthetic oligonucleotide
  Sense strand starting at position 572 of SEQ ID NO: 1562542
cgucuaggucucuguagaa

SEQ ID NO: 1754874 - RNA, 19 nt, Artificial Sequence
  Description of Artificial Sequence: Synthetic oligonucleotide
  Antisense strand to SEQ ID NO: 1754873
uucuacagagaccuagacg

SEQ ID NO: 1754875 - RNA, 19 nt, Artificial Sequence
  Description of Artificial Sequence: Synthetic oligonucleotide
  Sense strand starting at position 696 of SEQ ID NO: 1562542
acaguuucucagggaucua

SEQ ID NO: 1754876 - RNA, 19 nt, Artificial Sequence
  Description of Artificial Sequence: Synthetic oligonucleotide
  Antisense strand to SEQ ID NO: 1754875
uagaucccugagaaacugu

SEQ ID NO: 1754877 - RNA, 19 nt, Artificial Sequence
  Description of Artificial Sequence: Synthetic oligonucleotide
  Sense strand starting at position 766 of SEQ ID NO: 1562542
aggaguucucacgacauac

SEQ ID NO: 1754878 - RNA, 19 nt, Artificial Sequence
  Description of Artificial Sequence: Synthetic oligonucleotide
  Antisense strand to SEQ ID NO: 1754877
guaugucgugagaacuccu

SEQ ID NO: 1754879 - RNA, 19 nt, Artificial Sequence
  Description of Artificial Sequence: Synthetic oligonucleotide
  Sense strand starting at position 817 of SEQ ID NO: 1562542
aacagagagugcuuccuuu

SEQ ID NO: 1754880 - RNA, 19 nt, Artificial Sequence
  Description of Artificial Sequence: Synthetic oligonucleotide
  Antisense strand to SEQ ID NO: 1754879
aaaggaagcacucucuguu

SEQ ID NO: 1754881 - RNA, 19 nt, Artificial Sequence
  Description of Artificial Sequence: Synthetic oligonucleotide
  Sense strand starting at position 821 of SEQ ID NO: 1562542
gagagugcuuccuuuccaa

SEQ ID NO: 1754882 - RNA, 19 nt, Artificial Sequence
  Description of Artificial Sequence: Synthetic oligonucleotide
  Antisense strand to SEQ ID NO: 1754881
uuggaaaggaagcacucuc

SEQ ID NO: 1754883 - RNA, 19 nt, Artificial Sequence
  Description of Artificial Sequence: Synthetic oligonucleotide
  Sense strand starting at position 912 of SEQ ID NO: 1562542
aucguaacagucugaaaca

SEQ ID NO: 1754884 - RNA, 19 nt, Artificial Sequence
  Description of Artificial Sequence: Synthetic oligonucleotide
  Antisense strand to SEQ ID NO: 1754883
uguuucagacuguuacgau

SEQ ID NO: 1754885 - RNA, 19 nt, Artificial Sequence
  Description of Artificial Sequence: Synthetic oligonucleotide
  Sense strand starting at position 1070 of SEQ ID NO: 1562542
uccuuuguguaugcauuaa

SEQ ID NO: 1754886 - RNA, 19 nt, Artificial Sequence
  Description of Artificial Sequence: Synthetic oligonucleotide
  Antisense strand to SEQ ID NO: 1754885
uuaaugcauacacaaagga

SEQ ID NO: 1754887 - RNA, 19 nt, Artificial Sequence
  Description of Artificial Sequence: Synthetic oligonucleotide
  Sense strand starting at position 1074 of SEQ ID NO: 1562542
uuguguaugcauuaaagga

SEQ ID NO: 1754888 - RNA, 19 nt, Artificial Sequence
  Description of Artificial Sequence: Synthetic oligonucleotide
  Antisense strand to SEQ ID NO: 1754887
uccuuuaaugcauacacaa

SEQ ID NO: 1754889 - RNA, 19 nt, Artificial Sequence
  Description of Artificial Sequence: Synthetic oligonucleotide
  Sense strand starting at position 2477 of SEQ ID NO: 1562542
ggcauuucggaaugccaca

SEQ ID NO: 1754890 - RNA, 19 nt, Artificial Sequence
  Description of Artificial Sequence: Synthetic oligonucleotide
  Antisense strand to SEQ ID NO: 1754889
uguggcauuccgaaaugcc

SEQ ID NO: 1754891 - RNA, 19 nt, Artificial Sequence
  Description of Artificial Sequence: Synthetic oligonucleotide
  Sense strand starting at position 2775 of SEQ ID NO: 1562542
ucgggaucucacuauguuu

SEQ ID NO: 1754892 - RNA, 19 nt, Artificial Sequence
  Description of Artificial Sequence: Synthetic oligonucleotide
  Antisense strand to SEQ ID NO: 1754891
aaacauagugagaucccga

SEQ ID NO: 1754893 - RNA, 19 nt, Artificial Sequence
  Description of Artificial Sequence: Synthetic oligonucleotide
  Sense strand starting at position 2935 of SEQ ID NO: 1562542
ucuagaguuuagucaaaug

SEQ ID NO: 1754894 - RNA, 19 nt, Artificial Sequence
  Description of Artificial Sequence: Synthetic oligonucleotide
  Antisense strand to SEQ ID NO: 1754893
cauuugacuaaacucuaga

SEQ ID NO: 1754895 - RNA, 19 nt, Artificial Sequence
  Description of Artificial Sequence: Synthetic oligonucleotide
  Sense strand starting at position 2940 of SEQ ID NO: 1562542
aguuuagucaaaugcgaag

SEQ ID NO: 1754896 - RNA, 19 nt, Artificial Sequence
  Description of Artificial Sequence: Synthetic oligonucleotide
  Antisense strand to SEQ ID NO: 1754895
cuucgcauuugacuaaacu

SEQ ID NO: 1754897 - RNA, 19 nt, Artificial Sequence
  Description of Artificial Sequence: Synthetic oligonucleotide
  Sense strand starting at position 2997 of SEQ ID NO: 1562542
aguguucucaaacguagaa

SEQ ID NO: 1754898 - RNA, 19 nt, Artificial Sequence
  Description of Artificial Sequence: Synthetic oligonucleotide
  Antisense strand to SEQ ID NO: 1754897
uucuacguuugagaacacu

SEQ ID NO: 1754899 - RNA, 19 nt, Artificial Sequence
  Description of Artificial Sequence: Synthetic oligonucleotide
  Sense strand starting at position 3045 of SEQ ID NO: 1562542
cgggaagccuaaccgaauu

SEQ ID NO: 1754900 - RNA, 19 nt, Artificial Sequence
  Description of Artificial Sequence: Synthetic oligonucleotide
  Antisense strand to SEQ ID NO: 1754899
aauucgguuaggcuucccg

SEQ ID NO: 1754901 - RNA, 19 nt, Artificial Sequence
  Description of Artificial Sequence: Synthetic oligonucleotide
  Sense strand starting at position 3076 of SEQ ID NO: 1562542
cuguauaaggccuaaugca

SEQ ID NO: 1754902 - RNA, 19 nt, Artificial Sequence
  Description of Artificial Sequence: Synthetic oligonucleotide
  Antisense strand to SEQ ID NO: 1754901
ugcauuaggccuuauacag

SEQ ID NO: 1754903 - RNA, 19 nt, Artificial Sequence
  Description of Artificial Sequence: Synthetic oligonucleotide
  Sense strand starting at position 3098 of SEQ ID NO: 1562542
uuacaacagucuguuuagu

SEQ ID NO: 1754904 - RNA, 19 nt, Artificial Sequence
  Description of Artificial Sequence: Synthetic oligonucleotide
  Antisense strand to SEQ ID NO: 1754903
acuaaacagacuguuguaa

SEQ ID NO: 1754905 - RNA, 19 nt, Artificial Sequence
  Description of Artificial Sequence: Synthetic oligonucleotide
  Sense strand starting at position 3174 of SEQ ID NO: 1562542
ugcugucuggucuaaguca

SEQ ID NO: 1754906 - RNA, 19 nt, Artificial Sequence
  Description of Artificial Sequence: Synthetic oligonucleotide
  Antisense strand to SEQ ID NO: 1754905
ugacuuagaccagacagca

SEQ ID NO: 1754907 - RNA, 19 nt, Artificial Sequence
  Description of Artificial Sequence: Synthetic oligonucleotide
  Sense strand starting at position 3206 of SEQ ID NO: 1562542
ggagacagcuaaucuguaa

SEQ ID NO: 1754908 - RNA, 19 nt, Artificial Sequence
  Description of Artificial Sequence: Synthetic oligonucleotide
  Antisense strand to SEQ ID NO: 1754907
uuacagauuagcugucucc

SEQ ID NO: 1754909 - RNA, 19 nt, Artificial Sequence
  Description of Artificial Sequence: Synthetic oligonucleotide
  Sense strand starting at position 3256 of SEQ ID NO: 1562542
ggucuuucuuagucauuaa

SEQ ID NO: 1754910 - RNA, 19 nt, Artificial Sequence
  Description of Artificial Sequence: Synthetic oligonucleotide
  Antisense strand to SEQ ID NO: 1754909
uuaaugacuaagaaagacc

SEQ ID NO: 1754911 - RNA, 19 nt, Artificial Sequence
  Description of Artificial Sequence: Synthetic oligonucleotide
  Sense strand starting at position 3482 of SEQ ID NO: 1562542
gacggucacaucuagggau

SEQ ID NO: 1754912 - RNA, 19 nt, Artificial Sequence
  Description of Artificial Sequence: Synthetic oligonucleotide
  Antisense strand to SEQ ID NO: 1754911
aucccuagaugugaccguc

SEQ ID NO: 1754913 - RNA, 19 nt, Artificial Sequence
  Description of Artificial Sequence: Synthetic oligonucleotide
  Sense strand starting at position 3484 of SEQ ID NO: 1562542
cggucacaucuagggauga

SEQ ID NO: 1754914 - RNA, 19 nt, Artificial Sequence
  Description of Artificial Sequence: Synthetic oligonucleotide
  Antisense strand to SEQ ID NO: 1754913
ucaucccuagaugugaccg

SEQ ID NO: 1754915 - RNA, 19 nt, Artificial Sequence
  Description of Artificial Sequence: Synthetic oligonucleotide
  Sense strand starting at position 3514 of SEQ ID NO: 1562542
gacacaucauuagggauga

SEQ ID NO: 1754916 - RNA, 19 nt, Artificial Sequence
  Description of Artificial Sequence: Synthetic oligonucleotide
  Antisense strand to SEQ ID NO: 1754915
ucaucccuaaugauguguc

SEQ ID NO: 1754917 - RNA, 19 nt, Artificial Sequence
  Description of Artificial Sequence: Synthetic oligonucleotide
  Sense strand starting at position 3527 of SEQ ID NO: 1562542
ggaugagauucucauaagg

SEQ ID NO: 1754918 - RNA, 19 nt, Artificial Sequence
  Description of Artificial Sequence: Synthetic oligonucleotide
  Antisense strand to SEQ ID NO: 1754917
ccuuaugagaaucucaucc

SEQ ID NO: 1754919 - RNA, 19 nt, Artificial Sequence
  Description of Artificial Sequence: Synthetic oligonucleotide
  Sense strand starting at position 3798 of SEQ ID NO: 1562542
agacacuugugcucaagaa

SEQ ID NO: 1754920 - RNA, 19 nt, Artificial Sequence
  Description of Artificial Sequence: Synthetic oligonucleotide
  Antisense strand to SEQ ID NO: 1754919
uucuugagcacaagugucu

SEQ ID NO: 1754921 - RNA, 19 nt, Artificial Sequence
  Description of Artificial Sequence: Synthetic oligonucleotide
  Sense strand starting at position 3799 of SEQ ID NO: 1562542
gacacuugugcucaagaac

SEQ ID NO: 1754922 - RNA, 19 nt, Artificial Sequence
  Description of Artificial Sequence: Synthetic oligonucleotide
  Antisense strand to SEQ ID NO: 1754921
guucuugagcacaaguguc

SEQ ID NO: 1754923 - RNA, 19 nt, Artificial Sequence
  Description of Artificial Sequence: Synthetic oligonucleotide
  Sense strand starting at position 3802 of SEQ ID NO: 1562542
acuugugcucaagaacaag

SEQ ID NO: 1754924 - RNA, 19 nt, Artificial Sequence
  Description of Artificial Sequence: Synthetic oligonucleotide
  Antisense strand to SEQ ID NO: 1754923
cuuguucuugagcacaagu

SEQ ID NO: 1754925 - RNA, 19 nt, Artificial Sequence
  Description of Artificial Sequence: Synthetic oligonucleotide
  Sense strand starting at position 3828 of SEQ ID NO: 1562542
agcauuaaacuguaaucga

SEQ ID NO: 1754926 - RNA, 19 nt, Artificial Sequence
  Description of Artificial Sequence: Synthetic oligonucleotide
  Antisense strand to SEQ ID NO: 1754925
ucgauuacaguuuaaugcu

SEQ ID NO: 1754927 - RNA, 19 nt, Artificial Sequence
  Description of Artificial Sequence: Synthetic oligonucleotide
  Sense strand starting at position 3831 of SEQ ID NO: 1562542
auuaaacuguaaucgaaga

SEQ ID NO: 1754928 - RNA, 19 nt, Artificial Sequence
  Description of Artificial Sequence: Synthetic oligonucleotide
  Antisense strand to SEQ ID NO: 1754927
ucuucgauuacaguuuaau

SEQ ID NO: 1754929 - RNA, 19 nt, Artificial Sequence
  Description of Artificial Sequence: Synthetic oligonucleotide
  Sense strand starting at position 3902 of SEQ ID NO: 1562542
uuggcaucauaaguuuaga

SEQ ID NO: 1754930 - RNA, 19 nt, Artificial Sequence
  Description of Artificial Sequence: Synthetic oligonucleotide
  Antisense strand to SEQ ID NO: 1754929
ucuaaacuuaugaugccaa

SEQ ID NO: 1754931 - RNA, 19 nt, Artificial Sequence
  Description of Artificial Sequence: Synthetic oligonucleotide
  Sense strand starting at position 3956 of SEQ ID NO: 1562542
gagauaguuugggugugaa

SEQ ID NO: 1754932 - RNA, 19 nt, Artificial Sequence
  Description of Artificial Sequence: Synthetic oligonucleotide
  Antisense strand to SEQ ID NO: 1754931
uucacacccaaacuaucuc

SEQ ID NO: 1754933 - RNA, 19 nt, Artificial Sequence
  Description of Artificial Sequence: Synthetic oligonucleotide
  Sense strand starting at position 3959 of SEQ ID NO: 1562542
auaguuugggugugaacac

SEQ ID NO: 1754934 - RNA, 19 nt, Artificial Sequence
  Description of Artificial Sequence: Synthetic oligonucleotide
  Antisense strand to SEQ ID NO: 1754933
guguucacacccaaacuau

SEQ ID NO: 1754935 - RNA, 19 nt, Artificial Sequence
  Description of Artificial Sequence: Synthetic oligonucleotide
  Sense strand starting at position 3979 of SEQ ID NO: 1562542
gcugcuaaaugugugaaca

SEQ ID NO: 1754936 - RNA, 19 nt, Artificial Sequence
  Description of Artificial Sequence: Synthetic oligonucleotide
  Antisense strand to SEQ ID NO: 1754935
uguucacacauuuagcagc

SEQ ID NO: 1754937 - RNA, 19 nt, Artificial Sequence
  Description of Artificial Sequence: Synthetic oligonucleotide
  Sense strand starting at position 3980 of SEQ ID NO: 1562542
cugcuaaaugugugaacau

SEQ ID NO: 1754938 - RNA, 19 nt, Artificial Sequence
  Description of Artificial Sequence: Synthetic oligonucleotide
  Antisense strand to SEQ ID NO: 1754937
auguucacacauuuagcag

SEQ ID NO: 1754939 - RNA, 19 nt, Artificial Sequence
  Description of Artificial Sequence: Synthetic oligonucleotide
  Sense strand starting at position 76 of SEQ ID NO: 1562543
gagguuguauagucacgga

SEQ ID NO: 1754940 - RNA, 19 nt, Artificial Sequence
  Description of Artificial Sequence: Synthetic oligonucleotide
  Antisense strand to SEQ ID NO: 1754939
uccgugacuauacaaccuc

SEQ ID NO: 1754941 - RNA, 19 nt, Artificial Sequence
  Description of Artificial Sequence: Synthetic oligonucleotide
  Sense strand starting at position 81 of SEQ ID NO: 1562543
uguauagucacggaaggcu

SEQ ID NO: 1754942 - RNA, 19 nt, Artificial Sequence
  Description of Artificial Sequence: Synthetic oligonucleotide
  Antisense strand to SEQ ID NO: 1754941
agccuuccgugacuauaca

SEQ ID NO: 1754943 - RNA, 19 nt, Artificial Sequence
  Description of Artificial Sequence: Synthetic oligonucleotide
  Sense strand starting at position 119 of SEQ ID NO: 1562543
ugcaauaggccuugaggga

SEQ ID NO: 1754944 - RNA, 19 nt, Artificial Sequence
  Description of Artificial Sequence: Synthetic oligonucleotide
  Antisense strand to SEQ ID NO: 1754943
ucccucaaggccuauugca

SEQ ID NO: 1754945 - RNA, 19 nt, Artificial Sequence
  Description of Artificial Sequence: Synthetic oligonucleotide
  Sense strand starting at position 120 of SEQ ID NO: 1562543
gcaauaggccuugagggau

SEQ ID NO: 1754946 - RNA, 19 nt, Artificial Sequence
  Description of Artificial Sequence: Synthetic oligonucleotide
  Antisense strand to SEQ ID NO: 1754945
aucccucaaggccuauugc

SEQ ID NO: 1754947 - RNA, 19 nt, Artificial Sequence
  Description of Artificial Sequence: Synthetic oligonucleotide
  Sense strand starting at position 124 of SEQ ID NO: 1562543
uaggccuugagggauaagu

SEQ ID NO: 1754948 - RNA, 19 nt, Artificial Sequence
  Description of Artificial Sequence: Synthetic oligonucleotide
  Antisense strand to SEQ ID NO: 1754947
acuuaucccucaaggccua

SEQ ID NO: 1754949 - RNA, 19 nt, Artificial Sequence
  Description of Artificial Sequence: Synthetic oligonucleotide
  Sense strand starting at position 200 of SEQ ID NO: 1562543
gcaugaaauggguguugcu

SEQ ID NO: 1754950 - RNA, 19 nt, Artificial Sequence
  Description of Artificial Sequence: Synthetic oligonucleotide
  Antisense strand to SEQ ID NO: 1754949
agcaacacccauuucaugc

SEQ ID NO: 1754951 - RNA, 19 nt, Artificial Sequence
  Description of Artificial Sequence: Synthetic oligonucleotide
  Sense strand starting at position 458 of SEQ ID NO: 1562543
gcagucuucuggccaugga

SEQ ID NO: 1754952 - RNA, 19 nt, Artificial Sequence
  Description of Artificial Sequence: Synthetic oligonucleotide
  Antisense strand to SEQ ID NO: 1754951
uccauggccagaagacugc

SEQ ID NO: 1754953 - RNA, 19 nt, Artificial Sequence
  Description of Artificial Sequence: Synthetic oligonucleotide
  Sense strand starting at position 557 of SEQ ID NO: 1562543
agaggaugcaucuguguuc

SEQ ID NO: 1754954 - RNA, 19 nt, Artificial Sequence
  Description of Artificial Sequence: Synthetic oligonucleotide
  Antisense strand to SEQ ID NO: 1754953
gaacacagaugcauccucu

SEQ ID NO: 1754955 - RNA, 19 nt, Artificial Sequence
  Description of Artificial Sequence: Synthetic oligonucleotide
  Sense strand starting at position 710 of SEQ ID NO: 1562543
guggaaaugcucuguggac

SEQ ID NO: 1754956 - RNA, 19 nt, Artificial Sequence
  Description of Artificial Sequence: Synthetic oligonucleotide
  Antisense strand to SEQ ID NO: 1754955
guccacagagcauuuccac

SEQ ID NO: 1754957 - RNA, 19 nt, Artificial Sequence
  Description of Artificial Sequence: Synthetic oligonucleotide
  Sense strand starting at position 711 of SEQ ID NO: 1562543
uggaaaugcucuguggacu

SEQ ID NO: 1754958 - RNA, 19 nt, Artificial Sequence
  Description of Artificial Sequence: Synthetic oligonucleotide
  Antisense strand to SEQ ID NO: 1754957
aguccacagagcauuucca

SEQ ID NO: 1754959 - RNA, 19 nt, Artificial Sequence
  Description of Artificial Sequence: Synthetic oligonucleotide
  Sense strand starting at position 712 of SEQ ID NO: 1562543
ggaaaugcucuguggacuc

SEQ ID NO: 1754960 - RNA, 19 nt, Artificial Sequence
  Description of Artificial Sequence: Synthetic oligonucleotide
  Antisense strand to SEQ ID NO: 1754959
gaguccacagagcauuucc

SEQ ID NO: 1754961 - RNA, 19 nt, Artificial Sequence
  Description of Artificial Sequence: Synthetic oligonucleotide
  Sense strand starting at position 945 of SEQ ID NO: 1562543
ggcuuucuugcugaaggua

SEQ ID NO: 1754962 - RNA, 19 nt, Artificial Sequence
  Description of Artificial Sequence: Synthetic oligonucleotide
  Antisense strand to SEQ ID NO: 1754961
uaccuucagcaagaaagcc

SEQ ID NO: 1754963 - RNA, 19 nt, Artificial Sequence
  Description of Artificial Sequence: Synthetic oligonucleotide
  Sense strand starting at position 1024 of SEQ ID NO: 1562543
aucugagcuccuugaggag

SEQ ID NO: 1754964 - RNA, 19 nt, Artificial Sequence
  Description of Artificial Sequence: Synthetic oligonucleotide
  Antisense strand to SEQ ID NO: 1754963
cuccucaaggagcucagau

SEQ ID NO: 1754965 - RNA, 19 nt, Artificial Sequence
  Description of Artificial Sequence: Synthetic oligonucleotide
  Sense strand starting at position 1216 of SEQ ID NO: 1562543
ccaccuuccuugggaacaa

SEQ ID NO: 1754966 - RNA, 19 nt, Artificial Sequence
  Description of Artificial Sequence: Synthetic oligonucleotide
  Antisense strand to SEQ ID NO: 1754965
uuguucccaaggaaggugg

SEQ ID NO: 1754967 - RNA, 19 nt, Artificial Sequence
  Description of Artificial Sequence: Synthetic oligonucleotide
  Sense strand starting at position 1357 of SEQ ID NO: 1562543
acauacuugugucuuugua

SEQ ID NO: 1754968 - RNA, 19 nt, Artificial Sequence
  Description of Artificial Sequence: Synthetic oligonucleotide
  Antisense strand to SEQ ID NO: 1754967
uacaaagacacaaguaugu

SEQ ID NO: 1754969 - RNA, 19 nt, Artificial Sequence
  Description of Artificial Sequence: Synthetic oligonucleotide
  Sense strand starting at position 1359 of SEQ ID NO: 1562543
auacuugugucuuuguauc

SEQ ID NO: 1754970 - RNA, 19 nt, Artificial Sequence
  Description of Artificial Sequence: Synthetic oligonucleotide
  Antisense strand to SEQ ID NO: 1754969
gauacaaagacacaaguau

SEQ ID NO: 1754971 - RNA, 19 nt, Artificial Sequence
  Description of Artificial Sequence: Synthetic oligonucleotide
  Sense strand starting at position 1423 of SEQ ID NO: 1562543
gauaaaggaugugaaauca

SEQ ID NO: 1754972 - RNA, 19 nt, Artificial Sequence
  Description of Artificial Sequence: Synthetic oligonucleotide
  Antisense strand to SEQ ID NO: 1754971
ugauuucacauccuuuauc

SEQ ID NO: 1754973 - RNA, 19 nt, Artificial Sequence
  Description of Artificial Sequence: Synthetic oligonucleotide
  Sense strand starting at position 1431 of SEQ ID NO: 1562543
augugaaaucauuaugcaa

SEQ ID NO: 1754974 - RNA, 19 nt, Artificial Sequence
  Description of Artificial Sequence: Synthetic oligonucleotide
  Antisense strand to SEQ ID NO: 1754973
uugcauaaugauuucacau

SEQ ID NO: 1754975 - RNA, 19 nt, Artificial Sequence
  Description of Artificial Sequence: Synthetic oligonucleotide
  Sense strand starting at position 1433 of SEQ ID NO: 1562543
gugaaaucauuaugcaaca

SEQ ID NO: 1754976 - RNA, 19 nt, Artificial Sequence
  Description of Artificial Sequence: Synthetic oligonucleotide
  Antisense strand to SEQ ID NO: 1754975
uguugcauaaugauuucac

SEQ ID NO: 1754977 - RNA, 19 nt, Artificial Sequence
  Description of Artificial Sequence: Synthetic oligonucleotide
  Sense strand starting at position 1438 of SEQ ID NO: 1562543
aucauuaugcaacaaggua

SEQ ID NO: 1754978 - RNA, 19 nt, Artificial Sequence
  Description of Artificial Sequence: Synthetic oligonucleotide
  Antisense strand to SEQ ID NO: 1754977
uaccuuguugcauaaugau

SEQ ID NO: 1754979 - RNA, 19 nt, Artificial Sequence
  Description of Artificial Sequence: Synthetic oligonucleotide
  Sense strand starting at position 1464 of SEQ ID NO: 1562543
guaacagauuuccaggacu

SEQ ID NO: 1754980 - RNA, 19 nt, Artificial Sequence
  Description of Artificial Sequence: Synthetic oligonucleotide
  Antisense strand to SEQ ID NO: 1754979
aguccuggaaaucuguuac

SEQ ID NO: 1754981 - RNA, 19 nt, Artificial Sequence
  Description of Artificial Sequence: Synthetic oligonucleotide
  Sense strand starting at position 1477 of SEQ ID NO: 1562543
aggacucuagcgcaacauu

SEQ ID NO: 1754982 - RNA, 19 nt, Artificial Sequence
  Description of Artificial Sequence: Synthetic oligonucleotide
  Antisense strand to SEQ ID NO: 1754981
aauguugcgcuagaguccu

SEQ ID NO: 1754983 - RNA, 19 nt, Artificial Sequence
  Description of Artificial Sequence: Synthetic oligonucleotide
  Sense strand starting at position 1497 of SEQ ID NO: 1562543
uugaguuaacccggugauu

SEQ ID NO: 1754984 - RNA, 19 nt, Artificial Sequence
  Description of Artificial Sequence: Synthetic oligonucleotide
  Antisense strand to SEQ ID NO: 1754983
aaucaccggguuaacucaa

SEQ ID NO: 1754985 - RNA, 19 nt, Artificial Sequence
  Description of Artificial Sequence: Synthetic oligonucleotide
  Sense strand starting at position 1499 of SEQ ID NO: 1562543
gaguuaacccggugauuuc

SEQ ID NO: 1754986 - RNA, 19 nt, Artificial Sequence
  Description of Artificial Sequence: Synthetic oligonucleotide
  Antisense strand to SEQ ID NO: 1754985
gaaaucaccggguuaacuc

SEQ ID NO: 1754987 - RNA, 19 nt, Artificial Sequence
  Description of Artificial Sequence: Synthetic oligonucleotide
  Sense strand starting at position 1535 of SEQ ID NO: 1562543
gggaaauggucaugcaacc

SEQ ID NO: 1754988 - RNA, 19 nt, Artificial Sequence
  Description of Artificial Sequence: Synthetic oligonucleotide
  Antisense strand to SEQ ID NO: 1754987
gguugcaugaccauuuccc

SEQ ID NO: 1754989 - RNA, 19 nt, Artificial Sequence
  Description of Artificial Sequence: Synthetic oligonucleotide
  Sense strand starting at position 1583 of SEQ ID NO: 1562543
ccaguucuguucucccaaa

SEQ ID NO: 1754990 - RNA, 19 nt, Artificial Sequence
  Description of Artificial Sequence: Synthetic oligonucleotide
  Antisense strand to SEQ ID NO: 1754989
uuugggagaacagaacugg

SEQ ID NO: 1754991 - RNA, 19 nt, Artificial Sequence
  Description of Artificial Sequence: Synthetic oligonucleotide
  Sense strand starting at position 2021 of SEQ ID NO: 1562543
ggaagaugaggcugauguu

SEQ ID NO: 1754992 - RNA, 19 nt, Artificial Sequence
  Description of Artificial Sequence: Synthetic oligonucleotide
  Antisense strand to SEQ ID NO: 1754991
aacaucagccucaucuucc

SEQ ID NO: 1754993 - RNA, 19 nt, Artificial Sequence
  Description of Artificial Sequence: Synthetic oligonucleotide
  Sense strand starting at position 2027 of SEQ ID NO: 1562543
ugaggcugauguucugaga

SEQ ID NO: 1754994 - RNA, 19 nt, Artificial Sequence
  Description of Artificial Sequence: Synthetic oligonucleotide
  Antisense strand to SEQ ID NO: 1754993
ucucagaacaucagccuca

SEQ ID NO: 1754995 - RNA, 19 nt, Artificial Sequence
  Description of Artificial Sequence: Synthetic oligonucleotide
  Sense strand starting at position 2030 of SEQ ID NO: 1562543
ggcugauguucugagagga

SEQ ID NO: 1754996 - RNA, 19 nt, Artificial Sequence
  Description of Artificial Sequence: Synthetic oligonucleotide
  Antisense strand to SEQ ID NO: 1754995
uccucucagaacaucagcc

SEQ ID NO: 1754997 - RNA, 19 nt, Artificial Sequence
  Description of Artificial Sequence: Synthetic oligonucleotide
  Sense strand starting at position 2319 of SEQ ID NO: 1562543
ugguuucgcaacuguacaa

SEQ ID NO: 1754998 - RNA, 19 nt, Artificial Sequence
  Description of Artificial Sequence: Synthetic oligonucleotide
  Antisense strand to SEQ ID NO: 1754997
uuguacaguugcgaaacca

SEQ ID NO: 1754999 - RNA, 19 nt, Artificial Sequence
  Description of Artificial Sequence: Synthetic oligonucleotide
  Sense strand starting at position 2561 of SEQ ID NO: 1562543
ugggauuaugggcgccaau

SEQ ID NO: 1755000 - RNA, 19 nt, Artificial Sequence
  Description of Artificial Sequence: Synthetic oligonucleotide
  Antisense strand to SEQ ID NO: 1754999
auuggcgcccauaauccca

SEQ ID NO: 1755001 - RNA, 19 nt, Artificial Sequence
  Description of Artificial Sequence: Synthetic oligonucleotide
  Sense strand starting at position 2946 of SEQ ID NO: 1562543
caguguucucaugagguca

SEQ ID NO: 1755002 - RNA, 19 nt, Artificial Sequence
  Description of Artificial Sequence: Synthetic oligonucleotide
  Antisense strand to SEQ ID NO: 1755001
ugaccucaugagaacacug

SEQ ID NO: 1755003 - RNA, 19 nt, Artificial Sequence
  Description of Artificial Sequence: Synthetic oligonucleotide
  Sense strand starting at position 2957 of SEQ ID NO: 1562543
ugaggucauccauggucau

SEQ ID NO: 1755004 - RNA, 19 nt, Artificial Sequence
  Description of Artificial Sequence: Synthetic oligonucleotide
  Antisense strand to SEQ ID NO: 1755003
augaccauggaugaccuca

SEQ ID NO: 1755005 - RNA, 19 nt, Artificial Sequence
  Description of Artificial Sequence: Synthetic oligonucleotide
  Sense strand starting at position 3006 of SEQ ID NO: 1562543
gaggguugcugggaugcaa

SEQ ID NO: 1755006 - RNA, 19 nt, Artificial Sequence
  Description of Artificial Sequence: Synthetic oligonucleotide
  Antisense strand to SEQ ID NO: 1755005
uugcaucccagcaacccuc

SEQ ID NO: 1755007 - RNA, 19 nt, Artificial Sequence
  Description of Artificial Sequence: Synthetic oligonucleotide
  Sense strand starting at position 3098 of SEQ ID NO: 1562543
gacggucacugucagacaa

SEQ ID NO: 1755008 - RNA, 19 nt, Artificial Sequence
  Description of Artificial Sequence: Synthetic oligonucleotide
  Antisense strand to SEQ ID NO: 1755007
uugucugacagugaccguc

SEQ ID NO: 1755009 - RNA, 19 nt, Artificial Sequence
  Description of Artificial Sequence: Synthetic oligonucleotide
  Sense strand starting at position 3298 of SEQ ID NO: 1562543
uuccgagacccguaaacuu

SEQ ID NO: 1755010 - RNA, 19 nt, Artificial Sequence
  Description of Artificial Sequence: Synthetic oligonucleotide
  Antisense strand to SEQ ID NO: 1755009
aaguuuacgggucucggaa

SEQ ID NO: 1755011 - RNA, 19 nt, Artificial Sequence
  Description of Artificial Sequence: Synthetic oligonucleotide
  Sense strand starting at position 3646 of SEQ ID NO: 1562543
gugggacucucugccuuaa

SEQ ID NO: 1755012 - RNA, 19 nt, Artificial Sequence
  Description of Artificial Sequence: Synthetic oligonucleotide
  Antisense strand to SEQ ID NO: 1755011
uuaaggcagagagucccac

SEQ ID NO: 1755013 - RNA, 19 nt, Artificial Sequence
  Description of Artificial Sequence: Synthetic oligonucleotide
  Sense strand starting at position 3648 of SEQ ID NO: 1562543
gggacucucugccuuaaga

SEQ ID NO: 1755014 - RNA, 19 nt, Artificial Sequence
  Description of Artificial Sequence: Synthetic oligonucleotide
  Antisense strand to SEQ ID NO: 1755013
ucuuaaggcagagaguccc

SEQ ID NO: 1755015 - RNA, 19 nt, Artificial Sequence
  Description of Artificial Sequence: Synthetic oligonucleotide
  Sense strand starting at position 3734 of SEQ ID NO: 1562543
ugugcagguuccucuaauc

SEQ ID NO: 1755016 - RNA, 19 nt, Artificial Sequence
  Description of Artificial Sequence: Synthetic oligonucleotide
  Antisense strand to SEQ ID NO: 1755015
gauuagaggaaccugcaca

SEQ ID NO: 1755017 - RNA, 19 nt, Artificial Sequence
  Description of Artificial Sequence: Synthetic oligonucleotide
  Sense strand starting at position 3744 of SEQ ID NO: 1562543
ccucuaaucccagaggcaa

SEQ ID NO: 1755018 - RNA, 19 nt, Artificial Sequence
  Description of Artificial Sequence: Synthetic oligonucleotide
  Antisense strand to SEQ ID NO: 1755017
uugccucugggauuagagg

SEQ ID NO: 1755019 - RNA, 19 nt, Artificial Sequence
  Description of Artificial Sequence: Synthetic oligonucleotide
  Sense strand starting at position 226 of SEQ ID NO: 1562544
gugacuucuacagaacgau

SEQ ID NO: 1755020 - RNA, 19 nt, Artificial Sequence
  Description of Artificial Sequence: Synthetic oligonucleotide
  Antisense strand to SEQ ID NO: 1755019
aucguucuguagaagucac

SEQ ID NO: 1755021 - RNA, 19 nt, Artificial Sequence
  Description of Artificial Sequence: Synthetic oligonucleotide
  Sense strand starting at position 264 of SEQ ID NO: 1562544
uuaugcuagucucuuggga

SEQ ID NO: 1755022 - RNA, 19 nt, Artificial Sequence
  Description of Artificial Sequence: Synthetic oligonucleotide
  Antisense strand to SEQ ID NO: 1755021
ucccaagagacuagcauaa

SEQ ID NO: 1755023 - RNA, 19 nt, Artificial Sequence
  Description of Artificial Sequence: Synthetic oligonucleotide
  Sense strand starting at position 347 of SEQ ID NO: 1562544
uuauaacugggucaucuuu

SEQ ID NO: 1755024 - RNA, 19 nt, Artificial Sequence
  Description of Artificial Sequence: Synthetic oligonucleotide
  Antisense strand to SEQ ID NO: 1755023
aaagaugacccaguuauaa

SEQ ID NO: 1755025 - RNA, 19 nt, Artificial Sequence
  Description of Artificial Sequence: Synthetic oligonucleotide
  Sense strand starting at position 424 of SEQ ID NO: 1562544
uauuauuaugcagguugau

SEQ ID NO: 1755026 - RNA, 19 nt, Artificial Sequence
  Description of Artificial Sequence: Synthetic oligonucleotide
  Antisense strand to SEQ ID NO: 1755025
aucaaccugcauaauaaua

SEQ ID NO: 1755027 - RNA, 19 nt, Artificial Sequence
  Description of Artificial Sequence: Synthetic oligonucleotide
  Sense strand starting at position 436 of SEQ ID NO: 1562544
gguugauucuguucccuga

SEQ ID NO: 1755028 - RNA, 19 nt, Artificial Sequence
  Description of Artificial Sequence: Synthetic oligonucleotide
  Antisense strand to SEQ ID NO: 1755027
ucagggaacagaaucaacc

SEQ ID NO: 1755029 - RNA, 19 nt, Artificial Sequence
  Description of Artificial Sequence: Synthetic oligonucleotide
  Sense strand starting at position 440 of SEQ ID NO: 1562544
gauucuguucccugagcua

SEQ ID NO: 1755030 - RNA, 19 nt, Artificial Sequence
  Description of Artificial Sequence: Synthetic oligonucleotide
  Antisense strand to SEQ ID NO: 1755029
uagcucagggaacagaauc

SEQ ID NO: 1755031 - RNA, 19 nt, Artificial Sequence
  Description of Artificial Sequence: Synthetic oligonucleotide
  Sense strand starting at position 623 of SEQ ID NO: 1562544
gcugacuuggcucucguau

SEQ ID NO: 1755032 - RNA, 19 nt, Artificial Sequence
  Description of Artificial Sequence: Synthetic oligonucleotide
  Antisense strand to SEQ ID NO: 1755031
auacgagagccaagucagc

SEQ ID NO: 1755033 - RNA, 19 nt, Artificial Sequence
  Description of Artificial Sequence: Synthetic oligonucleotide
  Sense strand starting at position 902 of SEQ ID NO: 1562544
cuggucaugucaucgggau

SEQ ID NO: 1755034 - RNA, 19 nt, Artificial Sequence
  Description of Artificial Sequence: Synthetic oligonucleotide
  Antisense strand to SEQ ID NO: 1755033
aucccgaugacaugaccag

SEQ ID NO: 1755035 - RNA, 19 nt, Artificial Sequence
  Description of Artificial Sequence: Synthetic oligonucleotide
  Sense strand starting at position 903 of SEQ ID NO: 1562544
uggucaugucaucgggauc

SEQ ID NO: 1755036 - RNA, 19 nt, Artificial Sequence
  Description of Artificial Sequence: Synthetic oligonucleotide
  Antisense strand to SEQ ID NO: 1755035
gaucccgaugacaugacca

SEQ ID NO: 1755037 - RNA, 19 nt, Artificial Sequence
  Description of Artificial Sequence: Synthetic oligonucleotide
  Sense strand starting at position 904 of SEQ ID NO: 1562544
ggucaugucaucgggaucu

SEQ ID NO: 1755038 - RNA, 19 nt, Artificial Sequence
  Description of Artificial Sequence: Synthetic oligonucleotide
  Antisense strand to SEQ ID NO: 1755037
agaucccgaugacaugacc

SEQ ID NO: 1755039 - RNA, 19 nt, Artificial Sequence
  Description of Artificial Sequence: Synthetic oligonucleotide
  Sense strand starting at position 906 of SEQ ID NO: 1562544
ucaugucaucgggaucuga

SEQ ID NO: 1755040 - RNA, 19 nt, Artificial Sequence
  Description of Artificial Sequence: Synthetic oligonucleotide
  Antisense strand to SEQ ID NO: 1755039
ucagaucccgaugacauga

SEQ ID NO: 1755041 - RNA, 19 nt, Artificial Sequence
  Description of Artificial Sequence: Synthetic oligonucleotide
  Sense strand starting at position 993 of SEQ ID NO: 1562544
augcaugauuugcaaacaa

SEQ ID NO: 1755042 - RNA, 19 nt, Artificial Sequence
  Description of Artificial Sequence: Synthetic oligonucleotide
  Antisense strand to SEQ ID NO: 1755041
uuguuugcaaaucaugcau

SEQ ID NO: 1755043 - RNA, 19 nt, Artificial Sequence
  Description of Artificial Sequence: Synthetic oligonucleotide
  Sense strand starting at position 1067 of SEQ ID NO: 1562544
gagugcuggagucacuaau

SEQ ID NO: 1755044 - RNA, 19 nt, Artificial Sequence
  Description of Artificial Sequence: Synthetic oligonucleotide
  Antisense strand to SEQ ID NO: 1755043
auuagugacuccagcacuc

SEQ ID NO: 1755045 - RNA, 19 nt, Artificial Sequence
  Description of Artificial Sequence: Synthetic oligonucleotide
  Sense strand starting at position 1085 of SEQ ID NO: 1562544
uuuacuguccaguaacuga

SEQ ID NO: 1755046 - RNA, 19 nt, Artificial Sequence
  Description of Artificial Sequence: Synthetic oligonucleotide
  Antisense strand to SEQ ID NO: 1755045
ucaguuacuggacaguaaa

SEQ ID NO: 1755047 - RNA, 19 nt, Artificial Sequence
  Description of Artificial Sequence: Synthetic oligonucleotide
  Sense strand starting at position 1092 of SEQ ID NO: 1562544
uccaguaacugaguuucua

SEQ ID NO: 1755048 - RNA, 19 nt, Artificial Sequence
  Description of Artificial Sequence: Synthetic oligonucleotide
  Antisense strand to SEQ ID NO: 1755047
uagaaacucaguuacugga

SEQ ID NO: 1755049 - RNA, 19 nt, Artificial Sequence
  Description of Artificial Sequence: Synthetic oligonucleotide
  Sense strand starting at position 1118 of SEQ ID NO: 1562544
ggucuaguugucguguuac

SEQ ID NO: 1755050 - RNA, 19 nt, Artificial Sequence
  Description of Artificial Sequence: Synthetic oligonucleotide
  Antisense strand to SEQ ID NO: 1755049
guaacacgacaacuagacc

SEQ ID NO: 1755051 - RNA, 19 nt, Artificial Sequence
  Description of Artificial Sequence: Synthetic oligonucleotide
  Sense strand starting at position 1120 of SEQ ID NO: 1562544
ucuaguugucguguuacuu

SEQ ID NO: 1755052 - RNA, 19 nt, Artificial Sequence
  Description of Artificial Sequence: Synthetic oligonucleotide
  Antisense strand to SEQ ID NO: 1755051
aaguaacacgacaacuaga

SEQ ID NO: 1755053 - RNA, 19 nt, Artificial Sequence
  Description of Artificial Sequence: Synthetic oligonucleotide
  Sense strand starting at position 1121 of SEQ ID NO: 1562544
cuaguugucguguuacuuu

SEQ ID NO: 1755054 - RNA, 19 nt, Artificial Sequence
  Description of Artificial Sequence: Synthetic oligonucleotide
  Antisense strand to SEQ ID NO: 1755053
aaaguaacacgacaacuag

SEQ ID NO: 1755055 - RNA, 19 nt, Artificial Sequence
  Description of Artificial Sequence: Synthetic oligonucleotide
  Sense strand starting at position 1189 of SEQ ID NO: 1562544
aguauuagcgugucauggu

SEQ ID NO: 1755056 - RNA, 19 nt, Artificial Sequence
  Description of Artificial Sequence: Synthetic oligonucleotide
  Antisense strand to SEQ ID NO: 1755055
accaugacacgcuaauacu

SEQ ID NO: 1755057 - RNA, 19 nt, Artificial Sequence
  Description of Artificial Sequence: Synthetic oligonucleotide
  Sense strand starting at position 1626 of SEQ ID NO: 1562544
uaaagagccgcguuucuau

SEQ ID NO: 1755058 - RNA, 19 nt, Artificial Sequence
  Description of Artificial Sequence: Synthetic oligonucleotide
  Antisense strand to SEQ ID NO: 1755057
auagaaacgcggcucuuua

SEQ ID NO: 1755059 - RNA, 19 nt, Artificial Sequence
  Description of Artificial Sequence: Synthetic oligonucleotide
  Sense strand starting at position 1765 of SEQ ID NO: 1562544
aguguuagaaaguggcauu

SEQ ID NO: 1755060 - RNA, 19 nt, Artificial Sequence
  Description of Artificial Sequence: Synthetic oligonucleotide
  Antisense strand to SEQ ID NO: 1755059
aaugccacuuucuaacacu

SEQ ID NO: 1755061 - RNA, 19 nt, Artificial Sequence
  Description of Artificial Sequence: Synthetic oligonucleotide
  Sense strand starting at position 1766 of SEQ ID NO: 1562544
guguuagaaaguggcauuu

SEQ ID NO: 1755062 - RNA, 19 nt, Artificial Sequence
  Description of Artificial Sequence: Synthetic oligonucleotide
  Antisense strand to SEQ ID NO: 1755061
aaaugccacuuucuaacac

SEQ ID NO: 1755063 - RNA, 19 nt, Artificial Sequence
  Description of Artificial Sequence: Synthetic oligonucleotide
  Sense strand starting at position 1777 of SEQ ID NO: 1562544
uggcauuugugacucgaca

SEQ ID NO: 1755064 - RNA, 19 nt, Artificial Sequence
  Description of Artificial Sequence: Synthetic oligonucleotide
  Antisense strand to SEQ ID NO: 1755063
ugucgagucacaaaugcca

SEQ ID NO: 1755065 - RNA, 19 nt, Artificial Sequence
  Description of Artificial Sequence: Synthetic oligonucleotide
  Sense strand starting at position 2218 of SEQ ID NO: 1562544
gcaggugacaggugauaac

SEQ ID NO: 1755066 - RNA, 19 nt, Artificial Sequence
  Description of Artificial Sequence: Synthetic oligonucleotide
  Antisense strand to SEQ ID NO: 1755065
guuaucaccugucaccugc

SEQ ID NO: 1755067 - RNA, 19 nt, Artificial Sequence
  Description of Artificial Sequence: Synthetic oligonucleotide
  Sense strand starting at position 2254 of SEQ ID NO: 1562544
ggauuagucgcuggcaaag

SEQ ID NO: 1755068 - RNA, 19 nt, Artificial Sequence
  Description of Artificial Sequence: Synthetic oligonucleotide
  Antisense strand to SEQ ID NO: 1755067
cuuugccagcgacuaaucc

SEQ ID NO: 1755069 - RNA, 19 nt, Artificial Sequence
  Description of Artificial Sequence: Synthetic oligonucleotide
  Sense strand starting at position 2760 of SEQ ID NO: 1562544
guggguuugucaacuguug

SEQ ID NO: 1755070 - RNA, 19 nt, Artificial Sequence
  Description of Artificial Sequence: Synthetic oligonucleotide
  Antisense strand to SEQ ID NO: 1755069
caacaguugacaaacccac

SEQ ID NO: 1755071 - RNA, 19 nt, Artificial Sequence
  Description of Artificial Sequence: Synthetic oligonucleotide
  Sense strand starting at position 2845 of SEQ ID NO: 1562544
gugagugucccucagggaa

SEQ ID NO: 1755072 - RNA, 19 nt, Artificial Sequence
  Description of Artificial Sequence: Synthetic oligonucleotide
  Antisense strand to SEQ ID NO: 1755071
uucccugagggacacucac

SEQ ID NO: 1755073 - RNA, 19 nt, Artificial Sequence
  Description of Artificial Sequence: Synthetic oligonucleotide
  Sense strand starting at position 2952 of SEQ ID NO: 1562544
agcuauuaacuagaaguau

SEQ ID NO: 1755074 - RNA, 19 nt, Artificial Sequence
  Description of Artificial Sequence: Synthetic oligonucleotide
  Antisense strand to SEQ ID NO: 1755073
auacuucuaguuaauagcu

SEQ ID NO: 1755075 - RNA, 19 nt, Artificial Sequence
  Description of Artificial Sequence: Synthetic oligonucleotide
  Sense strand starting at position 3024 of SEQ ID NO: 1562544
agcauucuugcagaaaucu

SEQ ID NO: 1755076 - RNA, 19 nt, Artificial Sequence
  Description of Artificial Sequence: Synthetic oligonucleotide
  Antisense strand to SEQ ID NO: 1755075
agauuucugcaagaaugcu

SEQ ID NO: 1755077 - RNA, 19 nt, Artificial Sequence
  Description of Artificial Sequence: Synthetic oligonucleotide
  Sense strand starting at position 3032 of SEQ ID NO: 1562544
ugcagaaaucuccaacgca

SEQ ID NO: 1755078 - RNA, 19 nt, Artificial Sequence
  Description of Artificial Sequence: Synthetic oligonucleotide
  Antisense strand to SEQ ID NO: 1755077
ugcguuggagauuucugca

SEQ ID NO: 1755079 - RNA, 19 nt, Artificial Sequence
  Description of Artificial Sequence: Synthetic oligonucleotide
  Sense strand starting at position 3035 of SEQ ID NO: 1562544
agaaaucuccaacgcaacu

SEQ ID NO: 1755080 - RNA, 19 nt, Artificial Sequence
  Description of Artificial Sequence: Synthetic oligonucleotide
  Antisense strand to SEQ ID NO: 1755079
aguugcguuggagauuucu

SEQ ID NO: 1755081 - RNA, 19 nt, Artificial Sequence
  Description of Artificial Sequence: Synthetic oligonucleotide
  Sense strand starting at position 3209 of SEQ ID NO: 1562544
gagcauagacccugucauu

SEQ ID NO: 1755082 - RNA, 19 nt, Artificial Sequence
  Description of Artificial Sequence: Synthetic oligonucleotide
  Antisense strand to SEQ ID NO: 1755081
aaugacagggucuaugcuc

SEQ ID NO: 1755083 - RNA, 19 nt, Artificial Sequence
  Description of Artificial Sequence: Synthetic oligonucleotide
  Sense strand starting at position 3354 of SEQ ID NO: 1562544
ucuggaggcucuucccaua

SEQ ID NO: 1755084 - RNA, 19 nt, Artificial Sequence
  Description of Artificial Sequence: Synthetic oligonucleotide
  Antisense strand to SEQ ID NO: 1755083
uaugggaagagccuccaga

SEQ ID NO: 1755085 - RNA, 19 nt, Artificial Sequence
  Description of Artificial Sequence: Synthetic oligonucleotide
  Sense strand starting at position 3480 of SEQ ID NO: 1562544
auuaauucguaguccuauu

SEQ ID NO: 1755086 - RNA, 19 nt, Artificial Sequence
  Description of Artificial Sequence: Synthetic oligonucleotide
  Antisense strand to SEQ ID NO: 1755085
aauaggacuacgaauuaau

SEQ ID NO: 1755087 - RNA, 19 nt, Artificial Sequence
  Description of Artificial Sequence: Synthetic oligonucleotide
  Sense strand starting at position 3511 of SEQ ID NO: 1562544
guuaacuggcaucauauga

SEQ ID NO: 1755088 - RNA, 19 nt, Artificial Sequence
  Description of Artificial Sequence: Synthetic oligonucleotide
  Antisense strand to SEQ ID NO: 1755087
ucauaugaugccaguuaac

SEQ ID NO: 1755089 - RNA, 19 nt, Artificial Sequence
  Description of Artificial Sequence: Synthetic oligonucleotide
  Sense strand starting at position 3535 of SEQ ID NO: 1562544
gguugaaggucucccauua

SEQ ID NO: 1755090 - RNA, 19 nt, Artificial Sequence
  Description of Artificial Sequence: Synthetic oligonucleotide
  Antisense strand to SEQ ID NO: 1755089
uaaugggagaccuucaacc

SEQ ID NO: 1755091 - RNA, 19 nt, Artificial Sequence
  Description of Artificial Sequence: Synthetic oligonucleotide
  Sense strand starting at position 3553 of SEQ ID NO: 1562544
auaugugacuccucuucca

SEQ ID NO: 1755092 - RNA, 19 nt, Artificial Sequence
  Description of Artificial Sequence: Synthetic oligonucleotide
  Antisense strand to SEQ ID NO: 1755091
uggaagaggagucacauau

SEQ ID NO: 1755093 - RNA, 19 nt, Artificial Sequence
  Description of Artificial Sequence: Synthetic oligonucleotide
  Sense strand starting at position 3773 of SEQ ID NO: 1562544
agcgaaaggccugaucguu

SEQ ID NO: 1755094 - RNA, 19 nt, Artificial Sequence
  Description of Artificial Sequence: Synthetic oligonucleotide
  Antisense strand to SEQ ID NO: 1755093
aacgaucaggccuuucgcu

SEQ ID NO: 1755095 - RNA, 19 nt, Artificial Sequence
  Description of Artificial Sequence: Synthetic oligonucleotide
  Sense strand starting at position 3788 of SEQ ID NO: 1562544
cguuguguaaauggaauaa

SEQ ID NO: 1755096 - RNA, 19 nt, Artificial Sequence
  Description of Artificial Sequence: Synthetic oligonucleotide
  Antisense strand to SEQ ID NO: 1755095
uuauuccauuuacacaacg

SEQ ID NO: 1755097 - RNA, 19 nt, Artificial Sequence
  Description of Artificial Sequence: Synthetic oligonucleotide
  Sense strand starting at position 3835 of SEQ ID NO: 1562544
ccaugagaacuuuguccug

SEQ ID NO: 1755098 - RNA, 19 nt, Artificial Sequence
  Description of Artificial Sequence: Synthetic oligonucleotide
  Antisense strand to SEQ ID NO: 1755097
caggacaaaguucucaugg

SEQ ID NO: 1755099 - RNA, 19 nt, Artificial Sequence
  Description of Artificial Sequence: Synthetic oligonucleotide
  Sense strand starting at position 379 of SEQ ID NO: 1562545
cucuguauuugauaucuga

SEQ ID NO: 1755100 - RNA, 19 nt, Artificial Sequence
  Description of Artificial Sequence: Synthetic oligonucleotide
  Antisense strand to SEQ ID NO: 1755099
ucagauaucaaauacagag

SEQ ID NO: 1755101 - RNA, 19 nt, Artificial Sequence
  Description of Artificial Sequence: Synthetic oligonucleotide
  Sense strand starting at position 490 of SEQ ID NO: 1562545
gcacgaaaccuugagcaau

SEQ ID NO: 1755102 - RNA, 19 nt, Artificial Sequence
  Description of Artificial Sequence: Synthetic oligonucleotide
  Antisense strand to SEQ ID NO: 1755101
auugcucaagguuucgugc

SEQ ID NO: 1755103 - RNA, 19 nt, Artificial Sequence
  Description of Artificial Sequence: Synthetic oligonucleotide
  Sense strand starting at position 539 of SEQ ID NO: 1562545
gaaguuucuuacccuaggu

SEQ ID NO: 1755104 - RNA, 19 nt, Artificial Sequence
  Description of Artificial Sequence: Synthetic oligonucleotide
  Antisense strand to SEQ ID NO: 1755103
accuaggguaagaaacuuc

SEQ ID NO: 1755105 - RNA, 19 nt, Artificial Sequence
  Description of Artificial Sequence: Synthetic oligonucleotide
  Sense strand starting at position 541 of SEQ ID NO: 1562545
aguuucuuacccuagguau

SEQ ID NO: 1755106 - RNA, 19 nt, Artificial Sequence
  Description of Artificial Sequence: Synthetic oligonucleotide
  Antisense strand to SEQ ID NO: 1755105
auaccuaggguaagaaacu

SEQ ID NO: 1755107 - RNA, 19 nt, Artificial Sequence
  Description of Artificial Sequence: Synthetic oligonucleotide
  Sense strand starting at position 648 of SEQ ID NO: 1562545
aggcucucuccggaggagu

SEQ ID NO: 1755108 - RNA, 19 nt, Artificial Sequence
  Description of Artificial Sequence: Synthetic oligonucleotide
  Antisense strand to SEQ ID NO: 1755107
acuccuccggagagagccu

SEQ ID NO: 1755109 - RNA, 19 nt, Artificial Sequence
  Description of Artificial Sequence: Synthetic oligonucleotide
  Sense strand starting at position 650 of SEQ ID NO: 1562545
gcucucuccggaggaguaa

SEQ ID NO: 1755110 - RNA, 19 nt, Artificial Sequence
  Description of Artificial Sequence: Synthetic oligonucleotide
  Antisense strand to SEQ ID NO: 1755109
uuacuccuccggagagagc

SEQ ID NO: 1755111 - RNA, 19 nt, Artificial Sequence
  Description of Artificial Sequence: Synthetic oligonucleotide
  Sense strand starting at position 651 of SEQ ID NO: 1562545
cucucuccggaggaguaaa

SEQ ID NO: 1755112 - RNA, 19 nt, Artificial Sequence
  Description of Artificial Sequence: Synthetic oligonucleotide
  Antisense strand to SEQ ID NO: 1755111
uuuacuccuccggagagag

SEQ ID NO: 1755113 - RNA, 19 nt, Artificial Sequence
  Description of Artificial Sequence: Synthetic oligonucleotide
  Sense strand starting at position 720 of SEQ ID NO: 1562545
gaaagagauuuaggugaau

SEQ ID NO: 1755114 - RNA, 19 nt, Artificial Sequence
  Description of Artificial Sequence: Synthetic oligonucleotide
  Antisense strand to SEQ ID NO: 1755113
auucaccuaaaucucuuuc

SEQ ID NO: 1755115 - RNA, 19 nt, Artificial Sequence
  Description of Artificial Sequence: Synthetic oligonucleotide
  Sense strand starting at position 798 of SEQ ID NO: 1562545
ccaguaggagagugcauau

SEQ ID NO: 1755116 - RNA, 19 nt, Artificial Sequence
  Description of Artificial Sequence: Synthetic oligonucleotide
  Antisense strand to SEQ ID NO: 1755115
auaugcacucuccuacugg

SEQ ID NO: 1755117 - RNA, 19 nt, Artificial Sequence
  Description of Artificial Sequence: Synthetic oligonucleotide
  Sense strand starting at position 819 of SEQ ID NO: 1562545
uuugaaaggucucugcaac

SEQ ID NO: 1755118 - RNA, 19 nt, Artificial Sequence
  Description of Artificial Sequence: Synthetic oligonucleotide
  Antisense strand to SEQ ID NO: 1755117
guugcagagaccuuucaaa

SEQ ID NO: 1755119 - RNA, 19 nt, Artificial Sequence
  Description of Artificial Sequence: Synthetic oligonucleotide
  Sense strand starting at position 820 of SEQ ID NO: 1562545
uugaaaggucucugcaacu

SEQ ID NO: 1755120 - RNA, 19 nt, Artificial Sequence
  Description of Artificial Sequence: Synthetic oligonucleotide
  Antisense strand to SEQ ID NO: 1755119
aguugcagagaccuuucaa

SEQ ID NO: 1755121 - RNA, 19 nt, Artificial Sequence
  Description of Artificial Sequence: Synthetic oligonucleotide
  Sense strand starting at position 1055 of SEQ ID NO: 1562545
agagaaugcucagaaagag

SEQ ID NO: 1755122 - RNA, 19 nt, Artificial Sequence
  Description of Artificial Sequence: Synthetic oligonucleotide
  Antisense strand to SEQ ID NO: 1755121
cucuuucugagcauucucu

SEQ ID NO: 1755123 - RNA, 19 nt, Artificial Sequence
  Description of Artificial Sequence: Synthetic oligonucleotide
  Sense strand starting at position 1265 of SEQ ID NO: 1562545
agaauuaaauccgcacaca

SEQ ID NO: 1755124 - RNA, 19 nt, Artificial Sequence
  Description of Artificial Sequence: Synthetic oligonucleotide
  Antisense strand to SEQ ID NO: 1755123
ugugugcggauuuaauucu

SEQ ID NO: 1755125 - RNA, 19 nt, Artificial Sequence
  Description of Artificial Sequence: Synthetic oligonucleotide
  Sense strand starting at position 2341 of SEQ ID NO: 1562545
cccgccucgaaugagaaau

SEQ ID NO: 1755126 - RNA, 19 nt, Artificial Sequence
  Description of Artificial Sequence: Synthetic oligonucleotide
  Antisense strand to SEQ ID NO: 1755125
auuucucauucgaggcggg

SEQ ID NO: 1755127 - RNA, 19 nt, Artificial Sequence
  Description of Artificial Sequence: Synthetic oligonucleotide
  Sense strand starting at position 2671 of SEQ ID NO: 1562545
gcgagaauggaucaauggu

SEQ ID NO: 1755128 - RNA, 19 nt, Artificial Sequence
  Description of Artificial Sequence: Synthetic oligonucleotide
  Antisense strand to SEQ ID NO: 1755127
accauugauccauucucgc

SEQ ID NO: 1755129 - RNA, 19 nt, Artificial Sequence
  Description of Artificial Sequence: Synthetic oligonucleotide
  Sense strand starting at position 2792 of SEQ ID NO: 1562545
agcgauuuauggcuuuguu

SEQ ID NO: 1755130 - RNA, 19 nt, Artificial Sequence
  Description of Artificial Sequence: Synthetic oligonucleotide
  Antisense strand to SEQ ID NO: 1755129
aacaaagccauaaaucgcu

SEQ ID NO: 1755131 - RNA, 19 nt, Artificial Sequence
  Description of Artificial Sequence: Synthetic oligonucleotide
  Sense strand starting at position 2795 of SEQ ID NO: 1562545
gauuuauggcuuuguucuu

SEQ ID NO: 1755132 - RNA, 19 nt, Artificial Sequence
  Description of Artificial Sequence: Synthetic oligonucleotide
  Antisense strand to SEQ ID NO: 1755131
aagaacaaagccauaaauc

SEQ ID NO: 1755133 - RNA, 19 nt, Artificial Sequence
  Description of Artificial Sequence: Synthetic oligonucleotide
  Sense strand starting at position 2896 of SEQ ID NO: 1562545
agaauacauugguuagacu

SEQ ID NO: 1755134 - RNA, 19 nt, Artificial Sequence
  Description of Artificial Sequence: Synthetic oligonucleotide
  Antisense strand to SEQ ID NO: 1755133
agucuaaccaauguauucu

SEQ ID NO: 1755135 - RNA, 19 nt, Artificial Sequence
  Description of Artificial Sequence: Synthetic oligonucleotide
  Sense strand starting at position 2921 of SEQ ID NO: 1562545
acaugaacuguugauucuu

SEQ ID NO: 1755136 - RNA, 19 nt, Artificial Sequence
  Description of Artificial Sequence: Synthetic oligonucleotide
  Antisense strand to SEQ ID NO: 1755135
aagaaucaacaguucaugu

SEQ ID NO: 1755137 - RNA, 19 nt, Artificial Sequence
  Description of Artificial Sequence: Synthetic oligonucleotide
  Sense strand starting at position 2929 of SEQ ID NO: 1562545
uguugauucuuucucccua

SEQ ID NO: 1755138 - RNA, 19 nt, Artificial Sequence
  Description of Artificial Sequence: Synthetic oligonucleotide
  Antisense strand to SEQ ID NO: 1755137
uagggagaaagaaucaaca

SEQ ID NO: 1755139 - RNA, 19 nt, Artificial Sequence
  Description of Artificial Sequence: Synthetic oligonucleotide
  Sense strand starting at position 2930 of SEQ ID NO: 1562545
guugauucuuucucccuau

SEQ ID NO: 1755140 - RNA, 19 nt, Artificial Sequence
  Description of Artificial Sequence: Synthetic oligonucleotide
  Antisense strand to SEQ ID NO: 1755139
auagggagaaagaaucaac

SEQ ID NO: 1755141 - RNA, 19 nt, Artificial Sequence
  Description of Artificial Sequence: Synthetic oligonucleotide
  Sense strand starting at position 3102 of SEQ ID NO: 1562545
cguggucuuguggaggaga

SEQ ID NO: 1755142 - RNA, 19 nt, Artificial Sequence
  Description of Artificial Sequence: Synthetic oligonucleotide
  Antisense strand to SEQ ID NO: 1755141
ucuccuccacaagaccacg

SEQ ID NO: 1755143 - RNA, 19 nt, Artificial Sequence
  Description of Artificial Sequence: Synthetic oligonucleotide
  Sense strand starting at position 3104 of SEQ ID NO: 1562545
uggucuuguggaggagaca

SEQ ID NO: 1755144 - RNA, 19 nt, Artificial Sequence
  Description of Artificial Sequence: Synthetic oligonucleotide
  Antisense strand to SEQ ID NO: 1755143
ugucuccuccacaagacca

SEQ ID NO: 1755145 - RNA, 19 nt, Artificial Sequence
  Description of Artificial Sequence: Synthetic oligonucleotide
  Sense strand starting at position 3202 of SEQ ID NO: 1562545
agucaaggcuuucuacaga

SEQ ID NO: 1755146 - RNA, 19 nt, Artificial Sequence
  Description of Artificial Sequence: Synthetic oligonucleotide
  Antisense strand to SEQ ID NO: 1755145
ucuguagaaagccuugacu

SEQ ID NO: 1755147 - RNA, 19 nt, Artificial Sequence
  Description of Artificial Sequence: Synthetic oligonucleotide
  Sense strand starting at position 3236 of SEQ ID NO: 1562545
cacugaugcugauuaggaa

SEQ ID NO: 1755148 - RNA, 19 nt, Artificial Sequence
  Description of Artificial Sequence: Synthetic oligonucleotide
  Antisense strand to SEQ ID NO: 1755147
uuccuaaucagcaucagug

SEQ ID NO: 1755149 - RNA, 19 nt, Artificial Sequence
  Description of Artificial Sequence: Synthetic oligonucleotide
  Sense strand starting at position 3276 of SEQ ID NO: 1562545
guggaaaggccuugaauga

SEQ ID NO: 1755150 - RNA, 19 nt, Artificial Sequence
  Description of Artificial Sequence: Synthetic oligonucleotide
  Antisense strand to SEQ ID NO: 1755149
ucauucaaggccuuuccac

SEQ ID NO: 1755151 - RNA, 19 nt, Artificial Sequence
  Description of Artificial Sequence: Synthetic oligonucleotide
  Sense strand starting at position 3399 of SEQ ID NO: 1562545
ugucguuugcguccuggau

SEQ ID NO: 1755152 - RNA, 19 nt, Artificial Sequence
  Description of Artificial Sequence: Synthetic oligonucleotide
  Antisense strand to SEQ ID NO: 1755151
auccaggacgcaaacgaca

SEQ ID NO: 1755153 - RNA, 19 nt, Artificial Sequence
  Description of Artificial Sequence: Synthetic oligonucleotide
  Sense strand starting at position 3459 of SEQ ID NO: 1562545
ggagacugaugcucacuaa

SEQ ID NO: 1755154 - RNA, 19 nt, Artificial Sequence
  Description of Artificial Sequence: Synthetic oligonucleotide
  Antisense strand to SEQ ID NO: 1755153
uuagugagcaucagucucc

SEQ ID NO: 1755155 - RNA, 19 nt, Artificial Sequence
  Description of Artificial Sequence: Synthetic oligonucleotide
  Sense strand starting at position 3564 of SEQ ID NO: 1562545
uugagugcccgugauccaa

SEQ ID NO: 1755156 - RNA, 19 nt, Artificial Sequence
  Description of Artificial Sequence: Synthetic oligonucleotide
  Antisense strand to SEQ ID NO: 1755155
uuggaucacgggcacucaa

SEQ ID NO: 1755157 - RNA, 19 nt, Artificial Sequence
  Description of Artificial Sequence: Synthetic oligonucleotide
  Sense strand starting at position 3585 of SEQ ID NO: 1562545
uucugcaacuguuuggaaa

SEQ ID NO: 1755158 - RNA, 19 nt, Artificial Sequence
  Description of Artificial Sequence: Synthetic oligonucleotide
  Antisense strand to SEQ ID NO: 1755157
uuuccaaacaguugcagaa

SEQ ID NO: 1755159 - RNA, 19 nt, Artificial Sequence
  Description of Artificial Sequence: Synthetic oligonucleotide
  Sense strand starting at position 3671 of SEQ ID NO: 1562545
acagcuugcagaugaaugu

SEQ ID NO: 1755160 - RNA, 19 nt, Artificial Sequence
  Description of Artificial Sequence: Synthetic oligonucleotide
  Antisense strand to SEQ ID NO: 1755159
acauucaucugcaagcugu

SEQ ID NO: 1755161 - RNA, 19 nt, Artificial Sequence
  Description of Artificial Sequence: Synthetic oligonucleotide
  Sense strand starting at position 3684 of SEQ ID NO: 1562545
gaauguaauggccaggcua

SEQ ID NO: 1755162 - RNA, 19 nt, Artificial Sequence
  Description of Artificial Sequence: Synthetic oligonucleotide
  Antisense strand to SEQ ID NO: 1755161
uagccuggccauuacauuc

SEQ ID NO: 1755163 - RNA, 19 nt, Artificial Sequence
  Description of Artificial Sequence: Synthetic oligonucleotide
  Sense strand starting at position 3726 of SEQ ID NO: 1562545
aguuacaacugaguucgaa

SEQ ID NO: 1755164 - RNA, 19 nt, Artificial Sequence
  Description of Artificial Sequence: Synthetic oligonucleotide
  Antisense strand to SEQ ID NO: 1755163
uucgaacucaguuguaacu

SEQ ID NO: 1755165 - RNA, 19 nt, Artificial Sequence
  Description of Artificial Sequence: Synthetic oligonucleotide
  Sense strand starting at position 3758 of SEQ ID NO: 1562545
acagauuagccaugugagc

SEQ ID NO: 1755166 - RNA, 19 nt, Artificial Sequence
  Description of Artificial Sequence: Synthetic oligonucleotide
  Antisense strand to SEQ ID NO: 1755165
gcucacauggcuaaucugu

SEQ ID NO: 1755167 - RNA, 19 nt, Artificial Sequence
  Description of Artificial Sequence: Synthetic oligonucleotide
  Sense strand starting at position 3826 of SEQ ID NO: 1562545
gguagugauaaugaugguu

SEQ ID NO: 1755168 - RNA, 19 nt, Artificial Sequence
  Description of Artificial Sequence: Synthetic oligonucleotide
  Antisense strand to SEQ ID NO: 1755167
aaccaucauuaucacuacc

SEQ ID NO: 1755169 - RNA, 19 nt, Artificial Sequence
  Description of Artificial Sequence: Synthetic oligonucleotide
  Sense strand starting at position 3829 of SEQ ID NO: 1562545
agugauaaugaugguuauu

SEQ ID NO: 1755170 - RNA, 19 nt, Artificial Sequence
  Description of Artificial Sequence: Synthetic oligonucleotide
  Antisense strand to SEQ ID NO: 1755169
aauaaccaucauuaucacu

SEQ ID NO: 1755171 - RNA, 19 nt, Artificial Sequence
  Description of Artificial Sequence: Synthetic oligonucleotide
  Sense strand starting at position 3842 of SEQ ID NO: 1562545
guuauuaaaugcuuaugac

SEQ ID NO: 1755172 - RNA, 19 nt, Artificial Sequence
  Description of Artificial Sequence: Synthetic oligonucleotide
  Antisense strand to SEQ ID NO: 1755171
gucauaagcauuuaauaac

SEQ ID NO: 1755173 - RNA, 19 nt, Artificial Sequence
  Description of Artificial Sequence: Synthetic oligonucleotide
  Sense strand starting at position 3850 of SEQ ID NO: 1562545
augcuuaugacgcaugaaa

SEQ ID NO: 1755174 - RNA, 19 nt, Artificial Sequence
  Description of Artificial Sequence: Synthetic oligonucleotide
  Antisense strand to SEQ ID NO: 1755173
uuucaugcgucauaagcau

SEQ ID NO: 1755175 - RNA, 19 nt, Artificial Sequence
  Description of Artificial Sequence: Synthetic oligonucleotide
  Sense strand starting at position 3852 of SEQ ID NO: 1562545
gcuuaugacgcaugaaaca

SEQ ID NO: 1755176 - RNA, 19 nt, Artificial Sequence
  Description of Artificial Sequence: Synthetic oligonucleotide
  Antisense strand to SEQ ID NO: 1755175
uguuucaugcgucauaagc

SEQ ID NO: 1755177 - RNA, 19 nt, Artificial Sequence
  Description of Artificial Sequence: Synthetic oligonucleotide
  Sense strand starting at position 3889 of SEQ ID NO: 1562545
uguuauuacuguccuuuaa

SEQ ID NO: 1755178 - RNA, 19 nt, Artificial Sequence
  Description of Artificial Sequence: Synthetic oligonucleotide
  Antisense strand to SEQ ID NO: 1755177
uuaaaggacaguaauaaca

SEQ ID NO: 1755179 - RNA, 19 nt, Artificial Sequence
  Description of Artificial Sequence: Synthetic oligonucleotide
  Sense strand starting at position 266 of SEQ ID NO: 1562546
gugacaaagugguuaagaa

SEQ ID NO: 1755180 - RNA, 19 nt, Artificial Sequence
  Description of Artificial Sequence: Synthetic oligonucleotide
  Antisense strand to SEQ ID NO: 1755179
uucuuaaccacuuugucac

SEQ ID NO: 1755181 - RNA, 19 nt, Artificial Sequence
  Description of Artificial Sequence: Synthetic oligonucleotide
  Sense strand starting at position 373 of SEQ ID NO: 1562546
cugugcuuccucuguguuu

SEQ ID NO: 1755182 - RNA, 19 nt, Artificial Sequence
  Description of Artificial Sequence: Synthetic oligonucleotide
  Antisense strand to SEQ ID NO: 1755181
aaacacagaggaagcacag

SEQ ID NO: 1755183 - RNA, 19 nt, Artificial Sequence
  Description of Artificial Sequence: Synthetic oligonucleotide
  Sense strand starting at position 382 of SEQ ID NO: 1562546
cucuguguuuccucgcaua

SEQ ID NO: 1755184 - RNA, 19 nt, Artificial Sequence
  Description of Artificial Sequence: Synthetic oligonucleotide
  Antisense strand to SEQ ID NO: 1755183
uaugcgaggaaacacagag

SEQ ID NO: 1755185 - RNA, 19 nt, Artificial Sequence
  Description of Artificial Sequence: Synthetic oligonucleotide
  Sense strand starting at position 384 of SEQ ID NO: 1562546
cuguguuuccucgcauauc

SEQ ID NO: 1755186 - RNA, 19 nt, Artificial Sequence
  Description of Artificial Sequence: Synthetic oligonucleotide
  Antisense strand to SEQ ID NO: 1755185
gauaugcgaggaaacacag

SEQ ID NO: 1755187 - RNA, 19 nt, Artificial Sequence
  Description of Artificial Sequence: Synthetic oligonucleotide
  Sense strand starting at position 387 of SEQ ID NO: 1562546
uguuuccucgcauaucaaa

SEQ ID NO: 1755188 - RNA, 19 nt, Artificial Sequence
  Description of Artificial Sequence: Synthetic oligonucleotide
  Antisense strand to SEQ ID NO: 1755187
uuugauaugcgaggaaaca

SEQ ID NO: 1755189 - RNA, 19 nt, Artificial Sequence
  Description of Artificial Sequence: Synthetic oligonucleotide
  Sense strand starting at position 458 of SEQ ID NO: 1562546
uuagaagaguaccagguau

SEQ ID NO: 1755190 - RNA, 19 nt, Artificial Sequence
  Description of Artificial Sequence: Synthetic oligonucleotide
  Antisense strand to SEQ ID NO: 1755189
auaccugguacucuucuaa

SEQ ID NO: 1755191 - RNA, 19 nt, Artificial Sequence
  Description of Artificial Sequence: Synthetic oligonucleotide
  Sense strand starting at position 460 of SEQ ID NO: 1562546
agaagaguaccagguauau

SEQ ID NO: 1755192 - RNA, 19 nt, Artificial Sequence
  Description of Artificial Sequence: Synthetic oligonucleotide
  Antisense strand to SEQ ID NO: 1755191
auauaccugguacucuucu

SEQ ID NO: 1755193 - RNA, 19 nt, Artificial Sequence
  Description of Artificial Sequence: Synthetic oligonucleotide
  Sense strand starting at position 466 of SEQ ID NO: 1562546
guaccagguauaugggaaa

SEQ ID NO: 1755194 - RNA, 19 nt, Artificial Sequence
  Description of Artificial Sequence: Synthetic oligonucleotide
  Antisense strand to SEQ ID NO: 1755193
uuucccauauaccugguac

SEQ ID NO: 1755195 - RNA, 19 nt, Artificial Sequence
  Description of Artificial Sequence: Synthetic oligonucleotide
  Sense strand starting at position 473 of SEQ ID NO: 1562546
guauaugggaaaugcuaua

SEQ ID NO: 1755196 - RNA, 19 nt, Artificial Sequence
  Description of Artificial Sequence: Synthetic oligonucleotide
  Antisense strand to SEQ ID NO: 1755195
uauagcauuucccauauac

SEQ ID NO: 1755197 - RNA, 19 nt, Artificial Sequence
  Description of Artificial Sequence: Synthetic oligonucleotide
  Sense strand starting at position 509 of SEQ ID NO: 1562546
acauuaauguuagaugagu

SEQ ID NO: 1755198 - RNA, 19 nt, Artificial Sequence
  Description of Artificial Sequence: Synthetic oligonucleotide
  Antisense strand to SEQ ID NO: 1755197
acucaucuaacauuaaugu

SEQ ID NO: 1755199 - RNA, 19 nt, Artificial Sequence
  Description of Artificial Sequence: Synthetic oligonucleotide
  Sense strand starting at position 545 of SEQ ID NO: 1562546
uuuggaugcuuccagcuaa

SEQ ID NO: 1755200 - RNA, 19 nt, Artificial Sequence
  Description of Artificial Sequence: Synthetic oligonucleotide
  Antisense strand to SEQ ID NO: 1755199
uuagcuggaagcauccaaa

SEQ ID NO: 1755201 - RNA, 19 nt, Artificial Sequence
  Description of Artificial Sequence: Synthetic oligonucleotide
  Sense strand starting at position 2038 of SEQ ID NO: 1562546
aauggaaauguugguauca

SEQ ID NO: 1755202 - RNA, 19 nt, Artificial Sequence
  Description of Artificial Sequence: Synthetic oligonucleotide
  Antisense strand to SEQ ID NO: 1755201
ugauaccaacauuuccauu

SEQ ID NO: 1755203 - RNA, 19 nt, Artificial Sequence
  Description of Artificial Sequence: Synthetic oligonucleotide
  Sense strand starting at position 2039 of SEQ ID NO: 1562546
auggaaauguugguaucac

SEQ ID NO: 1755204 - RNA, 19 nt, Artificial Sequence
  Description of Artificial Sequence: Synthetic oligonucleotide
  Antisense strand to SEQ ID NO: 1755203
gugauaccaacauuuccau

SEQ ID NO: 1755205 - RNA, 19 nt, Artificial Sequence
  Description of Artificial Sequence: Synthetic oligonucleotide
  Sense strand starting at position 2049 of SEQ ID NO: 1562546
ugguaucaccaagaaagcu

SEQ ID NO: 1755206 - RNA, 19 nt, Artificial Sequence
  Description of Artificial Sequence: Synthetic oligonucleotide
  Antisense strand to SEQ ID NO: 1755205
agcuuucuuggugauacca

SEQ ID NO: 1755207 - RNA, 19 nt, Artificial Sequence
  Description of Artificial Sequence: Synthetic oligonucleotide
  Sense strand starting at position 2058 of SEQ ID NO: 1562546
caagaaagcuugcuuggua

SEQ ID NO: 1755208 - RNA, 19 nt, Artificial Sequence
  Description of Artificial Sequence: Synthetic oligonucleotide
  Antisense strand to SEQ ID NO: 1755207
uaccaagcaagcuuucuug

SEQ ID NO: 1755209 - RNA, 19 nt, Artificial Sequence
  Description of Artificial Sequence: Synthetic oligonucleotide
  Sense strand starting at position 2063 of SEQ ID NO: 1562546
aagcuugcuugguaccaua

SEQ ID NO: 1755210 - RNA, 19 nt, Artificial Sequence
  Description of Artificial Sequence: Synthetic oligonucleotide
  Antisense strand to SEQ ID NO: 1755209
uaugguaccaagcaagcuu

SEQ ID NO: 1755211 - RNA, 19 nt, Artificial Sequence
  Description of Artificial Sequence: Synthetic oligonucleotide
  Sense strand starting at position 2145 of SEQ ID NO: 1562546
uucugaucccaucaguuau

SEQ ID NO: 1755212 - RNA, 19 nt, Artificial Sequence
  Description of Artificial Sequence: Synthetic oligonucleotide
  Antisense strand to SEQ ID NO: 1755211
auaacugaugggaucagaa

SEQ ID NO: 1755213 - RNA, 19 nt, Artificial Sequence
  Description of Artificial Sequence: Synthetic oligonucleotide
  Sense strand starting at position 2151 of SEQ ID NO: 1562546
ucccaucaguuauggucaa

SEQ ID NO: 1755214 - RNA, 19 nt, Artificial Sequence
  Description of Artificial Sequence: Synthetic oligonucleotide
  Antisense strand to SEQ ID NO: 1755213
uugaccauaacugauggga

SEQ ID NO: 1755215 - RNA, 19 nt, Artificial Sequence
  Description of Artificial Sequence: Synthetic oligonucleotide
  Sense strand starting at position 2155 of SEQ ID NO: 1562546
aucaguuauggucaacuau

SEQ ID NO: 1755216 - RNA, 19 nt, Artificial Sequence
  Description of Artificial Sequence: Synthetic oligonucleotide
  Antisense strand to SEQ ID NO: 1755215
auaguugaccauaacugau

SEQ ID NO: 1755217 - RNA, 19 nt, Artificial Sequence
  Description of Artificial Sequence: Synthetic oligonucleotide
  Sense strand starting at position 2185 of SEQ ID NO: 1562546
gaauguacuguugggagga

SEQ ID NO: 1755218 - RNA, 19 nt, Artificial Sequence
  Description of Artificial Sequence: Synthetic oligonucleotide
  Antisense strand to SEQ ID NO: 1755217
uccucccaacaguacauuc

SEQ ID NO: 1755219 - RNA, 19 nt, Artificial Sequence
  Description of Artificial Sequence: Synthetic oligonucleotide
  Sense strand starting at position 2186 of SEQ ID NO: 1562546
aauguacuguugggaggaa

SEQ ID NO: 1755220 - RNA, 19 nt, Artificial Sequence
  Description of Artificial Sequence: Synthetic oligonucleotide
  Antisense strand to SEQ ID NO: 1755219
uuccucccaacaguacauu

SEQ ID NO: 1755221 - RNA, 19 nt, Artificial Sequence
  Description of Artificial Sequence: Synthetic oligonucleotide
  Sense strand starting at position 2187 of SEQ ID NO: 1562546
auguacuguugggaggaaa

SEQ ID NO: 1755222 - RNA, 19 nt, Artificial Sequence
  Description of Artificial Sequence: Synthetic oligonucleotide
  Antisense strand to SEQ ID NO: 1755221
uuuccucccaacaguacau

SEQ ID NO: 1755223 - RNA, 19 nt, Artificial Sequence
  Description of Artificial Sequence: Synthetic oligonucleotide
  Sense strand starting at position 2340 of SEQ ID NO: 1562546
aguuuagugcuacaaguag

SEQ ID NO: 1755224 - RNA, 19 nt, Artificial Sequence
  Description of Artificial Sequence: Synthetic oligonucleotide
  Antisense strand to SEQ ID NO: 1755223
cuacuuguagcacuaaacu

SEQ ID NO: 1755225 - RNA, 19 nt, Artificial Sequence
  Description of Artificial Sequence: Synthetic oligonucleotide
  Sense strand starting at position 2457 of SEQ ID NO: 1562546
agacaaagcugauagaaau

SEQ ID NO: 1755226 - RNA, 19 nt, Artificial Sequence
  Description of Artificial Sequence: Synthetic oligonucleotide
  Antisense strand to SEQ ID NO: 1755225
auuucuaucagcuuugucu

SEQ ID NO: 1755227 - RNA, 19 nt, Artificial Sequence
  Description of Artificial Sequence: Synthetic oligonucleotide
  Sense strand starting at position 2637 of SEQ ID NO: 1562546
ccucaaggauaucagacau

SEQ ID NO: 1755228 - RNA, 19 nt, Artificial Sequence
  Description of Artificial Sequence: Synthetic oligonucleotide
  Antisense strand to SEQ ID NO: 1755227
augucugauauccuugagg

SEQ ID NO: 1755229 - RNA, 19 nt, Artificial Sequence
  Description of Artificial Sequence: Synthetic oligonucleotide
  Sense strand starting at position 2655 of SEQ ID NO: 1562546
uugggaaugucugauauag

SEQ ID NO: 1755230 - RNA, 19 nt, Artificial Sequence
  Description of Artificial Sequence: Synthetic oligonucleotide
  Antisense strand to SEQ ID NO: 1755229
cuauaucagacauucccaa

SEQ ID NO: 1755231 - RNA, 19 nt, Artificial Sequence
  Description of Artificial Sequence: Synthetic oligonucleotide
  Sense strand starting at position 2657 of SEQ ID NO: 1562546
gggaaugucugauauaguc

SEQ ID NO: 1755232 - RNA, 19 nt, Artificial Sequence
  Description of Artificial Sequence: Synthetic oligonucleotide
  Antisense strand to SEQ ID NO: 1755231
gacuauaucagacauuccc

SEQ ID NO: 1755233 - RNA, 19 nt, Artificial Sequence
  Description of Artificial Sequence: Synthetic oligonucleotide
  Sense strand starting at position 3134 of SEQ ID NO: 1562546
agaggauauuaggcacagu

SEQ ID NO: 1755234 - RNA, 19 nt, Artificial Sequence
  Description of Artificial Sequence: Synthetic oligonucleotide
  Antisense strand to SEQ ID NO: 1755233
acugugccuaauauccucu

SEQ ID NO: 1755235 - RNA, 19 nt, Artificial Sequence
  Description of Artificial Sequence: Synthetic oligonucleotide
  Sense strand starting at position 3203 of SEQ ID NO: 1562546
acuguaaauucugguaaag

SEQ ID NO: 1755236 - RNA, 19 nt, Artificial Sequence
  Description of Artificial Sequence: Synthetic oligonucleotide
  Antisense strand to SEQ ID NO: 1755235
cuuuaccagaauuuacagu

SEQ ID NO: 1755237 - RNA, 19 nt, Artificial Sequence
  Description of Artificial Sequence: Synthetic oligonucleotide
  Sense strand starting at position 3205 of SEQ ID NO: 1562546
uguaaauucugguaaagag

SEQ ID NO: 1755238 - RNA, 19 nt, Artificial Sequence
  Description of Artificial Sequence: Synthetic oligonucleotide
  Antisense strand to SEQ ID NO: 1755237
cucuuuaccagaauuuaca

SEQ ID NO: 1755239 - RNA, 19 nt, Artificial Sequence
  Description of Artificial Sequence: Synthetic oligonucleotide
  Sense strand starting at position 3266 of SEQ ID NO: 1562546
cuggaaacaguuuagugua

SEQ ID NO: 1755240 - RNA, 19 nt, Artificial Sequence
  Description of Artificial Sequence: Synthetic oligonucleotide
  Antisense strand to SEQ ID NO: 1755239
uacacuaaacuguuuccag

SEQ ID NO: 1755241 - RNA, 19 nt, Artificial Sequence
  Description of Artificial Sequence: Synthetic oligonucleotide
  Sense strand starting at position 3268 of SEQ ID NO: 1562546
ggaaacaguuuaguguaua

SEQ ID NO: 1755242 - RNA, 19 nt, Artificial Sequence
  Description of Artificial Sequence: Synthetic oligonucleotide
  Antisense strand to SEQ ID NO: 1755241
uauacacuaaacuguuucc

SEQ ID NO: 1755243 - RNA, 19 nt, Artificial Sequence
  Description of Artificial Sequence: Synthetic oligonucleotide
  Sense strand starting at position 3269 of SEQ ID NO: 1562546
gaaacaguuuaguguauau

SEQ ID NO: 1755244 - RNA, 19 nt, Artificial Sequence
  Description of Artificial Sequence: Synthetic oligonucleotide
  Antisense strand to SEQ ID NO: 1755243
auauacacuaaacuguuuc

SEQ ID NO: 1755245 - RNA, 19 nt, Artificial Sequence
  Description of Artificial Sequence: Synthetic oligonucleotide
  Sense strand starting at position 3316 of SEQ ID NO: 1562546
agaagagacuaaugagaca

SEQ ID NO: 1755246 - RNA, 19 nt, Artificial Sequence
  Description of Artificial Sequence: Synthetic oligonucleotide
  Antisense strand to SEQ ID NO: 1755245
ugucucauuagucucuucu

SEQ ID NO: 1755247 - RNA, 19 nt, Artificial Sequence
  Description of Artificial Sequence: Synthetic oligonucleotide
  Sense strand starting at position 3319 of SEQ ID NO: 1562546
agagacuaaugagacauaa

SEQ ID NO: 1755248 - RNA, 19 nt, Artificial Sequence
  Description of Artificial Sequence: Synthetic oligonucleotide
  Antisense strand to SEQ ID NO: 1755247
uuaugucucauuagucucu

SEQ ID NO: 1755249 - RNA, 19 nt, Artificial Sequence
  Description of Artificial Sequence: Synthetic oligonucleotide
  Sense strand starting at position 3437 of SEQ ID NO: 1562546
uaucuagacuuagaaguga

SEQ ID NO: 1755250 - RNA, 19 nt, Artificial Sequence
  Description of Artificial Sequence: Synthetic oligonucleotide
  Antisense strand to SEQ ID NO: 1755249
ucacuucuaagucuagaua

SEQ ID NO: 1755251 - RNA, 19 nt, Artificial Sequence
  Description of Artificial Sequence: Synthetic oligonucleotide
  Sense strand starting at position 3446 of SEQ ID NO: 1562546
uuagaagugaaaugaugua

SEQ ID NO: 1755252 - RNA, 19 nt, Artificial Sequence
  Description of Artificial Sequence: Synthetic oligonucleotide
  Antisense strand to SEQ ID NO: 1755251
uacaucauuucacuucuaa

SEQ ID NO: 1755253 - RNA, 19 nt, Artificial Sequence
  Description of Artificial Sequence: Synthetic oligonucleotide
  Sense strand starting at position 3854 of SEQ ID NO: 1562546
ggcagcacacuuuguauaa

SEQ ID NO: 1755254 - RNA, 19 nt, Artificial Sequence
  Description of Artificial Sequence: Synthetic oligonucleotide
  Antisense strand to SEQ ID NO: 1755253
uuauacaaagugugcugcc

SEQ ID NO: 1755255 - RNA, 19 nt, Artificial Sequence
  Description of Artificial Sequence: Synthetic oligonucleotide
  Sense strand starting at position 3858 of SEQ ID NO: 1562546
gcacacuuuguauaagcaa

SEQ ID NO: 1755256 - RNA, 19 nt, Artificial Sequence
  Description of Artificial Sequence: Synthetic oligonucleotide
  Antisense strand to SEQ ID NO: 1755255
uugcuuauacaaagugugc

SEQ ID NO: 1755257 - RNA, 19 nt, Artificial Sequence
  Description of Artificial Sequence: Synthetic oligonucleotide
  Sense strand starting at position 3873 of SEQ ID NO: 1562546
gcaacagcagaauaguauu

SEQ ID NO: 1755258 - RNA, 19 nt, Artificial Sequence
  Description of Artificial Sequence: Synthetic oligonucleotide
  Antisense strand to SEQ ID NO: 1755257
aauacuauucugcuguugc

SEQ ID NO: 1755259 - RNA, 19 nt, Artificial Sequence
  Description of Artificial Sequence: Synthetic oligonucleotide
  Sense strand starting at position 140 of SEQ ID NO: 1562549
aguacauugcauugaauug

SEQ ID NO: 1755260 - RNA, 19 nt, Artificial Sequence
  Description of Artificial Sequence: Synthetic oligonucleotide
  Antisense strand to SEQ ID NO: 1755259
caauucaaugcaauguacu

SEQ ID NO: 1755261 - RNA, 19 nt, Artificial Sequence
  Description of Artificial Sequence: Synthetic oligonucleotide
  Sense strand starting at position 432 of SEQ ID NO: 1562549
ugaguagaaguccaugcua

SEQ ID NO: 1755262 - RNA, 19 nt, Artificial Sequence
  Description of Artificial Sequence: Synthetic oligonucleotide
  Antisense strand to SEQ ID NO: 1755261
uagcauggacuucuacuca

SEQ ID NO: 1755263 - RNA, 19 nt, Artificial Sequence
  Description of Artificial Sequence: Synthetic oligonucleotide
  Sense strand starting at position 662 of SEQ ID NO: 1562549
cuggcuuagcuugaacaua

SEQ ID NO: 1755264 - RNA, 19 nt, Artificial Sequence
  Description of Artificial Sequence: Synthetic oligonucleotide
  Antisense strand to SEQ ID NO: 1755263
uauguucaagcuaagccag

SEQ ID NO: 1755265 - RNA, 19 nt, Artificial Sequence
  Description of Artificial Sequence: Synthetic oligonucleotide
  Sense strand starting at position 711 of SEQ ID NO: 1562549
aagaaauggguuugucuag

SEQ ID NO: 1755266 - RNA, 19 nt, Artificial Sequence
  Description of Artificial Sequence: Synthetic oligonucleotide
  Antisense strand to SEQ ID NO: 1755265
cuagacaaacccauuucuu

SEQ ID NO: 1755267 - RNA, 19 nt, Artificial Sequence
  Description of Artificial Sequence: Synthetic oligonucleotide
  Sense strand starting at position 765 of SEQ ID NO: 1562549
uguuauaguguggaaggaa

SEQ ID NO: 1755268 - RNA, 19 nt, Artificial Sequence
  Description of Artificial Sequence: Synthetic oligonucleotide
  Antisense strand to SEQ ID NO: 1755267
uuccuuccacacuauaaca

SEQ ID NO: 1755269 - RNA, 19 nt, Artificial Sequence
  Description of Artificial Sequence: Synthetic oligonucleotide
  Sense strand starting at position 905 of SEQ ID NO: 1562549
augaaugggucagauuuaa

SEQ ID NO: 1755270 - RNA, 19 nt, Artificial Sequence
  Description of Artificial Sequence: Synthetic oligonucleotide
  Antisense strand to SEQ ID NO: 1755269
uuaaaucugacccauucau

SEQ ID NO: 1755271 - RNA, 19 nt, Artificial Sequence
  Description of Artificial Sequence: Synthetic oligonucleotide
  Sense strand starting at position 936 of SEQ ID NO: 1562549
ccaugaaagcuguaaccca

SEQ ID NO: 1755272 - RNA, 19 nt, Artificial Sequence
  Description of Artificial Sequence: Synthetic oligonucleotide
  Antisense strand to SEQ ID NO: 1755271
uggguuacagcuuucaugg

SEQ ID NO: 1755273 - RNA, 19 nt, Artificial Sequence
  Description of Artificial Sequence: Synthetic oligonucleotide
  Sense strand starting at position 1071 of SEQ ID NO: 1562549
cuacccauuuguuucguua

SEQ ID NO: 1755274 - RNA, 19 nt, Artificial Sequence
  Description of Artificial Sequence: Synthetic oligonucleotide
  Antisense strand to SEQ ID NO: 1755273
uaacgaaacaaauggguag

SEQ ID NO: 1755275 - RNA, 19 nt, Artificial Sequence
  Description of Artificial Sequence: Synthetic oligonucleotide
  Sense strand starting at position 1074 of SEQ ID NO: 1562549
cccauuuguuucguuauca

SEQ ID NO: 1755276 - RNA, 19 nt, Artificial Sequence
  Description of Artificial Sequence: Synthetic oligonucleotide
  Antisense strand to SEQ ID NO: 1755275
ugauaacgaaacaaauggg

SEQ ID NO: 1755277 - RNA, 19 nt, Artificial Sequence
  Description of Artificial Sequence: Synthetic oligonucleotide
  Sense strand starting at position 1075 of SEQ ID NO: 1562549
ccauuuguuucguuaucag

SEQ ID NO: 1755278 - RNA, 19 nt, Artificial Sequence
  Description of Artificial Sequence: Synthetic oligonucleotide
  Antisense strand to SEQ ID NO: 1755277
cugauaacgaaacaaaugg

SEQ ID NO: 1755279 - RNA, 19 nt, Artificial Sequence
  Description of Artificial Sequence: Synthetic oligonucleotide
  Sense strand starting at position 1101 of SEQ ID NO: 1562549
agggauugucucugaggac

SEQ ID NO: 1755280 - RNA, 19 nt, Artificial Sequence
  Description of Artificial Sequence: Synthetic oligonucleotide
  Antisense strand to SEQ ID NO: 1755279
guccucagagacaaucccu

SEQ ID NO: 1755281 - RNA, 19 nt, Artificial Sequence
  Description of Artificial Sequence: Synthetic oligonucleotide
  Sense strand starting at position 1105 of SEQ ID NO: 1562549
auugucucugaggacaagu

SEQ ID NO: 1755282 - RNA, 19 nt, Artificial Sequence
  Description of Artificial Sequence: Synthetic oligonucleotide
  Antisense strand to SEQ ID NO: 1755281
acuuguccucagagacaau

SEQ ID NO: 1755283 - RNA, 19 nt, Artificial Sequence
  Description of Artificial Sequence: Synthetic oligonucleotide
  Sense strand starting at position 1213 of SEQ ID NO: 1562549
gaguuugaauaucuugaaa

SEQ ID NO: 1755284 - RNA, 19 nt, Artificial Sequence
  Description of Artificial Sequence: Synthetic oligonucleotide
  Antisense strand to SEQ ID NO: 1755283
uuucaagauauucaaacuc

SEQ ID NO: 1755285 - RNA, 19 nt, Artificial Sequence
  Description of Artificial Sequence: Synthetic oligonucleotide
  Sense strand starting at position 1316 of SEQ ID NO: 1562549
agaguaauacauggcuucu

SEQ ID NO: 1755286 - RNA, 19 nt, Artificial Sequence
  Description of Artificial Sequence: Synthetic oligonucleotide
  Antisense strand to SEQ ID NO: 1755285
agaagccauguauuacucu

SEQ ID NO: 1755287 - RNA, 19 nt, Artificial Sequence
  Description of Artificial Sequence: Synthetic oligonucleotide
  Sense strand starting at position 1318 of SEQ ID NO: 1562549
aguaauacauggcuucuga

SEQ ID NO: 1755288 - RNA, 19 nt, Artificial Sequence
  Description of Artificial Sequence: Synthetic oligonucleotide
  Antisense strand to SEQ ID NO: 1755287
ucagaagccauguauuacu

SEQ ID NO: 1755289 - RNA, 19 nt, Artificial Sequence
  Description of Artificial Sequence: Synthetic oligonucleotide
  Sense strand starting at position 1595 of SEQ ID NO: 1562549
ccucauguggguuggacaa

SEQ ID NO: 1755290 - RNA, 19 nt, Artificial Sequence
  Description of Artificial Sequence: Synthetic oligonucleotide
  Antisense strand to SEQ ID NO: 1755289
uuguccaacccacaugagg

SEQ ID NO: 1755291 - RNA, 19 nt, Artificial Sequence
  Description of Artificial Sequence: Synthetic oligonucleotide
  Sense strand starting at position 1607 of SEQ ID NO: 1562549
uggacaagcuuggucaaga

SEQ ID NO: 1755292 - RNA, 19 nt, Artificial Sequence
  Description of Artificial Sequence: Synthetic oligonucleotide
  Antisense strand to SEQ ID NO: 1755291
ucuugaccaagcuugucca

SEQ ID NO: 1755293 - RNA, 19 nt, Artificial Sequence
  Description of Artificial Sequence: Synthetic oligonucleotide
  Sense strand starting at position 1608 of SEQ ID NO: 1562549
ggacaagcuuggucaagau

SEQ ID NO: 1755294 - RNA, 19 nt, Artificial Sequence
  Description of Artificial Sequence: Synthetic oligonucleotide
  Antisense strand to SEQ ID NO: 1755293
aucuugaccaagcuugucc

SEQ ID NO: 1755295 - RNA, 19 nt, Artificial Sequence
  Description of Artificial Sequence: Synthetic oligonucleotide
  Sense strand starting at position 2051 of SEQ ID NO: 1562549
uccuguuugcaugagauau

SEQ ID NO: 1755296 - RNA, 19 nt, Artificial Sequence
  Description of Artificial Sequence: Synthetic oligonucleotide
  Antisense strand to SEQ ID NO: 1755295
auaucucaugcaaacagga

SEQ ID NO: 1755297 - RNA, 19 nt, Artificial Sequence
  Description of Artificial Sequence: Synthetic oligonucleotide
  Sense strand starting at position 2055 of SEQ ID NO: 1562549
guuugcaugagauaucagu

SEQ ID NO: 1755298 - RNA, 19 nt, Artificial Sequence
  Description of Artificial Sequence: Synthetic oligonucleotide
  Antisense strand to SEQ ID NO: 1755297
acugauaucucaugcaaac

SEQ ID NO: 1755299 - RNA, 19 nt, Artificial Sequence
  Description of Artificial Sequence: Synthetic oligonucleotide
  Sense strand starting at position 2078 of SEQ ID NO: 1562549
agaauucuguuugcaggau

SEQ ID NO: 1755300 - RNA, 19 nt, Artificial Sequence
  Description of Artificial Sequence: Synthetic oligonucleotide
  Antisense strand to SEQ ID NO: 1755299
auccugcaaacagaauucu

SEQ ID NO: 1755301 - RNA, 19 nt, Artificial Sequence
  Description of Artificial Sequence: Synthetic oligonucleotide
  Sense strand starting at position 2138 of SEQ ID NO: 1562549
ggaguuugaggcuaaaggu

SEQ ID NO: 1755302 - RNA, 19 nt, Artificial Sequence
  Description of Artificial Sequence: Synthetic oligonucleotide
  Antisense strand to SEQ ID NO: 1755301
accuuuagccucaaacucc

SEQ ID NO: 1755303 - RNA, 19 nt, Artificial Sequence
  Description of Artificial Sequence: Synthetic oligonucleotide
  Sense strand starting at position 2189 of SEQ ID NO: 1562549
uagggacuuggcuaguauu

SEQ ID NO: 1755304 - RNA, 19 nt, Artificial Sequence
  Description of Artificial Sequence: Synthetic oligonucleotide
  Antisense strand to SEQ ID NO: 1755303
aauacuagccaagucccua

SEQ ID NO: 1755305 - RNA, 19 nt, Artificial Sequence
  Description of Artificial Sequence: Synthetic oligonucleotide
  Sense strand starting at position 2202 of SEQ ID NO: 1562549
aguauucgggagcaagaau

SEQ ID NO: 1755306 - RNA, 19 nt, Artificial Sequence
  Description of Artificial Sequence: Synthetic oligonucleotide
  Antisense strand to SEQ ID NO: 1755305
auucuugcucccgaauacu

SEQ ID NO: 1755307 - RNA, 19 nt, Artificial Sequence
  Description of Artificial Sequence: Synthetic oligonucleotide
  Sense strand starting at position 2439 of SEQ ID NO: 1562549
gcuuuauauguguacagaa

SEQ ID NO: 1755308 - RNA, 19 nt, Artificial Sequence
  Description of Artificial Sequence: Synthetic oligonucleotide
  Antisense strand to SEQ ID NO: 1755307
uucuguacacauauaaagc

SEQ ID NO: 1755309 - RNA, 19 nt, Artificial Sequence
  Description of Artificial Sequence: Synthetic oligonucleotide
  Sense strand starting at position 2463 of SEQ ID NO: 1562549
gaugaaucauauguguaua

SEQ ID NO: 1755310 - RNA, 19 nt, Artificial Sequence
  Description of Artificial Sequence: Synthetic oligonucleotide
  Antisense strand to SEQ ID NO: 1755309
uauacacauaugauucauc

SEQ ID NO: 1755311 - RNA, 19 nt, Artificial Sequence
  Description of Artificial Sequence: Synthetic oligonucleotide
  Sense strand starting at position 2466 of SEQ ID NO: 1562549
gaaucauauguguauagcu

SEQ ID NO: 1755312 - RNA, 19 nt, Artificial Sequence
  Description of Artificial Sequence: Synthetic oligonucleotide
  Antisense strand to SEQ ID NO: 1755311
agcuauacacauaugauuc

SEQ ID NO: 1755313 - RNA, 19 nt, Artificial Sequence
  Description of Artificial Sequence: Synthetic oligonucleotide
  Sense strand starting at position 2473 of SEQ ID NO: 1562549
auguguauagcucaaggaa

SEQ ID NO: 1755314 - RNA, 19 nt, Artificial Sequence
  Description of Artificial Sequence: Synthetic oligonucleotide
  Antisense strand to SEQ ID NO: 1755313
uuccuugagcuauacacau

SEQ ID NO: 1755315 - RNA, 19 nt, Artificial Sequence
  Description of Artificial Sequence: Synthetic oligonucleotide
  Sense strand starting at position 2742 of SEQ ID NO: 1562549
gagauagccugcucuggaa

SEQ ID NO: 1755316 - RNA, 19 nt, Artificial Sequence
  Description of Artificial Sequence: Synthetic oligonucleotide
  Antisense strand to SEQ ID NO: 1755315
uuccagagcaggcuaucuc

SEQ ID NO: 1755317 - RNA, 19 nt, Artificial Sequence
  Description of Artificial Sequence: Synthetic oligonucleotide
  Sense strand starting at position 2833 of SEQ ID NO: 1562549
aguaaacugcuguaucacu

SEQ ID NO: 1755318 - RNA, 19 nt, Artificial Sequence
  Description of Artificial Sequence: Synthetic oligonucleotide
  Antisense strand to SEQ ID NO: 1755317
agugauacagcaguuuacu

SEQ ID NO: 1755319 - RNA, 19 nt, Artificial Sequence
  Description of Artificial Sequence: Synthetic oligonucleotide
  Sense strand starting at position 2844 of SEQ ID NO: 1562549
guaucacuuguauaugaau

SEQ ID NO: 1755320 - RNA, 19 nt, Artificial Sequence
  Description of Artificial Sequence: Synthetic oligonucleotide
  Antisense strand to SEQ ID NO: 1755319
auucauauacaagugauac

SEQ ID NO: 1755321 - RNA, 19 nt, Artificial Sequence
  Description of Artificial Sequence: Synthetic oligonucleotide
  Sense strand starting at position 2990 of SEQ ID NO: 1562549
acuguuauugcuguguagu

SEQ ID NO: 1755322 - RNA, 19 nt, Artificial Sequence
  Description of Artificial Sequence: Synthetic oligonucleotide
  Antisense strand to SEQ ID NO: 1755321
acuacacagcaauaacagu

SEQ ID NO: 1755323 - RNA, 19 nt, Artificial Sequence
  Description of Artificial Sequence: Synthetic oligonucleotide
  Sense strand starting at position 3412 of SEQ ID NO: 1562549
uaacuaauguugcugagga

SEQ ID NO: 1755324 - RNA, 19 nt, Artificial Sequence
  Description of Artificial Sequence: Synthetic oligonucleotide
  Antisense strand to SEQ ID NO: 1755323
uccucagcaacauuaguua

SEQ ID NO: 1755325 - RNA, 19 nt, Artificial Sequence
  Description of Artificial Sequence: Synthetic oligonucleotide
  Sense strand starting at position 3461 of SEQ ID NO: 1562549
gcaugcauuucuguuaggu

SEQ ID NO: 1755326 - RNA, 19 nt, Artificial Sequence
  Description of Artificial Sequence: Synthetic oligonucleotide
  Antisense strand to SEQ ID NO: 1755325
accuaacagaaaugcaugc

SEQ ID NO: 1755327 - RNA, 19 nt, Artificial Sequence
  Description of Artificial Sequence: Synthetic oligonucleotide
  Sense strand starting at position 3467 of SEQ ID NO: 1562549
auuucuguuaggugugcau

SEQ ID NO: 1755328 - RNA, 19 nt, Artificial Sequence
  Description of Artificial Sequence: Synthetic oligonucleotide
  Antisense strand to SEQ ID NO: 1755327
augcacaccuaacagaaau

SEQ ID NO: 1755329 - RNA, 19 nt, Artificial Sequence
  Description of Artificial Sequence: Synthetic oligonucleotide
  Sense strand starting at position 3796 of SEQ ID NO: 1562549
ugggaacucugguuagagu

SEQ ID NO: 1755330 - RNA, 19 nt, Artificial Sequence
  Description of Artificial Sequence: Synthetic oligonucleotide
  Antisense strand to SEQ ID NO: 1755329
acucuaaccagaguuccca

SEQ ID NO: 1755331 - RNA, 19 nt, Artificial Sequence
  Description of Artificial Sequence: Synthetic oligonucleotide
  Sense strand starting at position 3797 of SEQ ID NO: 1562549
gggaacucugguuagaguu

SEQ ID NO: 1755332 - RNA, 19 nt, Artificial Sequence
  Description of Artificial Sequence: Synthetic oligonucleotide
  Antisense strand to SEQ ID NO: 1755331
aacucuaaccagaguuccc

SEQ ID NO: 1755333 - RNA, 19 nt, Artificial Sequence
  Description of Artificial Sequence: Synthetic oligonucleotide
  Sense strand starting at position 3831 of SEQ ID NO: 1562549
aagagauuguuguuaaucc

SEQ ID NO: 1755334 - RNA, 19 nt, Artificial Sequence
  Description of Artificial Sequence: Synthetic oligonucleotide
  Antisense strand to SEQ ID NO: 1755333
ggauuaacaacaaucucuu

SEQ ID NO: 1755335 - RNA, 19 nt, Artificial Sequence
  Description of Artificial Sequence: Synthetic oligonucleotide
  Sense strand starting at position 3840 of SEQ ID NO: 1562549
uuguuaauccaacaucgau

SEQ ID NO: 1755336 - RNA, 19 nt, Artificial Sequence
  Description of Artificial Sequence: Synthetic oligonucleotide
  Antisense strand to SEQ ID NO: 1755335
aucgauguuggauuaacaa

SEQ ID NO: 1755337 - RNA, 19 nt, Artificial Sequence
  Description of Artificial Sequence: Synthetic oligonucleotide
  Sense strand starting at position 3855 of SEQ ID NO: 1562549
cgaugaagaucaucuaugu

SEQ ID NO: 1755338 - RNA, 19 nt, Artificial Sequence
  Description of Artificial Sequence: Synthetic oligonucleotide
  Antisense strand to SEQ ID NO: 1755337
acauagaugaucuucaucg

SEQ ID NO: 1755339 - RNA, 19 nt, Artificial Sequence
  Description of Artificial Sequence: Synthetic oligonucleotide
  Sense strand starting at position 73 of SEQ ID NO: 1562550
aguuacuauuggccuaauu

SEQ ID NO: 1755340 - RNA, 19 nt, Artificial Sequence
  Description of Artificial Sequence: Synthetic oligonucleotide
  Antisense strand to SEQ ID NO: 1755339
aauuaggccaauaguaacu

SEQ ID NO: 1755341 - RNA, 19 nt, Artificial Sequence
  Description of Artificial Sequence: Synthetic oligonucleotide
  Sense strand starting at position 255 of SEQ ID NO: 1562550
agaucacaguaauagauua

SEQ ID NO: 1755342 - RNA, 19 nt, Artificial Sequence
  Description of Artificial Sequence: Synthetic oligonucleotide
  Antisense strand to SEQ ID NO: 1755341
uaaucuauuacugugaucu

SEQ ID NO: 1755343 - RNA, 19 nt, Artificial Sequence
  Description of Artificial Sequence: Synthetic oligonucleotide
  Sense strand starting at position 368 of SEQ ID NO: 1562550
aaugcaagaucugcgaagu

SEQ ID NO: 1755344 - RNA, 19 nt, Artificial Sequence
  Description of Artificial Sequence: Synthetic oligonucleotide
  Antisense strand to SEQ ID NO: 1755343
acuucgcagaucuugcauu

SEQ ID NO: 1755345 - RNA, 19 nt, Artificial Sequence
  Description of Artificial Sequence: Synthetic oligonucleotide
  Sense strand starting at position 381 of SEQ ID NO: 1562550
cgaagugaagcucaauaaa

SEQ ID NO: 1755346 - RNA, 19 nt, Artificial Sequence
  Description of Artificial Sequence: Synthetic oligonucleotide
  Antisense strand to SEQ ID NO: 1755345
uuuauugagcuucacuucg

SEQ ID NO: 1755347 - RNA, 19 nt, Artificial Sequence
  Description of Artificial Sequence: Synthetic oligonucleotide
  Sense strand starting at position 431 of SEQ ID NO: 1562550
uauguucugcuuuagcaga

SEQ ID NO: 1755348 - RNA, 19 nt, Artificial Sequence
  Description of Artificial Sequence: Synthetic oligonucleotide
  Antisense strand to SEQ ID NO: 1755347
ucugcuaaagcagaacaua

SEQ ID NO: 1755349 - RNA, 19 nt, Artificial Sequence
  Description of Artificial Sequence: Synthetic oligonucleotide
  Sense strand starting at position 433 of SEQ ID NO: 1562550
uguucugcuuuagcagaca

SEQ ID NO: 1755350 - RNA, 19 nt, Artificial Sequence
  Description of Artificial Sequence: Synthetic oligonucleotide
  Antisense strand to SEQ ID NO: 1755349
ugucugcuaaagcagaaca

SEQ ID NO: 1755351 - RNA, 19 nt, Artificial Sequence
  Description of Artificial Sequence: Synthetic oligonucleotide
  Sense strand starting at position 436 of SEQ ID NO: 1562550
ucugcuuuagcagacacua

SEQ ID NO: 1755352 - RNA, 19 nt, Artificial Sequence
  Description of Artificial Sequence: Synthetic oligonucleotide
  Antisense strand to SEQ ID NO: 1755351
uagugucugcuaaagcaga

SEQ ID NO: 1755353 - RNA, 19 nt, Artificial Sequence
  Description of Artificial Sequence: Synthetic oligonucleotide
  Sense strand starting at position 455 of SEQ ID NO: 1562550
gguggcgagcguuauuuga

SEQ ID NO: 1755354 - RNA, 19 nt, Artificial Sequence
  Description of Artificial Sequence: Synthetic oligonucleotide
  Antisense strand to SEQ ID NO: 1755353
ucaaauaacgcucgccacc

SEQ ID NO: 1755355 - RNA, 19 nt, Artificial Sequence
  Description of Artificial Sequence: Synthetic oligonucleotide
  Sense strand starting at position 457 of SEQ ID NO: 1562550
uggcgagcguuauuugaac

SEQ ID NO: 1755356 - RNA, 19 nt, Artificial Sequence
  Description of Artificial Sequence: Synthetic oligonucleotide
  Antisense strand to SEQ ID NO: 1755355
guucaaauaacgcucgcca

SEQ ID NO: 1755357 - RNA, 19 nt, Artificial Sequence
  Description of Artificial Sequence: Synthetic oligonucleotide
  Sense strand starting at position 459 of SEQ ID NO: 1562550
gcgagcguuauuugaacgu

SEQ ID NO: 1755358 - RNA, 19 nt, Artificial Sequence
  Description of Artificial Sequence: Synthetic oligonucleotide
  Antisense strand to SEQ ID NO: 1755357
acguucaaauaacgcucgc

SEQ ID NO: 1755359 - RNA, 19 nt, Artificial Sequence
  Description of Artificial Sequence: Synthetic oligonucleotide
  Sense strand starting at position 463 of SEQ ID NO: 1562550
gcguuauuugaacguuuac

SEQ ID NO: 1755360 - RNA, 19 nt, Artificial Sequence
  Description of Artificial Sequence: Synthetic oligonucleotide
  Antisense strand to SEQ ID NO: 1755359
guaaacguucaaauaacgc

SEQ ID NO: 1755361 - RNA, 19 nt, Artificial Sequence
  Description of Artificial Sequence: Synthetic oligonucleotide
  Sense strand starting at position 492 of SEQ ID NO: 1562550
guguaucugcggcugcaua

SEQ ID NO: 1755362 - RNA, 19 nt, Artificial Sequence
  Description of Artificial Sequence: Synthetic oligonucleotide
  Antisense strand to SEQ ID NO: 1755361
uaugcagccgcagauacac

SEQ ID NO: 1755363 - RNA, 19 nt, Artificial Sequence
  Description of Artificial Sequence: Synthetic oligonucleotide
  Sense strand starting at position 503 of SEQ ID NO: 1562550
gcugcauauccauggauuc

SEQ ID NO: 1755364 - RNA, 19 nt, Artificial Sequence
  Description of Artificial Sequence: Synthetic oligonucleotide
  Antisense strand to SEQ ID NO: 1755363
gaauccauggauaugcagc

SEQ ID NO: 1755365 - RNA, 19 nt, Artificial Sequence
  Description of Artificial Sequence: Synthetic oligonucleotide
  Sense strand starting at position 505 of SEQ ID NO: 1562550
ugcauauccauggauucga

SEQ ID NO: 1755366 - RNA, 19 nt, Artificial Sequence
  Description of Artificial Sequence: Synthetic oligonucleotide
  Antisense strand to SEQ ID NO: 1755365
ucgaauccauggauaugca

SEQ ID NO: 1755367 - RNA, 19 nt, Artificial Sequence
  Description of Artificial Sequence: Synthetic oligonucleotide
  Sense strand starting at position 598 of SEQ ID NO: 1562550
caguguaacuauuugugca

SEQ ID NO: 1755368 - RNA, 19 nt, Artificial Sequence
  Description of Artificial Sequence: Synthetic oligonucleotide
  Antisense strand to SEQ ID NO: 1755367
ugcacaaauaguuacacug

SEQ ID NO: 1755369 - RNA, 19 nt, Artificial Sequence
  Description of Artificial Sequence: Synthetic oligonucleotide
  Sense strand starting at position 642 of SEQ ID NO: 1562550
aaguaaccuugagaugauu

SEQ ID NO: 1755370 - RNA, 19 nt, Artificial Sequence
  Description of Artificial Sequence: Synthetic oligonucleotide
  Antisense strand to SEQ ID NO: 1755369
aaucaucucaagguuacuu

SEQ ID NO: 1755371 - RNA, 19 nt, Artificial Sequence
  Description of Artificial Sequence: Synthetic oligonucleotide
  Sense strand starting at position 672 of SEQ ID NO: 1562550
agaggcuaugcauacauua

SEQ ID NO: 1755372 - RNA, 19 nt, Artificial Sequence
  Description of Artificial Sequence: Synthetic oligonucleotide
  Antisense strand to SEQ ID NO: 1755371
uaauguaugcauagccucu

SEQ ID NO: 1755373 - RNA, 19 nt, Artificial Sequence
  Description of Artificial Sequence: Synthetic oligonucleotide
  Sense strand starting at position 713 of SEQ ID NO: 1562550
auaguagggacuugagcau

SEQ ID NO: 1755374 - RNA, 19 nt, Artificial Sequence
  Description of Artificial Sequence: Synthetic oligonucleotide
  Antisense strand to SEQ ID NO: 1755373
augcucaagucccuacuau

SEQ ID NO: 1755375 - RNA, 19 nt, Artificial Sequence
  Description of Artificial Sequence: Synthetic oligonucleotide
  Sense strand starting at position 1007 of SEQ ID NO: 1562550
gguuacacaucagguauuu

SEQ ID NO: 1755376 - RNA, 19 nt, Artificial Sequence
  Description of Artificial Sequence: Synthetic oligonucleotide
  Antisense strand to SEQ ID NO: 1755375
aaauaccugauguguaacc

SEQ ID NO: 1755377 - RNA, 19 nt, Artificial Sequence
  Description of Artificial Sequence: Synthetic oligonucleotide
  Sense strand starting at position 1148 of SEQ ID NO: 1562550
gcucuuagccggcuacuau

SEQ ID NO: 1755378 - RNA, 19 nt, Artificial Sequence
  Description of Artificial Sequence: Synthetic oligonucleotide
  Antisense strand to SEQ ID NO: 1755377
auaguagccggcuaagagc

SEQ ID NO: 1755379 - RNA, 19 nt, Artificial Sequence
  Description of Artificial Sequence: Synthetic oligonucleotide
  Sense strand starting at position 1210 of SEQ ID NO: 1562550
augguauuccaagacuucu

SEQ ID NO: 1755380 - RNA, 19 nt, Artificial Sequence
  Description of Artificial Sequence: Synthetic oligonucleotide
  Antisense strand to SEQ ID NO: 1755379
agaagucuuggaauaccau

SEQ ID NO: 1755381 - RNA, 19 nt, Artificial Sequence
  Description of Artificial Sequence: Synthetic oligonucleotide
  Sense strand starting at position 1265 of SEQ ID NO: 1562550
cgauggaaugccgaguguu

SEQ ID NO: 1755382 - RNA, 19 nt, Artificial Sequence
  Description of Artificial Sequence: Synthetic oligonucleotide
  Antisense strand to SEQ ID NO: 1755381
aacacucggcauuccaucg

SEQ ID NO: 1755383 - RNA, 19 nt, Artificial Sequence
  Description of Artificial Sequence: Synthetic oligonucleotide
  Sense strand starting at position 1277 of SEQ ID NO: 1562550
gaguguuccuagguucuca

SEQ ID NO: 1755384 - RNA, 19 nt, Artificial Sequence
  Description of Artificial Sequence: Synthetic oligonucleotide
  Antisense strand to SEQ ID NO: 1755383
ugagaaccuaggaacacuc

SEQ ID NO: 1755385 - RNA, 19 nt, Artificial Sequence
  Description of Artificial Sequence: Synthetic oligonucleotide
  Sense strand starting at position 1303 of SEQ ID NO: 1562550
cuucgcucuccucagacau

SEQ ID NO: 1755386 - RNA, 19 nt, Artificial Sequence
  Description of Artificial Sequence: Synthetic oligonucleotide
  Antisense strand to SEQ ID NO: 1755385
augucugaggagagcgaag

SEQ ID NO: 1755387 - RNA, 19 nt, Artificial Sequence
  Description of Artificial Sequence: Synthetic oligonucleotide
  Sense strand starting at position 1355 of SEQ ID NO: 1562550
ucaagagguuuccucaaca

SEQ ID NO: 1755388 - RNA, 19 nt, Artificial Sequence
  Description of Artificial Sequence: Synthetic oligonucleotide
  Antisense strand to SEQ ID NO: 1755387
uguugaggaaaccucuuga

SEQ ID NO: 1755389 - RNA, 19 nt, Artificial Sequence
  Description of Artificial Sequence: Synthetic oligonucleotide
  Sense strand starting at position 2183 of SEQ ID NO: 1562550
uagagacuuccugaacggu

SEQ ID NO: 1755390 - RNA, 19 nt, Artificial Sequence
  Description of Artificial Sequence: Synthetic oligonucleotide
  Antisense strand to SEQ ID NO: 1755389
accguucaggaagucucua

SEQ ID NO: 1755391 - RNA, 19 nt, Artificial Sequence
  Description of Artificial Sequence: Synthetic oligonucleotide
  Sense strand starting at position 2394 of SEQ ID NO: 1562550
cggguacgcacugaacauu

SEQ ID NO: 1755392 - RNA, 19 nt, Artificial Sequence
  Description of Artificial Sequence: Synthetic oligonucleotide
  Antisense strand to SEQ ID NO: 1755391
aauguucagugcguacccg

SEQ ID NO: 1755393 - RNA, 19 nt, Artificial Sequence
  Description of Artificial Sequence: Synthetic oligonucleotide
  Sense strand starting at position 2792 of SEQ ID NO: 1562550
cgcugugaggugagcgauu

SEQ ID NO: 1755394 - RNA, 19 nt, Artificial Sequence
  Description of Artificial Sequence: Synthetic oligonucleotide
  Antisense strand to SEQ ID NO: 1755393
aaucgcucaccucacagcg

SEQ ID NO: 1755395 - RNA, 19 nt, Artificial Sequence
  Description of Artificial Sequence: Synthetic oligonucleotide
  Sense strand starting at position 2968 of SEQ ID NO: 1562550
ugcagaugaucccuugaaa

SEQ ID NO: 1755396 - RNA, 19 nt, Artificial Sequence
  Description of Artificial Sequence: Synthetic oligonucleotide
  Antisense strand to SEQ ID NO: 1755395
uuucaagggaucaucugca

SEQ ID NO: 1755397 - RNA, 19 nt, Artificial Sequence
  Description of Artificial Sequence: Synthetic oligonucleotide
  Sense strand starting at position 3322 of SEQ ID NO: 1562550
acuggcaugcuauaaaugu

SEQ ID NO: 1755398 - RNA, 19 nt, Artificial Sequence
  Description of Artificial Sequence: Synthetic oligonucleotide
  Antisense strand to SEQ ID NO: 1755397
acauuuauagcaugccagu

SEQ ID NO: 1755399 - RNA, 19 nt, Artificial Sequence
  Description of Artificial Sequence: Synthetic oligonucleotide
  Sense strand starting at position 3337 of SEQ ID NO: 1562550
auguauuacccuuaucugu

SEQ ID NO: 1755400 - RNA, 19 nt, Artificial Sequence
  Description of Artificial Sequence: Synthetic oligonucleotide
  Antisense strand to SEQ ID NO: 1755399
acagauaaggguaauacau

SEQ ID NO: 1755401 - RNA, 19 nt, Artificial Sequence
  Description of Artificial Sequence: Synthetic oligonucleotide
  Sense strand starting at position 3504 of SEQ ID NO: 1562550
guaugcauaguguaggaaa

SEQ ID NO: 1755402 - RNA, 19 nt, Artificial Sequence
  Description of Artificial Sequence: Synthetic oligonucleotide
  Antisense strand to SEQ ID NO: 1755401
uuuccuacacuaugcauac

SEQ ID NO: 1755403 - RNA, 19 nt, Artificial Sequence
  Description of Artificial Sequence: Synthetic oligonucleotide
  Sense strand starting at position 3567 of SEQ ID NO: 1562550
ugaccacagugcuuuauaa

SEQ ID NO: 1755404 - RNA, 19 nt, Artificial Sequence
  Description of Artificial Sequence: Synthetic oligonucleotide
  Antisense strand to SEQ ID NO: 1755403
uuauaaagcacugugguca

SEQ ID NO: 1755405 - RNA, 19 nt, Artificial Sequence
  Description of Artificial Sequence: Synthetic oligonucleotide
  Sense strand starting at position 3587 of SEQ ID NO: 1562550
augacaugguccuuugaga

SEQ ID NO: 1755406 - RNA, 19 nt, Artificial Sequence
  Description of Artificial Sequence: Synthetic oligonucleotide
  Antisense strand to SEQ ID NO: 1755405
ucucaaaggaccaugucau

SEQ ID NO: 1755407 - RNA, 19 nt, Artificial Sequence
  Description of Artificial Sequence: Synthetic oligonucleotide
  Sense strand starting at position 3725 of SEQ ID NO: 1562550
ucuguccagugcuccuaaa

SEQ ID NO: 1755408 - RNA, 19 nt, Artificial Sequence
  Description of Artificial Sequence: Synthetic oligonucleotide
  Antisense strand to SEQ ID NO: 1755407
uuuaggagcacuggacaga

SEQ ID NO: 1755409 - RNA, 19 nt, Artificial Sequence
  Description of Artificial Sequence: Synthetic oligonucleotide
  Sense strand starting at position 3760 of SEQ ID NO: 1562550
uuuccaguuaugggagaug

SEQ ID NO: 1755410 - RNA, 19 nt, Artificial Sequence
  Description of Artificial Sequence: Synthetic oligonucleotide
  Antisense strand to SEQ ID NO: 1755409
caucucccauaacuggaaa

SEQ ID NO: 1755411 - RNA, 19 nt, Artificial Sequence
  Description of Artificial Sequence: Synthetic oligonucleotide
  Sense strand starting at position 3769 of SEQ ID NO: 1562550
augggagaugugggcaaua

SEQ ID NO: 1755412 - RNA, 19 nt, Artificial Sequence
  Description of Artificial Sequence: Synthetic oligonucleotide
  Antisense strand to SEQ ID NO: 1755411
uauugcccacaucucccau

SEQ ID NO: 1755413 - RNA, 19 nt, Artificial Sequence
  Description of Artificial Sequence: Synthetic oligonucleotide
  Sense strand starting at position 3819 of SEQ ID NO: 1562550
gcaacauaugcuugauguu

SEQ ID NO: 1755414 - RNA, 19 nt, Artificial Sequence
  Description of Artificial Sequence: Synthetic oligonucleotide
  Antisense strand to SEQ ID NO: 1755413
aacaucaagcauauguugc

SEQ ID NO: 1755415 - RNA, 19 nt, Artificial Sequence
  Description of Artificial Sequence: Synthetic oligonucleotide
  Sense strand starting at position 3860 of SEQ ID NO: 1562550
ucagacaucuuacugcaga

SEQ ID NO: 1755416 - RNA, 19 nt, Artificial Sequence
  Description of Artificial Sequence: Synthetic oligonucleotide
  Antisense strand to SEQ ID NO: 1755415
ucugcaguaagaugucuga

SEQ ID NO: 1755417 - RNA, 19 nt, Artificial Sequence
  Description of Artificial Sequence: Synthetic oligonucleotide
  Sense strand starting at position 3873 of SEQ ID NO: 1562550
ugcagaacacuguauguuu

SEQ ID NO: 1755418 - RNA, 19 nt, Artificial Sequence
  Description of Artificial Sequence: Synthetic oligonucleotide
  Antisense strand to SEQ ID NO: 1755417
aaacauacaguguucugca

SEQ ID NO: 1755419 - RNA, 19 nt, Artificial Sequence
  Description of Artificial Sequence: Synthetic oligonucleotide
  Sense strand starting at position 19 of SEQ ID NO: 1562551
uggaauauggccggaagga

SEQ ID NO: 1755420 - RNA, 19 nt, Artificial Sequence
  Description of Artificial Sequence: Synthetic oligonucleotide
  Antisense strand to SEQ ID NO: 1755419
uccuuccggccauauucca

SEQ ID NO: 1755421 - RNA, 19 nt, Artificial Sequence
  Description of Artificial Sequence: Synthetic oligonucleotide
  Sense strand starting at position 178 of SEQ ID NO: 1562551
agcuccuggucucuagaga

SEQ ID NO: 1755422 - RNA, 19 nt, Artificial Sequence
  Description of Artificial Sequence: Synthetic oligonucleotide
  Antisense strand to SEQ ID NO: 1755421
ucucuagagaccaggagcu

SEQ ID NO: 1755423 - RNA, 19 nt, Artificial Sequence
  Description of Artificial Sequence: Synthetic oligonucleotide
  Sense strand starting at position 493 of SEQ ID NO: 1562551
cggucucagagaugggaaa

SEQ ID NO: 1755424 - RNA, 19 nt, Artificial Sequence
  Description of Artificial Sequence: Synthetic oligonucleotide
  Antisense strand to SEQ ID NO: 1755423
uuucccaucucugagaccg

SEQ ID NO: 1755425 - RNA, 19 nt, Artificial Sequence
  Description of Artificial Sequence: Synthetic oligonucleotide
  Sense strand starting at position 589 of SEQ ID NO: 1562551
gcaugauugcgcccauguc

SEQ ID NO: 1755426 - RNA, 19 nt, Artificial Sequence
  Description of Artificial Sequence: Synthetic oligonucleotide
  Antisense strand to SEQ ID NO: 1755425
gacaugggcgcaaucaugc

SEQ ID NO: 1755427 - RNA, 19 nt, Artificial Sequence
  Description of Artificial Sequence: Synthetic oligonucleotide
  Sense strand starting at position 628 of SEQ ID NO: 1562551
ucuugucaucugugaaaua

SEQ ID NO: 1755428 - RNA, 19 nt, Artificial Sequence
  Description of Artificial Sequence: Synthetic oligonucleotide
  Antisense strand to SEQ ID NO: 1755427
uauuucacagaugacaaga

SEQ ID NO: 1755429 - RNA, 19 nt, Artificial Sequence
  Description of Artificial Sequence: Synthetic oligonucleotide
  Sense strand starting at position 1189 of SEQ ID NO: 1562551
ugggcaagucccugaucca

SEQ ID NO: 1755430 - RNA, 19 nt, Artificial Sequence
  Description of Artificial Sequence: Synthetic oligonucleotide
  Antisense strand to SEQ ID NO: 1755429
uggaucagggacuugccca

SEQ ID NO: 1755431 - RNA, 19 nt, Artificial Sequence
  Description of Artificial Sequence: Synthetic oligonucleotide
  Sense strand starting at position 1190 of SEQ ID NO: 1562551
gggcaagucccugauccau

SEQ ID NO: 1755432 - RNA, 19 nt, Artificial Sequence
  Description of Artificial Sequence: Synthetic oligonucleotide
  Antisense strand to SEQ ID NO: 1755431
auggaucagggacuugccc

SEQ ID NO: 1755433 - RNA, 19 nt, Artificial Sequence
  Description of Artificial Sequence: Synthetic oligonucleotide
  Sense strand starting at position 1503 of SEQ ID NO: 1562551
acuugaaugcaccaagguu

SEQ ID NO: 1755434 - RNA, 19 nt, Artificial Sequence
  Description of Artificial Sequence: Synthetic oligonucleotide
  Antisense strand to SEQ ID NO: 1755433
aaccuuggugcauucaagu

SEQ ID NO: 1755435 - RNA, 19 nt, Artificial Sequence
  Description of Artificial Sequence: Synthetic oligonucleotide
  Sense strand starting at position 1554 of SEQ ID NO: 1562551
cacuguucucagugggauc

SEQ ID NO: 1755436 - RNA, 19 nt, Artificial Sequence
  Description of Artificial Sequence: Synthetic oligonucleotide
  Antisense strand to SEQ ID NO: 1755435
gaucccacugagaacagug

SEQ ID NO: 1755437 - RNA, 19 nt, Artificial Sequence
  Description of Artificial Sequence: Synthetic oligonucleotide
  Sense strand starting at position 1632 of SEQ ID NO: 1562551
agaccugcuggcuaagaau

SEQ ID NO: 1755438 - RNA, 19 nt, Artificial Sequence
  Description of Artificial Sequence: Synthetic oligonucleotide
  Antisense strand to SEQ ID NO: 1755437
auucuuagccagcaggucu

SEQ ID NO: 1755439 - RNA, 19 nt, Artificial Sequence
  Description of Artificial Sequence: Synthetic oligonucleotide
  Sense strand starting at position 2166 of SEQ ID NO: 1562551
ggagcagucccuuaugccu

SEQ ID NO: 1755440 - RNA, 19 nt, Artificial Sequence
  Description of Artificial Sequence: Synthetic oligonucleotide
  Antisense strand to SEQ ID NO: 1755439
aggcauaagggacugcucc

SEQ ID NO: 1755441 - RNA, 19 nt, Artificial Sequence
  Description of Artificial Sequence: Synthetic oligonucleotide
  Sense strand starting at position 2174 of SEQ ID NO: 1562551
cccuuaugccugcucguua

SEQ ID NO: 1755442 - RNA, 19 nt, Artificial Sequence
  Description of Artificial Sequence: Synthetic oligonucleotide
  Antisense strand to SEQ ID NO: 1755441
uaacgagcaggcauaaggg

SEQ ID NO: 1755443 - RNA, 19 nt, Artificial Sequence
  Description of Artificial Sequence: Synthetic oligonucleotide
  Sense strand starting at position 2343 of SEQ ID NO: 1562551
auuugagacucauaucuga

SEQ ID NO: 1755444 - RNA, 19 nt, Artificial Sequence
  Description of Artificial Sequence: Synthetic oligonucleotide
  Antisense strand to SEQ ID NO: 1755443
ucagauaugagucucaaau

SEQ ID NO: 1755445 - RNA, 19 nt, Artificial Sequence
  Description of Artificial Sequence: Synthetic oligonucleotide
  Sense strand starting at position 2565 of SEQ ID NO: 1562551
gucacagggaugugcauua

SEQ ID NO: 1755446 - RNA, 19 nt, Artificial Sequence
  Description of Artificial Sequence: Synthetic oligonucleotide
  Antisense strand to SEQ ID NO: 1755445
uaaugcacaucccugugac

SEQ ID NO: 1755447 - RNA, 19 nt, Artificial Sequence
  Description of Artificial Sequence: Synthetic oligonucleotide
  Sense strand starting at position 2570 of SEQ ID NO: 1562551
agggaugugcauuaccuau

SEQ ID NO: 1755448 - RNA, 19 nt, Artificial Sequence
  Description of Artificial Sequence: Synthetic oligonucleotide
  Antisense strand to SEQ ID NO: 1755447
auagguaaugcacaucccu

SEQ ID NO: 1755449 - RNA, 19 nt, Artificial Sequence
  Description of Artificial Sequence: Synthetic oligonucleotide
  Sense strand starting at position 2572 of SEQ ID NO: 1562551
ggaugugcauuaccuauua

SEQ ID NO: 1755450 - RNA, 19 nt, Artificial Sequence
  Description of Artificial Sequence: Synthetic oligonucleotide
  Antisense strand to SEQ ID NO: 1755449
uaauagguaaugcacaucc

SEQ ID NO: 1755451 - RNA, 19 nt, Artificial Sequence
  Description of Artificial Sequence: Synthetic oligonucleotide
  Sense strand starting at position 2634 of SEQ ID NO: 1562551
gugggagaguaauuauuac

SEQ ID NO: 1755452 - RNA, 19 nt, Artificial Sequence
  Description of Artificial Sequence: Synthetic oligonucleotide
  Antisense strand to SEQ ID NO: 1755451
guaauaauuacucucccac

SEQ ID NO: 1755453 - RNA, 19 nt, Artificial Sequence
  Description of Artificial Sequence: Synthetic oligonucleotide
  Sense strand starting at position 2681 of SEQ ID NO: 1562551
cguugaaaugcucaccaug

SEQ ID NO: 1755454 - RNA, 19 nt, Artificial Sequence
  Description of Artificial Sequence: Synthetic oligonucleotide
  Antisense strand to SEQ ID NO: 1755453
cauggugagcauuucaacg

SEQ ID NO: 1755455 - RNA, 19 nt, Artificial Sequence
  Description of Artificial Sequence: Synthetic oligonucleotide
  Sense strand starting at position 2683 of SEQ ID NO: 1562551
uugaaaugcucaccaugaa

SEQ ID NO: 1755456 - RNA, 19 nt, Artificial Sequence
  Description of Artificial Sequence: Synthetic oligonucleotide
  Antisense strand to SEQ ID NO: 1755455
uucauggugagcauuucaa

SEQ ID NO: 1755457 - RNA, 19 nt, Artificial Sequence
  Description of Artificial Sequence: Synthetic oligonucleotide
  Sense strand starting at position 2775 of SEQ ID NO: 1562551
agugacaacucuguacagu

SEQ ID NO: 1755458 - RNA, 19 nt, Artificial Sequence
  Description of Artificial Sequence: Synthetic oligonucleotide
  Antisense strand to SEQ ID NO: 1755457
acuguacagaguugucacu

SEQ ID NO: 1755459 - RNA, 19 nt, Artificial Sequence
  Description of Artificial Sequence: Synthetic oligonucleotide
  Sense strand starting at position 2776 of SEQ ID NO: 1562551
gugacaacucuguacaguu

SEQ ID NO: 1755460 - RNA, 19 nt, Artificial Sequence
  Description of Artificial Sequence: Synthetic oligonucleotide
  Antisense strand to SEQ ID NO: 1755459
aacuguacagaguugucac

SEQ ID NO: 1755461 - RNA, 19 nt, Artificial Sequence
  Description of Artificial Sequence: Synthetic oligonucleotide
  Sense strand starting at position 2792 of SEQ ID NO: 1562551
guuauauaagcauggagaa

SEQ ID NO: 1755462 - RNA, 19 nt, Artificial Sequence
  Description of Artificial Sequence: Synthetic oligonucleotide
  Antisense strand to SEQ ID NO: 1755461
uucuccaugcuuauauaac

SEQ ID NO: 1755463 - RNA, 19 nt, Artificial Sequence
  Description of Artificial Sequence: Synthetic oligonucleotide
  Sense strand starting at position 2862 of SEQ ID NO: 1562551
gaauacaggugauuaaugu

SEQ ID NO: 1755464 - RNA, 19 nt, Artificial Sequence
  Description of Artificial Sequence: Synthetic oligonucleotide
  Antisense strand to SEQ ID NO: 1755463
acauuaaucaccuguauuc

SEQ ID NO: 1755465 - RNA, 19 nt, Artificial Sequence
  Description of Artificial Sequence: Synthetic oligonucleotide
  Sense strand starting at position 2889 of SEQ ID NO: 1562551
aguagucaucaugguauau

SEQ ID NO: 1755466 - RNA, 19 nt, Artificial Sequence
  Description of Artificial Sequence: Synthetic oligonucleotide
  Antisense strand to SEQ ID NO: 1755465
auauaccaugaugacuacu

SEQ ID NO: 1755467 - RNA, 19 nt, Artificial Sequence
  Description of Artificial Sequence: Synthetic oligonucleotide
  Sense strand starting at position 2893 of SEQ ID NO: 1562551
gucaucaugguauauguga

SEQ ID NO: 1755468 - RNA, 19 nt, Artificial Sequence
  Description of Artificial Sequence: Synthetic oligonucleotide
  Antisense strand to SEQ ID NO: 1755467
ucacauauaccaugaugac

SEQ ID NO: 1755469 - RNA, 19 nt, Artificial Sequence
  Description of Artificial Sequence: Synthetic oligonucleotide
  Sense strand starting at position 2936 of SEQ ID NO: 1562551
aguucuuucuagcucauga

SEQ ID NO: 1755470 - RNA, 19 nt, Artificial Sequence
  Description of Artificial Sequence: Synthetic oligonucleotide
  Antisense strand to SEQ ID NO: 1755469
ucaugagcuagaaagaacu

SEQ ID NO: 1755471 - RNA, 19 nt, Artificial Sequence
  Description of Artificial Sequence: Synthetic oligonucleotide
  Sense strand starting at position 2941 of SEQ ID NO: 1562551
uuucuagcucaugauguuu

SEQ ID NO: 1755472 - RNA, 19 nt, Artificial Sequence
  Description of Artificial Sequence: Synthetic oligonucleotide
  Antisense strand to SEQ ID NO: 1755471
aaacaucaugagcuagaaa

SEQ ID NO: 1755473 - RNA, 19 nt, Artificial Sequence
  Description of Artificial Sequence: Synthetic oligonucleotide
  Sense strand starting at position 2982 of SEQ ID NO: 1562551
ucucacuucuuaguguuga

SEQ ID NO: 1755474 - RNA, 19 nt, Artificial Sequence
  Description of Artificial Sequence: Synthetic oligonucleotide
  Antisense strand to SEQ ID NO: 1755473
ucaacacuaagaagugaga

SEQ ID NO: 1755475 - RNA, 19 nt, Artificial Sequence
  Description of Artificial Sequence: Synthetic oligonucleotide
  Sense strand starting at position 3097 of SEQ ID NO: 1562551
augguucgggagcauaauu

SEQ ID NO: 1755476 - RNA, 19 nt, Artificial Sequence
  Description of Artificial Sequence: Synthetic oligonucleotide
  Antisense strand to SEQ ID NO: 1755475
aauuaugcucccgaaccau

SEQ ID NO: 1755477 - RNA, 19 nt, Artificial Sequence
  Description of Artificial Sequence: Synthetic oligonucleotide
  Sense strand starting at position 3113 of SEQ ID NO: 1562551
auucccugguguucuagau

SEQ ID NO: 1755478 - RNA, 19 nt, Artificial Sequence
  Description of Artificial Sequence: Synthetic oligonucleotide
  Antisense strand to SEQ ID NO: 1755477
aucuagaacaccagggaau

SEQ ID NO: 1755479 - RNA, 19 nt, Artificial Sequence
  Description of Artificial Sequence: Synthetic oligonucleotide
  Sense strand starting at position 3117 of SEQ ID NO: 1562551
ccugguguucuagauacaa

SEQ ID NO: 1755480 - RNA, 19 nt, Artificial Sequence
  Description of Artificial Sequence: Synthetic oligonucleotide
  Antisense strand to SEQ ID NO: 1755479
uuguaucuagaacaccagg

SEQ ID NO: 1755481 - RNA, 19 nt, Artificial Sequence
  Description of Artificial Sequence: Synthetic oligonucleotide
  Sense strand starting at position 3201 of SEQ ID NO: 1562551
ucuguagauuaaucucuga

SEQ ID NO: 1755482 - RNA, 19 nt, Artificial Sequence
  Description of Artificial Sequence: Synthetic oligonucleotide
  Antisense strand to SEQ ID NO: 1755481
ucagagauuaaucuacaga

SEQ ID NO: 1755483 - RNA, 19 nt, Artificial Sequence
  Description of Artificial Sequence: Synthetic oligonucleotide
  Sense strand starting at position 3204 of SEQ ID NO: 1562551
guagauuaaucucugagau

SEQ ID NO: 1755484 - RNA, 19 nt, Artificial Sequence
  Description of Artificial Sequence: Synthetic oligonucleotide
  Antisense strand to SEQ ID NO: 1755483
aucucagagauuaaucuac

SEQ ID NO: 1755485 - RNA, 19 nt, Artificial Sequence
  Description of Artificial Sequence: Synthetic oligonucleotide
  Sense strand starting at position 3231 of SEQ ID NO: 1562551
gcugcauuugcuuggcuaa

SEQ ID NO: 1755486 - RNA, 19 nt, Artificial Sequence
  Description of Artificial Sequence: Synthetic oligonucleotide
  Antisense strand to SEQ ID NO: 1755485
uuagccaagcaaaugcagc

SEQ ID NO: 1755487 - RNA, 19 nt, Artificial Sequence
  Description of Artificial Sequence: Synthetic oligonucleotide
  Sense strand starting at position 3234 of SEQ ID NO: 1562551
gcauuugcuuggcuaauga

SEQ ID NO: 1755488 - RNA, 19 nt, Artificial Sequence
  Description of Artificial Sequence: Synthetic oligonucleotide
  Antisense strand to SEQ ID NO: 1755487
ucauuagccaagcaaaugc

SEQ ID NO: 1755489 - RNA, 19 nt, Artificial Sequence
  Description of Artificial Sequence: Synthetic oligonucleotide
  Sense strand starting at position 3668 of SEQ ID NO: 1562551
ucacgauugcccuaugaaa

SEQ ID NO: 1755490 - RNA, 19 nt, Artificial Sequence
  Description of Artificial Sequence: Synthetic oligonucleotide
  Antisense strand to SEQ ID NO: 1755489
uuucauagggcaaucguga

SEQ ID NO: 1755491 - RNA, 19 nt, Artificial Sequence
  Description of Artificial Sequence: Synthetic oligonucleotide
  Sense strand starting at position 3670 of SEQ ID NO: 1562551
acgauugcccuaugaaaua

SEQ ID NO: 1755492 - RNA, 19 nt, Artificial Sequence
  Description of Artificial Sequence: Synthetic oligonucleotide
  Antisense strand to SEQ ID NO: 1755491
uauuucauagggcaaucgu

SEQ ID NO: 1755493 - RNA, 19 nt, Artificial Sequence
  Description of Artificial Sequence: Synthetic oligonucleotide
  Sense strand starting at position 3690 of SEQ ID NO: 1562551
guccuuugucccuauuaua

SEQ ID NO: 1755494 - RNA, 19 nt, Artificial Sequence
  Description of Artificial Sequence: Synthetic oligonucleotide
  Antisense strand to SEQ ID NO: 1755493
uauaauagggacaaaggac

SEQ ID NO: 1755495 - RNA, 19 nt, Artificial Sequence
  Description of Artificial Sequence: Synthetic oligonucleotide
  Sense strand starting at position 3700 of SEQ ID NO: 1562551
ccuauuauauaggugagaa

SEQ ID NO: 1755496 - RNA, 19 nt, Artificial Sequence
  Description of Artificial Sequence: Synthetic oligonucleotide
  Antisense strand to SEQ ID NO: 1755495
uucucaccuauauaauagg

SEQ ID NO: 1755497 - RNA, 19 nt, Artificial Sequence
  Description of Artificial Sequence: Synthetic oligonucleotide
  Sense strand starting at position 3755 of SEQ ID NO: 1562551
agauuaaacccaggcuugu

SEQ ID NO: 1755498 - RNA, 19 nt, Artificial Sequence
  Description of Artificial Sequence: Synthetic oligonucleotide
  Antisense strand to SEQ ID NO: 1755497
acaagccuggguuuaaucu

SEQ ID NO: 1755499 - RNA, 19 nt, Artificial Sequence
  Description of Artificial Sequence: Synthetic oligonucleotide
  Sense strand starting at position 22 of SEQ ID NO: 1562552
ucagauaugcgcucuuugu

SEQ ID NO: 1755500 - RNA, 19 nt, Artificial Sequence
  Description of Artificial Sequence: Synthetic oligonucleotide
  Antisense strand to SEQ ID NO: 1755499
acaaagagcgcauaucuga

SEQ ID NO: 1755501 - RNA, 19 nt, Artificial Sequence
  Description of Artificial Sequence: Synthetic oligonucleotide
  Sense strand starting at position 23 of SEQ ID NO: 1562552
cagauaugcgcucuuuguc

SEQ ID NO: 1755502 - RNA, 19 nt, Artificial Sequence
  Description of Artificial Sequence: Synthetic oligonucleotide
  Antisense strand to SEQ ID NO: 1755501
gacaaagagcgcauaucug

SEQ ID NO: 1755503 - RNA, 19 nt, Artificial Sequence
  Description of Artificial Sequence: Synthetic oligonucleotide
  Sense strand starting at position 28 of SEQ ID NO: 1562552
augcgcucuuugucaggau

SEQ ID NO: 1755504 - RNA, 19 nt, Artificial Sequence
  Description of Artificial Sequence: Synthetic oligonucleotide
  Antisense strand to SEQ ID NO: 1755503
auccugacaaagagcgcau

SEQ ID NO: 1755505 - RNA, 19 nt, Artificial Sequence
  Description of Artificial Sequence: Synthetic oligonucleotide
  Sense strand starting at position 408 of SEQ ID NO: 1562552
gaaagaaauuugugauucu

SEQ ID NO: 1755506 - RNA, 19 nt, Artificial Sequence
  Description of Artificial Sequence: Synthetic oligonucleotide
  Antisense strand to SEQ ID NO: 1755505
agaaucacaaauuucuuuc

SEQ ID NO: 1755507 - RNA, 19 nt, Artificial Sequence
  Description of Artificial Sequence: Synthetic oligonucleotide
  Sense strand starting at position 417 of SEQ ID NO: 1562552
uugugauucuaagaaauug

SEQ ID NO: 1755508 - RNA, 19 nt, Artificial Sequence
  Description of Artificial Sequence: Synthetic oligonucleotide
  Antisense strand to SEQ ID NO: 1755507
caauuucuuagaaucacaa

SEQ ID NO: 1755509 - RNA, 19 nt, Artificial Sequence
  Description of Artificial Sequence: Synthetic oligonucleotide
  Sense strand starting at position 519 of SEQ ID NO: 1562552
cguguaguucccgugccaa

SEQ ID NO: 1755510 - RNA, 19 nt, Artificial Sequence
  Description of Artificial Sequence: Synthetic oligonucleotide
  Antisense strand to SEQ ID NO: 1755509
uuggcacgggaacuacacg

SEQ ID NO: 1755511 - RNA, 19 nt, Artificial Sequence
  Description of Artificial Sequence: Synthetic oligonucleotide
  Sense strand starting at position 718 of SEQ ID NO: 1562552
cugcuugacucagucuauu

SEQ ID NO: 1755512 - RNA, 19 nt, Artificial Sequence
  Description of Artificial Sequence: Synthetic oligonucleotide
  Antisense strand to SEQ ID NO: 1755511
aauagacugagucaagcag

SEQ ID NO: 1755513 - RNA, 19 nt, Artificial Sequence
  Description of Artificial Sequence: Synthetic oligonucleotide
  Sense strand starting at position 794 of SEQ ID NO: 1562552
gagaaacuguugggcugaa

SEQ ID NO: 1755514 - RNA, 19 nt, Artificial Sequence
  Description of Artificial Sequence: Synthetic oligonucleotide
  Antisense strand to SEQ ID NO: 1755513
uucagcccaacaguuucuc

SEQ ID NO: 1755515 - RNA, 19 nt, Artificial Sequence
  Description of Artificial Sequence: Synthetic oligonucleotide
  Sense strand starting at position 913 of SEQ ID NO: 1562552
ccauauaacggccagguua

SEQ ID NO: 1755516 - RNA, 19 nt, Artificial Sequence
  Description of Artificial Sequence: Synthetic oligonucleotide
  Antisense strand to SEQ ID NO: 1755515
uaaccuggccguuauaugg

SEQ ID NO: 1755517 - RNA, 19 nt, Artificial Sequence
  Description of Artificial Sequence: Synthetic oligonucleotide
  Sense strand starting at position 915 of SEQ ID NO: 1562552
auauaacggccagguuauu

SEQ ID NO: 1755518 - RNA, 19 nt, Artificial Sequence
  Description of Artificial Sequence: Synthetic oligonucleotide
  Antisense strand to SEQ ID NO: 1755517
aauaaccuggccguuauau

SEQ ID NO: 1755519 - RNA, 19 nt, Artificial Sequence
  Description of Artificial Sequence: Synthetic oligonucleotide
  Sense strand starting at position 921 of SEQ ID NO: 1562552
cggccagguuauuucagau

SEQ ID NO: 1755520 - RNA, 19 nt, Artificial Sequence
  Description of Artificial Sequence: Synthetic oligonucleotide
  Antisense strand to SEQ ID NO: 1755519
aucugaaauaaccuggccg

SEQ ID NO: 1755521 - RNA, 19 nt, Artificial Sequence
  Description of Artificial Sequence: Synthetic oligonucleotide
  Sense strand starting at position 947 of SEQ ID NO: 1562552
cauccuaauguacgaguca

SEQ ID NO: 1755522 - RNA, 19 nt, Artificial Sequence
  Description of Artificial Sequence: Synthetic oligonucleotide
  Antisense strand to SEQ ID NO: 1755521
ugacucguacauuaggaug

SEQ ID NO: 1755523 - RNA, 19 nt, Artificial Sequence
  Description of Artificial Sequence: Synthetic oligonucleotide
  Sense strand starting at position 1082 of SEQ ID NO: 1562552
ggugguuugcucugcucca

SEQ ID NO: 1755524 - RNA, 19 nt, Artificial Sequence
  Description of Artificial Sequence: Synthetic oligonucleotide
  Antisense strand to SEQ ID NO: 1755523
uggagcagagcaaaccacc

SEQ ID NO: 1755525 - RNA, 19 nt, Artificial Sequence
  Description of Artificial Sequence: Synthetic oligonucleotide
  Sense strand starting at position 1136 of SEQ ID NO: 1562552
agggcuuccugcuuuaauu

SEQ ID NO: 1755526 - RNA, 19 nt, Artificial Sequence
  Description of Artificial Sequence: Synthetic oligonucleotide
  Antisense strand to SEQ ID NO: 1755525
aauuaaagcaggaagcccu

SEQ ID NO: 1755527 - RNA, 19 nt, Artificial Sequence
  Description of Artificial Sequence: Synthetic oligonucleotide
  Sense strand starting at position 1243 of SEQ ID NO: 1562552
gccaguugggagcaauguu

SEQ ID NO: 1755528 - RNA, 19 nt, Artificial Sequence
  Description of Artificial Sequence: Synthetic oligonucleotide
  Antisense strand to SEQ ID NO: 1755527
aacauugcucccaacuggc

SEQ ID NO: 1755529 - RNA, 19 nt, Artificial Sequence
  Description of Artificial Sequence: Synthetic oligonucleotide
  Sense strand starting at position 1250 of SEQ ID NO: 1562552
gggagcaauguucacgaua

SEQ ID NO: 1755530 - RNA, 19 nt, Artificial Sequence
  Description of Artificial Sequence: Synthetic oligonucleotide
  Antisense strand to SEQ ID NO: 1755529
uaucgugaacauugcuccc

SEQ ID NO: 1755531 - RNA, 19 nt, Artificial Sequence
  Description of Artificial Sequence: Synthetic oligonucleotide
  Sense strand starting at position 1280 of SEQ ID NO: 1562552
gcaccagucccagagucuu

SEQ ID NO: 1755532 - RNA, 19 nt, Artificial Sequence
  Description of Artificial Sequence: Synthetic oligonucleotide
  Antisense strand to SEQ ID NO: 1755531
aagacucugggacuggugc

SEQ ID NO: 1755533 - RNA, 19 nt, Artificial Sequence
  Description of Artificial Sequence: Synthetic oligonucleotide
  Sense strand starting at position 1432 of SEQ ID NO: 1562552
ccaggaaggucuccugaua

SEQ ID NO: 1755534 - RNA, 19 nt, Artificial Sequence
  Description of Artificial Sequence: Synthetic oligonucleotide
  Antisense strand to SEQ ID NO: 1755533
uaucaggagaccuuccugg

SEQ ID NO: 1755535 - RNA, 19 nt, Artificial Sequence
  Description of Artificial Sequence: Synthetic oligonucleotide
  Sense strand starting at position 1607 of SEQ ID NO: 1562552
gcagcuugccaaugaggaa

SEQ ID NO: 1755536 - RNA, 19 nt, Artificial Sequence
  Description of Artificial Sequence: Synthetic oligonucleotide
  Antisense strand to SEQ ID NO: 1755535
uuccucauuggcaagcugc

SEQ ID NO: 1755537 - RNA, 19 nt, Artificial Sequence
  Description of Artificial Sequence: Synthetic oligonucleotide
  Sense strand starting at position 1734 of SEQ ID NO: 1562552
augucaacuuacuuggaaa

SEQ ID NO: 1755538 - RNA, 19 nt, Artificial Sequence
  Description of Artificial Sequence: Synthetic oligonucleotide
  Antisense strand to SEQ ID NO: 1755537
uuuccaaguaaguugacau

SEQ ID NO: 1755539 - RNA, 19 nt, Artificial Sequence
  Description of Artificial Sequence: Synthetic oligonucleotide
  Sense strand starting at position 2079 of SEQ ID NO: 1562552
gugguucuuuguuuguaca

SEQ ID NO: 1755540 - RNA, 19 nt, Artificial Sequence
  Description of Artificial Sequence: Synthetic oligonucleotide
  Antisense strand to SEQ ID NO: 1755539
uguacaaacaaagaaccac

SEQ ID NO: 1755541 - RNA, 19 nt, Artificial Sequence
  Description of Artificial Sequence: Synthetic oligonucleotide
  Sense strand starting at position 2081 of SEQ ID NO: 1562552
gguucuuuguuuguacagu

SEQ ID NO: 1755542 - RNA, 19 nt, Artificial Sequence
  Description of Artificial Sequence: Synthetic oligonucleotide
  Antisense strand to SEQ ID NO: 1755541
acuguacaaacaaagaacc

SEQ ID NO: 1755543 - RNA, 19 nt, Artificial Sequence
  Description of Artificial Sequence: Synthetic oligonucleotide
  Sense strand starting at position 2226 of SEQ ID NO: 1562552
ccaguuccggcagaguuua

SEQ ID NO: 1755544 - RNA, 19 nt, Artificial Sequence
  Description of Artificial Sequence: Synthetic oligonucleotide
  Antisense strand to SEQ ID NO: 1755543
uaaacucugccggaacugg

SEQ ID NO: 1755545 - RNA, 19 nt, Artificial Sequence
  Description of Artificial Sequence: Synthetic oligonucleotide
  Sense strand starting at position 2288 of SEQ ID NO: 1562552
ugggcugacuuguacauua

SEQ ID NO: 1755546 - RNA, 19 nt, Artificial Sequence
  Description of Artificial Sequence: Synthetic oligonucleotide
  Antisense strand to SEQ ID NO: 1755545
uaauguacaagucagccca

SEQ ID NO: 1755547 - RNA, 19 nt, Artificial Sequence
  Description of Artificial Sequence: Synthetic oligonucleotide
  Sense strand starting at position 2305 of SEQ ID NO: 1562552
uaggauaugugucaaucug

SEQ ID NO: 1755548 - RNA, 19 nt, Artificial Sequence
  Description of Artificial Sequence: Synthetic oligonucleotide
  Antisense strand to SEQ ID NO: 1755547
cagauugacacauauccua

SEQ ID NO: 1755549 - RNA, 19 nt, Artificial Sequence
  Description of Artificial Sequence: Synthetic oligonucleotide
  Sense strand starting at position 2311 of SEQ ID NO: 1562552
augugucaaucugaaacaa

SEQ ID NO: 1755550 - RNA, 19 nt, Artificial Sequence
  Description of Artificial Sequence: Synthetic oligonucleotide
  Antisense strand to SEQ ID NO: 1755549
uuguuucagauugacacau

SEQ ID NO: 1755551 - RNA, 19 nt, Artificial Sequence
  Description of Artificial Sequence: Synthetic oligonucleotide
  Sense strand starting at position 2362 of SEQ ID NO: 1562552
gggcauuucugacagguug

SEQ ID NO: 1755552 - RNA, 19 nt, Artificial Sequence
  Description of Artificial Sequence: Synthetic oligonucleotide
  Antisense strand to SEQ ID NO: 1755551
caaccugucagaaaugccc

SEQ ID NO: 1755553 - RNA, 19 nt, Artificial Sequence
  Description of Artificial Sequence: Synthetic oligonucleotide
  Sense strand starting at position 2364 of SEQ ID NO: 1562552
gcauuucugacagguugug

SEQ ID NO: 1755554 - RNA, 19 nt, Artificial Sequence
  Description of Artificial Sequence: Synthetic oligonucleotide
  Antisense strand to SEQ ID NO: 1755553
cacaaccugucagaaaugc

SEQ ID NO: 1755555 - RNA, 19 nt, Artificial Sequence
  Description of Artificial Sequence: Synthetic oligonucleotide
  Sense strand starting at position 2406 of SEQ ID NO: 1562552
ggcugucggugaacugauu

SEQ ID NO: 1755556 - RNA, 19 nt, Artificial Sequence
  Description of Artificial Sequence: Synthetic oligonucleotide
  Antisense strand to SEQ ID NO: 1755555
aaucaguucaccgacagcc

SEQ ID NO: 1755557 - RNA, 19 nt, Artificial Sequence
  Description of Artificial Sequence: Synthetic oligonucleotide
  Sense strand starting at position 2575 of SEQ ID NO: 1562552
caggguuggauguauuauc

SEQ ID NO: 1755558 - RNA, 19 nt, Artificial Sequence
  Description of Artificial Sequence: Synthetic oligonucleotide
  Antisense strand to SEQ ID NO: 1755557
gauaauacauccaacccug

SEQ ID NO: 1755559 - RNA, 19 nt, Artificial Sequence
  Description of Artificial Sequence: Synthetic oligonucleotide
  Sense strand starting at position 2706 of SEQ ID NO: 1562552
uuggaaacguucucacacu

SEQ ID NO: 1755560 - RNA, 19 nt, Artificial Sequence
  Description of Artificial Sequence: Synthetic oligonucleotide
  Antisense strand to SEQ ID NO: 1755559
agugugagaacguuuccaa

SEQ ID NO: 1755561 - RNA, 19 nt, Artificial Sequence
  Description of Artificial Sequence: Synthetic oligonucleotide
  Sense strand starting at position 2750 of SEQ ID NO: 1562552
gggugauguugagaaagug

SEQ ID NO: 1755562 - RNA, 19 nt, Artificial Sequence
  Description of Artificial Sequence: Synthetic oligonucleotide
  Antisense strand to SEQ ID NO: 1755561
cacuuucucaacaucaccc

SEQ ID NO: 1755563 - RNA, 19 nt, Artificial Sequence
  Description of Artificial Sequence: Synthetic oligonucleotide
  Sense strand starting at position 2784 of SEQ ID NO: 1562552
ggccuuucucccuguugga

SEQ ID NO: 1755564 - RNA, 19 nt, Artificial Sequence
  Description of Artificial Sequence: Synthetic oligonucleotide
  Antisense strand to SEQ ID NO: 1755563
uccaacagggagaaaggcc

SEQ ID NO: 1755565 - RNA, 19 nt, Artificial Sequence
  Description of Artificial Sequence: Synthetic oligonucleotide
  Sense strand starting at position 2928 of SEQ ID NO: 1562552
gccaauuuguccugaggaa

SEQ ID NO: 1755566 - RNA, 19 nt, Artificial Sequence
  Description of Artificial Sequence: Synthetic oligonucleotide
  Antisense strand to SEQ ID NO: 1755565
uuccucaggacaaauuggc

SEQ ID NO: 1755567 - RNA, 19 nt, Artificial Sequence
  Description of Artificial Sequence: Synthetic oligonucleotide
  Sense strand starting at position 3130 of SEQ ID NO: 1562552
gagauaaguugagggaaau

SEQ ID NO: 1755568 - RNA, 19 nt, Artificial Sequence
  Description of Artificial Sequence: Synthetic oligonucleotide
  Antisense strand to SEQ ID NO: 1755567
auuucccucaacuuaucuc

SEQ ID NO: 1755569 - RNA, 19 nt, Artificial Sequence
  Description of Artificial Sequence: Synthetic oligonucleotide
  Sense strand starting at position 3300 of SEQ ID NO: 1562552
gccgcuuccuccuuccaga

SEQ ID NO: 1755570 - RNA, 19 nt, Artificial Sequence
  Description of Artificial Sequence: Synthetic oligonucleotide
  Antisense strand to SEQ ID NO: 1755569
ucuggaaggaggaagcggc

SEQ ID NO: 1755571 - RNA, 19 nt, Artificial Sequence
  Description of Artificial Sequence: Synthetic oligonucleotide
  Sense strand starting at position 3443 of SEQ ID NO: 1562552
gagggaugcugauacagaa

SEQ ID NO: 1755572 - RNA, 19 nt, Artificial Sequence
  Description of Artificial Sequence: Synthetic oligonucleotide
  Antisense strand to SEQ ID NO: 1755571
uucuguaucagcaucccuc

SEQ ID NO: 1755573 - RNA, 19 nt, Artificial Sequence
  Description of Artificial Sequence: Synthetic oligonucleotide
  Sense strand starting at position 3699 of SEQ ID NO: 1562552
gcuaaauugugucccucaa

SEQ ID NO: 1755574 - RNA, 19 nt, Artificial Sequence
  Description of Artificial Sequence: Synthetic oligonucleotide
  Antisense strand to SEQ ID NO: 1755573
uugagggacacaauuuagc

SEQ ID NO: 1755575 - RNA, 19 nt, Artificial Sequence
  Description of Artificial Sequence: Synthetic oligonucleotide
  Sense strand starting at position 3749 of SEQ ID NO: 1562552
uggugaaugugacuguauu

SEQ ID NO: 1755576 - RNA, 19 nt, Artificial Sequence
  Description of Artificial Sequence: Synthetic oligonucleotide
  Antisense strand to SEQ ID NO: 1755575
aauacagucacauucacca

SEQ ID NO: 1755577 - RNA, 19 nt, Artificial Sequence
  Description of Artificial Sequence: Synthetic oligonucleotide
  Sense strand starting at position 3853 of SEQ ID NO: 1562552
gagagacauuuggaugcaa

SEQ ID NO: 1755578 - RNA, 19 nt, Artificial Sequence
  Description of Artificial Sequence: Synthetic oligonucleotide
  Antisense strand to SEQ ID NO: 1755577
uugcauccaaaugucucuc

SEQ ID NO: 1755579 - RNA, 19 nt, Artificial Sequence
  Description of Artificial Sequence: Synthetic oligonucleotide
  Sense strand starting at position 426 of SEQ ID NO: 1562553
agauccaaggucuguuaaa

SEQ ID NO: 1755580 - RNA, 19 nt, Artificial Sequence
  Description of Artificial Sequence: Synthetic oligonucleotide
  Antisense strand to SEQ ID NO: 1755579
uuuaacagaccuuggaucu

SEQ ID NO: 1755581 - RNA, 19 nt, Artificial Sequence
  Description of Artificial Sequence: Synthetic oligonucleotide
  Sense strand starting at position 427 of SEQ ID NO: 1562553
gauccaaggucuguuaaac

SEQ ID NO: 1755582 - RNA, 19 nt, Artificial Sequence
  Description of Artificial Sequence: Synthetic oligonucleotide
  Antisense strand to SEQ ID NO: 1755581
guuuaacagaccuuggauc

SEQ ID NO: 1755583 - RNA, 19 nt, Artificial Sequence
  Description of Artificial Sequence: Synthetic oligonucleotide
  Sense strand starting at position 459 of SEQ ID NO: 1562553
auguaccucuccuuuggaa

SEQ ID NO: 1755584 - RNA, 19 nt, Artificial Sequence
  Description of Artificial Sequence: Synthetic oligonucleotide
  Antisense strand to SEQ ID NO: 1755583
uuccaaaggagagguacau

SEQ ID NO: 1755585 - RNA, 19 nt, Artificial Sequence
  Description of Artificial Sequence: Synthetic oligonucleotide
  Sense strand starting at position 588 of SEQ ID NO: 1562553
ucacuuuaucucuaccgua

SEQ ID NO: 1755586 - RNA, 19 nt, Artificial Sequence
  Description of Artificial Sequence: Synthetic oligonucleotide
  Antisense strand to SEQ ID NO: 1755585
uacgguagagauaaaguga

SEQ ID NO: 1755587 - RNA, 19 nt, Artificial Sequence
  Description of Artificial Sequence: Synthetic oligonucleotide
  Sense strand starting at position 593 of SEQ ID NO: 1562553
uuaucucuaccguagcaaa

SEQ ID NO: 1755588 - RNA, 19 nt, Artificial Sequence
  Description of Artificial Sequence: Synthetic oligonucleotide
  Antisense strand to SEQ ID NO: 1755587
uuugcuacgguagagauaa

SEQ ID NO: 1755589 - RNA, 19 nt, Artificial Sequence
  Description of Artificial Sequence: Synthetic oligonucleotide
  Sense strand starting at position 1180 of SEQ ID NO: 1562553
uuuccaaacgauuacaagu

SEQ ID NO: 1755590 - RNA, 19 nt, Artificial Sequence
  Description of Artificial Sequence: Synthetic oligonucleotide
  Antisense strand to SEQ ID NO: 1755589
acuuguaaucguuuggaaa

SEQ ID NO: 1755591 - RNA, 19 nt, Artificial Sequence
  Description of Artificial Sequence: Synthetic oligonucleotide
  Sense strand starting at position 1239 of SEQ ID NO: 1562553
aauuauagagucggcuaca

SEQ ID NO: 1755592 - RNA, 19 nt, Artificial Sequence
  Description of Artificial Sequence: Synthetic oligonucleotide
  Antisense strand to SEQ ID NO: 1755591
uguagccgacucuauaauu

SEQ ID NO: 1755593 - RNA, 19 nt, Artificial Sequence
  Description of Artificial Sequence: Synthetic oligonucleotide
  Sense strand starting at position 1240 of SEQ ID NO: 1562553
auuauagagucggcuacau

SEQ ID NO: 1755594 - RNA, 19 nt, Artificial Sequence
  Description of Artificial Sequence: Synthetic oligonucleotide
  Antisense strand to SEQ ID NO: 1755593
auguagccgacucuauaau

SEQ ID NO: 1755595 - RNA, 19 nt, Artificial Sequence
  Description of Artificial Sequence: Synthetic oligonucleotide
  Sense strand starting at position 1319 of SEQ ID NO: 1562553
guuacaagucaucaaguca

SEQ ID NO: 1755596 - RNA, 19 nt, Artificial Sequence
  Description of Artificial Sequence: Synthetic oligonucleotide
  Antisense strand to SEQ ID NO: 1755595
ugacuugaugacuuguaac

SEQ ID NO: 1755597 - RNA, 19 nt, Artificial Sequence
  Description of Artificial Sequence: Synthetic oligonucleotide
  Sense strand starting at position 1327 of SEQ ID NO: 1562553
ucaucaagucaguaugagu

SEQ ID NO: 1755598 - RNA, 19 nt, Artificial Sequence
  Description of Artificial Sequence: Synthetic oligonucleotide
  Antisense strand to SEQ ID NO: 1755597
acucauacugacuugauga

SEQ ID NO: 1755599 - RNA, 19 nt, Artificial Sequence
  Description of Artificial Sequence: Synthetic oligonucleotide
  Sense strand starting at position 1391 of SEQ ID NO: 1562553
guagcaaacugucucauga

SEQ ID NO: 1755600 - RNA, 19 nt, Artificial Sequence
  Description of Artificial Sequence: Synthetic oligonucleotide
  Antisense strand to SEQ ID NO: 1755599
ucaugagacaguuugcuac

SEQ ID NO: 1755601 - RNA, 19 nt, Artificial Sequence
  Description of Artificial Sequence: Synthetic oligonucleotide
  Sense strand starting at position 1522 of SEQ ID NO: 1562553
gggaaauaaauguguugua

SEQ ID NO: 1755602 - RNA, 19 nt, Artificial Sequence
  Description of Artificial Sequence: Synthetic oligonucleotide
  Antisense strand to SEQ ID NO: 1755601
uacaacacauuuauuuccc

SEQ ID NO: 1755603 - RNA, 19 nt, Artificial Sequence
  Description of Artificial Sequence: Synthetic oligonucleotide
  Sense strand starting at position 1523 of SEQ ID NO: 1562553
ggaaauaaauguguuguaa

SEQ ID NO: 1755604 - RNA, 19 nt, Artificial Sequence
  Description of Artificial Sequence: Synthetic oligonucleotide
  Antisense strand to SEQ ID NO: 1755603
uuacaacacauuuauuucc

SEQ ID NO: 1755605 - RNA, 19 nt, Artificial Sequence
  Description of Artificial Sequence: Synthetic oligonucleotide
  Sense strand starting at position 1659 of SEQ ID NO: 1562553
gagccuaugugacccgaaa

SEQ ID NO: 1755606 - RNA, 19 nt, Artificial Sequence
  Description of Artificial Sequence: Synthetic oligonucleotide
  Antisense strand to SEQ ID NO: 1755605
uuucgggucacauaggcuc

SEQ ID NO: 1755607 - RNA, 19 nt, Artificial Sequence
  Description of Artificial Sequence: Synthetic oligonucleotide
  Sense strand starting at position 2988 of SEQ ID NO: 1562553
ucgauacuuagguaugugu

SEQ ID NO: 1755608 - RNA, 19 nt, Artificial Sequence
  Description of Artificial Sequence: Synthetic oligonucleotide
  Antisense strand to SEQ ID NO: 1755607
acacauaccuaaguaucga

SEQ ID NO: 1755609 - RNA, 19 nt, Artificial Sequence
  Description of Artificial Sequence: Synthetic oligonucleotide
  Sense strand starting at position 2995 of SEQ ID NO: 1562553
uuagguauguguccaaaua

SEQ ID NO: 1755610 - RNA, 19 nt, Artificial Sequence
  Description of Artificial Sequence: Synthetic oligonucleotide
  Antisense strand to SEQ ID NO: 1755609
uauuuggacacauaccuaa

SEQ ID NO: 1755611 - RNA, 19 nt, Artificial Sequence
  Description of Artificial Sequence: Synthetic oligonucleotide
  Sense strand starting at position 2996 of SEQ ID NO: 1562553
uagguauguguccaaauaa

SEQ ID NO: 1755612 - RNA, 19 nt, Artificial Sequence
  Description of Artificial Sequence: Synthetic oligonucleotide
  Antisense strand to SEQ ID NO: 1755611
uuauuuggacacauaccua

SEQ ID NO: 1755613 - RNA, 19 nt, Artificial Sequence
  Description of Artificial Sequence: Synthetic oligonucleotide
  Sense strand starting at position 3020 of SEQ ID NO: 1562553
gaaccagcgcauuagauaa

SEQ ID NO: 1755614 - RNA, 19 nt, Artificial Sequence
  Description of Artificial Sequence: Synthetic oligonucleotide
  Antisense strand to SEQ ID NO: 1755613
uuaucuaaugcgcugguuc

SEQ ID NO: 1755615 - RNA, 19 nt, Artificial Sequence
  Description of Artificial Sequence: Synthetic oligonucleotide
  Sense strand starting at position 3027 of SEQ ID NO: 1562553
cgcauuagauaaguaacuu

SEQ ID NO: 1755616 - RNA, 19 nt, Artificial Sequence
  Description of Artificial Sequence: Synthetic oligonucleotide
  Antisense strand to SEQ ID NO: 1755615
aaguuacuuaucuaaugcg

SEQ ID NO: 1755617 - RNA, 19 nt, Artificial Sequence
  Description of Artificial Sequence: Synthetic oligonucleotide
  Sense strand starting at position 3033 of SEQ ID NO: 1562553
agauaaguaacuuggugau

SEQ ID NO: 1755618 - RNA, 19 nt, Artificial Sequence
  Description of Artificial Sequence: Synthetic oligonucleotide
  Antisense strand to SEQ ID NO: 1755617
aucaccaaguuacuuaucu

SEQ ID NO: 1755619 - RNA, 19 nt, Artificial Sequence
  Description of Artificial Sequence: Synthetic oligonucleotide
  Sense strand starting at position 3037 of SEQ ID NO: 1562553
aaguaacuuggugauuacu

SEQ ID NO: 1755620 - RNA, 19 nt, Artificial Sequence
  Description of Artificial Sequence: Synthetic oligonucleotide
  Antisense strand to SEQ ID NO: 1755619
aguaaucaccaaguuacuu

SEQ ID NO: 1755621 - RNA, 19 nt, Artificial Sequence
  Description of Artificial Sequence: Synthetic oligonucleotide
  Sense strand starting at position 3039 of SEQ ID NO: 1562553
guaacuuggugauuacuga

SEQ ID NO: 1755622 - RNA, 19 nt, Artificial Sequence
  Description of Artificial Sequence: Synthetic oligonucleotide
  Antisense strand to SEQ ID NO: 1755621
ucaguaaucaccaaguuac

SEQ ID NO: 1755623 - RNA, 19 nt, Artificial Sequence
  Description of Artificial Sequence: Synthetic oligonucleotide
  Sense strand starting at position 3068 of SEQ ID NO: 1562553
cagguuguccucuagucua

SEQ ID NO: 1755624 - RNA, 19 nt, Artificial Sequence
  Description of Artificial Sequence: Synthetic oligonucleotide
  Antisense strand to SEQ ID NO: 1755623
uagacuagaggacaaccug

SEQ ID NO: 1755625 - RNA, 19 nt, Artificial Sequence
  Description of Artificial Sequence: Synthetic oligonucleotide
  Sense strand starting at position 3073 of SEQ ID NO: 1562553
uguccucuagucuaagaaa

SEQ ID NO: 1755626 - RNA, 19 nt, Artificial Sequence
  Description of Artificial Sequence: Synthetic oligonucleotide
  Antisense strand to SEQ ID NO: 1755625
uuucuuagacuagaggaca

SEQ ID NO: 1755627 - RNA, 19 nt, Artificial Sequence
  Description of Artificial Sequence: Synthetic oligonucleotide
  Sense strand starting at position 3205 of SEQ ID NO: 1562553
agccucugucccgacaaga

SEQ ID NO: 1755628 - RNA, 19 nt, Artificial Sequence
  Description of Artificial Sequence: Synthetic oligonucleotide
  Antisense strand to SEQ ID NO: 1755627
ucuugucgggacagaggcu

SEQ ID NO: 1755629 - RNA, 19 nt, Artificial Sequence
  Description of Artificial Sequence: Synthetic oligonucleotide
  Sense strand starting at position 3221 of SEQ ID NO: 1562553
agaugauugugccugugga

SEQ ID NO: 1755630 - RNA, 19 nt, Artificial Sequence
  Description of Artificial Sequence: Synthetic oligonucleotide
  Antisense strand to SEQ ID NO: 1755629
uccacaggcacaaucaucu

SEQ ID NO: 1755631 - RNA, 19 nt, Artificial Sequence
  Description of Artificial Sequence: Synthetic oligonucleotide
  Sense strand starting at position 3234 of SEQ ID NO: 1562553
uguggagaugucuauguug

SEQ ID NO: 1755632 - RNA, 19 nt, Artificial Sequence
  Description of Artificial Sequence: Synthetic oligonucleotide
  Antisense strand to SEQ ID NO: 1755631
caacauagacaucuccaca

SEQ ID NO: 1755633 - RNA, 19 nt, Artificial Sequence
  Description of Artificial Sequence: Synthetic oligonucleotide
  Sense strand starting at position 3237 of SEQ ID NO: 1562553
ggagaugucuauguuguag

SEQ ID NO: 1755634 - RNA, 19 nt, Artificial Sequence
  Description of Artificial Sequence: Synthetic oligonucleotide
  Antisense strand to SEQ ID NO: 1755633
cuacaacauagacaucucc

SEQ ID NO: 1755635 - RNA, 19 nt, Artificial Sequence
  Description of Artificial Sequence: Synthetic oligonucleotide
  Sense strand starting at position 3284 of SEQ ID NO: 1562553
gcagauaugagcuaaugca

SEQ ID NO: 1755636 - RNA, 19 nt, Artificial Sequence
  Description of Artificial Sequence: Synthetic oligonucleotide
  Antisense strand to SEQ ID NO: 1755635
ugcauuagcucauaucugc

SEQ ID NO: 1755637 - RNA, 19 nt, Artificial Sequence
  Description of Artificial Sequence: Synthetic oligonucleotide
  Sense strand starting at position 3347 of SEQ ID NO: 1562553
aggcaacacucauuaguga

SEQ ID NO: 1755638 - RNA, 19 nt, Artificial Sequence
  Description of Artificial Sequence: Synthetic oligonucleotide
  Antisense strand to SEQ ID NO: 1755637
ucacuaaugaguguugccu

SEQ ID NO: 1755639 - RNA, 19 nt, Artificial Sequence
  Description of Artificial Sequence: Synthetic oligonucleotide
  Sense strand starting at position 3348 of SEQ ID NO: 1562553
ggcaacacucauuagugaa

SEQ ID NO: 1755640 - RNA, 19 nt, Artificial Sequence
  Description of Artificial Sequence: Synthetic oligonucleotide
  Antisense strand to SEQ ID NO: 1755639
uucacuaaugaguguugcc

SEQ ID NO: 1755641 - RNA, 19 nt, Artificial Sequence
  Description of Artificial Sequence: Synthetic oligonucleotide
  Sense strand starting at position 3636 of SEQ ID NO: 1562553
aguguauccuagucccaaa

SEQ ID NO: 1755642 - RNA, 19 nt, Artificial Sequence
  Description of Artificial Sequence: Synthetic oligonucleotide
  Antisense strand to SEQ ID NO: 1755641
uuugggacuaggauacacu

SEQ ID NO: 1755643 - RNA, 19 nt, Artificial Sequence
  Description of Artificial Sequence: Synthetic oligonucleotide
  Sense strand starting at position 3693 of SEQ ID NO: 1562553
cagccuuagccagagaugu

SEQ ID NO: 1755644 - RNA, 19 nt, Artificial Sequence
  Description of Artificial Sequence: Synthetic oligonucleotide
  Antisense strand to SEQ ID NO: 1755643
acaucucuggcuaaggcug

SEQ ID NO: 1755645 - RNA, 19 nt, Artificial Sequence
  Description of Artificial Sequence: Synthetic oligonucleotide
  Sense strand starting at position 3695 of SEQ ID NO: 1562553
gccuuagccagagauguau

SEQ ID NO: 1755646 - RNA, 19 nt, Artificial Sequence
  Description of Artificial Sequence: Synthetic oligonucleotide
  Antisense strand to SEQ ID NO: 1755645
auacaucucuggcuaaggc

SEQ ID NO: 1755647 - RNA, 19 nt, Artificial Sequence
  Description of Artificial Sequence: Synthetic oligonucleotide
  Sense strand starting at position 3759 of SEQ ID NO: 1562553
aguuaaugccaugaaucau

SEQ ID NO: 1755648 - RNA, 19 nt, Artificial Sequence
  Description of Artificial Sequence: Synthetic oligonucleotide
  Antisense strand to SEQ ID NO: 1755647
augauucauggcauuaacu

SEQ ID NO: 1755649 - RNA, 19 nt, Artificial Sequence
  Description of Artificial Sequence: Synthetic oligonucleotide
  Sense strand starting at position 3773 of SEQ ID NO: 1562553
aucauugaugcuggguuaa

SEQ ID NO: 1755650 - RNA, 19 nt, Artificial Sequence
  Description of Artificial Sequence: Synthetic oligonucleotide
  Antisense strand to SEQ ID NO: 1755649
uuaacccagcaucaaugau

SEQ ID NO: 1755651 - RNA, 19 nt, Artificial Sequence
  Description of Artificial Sequence: Synthetic oligonucleotide
  Sense strand starting at position 3824 of SEQ ID NO: 1562553
uggauagugacuugucuuu

SEQ ID NO: 1755652 - RNA, 19 nt, Artificial Sequence
  Description of Artificial Sequence: Synthetic oligonucleotide
  Antisense strand to SEQ ID NO: 1755651
aaagacaagucacuaucca

SEQ ID NO: 1755653 - RNA, 19 nt, Artificial Sequence
  Description of Artificial Sequence: Synthetic oligonucleotide
  Sense strand starting at position 3829 of SEQ ID NO: 1562553
agugacuugucuuuccaua

SEQ ID NO: 1755654 - RNA, 19 nt, Artificial Sequence
  Description of Artificial Sequence: Synthetic oligonucleotide
  Antisense strand to SEQ ID NO: 1755653
uauggaaagacaagucacu

SEQ ID NO: 1755655 - RNA, 19 nt, Artificial Sequence
  Description of Artificial Sequence: Synthetic oligonucleotide
  Sense strand starting at position 3831 of SEQ ID NO: 1562553
ugacuugucuuuccauauc

SEQ ID NO: 1755656 - RNA, 19 nt, Artificial Sequence
  Description of Artificial Sequence: Synthetic oligonucleotide
  Antisense strand to SEQ ID NO: 1755655
gauauggaaagacaaguca

SEQ ID NO: 1755657 - RNA, 19 nt, Artificial Sequence
  Description of Artificial Sequence: Synthetic oligonucleotide
  Sense strand starting at position 3976 of SEQ ID NO: 1562553
acucuuugcccagagcuca

SEQ ID NO: 1755658 - RNA, 19 nt, Artificial Sequence
  Description of Artificial Sequence: Synthetic oligonucleotide
  Antisense strand to SEQ ID NO: 1755657
ugagcucugggcaaagagu

SEQ ID NO: 1755659 - RNA, 19 nt, Artificial Sequence
  Description of Artificial Sequence: Synthetic oligonucleotide
  Sense strand starting at position 499 of SEQ ID NO: 1562554
uuugauuucuagcuguaau

SEQ ID NO: 1755660 - RNA, 19 nt, Artificial Sequence
  Description of Artificial Sequence: Synthetic oligonucleotide
  Antisense strand to SEQ ID NO: 1755659
auuacagcuagaaaucaaa

SEQ ID NO: 1755661 - RNA, 19 nt, Artificial Sequence
  Description of Artificial Sequence: Synthetic oligonucleotide
  Sense strand starting at position 616 of SEQ ID NO: 1562554
guauuuaugguaugcucua

SEQ ID NO: 1755662 - RNA, 19 nt, Artificial Sequence
  Description of Artificial Sequence: Synthetic oligonucleotide
  Antisense strand to SEQ ID NO: 1755661
uagagcauaccauaaauac

SEQ ID NO: 1755663 - RNA, 19 nt, Artificial Sequence
  Description of Artificial Sequence: Synthetic oligonucleotide
  Sense strand starting at position 621 of SEQ ID NO: 1562554
uaugguaugcucuagucau

SEQ ID NO: 1755664 - RNA, 19 nt, Artificial Sequence
  Description of Artificial Sequence: Synthetic oligonucleotide
  Antisense strand to SEQ ID NO: 1755663
augacuagagcauaccaua

SEQ ID NO: 1755665 - RNA, 19 nt, Artificial Sequence
  Description of Artificial Sequence: Synthetic oligonucleotide
  Sense strand starting at position 677 of SEQ ID NO: 1562554
aucuuuaaucuggguuuau

SEQ ID NO: 1755666 - RNA, 19 nt, Artificial Sequence
  Description of Artificial Sequence: Synthetic oligonucleotide
  Antisense strand to SEQ ID NO: 1755665
auaaacccagauuaaagau

SEQ ID NO: 1755667 - RNA, 19 nt, Artificial Sequence
  Description of Artificial Sequence: Synthetic oligonucleotide
  Sense strand starting at position 678 of SEQ ID NO: 1562554
ucuuuaaucuggguuuaug

SEQ ID NO: 1755668 - RNA, 19 nt, Artificial Sequence
  Description of Artificial Sequence: Synthetic oligonucleotide
  Antisense strand to SEQ ID NO: 1755667
cauaaacccagauuaaaga

SEQ ID NO: 1755669 - RNA, 19 nt, Artificial Sequence
  Description of Artificial Sequence: Synthetic oligonucleotide
  Sense strand starting at position 681 of SEQ ID NO: 1562554
uuaaucuggguuuauguua

SEQ ID NO: 1755670 - RNA, 19 nt, Artificial Sequence
  Description of Artificial Sequence: Synthetic oligonucleotide
  Antisense strand to SEQ ID NO: 1755669
uaacauaaacccagauuaa

SEQ ID NO: 1755671 - RNA, 19 nt, Artificial Sequence
  Description of Artificial Sequence: Synthetic oligonucleotide
  Sense strand starting at position 688 of SEQ ID NO: 1562554
ggguuuauguuauuucugu

SEQ ID NO: 1755672 - RNA, 19 nt, Artificial Sequence
  Description of Artificial Sequence: Synthetic oligonucleotide
  Antisense strand to SEQ ID NO: 1755671
acagaaauaacauaaaccc

SEQ ID NO: 1755673 - RNA, 19 nt, Artificial Sequence
  Description of Artificial Sequence: Synthetic oligonucleotide
  Sense strand starting at position 689 of SEQ ID NO: 1562554
gguuuauguuauuucugua

SEQ ID NO: 1755674 - RNA, 19 nt, Artificial Sequence
  Description of Artificial Sequence: Synthetic oligonucleotide
  Antisense strand to SEQ ID NO: 1755673
uacagaaauaacauaaacc

SEQ ID NO: 1755675 - RNA, 19 nt, Artificial Sequence
  Description of Artificial Sequence: Synthetic oligonucleotide
  Sense strand starting at position 754 of SEQ ID NO: 1562554
uuuggaacugccuauaaua

SEQ ID NO: 1755676 - RNA, 19 nt, Artificial Sequence
  Description of Artificial Sequence: Synthetic oligonucleotide
  Antisense strand to SEQ ID NO: 1755675
uauuauaggcaguuccaaa

SEQ ID NO: 1755677 - RNA, 19 nt, Artificial Sequence
  Description of Artificial Sequence: Synthetic oligonucleotide
  Sense strand starting at position 756 of SEQ ID NO: 1562554
uggaacugccuauaauauc

SEQ ID NO: 1755678 - RNA, 19 nt, Artificial Sequence
  Description of Artificial Sequence: Synthetic oligonucleotide
  Antisense strand to SEQ ID NO: 1755677
gauauuauaggcaguucca

SEQ ID NO: 1755679 - RNA, 19 nt, Artificial Sequence
  Description of Artificial Sequence: Synthetic oligonucleotide
  Sense strand starting at position 776 of SEQ ID NO: 1562554
agcauaauguuaguacaua

SEQ ID NO: 1755680 - RNA, 19 nt, Artificial Sequence
  Description of Artificial Sequence: Synthetic oligonucleotide
  Antisense strand to SEQ ID NO: 1755679
uauguacuaacauuaugcu

SEQ ID NO: 1755681 - RNA, 19 nt, Artificial Sequence
  Description of Artificial Sequence: Synthetic oligonucleotide
  Sense strand starting at position 945 of SEQ ID NO: 1562554
agaagucugcaguagugaa

SEQ ID NO: 1755682 - RNA, 19 nt, Artificial Sequence
  Description of Artificial Sequence: Synthetic oligonucleotide
  Antisense strand to SEQ ID NO: 1755681
uucacuacugcagacuucu

SEQ ID NO: 1755683 - RNA, 19 nt, Artificial Sequence
  Description of Artificial Sequence: Synthetic oligonucleotide
  Sense strand starting at position 972 of SEQ ID NO: 1562554
uaguaaaucugguuugagg

SEQ ID NO: 1755684 - RNA, 19 nt, Artificial Sequence
  Description of Artificial Sequence: Synthetic oligonucleotide
  Antisense strand to SEQ ID NO: 1755683
ccucaaaccagauuuacua

SEQ ID NO: 1755685 - RNA, 19 nt, Artificial Sequence
  Description of Artificial Sequence: Synthetic oligonucleotide
  Sense strand starting at position 974 of SEQ ID NO: 1562554
guaaaucugguuugaggau

SEQ ID NO: 1755686 - RNA, 19 nt, Artificial Sequence
  Description of Artificial Sequence: Synthetic oligonucleotide
  Antisense strand to SEQ ID NO: 1755685
auccucaaaccagauuuac

SEQ ID NO: 1755687 - RNA, 19 nt, Artificial Sequence
  Description of Artificial Sequence: Synthetic oligonucleotide
  Sense strand starting at position 986 of SEQ ID NO: 1562554
ugaggauugcagcagcuua

SEQ ID NO: 1755688 - RNA, 19 nt, Artificial Sequence
  Description of Artificial Sequence: Synthetic oligonucleotide
  Antisense strand to SEQ ID NO: 1755687
uaagcugcugcaauccuca

SEQ ID NO: 1755689 - RNA, 19 nt, Artificial Sequence
  Description of Artificial Sequence: Synthetic oligonucleotide
  Sense strand starting at position 1138 of SEQ ID NO: 1562554
agcauauugugacuuccau

SEQ ID NO: 1755690 - RNA, 19 nt, Artificial Sequence
  Description of Artificial Sequence: Synthetic oligonucleotide
  Antisense strand to SEQ ID NO: 1755689
auggaagucacaauaugcu

SEQ ID NO: 1755691 - RNA, 19 nt, Artificial Sequence
  Description of Artificial Sequence: Synthetic oligonucleotide
  Sense strand starting at position 1145 of SEQ ID NO: 1562554
ugugacuuccaucagcuau

SEQ ID NO: 1755692 - RNA, 19 nt, Artificial Sequence
  Description of Artificial Sequence: Synthetic oligonucleotide
  Antisense strand to SEQ ID NO: 1755691
auagcugauggaagucaca

SEQ ID NO: 1755693 - RNA, 19 nt, Artificial Sequence
  Description of Artificial Sequence: Synthetic oligonucleotide
  Sense strand starting at position 1198 of SEQ ID NO: 1562554
gugucaucggaugagcauu

SEQ ID NO: 1755694 - RNA, 19 nt, Artificial Sequence
  Description of Artificial Sequence: Synthetic oligonucleotide
  Antisense strand to SEQ ID NO: 1755693
aaugcucauccgaugacac

SEQ ID NO: 1755695 - RNA, 19 nt, Artificial Sequence
  Description of Artificial Sequence: Synthetic oligonucleotide
  Sense strand starting at position 1214 of SEQ ID NO: 1562554
auuaacgucuuagugaaau

SEQ ID NO: 1755696 - RNA, 19 nt, Artificial Sequence
  Description of Artificial Sequence: Synthetic oligonucleotide
  Antisense strand to SEQ ID NO: 1755695
auuucacuaagacguuaau

SEQ ID NO: 1755697 - RNA, 19 nt, Artificial Sequence
  Description of Artificial Sequence: Synthetic oligonucleotide
  Sense strand starting at position 1272 of SEQ ID NO: 1562554
uagucuugccgguucucau

SEQ ID NO: 1755698 - RNA, 19 nt, Artificial Sequence
  Description of Artificial Sequence: Synthetic oligonucleotide
  Antisense strand to SEQ ID NO: 1755697
augagaaccggcaagacua

SEQ ID NO: 1755699 - RNA, 19 nt, Artificial Sequence
  Description of Artificial Sequence: Synthetic oligonucleotide
  Sense strand starting at position 2037 of SEQ ID NO: 1562554
ucggcucugacgcuaguaa

SEQ ID NO: 1755700 - RNA, 19 nt, Artificial Sequence
  Description of Artificial Sequence: Synthetic oligonucleotide
  Antisense strand to SEQ ID NO: 1755699
uuacuagcgucagagccga

SEQ ID NO: 1755701 - RNA, 19 nt, Artificial Sequence
  Description of Artificial Sequence: Synthetic oligonucleotide
  Sense strand starting at position 2128 of SEQ ID NO: 1562554
cugacauaaccacgaaguu

SEQ ID NO: 1755702 - RNA, 19 nt, Artificial Sequence
  Description of Artificial Sequence: Synthetic oligonucleotide
  Antisense strand to SEQ ID NO: 1755701
aacuucgugguuaugucag

SEQ ID NO: 1755703 - RNA, 19 nt, Artificial Sequence
  Description of Artificial Sequence: Synthetic oligonucleotide
  Sense strand starting at position 2149 of SEQ ID NO: 1562554
auaaaugcuccugaagugu

SEQ ID NO: 1755704 - RNA, 19 nt, Artificial Sequence
  Description of Artificial Sequence: Synthetic oligonucleotide
  Antisense strand to SEQ ID NO: 1755703
acacuucaggagcauuuau

SEQ ID NO: 1755705 - RNA, 19 nt, Artificial Sequence
  Description of Artificial Sequence: Synthetic oligonucleotide
  Sense strand starting at position 2193 of SEQ ID NO: 1562554
uggaguuuccuagaugguu

SEQ ID NO: 1755706 - RNA, 19 nt, Artificial Sequence
  Description of Artificial Sequence: Synthetic oligonucleotide
  Antisense strand to SEQ ID NO: 1755705
aaccaucuaggaaacucca

SEQ ID NO: 1755707 - RNA, 19 nt, Artificial Sequence
  Description of Artificial Sequence: Synthetic oligonucleotide
  Sense strand starting at position 2209 of SEQ ID NO: 1562554
guuaccuuucuggaacaca

SEQ ID NO: 1755708 - RNA, 19 nt, Artificial Sequence
  Description of Artificial Sequence: Synthetic oligonucleotide
  Antisense strand to SEQ ID NO: 1755707
uguguuccagaaagguaac

SEQ ID NO: 1755709 - RNA, 19 nt, Artificial Sequence
  Description of Artificial Sequence: Synthetic oligonucleotide
  Sense strand starting at position 2225 of SEQ ID NO: 1562554
acauuauauuuggagcuaa

SEQ ID NO: 1755710 - RNA, 19 nt, Artificial Sequence
  Description of Artificial Sequence: Synthetic oligonucleotide
  Antisense strand to SEQ ID NO: 1755709
uuagcuccaaauauaaugu

SEQ ID NO: 1755711 - RNA, 19 nt, Artificial Sequence
  Description of Artificial Sequence: Synthetic oligonucleotide
  Sense strand starting at position 2254 of SEQ ID NO: 1562554
gcuuaaauuuguuuccgua

SEQ ID NO: 1755712 - RNA, 19 nt, Artificial Sequence
  Description of Artificial Sequence: Synthetic oligonucleotide
  Antisense strand to SEQ ID NO: 1755711
uacggaaacaaauuuaagc

SEQ ID NO: 1755713 - RNA, 19 nt, Artificial Sequence
  Description of Artificial Sequence: Synthetic oligonucleotide
  Sense strand starting at position 2269 of SEQ ID NO: 1562554
cguaauucuguccugucga

SEQ ID NO: 1755714 - RNA, 19 nt, Artificial Sequence
  Description of Artificial Sequence: Synthetic oligonucleotide
  Antisense strand to SEQ ID NO: 1755713
ucgacaggacagaauuacg

SEQ ID NO: 1755715 - RNA, 19 nt, Artificial Sequence
  Description of Artificial Sequence: Synthetic oligonucleotide
  Sense strand starting at position 2370 of SEQ ID NO: 1562554
guuuguuugagacggaaua

SEQ ID NO: 1755716 - RNA, 19 nt, Artificial Sequence
  Description of Artificial Sequence: Synthetic oligonucleotide
  Antisense strand to SEQ ID NO: 1755715
uauuccgucucaaacaaac

SEQ ID NO: 1755717 - RNA, 19 nt, Artificial Sequence
  Description of Artificial Sequence: Synthetic oligonucleotide
  Sense strand starting at position 2371 of SEQ ID NO: 1562554
uuuguuugagacggaauau

SEQ ID NO: 1755718 - RNA, 19 nt, Artificial Sequence
  Description of Artificial Sequence: Synthetic oligonucleotide
  Antisense strand to SEQ ID NO: 1755717
auauuccgucucaaacaaa

SEQ ID NO: 1755719 - RNA, 19 nt, Artificial Sequence
  Description of Artificial Sequence: Synthetic oligonucleotide
  Sense strand starting at position 2372 of SEQ ID NO: 1562554
uuguuugagacggaauauc

SEQ ID NO: 1755720 - RNA, 19 nt, Artificial Sequence
  Description of Artificial Sequence: Synthetic oligonucleotide
  Antisense strand to SEQ ID NO: 1755719
gauauuccgucucaaacaa

SEQ ID NO: 1755721 - RNA, 19 nt, Artificial Sequence
  Description of Artificial Sequence: Synthetic oligonucleotide
  Sense strand starting at position 2641 of SEQ ID NO: 1562554
gacggugucagauaaauug

SEQ ID NO: 1755722 - RNA, 19 nt, Artificial Sequence
  Description of Artificial Sequence: Synthetic oligonucleotide
  Antisense strand to SEQ ID NO: 1755721
caauuuaucugacaccguc

SEQ ID NO: 1755723 - RNA, 19 nt, Artificial Sequence
  Description of Artificial Sequence: Synthetic oligonucleotide
  Sense strand starting at position 3084 of SEQ ID NO: 1562554
ggagucuuaguuuaguaga

SEQ ID NO: 1755724 - RNA, 19 nt, Artificial Sequence
  Description of Artificial Sequence: Synthetic oligonucleotide
  Antisense strand to SEQ ID NO: 1755723
ucuacuaaacuaagacucc

SEQ ID NO: 1755725 - RNA, 19 nt, Artificial Sequence
  Description of Artificial Sequence: Synthetic oligonucleotide
  Sense strand starting at position 3086 of SEQ ID NO: 1562554
agucuuaguuuaguagaga

SEQ ID NO: 1755726 - RNA, 19 nt, Artificial Sequence
  Description of Artificial Sequence: Synthetic oligonucleotide
  Antisense strand to SEQ ID NO: 1755725
ucucuacuaaacuaagacu

SEQ ID NO: 1755727 - RNA, 19 nt, Artificial Sequence
  Description of Artificial Sequence: Synthetic oligonucleotide
  Sense strand starting at position 3133 of SEQ ID NO: 1562554
gggaguugcagauagcuau

SEQ ID NO: 1755728 - RNA, 19 nt, Artificial Sequence
  Description of Artificial Sequence: Synthetic oligonucleotide
  Antisense strand to SEQ ID NO: 1755727
auagcuaucugcaacuccc

SEQ ID NO: 1755729 - RNA, 19 nt, Artificial Sequence
  Description of Artificial Sequence: Synthetic oligonucleotide
  Sense strand starting at position 3137 of SEQ ID NO: 1562554
guugcagauagcuauagaa

SEQ ID NO: 1755730 - RNA, 19 nt, Artificial Sequence
  Description of Artificial Sequence: Synthetic oligonucleotide
  Antisense strand to SEQ ID NO: 1755729
uucuauagcuaucugcaac

SEQ ID NO: 1755731 - RNA, 19 nt, Artificial Sequence
  Description of Artificial Sequence: Synthetic oligonucleotide
  Sense strand starting at position 3751 of SEQ ID NO: 1562554
acgaauguauuaucucaaa

SEQ ID NO: 1755732 - RNA, 19 nt, Artificial Sequence
  Description of Artificial Sequence: Synthetic oligonucleotide
  Antisense strand to SEQ ID NO: 1755731
uuugagauaauacauucgu

SEQ ID NO: 1755733 - RNA, 19 nt, Artificial Sequence
  Description of Artificial Sequence: Synthetic oligonucleotide
  Sense strand starting at position 3807 of SEQ ID NO: 1562554
aagucaaauccugggcaua

SEQ ID NO: 1755734 - RNA, 19 nt, Artificial Sequence
  Description of Artificial Sequence: Synthetic oligonucleotide
  Antisense strand to SEQ ID NO: 1755733
uaugcccaggauuugacuu

SEQ ID NO: 1755735 - RNA, 19 nt, Artificial Sequence
  Description of Artificial Sequence: Synthetic oligonucleotide
  Sense strand starting at position 3820 of SEQ ID NO: 1562554
ggcauauccacggaugugu

SEQ ID NO: 1755736 - RNA, 19 nt, Artificial Sequence
  Description of Artificial Sequence: Synthetic oligonucleotide
  Antisense strand to SEQ ID NO: 1755735
acacauccguggauaugcc

SEQ ID NO: 1755737 - RNA, 19 nt, Artificial Sequence
  Description of Artificial Sequence: Synthetic oligonucleotide
  Sense strand starting at position 3961 of SEQ ID NO: 1562554
gagccuuagggucauugua

SEQ ID NO: 1755738 - RNA, 19 nt, Artificial Sequence
  Description of Artificial Sequence: Synthetic oligonucleotide
  Antisense strand to SEQ ID NO: 1755737
uacaaugacccuaaggcuc

SEQ ID NO: 1755739 - RNA, 19 nt, Artificial Sequence
  Description of Artificial Sequence: Synthetic oligonucleotide
  Sense strand starting at position 146 of SEQ ID NO: 1562555
uuaaauauugcuuagcguu

SEQ ID NO: 1755740 - RNA, 19 nt, Artificial Sequence
  Description of Artificial Sequence: Synthetic oligonucleotide
  Antisense strand to SEQ ID NO: 1755739
aacgcuaagcaauauuuaa

SEQ ID NO: 1755741 - RNA, 19 nt, Artificial Sequence
  Description of Artificial Sequence: Synthetic oligonucleotide
  Sense strand starting at position 307 of SEQ ID NO: 1562555
ugcagugugcaauauccuu

SEQ ID NO: 1755742 - RNA, 19 nt, Artificial Sequence
  Description of Artificial Sequence: Synthetic oligonucleotide
  Antisense strand to SEQ ID NO: 1755741
aaggauauugcacacugca

SEQ ID NO: 1755743 - RNA, 19 nt, Artificial Sequence
  Description of Artificial Sequence: Synthetic oligonucleotide
  Sense strand starting at position 417 of SEQ ID NO: 1562555
aaacuugaguaucuucgau

SEQ ID NO: 1755744 - RNA, 19 nt, Artificial Sequence
  Description of Artificial Sequence: Synthetic oligonucleotide
  Antisense strand to SEQ ID NO: 1755743
aucgaagauacucaaguuu

SEQ ID NO: 1755745 - RNA, 19 nt, Artificial Sequence
  Description of Artificial Sequence: Synthetic oligonucleotide
  Sense strand starting at position 419 of SEQ ID NO: 1562555
acuugaguaucuucgauua

SEQ ID NO: 1755746 - RNA, 19 nt, Artificial Sequence
  Description of Artificial Sequence: Synthetic oligonucleotide
  Antisense strand to SEQ ID NO: 1755745
uaaucgaagauacucaagu

SEQ ID NO: 1755747 - RNA, 19 nt, Artificial Sequence
  Description of Artificial Sequence: Synthetic oligonucleotide
  Sense strand starting at position 424 of SEQ ID NO: 1562555
aguaucuucgauuacuuua

SEQ ID NO: 1755748 - RNA, 19 nt, Artificial Sequence
  Description of Artificial Sequence: Synthetic oligonucleotide
  Antisense strand to SEQ ID NO: 1755747
uaaaguaaucgaagauacu

SEQ ID NO: 1755749 - RNA, 19 nt, Artificial Sequence
  Description of Artificial Sequence: Synthetic oligonucleotide
  Sense strand starting at position 429 of SEQ ID NO: 1562555
cuucgauuacuuuaaagca

SEQ ID NO: 1755750 - RNA, 19 nt, Artificial Sequence
  Description of Artificial Sequence: Synthetic oligonucleotide
  Antisense strand to SEQ ID NO: 1755749
ugcuuuaaaguaaucgaag

SEQ ID NO: 1755751 - RNA, 19 nt, Artificial Sequence
  Description of Artificial Sequence: Synthetic oligonucleotide
  Sense strand starting at position 738 of SEQ ID NO: 1562555
guuaaaucauggccaacua

SEQ ID NO: 1755752 - RNA, 19 nt, Artificial Sequence
  Description of Artificial Sequence: Synthetic oligonucleotide
  Antisense strand to SEQ ID NO: 1755751
uaguuggccaugauuuaac

SEQ ID NO: 1755753 - RNA, 19 nt, Artificial Sequence
  Description of Artificial Sequence: Synthetic oligonucleotide
  Sense strand starting at position 818 of SEQ ID NO: 1562555
auagcagaaugaucucuau

SEQ ID NO: 1755754 - RNA, 19 nt, Artificial Sequence
  Description of Artificial Sequence: Synthetic oligonucleotide
  Antisense strand to SEQ ID NO: 1755753
auagagaucauucugcuau

SEQ ID NO: 1755755 - RNA, 19 nt, Artificial Sequence
  Description of Artificial Sequence: Synthetic oligonucleotide
  Sense strand starting at position 880 of SEQ ID NO: 1562555
uuucuuuagugagugacca

SEQ ID NO: 1755756 - RNA, 19 nt, Artificial Sequence
  Description of Artificial Sequence: Synthetic oligonucleotide
  Antisense strand to SEQ ID NO: 1755755
uggucacucacuaaagaaa

SEQ ID NO: 1755757 - RNA, 19 nt, Artificial Sequence
  Description of Artificial Sequence: Synthetic oligonucleotide
  Sense strand starting at position 881 of SEQ ID NO: 1562555
uucuuuagugagugaccau

SEQ ID NO: 1755758 - RNA, 19 nt, Artificial Sequence
  Description of Artificial Sequence: Synthetic oligonucleotide
  Antisense strand to SEQ ID NO: 1755757
auggucacucacuaaagaa

SEQ ID NO: 1755759 - RNA, 19 nt, Artificial Sequence
  Description of Artificial Sequence: Synthetic oligonucleotide
  Sense strand starting at position 898 of SEQ ID NO: 1562555
auuugaaugugugacugau

SEQ ID NO: 1755760 - RNA, 19 nt, Artificial Sequence
  Description of Artificial Sequence: Synthetic oligonucleotide
  Antisense strand to SEQ ID NO: 1755759
aucagucacacauucaaau

SEQ ID NO: 1755761 - RNA, 19 nt, Artificial Sequence
  Description of Artificial Sequence: Synthetic oligonucleotide
  Sense strand starting at position 906 of SEQ ID NO: 1562555
gugugacugaugcaagagu

SEQ ID NO: 1755762 - RNA, 19 nt, Artificial Sequence
  Description of Artificial Sequence: Synthetic oligonucleotide
  Antisense strand to SEQ ID NO: 1755761
acucuugcaucagucacac

SEQ ID NO: 1755763 - RNA, 19 nt, Artificial Sequence
  Description of Artificial Sequence: Synthetic oligonucleotide
  Sense strand starting at position 986 of SEQ ID NO: 1562555
ccagaaagguuuccucucu

SEQ ID NO: 1755764 - RNA, 19 nt, Artificial Sequence
  Description of Artificial Sequence: Synthetic oligonucleotide
  Antisense strand to SEQ ID NO: 1755763
agagaggaaaccuuucugg

SEQ ID NO: 1755765 - RNA, 19 nt, Artificial Sequence
  Description of Artificial Sequence: Synthetic oligonucleotide
  Sense strand starting at position 1005 of SEQ ID NO: 1562555
uagggacaguuucuauauu

SEQ ID NO: 1755766 - RNA, 19 nt, Artificial Sequence
  Description of Artificial Sequence: Synthetic oligonucleotide
  Antisense strand to SEQ ID NO: 1755765
aauauagaaacugucccua

SEQ ID NO: 1755767 - RNA, 19 nt, Artificial Sequence
  Description of Artificial Sequence: Synthetic oligonucleotide
  Sense strand starting at position 1342 of SEQ ID NO: 1562555
caccgucugcuacgggaaa

SEQ ID NO: 1755768 - RNA, 19 nt, Artificial Sequence
  Description of Artificial Sequence: Synthetic oligonucleotide
  Antisense strand to SEQ ID NO: 1755767
uuucccguagcagacggug

SEQ ID NO: 1755769 - RNA, 19 nt, Artificial Sequence
  Description of Artificial Sequence: Synthetic oligonucleotide
  Sense strand starting at position 1381 of SEQ ID NO: 1562555
gauugaagcccgcaaacua

SEQ ID NO: 1755770 - RNA, 19 nt, Artificial Sequence
  Description of Artificial Sequence: Synthetic oligonucleotide
  Antisense strand to SEQ ID NO: 1755769
uaguuugcgggcuucaauc

SEQ ID NO: 1755771 - RNA, 19 nt, Artificial Sequence
  Description of Artificial Sequence: Synthetic oligonucleotide
  Sense strand starting at position 2488 of SEQ ID NO: 1562555
cucgccuuucuaggaauuu

SEQ ID NO: 1755772 - RNA, 19 nt, Artificial Sequence
  Description of Artificial Sequence: Synthetic oligonucleotide
  Antisense strand to SEQ ID NO: 1755771
aaauuccuagaaaggcgag

SEQ ID NO: 1755773 - RNA, 19 nt, Artificial Sequence
  Description of Artificial Sequence: Synthetic oligonucleotide
  Sense strand starting at position 2556 of SEQ ID NO: 1562555
gccagaaaucuuuaugcug

SEQ ID NO: 1755774 - RNA, 19 nt, Artificial Sequence
  Description of Artificial Sequence: Synthetic oligonucleotide
  Antisense strand to SEQ ID NO: 1755773
cagcauaaagauuucuggc

SEQ ID NO: 1755775 - RNA, 19 nt, Artificial Sequence
  Description of Artificial Sequence: Synthetic oligonucleotide
  Sense strand starting at position 2559 of SEQ ID NO: 1562555
agaaaucuuuaugcuggga

SEQ ID NO: 1755776 - RNA, 19 nt, Artificial Sequence
  Description of Artificial Sequence: Synthetic oligonucleotide
  Antisense strand to SEQ ID NO: 1755775
ucccagcauaaagauuucu

SEQ ID NO: 1755777 - RNA, 19 nt, Artificial Sequence
  Description of Artificial Sequence: Synthetic oligonucleotide
  Sense strand starting at position 2562 of SEQ ID NO: 1562555
aaucuuuaugcugggaagu

SEQ ID NO: 1755778 - RNA, 19 nt, Artificial Sequence
  Description of Artificial Sequence: Synthetic oligonucleotide
  Antisense strand to SEQ ID NO: 1755777
acuucccagcauaaagauu

SEQ ID NO: 1755779 - RNA, 19 nt, Artificial Sequence
  Description of Artificial Sequence: Synthetic oligonucleotide
  Sense strand starting at position 2563 of SEQ ID NO: 1562555
aucuuuaugcugggaagua

SEQ ID NO: 1755780 - RNA, 19 nt, Artificial Sequence
  Description of Artificial Sequence: Synthetic oligonucleotide
  Antisense strand to SEQ ID NO: 1755779
uacuucccagcauaaagau

SEQ ID NO: 1755781 - RNA, 19 nt, Artificial Sequence
  Description of Artificial Sequence: Synthetic oligonucleotide
  Sense strand starting at position 2594 of SEQ ID NO: 1562555
acuaaucauuacguaaaug

SEQ ID NO: 1755782 - RNA, 19 nt, Artificial Sequence
  Description of Artificial Sequence: Synthetic oligonucleotide
  Antisense strand to SEQ ID NO: 1755781
cauuuacguaaugauuagu

SEQ ID NO: 1755783 - RNA, 19 nt, Artificial Sequence
  Description of Artificial Sequence: Synthetic oligonucleotide
  Sense strand starting at position 2647 of SEQ ID NO: 1562555
gaauaugugucagucacug

SEQ ID NO: 1755784 - RNA, 19 nt, Artificial Sequence
  Description of Artificial Sequence: Synthetic oligonucleotide
  Antisense strand to SEQ ID NO: 1755783
cagugacugacacauauuc

SEQ ID NO: 1755785 - RNA, 19 nt, Artificial Sequence
  Description of Artificial Sequence: Synthetic oligonucleotide
  Sense strand starting at position 2821 of SEQ ID NO: 1562555
uggaaugcuugacuauaua

SEQ ID NO: 1755786 - RNA, 19 nt, Artificial Sequence
  Description of Artificial Sequence: Synthetic oligonucleotide
  Antisense strand to SEQ ID NO: 1755785
uauauagucaagcauucca

SEQ ID NO: 1755787 - RNA, 19 nt, Artificial Sequence
  Description of Artificial Sequence: Synthetic oligonucleotide
  Sense strand starting at position 2894 of SEQ ID NO: 1562555
ucucgaguuccaggagcua

SEQ ID NO: 1755788 - RNA, 19 nt, Artificial Sequence
  Description of Artificial Sequence: Synthetic oligonucleotide
  Antisense strand to SEQ ID NO: 1755787
uagcuccuggaacucgaga

SEQ ID NO: 1755789 - RNA, 19 nt, Artificial Sequence
  Description of Artificial Sequence: Synthetic oligonucleotide
  Sense strand starting at position 3026 of SEQ ID NO: 1562555
gaaagcaagcuuggcaaau

SEQ ID NO: 1755790 - RNA, 19 nt, Artificial Sequence
  Description of Artificial Sequence: Synthetic oligonucleotide
  Antisense strand to SEQ ID NO: 1755789
auuugccaagcuugcuuuc

SEQ ID NO: 1755791 - RNA, 19 nt, Artificial Sequence
  Description of Artificial Sequence: Synthetic oligonucleotide
  Sense strand starting at position 3038 of SEQ ID NO: 1562555
ggcaaaugcuaauugaaau

SEQ ID NO: 1755792 - RNA, 19 nt, Artificial Sequence
  Description of Artificial Sequence: Synthetic oligonucleotide
  Antisense strand to SEQ ID NO: 1755791
auuucaauuagcauuugcc

SEQ ID NO: 1755793 - RNA, 19 nt, Artificial Sequence
  Description of Artificial Sequence: Synthetic oligonucleotide
  Sense strand starting at position 3051 of SEQ ID NO: 1562555
ugaaauaguaugugguguu

SEQ ID NO: 1755794 - RNA, 19 nt, Artificial Sequence
  Description of Artificial Sequence: Synthetic oligonucleotide
  Antisense strand to SEQ ID NO: 1755793
aacaccacauacuauuuca

SEQ ID NO: 1755795 - RNA, 19 nt, Artificial Sequence
  Description of Artificial Sequence: Synthetic oligonucleotide
  Sense strand starting at position 3083 of SEQ ID NO: 1562555
ggauuauaguagcucuuaa

SEQ ID NO: 1755796 - RNA, 19 nt, Artificial Sequence
  Description of Artificial Sequence: Synthetic oligonucleotide
  Antisense strand to SEQ ID NO: 1755795
uuaagagcuacuauaaucc

SEQ ID NO: 1755797 - RNA, 19 nt, Artificial Sequence
  Description of Artificial Sequence: Synthetic oligonucleotide
  Sense strand starting at position 3095 of SEQ ID NO: 1562555
cucuuaaggcuuuguaaca

SEQ ID NO: 1755798 - RNA, 19 nt, Artificial Sequence
  Description of Artificial Sequence: Synthetic oligonucleotide
  Antisense strand to SEQ ID NO: 1755797
uguuacaaagccuuaagag

SEQ ID NO: 1755799 - RNA, 19 nt, Artificial Sequence
  Description of Artificial Sequence: Synthetic oligonucleotide
  Sense strand starting at position 3279 of SEQ ID NO: 1562555
ucaugaaacgguuggaaac

SEQ ID NO: 1755800 - RNA, 19 nt, Artificial Sequence
  Description of Artificial Sequence: Synthetic oligonucleotide
  Antisense strand to SEQ ID NO: 1755799
guuuccaaccguuucauga

SEQ ID NO: 1755801 - RNA, 19 nt, Artificial Sequence
  Description of Artificial Sequence: Synthetic oligonucleotide
  Sense strand starting at position 3456 of SEQ ID NO: 1562555
cauguuucuccauaugagg

SEQ ID NO: 1755802 - RNA, 19 nt, Artificial Sequence
  Description of Artificial Sequence: Synthetic oligonucleotide
  Antisense strand to SEQ ID NO: 1755801
ccucauauggagaaacaug

SEQ ID NO: 1755803 - RNA, 19 nt, Artificial Sequence
  Description of Artificial Sequence: Synthetic oligonucleotide
  Sense strand starting at position 3615 of SEQ ID NO: 1562555
ucaagaauuuggcaauaca

SEQ ID NO: 1755804 - RNA, 19 nt, Artificial Sequence
  Description of Artificial Sequence: Synthetic oligonucleotide
  Antisense strand to SEQ ID NO: 1755803
uguauugccaaauucuuga

SEQ ID NO: 1755805 - RNA, 19 nt, Artificial Sequence
  Description of Artificial Sequence: Synthetic oligonucleotide
  Sense strand starting at position 3651 of SEQ ID NO: 1562555
auuuguuacuuccauacag

SEQ ID NO: 1755806 - RNA, 19 nt, Artificial Sequence
  Description of Artificial Sequence: Synthetic oligonucleotide
  Antisense strand to SEQ ID NO: 1755805
cuguauggaaguaacaaau

SEQ ID NO: 1755807 - RNA, 19 nt, Artificial Sequence
  Description of Artificial Sequence: Synthetic oligonucleotide
  Sense strand starting at position 3764 of SEQ ID NO: 1562555
uucugaggguuuccuacuu

SEQ ID NO: 1755808 - RNA, 19 nt, Artificial Sequence
  Description of Artificial Sequence: Synthetic oligonucleotide
  Antisense strand to SEQ ID NO: 1755807
aaguaggaaacccucagaa

SEQ ID NO: 1755809 - RNA, 19 nt, Artificial Sequence
  Description of Artificial Sequence: Synthetic oligonucleotide
  Sense strand starting at position 3769 of SEQ ID NO: 1562555
aggguuuccuacuuacuca

SEQ ID NO: 1755810 - RNA, 19 nt, Artificial Sequence
  Description of Artificial Sequence: Synthetic oligonucleotide
  Antisense strand to SEQ ID NO: 1755809
ugaguaaguaggaaacccu

SEQ ID NO: 1755811 - RNA, 19 nt, Artificial Sequence
  Description of Artificial Sequence: Synthetic oligonucleotide
  Sense strand starting at position 3820 of SEQ ID NO: 1562555
gaagaacauugagaagaaa

SEQ ID NO: 1755812 - RNA, 19 nt, Artificial Sequence
  Description of Artificial Sequence: Synthetic oligonucleotide
  Antisense strand to SEQ ID NO: 1755811
uuucuucucaauguucuuc

SEQ ID NO: 1755813 - RNA, 19 nt, Artificial Sequence
  Description of Artificial Sequence: Synthetic oligonucleotide
  Sense strand starting at position 3873 of SEQ ID NO: 1562555
aggcuuacaauugggauga

SEQ ID NO: 1755814 - RNA, 19 nt, Artificial Sequence
  Description of Artificial Sequence: Synthetic oligonucleotide
  Antisense strand to SEQ ID NO: 1755813
ucaucccaauuguaagccu

SEQ ID NO: 1755815 - RNA, 19 nt, Artificial Sequence
  Description of Artificial Sequence: Synthetic oligonucleotide
  Sense strand starting at position 3966 of SEQ ID NO: 1562555
uuaaauuugcgccgugaca

SEQ ID NO: 1755816 - RNA, 19 nt, Artificial Sequence
  Description of Artificial Sequence: Synthetic oligonucleotide
  Antisense strand to SEQ ID NO: 1755815
ugucacggcgcaaauuuaa

SEQ ID NO: 1755817 - RNA, 19 nt, Artificial Sequence
  Description of Artificial Sequence: Synthetic oligonucleotide
  Sense strand starting at position 3968 of SEQ ID NO: 1562555
aaauuugcgccgugacaau

SEQ ID NO: 1755818 - RNA, 19 nt, Artificial Sequence
  Description of Artificial Sequence: Synthetic oligonucleotide
  Antisense strand to SEQ ID NO: 1755817
auugucacggcgcaaauuu

SEQ ID NO: 1755819 - RNA, 19 nt, Artificial Sequence
  Description of Artificial Sequence: Synthetic oligonucleotide
  Sense strand starting at position 29 of SEQ ID NO: 1562556
cuuaaucucuuauuggagu

SEQ ID NO: 1755820 - RNA, 19 nt, Artificial Sequence
  Description of Artificial Sequence: Synthetic oligonucleotide
  Antisense strand to SEQ ID NO: 1755819
acuccaauaagagauuaag

SEQ ID NO: 1755821 - RNA, 19 nt, Artificial Sequence
  Description of Artificial Sequence: Synthetic oligonucleotide
  Sense strand starting at position 35 of SEQ ID NO: 1562556
cucuuauuggaguacguca

SEQ ID NO: 1755822 - RNA, 19 nt, Artificial Sequence
  Description of Artificial Sequence: Synthetic oligonucleotide
  Antisense strand to SEQ ID NO: 1755821
ugacguacuccaauaagag

SEQ ID NO: 1755823 - RNA, 19 nt, Artificial Sequence
  Description of Artificial Sequence: Synthetic oligonucleotide
  Sense strand starting at position 37 of SEQ ID NO: 1562556
cuuauuggaguacgucaua

SEQ ID NO: 1755824 - RNA, 19 nt, Artificial Sequence
  Description of Artificial Sequence: Synthetic oligonucleotide
  Antisense strand to SEQ ID NO: 1755823
uaugacguacuccaauaag

SEQ ID NO: 1755825 - RNA, 19 nt, Artificial Sequence
  Description of Artificial Sequence: Synthetic oligonucleotide
  Sense strand starting at position 56 of SEQ ID NO: 1562556
cugcauaguucugugggaa

SEQ ID NO: 1755826 - RNA, 19 nt, Artificial Sequence
  Description of Artificial Sequence: Synthetic oligonucleotide
  Antisense strand to SEQ ID NO: 1755825
uucccacagaacuaugcag

SEQ ID NO: 1755827 - RNA, 19 nt, Artificial Sequence
  Description of Artificial Sequence: Synthetic oligonucleotide
  Sense strand starting at position 148 of SEQ ID NO: 1562556
aaaucuaugcgacaugguu

SEQ ID NO: 1755828 - RNA, 19 nt, Artificial Sequence
  Description of Artificial Sequence: Synthetic oligonucleotide
  Antisense strand to SEQ ID NO: 1755827
aaccaugucgcauagauuu

SEQ ID NO: 1755829 - RNA, 19 nt, Artificial Sequence
  Description of Artificial Sequence: Synthetic oligonucleotide
  Sense strand starting at position 154 of SEQ ID NO: 1562556
augcgacaugguuauaaga

SEQ ID NO: 1755830 - RNA, 19 nt, Artificial Sequence
  Description of Artificial Sequence: Synthetic oligonucleotide
  Antisense strand to SEQ ID NO: 1755829
ucuuauaaccaugucgcau

SEQ ID NO: 1755831 - RNA, 19 nt, Artificial Sequence
  Description of Artificial Sequence: Synthetic oligonucleotide
  Sense strand starting at position 572 of SEQ ID NO: 1562556
accugaaaguguucccaug

SEQ ID NO: 1755832 - RNA, 19 nt, Artificial Sequence
  Description of Artificial Sequence: Synthetic oligonucleotide
  Antisense strand to SEQ ID NO: 1755831
caugggaacacuuucaggu

SEQ ID NO: 1755833 - RNA, 19 nt, Artificial Sequence
  Description of Artificial Sequence: Synthetic oligonucleotide
  Sense strand starting at position 574 of SEQ ID NO: 1562556
cugaaaguguucccaugac

SEQ ID NO: 1755834 - RNA, 19 nt, Artificial Sequence
  Description of Artificial Sequence: Synthetic oligonucleotide
  Antisense strand to SEQ ID NO: 1755833
gucaugggaacacuuucag

SEQ ID NO: 1755835 - RNA, 19 nt, Artificial Sequence
  Description of Artificial Sequence: Synthetic oligonucleotide
  Sense strand starting at position 635 of SEQ ID NO: 1562556
gaaccuaaacuucgguuua

SEQ ID NO: 1755836 - RNA, 19 nt, Artificial Sequence
  Description of Artificial Sequence: Synthetic oligonucleotide
  Antisense strand to SEQ ID NO: 1755835
uaaaccgaaguuuagguuc

SEQ ID NO: 1755837 - RNA, 19 nt, Artificial Sequence
  Description of Artificial Sequence: Synthetic oligonucleotide
  Sense strand starting at position 637 of SEQ ID NO: 1562556
accuaaacuucgguuuauc

SEQ ID NO: 1755838 - RNA, 19 nt, Artificial Sequence
  Description of Artificial Sequence: Synthetic oligonucleotide
  Antisense strand to SEQ ID NO: 1755837
gauaaaccgaaguuuaggu

SEQ ID NO: 1755839 - RNA, 19 nt, Artificial Sequence
  Description of Artificial Sequence: Synthetic oligonucleotide
  Sense strand starting at position 836 of SEQ ID NO: 1562556
cucacucuggcagauauua

SEQ ID NO: 1755840 - RNA, 19 nt, Artificial Sequence
  Description of Artificial Sequence: Synthetic oligonucleotide
  Antisense strand to SEQ ID NO: 1755839
uaauaucugccagagugag

SEQ ID NO: 1755841 - RNA, 19 nt, Artificial Sequence
  Description of Artificial Sequence: Synthetic oligonucleotide
  Sense strand starting at position 846 of SEQ ID NO: 1562556
cagauauuagaccgugagu

SEQ ID NO: 1755842 - RNA, 19 nt, Artificial Sequence
  Description of Artificial Sequence: Synthetic oligonucleotide
  Antisense strand to SEQ ID NO: 1755841
acucacggucuaauaucug

SEQ ID NO: 1755843 - RNA, 19 nt, Artificial Sequence
  Description of Artificial Sequence: Synthetic oligonucleotide
  Sense strand starting at position 848 of SEQ ID NO: 1562556
gauauuagaccgugagucu

SEQ ID NO: 1755844 - RNA, 19 nt, Artificial Sequence
  Description of Artificial Sequence: Synthetic oligonucleotide
  Antisense strand to SEQ ID NO: 1755843
agacucacggucuaauauc

SEQ ID NO: 1755845 - RNA, 19 nt, Artificial Sequence
  Description of Artificial Sequence: Synthetic oligonucleotide
  Sense strand starting at position 885 of SEQ ID NO: 1562556
ggauaugugacggguuucu

SEQ ID NO: 1755846 - RNA, 19 nt, Artificial Sequence
  Description of Artificial Sequence: Synthetic oligonucleotide
  Antisense strand to SEQ ID NO: 1755845
agaaacccgucacauaucc

SEQ ID NO: 1755847 - RNA, 19 nt, Artificial Sequence
  Description of Artificial Sequence: Synthetic oligonucleotide
  Sense strand starting at position 894 of SEQ ID NO: 1562556
acggguuucugaguacaau

SEQ ID NO: 1755848 - RNA, 19 nt, Artificial Sequence
  Description of Artificial Sequence: Synthetic oligonucleotide
  Antisense strand to SEQ ID NO: 1755847
auuguacucagaaacccgu

SEQ ID NO: 1755849 - RNA, 19 nt, Artificial Sequence
  Description of Artificial Sequence: Synthetic oligonucleotide
  Sense strand starting at position 895 of SEQ ID NO: 1562556
cggguuucugaguacaauu

SEQ ID NO: 1755850 - RNA, 19 nt, Artificial Sequence
  Description of Artificial Sequence: Synthetic oligonucleotide
  Antisense strand to SEQ ID NO: 1755849
aauuguacucagaaacccg

SEQ ID NO: 1755851 - RNA, 19 nt, Artificial Sequence
  Description of Artificial Sequence: Synthetic oligonucleotide
  Sense strand starting at position 989 of SEQ ID NO: 1562556
acacgucguccguuucaaa

SEQ ID NO: 1755852 - RNA, 19 nt, Artificial Sequence
  Description of Artificial Sequence: Synthetic oligonucleotide
  Antisense strand to SEQ ID NO: 1755851
uuugaaacggacgacgugu

SEQ ID NO: 1755853 - RNA, 19 nt, Artificial Sequence
  Description of Artificial Sequence: Synthetic oligonucleotide
  Sense strand starting at position 1018 of SEQ ID NO: 1562556
caaauaaccugggaaagga

SEQ ID NO: 1755854 - RNA, 19 nt, Artificial Sequence
  Description of Artificial Sequence: Synthetic oligonucleotide
  Antisense strand to SEQ ID NO: 1755853
uccuuucccagguuauuug

SEQ ID NO: 1755855 - RNA, 19 nt, Artificial Sequence
  Description of Artificial Sequence: Synthetic oligonucleotide
  Sense strand starting at position 1060 of SEQ ID NO: 1562556
acuacuaauugcuccgaga

SEQ ID NO: 1755856 - RNA, 19 nt, Artificial Sequence
  Description of Artificial Sequence: Synthetic oligonucleotide
  Antisense strand to SEQ ID NO: 1755855
ucucggagcaauuaguagu

SEQ ID NO: 1755857 - RNA, 19 nt, Artificial Sequence
  Description of Artificial Sequence: Synthetic oligonucleotide
  Sense strand starting at position 1082 of SEQ ID NO: 1562556
cugaguuaggacuguucca

SEQ ID NO: 1755858 - RNA, 19 nt, Artificial Sequence
  Description of Artificial Sequence: Synthetic oligonucleotide
  Antisense strand to SEQ ID NO: 1755857
uggaacaguccuaacucag

SEQ ID NO: 1755859 - RNA, 19 nt, Artificial Sequence
  Description of Artificial Sequence: Synthetic oligonucleotide
  Sense strand starting at position 1255 of SEQ ID NO: 1562556
uggguaagugucggagaug

SEQ ID NO: 1755860 - RNA, 19 nt, Artificial Sequence
  Description of Artificial Sequence: Synthetic oligonucleotide
  Antisense strand to SEQ ID NO: 1755859
caucuccgacacuuaccca

SEQ ID NO: 1755861 - RNA, 19 nt, Artificial Sequence
  Description of Artificial Sequence: Synthetic oligonucleotide
  Sense strand starting at position 1258 of SEQ ID NO: 1562556
guaagugucggagaugacu

SEQ ID NO: 1755862 - RNA, 19 nt, Artificial Sequence
  Description of Artificial Sequence: Synthetic oligonucleotide
  Antisense strand to SEQ ID NO: 1755861
agucaucuccgacacuuac

SEQ ID NO: 1755863 - RNA, 19 nt, Artificial Sequence
  Description of Artificial Sequence: Synthetic oligonucleotide
  Sense strand starting at position 1280 of SEQ ID NO: 1562556
agcccuaaggagcaauuaa

SEQ ID NO: 1755864 - RNA, 19 nt, Artificial Sequence
  Description of Artificial Sequence: Synthetic oligonucleotide
  Antisense strand to SEQ ID NO: 1755863
uuaauugcuccuuagggcu

SEQ ID NO: 1755865 - RNA, 19 nt, Artificial Sequence
  Description of Artificial Sequence: Synthetic oligonucleotide
  Sense strand starting at position 1292 of SEQ ID NO: 1562556
caauuaaggccaggugagu

SEQ ID NO: 1755866 - RNA, 19 nt, Artificial Sequence
  Description of Artificial Sequence: Synthetic oligonucleotide
  Antisense strand to SEQ ID NO: 1755865
acucaccuggccuuaauug

SEQ ID NO: 1755867 - RNA, 19 nt, Artificial Sequence
  Description of Artificial Sequence: Synthetic oligonucleotide
  Sense strand starting at position 1790 of SEQ ID NO: 1562556
uggucucccuguuccaaga

SEQ ID NO: 1755868 - RNA, 19 nt, Artificial Sequence
  Description of Artificial Sequence: Synthetic oligonucleotide
  Antisense strand to SEQ ID NO: 1755867
ucuuggaacagggagacca

SEQ ID NO: 1755869 - RNA, 19 nt, Artificial Sequence
  Description of Artificial Sequence: Synthetic oligonucleotide
  Sense strand starting at position 2106 of SEQ ID NO: 1562556
cgguguuucggguuuggca

SEQ ID NO: 1755870 - RNA, 19 nt, Artificial Sequence
  Description of Artificial Sequence: Synthetic oligonucleotide
  Antisense strand to SEQ ID NO: 1755869
ugccaaacccgaaacaccg

SEQ ID NO: 1755871 - RNA, 19 nt, Artificial Sequence
  Description of Artificial Sequence: Synthetic oligonucleotide
  Sense strand starting at position 2248 of SEQ ID NO: 1562556
agacguaggaccugaugau

SEQ ID NO: 1755872 - RNA, 19 nt, Artificial Sequence
  Description of Artificial Sequence: Synthetic oligonucleotide
  Antisense strand to SEQ ID NO: 1755871
aucaucagguccuacgucu

SEQ ID NO: 1755873 - RNA, 19 nt, Artificial Sequence
  Description of Artificial Sequence: Synthetic oligonucleotide
  Sense strand starting at position 2269 of SEQ ID NO: 1562556
cuacuagaugccugguaaa

SEQ ID NO: 1755874 - RNA, 19 nt, Artificial Sequence
  Description of Artificial Sequence: Synthetic oligonucleotide
  Antisense strand to SEQ ID NO: 1755873
uuuaccaggcaucuaguag

SEQ ID NO: 1755875 - RNA, 19 nt, Artificial Sequence
  Description of Artificial Sequence: Synthetic oligonucleotide
  Sense strand starting at position 2565 of SEQ ID NO: 1562556
ccaagauguggucaugggu

SEQ ID NO: 1755876 - RNA, 19 nt, Artificial Sequence
  Description of Artificial Sequence: Synthetic oligonucleotide
  Antisense strand to SEQ ID NO: 1755875
acccaugaccacaucuugg

SEQ ID NO: 1755877 - RNA, 19 nt, Artificial Sequence
  Description of Artificial Sequence: Synthetic oligonucleotide
  Sense strand starting at position 2699 of SEQ ID NO: 1562556
cccaaacuaugguuaguuu

SEQ ID NO: 1755878 - RNA, 19 nt, Artificial Sequence
  Description of Artificial Sequence: Synthetic oligonucleotide
  Antisense strand to SEQ ID NO: 1755877
aaacuaaccauaguuuggg

SEQ ID NO: 1755879 - RNA, 19 nt, Artificial Sequence
  Description of Artificial Sequence: Synthetic oligonucleotide
  Sense strand starting at position 2953 of SEQ ID NO: 1562556
aguaaucacugguccaaag

SEQ ID NO: 1755880 - RNA, 19 nt, Artificial Sequence
  Description of Artificial Sequence: Synthetic oligonucleotide
  Antisense strand to SEQ ID NO: 1755879
cuuuggaccagugauuacu

SEQ ID NO: 1755881 - RNA, 19 nt, Artificial Sequence
  Description of Artificial Sequence: Synthetic oligonucleotide
  Sense strand starting at position 3130 of SEQ ID NO: 1562556
cuuggccauguugaagaau

SEQ ID NO: 1755882 - RNA, 19 nt, Artificial Sequence
  Description of Artificial Sequence: Synthetic oligonucleotide
  Antisense strand to SEQ ID NO: 1755881
auucuucaacauggccaag

SEQ ID NO: 1755883 - RNA, 19 nt, Artificial Sequence
  Description of Artificial Sequence: Synthetic oligonucleotide
  Sense strand starting at position 3141 of SEQ ID NO: 1562556
ugaagaaugugcccuuuga

SEQ ID NO: 1755884 - RNA, 19 nt, Artificial Sequence
  Description of Artificial Sequence: Synthetic oligonucleotide
  Antisense strand to SEQ ID NO: 1755883
ucaaagggcacauucuuca

SEQ ID NO: 1755885 - RNA, 19 nt, Artificial Sequence
  Description of Artificial Sequence: Synthetic oligonucleotide
  Sense strand starting at position 3145 of SEQ ID NO: 1562556
gaaugugcccuuugagaaa

SEQ ID NO: 1755886 - RNA, 19 nt, Artificial Sequence
  Description of Artificial Sequence: Synthetic oligonucleotide
  Antisense strand to SEQ ID NO: 1755885
uuucucaaagggcacauuc

SEQ ID NO: 1755887 - RNA, 19 nt, Artificial Sequence
  Description of Artificial Sequence: Synthetic oligonucleotide
  Sense strand starting at position 3222 of SEQ ID NO: 1562556
cuaaacuguucuguccaca

SEQ ID NO: 1755888 - RNA, 19 nt, Artificial Sequence
  Description of Artificial Sequence: Synthetic oligonucleotide
  Antisense strand to SEQ ID NO: 1755887
uguggacagaacaguuuag

SEQ ID NO: 1755889 - RNA, 19 nt, Artificial Sequence
  Description of Artificial Sequence: Synthetic oligonucleotide
  Sense strand starting at position 3643 of SEQ ID NO: 1562556
uugagaucaccuugacuuc

SEQ ID NO: 1755890 - RNA, 19 nt, Artificial Sequence
  Description of Artificial Sequence: Synthetic oligonucleotide
  Antisense strand to SEQ ID NO: 1755889
gaagucaaggugaucucaa

SEQ ID NO: 1755891 - RNA, 19 nt, Artificial Sequence
  Description of Artificial Sequence: Synthetic oligonucleotide
  Sense strand starting at position 3706 of SEQ ID NO: 1562556
ugaucuuuggcccagguua

SEQ ID NO: 1755892 - RNA, 19 nt, Artificial Sequence
  Description of Artificial Sequence: Synthetic oligonucleotide
  Antisense strand to SEQ ID NO: 1755891
uaaccugggccaaagauca

SEQ ID NO: 1755893 - RNA, 19 nt, Artificial Sequence
  Description of Artificial Sequence: Synthetic oligonucleotide
  Sense strand starting at position 3747 of SEQ ID NO: 1562556
accaacuauugggucuaau

SEQ ID NO: 1755894 - RNA, 19 nt, Artificial Sequence
  Description of Artificial Sequence: Synthetic oligonucleotide
  Antisense strand to SEQ ID NO: 1755893
auuagacccaauaguuggu

SEQ ID NO: 1755895 - RNA, 19 nt, Artificial Sequence
  Description of Artificial Sequence: Synthetic oligonucleotide
  Sense strand starting at position 3786 of SEQ ID NO: 1562556
cccaaagugugcucuaaau

SEQ ID NO: 1755896 - RNA, 19 nt, Artificial Sequence
  Description of Artificial Sequence: Synthetic oligonucleotide
  Antisense strand to SEQ ID NO: 1755895
auuuagagcacacuuuggg

SEQ ID NO: 1755897 - RNA, 19 nt, Artificial Sequence
  Description of Artificial Sequence: Synthetic oligonucleotide
  Sense strand starting at position 3850 of SEQ ID NO: 1562556
uucuauaagugucucaaca

SEQ ID NO: 1755898 - RNA, 19 nt, Artificial Sequence
  Description of Artificial Sequence: Synthetic oligonucleotide
  Antisense strand to SEQ ID NO: 1755897
uguugagacacuuauagaa

SEQ ID NO: 1755899 - RNA, 19 nt, Artificial Sequence
  Description of Artificial Sequence: Synthetic oligonucleotide
  Sense strand starting at position 23 of SEQ ID NO: 1562557
cuuaaucucuuauuggagu

SEQ ID NO: 1755900 - RNA, 19 nt, Artificial Sequence
  Description of Artificial Sequence: Synthetic oligonucleotide
  Antisense strand to SEQ ID NO: 1755899
acuccaauaagagauuaag

SEQ ID NO: 1755901 - RNA, 19 nt, Artificial Sequence
  Description of Artificial Sequence: Synthetic oligonucleotide
  Sense strand starting at position 29 of SEQ ID NO: 1562557
cucuuauuggaguacguca

SEQ ID NO: 1755902 - RNA, 19 nt, Artificial Sequence
  Description of Artificial Sequence: Synthetic oligonucleotide
  Antisense strand to SEQ ID NO: 1755901
ugacguacuccaauaagag

SEQ ID NO: 1755903 - RNA, 19 nt, Artificial Sequence
  Description of Artificial Sequence: Synthetic oligonucleotide
  Sense strand starting at position 31 of SEQ ID NO: 1562557
cuuauuggaguacgucaua

SEQ ID NO: 1755904 - RNA, 19 nt, Artificial Sequence
  Description of Artificial Sequence: Synthetic oligonucleotide
  Antisense strand to SEQ ID NO: 1755903
uaugacguacuccaauaag

SEQ ID NO: 1755905 - RNA, 19 nt, Artificial Sequence
  Description of Artificial Sequence: Synthetic oligonucleotide
  Sense strand starting at position 50 of SEQ ID NO: 1562557
cugcauaguucugugggaa

SEQ ID NO: 1755906 - RNA, 19 nt, Artificial Sequence
  Description of Artificial Sequence: Synthetic oligonucleotide
  Antisense strand to SEQ ID NO: 1755905
uucccacagaacuaugcag

SEQ ID NO: 1755907 - RNA, 19 nt, Artificial Sequence
  Description of Artificial Sequence: Synthetic oligonucleotide
  Sense strand starting at position 142 of SEQ ID NO: 1562557
aaaucuaugcgacaugguu

SEQ ID NO: 1755908 - RNA, 19 nt, Artificial Sequence
  Description of Artificial Sequence: Synthetic oligonucleotide
  Antisense strand to SEQ ID NO: 1755907
aaccaugucgcauagauuu

SEQ ID NO: 1755909 - RNA, 19 nt, Artificial Sequence
  Description of Artificial Sequence: Synthetic oligonucleotide
  Sense strand starting at position 148 of SEQ ID NO: 1562557
augcgacaugguuauaaga

SEQ ID NO: 1755910 - RNA, 19 nt, Artificial Sequence
  Description of Artificial Sequence: Synthetic oligonucleotide
  Antisense strand to SEQ ID NO: 1755909
ucuuauaaccaugucgcau

SEQ ID NO: 1755911 - RNA, 19 nt, Artificial Sequence
  Description of Artificial Sequence: Synthetic oligonucleotide
  Sense strand starting at position 566 of SEQ ID NO: 1562557
accugaaaguguucccaug

SEQ ID NO: 1755912 - RNA, 19 nt, Artificial Sequence
  Description of Artificial Sequence: Synthetic oligonucleotide
  Antisense strand to SEQ ID NO: 1755911
caugggaacacuuucaggu

SEQ ID NO: 1755913 - RNA, 19 nt, Artificial Sequence
  Description of Artificial Sequence: Synthetic oligonucleotide
  Sense strand starting at position 568 of SEQ ID NO: 1562557
cugaaaguguucccaugac

SEQ ID NO: 1755914 - RNA, 19 nt, Artificial Sequence
  Description of Artificial Sequence: Synthetic oligonucleotide
  Antisense strand to SEQ ID NO: 1755913
gucaugggaacacuuucag

SEQ ID NO: 1755915 - RNA, 19 nt, Artificial Sequence
  Description of Artificial Sequence: Synthetic oligonucleotide
  Sense strand starting at position 629 of SEQ ID NO: 1562557
gaaccuaaacuucgguuua

SEQ ID NO: 1755916 - RNA, 19 nt, Artificial Sequence
  Description of Artificial Sequence: Synthetic oligonucleotide
  Antisense strand to SEQ ID NO: 1755915
uaaaccgaaguuuagguuc

SEQ ID NO: 1755917 - RNA, 19 nt, Artificial Sequence
  Description of Artificial Sequence: Synthetic oligonucleotide
  Sense strand starting at position 631 of SEQ ID NO: 1562557
accuaaacuucgguuuauc

SEQ ID NO: 1755918 - RNA, 19 nt, Artificial Sequence
  Description of Artificial Sequence: Synthetic oligonucleotide
  Antisense strand to SEQ ID NO: 1755917
gauaaaccgaaguuuaggu

SEQ ID NO: 1755919 - RNA, 19 nt, Artificial Sequence
  Description of Artificial Sequence: Synthetic oligonucleotide
  Sense strand starting at position 830 of SEQ ID NO: 1562557
cucacucuggcagauauua

SEQ ID NO: 1755920 - RNA, 19 nt, Artificial Sequence
  Description of Artificial Sequence: Synthetic oligonucleotide
  Antisense strand to SEQ ID NO: 1755919
uaauaucugccagagugag

SEQ ID NO: 1755921 - RNA, 19 nt, Artificial Sequence
  Description of Artificial Sequence: Synthetic oligonucleotide
  Sense strand starting at position 840 of SEQ ID NO: 1562557
cagauauuagaccgugagu

SEQ ID NO: 1755922 - RNA, 19 nt, Artificial Sequence
  Description of Artificial Sequence: Synthetic oligonucleotide
  Antisense strand to SEQ ID NO: 1755921
acucacggucuaauaucug

SEQ ID NO: 1755923 - RNA, 19 nt, Artificial Sequence
  Description of Artificial Sequence: Synthetic oligonucleotide
  Sense strand starting at position 842 of SEQ ID NO: 1562557
gauauuagaccgugagucu

SEQ ID NO: 1755924 - RNA, 19 nt, Artificial Sequence
  Description of Artificial Sequence: Synthetic oligonucleotide
  Antisense strand to SEQ ID NO: 1755923
agacucacggucuaauauc

SEQ ID NO: 1755925 - RNA, 19 nt, Artificial Sequence
  Description of Artificial Sequence: Synthetic oligonucleotide
  Sense strand starting at position 879 of SEQ ID NO: 1562557
ggauaugugacggguuucu

SEQ ID NO: 1755926 - RNA, 19 nt, Artificial Sequence
  Description of Artificial Sequence: Synthetic oligonucleotide
  Antisense strand to SEQ ID NO: 1755925
agaaacccgucacauaucc

SEQ ID NO: 1755927 - RNA, 19 nt, Artificial Sequence
  Description of Artificial Sequence: Synthetic oligonucleotide
  Sense strand starting at position 888 of SEQ ID NO: 1562557
acggguuucugaguacaau

SEQ ID NO: 1755928 - RNA, 19 nt, Artificial Sequence
  Description of Artificial Sequence: Synthetic oligonucleotide
  Antisense strand to SEQ ID NO: 1755927
auuguacucagaaacccgu

SEQ ID NO: 1755929 - RNA, 19 nt, Artificial Sequence
  Description of Artificial Sequence: Synthetic oligonucleotide
  Sense strand starting at position 889 of SEQ ID NO: 1562557
cggguuucugaguacaauu

SEQ ID NO: 1755930 - RNA, 19 nt, Artificial Sequence
  Description of Artificial Sequence: Synthetic oligonucleotide
  Antisense strand to SEQ ID NO: 1755929
aauuguacucagaaacccg

SEQ ID NO: 1755931 - RNA, 19 nt, Artificial Sequence
  Description of Artificial Sequence: Synthetic oligonucleotide
  Sense strand starting at position 983 of SEQ ID NO: 1562557
acacgucguccguuucaaa

SEQ ID NO: 1755932 - RNA, 19 nt, Artificial Sequence
  Description of Artificial Sequence: Synthetic oligonucleotide
  Antisense strand to SEQ ID NO: 1755931
uuugaaacggacgacgugu

SEQ ID NO: 1755933 - RNA, 19 nt, Artificial Sequence
  Description of Artificial Sequence: Synthetic oligonucleotide
  Sense strand starting at position 1012 of SEQ ID NO: 1562557
caaauaaccugggaaagga

SEQ ID NO: 1755934 - RNA, 19 nt, Artificial Sequence
  Description of Artificial Sequence: Synthetic oligonucleotide
  Antisense strand to SEQ ID NO: 1755933
uccuuucccagguuauuug

SEQ ID NO: 1755935 - RNA, 19 nt, Artificial Sequence
  Description of Artificial Sequence: Synthetic oligonucleotide
  Sense strand starting at position 1054 of SEQ ID NO: 1562557
acuacuaauugcuccgaga

SEQ ID NO: 1755936 - RNA, 19 nt, Artificial Sequence
  Description of Artificial Sequence: Synthetic oligonucleotide
  Antisense strand to SEQ ID NO: 1755935
ucucggagcaauuaguagu

SEQ ID NO: 1755937 - RNA, 19 nt, Artificial Sequence
  Description of Artificial Sequence: Synthetic oligonucleotide
  Sense strand starting at position 1076 of SEQ ID NO: 1562557
cugaguuaggacuguucca

SEQ ID NO: 1755938 - RNA, 19 nt, Artificial Sequence
  Description of Artificial Sequence: Synthetic oligonucleotide
  Antisense strand to SEQ ID NO: 1755937
uggaacaguccuaacucag

SEQ ID NO: 1755939 - RNA, 19 nt, Artificial Sequence
  Description of Artificial Sequence: Synthetic oligonucleotide
  Sense strand starting at position 1249 of SEQ ID NO: 1562557
uggguaagugucggagaug

SEQ ID NO: 1755940 - RNA, 19 nt, Artificial Sequence
  Description of Artificial Sequence: Synthetic oligonucleotide
  Antisense strand to SEQ ID NO: 1755939
caucuccgacacuuaccca

SEQ ID NO: 1755941 - RNA, 19 nt, Artificial Sequence
  Description of Artificial Sequence: Synthetic oligonucleotide
  Sense strand starting at position 1252 of SEQ ID NO: 1562557
guaagugucggagaugacu

SEQ ID NO: 1755942 - RNA, 19 nt, Artificial Sequence
  Description of Artificial Sequence: Synthetic oligonucleotide
  Antisense strand to SEQ ID NO: 1755941
agucaucuccgacacuuac

SEQ ID NO: 1755943 - RNA, 19 nt, Artificial Sequence
  Description of Artificial Sequence: Synthetic oligonucleotide
  Sense strand starting at position 1274 of SEQ ID NO: 1562557
agcccuaaggagcaauuaa

SEQ ID NO: 1755944 - RNA, 19 nt, Artificial Sequence
  Description of Artificial Sequence: Synthetic oligonucleotide
  Antisense strand to SEQ ID NO: 1755943
uuaauugcuccuuagggcu

SEQ ID NO: 1755945 - RNA, 19 nt, Artificial Sequence
  Description of Artificial Sequence: Synthetic oligonucleotide
  Sense strand starting at position 1286 of SEQ ID NO: 1562557
caauuaaggccaggugagu

SEQ ID NO: 1755946 - RNA, 19 nt, Artificial Sequence
  Description of Artificial Sequence: Synthetic oligonucleotide
  Antisense strand to SEQ ID NO: 1755945
acucaccuggccuuaauug

SEQ ID NO: 1755947 - RNA, 19 nt, Artificial Sequence
  Description of Artificial Sequence: Synthetic oligonucleotide
  Sense strand starting at position 1784 of SEQ ID NO: 1562557
uggucucccuguuccaaga

SEQ ID NO: 1755948 - RNA, 19 nt, Artificial Sequence
  Description of Artificial Sequence: Synthetic oligonucleotide
  Antisense strand to SEQ ID NO: 1755947
ucuuggaacagggagacca

SEQ ID NO: 1755949 - RNA, 19 nt, Artificial Sequence
  Description of Artificial Sequence: Synthetic oligonucleotide
  Sense strand starting at position 2100 of SEQ ID NO: 1562557
cgguguuucggguuuggca

SEQ ID NO: 1755950 - RNA, 19 nt, Artificial Sequence
  Description of Artificial Sequence: Synthetic oligonucleotide
  Antisense strand to SEQ ID NO: 1755949
ugccaaacccgaaacaccg

SEQ ID NO: 1755951 - RNA, 19 nt, Artificial Sequence
  Description of Artificial Sequence: Synthetic oligonucleotide
  Sense strand starting at position 2242 of SEQ ID NO: 1562557
agacguaggaccugaugau

SEQ ID NO: 1755952 - RNA, 19 nt, Artificial Sequence
  Description of Artificial Sequence: Synthetic oligonucleotide
  Antisense strand to SEQ ID NO: 1755951
aucaucagguccuacgucu

SEQ ID NO: 1755953 - RNA, 19 nt, Artificial Sequence
  Description of Artificial Sequence: Synthetic oligonucleotide
  Sense strand starting at position 2263 of SEQ ID NO: 1562557
cuacuagaugccugguaaa

SEQ ID NO: 1755954 - RNA, 19 nt, Artificial Sequence
  Description of Artificial Sequence: Synthetic oligonucleotide
  Antisense strand to SEQ ID NO: 1755953
uuuaccaggcaucuaguag

SEQ ID NO: 1755955 - RNA, 19 nt, Artificial Sequence
  Description of Artificial Sequence: Synthetic oligonucleotide
  Sense strand starting at position 2559 of SEQ ID NO: 1562557
ccaagauguggucaugggu

SEQ ID NO: 1755956 - RNA, 19 nt, Artificial Sequence
  Description of Artificial Sequence: Synthetic oligonucleotide
  Antisense strand to SEQ ID NO: 1755955
acccaugaccacaucuugg

SEQ ID NO: 1755957 - RNA, 19 nt, Artificial Sequence
  Description of Artificial Sequence: Synthetic oligonucleotide
  Sense strand starting at position 2693 of SEQ ID NO: 1562557
cccaaacuaugguuaguuu

SEQ ID NO: 1755958 - RNA, 19 nt, Artificial Sequence
  Description of Artificial Sequence: Synthetic oligonucleotide
  Antisense strand to SEQ ID NO: 1755957
aaacuaaccauaguuuggg

SEQ ID NO: 1755959 - RNA, 19 nt, Artificial Sequence
  Description of Artificial Sequence: Synthetic oligonucleotide
  Sense strand starting at position 2947 of SEQ ID NO: 1562557
aguaaucacugguccaaag

SEQ ID NO: 1755960 - RNA, 19 nt, Artificial Sequence
  Description of Artificial Sequence: Synthetic oligonucleotide
  Antisense strand to SEQ ID NO: 1755959
cuuuggaccagugauuacu

SEQ ID NO: 1755961 - RNA, 19 nt, Artificial Sequence
  Description of Artificial Sequence: Synthetic oligonucleotide
  Sense strand starting at position 3124 of SEQ ID NO: 1562557
cuuggccauguugaagaau

SEQ ID NO: 1755962 - RNA, 19 nt, Artificial Sequence
  Description of Artificial Sequence: Synthetic oligonucleotide
  Antisense strand to SEQ ID NO: 1755961
auucuucaacauggccaag

SEQ ID NO: 1755963 - RNA, 19 nt, Artificial Sequence
  Description of Artificial Sequence: Synthetic oligonucleotide
  Sense strand starting at position 3135 of SEQ ID NO: 1562557
ugaagaaugugcccuuuga

SEQ ID NO: 1755964 - RNA, 19 nt, Artificial Sequence
  Description of Artificial Sequence: Synthetic oligonucleotide
  Antisense strand to SEQ ID NO: 1755963
ucaaagggcacauucuuca

SEQ ID NO: 1755965 - RNA, 19 nt, Artificial Sequence
  Description of Artificial Sequence: Synthetic oligonucleotide
  Sense strand starting at position 3139 of SEQ ID NO: 1562557
gaaugugcccuuugagaaa

SEQ ID NO: 1755966 - RNA, 19 nt, Artificial Sequence
  Description of Artificial Sequence: Synthetic oligonucleotide
  Antisense strand to SEQ ID NO: 1755965
uuucucaaagggcacauuc

SEQ ID NO: 1755967 - RNA, 19 nt, Artificial Sequence
  Description of Artificial Sequence: Synthetic oligonucleotide
  Sense strand starting at position 3216 of SEQ ID NO: 1562557
cuaaacuguucuguccaca

SEQ ID NO: 1755968 - RNA, 19 nt, Artificial Sequence
  Description of Artificial Sequence: Synthetic oligonucleotide
  Antisense strand to SEQ ID NO: 1755967
uguggacagaacaguuuag

SEQ ID NO: 1755969 - RNA, 19 nt, Artificial Sequence
  Description of Artificial Sequence: Synthetic oligonucleotide
  Sense strand starting at position 3637 of SEQ ID NO: 1562557
uugagaucaccuugacuuc

SEQ ID NO: 1755970 - RNA, 19 nt, Artificial Sequence
  Description of Artificial Sequence: Synthetic oligonucleotide
  Antisense strand to SEQ ID NO: 1755969
gaagucaaggugaucucaa

SEQ ID NO: 1755971 - RNA, 19 nt, Artificial Sequence
  Description of Artificial Sequence: Synthetic oligonucleotide
  Sense strand starting at position 3700 of SEQ ID NO: 1562557
ugaucuuuggcccagguua

SEQ ID NO: 1755972 - RNA, 19 nt, Artificial Sequence
  Description of Artificial Sequence: Synthetic oligonucleotide
  Antisense strand to SEQ ID NO: 1755971
uaaccugggccaaagauca

SEQ ID NO: 1755973 - RNA, 19 nt, Artificial Sequence
  Description of Artificial Sequence: Synthetic oligonucleotide
  Sense strand starting at position 3741 of SEQ ID NO: 1562557
accaacuauugggucuaau

SEQ ID NO: 1755974 - RNA, 19 nt, Artificial Sequence
  Description of Artificial Sequence: Synthetic oligonucleotide
  Antisense strand to SEQ ID NO: 1755973
auuagacccaauaguuggu

SEQ ID NO: 1755975 - RNA, 19 nt, Artificial Sequence
  Description of Artificial Sequence: Synthetic oligonucleotide
  Sense strand starting at position 3780 of SEQ ID NO: 1562557
cccaaagugugcucuaaau

SEQ ID NO: 1755976 - RNA, 19 nt, Artificial Sequence
  Description of Artificial Sequence: Synthetic oligonucleotide
  Antisense strand to SEQ ID NO: 1755975
auuuagagcacacuuuggg

SEQ ID NO: 1755977 - RNA, 19 nt, Artificial Sequence
  Description of Artificial Sequence: Synthetic oligonucleotide
  Sense strand starting at position 3844 of SEQ ID NO: 1562557
uucuauaagugucucaaca

SEQ ID NO: 1755978 - RNA, 19 nt, Artificial Sequence
  Description of Artificial Sequence: Synthetic oligonucleotide
  Antisense strand to SEQ ID NO: 1755977
uguugagacacuuauagaa

SEQ ID NO: 1755979 - RNA, 19 nt, Artificial Sequence
  Description of Artificial Sequence: Synthetic oligonucleotide
  Sense strand starting at position 337 of SEQ ID NO: 1562558
cuuaaucucuuauuggagu

SEQ ID NO: 1755980 - RNA, 19 nt, Artificial Sequence
  Description of Artificial Sequence: Synthetic oligonucleotide
  Antisense strand to SEQ ID NO: 1755979
acuccaauaagagauuaag

SEQ ID NO: 1755981 - RNA, 19 nt, Artificial Sequence
  Description of Artificial Sequence: Synthetic oligonucleotide
  Sense strand starting at position 343 of SEQ ID NO: 1562558
cucuuauuggaguacguca

SEQ ID NO: 1755982 - RNA, 19 nt, Artificial Sequence
  Description of Artificial Sequence: Synthetic oligonucleotide
  Antisense strand to SEQ ID NO: 1755981
ugacguacuccaauaagag

SEQ ID NO: 1755983 - RNA, 19 nt, Artificial Sequence
  Description of Artificial Sequence: Synthetic oligonucleotide
  Sense strand starting at position 345 of SEQ ID NO: 1562558
cuuauuggaguacgucaua

SEQ ID NO: 1755984 - RNA, 19 nt, Artificial Sequence
  Description of Artificial Sequence: Synthetic oligonucleotide
  Antisense strand to SEQ ID NO: 1755983
uaugacguacuccaauaag

SEQ ID NO: 1755985 - RNA, 19 nt, Artificial Sequence
  Description of Artificial Sequence: Synthetic oligonucleotide
  Sense strand starting at position 364 of SEQ ID NO: 1562558
cugcauaguucugugggaa

SEQ ID NO: 1755986 - RNA, 19 nt, Artificial Sequence
  Description of Artificial Sequence: Synthetic oligonucleotide
  Antisense strand to SEQ ID NO: 1755985
uucccacagaacuaugcag

SEQ ID NO: 1755987 - RNA, 19 nt, Artificial Sequence
  Description of Artificial Sequence: Synthetic oligonucleotide
  Sense strand starting at position 456 of SEQ ID NO: 1562558
aaaucuaugcgacaugguu

SEQ ID NO: 1755988 - RNA, 19 nt, Artificial Sequence
  Description of Artificial Sequence: Synthetic oligonucleotide
  Antisense strand to SEQ ID NO: 1755987
aaccaugucgcauagauuu

SEQ ID NO: 1755989 - RNA, 19 nt, Artificial Sequence
  Description of Artificial Sequence: Synthetic oligonucleotide
  Sense strand starting at position 458 of SEQ ID NO: 1562558
aucuaugcgacaugguuau

SEQ ID NO: 1755990 - RNA, 19 nt, Artificial Sequence
  Description of Artificial Sequence: Synthetic oligonucleotide
  Antisense strand to SEQ ID NO: 1755989
auaaccaugucgcauagau

SEQ ID NO: 1755991 - RNA, 19 nt, Artificial Sequence
  Description of Artificial Sequence: Synthetic oligonucleotide
  Sense strand starting at position 462 of SEQ ID NO: 1562558
augcgacaugguuauaaga

SEQ ID NO: 1755992 - RNA, 19 nt, Artificial Sequence
  Description of Artificial Sequence: Synthetic oligonucleotide
  Antisense strand to SEQ ID NO: 1755991
ucuuauaaccaugucgcau

SEQ ID NO: 1755993 - RNA, 19 nt, Artificial Sequence
  Description of Artificial Sequence: Synthetic oligonucleotide
  Sense strand starting at position 880 of SEQ ID NO: 1562558
accugaaaguguucccaug

SEQ ID NO: 1755994 - RNA, 19 nt, Artificial Sequence
  Description of Artificial Sequence: Synthetic oligonucleotide
  Antisense strand to SEQ ID NO: 1755993
caugggaacacuuucaggu

SEQ ID NO: 1755995 - RNA, 19 nt, Artificial Sequence
  Description of Artificial Sequence: Synthetic oligonucleotide
  Sense strand starting at position 882 of SEQ ID NO: 1562558
cugaaaguguucccaugac

SEQ ID NO: 1755996 - RNA, 19 nt, Artificial Sequence
  Description of Artificial Sequence: Synthetic oligonucleotide
  Antisense strand to SEQ ID NO: 1755995
gucaugggaacacuuucag

SEQ ID NO: 1755997 - RNA, 19 nt, Artificial Sequence
  Description of Artificial Sequence: Synthetic oligonucleotide
  Sense strand starting at position 943 of SEQ ID NO: 1562558
gaaccuaaacuucgguuua

SEQ ID NO: 1755998 - RNA, 19 nt, Artificial Sequence
  Description of Artificial Sequence: Synthetic oligonucleotide
  Antisense strand to SEQ ID NO: 1755997
uaaaccgaaguuuagguuc

SEQ ID NO: 1755999 - RNA, 19 nt, Artificial Sequence
  Description of Artificial Sequence: Synthetic oligonucleotide
  Sense strand starting at position 945 of SEQ ID NO: 1562558
accuaaacuucgguuuauc

SEQ ID NO: 1756000 - RNA, 19 nt, Artificial Sequence
  Description of Artificial Sequence: Synthetic oligonucleotide
  Antisense strand to SEQ ID NO: 1755999
gauaaaccgaaguuuaggu

SEQ ID NO: 1756001 - RNA, 19 nt, Artificial Sequence
  Description of Artificial Sequence: Synthetic oligonucleotide
  Sense strand starting at position 1144 of SEQ ID NO: 1562558
cucacucuggcagauauua

SEQ ID NO: 1756002 - RNA, 19 nt, Artificial Sequence
  Description of Artificial Sequence: Synthetic oligonucleotide
  Antisense strand to SEQ ID NO: 1756001
uaauaucugccagagugag

SEQ ID NO: 1756003 - RNA, 19 nt, Artificial Sequence
  Description of Artificial Sequence: Synthetic oligonucleotide
  Sense strand starting at position 1154 of SEQ ID NO: 1562558
cagauauuagaccgugagu

SEQ ID NO: 1756004 - RNA, 19 nt, Artificial Sequence
  Description of Artificial Sequence: Synthetic oligonucleotide
  Antisense strand to SEQ ID NO: 1756003
acucacggucuaauaucug

SEQ ID NO: 1756005 - RNA, 19 nt, Artificial Sequence
  Description of Artificial Sequence: Synthetic oligonucleotide
  Sense strand starting at position 1156 of SEQ ID NO: 1562558
gauauuagaccgugagucu

SEQ ID NO: 1756006 - RNA, 19 nt, Artificial Sequence
  Description of Artificial Sequence: Synthetic oligonucleotide
  Antisense strand to SEQ ID NO: 1756005
agacucacggucuaauauc

SEQ ID NO: 1756007 - RNA, 19 nt, Artificial Sequence
  Description of Artificial Sequence: Synthetic oligonucleotide
  Sense strand starting at position 1193 of SEQ ID NO: 1562558
ggauaugugacggguuucu

SEQ ID NO: 1756008 - RNA, 19 nt, Artificial Sequence
  Description of Artificial Sequence: Synthetic oligonucleotide
  Antisense strand to SEQ ID NO: 1756007
agaaacccgucacauaucc

SEQ ID NO: 1756009 - RNA, 19 nt, Artificial Sequence
  Description of Artificial Sequence: Synthetic oligonucleotide
  Sense strand starting at position 1202 of SEQ ID NO: 1562558
acggguuucugaguacaau

SEQ ID NO: 1756010 - RNA, 19 nt, Artificial Sequence
  Description of Artificial Sequence: Synthetic oligonucleotide
  Antisense strand to SEQ ID NO: 1756009
auuguacucagaaacccgu

SEQ ID NO: 1756011 - RNA, 19 nt, Artificial Sequence
  Description of Artificial Sequence: Synthetic oligonucleotide
  Sense strand starting at position 1203 of SEQ ID NO: 1562558
cggguuucugaguacaauu

SEQ ID NO: 1756012 - RNA, 19 nt, Artificial Sequence
  Description of Artificial Sequence: Synthetic oligonucleotide
  Antisense strand to SEQ ID NO: 1756011
aauuguacucagaaacccg

SEQ ID NO: 1756013 - RNA, 19 nt, Artificial Sequence
  Description of Artificial Sequence: Synthetic oligonucleotide
  Sense strand starting at position 1297 of SEQ ID NO: 1562558
acacgucguccguuucaaa

SEQ ID NO: 1756014 - RNA, 19 nt, Artificial Sequence
  Description of Artificial Sequence: Synthetic oligonucleotide
  Antisense strand to SEQ ID NO: 1756013
uuugaaacggacgacgugu

SEQ ID NO: 1756015 - RNA, 19 nt, Artificial Sequence
  Description of Artificial Sequence: Synthetic oligonucleotide
  Sense strand starting at position 1326 of SEQ ID NO: 1562558
caaauaaccugggaaagga

SEQ ID NO: 1756016 - RNA, 19 nt, Artificial Sequence
  Description of Artificial Sequence: Synthetic oligonucleotide
  Antisense strand to SEQ ID NO: 1756015
uccuuucccagguuauuug

SEQ ID NO: 1756017 - RNA, 19 nt, Artificial Sequence
  Description of Artificial Sequence: Synthetic oligonucleotide
  Sense strand starting at position 1368 of SEQ ID NO: 1562558
acuacuaauugcuccgaga

SEQ ID NO: 1756018 - RNA, 19 nt, Artificial Sequence
  Description of Artificial Sequence: Synthetic oligonucleotide
  Antisense strand to SEQ ID NO: 1756017
ucucggagcaauuaguagu

SEQ ID NO: 1756019 - RNA, 19 nt, Artificial Sequence
  Description of Artificial Sequence: Synthetic oligonucleotide
  Sense strand starting at position 1370 of SEQ ID NO: 1562558
uacuaauugcuccgagagu

SEQ ID NO: 1756020 - RNA, 19 nt, Artificial Sequence
  Description of Artificial Sequence: Synthetic oligonucleotide
  Antisense strand to SEQ ID NO: 1756019
acucucggagcaauuagua

SEQ ID NO: 1756021 - RNA, 19 nt, Artificial Sequence
  Description of Artificial Sequence: Synthetic oligonucleotide
  Sense strand starting at position 1390 of SEQ ID NO: 1562558
cugaguuaggacuguucca

SEQ ID NO: 1756022 - RNA, 19 nt, Artificial Sequence
  Description of Artificial Sequence: Synthetic oligonucleotide
  Antisense strand to SEQ ID NO: 1756021
uggaacaguccuaacucag

SEQ ID NO: 1756023 - RNA, 19 nt, Artificial Sequence
  Description of Artificial Sequence: Synthetic oligonucleotide
  Sense strand starting at position 1563 of SEQ ID NO: 1562558
uggguaagugucggagaug

SEQ ID NO: 1756024 - RNA, 19 nt, Artificial Sequence
  Description of Artificial Sequence: Synthetic oligonucleotide
  Antisense strand to SEQ ID NO: 1756023
caucuccgacacuuaccca

SEQ ID NO: 1756025 - RNA, 19 nt, Artificial Sequence
  Description of Artificial Sequence: Synthetic oligonucleotide
  Sense strand starting at position 1566 of SEQ ID NO: 1562558
guaagugucggagaugacu

SEQ ID NO: 1756026 - RNA, 19 nt, Artificial Sequence
  Description of Artificial Sequence: Synthetic oligonucleotide
  Antisense strand to SEQ ID NO: 1756025
agucaucuccgacacuuac

SEQ ID NO: 1756027 - RNA, 19 nt, Artificial Sequence
  Description of Artificial Sequence: Synthetic oligonucleotide
  Sense strand starting at position 1588 of SEQ ID NO: 1562558
agcccuaaggagcaauuaa

SEQ ID NO: 1756028 - RNA, 19 nt, Artificial Sequence
  Description of Artificial Sequence: Synthetic oligonucleotide
  Antisense strand to SEQ ID NO: 1756027
uuaauugcuccuuagggcu

SEQ ID NO: 1756029 - RNA, 19 nt, Artificial Sequence
  Description of Artificial Sequence: Synthetic oligonucleotide
  Sense strand starting at position 1600 of SEQ ID NO: 1562558
caauuaaggccaggugagu

SEQ ID NO: 1756030 - RNA, 19 nt, Artificial Sequence
  Description of Artificial Sequence: Synthetic oligonucleotide
  Antisense strand to SEQ ID NO: 1756029
acucaccuggccuuaauug

SEQ ID NO: 1756031 - RNA, 19 nt, Artificial Sequence
  Description of Artificial Sequence: Synthetic oligonucleotide
  Sense strand starting at position 2098 of SEQ ID NO: 1562558
uggucucccuguuccaaga

SEQ ID NO: 1756032 - RNA, 19 nt, Artificial Sequence
  Description of Artificial Sequence: Synthetic oligonucleotide
  Antisense strand to SEQ ID NO: 1756031
ucuuggaacagggagacca

SEQ ID NO: 1756033 - RNA, 19 nt, Artificial Sequence
  Description of Artificial Sequence: Synthetic oligonucleotide
  Sense strand starting at position 2414 of SEQ ID NO: 1562558
cgguguuucggguuuggca

SEQ ID NO: 1756034 - RNA, 19 nt, Artificial Sequence
  Description of Artificial Sequence: Synthetic oligonucleotide
  Antisense strand to SEQ ID NO: 1756033
ugccaaacccgaaacaccg

SEQ ID NO: 1756035 - RNA, 19 nt, Artificial Sequence
  Description of Artificial Sequence: Synthetic oligonucleotide
  Sense strand starting at position 2556 of SEQ ID NO: 1562558
agacguaggaccugaugau

SEQ ID NO: 1756036 - RNA, 19 nt, Artificial Sequence
  Description of Artificial Sequence: Synthetic oligonucleotide
  Antisense strand to SEQ ID NO: 1756035
aucaucagguccuacgucu

SEQ ID NO: 1756037 - RNA, 19 nt, Artificial Sequence
  Description of Artificial Sequence: Synthetic oligonucleotide
  Sense strand starting at position 2576 of SEQ ID NO: 1562558
gcuacuagaugccugguaa

SEQ ID NO: 1756038 - RNA, 19 nt, Artificial Sequence
  Description of Artificial Sequence: Synthetic oligonucleotide
  Antisense strand to SEQ ID NO: 1756037
uuaccaggcaucuaguagc

SEQ ID NO: 1756039 - RNA, 19 nt, Artificial Sequence
  Description of Artificial Sequence: Synthetic oligonucleotide
  Sense strand starting at position 2577 of SEQ ID NO: 1562558
cuacuagaugccugguaaa

SEQ ID NO: 1756040 - RNA, 19 nt, Artificial Sequence
  Description of Artificial Sequence: Synthetic oligonucleotide
  Antisense strand to SEQ ID NO: 1756039
uuuaccaggcaucuaguag

SEQ ID NO: 1756041 - RNA, 19 nt, Artificial Sequence
  Description of Artificial Sequence: Synthetic oligonucleotide
  Sense strand starting at position 2873 of SEQ ID NO: 1562558
ccaagauguggucaugggu

SEQ ID NO: 1756042 - RNA, 19 nt, Artificial Sequence
  Description of Artificial Sequence: Synthetic oligonucleotide
  Antisense strand to SEQ ID NO: 1756041
acccaugaccacaucuugg

SEQ ID NO: 1756043 - RNA, 19 nt, Artificial Sequence
  Description of Artificial Sequence: Synthetic oligonucleotide
  Sense strand starting at position 2918 of SEQ ID NO: 1562558
ugaggucgcuagaaguaag

SEQ ID NO: 1756044 - RNA, 19 nt, Artificial Sequence
  Description of Artificial Sequence: Synthetic oligonucleotide
  Antisense strand to SEQ ID NO: 1756043
cuuacuucuagcgaccuca

SEQ ID NO: 1756045 - RNA, 19 nt, Artificial Sequence
  Description of Artificial Sequence: Synthetic oligonucleotide
  Sense strand starting at position 3007 of SEQ ID NO: 1562558
cccaaacuaugguuaguuu

SEQ ID NO: 1756046 - RNA, 19 nt, Artificial Sequence
  Description of Artificial Sequence: Synthetic oligonucleotide
  Antisense strand to SEQ ID NO: 1756045
aaacuaaccauaguuuggg

SEQ ID NO: 1756047 - RNA, 19 nt, Artificial Sequence
  Description of Artificial Sequence: Synthetic oligonucleotide
  Sense strand starting at position 3261 of SEQ ID NO: 1562558
aguaaucacugguccaaag

SEQ ID NO: 1756048 - RNA, 19 nt, Artificial Sequence
  Description of Artificial Sequence: Synthetic oligonucleotide
  Antisense strand to SEQ ID NO: 1756047
cuuuggaccagugauuacu

SEQ ID NO: 1756049 - RNA, 19 nt, Artificial Sequence
  Description of Artificial Sequence: Synthetic oligonucleotide
  Sense strand starting at position 3438 of SEQ ID NO: 1562558
cuuggccauguugaagaau

SEQ ID NO: 1756050 - RNA, 19 nt, Artificial Sequence
  Description of Artificial Sequence: Synthetic oligonucleotide
  Antisense strand to SEQ ID NO: 1756049
auucuucaacauggccaag

SEQ ID NO: 1756051 - RNA, 19 nt, Artificial Sequence
  Description of Artificial Sequence: Synthetic oligonucleotide
  Sense strand starting at position 3449 of SEQ ID NO: 1562558
ugaagaaugugcccuuuga

SEQ ID NO: 1756052 - RNA, 19 nt, Artificial Sequence
  Description of Artificial Sequence: Synthetic oligonucleotide
  Antisense strand to SEQ ID NO: 1756051
ucaaagggcacauucuuca

SEQ ID NO: 1756053 - RNA, 19 nt, Artificial Sequence
  Description of Artificial Sequence: Synthetic oligonucleotide
  Sense strand starting at position 3453 of SEQ ID NO: 1562558
gaaugugcccuuugagaaa

SEQ ID NO: 1756054 - RNA, 19 nt, Artificial Sequence
  Description of Artificial Sequence: Synthetic oligonucleotide
  Antisense strand to SEQ ID NO: 1756053
uuucucaaagggcacauuc

SEQ ID NO: 1756055 - RNA, 19 nt, Artificial Sequence
  Description of Artificial Sequence: Synthetic oligonucleotide
  Sense strand starting at position 3530 of SEQ ID NO: 1562558
cuaaacuguucuguccaca

SEQ ID NO: 1756056 - RNA, 19 nt, Artificial Sequence
  Description of Artificial Sequence: Synthetic oligonucleotide
  Antisense strand to SEQ ID NO: 1756055
uguggacagaacaguuuag

SEQ ID NO: 1756057 - RNA, 19 nt, Artificial Sequence
  Description of Artificial Sequence: Synthetic oligonucleotide
  Sense strand starting at position 3951 of SEQ ID NO: 1562558
uugagaucaccuugacuuc

SEQ ID NO: 1756058 - RNA, 19 nt, Artificial Sequence
  Description of Artificial Sequence: Synthetic oligonucleotide
  Antisense strand to SEQ ID NO: 1756057
gaagucaaggugaucucaa

SEQ ID NO: 1756059 - RNA, 19 nt, Artificial Sequence
  Description of Artificial Sequence: Synthetic oligonucleotide
  Sense strand starting at position 372 of SEQ ID NO: 1562559
gugggaggaucucuuguau

SEQ ID NO: 1756060 - RNA, 19 nt, Artificial Sequence
  Description of Artificial Sequence: Synthetic oligonucleotide
  Antisense strand to SEQ ID NO: 1756059
auacaagagauccucccac

SEQ ID NO: 1756061 - RNA, 19 nt, Artificial Sequence
  Description of Artificial Sequence: Synthetic oligonucleotide
  Sense strand starting at position 376 of SEQ ID NO: 1562559
gaggaucucuuguauacag

SEQ ID NO: 1756062 - RNA, 19 nt, Artificial Sequence
  Description of Artificial Sequence: Synthetic oligonucleotide
  Antisense strand to SEQ ID NO: 1756061
cuguauacaagagauccuc

SEQ ID NO: 1756063 - RNA, 19 nt, Artificial Sequence
  Description of Artificial Sequence: Synthetic oligonucleotide
  Sense strand starting at position 763 of SEQ ID NO: 1562559
ggagaucugugguuuccac

SEQ ID NO: 1756064 - RNA, 19 nt, Artificial Sequence
  Description of Artificial Sequence: Synthetic oligonucleotide
  Antisense strand to SEQ ID NO: 1756063
guggaaaccacagaucucc

SEQ ID NO: 1756065 - RNA, 19 nt, Artificial Sequence
  Description of Artificial Sequence: Synthetic oligonucleotide
  Sense strand starting at position 1233 of SEQ ID NO: 1562559
cgaaaucacuggccucuga

SEQ ID NO: 1756066 - RNA, 19 nt, Artificial Sequence
  Description of Artificial Sequence: Synthetic oligonucleotide
  Antisense strand to SEQ ID NO: 1756065
ucagaggccagugauuucg

SEQ ID NO: 1756067 - RNA, 19 nt, Artificial Sequence
  Description of Artificial Sequence: Synthetic oligonucleotide
  Sense strand starting at position 1259 of SEQ ID NO: 1562559
aaaugacagccaugaaagu

SEQ ID NO: 1756068 - RNA, 19 nt, Artificial Sequence
  Description of Artificial Sequence: Synthetic oligonucleotide
  Antisense strand to SEQ ID NO: 1756067
acuuucauggcugucauuu

SEQ ID NO: 1756069 - RNA, 19 nt, Artificial Sequence
  Description of Artificial Sequence: Synthetic oligonucleotide
  Sense strand starting at position 1321 of SEQ ID NO: 1562559
cgggaaaugcaaugcauga

SEQ ID NO: 1756070 - RNA, 19 nt, Artificial Sequence
  Description of Artificial Sequence: Synthetic oligonucleotide
  Antisense strand to SEQ ID NO: 1756069
ucaugcauugcauuucccg

SEQ ID NO: 1756071 - RNA, 19 nt, Artificial Sequence
  Description of Artificial Sequence: Synthetic oligonucleotide
  Sense strand starting at position 1328 of SEQ ID NO: 1562559
ugcaaugcaugauuccgaa

SEQ ID NO: 1756072 - RNA, 19 nt, Artificial Sequence
  Description of Artificial Sequence: Synthetic oligonucleotide
  Antisense strand to SEQ ID NO: 1756071
uucggaaucaugcauugca

SEQ ID NO: 1756073 - RNA, 19 nt, Artificial Sequence
  Description of Artificial Sequence: Synthetic oligonucleotide
  Sense strand starting at position 1348 of SEQ ID NO: 1562559
uggguccuuucccuguuaa

SEQ ID NO: 1756074 - RNA, 19 nt, Artificial Sequence
  Description of Artificial Sequence: Synthetic oligonucleotide
  Antisense strand to SEQ ID NO: 1756073
uuaacagggaaaggaccca

SEQ ID NO: 1756075 - RNA, 19 nt, Artificial Sequence
  Description of Artificial Sequence: Synthetic oligonucleotide
  Sense strand starting at position 1349 of SEQ ID NO: 1562559
ggguccuuucccuguuaag

SEQ ID NO: 1756076 - RNA, 19 nt, Artificial Sequence
  Description of Artificial Sequence: Synthetic oligonucleotide
  Antisense strand to SEQ ID NO: 1756075
cuuaacagggaaaggaccc

SEQ ID NO: 1756077 - RNA, 19 nt, Artificial Sequence
  Description of Artificial Sequence: Synthetic oligonucleotide
  Sense strand starting at position 1405 of SEQ ID NO: 1562559
ugaggaucagaucguggua

SEQ ID NO: 1756078 - RNA, 19 nt, Artificial Sequence
  Description of Artificial Sequence: Synthetic oligonucleotide
  Antisense strand to SEQ ID NO: 1756077
uaccacgaucugauccuca

SEQ ID NO: 1756079 - RNA, 19 nt, Artificial Sequence
  Description of Artificial Sequence: Synthetic oligonucleotide
  Sense strand starting at position 1426 of SEQ ID NO: 1562559
guacuugacgccugcauua

SEQ ID NO: 1756080 - RNA, 19 nt, Artificial Sequence
  Description of Artificial Sequence: Synthetic oligonucleotide
  Antisense strand to SEQ ID NO: 1756079
uaaugcaggcgucaaguac

SEQ ID NO: 1756081 - RNA, 19 nt, Artificial Sequence
  Description of Artificial Sequence: Synthetic oligonucleotide
  Sense strand starting at position 1428 of SEQ ID NO: 1562559
acuugacgccugcauuaga

SEQ ID NO: 1756082 - RNA, 19 nt, Artificial Sequence
  Description of Artificial Sequence: Synthetic oligonucleotide
  Antisense strand to SEQ ID NO: 1756081
ucuaaugcaggcgucaagu

SEQ ID NO: 1756083 - RNA, 19 nt, Artificial Sequence
  Description of Artificial Sequence: Synthetic oligonucleotide
  Sense strand starting at position 1439 of SEQ ID NO: 1562559
gcauuagaucucggcucac

SEQ ID NO: 1756084 - RNA, 19 nt, Artificial Sequence
  Description of Artificial Sequence: Synthetic oligonucleotide
  Antisense strand to SEQ ID NO: 1756083
gugagccgagaucuaaugc

SEQ ID NO: 1756085 - RNA, 19 nt, Artificial Sequence
  Description of Artificial Sequence: Synthetic oligonucleotide
  Sense strand starting at position 1582 of SEQ ID NO: 1562559
cuauguugccagugaacuc

SEQ ID NO: 1756086 - RNA, 19 nt, Artificial Sequence
  Description of Artificial Sequence: Synthetic oligonucleotide
  Antisense strand to SEQ ID NO: 1756085
gaguucacuggcaacauag

SEQ ID NO: 1756087 - RNA, 19 nt, Artificial Sequence
  Description of Artificial Sequence: Synthetic oligonucleotide
  Sense strand starting at position 1591 of SEQ ID NO: 1562559
cagugaacuccugagcuca

SEQ ID NO: 1756088 - RNA, 19 nt, Artificial Sequence
  Description of Artificial Sequence: Synthetic oligonucleotide
  Antisense strand to SEQ ID NO: 1756087
ugagcucaggaguucacug

SEQ ID NO: 1756089 - RNA, 19 nt, Artificial Sequence
  Description of Artificial Sequence: Synthetic oligonucleotide
  Sense strand starting at position 1695 of SEQ ID NO: 1562559
caaaguaucucggaaugag

SEQ ID NO: 1756090 - RNA, 19 nt, Artificial Sequence
  Description of Artificial Sequence: Synthetic oligonucleotide
  Antisense strand to SEQ ID NO: 1756089
cucauuccgagauacuuug

SEQ ID NO: 1756091 - RNA, 19 nt, Artificial Sequence
  Description of Artificial Sequence: Synthetic oligonucleotide
  Sense strand starting at position 1755 of SEQ ID NO: 1562559
aucaguuaucgguauugac

SEQ ID NO: 1756092 - RNA, 19 nt, Artificial Sequence
  Description of Artificial Sequence: Synthetic oligonucleotide
  Antisense strand to SEQ ID NO: 1756091
gucaauaccgauaacugau

SEQ ID NO: 1756093 - RNA, 19 nt, Artificial Sequence
  Description of Artificial Sequence: Synthetic oligonucleotide
  Sense strand starting at position 1762 of SEQ ID NO: 1562559
aucgguauugacuguauau

SEQ ID NO: 1756094 - RNA, 19 nt, Artificial Sequence
  Description of Artificial Sequence: Synthetic oligonucleotide
  Antisense strand to SEQ ID NO: 1756093
auauacagucaauaccgau

SEQ ID NO: 1756095 - RNA, 19 nt, Artificial Sequence
  Description of Artificial Sequence: Synthetic oligonucleotide
  Sense strand starting at position 1764 of SEQ ID NO: 1562559
cgguauugacuguauauaa

SEQ ID NO: 1756096 - RNA, 19 nt, Artificial Sequence
  Description of Artificial Sequence: Synthetic oligonucleotide
  Antisense strand to SEQ ID NO: 1756095
uuauauacagucaauaccg

SEQ ID NO: 1756097 - RNA, 19 nt, Artificial Sequence
  Description of Artificial Sequence: Synthetic oligonucleotide
  Sense strand starting at position 1794 of SEQ ID NO: 1562559
auuuguguuuguuucgaaa

SEQ ID NO: 1756098 - RNA, 19 nt, Artificial Sequence
  Description of Artificial Sequence: Synthetic oligonucleotide
  Antisense strand to SEQ ID NO: 1756097
uuucgaaacaaacacaaau

SEQ ID NO: 1756099 - RNA, 19 nt, Artificial Sequence
  Description of Artificial Sequence: Synthetic oligonucleotide
  Sense strand starting at position 1797 of SEQ ID NO: 1562559
uguguuuguuucgaaauuu

SEQ ID NO: 1756100 - RNA, 19 nt, Artificial Sequence
  Description of Artificial Sequence: Synthetic oligonucleotide
  Antisense strand to SEQ ID NO: 1756099
aaauuucgaaacaaacaca

SEQ ID NO: 1756101 - RNA, 19 nt, Artificial Sequence
  Description of Artificial Sequence: Synthetic oligonucleotide
  Sense strand starting at position 1842 of SEQ ID NO: 1562559
guuauaguguaucuaaagu

SEQ ID NO: 1756102 - RNA, 19 nt, Artificial Sequence
  Description of Artificial Sequence: Synthetic oligonucleotide
  Antisense strand to SEQ ID NO: 1756101
acuuuagauacacuauaac

SEQ ID NO: 1756103 - RNA, 19 nt, Artificial Sequence
  Description of Artificial Sequence: Synthetic oligonucleotide
  Sense strand starting at position 2150 of SEQ ID NO: 1562559
agccuuugcgcagggagua

SEQ ID NO: 1756104 - RNA, 19 nt, Artificial Sequence
  Description of Artificial Sequence: Synthetic oligonucleotide
  Antisense strand to SEQ ID NO: 1756103
uacucccugcgcaaaggcu

SEQ ID NO: 1756105 - RNA, 19 nt, Artificial Sequence
  Description of Artificial Sequence: Synthetic oligonucleotide
  Sense strand starting at position 2280 of SEQ ID NO: 1562559
ugggccaaauucucuuaga

SEQ ID NO: 1756106 - RNA, 19 nt, Artificial Sequence
  Description of Artificial Sequence: Synthetic oligonucleotide
  Antisense strand to SEQ ID NO: 1756105
ucuaagagaauuuggccca

SEQ ID NO: 1756107 - RNA, 19 nt, Artificial Sequence
  Description of Artificial Sequence: Synthetic oligonucleotide
  Sense strand starting at position 2281 of SEQ ID NO: 1562559
gggccaaauucucuuagau

SEQ ID NO: 1756108 - RNA, 19 nt, Artificial Sequence
  Description of Artificial Sequence: Synthetic oligonucleotide
  Antisense strand to SEQ ID NO: 1756107
aucuaagagaauuuggccc

SEQ ID NO: 1756109 - RNA, 19 nt, Artificial Sequence
  Description of Artificial Sequence: Synthetic oligonucleotide
  Sense strand starting at position 2283 of SEQ ID NO: 1562559
gccaaauucucuuagauga

SEQ ID NO: 1756110 - RNA, 19 nt, Artificial Sequence
  Description of Artificial Sequence: Synthetic oligonucleotide
  Antisense strand to SEQ ID NO: 1756109
ucaucuaagagaauuuggc

SEQ ID NO: 1756111 - RNA, 19 nt, Artificial Sequence
  Description of Artificial Sequence: Synthetic oligonucleotide
  Sense strand starting at position 2357 of SEQ ID NO: 1562559
uuugauaauuucgccuuau

SEQ ID NO: 1756112 - RNA, 19 nt, Artificial Sequence
  Description of Artificial Sequence: Synthetic oligonucleotide
  Antisense strand to SEQ ID NO: 1756111
auaaggcgaaauuaucaaa

SEQ ID NO: 1756113 - RNA, 19 nt, Artificial Sequence
  Description of Artificial Sequence: Synthetic oligonucleotide
  Sense strand starting at position 2841 of SEQ ID NO: 1562559
gcugcugugaguuaugaug

SEQ ID NO: 1756114 - RNA, 19 nt, Artificial Sequence
  Description of Artificial Sequence: Synthetic oligonucleotide
  Antisense strand to SEQ ID NO: 1756113
caucauaacucacagcagc

SEQ ID NO: 1756115 - RNA, 19 nt, Artificial Sequence
  Description of Artificial Sequence: Synthetic oligonucleotide
  Sense strand starting at position 2956 of SEQ ID NO: 1562559
auccaagacccacguauaa

SEQ ID NO: 1756116 - RNA, 19 nt, Artificial Sequence
  Description of Artificial Sequence: Synthetic oligonucleotide
  Antisense strand to SEQ ID NO: 1756115
uuauacgugggucuuggau

SEQ ID NO: 1756117 - RNA, 19 nt, Artificial Sequence
  Description of Artificial Sequence: Synthetic oligonucleotide
  Sense strand starting at position 2990 of SEQ ID NO: 1562559
agaaucaugcaguguaaga

SEQ ID NO: 1756118 - RNA, 19 nt, Artificial Sequence
  Description of Artificial Sequence: Synthetic oligonucleotide
  Antisense strand to SEQ ID NO: 1756117
ucuuacacugcaugauucu

SEQ ID NO: 1756119 - RNA, 19 nt, Artificial Sequence
  Description of Artificial Sequence: Synthetic oligonucleotide
  Sense strand starting at position 2992 of SEQ ID NO: 1562559
aaucaugcaguguaagauu

SEQ ID NO: 1756120 - RNA, 19 nt, Artificial Sequence
  Description of Artificial Sequence: Synthetic oligonucleotide
  Antisense strand to SEQ ID NO: 1756119
aaucuuacacugcaugauu

SEQ ID NO: 1756121 - RNA, 19 nt, Artificial Sequence
  Description of Artificial Sequence: Synthetic oligonucleotide
  Sense strand starting at position 2995 of SEQ ID NO: 1562559
caugcaguguaagauuuaa

SEQ ID NO: 1756122 - RNA, 19 nt, Artificial Sequence
  Description of Artificial Sequence: Synthetic oligonucleotide
  Antisense strand to SEQ ID NO: 1756121
uuaaaucuuacacugcaug

SEQ ID NO: 1756123 - RNA, 19 nt, Artificial Sequence
  Description of Artificial Sequence: Synthetic oligonucleotide
  Sense strand starting at position 3070 of SEQ ID NO: 1562559
gaauuaauugauggcauga

SEQ ID NO: 1756124 - RNA, 19 nt, Artificial Sequence
  Description of Artificial Sequence: Synthetic oligonucleotide
  Antisense strand to SEQ ID NO: 1756123
ucaugccaucaauuaauuc

SEQ ID NO: 1756125 - RNA, 19 nt, Artificial Sequence
  Description of Artificial Sequence: Synthetic oligonucleotide
  Sense strand starting at position 3072 of SEQ ID NO: 1562559
auuaauugauggcaugaca

SEQ ID NO: 1756126 - RNA, 19 nt, Artificial Sequence
  Description of Artificial Sequence: Synthetic oligonucleotide
  Antisense strand to SEQ ID NO: 1756125
ugucaugccaucaauuaau

SEQ ID NO: 1756127 - RNA, 19 nt, Artificial Sequence
  Description of Artificial Sequence: Synthetic oligonucleotide
  Sense strand starting at position 3161 of SEQ ID NO: 1562559
cccugagucccugaacaca

SEQ ID NO: 1756128 - RNA, 19 nt, Artificial Sequence
  Description of Artificial Sequence: Synthetic oligonucleotide
  Antisense strand to SEQ ID NO: 1756127
uguguucagggacucaggg

SEQ ID NO: 1756129 - RNA, 19 nt, Artificial Sequence
  Description of Artificial Sequence: Synthetic oligonucleotide
  Sense strand starting at position 3517 of SEQ ID NO: 1562559
ggugcucucuaagaagaug

SEQ ID NO: 1756130 - RNA, 19 nt, Artificial Sequence
  Description of Artificial Sequence: Synthetic oligonucleotide
  Antisense strand to SEQ ID NO: 1756129
caucuucuuagagagcacc

SEQ ID NO: 1756131 - RNA, 19 nt, Artificial Sequence
  Description of Artificial Sequence: Synthetic oligonucleotide
  Sense strand starting at position 3541 of SEQ ID NO: 1562559
agaggcaaacccugcaaua

SEQ ID NO: 1756132 - RNA, 19 nt, Artificial Sequence
  Description of Artificial Sequence: Synthetic oligonucleotide
  Antisense strand to SEQ ID NO: 1756131
uauugcaggguuugccucu

SEQ ID NO: 1756133 - RNA, 19 nt, Artificial Sequence
  Description of Artificial Sequence: Synthetic oligonucleotide
  Sense strand starting at position 3702 of SEQ ID NO: 1562559
ucugcaaagcucggauuga

SEQ ID NO: 1756134 - RNA, 19 nt, Artificial Sequence
  Description of Artificial Sequence: Synthetic oligonucleotide
  Antisense strand to SEQ ID NO: 1756133
ucaauccgagcuuugcaga

SEQ ID NO: 1756135 - RNA, 19 nt, Artificial Sequence
  Description of Artificial Sequence: Synthetic oligonucleotide
  Sense strand starting at position 3856 of SEQ ID NO: 1562559
caguguaugcgguuugcau

SEQ ID NO: 1756136 - RNA, 19 nt, Artificial Sequence
  Description of Artificial Sequence: Synthetic oligonucleotide
  Antisense strand to SEQ ID NO: 1756135
augcaaaccgcauacacug

SEQ ID NO: 1756137 - RNA, 19 nt, Artificial Sequence
  Description of Artificial Sequence: Synthetic oligonucleotide
  Sense strand starting at position 3857 of SEQ ID NO: 1562559
aguguaugcgguuugcaua

SEQ ID NO: 1756138 - RNA, 19 nt, Artificial Sequence
  Description of Artificial Sequence: Synthetic oligonucleotide
  Antisense strand to SEQ ID NO: 1756137
uaugcaaaccgcauacacu

SEQ ID NO: 1756139 - RNA, 19 nt, Artificial Sequence
  Description of Artificial Sequence: Synthetic oligonucleotide
  Sense strand starting at position 527 of SEQ ID NO: 1562560
auaauaaaguucugggaua

SEQ ID NO: 1756140 - RNA, 19 nt, Artificial Sequence
  Description of Artificial Sequence: Synthetic oligonucleotide
  Antisense strand to SEQ ID NO: 1756139
uaucccagaacuuuauuau

SEQ ID NO: 1756141 - RNA, 19 nt, Artificial Sequence
  Description of Artificial Sequence: Synthetic oligonucleotide
  Sense strand starting at position 538 of SEQ ID NO: 1562560
cugggauaaugguugcaca

SEQ ID NO: 1756142 - RNA, 19 nt, Artificial Sequence
  Description of Artificial Sequence: Synthetic oligonucleotide
  Antisense strand to SEQ ID NO: 1756141
ugugcaaccauuaucccag

SEQ ID NO: 1756143 - RNA, 19 nt, Artificial Sequence
  Description of Artificial Sequence: Synthetic oligonucleotide
  Sense strand starting at position 539 of SEQ ID NO: 1562560
ugggauaaugguugcacaa

SEQ ID NO: 1756144 - RNA, 19 nt, Artificial Sequence
  Description of Artificial Sequence: Synthetic oligonucleotide
  Antisense strand to SEQ ID NO: 1756143
uugugcaaccauuauccca

SEQ ID NO: 1756145 - RNA, 19 nt, Artificial Sequence
  Description of Artificial Sequence: Synthetic oligonucleotide
  Sense strand starting at position 685 of SEQ ID NO: 1562560
uuaugcaaugccugagaca

SEQ ID NO: 1756146 - RNA, 19 nt, Artificial Sequence
  Description of Artificial Sequence: Synthetic oligonucleotide
  Antisense strand to SEQ ID NO: 1756145
ugucucaggcauugcauaa

SEQ ID NO: 1756147 - RNA, 19 nt, Artificial Sequence
  Description of Artificial Sequence: Synthetic oligonucleotide
  Sense strand starting at position 717 of SEQ ID NO: 1562560
uggauagcaucaggaaaga

SEQ ID NO: 1756148 - RNA, 19 nt, Artificial Sequence
  Description of Artificial Sequence: Synthetic oligonucleotide
  Antisense strand to SEQ ID NO: 1756147
ucuuuccugaugcuaucca

SEQ ID NO: 1756149 - RNA, 19 nt, Artificial Sequence
  Description of Artificial Sequence: Synthetic oligonucleotide
  Sense strand starting at position 727 of SEQ ID NO: 1562560
caggaaagauucugaagga

SEQ ID NO: 1756150 - RNA, 19 nt, Artificial Sequence
  Description of Artificial Sequence: Synthetic oligonucleotide
  Antisense strand to SEQ ID NO: 1756149
uccuucagaaucuuuccug

SEQ ID NO: 1756151 - RNA, 19 nt, Artificial Sequence
  Description of Artificial Sequence: Synthetic oligonucleotide
  Sense strand starting at position 728 of SEQ ID NO: 1562560
aggaaagauucugaaggag

SEQ ID NO: 1756152 - RNA, 19 nt, Artificial Sequence
  Description of Artificial Sequence: Synthetic oligonucleotide
  Antisense strand to SEQ ID NO: 1756151
cuccuucagaaucuuuccu

SEQ ID NO: 1756153 - RNA, 19 nt, Artificial Sequence
  Description of Artificial Sequence: Synthetic oligonucleotide
  Sense strand starting at position 796 of SEQ ID NO: 1562560
uaggacaauugagagagua

SEQ ID NO: 1756154 - RNA, 19 nt, Artificial Sequence
  Description of Artificial Sequence: Synthetic oligonucleotide
  Antisense strand to SEQ ID NO: 1756153
uacucucucaauuguccua

SEQ ID NO: 1756155 - RNA, 19 nt, Artificial Sequence
  Description of Artificial Sequence: Synthetic oligonucleotide
  Sense strand starting at position 804 of SEQ ID NO: 1562560
uugagagaguaagaauaga

SEQ ID NO: 1756156 - RNA, 19 nt, Artificial Sequence
  Description of Artificial Sequence: Synthetic oligonucleotide
  Antisense strand to SEQ ID NO: 1756155
ucuauucuuacucucucaa

SEQ ID NO: 1756157 - RNA, 19 nt, Artificial Sequence
  Description of Artificial Sequence: Synthetic oligonucleotide
  Sense strand starting at position 845 of SEQ ID NO: 1562560
aaugaauacugguggaaua

SEQ ID NO: 1756158 - RNA, 19 nt, Artificial Sequence
  Description of Artificial Sequence: Synthetic oligonucleotide
  Antisense strand to SEQ ID NO: 1756157
uauuccaccaguauucauu

SEQ ID NO: 1756159 - RNA, 19 nt, Artificial Sequence
  Description of Artificial Sequence: Synthetic oligonucleotide
  Sense strand starting at position 881 of SEQ ID NO: 1562560
accaauuuaucuuaggaga

SEQ ID NO: 1756160 - RNA, 19 nt, Artificial Sequence
  Description of Artificial Sequence: Synthetic oligonucleotide
  Antisense strand to SEQ ID NO: 1756159
ucuccuaagauaaauuggu

SEQ ID NO: 1756161 - RNA, 19 nt, Artificial Sequence
  Description of Artificial Sequence: Synthetic oligonucleotide
  Sense strand starting at position 934 of SEQ ID NO: 1562560
aacgaaugcgcccaaucuu

SEQ ID NO: 1756162 - RNA, 19 nt, Artificial Sequence
  Description of Artificial Sequence: Synthetic oligonucleotide
  Antisense strand to SEQ ID NO: 1756161
aagauugggcgcauucguu

SEQ ID NO: 1756163 - RNA, 19 nt, Artificial Sequence
  Description of Artificial Sequence: Synthetic oligonucleotide
  Sense strand starting at position 1135 of SEQ ID NO: 1562560
ucacuagguggaugacuua

SEQ ID NO: 1756164 - RNA, 19 nt, Artificial Sequence
  Description of Artificial Sequence: Synthetic oligonucleotide
  Antisense strand to SEQ ID NO: 1756163
uaagucauccaccuaguga

SEQ ID NO: 1756165 - RNA, 19 nt, Artificial Sequence
  Description of Artificial Sequence: Synthetic oligonucleotide
  Sense strand starting at position 1179 of SEQ ID NO: 1562560
cagacuccuccgggaggua

SEQ ID NO: 1756166 - RNA, 19 nt, Artificial Sequence
  Description of Artificial Sequence: Synthetic oligonucleotide
  Antisense strand to SEQ ID NO: 1756165
uaccucccggaggagucug

SEQ ID NO: 1756167 - RNA, 19 nt, Artificial Sequence
  Description of Artificial Sequence: Synthetic oligonucleotide
  Sense strand starting at position 1180 of SEQ ID NO: 1562560
agacuccuccgggagguaa

SEQ ID NO: 1756168 - RNA, 19 nt, Artificial Sequence
  Description of Artificial Sequence: Synthetic oligonucleotide
  Antisense strand to SEQ ID NO: 1756167
uuaccucccggaggagucu

SEQ ID NO: 1756169 - RNA, 19 nt, Artificial Sequence
  Description of Artificial Sequence: Synthetic oligonucleotide
  Sense strand starting at position 1236 of SEQ ID NO: 1562560
ccgugagacagagguaaug

SEQ ID NO: 1756170 - RNA, 19 nt, Artificial Sequence
  Description of Artificial Sequence: Synthetic oligonucleotide
  Antisense strand to SEQ ID NO: 1756169
cauuaccucugucucacgg

SEQ ID NO: 1756171 - RNA, 19 nt, Artificial Sequence
  Description of Artificial Sequence: Synthetic oligonucleotide
  Sense strand starting at position 1246 of SEQ ID NO: 1562560
gagguaauguacucacuac

SEQ ID NO: 1756172 - RNA, 19 nt, Artificial Sequence
  Description of Artificial Sequence: Synthetic oligonucleotide
  Antisense strand to SEQ ID NO: 1756171
guagugaguacauuaccuc

SEQ ID NO: 1756173 - RNA, 19 nt, Artificial Sequence
  Description of Artificial Sequence: Synthetic oligonucleotide
  Sense strand starting at position 1293 of SEQ ID NO: 1562560
gguugcucccuuggauacu

SEQ ID NO: 1756174 - RNA, 19 nt, Artificial Sequence
  Description of Artificial Sequence: Synthetic oligonucleotide
  Antisense strand to SEQ ID NO: 1756173
aguauccaagggagcaacc

SEQ ID NO: 1756175 - RNA, 19 nt, Artificial Sequence
  Description of Artificial Sequence: Synthetic oligonucleotide
  Sense strand starting at position 1432 of SEQ ID NO: 1562560
ccgccaggccucugggaaa

SEQ ID NO: 1756176 - RNA, 19 nt, Artificial Sequence
  Description of Artificial Sequence: Synthetic oligonucleotide
  Antisense strand to SEQ ID NO: 1756175
uuucccagaggccuggcgg

SEQ ID NO: 1756177 - RNA, 19 nt, Artificial Sequence
  Description of Artificial Sequence: Synthetic oligonucleotide
  Sense strand starting at position 1455 of SEQ ID NO: 1562560
ggccgagggcugcucgaau

SEQ ID NO: 1756178 - RNA, 19 nt, Artificial Sequence
  Description of Artificial Sequence: Synthetic oligonucleotide
  Antisense strand to SEQ ID NO: 1756177
auucgagcagcccucggcc

SEQ ID NO: 1756179 - RNA, 19 nt, Artificial Sequence
  Description of Artificial Sequence: Synthetic oligonucleotide
  Sense strand starting at position 1467 of SEQ ID NO: 1562560
cucgaaugccucuaggaac

SEQ ID NO: 1756180 - RNA, 19 nt, Artificial Sequence
  Description of Artificial Sequence: Synthetic oligonucleotide
  Antisense strand to SEQ ID NO: 1756179
guuccuagaggcauucgag

SEQ ID NO: 1756181 - RNA, 19 nt, Artificial Sequence
  Description of Artificial Sequence: Synthetic oligonucleotide
  Sense strand starting at position 1560 of SEQ ID NO: 1562560
gccagaagaguccaggguu

SEQ ID NO: 1756182 - RNA, 19 nt, Artificial Sequence
  Description of Artificial Sequence: Synthetic oligonucleotide
  Antisense strand to SEQ ID NO: 1756181
aacccuggacucuucuggc

SEQ ID NO: 1756183 - RNA, 19 nt, Artificial Sequence
  Description of Artificial Sequence: Synthetic oligonucleotide
  Sense strand starting at position 1626 of SEQ ID NO: 1562560
ggguaaagcgucguaccuu

SEQ ID NO: 1756184 - RNA, 19 nt, Artificial Sequence
  Description of Artificial Sequence: Synthetic oligonucleotide
  Antisense strand to SEQ ID NO: 1756183
aagguacgacgcuuuaccc

SEQ ID NO: 1756185 - RNA, 19 nt, Artificial Sequence
  Description of Artificial Sequence: Synthetic oligonucleotide
  Sense strand starting at position 2409 of SEQ ID NO: 1562560
agaucuaaacacuguagua

SEQ ID NO: 1756186 - RNA, 19 nt, Artificial Sequence
  Description of Artificial Sequence: Synthetic oligonucleotide
  Antisense strand to SEQ ID NO: 1756185
uacuacaguguuuagaucu

SEQ ID NO: 1756187 - RNA, 19 nt, Artificial Sequence
  Description of Artificial Sequence: Synthetic oligonucleotide
  Sense strand starting at position 2517 of SEQ ID NO: 1562560
ccugaaucuaggugaagau

SEQ ID NO: 1756188 - RNA, 19 nt, Artificial Sequence
  Description of Artificial Sequence: Synthetic oligonucleotide
  Antisense strand to SEQ ID NO: 1756187
aucuucaccuagauucagg

SEQ ID NO: 1756189 - RNA, 19 nt, Artificial Sequence
  Description of Artificial Sequence: Synthetic oligonucleotide
  Sense strand starting at position 2547 of SEQ ID NO: 1562560
gcgaaagaaucccaacuca

SEQ ID NO: 1756190 - RNA, 19 nt, Artificial Sequence
  Description of Artificial Sequence: Synthetic oligonucleotide
  Antisense strand to SEQ ID NO: 1756189
ugaguugggauucuuucgc

SEQ ID NO: 1756191 - RNA, 19 nt, Artificial Sequence
  Description of Artificial Sequence: Synthetic oligonucleotide
  Sense strand starting at position 2922 of SEQ ID NO: 1562560
ugccaugacugguuucuga

SEQ ID NO: 1756192 - RNA, 19 nt, Artificial Sequence
  Description of Artificial Sequence: Synthetic oligonucleotide
  Antisense strand to SEQ ID NO: 1756191
ucagaaaccagucauggca

SEQ ID NO: 1756193 - RNA, 19 nt, Artificial Sequence
  Description of Artificial Sequence: Synthetic oligonucleotide
  Sense strand starting at position 2929 of SEQ ID NO: 1562560
acugguuucugaggacuaa

SEQ ID NO: 1756194 - RNA, 19 nt, Artificial Sequence
  Description of Artificial Sequence: Synthetic oligonucleotide
  Antisense strand to SEQ ID NO: 1756193
uuaguccucagaaaccagu

SEQ ID NO: 1756195 - RNA, 19 nt, Artificial Sequence
  Description of Artificial Sequence: Synthetic oligonucleotide
  Sense strand starting at position 3239 of SEQ ID NO: 1562560
gcacaacucuggcucauua

SEQ ID NO: 1756196 - RNA, 19 nt, Artificial Sequence
  Description of Artificial Sequence: Synthetic oligonucleotide
  Antisense strand to SEQ ID NO: 1756195
uaaugagccagaguugugc

SEQ ID NO: 1756197 - RNA, 19 nt, Artificial Sequence
  Description of Artificial Sequence: Synthetic oligonucleotide
  Sense strand starting at position 3246 of SEQ ID NO: 1562560
ucuggcucauuauuaugaa

SEQ ID NO: 1756198 - RNA, 19 nt, Artificial Sequence
  Description of Artificial Sequence: Synthetic oligonucleotide
  Antisense strand to SEQ ID NO: 1756197
uucauaauaaugagccaga

SEQ ID NO: 1756199 - RNA, 19 nt, Artificial Sequence
  Description of Artificial Sequence: Synthetic oligonucleotide
  Sense strand starting at position 3776 of SEQ ID NO: 1562560
ucuacaaauuucuguguca

SEQ ID NO: 1756200 - RNA, 19 nt, Artificial Sequence
  Description of Artificial Sequence: Synthetic oligonucleotide
  Antisense strand to SEQ ID NO: 1756199
ugacacagaaauuuguaga

SEQ ID NO: 1756201 - RNA, 19 nt, Artificial Sequence
  Description of Artificial Sequence: Synthetic oligonucleotide
  Sense strand starting at position 3819 of SEQ ID NO: 1562560
ucuguagugguagagugaa

SEQ ID NO: 1756202 - RNA, 19 nt, Artificial Sequence
  Description of Artificial Sequence: Synthetic oligonucleotide
  Antisense strand to SEQ ID NO: 1756201
uucacucuaccacuacaga

SEQ ID NO: 1756203 - RNA, 19 nt, Artificial Sequence
  Description of Artificial Sequence: Synthetic oligonucleotide
  Sense strand starting at position 3833 of SEQ ID NO: 1562560
gugaauuccuucccugaaa

SEQ ID NO: 1756204 - RNA, 19 nt, Artificial Sequence
  Description of Artificial Sequence: Synthetic oligonucleotide
  Antisense strand to SEQ ID NO: 1756203
uuucagggaaggaauucac

SEQ ID NO: 1756205 - RNA, 19 nt, Artificial Sequence
  Description of Artificial Sequence: Synthetic oligonucleotide
  Sense strand starting at position 3834 of SEQ ID NO: 1562560
ugaauuccuucccugaaag

SEQ ID NO: 1756206 - RNA, 19 nt, Artificial Sequence
  Description of Artificial Sequence: Synthetic oligonucleotide
  Antisense strand to SEQ ID NO: 1756205
cuuucagggaaggaauuca

SEQ ID NO: 1756207 - RNA, 19 nt, Artificial Sequence
  Description of Artificial Sequence: Synthetic oligonucleotide
  Sense strand starting at position 3850 of SEQ ID NO: 1562560
aaggacuuauugguuaagu

SEQ ID NO: 1756208 - RNA, 19 nt, Artificial Sequence
  Description of Artificial Sequence: Synthetic oligonucleotide
  Antisense strand to SEQ ID NO: 1756207
acuuaaccaauaaguccuu

SEQ ID NO: 1756209 - RNA, 19 nt, Artificial Sequence
  Description of Artificial Sequence: Synthetic oligonucleotide
  Sense strand starting at position 3851 of SEQ ID NO: 1562560
aggacuuauugguuaagug

SEQ ID NO: 1756210 - RNA, 19 nt, Artificial Sequence
  Description of Artificial Sequence: Synthetic oligonucleotide
  Antisense strand to SEQ ID NO: 1756209
cacuuaaccaauaaguccu

SEQ ID NO: 1756211 - RNA, 19 nt, Artificial Sequence
  Description of Artificial Sequence: Synthetic oligonucleotide
  Sense strand starting at position 3852 of SEQ ID NO: 1562560
ggacuuauugguuaaguga

SEQ ID NO: 1756212 - RNA, 19 nt, Artificial Sequence
  Description of Artificial Sequence: Synthetic oligonucleotide
  Antisense strand to SEQ ID NO: 1756211
ucacuuaaccaauaagucc

SEQ ID NO: 1756213 - RNA, 19 nt, Artificial Sequence
  Description of Artificial Sequence: Synthetic oligonucleotide
  Sense strand starting at position 3859 of SEQ ID NO: 1562560
uugguuaagugacuucuga

SEQ ID NO: 1756214 - RNA, 19 nt, Artificial Sequence
  Description of Artificial Sequence: Synthetic oligonucleotide
  Antisense strand to SEQ ID NO: 1756213
ucagaagucacuuaaccaa

SEQ ID NO: 1756215 - RNA, 19 nt, Artificial Sequence
  Description of Artificial Sequence: Synthetic oligonucleotide
  Sense strand starting at position 3970 of SEQ ID NO: 1562560
cuccucucucacuggagau

SEQ ID NO: 1756216 - RNA, 19 nt, Artificial Sequence
  Description of Artificial Sequence: Synthetic oligonucleotide
  Antisense strand to SEQ ID NO: 1756215
aucuccagugagagaggag

SEQ ID NO: 1756217 - RNA, 19 nt, Artificial Sequence
  Description of Artificial Sequence: Synthetic oligonucleotide
  Sense strand starting at position 3980 of SEQ ID NO: 1562560
acuggagauugagauggau

SEQ ID NO: 1756218 - RNA, 19 nt, Artificial Sequence
  Description of Artificial Sequence: Synthetic oligonucleotide
  Antisense strand to SEQ ID NO: 1756217
auccaucucaaucuccagu

SEQ ID NO: 1756219 - RNA, 19 nt, Artificial Sequence
  Description of Artificial Sequence: Synthetic oligonucleotide
  Sense strand starting at position 6 of SEQ ID NO: 1562561
aaggauacauguguuugaa

SEQ ID NO: 1756220 - RNA, 19 nt, Artificial Sequence
  Description of Artificial Sequence: Synthetic oligonucleotide
  Antisense strand to SEQ ID NO: 1756219
uucaaacacauguauccuu

SEQ ID NO: 1756221 - RNA, 19 nt, Artificial Sequence
  Description of Artificial Sequence: Synthetic oligonucleotide
  Sense strand starting at position 8 of SEQ ID NO: 1562561
ggauacauguguuugaaau

SEQ ID NO: 1756222 - RNA, 19 nt, Artificial Sequence
  Description of Artificial Sequence: Synthetic oligonucleotide
  Antisense strand to SEQ ID NO: 1756221
auuucaaacacauguaucc

SEQ ID NO: 1756223 - RNA, 19 nt, Artificial Sequence
  Description of Artificial Sequence: Synthetic oligonucleotide
  Sense strand starting at position 9 of SEQ ID NO: 1562561
gauacauguguuugaaaug

SEQ ID NO: 1756224 - RNA, 19 nt, Artificial Sequence
  Description of Artificial Sequence: Synthetic oligonucleotide
  Antisense strand to SEQ ID NO: 1756223
cauuucaaacacauguauc

SEQ ID NO: 1756225 - RNA, 19 nt, Artificial Sequence
  Description of Artificial Sequence: Synthetic oligonucleotide
  Sense strand starting at position 14 of SEQ ID NO: 1562561
auguguuugaaaugccaag

SEQ ID NO: 1756226 - RNA, 19 nt, Artificial Sequence
  Description of Artificial Sequence: Synthetic oligonucleotide
  Antisense strand to SEQ ID NO: 1756225
cuuggcauuucaaacacau

SEQ ID NO: 1756227 - RNA, 19 nt, Artificial Sequence
  Description of Artificial Sequence: Synthetic oligonucleotide
  Sense strand starting at position 40 of SEQ ID NO: 1562561
cccaaaggauugcuccaau

SEQ ID NO: 1756228 - RNA, 19 nt, Artificial Sequence
  Description of Artificial Sequence: Synthetic oligonucleotide
  Antisense strand to SEQ ID NO: 1756227
auuggagcaauccuuuggg

SEQ ID NO: 1756229 - RNA, 19 nt, Artificial Sequence
  Description of Artificial Sequence: Synthetic oligonucleotide
  Sense strand starting at position 94 of SEQ ID NO: 1562561
ucaucuacagaauguagau

SEQ ID NO: 1756230 - RNA, 19 nt, Artificial Sequence
  Description of Artificial Sequence: Synthetic oligonucleotide
  Antisense strand to SEQ ID NO: 1756229
aucuacauucuguagauga

SEQ ID NO: 1756231 - RNA, 19 nt, Artificial Sequence
  Description of Artificial Sequence: Synthetic oligonucleotide
  Sense strand starting at position 126 of SEQ ID NO: 1562561
cuauuacauugaguuuguu

SEQ ID NO: 1756232 - RNA, 19 nt, Artificial Sequence
  Description of Artificial Sequence: Synthetic oligonucleotide
  Antisense strand to SEQ ID NO: 1756231
aacaaacucaauguaauag

SEQ ID NO: 1756233 - RNA, 19 nt, Artificial Sequence
  Description of Artificial Sequence: Synthetic oligonucleotide
  Sense strand starting at position 129 of SEQ ID NO: 1562561
uuacauugaguuuguugga

SEQ ID NO: 1756234 - RNA, 19 nt, Artificial Sequence
  Description of Artificial Sequence: Synthetic oligonucleotide
  Antisense strand to SEQ ID NO: 1756233
uccaacaaacucaauguaa

SEQ ID NO: 1756235 - RNA, 19 nt, Artificial Sequence
  Description of Artificial Sequence: Synthetic oligonucleotide
  Sense strand starting at position 130 of SEQ ID NO: 1562561
uacauugaguuuguuggaa

SEQ ID NO: 1756236 - RNA, 19 nt, Artificial Sequence
  Description of Artificial Sequence: Synthetic oligonucleotide
  Antisense strand to SEQ ID NO: 1756235
uuccaacaaacucaaugua

SEQ ID NO: 1756237 - RNA, 19 nt, Artificial Sequence
  Description of Artificial Sequence: Synthetic oligonucleotide
  Sense strand starting at position 665 of SEQ ID NO: 1562561
cuggguuaccaguguaauu

SEQ ID NO: 1756238 - RNA, 19 nt, Artificial Sequence
  Description of Artificial Sequence: Synthetic oligonucleotide
  Antisense strand to SEQ ID NO: 1756237
aauuacacugguaacccag

SEQ ID NO: 1756239 - RNA, 19 nt, Artificial Sequence
  Description of Artificial Sequence: Synthetic oligonucleotide
  Sense strand starting at position 667 of SEQ ID NO: 1562561
ggguuaccaguguaauugu

SEQ ID NO: 1756240 - RNA, 19 nt, Artificial Sequence
  Description of Artificial Sequence: Synthetic oligonucleotide
  Antisense strand to SEQ ID NO: 1756239
acaauuacacugguaaccc

SEQ ID NO: 1756241 - RNA, 19 nt, Artificial Sequence
  Description of Artificial Sequence: Synthetic oligonucleotide
  Sense strand starting at position 670 of SEQ ID NO: 1562561
uuaccaguguaauuguaga

SEQ ID NO: 1756242 - RNA, 19 nt, Artificial Sequence
  Description of Artificial Sequence: Synthetic oligonucleotide
  Antisense strand to SEQ ID NO: 1756241
ucuacaauuacacugguaa

SEQ ID NO: 1756243 - RNA, 19 nt, Artificial Sequence
  Description of Artificial Sequence: Synthetic oligonucleotide
  Sense strand starting at position 680 of SEQ ID NO: 1562561
aauuguagacucuggguga

SEQ ID NO: 1756244 - RNA, 19 nt, Artificial Sequence
  Description of Artificial Sequence: Synthetic oligonucleotide
  Antisense strand to SEQ ID NO: 1756243
ucacccagagucuacaauu

SEQ ID NO: 1756245 - RNA, 19 nt, Artificial Sequence
  Description of Artificial Sequence: Synthetic oligonucleotide
  Sense strand starting at position 708 of SEQ ID NO: 1562561
aucaguggaggcugaauau

SEQ ID NO: 1756246 - RNA, 19 nt, Artificial Sequence
  Description of Artificial Sequence: Synthetic oligonucleotide
  Antisense strand to SEQ ID NO: 1756245
auauucagccuccacugau

SEQ ID NO: 1756247 - RNA, 19 nt, Artificial Sequence
  Description of Artificial Sequence: Synthetic oligonucleotide
  Sense strand starting at position 815 of SEQ ID NO: 1562561
uggagccuagccuauaaua

SEQ ID NO: 1756248 - RNA, 19 nt, Artificial Sequence
  Description of Artificial Sequence: Synthetic oligonucleotide
  Antisense strand to SEQ ID NO: 1756247
uauuauaggcuaggcucca

SEQ ID NO: 1756249 - RNA, 19 nt, Artificial Sequence
  Description of Artificial Sequence: Synthetic oligonucleotide
  Sense strand starting at position 1177 of SEQ ID NO: 1562561
gaaauuuacucugggaaga

SEQ ID NO: 1756250 - RNA, 19 nt, Artificial Sequence
  Description of Artificial Sequence: Synthetic oligonucleotide
  Antisense strand to SEQ ID NO: 1756249
ucuucccagaguaaauuuc

SEQ ID NO: 1756251 - RNA, 19 nt, Artificial Sequence
  Description of Artificial Sequence: Synthetic oligonucleotide
  Sense strand starting at position 1179 of SEQ ID NO: 1562561
aauuuacucugggaagaug

SEQ ID NO: 1756252 - RNA, 19 nt, Artificial Sequence
  Description of Artificial Sequence: Synthetic oligonucleotide
  Antisense strand to SEQ ID NO: 1756251
caucuucccagaguaaauu

SEQ ID NO: 1756253 - RNA, 19 nt, Artificial Sequence
  Description of Artificial Sequence: Synthetic oligonucleotide
  Sense strand starting at position 1555 of SEQ ID NO: 1562561
gcgcaaucagaucacuuua

SEQ ID NO: 1756254 - RNA, 19 nt, Artificial Sequence
  Description of Artificial Sequence: Synthetic oligonucleotide
  Antisense strand to SEQ ID NO: 1756253
uaaagugaucugauugcgc

SEQ ID NO: 1756255 - RNA, 19 nt, Artificial Sequence
  Description of Artificial Sequence: Synthetic oligonucleotide
  Sense strand starting at position 2385 of SEQ ID NO: 1562561
cugugcuggguggaagauu

SEQ ID NO: 1756256 - RNA, 19 nt, Artificial Sequence
  Description of Artificial Sequence: Synthetic oligonucleotide
  Antisense strand to SEQ ID NO: 1756255
aaucuuccacccagcacag

SEQ ID NO: 1756257 - RNA, 19 nt, Artificial Sequence
  Description of Artificial Sequence: Synthetic oligonucleotide
  Sense strand starting at position 2386 of SEQ ID NO: 1562561
ugugcuggguggaagauua

SEQ ID NO: 1756258 - RNA, 19 nt, Artificial Sequence
  Description of Artificial Sequence: Synthetic oligonucleotide
  Antisense strand to SEQ ID NO: 1756257
uaaucuuccacccagcaca

SEQ ID NO: 1756259 - RNA, 19 nt, Artificial Sequence
  Description of Artificial Sequence: Synthetic oligonucleotide
  Sense strand starting at position 2597 of SEQ ID NO: 1562561
gaauucuccggcuguagag

SEQ ID NO: 1756260 - RNA, 19 nt, Artificial Sequence
  Description of Artificial Sequence: Synthetic oligonucleotide
  Antisense strand to SEQ ID NO: 1756259
cucuacagccggagaauuc

SEQ ID NO: 1756261 - RNA, 19 nt, Artificial Sequence
  Description of Artificial Sequence: Synthetic oligonucleotide
  Sense strand starting at position 2606 of SEQ ID NO: 1562561
ggcuguagagauuggagga

SEQ ID NO: 1756262 - RNA, 19 nt, Artificial Sequence
  Description of Artificial Sequence: Synthetic oligonucleotide
  Antisense strand to SEQ ID NO: 1756261
uccuccaaucucuacagcc

SEQ ID NO: 1756263 - RNA, 19 nt, Artificial Sequence
  Description of Artificial Sequence: Synthetic oligonucleotide
  Sense strand starting at position 2607 of SEQ ID NO: 1562561
gcuguagagauuggaggaa

SEQ ID NO: 1756264 - RNA, 19 nt, Artificial Sequence
  Description of Artificial Sequence: Synthetic oligonucleotide
  Antisense strand to SEQ ID NO: 1756263
uuccuccaaucucuacagc

SEQ ID NO: 1756265 - RNA, 19 nt, Artificial Sequence
  Description of Artificial Sequence: Synthetic oligonucleotide
  Sense strand starting at position 2609 of SEQ ID NO: 1562561
uguagagauuggaggaagu

SEQ ID NO: 1756266 - RNA, 19 nt, Artificial Sequence
  Description of Artificial Sequence: Synthetic oligonucleotide
  Antisense strand to SEQ ID NO: 1756265
acuuccuccaaucucuaca

SEQ ID NO: 1756267 - RNA, 19 nt, Artificial Sequence
  Description of Artificial Sequence: Synthetic oligonucleotide
  Sense strand starting at position 2629 of SEQ ID NO: 1562561
gggagaaauucgucucuaa

SEQ ID NO: 1756268 - RNA, 19 nt, Artificial Sequence
  Description of Artificial Sequence: Synthetic oligonucleotide
  Antisense strand to SEQ ID NO: 1756267
uuagagacgaauuucuccc

SEQ ID NO: 1756269 - RNA, 19 nt, Artificial Sequence
  Description of Artificial Sequence: Synthetic oligonucleotide
  Sense strand starting at position 2632 of SEQ ID NO: 1562561
agaaauucgucucuaaguu

SEQ ID NO: 1756270 - RNA, 19 nt, Artificial Sequence
  Description of Artificial Sequence: Synthetic oligonucleotide
  Antisense strand to SEQ ID NO: 1756269
aacuuagagacgaauuucu

SEQ ID NO: 1756271 - RNA, 19 nt, Artificial Sequence
  Description of Artificial Sequence: Synthetic oligonucleotide
  Sense strand starting at position 2633 of SEQ ID NO: 1562561
gaaauucgucucuaaguug

SEQ ID NO: 1756272 - RNA, 19 nt, Artificial Sequence
  Description of Artificial Sequence: Synthetic oligonucleotide
  Antisense strand to SEQ ID NO: 1756271
caacuuagagacgaauuuc

SEQ ID NO: 1756273 - RNA, 19 nt, Artificial Sequence
  Description of Artificial Sequence: Synthetic oligonucleotide
  Sense strand starting at position 2645 of SEQ ID NO: 1562561
uaaguuguaagguggaaca

SEQ ID NO: 1756274 - RNA, 19 nt, Artificial Sequence
  Description of Artificial Sequence: Synthetic oligonucleotide
  Antisense strand to SEQ ID NO: 1756273
uguuccaccuuacaacuua

SEQ ID NO: 1756275 - RNA, 19 nt, Artificial Sequence
  Description of Artificial Sequence: Synthetic oligonucleotide
  Sense strand starting at position 2919 of SEQ ID NO: 1562561
agcagaacauagcuaugau

SEQ ID NO: 1756276 - RNA, 19 nt, Artificial Sequence
  Description of Artificial Sequence: Synthetic oligonucleotide
  Antisense strand to SEQ ID NO: 1756275
aucauagcuauguucugcu

SEQ ID NO: 1756277 - RNA, 19 nt, Artificial Sequence
  Description of Artificial Sequence: Synthetic oligonucleotide
  Sense strand starting at position 2920 of SEQ ID NO: 1562561
gcagaacauagcuaugaug

SEQ ID NO: 1756278 - RNA, 19 nt, Artificial Sequence
  Description of Artificial Sequence: Synthetic oligonucleotide
  Antisense strand to SEQ ID NO: 1756277
caucauagcuauguucugc

SEQ ID NO: 1756279 - RNA, 19 nt, Artificial Sequence
  Description of Artificial Sequence: Synthetic oligonucleotide
  Sense strand starting at position 2922 of SEQ ID NO: 1562561
agaacauagcuaugaugau

SEQ ID NO: 1756280 - RNA, 19 nt, Artificial Sequence
  Description of Artificial Sequence: Synthetic oligonucleotide
  Antisense strand to SEQ ID NO: 1756279
aucaucauagcuauguucu

SEQ ID NO: 1756281 - RNA, 19 nt, Artificial Sequence
  Description of Artificial Sequence: Synthetic oligonucleotide
  Sense strand starting at position 2959 of SEQ ID NO: 1562561
gcuuguucuaaagacgaag

SEQ ID NO: 1756282 - RNA, 19 nt, Artificial Sequence
  Description of Artificial Sequence: Synthetic oligonucleotide
  Antisense strand to SEQ ID NO: 1756281
cuucgucuuuagaacaagc

SEQ ID NO: 1756283 - RNA, 19 nt, Artificial Sequence
  Description of Artificial Sequence: Synthetic oligonucleotide
  Sense strand starting at position 3114 of SEQ ID NO: 1562561
cggcgucuucuaguaaugu

SEQ ID NO: 1756284 - RNA, 19 nt, Artificial Sequence
  Description of Artificial Sequence: Synthetic oligonucleotide
  Antisense strand to SEQ ID NO: 1756283
acauuacuagaagacgccg

SEQ ID NO: 1756285 - RNA, 19 nt, Artificial Sequence
  Description of Artificial Sequence: Synthetic oligonucleotide
  Sense strand starting at position 3195 of SEQ ID NO: 1562561
guaccuuaucugggaagag

SEQ ID NO: 1756286 - RNA, 19 nt, Artificial Sequence
  Description of Artificial Sequence: Synthetic oligonucleotide
  Antisense strand to SEQ ID NO: 1756285
cucuucccagauaagguac

SEQ ID NO: 1756287 - RNA, 19 nt, Artificial Sequence
  Description of Artificial Sequence: Synthetic oligonucleotide
  Sense strand starting at position 3204 of SEQ ID NO: 1562561
cugggaagagcucgggauu

SEQ ID NO: 1756288 - RNA, 19 nt, Artificial Sequence
  Description of Artificial Sequence: Synthetic oligonucleotide
  Antisense strand to SEQ ID NO: 1756287
aaucccgagcucuucccag

SEQ ID NO: 1756289 - RNA, 19 nt, Artificial Sequence
  Description of Artificial Sequence: Synthetic oligonucleotide
  Sense strand starting at position 3243 of SEQ ID NO: 1562561
cagcgucuucuggaguaag

SEQ ID NO: 1756290 - RNA, 19 nt, Artificial Sequence
  Description of Artificial Sequence: Synthetic oligonucleotide
  Antisense strand to SEQ ID NO: 1756289
cuuacuccagaagacgcug

SEQ ID NO: 1756291 - RNA, 19 nt, Artificial Sequence
  Description of Artificial Sequence: Synthetic oligonucleotide
  Sense strand starting at position 3246 of SEQ ID NO: 1562561
cgucuucuggaguaaguca

SEQ ID NO: 1756292 - RNA, 19 nt, Artificial Sequence
  Description of Artificial Sequence: Synthetic oligonucleotide
  Antisense strand to SEQ ID NO: 1756291
ugacuuacuccagaagacg

SEQ ID NO: 1756293 - RNA, 19 nt, Artificial Sequence
  Description of Artificial Sequence: Synthetic oligonucleotide
  Sense strand starting at position 3253 of SEQ ID NO: 1562561
uggaguaagucauuccucu

SEQ ID NO: 1756294 - RNA, 19 nt, Artificial Sequence
  Description of Artificial Sequence: Synthetic oligonucleotide
  Antisense strand to SEQ ID NO: 1756293
agaggaaugacuuacucca

SEQ ID NO: 1756295 - RNA, 19 nt, Artificial Sequence
  Description of Artificial Sequence: Synthetic oligonucleotide
  Sense strand starting at position 3371 of SEQ ID NO: 1562561
ucaucugugcugggaaaca

SEQ ID NO: 1756296 - RNA, 19 nt, Artificial Sequence
  Description of Artificial Sequence: Synthetic oligonucleotide
  Antisense strand to SEQ ID NO: 1756295
uguuucccagcacagauga

SEQ ID NO: 1756297 - RNA, 19 nt, Artificial Sequence
  Description of Artificial Sequence: Synthetic oligonucleotide
  Sense strand starting at position 3895 of SEQ ID NO: 1562561
agcuguuucccagguggaa

SEQ ID NO: 1756298 - RNA, 19 nt, Artificial Sequence
  Description of Artificial Sequence: Synthetic oligonucleotide
  Antisense strand to SEQ ID NO: 1756297
uuccaccugggaaacagcu

SEQ ID NO: 1756299 - RNA, 19 nt, Artificial Sequence
  Description of Artificial Sequence: Synthetic oligonucleotide
  Sense strand starting at position 497 of SEQ ID NO: 1562562
gacuacuaguccuuagaga

SEQ ID NO: 1756300 - RNA, 19 nt, Artificial Sequence
  Description of Artificial Sequence: Synthetic oligonucleotide
  Antisense strand to SEQ ID NO: 1756299
ucucuaaggacuaguaguc

SEQ ID NO: 1756301 - RNA, 19 nt, Artificial Sequence
  Description of Artificial Sequence: Synthetic oligonucleotide
  Sense strand starting at position 605 of SEQ ID NO: 1562562
cuucuuaaacaagguauga

SEQ ID NO: 1756302 - RNA, 19 nt, Artificial Sequence
  Description of Artificial Sequence: Synthetic oligonucleotide
  Antisense strand to SEQ ID NO: 1756301
ucauaccuuguuuaagaag

SEQ ID NO: 1756303 - RNA, 19 nt, Artificial Sequence
  Description of Artificial Sequence: Synthetic oligonucleotide
  Sense strand starting at position 618 of SEQ ID NO: 1562562
guaugaggaccguaaugua

SEQ ID NO: 1756304 - RNA, 19 nt, Artificial Sequence
  Description of Artificial Sequence: Synthetic oligonucleotide
  Antisense strand to SEQ ID NO: 1756303
uacauuacgguccucauac

SEQ ID NO: 1756305 - RNA, 19 nt, Artificial Sequence
  Description of Artificial Sequence: Synthetic oligonucleotide
  Sense strand starting at position 627 of SEQ ID NO: 1562562
ccguaauguaagcugcuua

SEQ ID NO: 1756306 - RNA, 19 nt, Artificial Sequence
  Description of Artificial Sequence: Synthetic oligonucleotide
  Antisense strand to SEQ ID NO: 1756305
uaagcagcuuacauuacgg

SEQ ID NO: 1756307 - RNA, 19 nt, Artificial Sequence
  Description of Artificial Sequence: Synthetic oligonucleotide
  Sense strand starting at position 628 of SEQ ID NO: 1562562
cguaauguaagcugcuuaa

SEQ ID NO: 1756308 - RNA, 19 nt, Artificial Sequence
  Description of Artificial Sequence: Synthetic oligonucleotide
  Antisense strand to SEQ ID NO: 1756307
uuaagcagcuuacauuacg

SEQ ID NO: 1756309 - RNA, 19 nt, Artificial Sequence
  Description of Artificial Sequence: Synthetic oligonucleotide
  Sense strand starting at position 632 of SEQ ID NO: 1562562
auguaagcugcuuaauuga

SEQ ID NO: 1756310 - RNA, 19 nt, Artificial Sequence
  Description of Artificial Sequence: Synthetic oligonucleotide
  Antisense strand to SEQ ID NO: 1756309
ucaauuaagcagcuuacau

SEQ ID NO: 1756311 - RNA, 19 nt, Artificial Sequence
  Description of Artificial Sequence: Synthetic oligonucleotide
  Sense strand starting at position 657 of SEQ ID NO: 1562562
agggucaucgugugaacaa

SEQ ID NO: 1756312 - RNA, 19 nt, Artificial Sequence
  Description of Artificial Sequence: Synthetic oligonucleotide
  Antisense strand to SEQ ID NO: 1756311
uuguucacacgaugacccu

SEQ ID NO: 1756313 - RNA, 19 nt, Artificial Sequence
  Description of Artificial Sequence: Synthetic oligonucleotide
  Sense strand starting at position 669 of SEQ ID NO: 1562562
ugaacaaucgcuggacuau

SEQ ID NO: 1756314 - RNA, 19 nt, Artificial Sequence
  Description of Artificial Sequence: Synthetic oligonucleotide
  Antisense strand to SEQ ID NO: 1756313
auaguccagcgauuguuca

SEQ ID NO: 1756315 - RNA, 19 nt, Artificial Sequence
  Description of Artificial Sequence: Synthetic oligonucleotide
  Sense strand starting at position 670 of SEQ ID NO: 1562562
gaacaaucgcuggacuauu

SEQ ID NO: 1756316 - RNA, 19 nt, Artificial Sequence
  Description of Artificial Sequence: Synthetic oligonucleotide
  Antisense strand to SEQ ID NO: 1756315
aauaguccagcgauuguuc

SEQ ID NO: 1756317 - RNA, 19 nt, Artificial Sequence
  Description of Artificial Sequence: Synthetic oligonucleotide
  Sense strand starting at position 762 of SEQ ID NO: 1562562
ccgugugaagucuaacuuu

SEQ ID NO: 1756318 - RNA, 19 nt, Artificial Sequence
  Description of Artificial Sequence: Synthetic oligonucleotide
  Antisense strand to SEQ ID NO: 1756317
aaaguuagacuucacacgg

SEQ ID NO: 1756319 - RNA, 19 nt, Artificial Sequence
  Description of Artificial Sequence: Synthetic oligonucleotide
  Sense strand starting at position 1565 of SEQ ID NO: 1562562
gagugaagcccgugaggga

SEQ ID NO: 1756320 - RNA, 19 nt, Artificial Sequence
  Description of Artificial Sequence: Synthetic oligonucleotide
  Antisense strand to SEQ ID NO: 1756319
ucccucacgggcuucacuc

SEQ ID NO: 1756321 - RNA, 19 nt, Artificial Sequence
  Description of Artificial Sequence: Synthetic oligonucleotide
  Sense strand starting at position 1827 of SEQ ID NO: 1562562
gcaguucuccuagagcuag

SEQ ID NO: 1756322 - RNA, 19 nt, Artificial Sequence
  Description of Artificial Sequence: Synthetic oligonucleotide
  Antisense strand to SEQ ID NO: 1756321
cuagcucuaggagaacugc

SEQ ID NO: 1756323 - RNA, 19 nt, Artificial Sequence
  Description of Artificial Sequence: Synthetic oligonucleotide
  Sense strand starting at position 1958 of SEQ ID NO: 1562562
ucuugaauuugacgucauc

SEQ ID NO: 1756324 - RNA, 19 nt, Artificial Sequence
  Description of Artificial Sequence: Synthetic oligonucleotide
  Antisense strand to SEQ ID NO: 1756323
gaugacgucaaauucaaga

SEQ ID NO: 1756325 - RNA, 19 nt, Artificial Sequence
  Description of Artificial Sequence: Synthetic oligonucleotide
  Sense strand starting at position 2615 of SEQ ID NO: 1562562
cgcucagagcgcuuccauu

SEQ ID NO: 1756326 - RNA, 19 nt, Artificial Sequence
  Description of Artificial Sequence: Synthetic oligonucleotide
  Antisense strand to SEQ ID NO: 1756325
aauggaagcgcucugagcg

SEQ ID NO: 1756327 - RNA, 19 nt, Artificial Sequence
  Description of Artificial Sequence: Synthetic oligonucleotide
  Sense strand starting at position 2801 of SEQ ID NO: 1562562
aucggagggcugugaucuu

SEQ ID NO: 1756328 - RNA, 19 nt, Artificial Sequence
  Description of Artificial Sequence: Synthetic oligonucleotide
  Antisense strand to SEQ ID NO: 1756327
aagaucacagcccuccgau

SEQ ID NO: 1756329 - RNA, 19 nt, Artificial Sequence
  Description of Artificial Sequence: Synthetic oligonucleotide
  Sense strand starting at position 3040 of SEQ ID NO: 1562562
acucaaacuccgggaugua

SEQ ID NO: 1756330 - RNA, 19 nt, Artificial Sequence
  Description of Artificial Sequence: Synthetic oligonucleotide
  Antisense strand to SEQ ID NO: 1756329
uacaucccggaguuugagu

SEQ ID NO: 1756331 - RNA, 19 nt, Artificial Sequence
  Description of Artificial Sequence: Synthetic oligonucleotide
  Sense strand starting at position 3041 of SEQ ID NO: 1562562
cucaaacuccgggauguaa

SEQ ID NO: 1756332 - RNA, 19 nt, Artificial Sequence
  Description of Artificial Sequence: Synthetic oligonucleotide
  Antisense strand to SEQ ID NO: 1756331
uuacaucccggaguuugag

SEQ ID NO: 1756333 - RNA, 19 nt, Artificial Sequence
  Description of Artificial Sequence: Synthetic oligonucleotide
  Sense strand starting at position 3082 of SEQ ID NO: 1562562
gggucuguuaauugccaaa

SEQ ID NO: 1756334 - RNA, 19 nt, Artificial Sequence
  Description of Artificial Sequence: Synthetic oligonucleotide
  Antisense strand to SEQ ID NO: 1756333
uuuggcaauuaacagaccc

SEQ ID NO: 1756335 - RNA, 19 nt, Artificial Sequence
  Description of Artificial Sequence: Synthetic oligonucleotide
  Sense strand starting at position 3084 of SEQ ID NO: 1562562
gucuguuaauugccaaaua

SEQ ID NO: 1756336 - RNA, 19 nt, Artificial Sequence
  Description of Artificial Sequence: Synthetic oligonucleotide
  Antisense strand to SEQ ID NO: 1756335
uauuuggcaauuaacagac

SEQ ID NO: 1756337 - RNA, 19 nt, Artificial Sequence
  Description of Artificial Sequence: Synthetic oligonucleotide
  Sense strand starting at position 3109 of SEQ ID NO: 1562562
uugaaaguuguaugcacua

SEQ ID NO: 1756338 - RNA, 19 nt, Artificial Sequence
  Description of Artificial Sequence: Synthetic oligonucleotide
  Antisense strand to SEQ ID NO: 1756337
uagugcauacaacuuucaa

SEQ ID NO: 1756339 - RNA, 19 nt, Artificial Sequence
  Description of Artificial Sequence: Synthetic oligonucleotide
  Sense strand starting at position 3114 of SEQ ID NO: 1562562
aguuguaugcacuagguaa

SEQ ID NO: 1756340 - RNA, 19 nt, Artificial Sequence
  Description of Artificial Sequence: Synthetic oligonucleotide
  Antisense strand to SEQ ID NO: 1756339
uuaccuagugcauacaacu

SEQ ID NO: 1756341 - RNA, 19 nt, Artificial Sequence
  Description of Artificial Sequence: Synthetic oligonucleotide
  Sense strand starting at position 3139 of SEQ ID NO: 1562562
uuauguaauguuuggaagu

SEQ ID NO: 1756342 - RNA, 19 nt, Artificial Sequence
  Description of Artificial Sequence: Synthetic oligonucleotide
  Antisense strand to SEQ ID NO: 1756341
acuuccaaacauuacauaa

SEQ ID NO: 1756343 - RNA, 19 nt, Artificial Sequence
  Description of Artificial Sequence: Synthetic oligonucleotide
  Sense strand starting at position 3145 of SEQ ID NO: 1562562
aauguuuggaaguauguga

SEQ ID NO: 1756344 - RNA, 19 nt, Artificial Sequence
  Description of Artificial Sequence: Synthetic oligonucleotide
  Antisense strand to SEQ ID NO: 1756343
ucacauacuuccaaacauu

SEQ ID NO: 1756345 - RNA, 19 nt, Artificial Sequence
  Description of Artificial Sequence: Synthetic oligonucleotide
  Sense strand starting at position 3149 of SEQ ID NO: 1562562
uuuggaaguaugugaaaga

SEQ ID NO: 1756346 - RNA, 19 nt, Artificial Sequence
  Description of Artificial Sequence: Synthetic oligonucleotide
  Antisense strand to SEQ ID NO: 1756345
ucuuucacauacuuccaaa

SEQ ID NO: 1756347 - RNA, 19 nt, Artificial Sequence
  Description of Artificial Sequence: Synthetic oligonucleotide
  Sense strand starting at position 3213 of SEQ ID NO: 1562562
agcucuguuguagauuauu

SEQ ID NO: 1756348 - RNA, 19 nt, Artificial Sequence
  Description of Artificial Sequence: Synthetic oligonucleotide
  Antisense strand to SEQ ID NO: 1756347
aauaaucuacaacagagcu

SEQ ID NO: 1756349 - RNA, 19 nt, Artificial Sequence
  Description of Artificial Sequence: Synthetic oligonucleotide
  Sense strand starting at position 3222 of SEQ ID NO: 1562562
guagauuauuaguuugacu

SEQ ID NO: 1756350 - RNA, 19 nt, Artificial Sequence
  Description of Artificial Sequence: Synthetic oligonucleotide
  Antisense strand to SEQ ID NO: 1756349
agucaaacuaauaaucuac

SEQ ID NO: 1756351 - RNA, 19 nt, Artificial Sequence
  Description of Artificial Sequence: Synthetic oligonucleotide
  Sense strand starting at position 3249 of SEQ ID NO: 1562562
gaggacucuuagucuuaca

SEQ ID NO: 1756352 - RNA, 19 nt, Artificial Sequence
  Description of Artificial Sequence: Synthetic oligonucleotide
  Antisense strand to SEQ ID NO: 1756351
uguaagacuaagaguccuc

SEQ ID NO: 1756353 - RNA, 19 nt, Artificial Sequence
  Description of Artificial Sequence: Synthetic oligonucleotide
  Sense strand starting at position 3571 of SEQ ID NO: 1562562
cucccaaugugcuuggaua

SEQ ID NO: 1756354 - RNA, 19 nt, Artificial Sequence
  Description of Artificial Sequence: Synthetic oligonucleotide
  Antisense strand to SEQ ID NO: 1756353
uauccaagcacauugggag

SEQ ID NO: 1756355 - RNA, 19 nt, Artificial Sequence
  Description of Artificial Sequence: Synthetic oligonucleotide
  Sense strand starting at position 3572 of SEQ ID NO: 1562562
ucccaaugugcuuggauaa

SEQ ID NO: 1756356 - RNA, 19 nt, Artificial Sequence
  Description of Artificial Sequence: Synthetic oligonucleotide
  Antisense strand to SEQ ID NO: 1756355
uuauccaagcacauuggga

SEQ ID NO: 1756357 - RNA, 19 nt, Artificial Sequence
  Description of Artificial Sequence: Synthetic oligonucleotide
  Sense strand starting at position 3614 of SEQ ID NO: 1562562
ccuaaagagugucuguauu

SEQ ID NO: 1756358 - RNA, 19 nt, Artificial Sequence
  Description of Artificial Sequence: Synthetic oligonucleotide
  Antisense strand to SEQ ID NO: 1756357
aauacagacacucuuuagg

SEQ ID NO: 1756359 - RNA, 19 nt, Artificial Sequence
  Description of Artificial Sequence: Synthetic oligonucleotide
  Sense strand starting at position 3656 of SEQ ID NO: 1562562
caaagugacuguucugaag

SEQ ID NO: 1756360 - RNA, 19 nt, Artificial Sequence
  Description of Artificial Sequence: Synthetic oligonucleotide
  Antisense strand to SEQ ID NO: 1756359
cuucagaacagucacuuug

SEQ ID NO: 1756361 - RNA, 19 nt, Artificial Sequence
  Description of Artificial Sequence: Synthetic oligonucleotide
  Sense strand starting at position 3662 of SEQ ID NO: 1562562
gacuguucugaagguagaa

SEQ ID NO: 1756362 - RNA, 19 nt, Artificial Sequence
  Description of Artificial Sequence: Synthetic oligonucleotide
  Antisense strand to SEQ ID NO: 1756361
uucuaccuucagaacaguc

SEQ ID NO: 1756363 - RNA, 19 nt, Artificial Sequence
  Description of Artificial Sequence: Synthetic oligonucleotide
  Sense strand starting at position 3680 of SEQ ID NO: 1562562
aggcaacagugauuauaag

SEQ ID NO: 1756364 - RNA, 19 nt, Artificial Sequence
  Description of Artificial Sequence: Synthetic oligonucleotide
  Antisense strand to SEQ ID NO: 1756363
cuuauaaucacuguugccu

SEQ ID NO: 1756365 - RNA, 19 nt, Artificial Sequence
  Description of Artificial Sequence: Synthetic oligonucleotide
  Sense strand starting at position 3681 of SEQ ID NO: 1562562
ggcaacagugauuauaagu

SEQ ID NO: 1756366 - RNA, 19 nt, Artificial Sequence
  Description of Artificial Sequence: Synthetic oligonucleotide
  Antisense strand to SEQ ID NO: 1756365
acuuauaaucacuguugcc

SEQ ID NO: 1756367 - RNA, 19 nt, Artificial Sequence
  Description of Artificial Sequence: Synthetic oligonucleotide
  Sense strand starting at position 3746 of SEQ ID NO: 1562562
gagugugugcuguuauccu

SEQ ID NO: 1756368 - RNA, 19 nt, Artificial Sequence
  Description of Artificial Sequence: Synthetic oligonucleotide
  Antisense strand to SEQ ID NO: 1756367
aggauaacagcacacacuc

SEQ ID NO: 1756369 - RNA, 19 nt, Artificial Sequence
  Description of Artificial Sequence: Synthetic oligonucleotide
  Sense strand starting at position 3751 of SEQ ID NO: 1562562
ugugcuguuauccuaguuu

SEQ ID NO: 1756370 - RNA, 19 nt, Artificial Sequence
  Description of Artificial Sequence: Synthetic oligonucleotide
  Antisense strand to SEQ ID NO: 1756369
aaacuaggauaacagcaca

SEQ ID NO: 1756371 - RNA, 19 nt, Artificial Sequence
  Description of Artificial Sequence: Synthetic oligonucleotide
  Sense strand starting at position 3910 of SEQ ID NO: 1562562
auuggugucucugcuuuga

SEQ ID NO: 1756372 - RNA, 19 nt, Artificial Sequence
  Description of Artificial Sequence: Synthetic oligonucleotide
  Antisense strand to SEQ ID NO: 1756371
ucaaagcagagacaccaau

SEQ ID NO: 1756373 - RNA, 19 nt, Artificial Sequence
  Description of Artificial Sequence: Synthetic oligonucleotide
  Sense strand starting at position 3921 of SEQ ID NO: 1562562
ugcuuugagcuauaugauc

SEQ ID NO: 1756374 - RNA, 19 nt, Artificial Sequence
  Description of Artificial Sequence: Synthetic oligonucleotide
  Antisense strand to SEQ ID NO: 1756373
gaucauauagcucaaagca

SEQ ID NO: 1756375 - RNA, 19 nt, Artificial Sequence
  Description of Artificial Sequence: Synthetic oligonucleotide
  Sense strand starting at position 3926 of SEQ ID NO: 1562562
ugagcuauaugaucaggcu

SEQ ID NO: 1756376 - RNA, 19 nt, Artificial Sequence
  Description of Artificial Sequence: Synthetic oligonucleotide
  Antisense strand to SEQ ID NO: 1756375
agccugaucauauagcuca

SEQ ID NO: 1756377 - RNA, 19 nt, Artificial Sequence
  Description of Artificial Sequence: Synthetic oligonucleotide
  Sense strand starting at position 3927 of SEQ ID NO: 1562562
gagcuauaugaucaggcuu

SEQ ID NO: 1756378 - RNA, 19 nt, Artificial Sequence
  Description of Artificial Sequence: Synthetic oligonucleotide
  Antisense strand to SEQ ID NO: 1756377
aagccugaucauauagcuc

SEQ ID NO: 1756379 - RNA, 19 nt, Artificial Sequence
  Description of Artificial Sequence: Synthetic oligonucleotide
  Sense strand starting at position 183 of SEQ ID NO: 1562563
ccugguguuccacacaaac

SEQ ID NO: 1756380 - RNA, 19 nt, Artificial Sequence
  Description of Artificial Sequence: Synthetic oligonucleotide
  Antisense strand to SEQ ID NO: 1756379
guuuguguggaacaccagg

SEQ ID NO: 1756381 - RNA, 19 nt, Artificial Sequence
  Description of Artificial Sequence: Synthetic oligonucleotide
  Sense strand starting at position 204 of SEQ ID NO: 1562563
ccuggagauucugccaauc

SEQ ID NO: 1756382 - RNA, 19 nt, Artificial Sequence
  Description of Artificial Sequence: Synthetic oligonucleotide
  Antisense strand to SEQ ID NO: 1756381
gauuggcagaaucuccagg

SEQ ID NO: 1756383 - RNA, 19 nt, Artificial Sequence
  Description of Artificial Sequence: Synthetic oligonucleotide
  Sense strand starting at position 206 of SEQ ID NO: 1562563
uggagauucugccaauccu

SEQ ID NO: 1756384 - RNA, 19 nt, Artificial Sequence
  Description of Artificial Sequence: Synthetic oligonucleotide
  Antisense strand to SEQ ID NO: 1756383
aggauuggcagaaucucca

SEQ ID NO: 1756385 - RNA, 19 nt, Artificial Sequence
  Description of Artificial Sequence: Synthetic oligonucleotide
  Sense strand starting at position 348 of SEQ ID NO: 1562563
uuuggaguuuauccucuaa

SEQ ID NO: 1756386 - RNA, 19 nt, Artificial Sequence
  Description of Artificial Sequence: Synthetic oligonucleotide
  Antisense strand to SEQ ID NO: 1756385
uuagaggauaaacuccaaa

SEQ ID NO: 1756387 - RNA, 19 nt, Artificial Sequence
  Description of Artificial Sequence: Synthetic oligonucleotide
  Sense strand starting at position 350 of SEQ ID NO: 1562563
uggaguuuauccucuaaua

SEQ ID NO: 1756388 - RNA, 19 nt, Artificial Sequence
  Description of Artificial Sequence: Synthetic oligonucleotide
  Antisense strand to SEQ ID NO: 1756387
uauuagaggauaaacucca

SEQ ID NO: 1756389 - RNA, 19 nt, Artificial Sequence
  Description of Artificial Sequence: Synthetic oligonucleotide
  Sense strand starting at position 516 of SEQ ID NO: 1562563
cuagcaguuugagacuaca

SEQ ID NO: 1756390 - RNA, 19 nt, Artificial Sequence
  Description of Artificial Sequence: Synthetic oligonucleotide
  Antisense strand to SEQ ID NO: 1756389
uguagucucaaacugcuag

SEQ ID NO: 1756391 - RNA, 19 nt, Artificial Sequence
  Description of Artificial Sequence: Synthetic oligonucleotide
  Sense strand starting at position 659 of SEQ ID NO: 1562563
uccuuuguauuccuuugau

SEQ ID NO: 1756392 - RNA, 19 nt, Artificial Sequence
  Description of Artificial Sequence: Synthetic oligonucleotide
  Antisense strand to SEQ ID NO: 1756391
aucaaaggaauacaaagga

SEQ ID NO: 1756393 - RNA, 19 nt, Artificial Sequence
  Description of Artificial Sequence: Synthetic oligonucleotide
  Sense strand starting at position 745 of SEQ ID NO: 1562563
aagguuugaggcuggaaga

SEQ ID NO: 1756394 - RNA, 19 nt, Artificial Sequence
  Description of Artificial Sequence: Synthetic oligonucleotide
  Antisense strand to SEQ ID NO: 1756393
ucuuccagccucaaaccuu

SEQ ID NO: 1756395 - RNA, 19 nt, Artificial Sequence
  Description of Artificial Sequence: Synthetic oligonucleotide
  Sense strand starting at position 934 of SEQ ID NO: 1562563
ggguuauuugcugagugca

SEQ ID NO: 1756396 - RNA, 19 nt, Artificial Sequence
  Description of Artificial Sequence: Synthetic oligonucleotide
  Antisense strand to SEQ ID NO: 1756395
ugcacucagcaaauaaccc

SEQ ID NO: 1756397 - RNA, 19 nt, Artificial Sequence
  Description of Artificial Sequence: Synthetic oligonucleotide
  Sense strand starting at position 980 of SEQ ID NO: 1562563
ggaacaaucacucgacguu

SEQ ID NO: 1756398 - RNA, 19 nt, Artificial Sequence
  Description of Artificial Sequence: Synthetic oligonucleotide
  Antisense strand to SEQ ID NO: 1756397
aacgucgagugauuguucc

SEQ ID NO: 1756399 - RNA, 19 nt, Artificial Sequence
  Description of Artificial Sequence: Synthetic oligonucleotide
  Sense strand starting at position 1021 of SEQ ID NO: 1562563
agagggugucgugagggaa

SEQ ID NO: 1756400 - RNA, 19 nt, Artificial Sequence
  Description of Artificial Sequence: Synthetic oligonucleotide
  Antisense strand to SEQ ID NO: 1756399
uucccucacgacacccucu

SEQ ID NO: 1756401 - RNA, 19 nt, Artificial Sequence
  Description of Artificial Sequence: Synthetic oligonucleotide
  Sense strand starting at position 1122 of SEQ ID NO: 1562563
ccggaugacaggugaugaa

SEQ ID NO: 1756402 - RNA, 19 nt, Artificial Sequence
  Description of Artificial Sequence: Synthetic oligonucleotide
  Antisense strand to SEQ ID NO: 1756401
uucaucaccugucauccgg

SEQ ID NO: 1756403 - RNA, 19 nt, Artificial Sequence
  Description of Artificial Sequence: Synthetic oligonucleotide
  Sense strand starting at position 1125 of SEQ ID NO: 1562563
gaugacaggugaugaaacu

SEQ ID NO: 1756404 - RNA, 19 nt, Artificial Sequence
  Description of Artificial Sequence: Synthetic oligonucleotide
  Antisense strand to SEQ ID NO: 1756403
aguuucaucaccugucauc

SEQ ID NO: 1756405 - RNA, 19 nt, Artificial Sequence
  Description of Artificial Sequence: Synthetic oligonucleotide
  Sense strand starting at position 1773 of SEQ ID NO: 1562563
aaaugucgccuccagaaca

SEQ ID NO: 1756406 - RNA, 19 nt, Artificial Sequence
  Description of Artificial Sequence: Synthetic oligonucleotide
  Antisense strand to SEQ ID NO: 1756405
uguucuggaggcgacauuu

SEQ ID NO: 1756407 - RNA, 19 nt, Artificial Sequence
  Description of Artificial Sequence: Synthetic oligonucleotide
  Sense strand starting at position 2283 of SEQ ID NO: 1562563
aggguugaguaccucgaua

SEQ ID NO: 1756408 - RNA, 19 nt, Artificial Sequence
  Description of Artificial Sequence: Synthetic oligonucleotide
  Antisense strand to SEQ ID NO: 1756407
uaucgagguacucaacccu

SEQ ID NO: 1756409 - RNA, 19 nt, Artificial Sequence
  Description of Artificial Sequence: Synthetic oligonucleotide
  Sense strand starting at position 2285 of SEQ ID NO: 1562563
gguugaguaccucgauauu

SEQ ID NO: 1756410 - RNA, 19 nt, Artificial Sequence
  Description of Artificial Sequence: Synthetic oligonucleotide
  Antisense strand to SEQ ID NO: 1756409
aauaucgagguacucaacc

SEQ ID NO: 1756411 - RNA, 19 nt, Artificial Sequence
  Description of Artificial Sequence: Synthetic oligonucleotide
  Sense strand starting at position 2288 of SEQ ID NO: 1562563
ugaguaccucgauauucug

SEQ ID NO: 1756412 - RNA, 19 nt, Artificial Sequence
  Description of Artificial Sequence: Synthetic oligonucleotide
  Antisense strand to SEQ ID NO: 1756411
cagaauaucgagguacuca

SEQ ID NO: 1756413 - RNA, 19 nt, Artificial Sequence
  Description of Artificial Sequence: Synthetic oligonucleotide
  Sense strand starting at position 2295 of SEQ ID NO: 1562563
cucgauauucugcagugga

SEQ ID NO: 1756414 - RNA, 19 nt, Artificial Sequence
  Description of Artificial Sequence: Synthetic oligonucleotide
  Antisense strand to SEQ ID NO: 1756413
uccacugcagaauaucgag

SEQ ID NO: 1756415 - RNA, 19 nt, Artificial Sequence
  Description of Artificial Sequence: Synthetic oligonucleotide
  Sense strand starting at position 2298 of SEQ ID NO: 1562563
gauauucugcaguggagaa

SEQ ID NO: 1756416 - RNA, 19 nt, Artificial Sequence
  Description of Artificial Sequence: Synthetic oligonucleotide
  Antisense strand to SEQ ID NO: 1756415
uucuccacugcagaauauc

SEQ ID NO: 1756417 - RNA, 19 nt, Artificial Sequence
  Description of Artificial Sequence: Synthetic oligonucleotide
  Sense strand starting at position 2418 of SEQ ID NO: 1562563
uccaguuauuugcuguauc

SEQ ID NO: 1756418 - RNA, 19 nt, Artificial Sequence
  Description of Artificial Sequence: Synthetic oligonucleotide
  Antisense strand to SEQ ID NO: 1756417
gauacagcaaauaacugga

SEQ ID NO: 1756419 - RNA, 19 nt, Artificial Sequence
  Description of Artificial Sequence: Synthetic oligonucleotide
  Sense strand starting at position 2421 of SEQ ID NO: 1562563
aguuauuugcuguauccuu

SEQ ID NO: 1756420 - RNA, 19 nt, Artificial Sequence
  Description of Artificial Sequence: Synthetic oligonucleotide
  Antisense strand to SEQ ID NO: 1756419
aaggauacagcaaauaacu

SEQ ID NO: 1756421 - RNA, 19 nt, Artificial Sequence
  Description of Artificial Sequence: Synthetic oligonucleotide
  Sense strand starting at position 2525 of SEQ ID NO: 1562563
augugagaaauuggaaugu

SEQ ID NO: 1756422 - RNA, 19 nt, Artificial Sequence
  Description of Artificial Sequence: Synthetic oligonucleotide
  Antisense strand to SEQ ID NO: 1756421
acauuccaauuucucacau

SEQ ID NO: 1756423 - RNA, 19 nt, Artificial Sequence
  Description of Artificial Sequence: Synthetic oligonucleotide
  Sense strand starting at position 2549 of SEQ ID NO: 1562563
acacaauucguguaucaua

SEQ ID NO: 1756424 - RNA, 19 nt, Artificial Sequence
  Description of Artificial Sequence: Synthetic oligonucleotide
  Antisense strand to SEQ ID NO: 1756423
uaugauacacgaauugugu

SEQ ID NO: 1756425 - RNA, 19 nt, Artificial Sequence
  Description of Artificial Sequence: Synthetic oligonucleotide
  Sense strand starting at position 2597 of SEQ ID NO: 1562563
ccauguuuccagcauguca

SEQ ID NO: 1756426 - RNA, 19 nt, Artificial Sequence
  Description of Artificial Sequence: Synthetic oligonucleotide
  Antisense strand to SEQ ID NO: 1756425
ugacaugcuggaaacaugg

SEQ ID NO: 1756427 - RNA, 19 nt, Artificial Sequence
  Description of Artificial Sequence: Synthetic oligonucleotide
  Sense strand starting at position 2599 of SEQ ID NO: 1562563
auguuuccagcaugucaca

SEQ ID NO: 1756428 - RNA, 19 nt, Artificial Sequence
  Description of Artificial Sequence: Synthetic oligonucleotide
  Antisense strand to SEQ ID NO: 1756427
ugugacaugcuggaaacau

SEQ ID NO: 1756429 - RNA, 19 nt, Artificial Sequence
  Description of Artificial Sequence: Synthetic oligonucleotide
  Sense strand starting at position 2632 of SEQ ID NO: 1562563
aguucuuacuccucuggga

SEQ ID NO: 1756430 - RNA, 19 nt, Artificial Sequence
  Description of Artificial Sequence: Synthetic oligonucleotide
  Antisense strand to SEQ ID NO: 1756429
ucccagaggaguaagaacu

SEQ ID NO: 1756431 - RNA, 19 nt, Artificial Sequence
  Description of Artificial Sequence: Synthetic oligonucleotide
  Sense strand starting at position 2634 of SEQ ID NO: 1562563
uucuuacuccucugggaca

SEQ ID NO: 1756432 - RNA, 19 nt, Artificial Sequence
  Description of Artificial Sequence: Synthetic oligonucleotide
  Antisense strand to SEQ ID NO: 1756431
ugucccagaggaguaagaa

SEQ ID NO: 1756433 - RNA, 19 nt, Artificial Sequence
  Description of Artificial Sequence: Synthetic oligonucleotide
  Sense strand starting at position 2680 of SEQ ID NO: 1562563
gggugacuucuugagugcu

SEQ ID NO: 1756434 - RNA, 19 nt, Artificial Sequence
  Description of Artificial Sequence: Synthetic oligonucleotide
  Antisense strand to SEQ ID NO: 1756433
agcacucaagaagucaccc

SEQ ID NO: 1756435 - RNA, 19 nt, Artificial Sequence
  Description of Artificial Sequence: Synthetic oligonucleotide
  Sense strand starting at position 2732 of SEQ ID NO: 1562563
ugcccaagccacugagaaa

SEQ ID NO: 1756436 - RNA, 19 nt, Artificial Sequence
  Description of Artificial Sequence: Synthetic oligonucleotide
  Antisense strand to SEQ ID NO: 1756435
uuucucaguggcuugggca

SEQ ID NO: 1756437 - RNA, 19 nt, Artificial Sequence
  Description of Artificial Sequence: Synthetic oligonucleotide
  Sense strand starting at position 2760 of SEQ ID NO: 1562563
cuauccuagcccugagaaa

SEQ ID NO: 1756438 - RNA, 19 nt, Artificial Sequence
  Description of Artificial Sequence: Synthetic oligonucleotide
  Antisense strand to SEQ ID NO: 1756437
uuucucagggcuaggauag

SEQ ID NO: 1756439 - RNA, 19 nt, Artificial Sequence
  Description of Artificial Sequence: Synthetic oligonucleotide
  Sense strand starting at position 2789 of SEQ ID NO: 1562563
cucaaugggugcccaauaa

SEQ ID NO: 1756440 - RNA, 19 nt, Artificial Sequence
  Description of Artificial Sequence: Synthetic oligonucleotide
  Antisense strand to SEQ ID NO: 1756439
uuauugggcacccauugag

SEQ ID NO: 1756441 - RNA, 19 nt, Artificial Sequence
  Description of Artificial Sequence: Synthetic oligonucleotide
  Sense strand starting at position 2993 of SEQ ID NO: 1562563
ccauucucccugggucauu

SEQ ID NO: 1756442 - RNA, 19 nt, Artificial Sequence
  Description of Artificial Sequence: Synthetic oligonucleotide
  Antisense strand to SEQ ID NO: 1756441
aaugacccagggagaaugg

SEQ ID NO: 1756443 - RNA, 19 nt, Artificial Sequence
  Description of Artificial Sequence: Synthetic oligonucleotide
  Sense strand starting at position 3002 of SEQ ID NO: 1562563
cugggucauucccaucaca

SEQ ID NO: 1756444 - RNA, 19 nt, Artificial Sequence
  Description of Artificial Sequence: Synthetic oligonucleotide
  Antisense strand to SEQ ID NO: 1756443
ugugaugggaaugacccag

SEQ ID NO: 1756445 - RNA, 19 nt, Artificial Sequence
  Description of Artificial Sequence: Synthetic oligonucleotide
  Sense strand starting at position 3021 of SEQ ID NO: 1562563
ggcuguuacuucucccauc

SEQ ID NO: 1756446 - RNA, 19 nt, Artificial Sequence
  Description of Artificial Sequence: Synthetic oligonucleotide
  Antisense strand to SEQ ID NO: 1756445
gaugggagaaguaacagcc

SEQ ID NO: 1756447 - RNA, 19 nt, Artificial Sequence
  Description of Artificial Sequence: Synthetic oligonucleotide
  Sense strand starting at position 3111 of SEQ ID NO: 1562563
caggucaccugagaucaga

SEQ ID NO: 1756448 - RNA, 19 nt, Artificial Sequence
  Description of Artificial Sequence: Synthetic oligonucleotide
  Antisense strand to SEQ ID NO: 1756447
ucugaucucaggugaccug

SEQ ID NO: 1756449 - RNA, 19 nt, Artificial Sequence
  Description of Artificial Sequence: Synthetic oligonucleotide
  Sense strand starting at position 3191 of SEQ ID NO: 1562563
uggacaugcucacuugaac

SEQ ID NO: 1756450 - RNA, 19 nt, Artificial Sequence
  Description of Artificial Sequence: Synthetic oligonucleotide
  Antisense strand to SEQ ID NO: 1756449
guucaagugagcaugucca

SEQ ID NO: 1756451 - RNA, 19 nt, Artificial Sequence
  Description of Artificial Sequence: Synthetic oligonucleotide
  Sense strand starting at position 3382 of SEQ ID NO: 1562563
agaagagacucacucuguu

SEQ ID NO: 1756452 - RNA, 19 nt, Artificial Sequence
  Description of Artificial Sequence: Synthetic oligonucleotide
  Antisense strand to SEQ ID NO: 1756451
aacagagugagucucuucu

SEQ ID NO: 1756453 - RNA, 19 nt, Artificial Sequence
  Description of Artificial Sequence: Synthetic oligonucleotide
  Sense strand starting at position 3619 of SEQ ID NO: 1562563
caguguggugauuacagau

SEQ ID NO: 1756454 - RNA, 19 nt, Artificial Sequence
  Description of Artificial Sequence: Synthetic oligonucleotide
  Antisense strand to SEQ ID NO: 1756453
aucuguaaucaccacacug

SEQ ID NO: 1756455 - RNA, 19 nt, Artificial Sequence
  Description of Artificial Sequence: Synthetic oligonucleotide
  Sense strand starting at position 3723 of SEQ ID NO: 1562563
agagaaacuuuguauugcu

SEQ ID NO: 1756456 - RNA, 19 nt, Artificial Sequence
  Description of Artificial Sequence: Synthetic oligonucleotide
  Antisense strand to SEQ ID NO: 1756455
agcaauacaaaguuucucu

SEQ ID NO: 1756457 - RNA, 19 nt, Artificial Sequence
  Description of Artificial Sequence: Synthetic oligonucleotide
  Sense strand starting at position 3756 of SEQ ID NO: 1562563
accaguaucucagagacua

SEQ ID NO: 1756458 - RNA, 19 nt, Artificial Sequence
  Description of Artificial Sequence: Synthetic oligonucleotide
  Antisense strand to SEQ ID NO: 1756457
uagucucugagauacuggu

SEQ ID NO: 1756459 - RNA, 19 nt, Artificial Sequence
  Description of Artificial Sequence: Synthetic oligonucleotide
  Sense strand starting at position 605 of SEQ ID NO: 1562564
agagauaauuaggugcaaa

SEQ ID NO: 1756460 - RNA, 19 nt, Artificial Sequence
  Description of Artificial Sequence: Synthetic oligonucleotide
  Antisense strand to SEQ ID NO: 1756459
uuugcaccuaauuaucucu

SEQ ID NO: 1756461 - RNA, 19 nt, Artificial Sequence
  Description of Artificial Sequence: Synthetic oligonucleotide
  Sense strand starting at position 629 of SEQ ID NO: 1562564
ucccuuagcccggaauuga

SEQ ID NO: 1756462 - RNA, 19 nt, Artificial Sequence
  Description of Artificial Sequence: Synthetic oligonucleotide
  Antisense strand to SEQ ID NO: 1756461
ucaauuccgggcuaaggga

SEQ ID NO: 1756463 - RNA, 19 nt, Artificial Sequence
  Description of Artificial Sequence: Synthetic oligonucleotide
  Sense strand starting at position 788 of SEQ ID NO: 1562564
cugagaguacaacgcauaa

SEQ ID NO: 1756464 - RNA, 19 nt, Artificial Sequence
  Description of Artificial Sequence: Synthetic oligonucleotide
  Antisense strand to SEQ ID NO: 1756463
uuaugcguuguacucucag

SEQ ID NO: 1756465 - RNA, 19 nt, Artificial Sequence
  Description of Artificial Sequence: Synthetic oligonucleotide
  Sense strand starting at position 896 of SEQ ID NO: 1562564
acagaugcuugcuugauuu

SEQ ID NO: 1756466 - RNA, 19 nt, Artificial Sequence
  Description of Artificial Sequence: Synthetic oligonucleotide
  Antisense strand to SEQ ID NO: 1756465
aaaucaagcaagcaucugu

SEQ ID NO: 1756467 - RNA, 19 nt, Artificial Sequence
  Description of Artificial Sequence: Synthetic oligonucleotide
  Sense strand starting at position 926 of SEQ ID NO: 1562564
guacacauuugacauugaa

SEQ ID NO: 1756468 - RNA, 19 nt, Artificial Sequence
  Description of Artificial Sequence: Synthetic oligonucleotide
  Antisense strand to SEQ ID NO: 1756467
uucaaugucaaauguguac

SEQ ID NO: 1756469 - RNA, 19 nt, Artificial Sequence
  Description of Artificial Sequence: Synthetic oligonucleotide
  Sense strand starting at position 1005 of SEQ ID NO: 1562564
ucagucagcuuucuagaua

SEQ ID NO: 1756470 - RNA, 19 nt, Artificial Sequence
  Description of Artificial Sequence: Synthetic oligonucleotide
  Antisense strand to SEQ ID NO: 1756469
uaucuagaaagcugacuga

SEQ ID NO: 1756471 - RNA, 19 nt, Artificial Sequence
  Description of Artificial Sequence: Synthetic oligonucleotide
  Sense strand starting at position 1183 of SEQ ID NO: 1562564
caagaacugagugguggua

SEQ ID NO: 1756472 - RNA, 19 nt, Artificial Sequence
  Description of Artificial Sequence: Synthetic oligonucleotide
  Antisense strand to SEQ ID NO: 1756471
uaccaccacucaguucuug

SEQ ID NO: 1756473 - RNA, 19 nt, Artificial Sequence
  Description of Artificial Sequence: Synthetic oligonucleotide
  Sense strand starting at position 1357 of SEQ ID NO: 1562564
ucaaaucuugugcaaaggu

SEQ ID NO: 1756474 - RNA, 19 nt, Artificial Sequence
  Description of Artificial Sequence: Synthetic oligonucleotide
  Antisense strand to SEQ ID NO: 1756473
accuuugcacaagauuuga

SEQ ID NO: 1756475 - RNA, 19 nt, Artificial Sequence
  Description of Artificial Sequence: Synthetic oligonucleotide
  Sense strand starting at position 1401 of SEQ ID NO: 1562564
uacguaugggcccagaaga

SEQ ID NO: 1756476 - RNA, 19 nt, Artificial Sequence
  Description of Artificial Sequence: Synthetic oligonucleotide
  Antisense strand to SEQ ID NO: 1756475
ucuucugggcccauacgua

SEQ ID NO: 1756477 - RNA, 19 nt, Artificial Sequence
  Description of Artificial Sequence: Synthetic oligonucleotide
  Sense strand starting at position 1478 of SEQ ID NO: 1562564
cuaguuucuucuccagacu

SEQ ID NO: 1756478 - RNA, 19 nt, Artificial Sequence
  Description of Artificial Sequence: Synthetic oligonucleotide
  Antisense strand to SEQ ID NO: 1756477
agucuggagaagaaacuag

SEQ ID NO: 1756479 - RNA, 19 nt, Artificial Sequence
  Description of Artificial Sequence: Synthetic oligonucleotide
  Sense strand starting at position 1481 of SEQ ID NO: 1562564
guuucuucuccagacucca

SEQ ID NO: 1756480 - RNA, 19 nt, Artificial Sequence
  Description of Artificial Sequence: Synthetic oligonucleotide
  Antisense strand to SEQ ID NO: 1756479
uggagucuggagaagaaac

SEQ ID NO: 1756481 - RNA, 19 nt, Artificial Sequence
  Description of Artificial Sequence: Synthetic oligonucleotide
  Sense strand starting at position 1608 of SEQ ID NO: 1562564
uuguccucaccuugaggaa

SEQ ID NO: 1756482 - RNA, 19 nt, Artificial Sequence
  Description of Artificial Sequence: Synthetic oligonucleotide
  Antisense strand to SEQ ID NO: 1756481
uuccucaaggugaggacaa

SEQ ID NO: 1756483 - RNA, 19 nt, Artificial Sequence
  Description of Artificial Sequence: Synthetic oligonucleotide
  Sense strand starting at position 1609 of SEQ ID NO: 1562564
uguccucaccuugaggaau

SEQ ID NO: 1756484 - RNA, 19 nt, Artificial Sequence
  Description of Artificial Sequence: Synthetic oligonucleotide
  Antisense strand to SEQ ID NO: 1756483
auuccucaaggugaggaca

SEQ ID NO: 1756485 - RNA, 19 nt, Artificial Sequence
  Description of Artificial Sequence: Synthetic oligonucleotide
  Sense strand starting at position 1992 of SEQ ID NO: 1562564
caaagaugaggucgcauua

SEQ ID NO: 1756486 - RNA, 19 nt, Artificial Sequence
  Description of Artificial Sequence: Synthetic oligonucleotide
  Antisense strand to SEQ ID NO: 1756485
uaaugcgaccucaucuuug

SEQ ID NO: 1756487 - RNA, 19 nt, Artificial Sequence
  Description of Artificial Sequence: Synthetic oligonucleotide
  Sense strand starting at position 2238 of SEQ ID NO: 1562564
aguuaucuccgccauccaa

SEQ ID NO: 1756488 - RNA, 19 nt, Artificial Sequence
  Description of Artificial Sequence: Synthetic oligonucleotide
  Antisense strand to SEQ ID NO: 1756487
uuggauggcggagauaacu

SEQ ID NO: 1756489 - RNA, 19 nt, Artificial Sequence
  Description of Artificial Sequence: Synthetic oligonucleotide
  Sense strand starting at position 2250 of SEQ ID NO: 1562564
cauccaaaucugggagagu

SEQ ID NO: 1756490 - RNA, 19 nt, Artificial Sequence
  Description of Artificial Sequence: Synthetic oligonucleotide
  Antisense strand to SEQ ID NO: 1756489
acucucccagauuuggaug

SEQ ID NO: 1756491 - RNA, 19 nt, Artificial Sequence
  Description of Artificial Sequence: Synthetic oligonucleotide
  Sense strand starting at position 2429 of SEQ ID NO: 1562564
acggaaguucccgaagcuu

SEQ ID NO: 1756492 - RNA, 19 nt, Artificial Sequence
  Description of Artificial Sequence: Synthetic oligonucleotide
  Antisense strand to SEQ ID NO: 1756491
aagcuucgggaacuuccgu

SEQ ID NO: 1756493 - RNA, 19 nt, Artificial Sequence
  Description of Artificial Sequence: Synthetic oligonucleotide
  Sense strand starting at position 2466 of SEQ ID NO: 1562564
aggagcuauggcuaaacau

SEQ ID NO: 1756494 - RNA, 19 nt, Artificial Sequence
  Description of Artificial Sequence: Synthetic oligonucleotide
  Antisense strand to SEQ ID NO: 1756493
auguuuagccauagcuccu

SEQ ID NO: 1756495 - RNA, 19 nt, Artificial Sequence
  Description of Artificial Sequence: Synthetic oligonucleotide
  Sense strand starting at position 2676 of SEQ ID NO: 1562564
guggccucugaugagaaga

SEQ ID NO: 1756496 - RNA, 19 nt, Artificial Sequence
  Description of Artificial Sequence: Synthetic oligonucleotide
  Antisense strand to SEQ ID NO: 1756495
ucuucucaucagaggccac

SEQ ID NO: 1756497 - RNA, 19 nt, Artificial Sequence
  Description of Artificial Sequence: Synthetic oligonucleotide
  Sense strand starting at position 2911 of SEQ ID NO: 1562564
ggauguacuucuccucuuu

SEQ ID NO: 1756498 - RNA, 19 nt, Artificial Sequence
  Description of Artificial Sequence: Synthetic oligonucleotide
  Antisense strand to SEQ ID NO: 1756497
aaagaggagaaguacaucc

SEQ ID NO: 1756499 - RNA, 19 nt, Artificial Sequence
  Description of Artificial Sequence: Synthetic oligonucleotide
  Sense strand starting at position 3080 of SEQ ID NO: 1562564
gagggcuuugaguagaugu

SEQ ID NO: 1756500 - RNA, 19 nt, Artificial Sequence
  Description of Artificial Sequence: Synthetic oligonucleotide
  Antisense strand to SEQ ID NO: 1756499
acaucuacucaaagcccuc

SEQ ID NO: 1756501 - RNA, 19 nt, Artificial Sequence
  Description of Artificial Sequence: Synthetic oligonucleotide
  Sense strand starting at position 3201 of SEQ ID NO: 1562564
cgggaagaaucgccagagu

SEQ ID NO: 1756502 - RNA, 19 nt, Artificial Sequence
  Description of Artificial Sequence: Synthetic oligonucleotide
  Antisense strand to SEQ ID NO: 1756501
acucuggcgauucuucccg

SEQ ID NO: 1756503 - RNA, 19 nt, Artificial Sequence
  Description of Artificial Sequence: Synthetic oligonucleotide
  Sense strand starting at position 3390 of SEQ ID NO: 1562564
cccuaaagucacugucaaa

SEQ ID NO: 1756504 - RNA, 19 nt, Artificial Sequence
  Description of Artificial Sequence: Synthetic oligonucleotide
  Antisense strand to SEQ ID NO: 1756503
uuugacagugacuuuaggg

SEQ ID NO: 1756505 - RNA, 19 nt, Artificial Sequence
  Description of Artificial Sequence: Synthetic oligonucleotide
  Sense strand starting at position 3416 of SEQ ID NO: 1562564
uaguguauuucccaggaga

SEQ ID NO: 1756506 - RNA, 19 nt, Artificial Sequence
  Description of Artificial Sequence: Synthetic oligonucleotide
  Antisense strand to SEQ ID NO: 1756505
ucuccugggaaauacacua

SEQ ID NO: 1756507 - RNA, 19 nt, Artificial Sequence
  Description of Artificial Sequence: Synthetic oligonucleotide
  Sense strand starting at position 3427 of SEQ ID NO: 1562564
ccaggagacuaguauauuu

SEQ ID NO: 1756508 - RNA, 19 nt, Artificial Sequence
  Description of Artificial Sequence: Synthetic oligonucleotide
  Antisense strand to SEQ ID NO: 1756507
aaauauacuagucuccugg

SEQ ID NO: 1756509 - RNA, 19 nt, Artificial Sequence
  Description of Artificial Sequence: Synthetic oligonucleotide
  Sense strand starting at position 3475 of SEQ ID NO: 1562564
agaacuugugagcaugacu

SEQ ID NO: 1756510 - RNA, 19 nt, Artificial Sequence
  Description of Artificial Sequence: Synthetic oligonucleotide
  Antisense strand to SEQ ID NO: 1756509
agucaugcucacaaguucu

SEQ ID NO: 1756511 - RNA, 19 nt, Artificial Sequence
  Description of Artificial Sequence: Synthetic oligonucleotide
  Sense strand starting at position 3568 of SEQ ID NO: 1562564
auaugugaugaguguaacu

SEQ ID NO: 1756512 - RNA, 19 nt, Artificial Sequence
  Description of Artificial Sequence: Synthetic oligonucleotide
  Antisense strand to SEQ ID NO: 1756511
aguuacacucaucacauau

SEQ ID NO: 1756513 - RNA, 19 nt, Artificial Sequence
  Description of Artificial Sequence: Synthetic oligonucleotide
  Sense strand starting at position 3570 of SEQ ID NO: 1562564
augugaugaguguaacuau

SEQ ID NO: 1756514 - RNA, 19 nt, Artificial Sequence
  Description of Artificial Sequence: Synthetic oligonucleotide
  Antisense strand to SEQ ID NO: 1756513
auaguuacacucaucacau

SEQ ID NO: 1756515 - RNA, 19 nt, Artificial Sequence
  Description of Artificial Sequence: Synthetic oligonucleotide
  Sense strand starting at position 3573 of SEQ ID NO: 1562564
ugaugaguguaacuaugga

SEQ ID NO: 1756516 - RNA, 19 nt, Artificial Sequence
  Description of Artificial Sequence: Synthetic oligonucleotide
  Antisense strand to SEQ ID NO: 1756515
uccauaguuacacucauca

SEQ ID NO: 1756517 - RNA, 19 nt, Artificial Sequence
  Description of Artificial Sequence: Synthetic oligonucleotide
  Sense strand starting at position 3603 of SEQ ID NO: 1562564
gcgcugugugaucugugga

SEQ ID NO: 1756518 - RNA, 19 nt, Artificial Sequence
  Description of Artificial Sequence: Synthetic oligonucleotide
  Antisense strand to SEQ ID NO: 1756517
uccacagaucacacagcgc

SEQ ID NO: 1756519 - RNA, 19 nt, Artificial Sequence
  Description of Artificial Sequence: Synthetic oligonucleotide
  Sense strand starting at position 3606 of SEQ ID NO: 1562564
cugugugaucuguggagga

SEQ ID NO: 1756520 - RNA, 19 nt, Artificial Sequence
  Description of Artificial Sequence: Synthetic oligonucleotide
  Antisense strand to SEQ ID NO: 1756519
uccuccacagaucacacag

SEQ ID NO: 1756521 - RNA, 19 nt, Artificial Sequence
  Description of Artificial Sequence: Synthetic oligonucleotide
  Sense strand starting at position 3748 of SEQ ID NO: 1562564
uccuauggucuauggagau

SEQ ID NO: 1756522 - RNA, 19 nt, Artificial Sequence
  Description of Artificial Sequence: Synthetic oligonucleotide
  Antisense strand to SEQ ID NO: 1756521
aucuccauagaccauagga

SEQ ID NO: 1756523 - RNA, 19 nt, Artificial Sequence
  Description of Artificial Sequence: Synthetic oligonucleotide
  Sense strand starting at position 3778 of SEQ ID NO: 1562564
ucuagucaucuagguuaua

SEQ ID NO: 1756524 - RNA, 19 nt, Artificial Sequence
  Description of Artificial Sequence: Synthetic oligonucleotide
  Antisense strand to SEQ ID NO: 1756523
uauaaccuagaugacuaga

SEQ ID NO: 1756525 - RNA, 19 nt, Artificial Sequence
  Description of Artificial Sequence: Synthetic oligonucleotide
  Sense strand starting at position 3779 of SEQ ID NO: 1562564
cuagucaucuagguuauaa

SEQ ID NO: 1756526 - RNA, 19 nt, Artificial Sequence
  Description of Artificial Sequence: Synthetic oligonucleotide
  Antisense strand to SEQ ID NO: 1756525
uuauaaccuagaugacuag

SEQ ID NO: 1756527 - RNA, 19 nt, Artificial Sequence
  Description of Artificial Sequence: Synthetic oligonucleotide
  Sense strand starting at position 3781 of SEQ ID NO: 1562564
agucaucuagguuauaauu

SEQ ID NO: 1756528 - RNA, 19 nt, Artificial Sequence
  Description of Artificial Sequence: Synthetic oligonucleotide
  Antisense strand to SEQ ID NO: 1756527
aauuauaaccuagaugacu

SEQ ID NO: 1756529 - RNA, 19 nt, Artificial Sequence
  Description of Artificial Sequence: Synthetic oligonucleotide
  Sense strand starting at position 3804 of SEQ ID NO: 1562564
caaguucugugagucaaac

SEQ ID NO: 1756530 - RNA, 19 nt, Artificial Sequence
  Description of Artificial Sequence: Synthetic oligonucleotide
  Antisense strand to SEQ ID NO: 1756529
guuugacucacagaacuug

SEQ ID NO: 1756531 - RNA, 19 nt, Artificial Sequence
  Description of Artificial Sequence: Synthetic oligonucleotide
  Sense strand starting at position 3814 of SEQ ID NO: 1562564
gagucaaacuggguguagu

SEQ ID NO: 1756532 - RNA, 19 nt, Artificial Sequence
  Description of Artificial Sequence: Synthetic oligonucleotide
  Antisense strand to SEQ ID NO: 1756531
acuacacccaguuugacuc

SEQ ID NO: 1756533 - RNA, 19 nt, Artificial Sequence
  Description of Artificial Sequence: Synthetic oligonucleotide
  Sense strand starting at position 3822 of SEQ ID NO: 1562564
cuggguguaguccaauaaa

SEQ ID NO: 1756534 - RNA, 19 nt, Artificial Sequence
  Description of Artificial Sequence: Synthetic oligonucleotide
  Antisense strand to SEQ ID NO: 1756533
uuuauuggacuacacccag

SEQ ID NO: 1756535 - RNA, 19 nt, Artificial Sequence
  Description of Artificial Sequence: Synthetic oligonucleotide
  Sense strand starting at position 3876 of SEQ ID NO: 1562564
ggaagcaaaucuuugucaa

SEQ ID NO: 1756536 - RNA, 19 nt, Artificial Sequence
  Description of Artificial Sequence: Synthetic oligonucleotide
  Antisense strand to SEQ ID NO: 1756535
uugacaaagauuugcuucc

SEQ ID NO: 1756537 - RNA, 19 nt, Artificial Sequence
  Description of Artificial Sequence: Synthetic oligonucleotide
  Sense strand starting at position 3879 of SEQ ID NO: 1562564
agcaaaucuuugucaagac

SEQ ID NO: 1756538 - RNA, 19 nt, Artificial Sequence
  Description of Artificial Sequence: Synthetic oligonucleotide
  Antisense strand to SEQ ID NO: 1756537
gucuugacaaagauuugcu

SEQ ID NO: 1756539 - RNA, 19 nt, Artificial Sequence
  Description of Artificial Sequence: Synthetic oligonucleotide
  Sense strand starting at position 99 of SEQ ID NO: 1562565
uguggaaggccacagugau

SEQ ID NO: 1756540 - RNA, 19 nt, Artificial Sequence
  Description of Artificial Sequence: Synthetic oligonucleotide
  Antisense strand to SEQ ID NO: 1756539
aucacuguggccuuccaca

SEQ ID NO: 1756541 - RNA, 19 nt, Artificial Sequence
  Description of Artificial Sequence: Synthetic oligonucleotide
  Sense strand starting at position 526 of SEQ ID NO: 1562565
acauuacugugggcacaaa

SEQ ID NO: 1756542 - RNA, 19 nt, Artificial Sequence
  Description of Artificial Sequence: Synthetic oligonucleotide
  Antisense strand to SEQ ID NO: 1756541
uuugugcccacaguaaugu

SEQ ID NO: 1756543 - RNA, 19 nt, Artificial Sequence
  Description of Artificial Sequence: Synthetic oligonucleotide
  Sense strand starting at position 1162 of SEQ ID NO: 1562565
ugcagucacagauggagaa

SEQ ID NO: 1756544 - RNA, 19 nt, Artificial Sequence
  Description of Artificial Sequence: Synthetic oligonucleotide
  Antisense strand to SEQ ID NO: 1756543
uucuccaucugugacugca

SEQ ID NO: 1756545 - RNA, 19 nt, Artificial Sequence
  Description of Artificial Sequence: Synthetic oligonucleotide
  Sense strand starting at position 1163 of SEQ ID NO: 1562565
gcagucacagauggagaaa

SEQ ID NO: 1756546 - RNA, 19 nt, Artificial Sequence
  Description of Artificial Sequence: Synthetic oligonucleotide
  Antisense strand to SEQ ID NO: 1756545
uuucuccaucugugacugc

SEQ ID NO: 1756547 - RNA, 19 nt, Artificial Sequence
  Description of Artificial Sequence: Synthetic oligonucleotide
  Sense strand starting at position 1298 of SEQ ID NO: 1562565
gccugagguccuuauaacc

SEQ ID NO: 1756548 - RNA, 19 nt, Artificial Sequence
  Description of Artificial Sequence: Synthetic oligonucleotide
  Antisense strand to SEQ ID NO: 1756547
gguuauaaggaccucaggc

SEQ ID NO: 1756549 - RNA, 19 nt, Artificial Sequence
  Description of Artificial Sequence: Synthetic oligonucleotide
  Sense strand starting at position 1314 of SEQ ID NO: 1562565
accaaucuugggugggaga

SEQ ID NO: 1756550 - RNA, 19 nt, Artificial Sequence
  Description of Artificial Sequence: Synthetic oligonucleotide
  Antisense strand to SEQ ID NO: 1756549
ucucccacccaagauuggu

SEQ ID NO: 1756551 - RNA, 19 nt, Artificial Sequence
  Description of Artificial Sequence: Synthetic oligonucleotide
  Sense strand starting at position 1522 of SEQ ID NO: 1562565
gguaccuuggagugagaga

SEQ ID NO: 1756552 - RNA, 19 nt, Artificial Sequence
  Description of Artificial Sequence: Synthetic oligonucleotide
  Antisense strand to SEQ ID NO: 1756551
ucucucacuccaagguacc

SEQ ID NO: 1756553 - RNA, 19 nt, Artificial Sequence
  Description of Artificial Sequence: Synthetic oligonucleotide
  Sense strand starting at position 1862 of SEQ ID NO: 1562565
guaccugcuccucagaaga

SEQ ID NO: 1756554 - RNA, 19 nt, Artificial Sequence
  Description of Artificial Sequence: Synthetic oligonucleotide
  Antisense strand to SEQ ID NO: 1756553
ucuucugaggagcagguac

SEQ ID NO: 1756555 - RNA, 19 nt, Artificial Sequence
  Description of Artificial Sequence: Synthetic oligonucleotide
  Sense strand starting at position 2117 of SEQ ID NO: 1562565
cugguuugugcugaagaga

SEQ ID NO: 1756556 - RNA, 19 nt, Artificial Sequence
  Description of Artificial Sequence: Synthetic oligonucleotide
  Antisense strand to SEQ ID NO: 1756555
ucucuucagcacaaaccag

SEQ ID NO: 1756557 - RNA, 19 nt, Artificial Sequence
  Description of Artificial Sequence: Synthetic oligonucleotide
  Sense strand starting at position 2120 of SEQ ID NO: 1562565
guuugugcugaagagacuu

SEQ ID NO: 1756558 - RNA, 19 nt, Artificial Sequence
  Description of Artificial Sequence: Synthetic oligonucleotide
  Antisense strand to SEQ ID NO: 1756557
aagucucuucagcacaaac

SEQ ID NO: 1756559 - RNA, 19 nt, Artificial Sequence
  Description of Artificial Sequence: Synthetic oligonucleotide
  Sense strand starting at position 2128 of SEQ ID NO: 1562565
ugaagagacuucuugacuu

SEQ ID NO: 1756560 - RNA, 19 nt, Artificial Sequence
  Description of Artificial Sequence: Synthetic oligonucleotide
  Antisense strand to SEQ ID NO: 1756559
aagucaagaagucucuuca

SEQ ID NO: 1756561 - RNA, 19 nt, Artificial Sequence
  Description of Artificial Sequence: Synthetic oligonucleotide
  Sense strand starting at position 2354 of SEQ ID NO: 1562565
cagugaugagacggugcaa

SEQ ID NO: 1756562 - RNA, 19 nt, Artificial Sequence
  Description of Artificial Sequence: Synthetic oligonucleotide
  Antisense strand to SEQ ID NO: 1756561
uugcaccgucucaucacug

SEQ ID NO: 1756563 - RNA, 19 nt, Artificial Sequence
  Description of Artificial Sequence: Synthetic oligonucleotide
  Sense strand starting at position 2391 of SEQ ID NO: 1562565
gagucagggucagcagauu

SEQ ID NO: 1756564 - RNA, 19 nt, Artificial Sequence
  Description of Artificial Sequence: Synthetic oligonucleotide
  Antisense strand to SEQ ID NO: 1756563
aaucugcugacccugacuc

SEQ ID NO: 1756565 - RNA, 19 nt, Artificial Sequence
  Description of Artificial Sequence: Synthetic oligonucleotide
  Sense strand starting at position 2553 of SEQ ID NO: 1562565
ggucuccuauuauccugaa

SEQ ID NO: 1756566 - RNA, 19 nt, Artificial Sequence
  Description of Artificial Sequence: Synthetic oligonucleotide
  Antisense strand to SEQ ID NO: 1756565
uucaggauaauaggagacc

SEQ ID NO: 1756567 - RNA, 19 nt, Artificial Sequence
  Description of Artificial Sequence: Synthetic oligonucleotide
  Sense strand starting at position 2565 of SEQ ID NO: 1562565
uccugaaugucuccagauc

SEQ ID NO: 1756568 - RNA, 19 nt, Artificial Sequence
  Description of Artificial Sequence: Synthetic oligonucleotide
  Antisense strand to SEQ ID NO: 1756567
gaucuggagacauucagga

SEQ ID NO: 1756569 - RNA, 19 nt, Artificial Sequence
  Description of Artificial Sequence: Synthetic oligonucleotide
  Sense strand starting at position 2620 of SEQ ID NO: 1562565
ccuauacuugaaugucaag

SEQ ID NO: 1756570 - RNA, 19 nt, Artificial Sequence
  Description of Artificial Sequence: Synthetic oligonucleotide
  Antisense strand to SEQ ID NO: 1756569
cuugacauucaaguauagg

SEQ ID NO: 1756571 - RNA, 19 nt, Artificial Sequence
  Description of Artificial Sequence: Synthetic oligonucleotide
  Sense strand starting at position 2722 of SEQ ID NO: 1562565
gugacaaaugcuuauugca

SEQ ID NO: 1756572 - RNA, 19 nt, Artificial Sequence
  Description of Artificial Sequence: Synthetic oligonucleotide
  Antisense strand to SEQ ID NO: 1756571
ugcaauaagcauuugucac

SEQ ID NO: 1756573 - RNA, 19 nt, Artificial Sequence
  Description of Artificial Sequence: Synthetic oligonucleotide
  Sense strand starting at position 2736 of SEQ ID NO: 1562565
uugcaaacaccugaauguu

SEQ ID NO: 1756574 - RNA, 19 nt, Artificial Sequence
  Description of Artificial Sequence: Synthetic oligonucleotide
  Antisense strand to SEQ ID NO: 1756573
aacauucagguguuugcaa

SEQ ID NO: 1756575 - RNA, 19 nt, Artificial Sequence
  Description of Artificial Sequence: Synthetic oligonucleotide
  Sense strand starting at position 2823 of SEQ ID NO: 1562565
cuucuaccugaauguaaga

SEQ ID NO: 1756576 - RNA, 19 nt, Artificial Sequence
  Description of Artificial Sequence: Synthetic oligonucleotide
  Antisense strand to SEQ ID NO: 1756575
ucuuacauucagguagaag

SEQ ID NO: 1756577 - RNA, 19 nt, Artificial Sequence
  Description of Artificial Sequence: Synthetic oligonucleotide
  Sense strand starting at position 2857 of SEQ ID NO: 1562565
gggucaauagguugcacau

SEQ ID NO: 1756578 - RNA, 19 nt, Artificial Sequence
  Description of Artificial Sequence: Synthetic oligonucleotide
  Antisense strand to SEQ ID NO: 1756577
augugcaaccuauugaccc

SEQ ID NO: 1756579 - RNA, 19 nt, Artificial Sequence
  Description of Artificial Sequence: Synthetic oligonucleotide
  Sense strand starting at position 2866 of SEQ ID NO: 1562565
gguugcacaucaucuaagu

SEQ ID NO: 1756580 - RNA, 19 nt, Artificial Sequence
  Description of Artificial Sequence: Synthetic oligonucleotide
  Antisense strand to SEQ ID NO: 1756579
acuuagaugaugugcaacc

SEQ ID NO: 1756581 - RNA, 19 nt, Artificial Sequence
  Description of Artificial Sequence: Synthetic oligonucleotide
  Sense strand starting at position 2876 of SEQ ID NO: 1562565
caucuaagugggugucaga

SEQ ID NO: 1756582 - RNA, 19 nt, Artificial Sequence
  Description of Artificial Sequence: Synthetic oligonucleotide
  Antisense strand to SEQ ID NO: 1756581
ucugacacccacuuagaug

SEQ ID NO: 1756583 - RNA, 19 nt, Artificial Sequence
  Description of Artificial Sequence: Synthetic oligonucleotide
  Sense strand starting at position 2933 of SEQ ID NO: 1562565
ucuccuauuccugaguguu

SEQ ID NO: 1756584 - RNA, 19 nt, Artificial Sequence
  Description of Artificial Sequence: Synthetic oligonucleotide
  Antisense strand to SEQ ID NO: 1756583
aacacucaggaauaggaga

SEQ ID NO: 1756585 - RNA, 19 nt, Artificial Sequence
  Description of Artificial Sequence: Synthetic oligonucleotide
  Sense strand starting at position 2935 of SEQ ID NO: 1562565
uccuauuccugaguguuga

SEQ ID NO: 1756586 - RNA, 19 nt, Artificial Sequence
  Description of Artificial Sequence: Synthetic oligonucleotide
  Antisense strand to SEQ ID NO: 1756585
ucaacacucaggaauagga

SEQ ID NO: 1756587 - RNA, 19 nt, Artificial Sequence
  Description of Artificial Sequence: Synthetic oligonucleotide
  Sense strand starting at position 2965 of SEQ ID NO: 1562565
aucagaugaucuugauuua

SEQ ID NO: 1756588 - RNA, 19 nt, Artificial Sequence
  Description of Artificial Sequence: Synthetic oligonucleotide
  Antisense strand to SEQ ID NO: 1756587
uaaaucaagaucaucugau

SEQ ID NO: 1756589 - RNA, 19 nt, Artificial Sequence
  Description of Artificial Sequence: Synthetic oligonucleotide
  Sense strand starting at position 3037 of SEQ ID NO: 1562565
auaggucucguauaucuua

SEQ ID NO: 1756590 - RNA, 19 nt, Artificial Sequence
  Description of Artificial Sequence: Synthetic oligonucleotide
  Antisense strand to SEQ ID NO: 1756589
uaagauauacgagaccuau

SEQ ID NO: 1756591 - RNA, 19 nt, Artificial Sequence
  Description of Artificial Sequence: Synthetic oligonucleotide
  Sense strand starting at position 3056 of SEQ ID NO: 1562565
cccaguaucagggagugau

SEQ ID NO: 1756592 - RNA, 19 nt, Artificial Sequence
  Description of Artificial Sequence: Synthetic oligonucleotide
  Antisense strand to SEQ ID NO: 1756591
aucacucccugauacuggg

SEQ ID NO: 1756593 - RNA, 19 nt, Artificial Sequence
  Description of Artificial Sequence: Synthetic oligonucleotide
  Sense strand starting at position 3151 of SEQ ID NO: 1562565
gguuaagaauucucaccuc

SEQ ID NO: 1756594 - RNA, 19 nt, Artificial Sequence
  Description of Artificial Sequence: Synthetic oligonucleotide
  Antisense strand to SEQ ID NO: 1756593
gaggugagaauucuuaacc

SEQ ID NO: 1756595 - RNA, 19 nt, Artificial Sequence
  Description of Artificial Sequence: Synthetic oligonucleotide
  Sense strand starting at position 3262 of SEQ ID NO: 1562565
cuauaugaauguucugaag

SEQ ID NO: 1756596 - RNA, 19 nt, Artificial Sequence
  Description of Artificial Sequence: Synthetic oligonucleotide
  Antisense strand to SEQ ID NO: 1756595
cuucagaacauucauauag

SEQ ID NO: 1756597 - RNA, 19 nt, Artificial Sequence
  Description of Artificial Sequence: Synthetic oligonucleotide
  Sense strand starting at position 3276 of SEQ ID NO: 1562565
ugaagucuccaccgguaua

SEQ ID NO: 1756598 - RNA, 19 nt, Artificial Sequence
  Description of Artificial Sequence: Synthetic oligonucleotide
  Antisense strand to SEQ ID NO: 1756597
uauaccgguggagacuuca

SEQ ID NO: 1756599 - RNA, 19 nt, Artificial Sequence
  Description of Artificial Sequence: Synthetic oligonucleotide
  Sense strand starting at position 3286 of SEQ ID NO: 1562565
accgguauaccagaguguu

SEQ ID NO: 1756600 - RNA, 19 nt, Artificial Sequence
  Description of Artificial Sequence: Synthetic oligonucleotide
  Antisense strand to SEQ ID NO: 1756599
aacacucugguauaccggu

SEQ ID NO: 1756601 - RNA, 19 nt, Artificial Sequence
  Description of Artificial Sequence: Synthetic oligonucleotide
  Sense strand starting at position 3364 of SEQ ID NO: 1562565
agucucauaucccugucua

SEQ ID NO: 1756602 - RNA, 19 nt, Artificial Sequence
  Description of Artificial Sequence: Synthetic oligonucleotide
  Antisense strand to SEQ ID NO: 1756601
uagacagggauaugagacu

SEQ ID NO: 1756603 - RNA, 19 nt, Artificial Sequence
  Description of Artificial Sequence: Synthetic oligonucleotide
  Sense strand starting at position 3365 of SEQ ID NO: 1562565
gucucauaucccugucuaa

SEQ ID NO: 1756604 - RNA, 19 nt, Artificial Sequence
  Description of Artificial Sequence: Synthetic oligonucleotide
  Antisense strand to SEQ ID NO: 1756603
uuagacagggauaugagac

SEQ ID NO: 1756605 - RNA, 19 nt, Artificial Sequence
  Description of Artificial Sequence: Synthetic oligonucleotide
  Sense strand starting at position 3421 of SEQ ID NO: 1562565
ugagaucuccucuauucug

SEQ ID NO: 1756606 - RNA, 19 nt, Artificial Sequence
  Description of Artificial Sequence: Synthetic oligonucleotide
  Antisense strand to SEQ ID NO: 1756605
cagaauagaggagaucuca

SEQ ID NO: 1756607 - RNA, 19 nt, Artificial Sequence
  Description of Artificial Sequence: Synthetic oligonucleotide
  Sense strand starting at position 3430 of SEQ ID NO: 1562565
cucuauucuggguguccaa

SEQ ID NO: 1756608 - RNA, 19 nt, Artificial Sequence
  Description of Artificial Sequence: Synthetic oligonucleotide
  Antisense strand to SEQ ID NO: 1756607
uuggacacccagaauagag

SEQ ID NO: 1756609 - RNA, 19 nt, Artificial Sequence
  Description of Artificial Sequence: Synthetic oligonucleotide
  Sense strand starting at position 3557 of SEQ ID NO: 1562565
ugcccuaucuaagucauga

SEQ ID NO: 1756610 - RNA, 19 nt, Artificial Sequence
  Description of Artificial Sequence: Synthetic oligonucleotide
  Antisense strand to SEQ ID NO: 1756609
ucaugacuuagauagggca

SEQ ID NO: 1756611 - RNA, 19 nt, Artificial Sequence
  Description of Artificial Sequence: Synthetic oligonucleotide
  Sense strand starting at position 3656 of SEQ ID NO: 1562565
aaguucuauuucgugacuu

SEQ ID NO: 1756612 - RNA, 19 nt, Artificial Sequence
  Description of Artificial Sequence: Synthetic oligonucleotide
  Antisense strand to SEQ ID NO: 1756611
aagucacgaaauagaacuu

SEQ ID NO: 1756613 - RNA, 19 nt, Artificial Sequence
  Description of Artificial Sequence: Synthetic oligonucleotide
  Sense strand starting at position 3666 of SEQ ID NO: 1562565
ucgugacuugaaugugaau

SEQ ID NO: 1756614 - RNA, 19 nt, Artificial Sequence
  Description of Artificial Sequence: Synthetic oligonucleotide
  Antisense strand to SEQ ID NO: 1756613
auucacauucaagucacga

SEQ ID NO: 1756615 - RNA, 19 nt, Artificial Sequence
  Description of Artificial Sequence: Synthetic oligonucleotide
  Sense strand starting at position 3668 of SEQ ID NO: 1562565
gugacuugaaugugaauag

SEQ ID NO: 1756616 - RNA, 19 nt, Artificial Sequence
  Description of Artificial Sequence: Synthetic oligonucleotide
  Antisense strand to SEQ ID NO: 1756615
cuauucacauucaagucac

SEQ ID NO: 1756617 - RNA, 19 nt, Artificial Sequence
  Description of Artificial Sequence: Synthetic oligonucleotide
  Sense strand starting at position 3672 of SEQ ID NO: 1562565
cuugaaugugaauagguuu

SEQ ID NO: 1756618 - RNA, 19 nt, Artificial Sequence
  Description of Artificial Sequence: Synthetic oligonucleotide
  Antisense strand to SEQ ID NO: 1756617
aaaccuauucacauucaag

SEQ ID NO: 1756619 - RNA, 19 nt, Artificial Sequence
  Description of Artificial Sequence: Synthetic oligonucleotide
  Sense strand starting at position 2564 of SEQ ID NO: 1562566
ccagcaaguccgcgggauu

SEQ ID NO: 1756620 - RNA, 19 nt, Artificial Sequence
  Description of Artificial Sequence: Synthetic oligonucleotide
  Antisense strand to SEQ ID NO: 1756619
aaucccgcggacuugcugg

SEQ ID NO: 1756621 - RNA, 19 nt, Artificial Sequence
  Description of Artificial Sequence: Synthetic oligonucleotide
  Sense strand starting at position 3046 of SEQ ID NO: 1562566
acgagugaaacgugagacu

SEQ ID NO: 1756622 - RNA, 19 nt, Artificial Sequence
  Description of Artificial Sequence: Synthetic oligonucleotide
  Antisense strand to SEQ ID NO: 1756621
agucucacguuucacucgu

SEQ ID NO: 1756623 - RNA, 19 nt, Artificial Sequence
  Description of Artificial Sequence: Synthetic oligonucleotide
  Sense strand starting at position 3168 of SEQ ID NO: 1562566
acauccaugugugcagauu

SEQ ID NO: 1756624 - RNA, 19 nt, Artificial Sequence
  Description of Artificial Sequence: Synthetic oligonucleotide
  Antisense strand to SEQ ID NO: 1756623
aaucugcacacauggaugu

SEQ ID NO: 1756625 - RNA, 19 nt, Artificial Sequence
  Description of Artificial Sequence: Synthetic oligonucleotide
  Sense strand starting at position 3205 of SEQ ID NO: 1562566
ccguucuuuccugagagcu

SEQ ID NO: 1756626 - RNA, 19 nt, Artificial Sequence
  Description of Artificial Sequence: Synthetic oligonucleotide
  Antisense strand to SEQ ID NO: 1756625
agcucucaggaaagaacgg

SEQ ID NO: 1756627 - RNA, 19 nt, Artificial Sequence
  Description of Artificial Sequence: Synthetic oligonucleotide
  Sense strand starting at position 3207 of SEQ ID NO: 1562566
guucuuuccugagagcuug

SEQ ID NO: 1756628 - RNA, 19 nt, Artificial Sequence
  Description of Artificial Sequence: Synthetic oligonucleotide
  Antisense strand to SEQ ID NO: 1756627
caagcucucaggaaagaac

SEQ ID NO: 1756629 - RNA, 19 nt, Artificial Sequence
  Description of Artificial Sequence: Synthetic oligonucleotide
  Sense strand starting at position 3438 of SEQ ID NO: 1562566
uuuccuaugguuggaucua

SEQ ID NO: 1756630 - RNA, 19 nt, Artificial Sequence
  Description of Artificial Sequence: Synthetic oligonucleotide
  Antisense strand to SEQ ID NO: 1756629
uagauccaaccauaggaaa

SEQ ID NO: 1756631 - RNA, 19 nt, Artificial Sequence
  Description of Artificial Sequence: Synthetic oligonucleotide
  Sense strand starting at position 3459 of SEQ ID NO: 1562566
ccaacauauagguguugua

SEQ ID NO: 1756632 - RNA, 19 nt, Artificial Sequence
  Description of Artificial Sequence: Synthetic oligonucleotide
  Antisense strand to SEQ ID NO: 1756631
uacaacaccuauauguugg

SEQ ID NO: 1756633 - RNA, 19 nt, Artificial Sequence
  Description of Artificial Sequence: Synthetic oligonucleotide
  Sense strand starting at position 3462 of SEQ ID NO: 1562566
acauauagguguuguauga

SEQ ID NO: 1756634 - RNA, 19 nt, Artificial Sequence
  Description of Artificial Sequence: Synthetic oligonucleotide
  Antisense strand to SEQ ID NO: 1756633
ucauacaacaccuauaugu

SEQ ID NO: 1756635 - RNA, 19 nt, Artificial Sequence
  Description of Artificial Sequence: Synthetic oligonucleotide
  Sense strand starting at position 3538 of SEQ ID NO: 1562566
cugccuugagcucacagau

SEQ ID NO: 1756636 - RNA, 19 nt, Artificial Sequence
  Description of Artificial Sequence: Synthetic oligonucleotide
  Antisense strand to SEQ ID NO: 1756635
aucugugagcucaaggcag

SEQ ID NO: 1756637 - RNA, 19 nt, Artificial Sequence
  Description of Artificial Sequence: Synthetic oligonucleotide
  Sense strand starting at position 3547 of SEQ ID NO: 1562566
gcucacagaugugucuaua

SEQ ID NO: 1756638 - RNA, 19 nt, Artificial Sequence
  Description of Artificial Sequence: Synthetic oligonucleotide
  Antisense strand to SEQ ID NO: 1756637
uauagacacaucugugagc

SEQ ID NO: 1756639 - RNA, 19 nt, Artificial Sequence
  Description of Artificial Sequence: Synthetic oligonucleotide
  Sense strand starting at position 3566 of SEQ ID NO: 1562566
ggacaccuuccuggaagua

SEQ ID NO: 1756640 - RNA, 19 nt, Artificial Sequence
  Description of Artificial Sequence: Synthetic oligonucleotide
  Antisense strand to SEQ ID NO: 1756639
uacuuccaggaaggugucc

SEQ ID NO: 1756641 - RNA, 19 nt, Artificial Sequence
  Description of Artificial Sequence: Synthetic oligonucleotide
  Sense strand starting at position 3581 of SEQ ID NO: 1562566
aguagaaauucugguugaa

SEQ ID NO: 1756642 - RNA, 19 nt, Artificial Sequence
  Description of Artificial Sequence: Synthetic oligonucleotide
  Antisense strand to SEQ ID NO: 1756641
uucaaccagaauuucuacu

SEQ ID NO: 1756643 - RNA, 19 nt, Artificial Sequence
  Description of Artificial Sequence: Synthetic oligonucleotide
  Sense strand starting at position 3584 of SEQ ID NO: 1562566
agaaauucugguugaaggu

SEQ ID NO: 1756644 - RNA, 19 nt, Artificial Sequence
  Description of Artificial Sequence: Synthetic oligonucleotide
  Antisense strand to SEQ ID NO: 1756643
accuucaaccagaauuucu

SEQ ID NO: 1756645 - RNA, 19 nt, Artificial Sequence
  Description of Artificial Sequence: Synthetic oligonucleotide
  Sense strand starting at position 3601 of SEQ ID NO: 1562566
gugagcauguguuuauguu

SEQ ID NO: 1756646 - RNA, 19 nt, Artificial Sequence
  Description of Artificial Sequence: Synthetic oligonucleotide
  Antisense strand to SEQ ID NO: 1756645
aacauaaacacaugcucac

SEQ ID NO: 1756647 - RNA, 19 nt, Artificial Sequence
  Description of Artificial Sequence: Synthetic oligonucleotide
  Sense strand starting at position 3605 of SEQ ID NO: 1562566
gcauguguuuauguugaua

SEQ ID NO: 1756648 - RNA, 19 nt, Artificial Sequence
  Description of Artificial Sequence: Synthetic oligonucleotide
  Antisense strand to SEQ ID NO: 1756647
uaucaacauaaacacaugc

SEQ ID NO: 1756649 - RNA, 19 nt, Artificial Sequence
  Description of Artificial Sequence: Synthetic oligonucleotide
  Sense strand starting at position 3607 of SEQ ID NO: 1562566
auguguuuauguugauaga

SEQ ID NO: 1756650 - RNA, 19 nt, Artificial Sequence
  Description of Artificial Sequence: Synthetic oligonucleotide
  Antisense strand to SEQ ID NO: 1756649
ucuaucaacauaaacacau

SEQ ID NO: 1756651 - RNA, 19 nt, Artificial Sequence
  Description of Artificial Sequence: Synthetic oligonucleotide
  Sense strand starting at position 3608 of SEQ ID NO: 1562566
uguguuuauguugauagau

SEQ ID NO: 1756652 - RNA, 19 nt, Artificial Sequence
  Description of Artificial Sequence: Synthetic oligonucleotide
  Antisense strand to SEQ ID NO: 1756651
aucuaucaacauaaacaca

SEQ ID NO: 1756653 - RNA, 19 nt, Artificial Sequence
  Description of Artificial Sequence: Synthetic oligonucleotide
  Sense strand starting at position 3826 of SEQ ID NO: 1562566
gucaacauuugcuggguga

SEQ ID NO: 1756654 - RNA, 19 nt, Artificial Sequence
  Description of Artificial Sequence: Synthetic oligonucleotide
  Antisense strand to SEQ ID NO: 1756653
ucacccagcaaauguugac

SEQ ID NO: 1756655 - RNA, 19 nt, Artificial Sequence
  Description of Artificial Sequence: Synthetic oligonucleotide
  Sense strand starting at position 3840 of SEQ ID NO: 1562566
ggugaauaagucgaggagu

SEQ ID NO: 1756656 - RNA, 19 nt, Artificial Sequence
  Description of Artificial Sequence: Synthetic oligonucleotide
  Antisense strand to SEQ ID NO: 1756655
acuccucgacuuauucacc

SEQ ID NO: 1756657 - RNA, 19 nt, Artificial Sequence
  Description of Artificial Sequence: Synthetic oligonucleotide
  Sense strand starting at position 3841 of SEQ ID NO: 1562566
gugaauaagucgaggagug

SEQ ID NO: 1756658 - RNA, 19 nt, Artificial Sequence
  Description of Artificial Sequence: Synthetic oligonucleotide
  Antisense strand to SEQ ID NO: 1756657
cacuccucgacuuauucac

SEQ ID NO: 1756659 - RNA, 19 nt, Artificial Sequence
  Description of Artificial Sequence: Synthetic oligonucleotide
  Sense strand starting at position 3897 of SEQ ID NO: 1562566
ggaugccuugcagguauua

SEQ ID NO: 1756660 - RNA, 19 nt, Artificial Sequence
  Description of Artificial Sequence: Synthetic oligonucleotide
  Antisense strand to SEQ ID NO: 1756659
uaauaccugcaaggcaucc

SEQ ID NO: 1756661 - RNA, 19 nt, Artificial Sequence
  Description of Artificial Sequence: Synthetic oligonucleotide
  Sense strand starting at position 3943 of SEQ ID NO: 1562566
cagggagugucacauuuau

SEQ ID NO: 1756662 - RNA, 19 nt, Artificial Sequence
  Description of Artificial Sequence: Synthetic oligonucleotide
  Antisense strand to SEQ ID NO: 1756661
auaaaugugacacucccug

SEQ ID NO: 1756663 - RNA, 19 nt, Artificial Sequence
  Description of Artificial Sequence: Synthetic oligonucleotide
  Sense strand starting at position 2396 of SEQ ID NO: 1562567
ccagcaaguccgcgggauu

SEQ ID NO: 1756664 - RNA, 19 nt, Artificial Sequence
  Description of Artificial Sequence: Synthetic oligonucleotide
  Antisense strand to SEQ ID NO: 1756663
aaucccgcggacuugcugg

SEQ ID NO: 1756665 - RNA, 19 nt, Artificial Sequence
  Description of Artificial Sequence: Synthetic oligonucleotide
  Sense strand starting at position 2878 of SEQ ID NO: 1562567
acgagugaaacgugagacu

SEQ ID NO: 1756666 - RNA, 19 nt, Artificial Sequence
  Description of Artificial Sequence: Synthetic oligonucleotide
  Antisense strand to SEQ ID NO: 1756665
agucucacguuucacucgu

SEQ ID NO: 1756667 - RNA, 19 nt, Artificial Sequence
  Description of Artificial Sequence: Synthetic oligonucleotide
  Sense strand starting at position 3000 of SEQ ID NO: 1562567
acauccaugugugcagauu

SEQ ID NO: 1756668 - RNA, 19 nt, Artificial Sequence
  Description of Artificial Sequence: Synthetic oligonucleotide
  Antisense strand to SEQ ID NO: 1756667
aaucugcacacauggaugu

SEQ ID NO: 1756669 - RNA, 19 nt, Artificial Sequence
  Description of Artificial Sequence: Synthetic oligonucleotide
  Sense strand starting at position 3037 of SEQ ID NO: 1562567
ccguucuuuccugagagcu

SEQ ID NO: 1756670 - RNA, 19 nt, Artificial Sequence
  Description of Artificial Sequence: Synthetic oligonucleotide
  Antisense strand to SEQ ID NO: 1756669
agcucucaggaaagaacgg

SEQ ID NO: 1756671 - RNA, 19 nt, Artificial Sequence
  Description of Artificial Sequence: Synthetic oligonucleotide
  Sense strand starting at position 3039 of SEQ ID NO: 1562567
guucuuuccugagagcuug

SEQ ID NO: 1756672 - RNA, 19 nt, Artificial Sequence
  Description of Artificial Sequence: Synthetic oligonucleotide
  Antisense strand to SEQ ID NO: 1756671
caagcucucaggaaagaac

SEQ ID NO: 1756673 - RNA, 19 nt, Artificial Sequence
  Description of Artificial Sequence: Synthetic oligonucleotide
  Sense strand starting at position 3270 of SEQ ID NO: 1562567
uuuccuaugguuggaucua

SEQ ID NO: 1756674 - RNA, 19 nt, Artificial Sequence
  Description of Artificial Sequence: Synthetic oligonucleotide
  Antisense strand to SEQ ID NO: 1756673
uagauccaaccauaggaaa

SEQ ID NO: 1756675 - RNA, 19 nt, Artificial Sequence
  Description of Artificial Sequence: Synthetic oligonucleotide
  Sense strand starting at position 3291 of SEQ ID NO: 1562567
ccaacauauagguguugua

SEQ ID NO: 1756676 - RNA, 19 nt, Artificial Sequence
  Description of Artificial Sequence: Synthetic oligonucleotide
  Antisense strand to SEQ ID NO: 1756675
uacaacaccuauauguugg

SEQ ID NO: 1756677 - RNA, 19 nt, Artificial Sequence
  Description of Artificial Sequence: Synthetic oligonucleotide
  Sense strand starting at position 3294 of SEQ ID NO: 1562567
acauauagguguuguauga

SEQ ID NO: 1756678 - RNA, 19 nt, Artificial Sequence
  Description of Artificial Sequence: Synthetic oligonucleotide
  Antisense strand to SEQ ID NO: 1756677
ucauacaacaccuauaugu

SEQ ID NO: 1756679 - RNA, 19 nt, Artificial Sequence
  Description of Artificial Sequence: Synthetic oligonucleotide
  Sense strand starting at position 3370 of SEQ ID NO: 1562567
cugccuugagcucacagau

SEQ ID NO: 1756680 - RNA, 19 nt, Artificial Sequence
  Description of Artificial Sequence: Synthetic oligonucleotide
  Antisense strand to SEQ ID NO: 1756679
aucugugagcucaaggcag

SEQ ID NO: 1756681 - RNA, 19 nt, Artificial Sequence
  Description of Artificial Sequence: Synthetic oligonucleotide
  Sense strand starting at position 3379 of SEQ ID NO: 1562567
gcucacagaugugucuaua

SEQ ID NO: 1756682 - RNA, 19 nt, Artificial Sequence
  Description of Artificial Sequence: Synthetic oligonucleotide
  Antisense strand to SEQ ID NO: 1756681
uauagacacaucugugagc

SEQ ID NO: 1756683 - RNA, 19 nt, Artificial Sequence
  Description of Artificial Sequence: Synthetic oligonucleotide
  Sense strand starting at position 3398 of SEQ ID NO: 1562567
ggacaccuuccuggaagua

SEQ ID NO: 1756684 - RNA, 19 nt, Artificial Sequence
  Description of Artificial Sequence: Synthetic oligonucleotide
  Antisense strand to SEQ ID NO: 1756683
uacuuccaggaaggugucc

SEQ ID NO: 1756685 - RNA, 19 nt, Artificial Sequence
  Description of Artificial Sequence: Synthetic oligonucleotide
  Sense strand starting at position 3413 of SEQ ID NO: 1562567
aguagaaauucugguugaa

SEQ ID NO: 1756686 - RNA, 19 nt, Artificial Sequence
  Description of Artificial Sequence: Synthetic oligonucleotide
  Antisense strand to SEQ ID NO: 1756685
uucaaccagaauuucuacu

SEQ ID NO: 1756687 - RNA, 19 nt, Artificial Sequence
  Description of Artificial Sequence: Synthetic oligonucleotide
  Sense strand starting at position 3416 of SEQ ID NO: 1562567
agaaauucugguugaaggu

SEQ ID NO: 1756688 - RNA, 19 nt, Artificial Sequence
  Description of Artificial Sequence: Synthetic oligonucleotide
  Antisense strand to SEQ ID NO: 1756687
accuucaaccagaauuucu

SEQ ID NO: 1756689 - RNA, 19 nt, Artificial Sequence
  Description of Artificial Sequence: Synthetic oligonucleotide
  Sense strand starting at position 3433 of SEQ ID NO: 1562567
gugagcauguguuuauguu

SEQ ID NO: 1756690 - RNA, 19 nt, Artificial Sequence
  Description of Artificial Sequence: Synthetic oligonucleotide
  Antisense strand to SEQ ID NO: 1756689
aacauaaacacaugcucac

SEQ ID NO: 1756691 - RNA, 19 nt, Artificial Sequence
  Description of Artificial Sequence: Synthetic oligonucleotide
  Sense strand starting at position 3437 of SEQ ID NO: 1562567
gcauguguuuauguugaua

SEQ ID NO: 1756692 - RNA, 19 nt, Artificial Sequence
  Description of Artificial Sequence: Synthetic oligonucleotide
  Antisense strand to SEQ ID NO: 1756691
uaucaacauaaacacaugc

SEQ ID NO: 1756693 - RNA, 19 nt, Artificial Sequence
  Description of Artificial Sequence: Synthetic oligonucleotide
  Sense strand starting at position 3439 of SEQ ID NO: 1562567
auguguuuauguugauaga

SEQ ID NO: 1756694 - RNA, 19 nt, Artificial Sequence
  Description of Artificial Sequence: Synthetic oligonucleotide
  Antisense strand to SEQ ID NO: 1756693
ucuaucaacauaaacacau

SEQ ID NO: 1756695 - RNA, 19 nt, Artificial Sequence
  Description of Artificial Sequence: Synthetic oligonucleotide
  Sense strand starting at position 3440 of SEQ ID NO: 1562567
uguguuuauguugauagau

SEQ ID NO: 1756696 - RNA, 19 nt, Artificial Sequence
  Description of Artificial Sequence: Synthetic oligonucleotide
  Antisense strand to SEQ ID NO: 1756695
aucuaucaacauaaacaca

SEQ ID NO: 1756697 - RNA, 19 nt, Artificial Sequence
  Description of Artificial Sequence: Synthetic oligonucleotide
  Sense strand starting at position 3658 of SEQ ID NO: 1562567
gucaacauuugcuggguga

SEQ ID NO: 1756698 - RNA, 19 nt, Artificial Sequence
  Description of Artificial Sequence: Synthetic oligonucleotide
  Antisense strand to SEQ ID NO: 1756697
ucacccagcaaauguugac

SEQ ID NO: 1756699 - RNA, 19 nt, Artificial Sequence
  Description of Artificial Sequence: Synthetic oligonucleotide
  Sense strand starting at position 3672 of SEQ ID NO: 1562567
ggugaauaagucgaggagu

SEQ ID NO: 1756700 - RNA, 19 nt, Artificial Sequence
  Description of Artificial Sequence: Synthetic oligonucleotide
  Antisense strand to SEQ ID NO: 1756699
acuccucgacuuauucacc

SEQ ID NO: 1756701 - RNA, 19 nt, Artificial Sequence
  Description of Artificial Sequence: Synthetic oligonucleotide
  Sense strand starting at position 3673 of SEQ ID NO: 1562567
gugaauaagucgaggagug

SEQ ID NO: 1756702 - RNA, 19 nt, Artificial Sequence
  Description of Artificial Sequence: Synthetic oligonucleotide
  Antisense strand to SEQ ID NO: 1756701
cacuccucgacuuauucac

SEQ ID NO: 1756703 - RNA, 19 nt, Artificial Sequence
  Description of Artificial Sequence: Synthetic oligonucleotide
  Sense strand starting at position 3729 of SEQ ID NO: 1562567
ggaugccuugcagguauua

SEQ ID NO: 1756704 - RNA, 19 nt, Artificial Sequence
  Description of Artificial Sequence: Synthetic oligonucleotide
  Antisense strand to SEQ ID NO: 1756703
uaauaccugcaaggcaucc

SEQ ID NO: 1756705 - RNA, 19 nt, Artificial Sequence
  Description of Artificial Sequence: Synthetic oligonucleotide
  Sense strand starting at position 3775 of SEQ ID NO: 1562567
cagggagugucacauuuau

SEQ ID NO: 1756706 - RNA, 19 nt, Artificial Sequence
  Description of Artificial Sequence: Synthetic oligonucleotide
  Antisense strand to SEQ ID NO: 1756705
auaaaugugacacucccug

SEQ ID NO: 1756707 - RNA, 19 nt, Artificial Sequence
  Description of Artificial Sequence: Synthetic oligonucleotide
  Sense strand starting at position 92 of SEQ ID NO: 1562568
ugagucaucuguugcuaac

SEQ ID NO: 1756708 - RNA, 19 nt, Artificial Sequence
  Description of Artificial Sequence: Synthetic oligonucleotide
  Antisense strand to SEQ ID NO: 1756707
guuagcaacagaugacuca

SEQ ID NO: 1756709 - RNA, 19 nt, Artificial Sequence
  Description of Artificial Sequence: Synthetic oligonucleotide
  Sense strand starting at position 94 of SEQ ID NO: 1562568
agucaucuguugcuaacca

SEQ ID NO: 1756710 - RNA, 19 nt, Artificial Sequence
  Description of Artificial Sequence: Synthetic oligonucleotide
  Antisense strand to SEQ ID NO: 1756709
ugguuagcaacagaugacu

SEQ ID NO: 1756711 - RNA, 19 nt, Artificial Sequence
  Description of Artificial Sequence: Synthetic oligonucleotide
  Sense strand starting at position 136 of SEQ ID NO: 1562568
auguaauacuucucuguga

SEQ ID NO: 1756712 - RNA, 19 nt, Artificial Sequence
  Description of Artificial Sequence: Synthetic oligonucleotide
  Antisense strand to SEQ ID NO: 1756711
ucacagagaaguauuacau

SEQ ID NO: 1756713 - RNA, 19 nt, Artificial Sequence
  Description of Artificial Sequence: Synthetic oligonucleotide
  Sense strand starting at position 137 of SEQ ID NO: 1562568
uguaauacuucucugugau

SEQ ID NO: 1756714 - RNA, 19 nt, Artificial Sequence
  Description of Artificial Sequence: Synthetic oligonucleotide
  Antisense strand to SEQ ID NO: 1756713
aucacagagaaguauuaca

SEQ ID NO: 1756715 - RNA, 19 nt, Artificial Sequence
  Description of Artificial Sequence: Synthetic oligonucleotide
  Sense strand starting at position 138 of SEQ ID NO: 1562568
guaauacuucucugugauu

SEQ ID NO: 1756716 - RNA, 19 nt, Artificial Sequence
  Description of Artificial Sequence: Synthetic oligonucleotide
  Antisense strand to SEQ ID NO: 1756715
aaucacagagaaguauuac

SEQ ID NO: 1756717 - RNA, 19 nt, Artificial Sequence
  Description of Artificial Sequence: Synthetic oligonucleotide
  Sense strand starting at position 258 of SEQ ID NO: 1562568
aggauuccacgcggucaga

SEQ ID NO: 1756718 - RNA, 19 nt, Artificial Sequence
  Description of Artificial Sequence: Synthetic oligonucleotide
  Antisense strand to SEQ ID NO: 1756717
ucugaccgcguggaauccu

SEQ ID NO: 1756719 - RNA, 19 nt, Artificial Sequence
  Description of Artificial Sequence: Synthetic oligonucleotide
  Sense strand starting at position 816 of SEQ ID NO: 1562568
acaacauuggcucagcuaa

SEQ ID NO: 1756720 - RNA, 19 nt, Artificial Sequence
  Description of Artificial Sequence: Synthetic oligonucleotide
  Antisense strand to SEQ ID NO: 1756719
uuagcugagccaauguugu

SEQ ID NO: 1756721 - RNA, 19 nt, Artificial Sequence
  Description of Artificial Sequence: Synthetic oligonucleotide
  Sense strand starting at position 859 of SEQ ID NO: 1562568
gcgcaagagguauaugaag

SEQ ID NO: 1756722 - RNA, 19 nt, Artificial Sequence
  Description of Artificial Sequence: Synthetic oligonucleotide
  Antisense strand to SEQ ID NO: 1756721
cuucauauaccucuugcgc

SEQ ID NO: 1756723 - RNA, 19 nt, Artificial Sequence
  Description of Artificial Sequence: Synthetic oligonucleotide
  Sense strand starting at position 865 of SEQ ID NO: 1562568
gagguauaugaaggcuaag

SEQ ID NO: 1756724 - RNA, 19 nt, Artificial Sequence
  Description of Artificial Sequence: Synthetic oligonucleotide
  Antisense strand to SEQ ID NO: 1756723
cuuagccuucauauaccuc

SEQ ID NO: 1756725 - RNA, 19 nt, Artificial Sequence
  Description of Artificial Sequence: Synthetic oligonucleotide
  Sense strand starting at position 1005 of SEQ ID NO: 1562568
auggcauccguagacaaga

SEQ ID NO: 1756726 - RNA, 19 nt, Artificial Sequence
  Description of Artificial Sequence: Synthetic oligonucleotide
  Antisense strand to SEQ ID NO: 1756725
ucuugucuacggaugccau

SEQ ID NO: 1756727 - RNA, 19 nt, Artificial Sequence
  Description of Artificial Sequence: Synthetic oligonucleotide
  Sense strand starting at position 1007 of SEQ ID NO: 1562568
ggcauccguagacaagaau

SEQ ID NO: 1756728 - RNA, 19 nt, Artificial Sequence
  Description of Artificial Sequence: Synthetic oligonucleotide
  Antisense strand to SEQ ID NO: 1756727
auucuugucuacggaugcc

SEQ ID NO: 1756729 - RNA, 19 nt, Artificial Sequence
  Description of Artificial Sequence: Synthetic oligonucleotide
  Sense strand starting at position 1024 of SEQ ID NO: 1562568
augagaacuucugaaccga

SEQ ID NO: 1756730 - RNA, 19 nt, Artificial Sequence
  Description of Artificial Sequence: Synthetic oligonucleotide
  Antisense strand to SEQ ID NO: 1756729
ucgguucagaaguucucau

SEQ ID NO: 1756731 - RNA, 19 nt, Artificial Sequence
  Description of Artificial Sequence: Synthetic oligonucleotide
  Sense strand starting at position 1180 of SEQ ID NO: 1562568
ugaagcuaguacugaggaa

SEQ ID NO: 1756732 - RNA, 19 nt, Artificial Sequence
  Description of Artificial Sequence: Synthetic oligonucleotide
  Antisense strand to SEQ ID NO: 1756731
uuccucaguacuagcuuca

SEQ ID NO: 1756733 - RNA, 19 nt, Artificial Sequence
  Description of Artificial Sequence: Synthetic oligonucleotide
  Sense strand starting at position 1184 of SEQ ID NO: 1562568
gcuaguacugaggaauucu

SEQ ID NO: 1756734 - RNA, 19 nt, Artificial Sequence
  Description of Artificial Sequence: Synthetic oligonucleotide
  Antisense strand to SEQ ID NO: 1756733
agaauuccucaguacuagc

SEQ ID NO: 1756735 - RNA, 19 nt, Artificial Sequence
  Description of Artificial Sequence: Synthetic oligonucleotide
  Sense strand starting at position 1195 of SEQ ID NO: 1562568
ggaauucucccagaaacgc

SEQ ID NO: 1756736 - RNA, 19 nt, Artificial Sequence
  Description of Artificial Sequence: Synthetic oligonucleotide
  Antisense strand to SEQ ID NO: 1756735
gcguuucugggagaauucc

SEQ ID NO: 1756737 - RNA, 19 nt, Artificial Sequence
  Description of Artificial Sequence: Synthetic oligonucleotide
  Sense strand starting at position 1222 of SEQ ID NO: 1562568
gaccuagucuaggaggaaa

SEQ ID NO: 1756738 - RNA, 19 nt, Artificial Sequence
  Description of Artificial Sequence: Synthetic oligonucleotide
  Antisense strand to SEQ ID NO: 1756737
uuuccuccuagacuagguc

SEQ ID NO: 1756739 - RNA, 19 nt, Artificial Sequence
  Description of Artificial Sequence: Synthetic oligonucleotide
  Sense strand starting at position 2090 of SEQ ID NO: 1562568
aagggaguguuucuagaug

SEQ ID NO: 1756740 - RNA, 19 nt, Artificial Sequence
  Description of Artificial Sequence: Synthetic oligonucleotide
  Antisense strand to SEQ ID NO: 1756739
caucuagaaacacucccuu

SEQ ID NO: 1756741 - RNA, 19 nt, Artificial Sequence
  Description of Artificial Sequence: Synthetic oligonucleotide
  Sense strand starting at position 2432 of SEQ ID NO: 1562568
ggagaagucuccugcccag

SEQ ID NO: 1756742 - RNA, 19 nt, Artificial Sequence
  Description of Artificial Sequence: Synthetic oligonucleotide
  Antisense strand to SEQ ID NO: 1756741
cugggcaggagacuucucc

SEQ ID NO: 1756743 - RNA, 19 nt, Artificial Sequence
  Description of Artificial Sequence: Synthetic oligonucleotide
  Sense strand starting at position 2600 of SEQ ID NO: 1562568
cccagugacuccuggaaca

SEQ ID NO: 1756744 - RNA, 19 nt, Artificial Sequence
  Description of Artificial Sequence: Synthetic oligonucleotide
  Antisense strand to SEQ ID NO: 1756743
uguuccaggagucacuggg

SEQ ID NO: 1756745 - RNA, 19 nt, Artificial Sequence
  Description of Artificial Sequence: Synthetic oligonucleotide
  Sense strand starting at position 2680 of SEQ ID NO: 1562568
acaucaucugggugagacu

SEQ ID NO: 1756746 - RNA, 19 nt, Artificial Sequence
  Description of Artificial Sequence: Synthetic oligonucleotide
  Antisense strand to SEQ ID NO: 1756745
agucucacccagaugaugu

SEQ ID NO: 1756747 - RNA, 19 nt, Artificial Sequence
  Description of Artificial Sequence: Synthetic oligonucleotide
  Sense strand starting at position 2689 of SEQ ID NO: 1562568
gggugagacuuggaggaga

SEQ ID NO: 1756748 - RNA, 19 nt, Artificial Sequence
  Description of Artificial Sequence: Synthetic oligonucleotide
  Antisense strand to SEQ ID NO: 1756747
ucuccuccaagucucaccc

SEQ ID NO: 1756749 - RNA, 19 nt, Artificial Sequence
  Description of Artificial Sequence: Synthetic oligonucleotide
  Sense strand starting at position 2716 of SEQ ID NO: 1562568
ggagagagguaucgagaga

SEQ ID NO: 1756750 - RNA, 19 nt, Artificial Sequence
  Description of Artificial Sequence: Synthetic oligonucleotide
  Antisense strand to SEQ ID NO: 1756749
ucucucgauaccucucucc

SEQ ID NO: 1756751 - RNA, 19 nt, Artificial Sequence
  Description of Artificial Sequence: Synthetic oligonucleotide
  Sense strand starting at position 2729 of SEQ ID NO: 1562568
gagagauucuagcagagaa

SEQ ID NO: 1756752 - RNA, 19 nt, Artificial Sequence
  Description of Artificial Sequence: Synthetic oligonucleotide
  Antisense strand to SEQ ID NO: 1756751
uucucugcuagaaucucuc

SEQ ID NO: 1756753 - RNA, 19 nt, Artificial Sequence
  Description of Artificial Sequence: Synthetic oligonucleotide
  Sense strand starting at position 2893 of SEQ ID NO: 1562568
ggccuccuccgccaugaaa

SEQ ID NO: 1756754 - RNA, 19 nt, Artificial Sequence
  Description of Artificial Sequence: Synthetic oligonucleotide
  Antisense strand to SEQ ID NO: 1756753
uuucauggcggaggaggcc

SEQ ID NO: 1756755 - RNA, 19 nt, Artificial Sequence
  Description of Artificial Sequence: Synthetic oligonucleotide
  Sense strand starting at position 3256 of SEQ ID NO: 1562568
ggcucuguuugcgcugcaa

SEQ ID NO: 1756756 - RNA, 19 nt, Artificial Sequence
  Description of Artificial Sequence: Synthetic oligonucleotide
  Antisense strand to SEQ ID NO: 1756755
uugcagcgcaaacagagcc

SEQ ID NO: 1756757 - RNA, 19 nt, Artificial Sequence
  Description of Artificial Sequence: Synthetic oligonucleotide
  Sense strand starting at position 3258 of SEQ ID NO: 1562568
cucuguuugcgcugcaaua

SEQ ID NO: 1756758 - RNA, 19 nt, Artificial Sequence
  Description of Artificial Sequence: Synthetic oligonucleotide
  Antisense strand to SEQ ID NO: 1756757
uauugcagcgcaaacagag

SEQ ID NO: 1756759 - RNA, 19 nt, Artificial Sequence
  Description of Artificial Sequence: Synthetic oligonucleotide
  Sense strand starting at position 3260 of SEQ ID NO: 1562568
cuguuugcgcugcaauaga

SEQ ID NO: 1756760 - RNA, 19 nt, Artificial Sequence
  Description of Artificial Sequence: Synthetic oligonucleotide
  Antisense strand to SEQ ID NO: 1756759
ucuauugcagcgcaaacag

SEQ ID NO: 1756761 - RNA, 19 nt, Artificial Sequence
  Description of Artificial Sequence: Synthetic oligonucleotide
  Sense strand starting at position 3330 of SEQ ID NO: 1562568
guuagguggcucggguauu

SEQ ID NO: 1756762 - RNA, 19 nt, Artificial Sequence
  Description of Artificial Sequence: Synthetic oligonucleotide
  Antisense strand to SEQ ID NO: 1756761
aauacccgagccaccuaac

SEQ ID NO: 1756763 - RNA, 19 nt, Artificial Sequence
  Description of Artificial Sequence: Synthetic oligonucleotide
  Sense strand starting at position 3331 of SEQ ID NO: 1562568
uuagguggcucggguauua

SEQ ID NO: 1756764 - RNA, 19 nt, Artificial Sequence
  Description of Artificial Sequence: Synthetic oligonucleotide
  Antisense strand to SEQ ID NO: 1756763
uaauacccgagccaccuaa

SEQ ID NO: 1756765 - RNA, 19 nt, Artificial Sequence
  Description of Artificial Sequence: Synthetic oligonucleotide
  Sense strand starting at position 3342 of SEQ ID NO: 1562568
ggguauuaggucugugaga

SEQ ID NO: 1756766 - RNA, 19 nt, Artificial Sequence
  Description of Artificial Sequence: Synthetic oligonucleotide
  Antisense strand to SEQ ID NO: 1756765
ucucacagaccuaauaccc

SEQ ID NO: 1756767 - RNA, 19 nt, Artificial Sequence
  Description of Artificial Sequence: Synthetic oligonucleotide
  Sense strand starting at position 3343 of SEQ ID NO: 1562568
gguauuaggucugugagag

SEQ ID NO: 1756768 - RNA, 19 nt, Artificial Sequence
  Description of Artificial Sequence: Synthetic oligonucleotide
  Antisense strand to SEQ ID NO: 1756767
cucucacagaccuaauacc

SEQ ID NO: 1756769 - RNA, 19 nt, Artificial Sequence
  Description of Artificial Sequence: Synthetic oligonucleotide
  Sense strand starting at position 3344 of SEQ ID NO: 1562568
guauuaggucugugagagg

SEQ ID NO: 1756770 - RNA, 19 nt, Artificial Sequence
  Description of Artificial Sequence: Synthetic oligonucleotide
  Antisense strand to SEQ ID NO: 1756769
ccucucacagaccuaauac

SEQ ID NO: 1756771 - RNA, 19 nt, Artificial Sequence
  Description of Artificial Sequence: Synthetic oligonucleotide
  Sense strand starting at position 3347 of SEQ ID NO: 1562568
uuaggucugugagagggua

SEQ ID NO: 1756772 - RNA, 19 nt, Artificial Sequence
  Description of Artificial Sequence: Synthetic oligonucleotide
  Antisense strand to SEQ ID NO: 1756771
uacccucucacagaccuaa

SEQ ID NO: 1756773 - RNA, 19 nt, Artificial Sequence
  Description of Artificial Sequence: Synthetic oligonucleotide
  Sense strand starting at position 3366 of SEQ ID NO: 1562568
cuaagaccuucuuuggagu

SEQ ID NO: 1756774 - RNA, 19 nt, Artificial Sequence
  Description of Artificial Sequence: Synthetic oligonucleotide
  Antisense strand to SEQ ID NO: 1756773
acuccaaagaaggucuuag

SEQ ID NO: 1756775 - RNA, 19 nt, Artificial Sequence
  Description of Artificial Sequence: Synthetic oligonucleotide
  Sense strand starting at position 3465 of SEQ ID NO: 1562568
acgugaugcucucaaguca

SEQ ID NO: 1756776 - RNA, 19 nt, Artificial Sequence
  Description of Artificial Sequence: Synthetic oligonucleotide
  Antisense strand to SEQ ID NO: 1756775
ugacuugagagcaucacgu

SEQ ID NO: 1756777 - RNA, 19 nt, Artificial Sequence
  Description of Artificial Sequence: Synthetic oligonucleotide
  Sense strand starting at position 3673 of SEQ ID NO: 1562568
aggcauugcuaagaucauc

SEQ ID NO: 1756778 - RNA, 19 nt, Artificial Sequence
  Description of Artificial Sequence: Synthetic oligonucleotide
  Antisense strand to SEQ ID NO: 1756777
gaugaucuuagcaaugccu

SEQ ID NO: 1756779 - RNA, 19 nt, Artificial Sequence
  Description of Artificial Sequence: Synthetic oligonucleotide
  Sense strand starting at position 3690 of SEQ ID NO: 1562568
ucauccuuguucuacagau

SEQ ID NO: 1756780 - RNA, 19 nt, Artificial Sequence
  Description of Artificial Sequence: Synthetic oligonucleotide
  Antisense strand to SEQ ID NO: 1756779
aucuguagaacaaggauga

SEQ ID NO: 1756781 - RNA, 19 nt, Artificial Sequence
  Description of Artificial Sequence: Synthetic oligonucleotide
  Sense strand starting at position 3776 of SEQ ID NO: 1562568
agacgagagcacugaaauc

SEQ ID NO: 1756782 - RNA, 19 nt, Artificial Sequence
  Description of Artificial Sequence: Synthetic oligonucleotide
  Antisense strand to SEQ ID NO: 1756781
gauuucagugcucucgucu

SEQ ID NO: 1756783 - RNA, 19 nt, Artificial Sequence
  Description of Artificial Sequence: Synthetic oligonucleotide
  Sense strand starting at position 3816 of SEQ ID NO: 1562568
ugaggcagucauugccauu

SEQ ID NO: 1756784 - RNA, 19 nt, Artificial Sequence
  Description of Artificial Sequence: Synthetic oligonucleotide
  Antisense strand to SEQ ID NO: 1756783
aauggcaaugacugccuca

SEQ ID NO: 1756785 - RNA, 19 nt, Artificial Sequence
  Description of Artificial Sequence: Synthetic oligonucleotide
  Sense strand starting at position 3819 of SEQ ID NO: 1562568
ggcagucauugccauugau

SEQ ID NO: 1756786 - RNA, 19 nt, Artificial Sequence
  Description of Artificial Sequence: Synthetic oligonucleotide
  Antisense strand to SEQ ID NO: 1756785
aucaauggcaaugacugcc

SEQ ID NO: 1756787 - RNA, 19 nt, Artificial Sequence
  Description of Artificial Sequence: Synthetic oligonucleotide
  Sense strand starting at position 192 of SEQ ID NO: 1562569
cagucaguucggcaugacu

SEQ ID NO: 1756788 - RNA, 19 nt, Artificial Sequence
  Description of Artificial Sequence: Synthetic oligonucleotide
  Antisense strand to SEQ ID NO: 1756787
agucaugccgaacugacug

SEQ ID NO: 1756789 - RNA, 19 nt, Artificial Sequence
  Description of Artificial Sequence: Synthetic oligonucleotide
  Sense strand starting at position 1170 of SEQ ID NO: 1562569
cuggucugcuguggucaua

SEQ ID NO: 1756790 - RNA, 19 nt, Artificial Sequence
  Description of Artificial Sequence: Synthetic oligonucleotide
  Antisense strand to SEQ ID NO: 1756789
uaugaccacagcagaccag

SEQ ID NO: 1756791 - RNA, 19 nt, Artificial Sequence
  Description of Artificial Sequence: Synthetic oligonucleotide
  Sense strand starting at position 1241 of SEQ ID NO: 1562569
cagagaagucacugagcaa

SEQ ID NO: 1756792 - RNA, 19 nt, Artificial Sequence
  Description of Artificial Sequence: Synthetic oligonucleotide
  Antisense strand to SEQ ID NO: 1756791
uugcucagugacuucucug

SEQ ID NO: 1756793 - RNA, 19 nt, Artificial Sequence
  Description of Artificial Sequence: Synthetic oligonucleotide
  Sense strand starting at position 1280 of SEQ ID NO: 1562569
uagaauucccgcugagacu

SEQ ID NO: 1756794 - RNA, 19 nt, Artificial Sequence
  Description of Artificial Sequence: Synthetic oligonucleotide
  Antisense strand to SEQ ID NO: 1756793
agucucagcgggaauucua

SEQ ID NO: 1756795 - RNA, 19 nt, Artificial Sequence
  Description of Artificial Sequence: Synthetic oligonucleotide
  Sense strand starting at position 1346 of SEQ ID NO: 1562569
cagaaugaguacugcccua

SEQ ID NO: 1756796 - RNA, 19 nt, Artificial Sequence
  Description of Artificial Sequence: Synthetic oligonucleotide
  Antisense strand to SEQ ID NO: 1756795
uagggcaguacucauucug

SEQ ID NO: 1756797 - RNA, 19 nt, Artificial Sequence
  Description of Artificial Sequence: Synthetic oligonucleotide
  Sense strand starting at position 1508 of SEQ ID NO: 1562569
gccagaaacuuguuaaagu

SEQ ID NO: 1756798 - RNA, 19 nt, Artificial Sequence
  Description of Artificial Sequence: Synthetic oligonucleotide
  Antisense strand to SEQ ID NO: 1756797
acuuuaacaaguuucuggc

SEQ ID NO: 1756799 - RNA, 19 nt, Artificial Sequence
  Description of Artificial Sequence: Synthetic oligonucleotide
  Sense strand starting at position 1509 of SEQ ID NO: 1562569
ccagaaacuuguuaaaguc

SEQ ID NO: 1756800 - RNA, 19 nt, Artificial Sequence
  Description of Artificial Sequence: Synthetic oligonucleotide
  Antisense strand to SEQ ID NO: 1756799
gacuuuaacaaguuucugg

SEQ ID NO: 1756801 - RNA, 19 nt, Artificial Sequence
  Description of Artificial Sequence: Synthetic oligonucleotide
  Sense strand starting at position 1516 of SEQ ID NO: 1562569
cuuguuaaagucugucagu

SEQ ID NO: 1756802 - RNA, 19 nt, Artificial Sequence
  Description of Artificial Sequence: Synthetic oligonucleotide
  Antisense strand to SEQ ID NO: 1756801
acugacagacuuuaacaag

SEQ ID NO: 1756803 - RNA, 19 nt, Artificial Sequence
  Description of Artificial Sequence: Synthetic oligonucleotide
  Sense strand starting at position 1519 of SEQ ID NO: 1562569
guuaaagucugucaguguu

SEQ ID NO: 1756804 - RNA, 19 nt, Artificial Sequence
  Description of Artificial Sequence: Synthetic oligonucleotide
  Antisense strand to SEQ ID NO: 1756803
aacacugacagacuuuaac

SEQ ID NO: 1756805 - RNA, 19 nt, Artificial Sequence
  Description of Artificial Sequence: Synthetic oligonucleotide
  Sense strand starting at position 2036 of SEQ ID NO: 1562569
gaaugacuaacgggaguuu

SEQ ID NO: 1756806 - RNA, 19 nt, Artificial Sequence
  Description of Artificial Sequence: Synthetic oligonucleotide
  Antisense strand to SEQ ID NO: 1756805
aaacucccguuagucauuc

SEQ ID NO: 1756807 - RNA, 19 nt, Artificial Sequence
  Description of Artificial Sequence: Synthetic oligonucleotide
  Sense strand starting at position 2049 of SEQ ID NO: 1562569
gaguuuggucccuggcaga

SEQ ID NO: 1756808 - RNA, 19 nt, Artificial Sequence
  Description of Artificial Sequence: Synthetic oligonucleotide
  Antisense strand to SEQ ID NO: 1756807
ucugccagggaccaaacuc

SEQ ID NO: 1756809 - RNA, 19 nt, Artificial Sequence
  Description of Artificial Sequence: Synthetic oligonucleotide
  Sense strand starting at position 2132 of SEQ ID NO: 1562569
ucaguuuccucauugauac

SEQ ID NO: 1756810 - RNA, 19 nt, Artificial Sequence
  Description of Artificial Sequence: Synthetic oligonucleotide
  Antisense strand to SEQ ID NO: 1756809
guaucaaugaggaaacuga

SEQ ID NO: 1756811 - RNA, 19 nt, Artificial Sequence
  Description of Artificial Sequence: Synthetic oligonucleotide
  Sense strand starting at position 2202 of SEQ ID NO: 1562569
ccaugauucuaugagaagg

SEQ ID NO: 1756812 - RNA, 19 nt, Artificial Sequence
  Description of Artificial Sequence: Synthetic oligonucleotide
  Antisense strand to SEQ ID NO: 1756811
ccuucucauagaaucaugg

SEQ ID NO: 1756813 - RNA, 19 nt, Artificial Sequence
  Description of Artificial Sequence: Synthetic oligonucleotide
  Sense strand starting at position 2204 of SEQ ID NO: 1562569
augauucuaugagaaggaa

SEQ ID NO: 1756814 - RNA, 19 nt, Artificial Sequence
  Description of Artificial Sequence: Synthetic oligonucleotide
  Antisense strand to SEQ ID NO: 1756813
uuccuucucauagaaucau

SEQ ID NO: 1756815 - RNA, 19 nt, Artificial Sequence
  Description of Artificial Sequence: Synthetic oligonucleotide
  Sense strand starting at position 2344 of SEQ ID NO: 1562569
gccugugaauggucuggau

SEQ ID NO: 1756816 - RNA, 19 nt, Artificial Sequence
  Description of Artificial Sequence: Synthetic oligonucleotide
  Antisense strand to SEQ ID NO: 1756815
auccagaccauucacaggc

SEQ ID NO: 1756817 - RNA, 19 nt, Artificial Sequence
  Description of Artificial Sequence: Synthetic oligonucleotide
  Sense strand starting at position 2347 of SEQ ID NO: 1562569
ugugaauggucuggaucca

SEQ ID NO: 1756818 - RNA, 19 nt, Artificial Sequence
  Description of Artificial Sequence: Synthetic oligonucleotide
  Antisense strand to SEQ ID NO: 1756817
uggauccagaccauucaca

SEQ ID NO: 1756819 - RNA, 19 nt, Artificial Sequence
  Description of Artificial Sequence: Synthetic oligonucleotide
  Sense strand starting at position 2348 of SEQ ID NO: 1562569
gugaauggucuggauccaa

SEQ ID NO: 1756820 - RNA, 19 nt, Artificial Sequence
  Description of Artificial Sequence: Synthetic oligonucleotide
  Antisense strand to SEQ ID NO: 1756819
uuggauccagaccauucac

SEQ ID NO: 1756821 - RNA, 19 nt, Artificial Sequence
  Description of Artificial Sequence: Synthetic oligonucleotide
  Sense strand starting at position 2368 of SEQ ID NO: 1562569
uggaccucugcccguuaaa

SEQ ID NO: 1756822 - RNA, 19 nt, Artificial Sequence
  Description of Artificial Sequence: Synthetic oligonucleotide
  Antisense strand to SEQ ID NO: 1756821
uuuaacgggcagaggucca

SEQ ID NO: 1756823 - RNA, 19 nt, Artificial Sequence
  Description of Artificial Sequence: Synthetic oligonucleotide
  Sense strand starting at position 2802 of SEQ ID NO: 1562569
cuacuaggagccugggaau

SEQ ID NO: 1756824 - RNA, 19 nt, Artificial Sequence
  Description of Artificial Sequence: Synthetic oligonucleotide
  Antisense strand to SEQ ID NO: 1756823
auucccaggcuccuaguag

SEQ ID NO: 1756825 - RNA, 19 nt, Artificial Sequence
  Description of Artificial Sequence: Synthetic oligonucleotide
  Sense strand starting at position 2967 of SEQ ID NO: 1562569
gugugucguuggcagggau

SEQ ID NO: 1756826 - RNA, 19 nt, Artificial Sequence
  Description of Artificial Sequence: Synthetic oligonucleotide
  Antisense strand to SEQ ID NO: 1756825
aucccugccaacgacacac

SEQ ID NO: 1756827 - RNA, 19 nt, Artificial Sequence
  Description of Artificial Sequence: Synthetic oligonucleotide
  Sense strand starting at position 3034 of SEQ ID NO: 1562569
acaguuaucccugaugcuc

SEQ ID NO: 1756828 - RNA, 19 nt, Artificial Sequence
  Description of Artificial Sequence: Synthetic oligonucleotide
  Antisense strand to SEQ ID NO: 1756827
gagcaucagggauaacugu

SEQ ID NO: 1756829 - RNA, 19 nt, Artificial Sequence
  Description of Artificial Sequence: Synthetic oligonucleotide
  Sense strand starting at position 3305 of SEQ ID NO: 1562569
gggcaucugcauugaagga

SEQ ID NO: 1756830 - RNA, 19 nt, Artificial Sequence
  Description of Artificial Sequence: Synthetic oligonucleotide
  Antisense strand to SEQ ID NO: 1756829
uccuucaaugcagaugccc

SEQ ID NO: 1756831 - RNA, 19 nt, Artificial Sequence
  Description of Artificial Sequence: Synthetic oligonucleotide
  Sense strand starting at position 3306 of SEQ ID NO: 1562569
ggcaucugcauugaaggau

SEQ ID NO: 1756832 - RNA, 19 nt, Artificial Sequence
  Description of Artificial Sequence: Synthetic oligonucleotide
  Antisense strand to SEQ ID NO: 1756831
auccuucaaugcagaugcc

SEQ ID NO: 1756833 - RNA, 19 nt, Artificial Sequence
  Description of Artificial Sequence: Synthetic oligonucleotide
  Sense strand starting at position 3325 of SEQ ID NO: 1562569
gccacagccuucugccaau

SEQ ID NO: 1756834 - RNA, 19 nt, Artificial Sequence
  Description of Artificial Sequence: Synthetic oligonucleotide
  Antisense strand to SEQ ID NO: 1756833
auuggcagaaggcuguggc

SEQ ID NO: 1756835 - RNA, 19 nt, Artificial Sequence
  Description of Artificial Sequence: Synthetic oligonucleotide
  Sense strand starting at position 3427 of SEQ ID NO: 1562569
acauaacacgucugccaaa

SEQ ID NO: 1756836 - RNA, 19 nt, Artificial Sequence
  Description of Artificial Sequence: Synthetic oligonucleotide
  Antisense strand to SEQ ID NO: 1756835
uuuggcagacguguuaugu

SEQ ID NO: 1756837 - RNA, 19 nt, Artificial Sequence
  Description of Artificial Sequence: Synthetic oligonucleotide
  Sense strand starting at position 3689 of SEQ ID NO: 1562569
ccgauaaccuucuugacua

SEQ ID NO: 1756838 - RNA, 19 nt, Artificial Sequence
  Description of Artificial Sequence: Synthetic oligonucleotide
  Antisense strand to SEQ ID NO: 1756837
uagucaagaagguuaucgg

SEQ ID NO: 1756839 - RNA, 19 nt, Artificial Sequence
  Description of Artificial Sequence: Synthetic oligonucleotide
  Sense strand starting at position 3690 of SEQ ID NO: 1562569
cgauaaccuucuugacuau

SEQ ID NO: 1756840 - RNA, 19 nt, Artificial Sequence
  Description of Artificial Sequence: Synthetic oligonucleotide
  Antisense strand to SEQ ID NO: 1756839
auagucaagaagguuaucg

SEQ ID NO: 1756841 - RNA, 19 nt, Artificial Sequence
  Description of Artificial Sequence: Synthetic oligonucleotide
  Sense strand starting at position 108 of SEQ ID NO: 1562570
ggauuugccugagaaacuc

SEQ ID NO: 1756842 - RNA, 19 nt, Artificial Sequence
  Description of Artificial Sequence: Synthetic oligonucleotide
  Antisense strand to SEQ ID NO: 1756841
gaguuucucaggcaaaucc

SEQ ID NO: 1756843 - RNA, 19 nt, Artificial Sequence
  Description of Artificial Sequence: Synthetic oligonucleotide
  Sense strand starting at position 224 of SEQ ID NO: 1562570
auggaucugccgggauguu

SEQ ID NO: 1756844 - RNA, 19 nt, Artificial Sequence
  Description of Artificial Sequence: Synthetic oligonucleotide
  Antisense strand to SEQ ID NO: 1756843
aacaucccggcagauccau

SEQ ID NO: 1756845 - RNA, 19 nt, Artificial Sequence
  Description of Artificial Sequence: Synthetic oligonucleotide
  Sense strand starting at position 1156 of SEQ ID NO: 1562570
ggaggagcucgcgaagguu

SEQ ID NO: 1756846 - RNA, 19 nt, Artificial Sequence
  Description of Artificial Sequence: Synthetic oligonucleotide
  Antisense strand to SEQ ID NO: 1756845
aaccuucgcgagcuccucc

SEQ ID NO: 1756847 - RNA, 19 nt, Artificial Sequence
  Description of Artificial Sequence: Synthetic oligonucleotide
  Sense strand starting at position 2699 of SEQ ID NO: 1562570
ccacuaugguccuguggaa

SEQ ID NO: 1756848 - RNA, 19 nt, Artificial Sequence
  Description of Artificial Sequence: Synthetic oligonucleotide
  Antisense strand to SEQ ID NO: 1756847
uuccacaggaccauagugg

SEQ ID NO: 1756849 - RNA, 19 nt, Artificial Sequence
  Description of Artificial Sequence: Synthetic oligonucleotide
  Sense strand starting at position 2721 of SEQ ID NO: 1562570
ugcuguuccuuaucagagu

SEQ ID NO: 1756850 - RNA, 19 nt, Artificial Sequence
  Description of Artificial Sequence: Synthetic oligonucleotide
  Antisense strand to SEQ ID NO: 1756849
acucugauaaggaacagca

SEQ ID NO: 1756851 - RNA, 19 nt, Artificial Sequence
  Description of Artificial Sequence: Synthetic oligonucleotide
  Sense strand starting at position 2722 of SEQ ID NO: 1562570
gcuguuccuuaucagaguu

SEQ ID NO: 1756852 - RNA, 19 nt, Artificial Sequence
  Description of Artificial Sequence: Synthetic oligonucleotide
  Antisense strand to SEQ ID NO: 1756851
aacucugauaaggaacagc

SEQ ID NO: 1756853 - RNA, 19 nt, Artificial Sequence
  Description of Artificial Sequence: Synthetic oligonucleotide
  Sense strand starting at position 2796 of SEQ ID NO: 1562570
gccugcuccucagaucuuu

SEQ ID NO: 1756854 - RNA, 19 nt, Artificial Sequence
  Description of Artificial Sequence: Synthetic oligonucleotide
  Antisense strand to SEQ ID NO: 1756853
aaagaucugaggagcaggc

SEQ ID NO: 1756855 - RNA, 19 nt, Artificial Sequence
  Description of Artificial Sequence: Synthetic oligonucleotide
  Sense strand starting at position 2942 of SEQ ID NO: 1562570
ggcaacagcuguuaucuca

SEQ ID NO: 1756856 - RNA, 19 nt, Artificial Sequence
  Description of Artificial Sequence: Synthetic oligonucleotide
  Antisense strand to SEQ ID NO: 1756855
ugagauaacagcuguugcc

SEQ ID NO: 1756857 - RNA, 19 nt, Artificial Sequence
  Description of Artificial Sequence: Synthetic oligonucleotide
  Sense strand starting at position 3102 of SEQ ID NO: 1562570
gggaguccugucugcacca

SEQ ID NO: 1756858 - RNA, 19 nt, Artificial Sequence
  Description of Artificial Sequence: Synthetic oligonucleotide
  Antisense strand to SEQ ID NO: 1756857
uggugcagacaggacuccc

SEQ ID NO: 1756859 - RNA, 19 nt, Artificial Sequence
  Description of Artificial Sequence: Synthetic oligonucleotide
  Sense strand starting at position 3104 of SEQ ID NO: 1562570
gaguccugucugcaccaca

SEQ ID NO: 1756860 - RNA, 19 nt, Artificial Sequence
  Description of Artificial Sequence: Synthetic oligonucleotide
  Antisense strand to SEQ ID NO: 1756859
uguggugcagacaggacuc

SEQ ID NO: 1756861 - RNA, 19 nt, Artificial Sequence
  Description of Artificial Sequence: Synthetic oligonucleotide
  Sense strand starting at position 3355 of SEQ ID NO: 1562570
ugggaauccuugcauucua

SEQ ID NO: 1756862 - RNA, 19 nt, Artificial Sequence
  Description of Artificial Sequence: Synthetic oligonucleotide
  Antisense strand to SEQ ID NO: 1756861
uagaaugcaaggauuccca

SEQ ID NO: 1756863 - RNA, 19 nt, Artificial Sequence
  Description of Artificial Sequence: Synthetic oligonucleotide
  Sense strand starting at position 3468 of SEQ ID NO: 1562570
gggcaugaccucuaucaca

SEQ ID NO: 1756864 - RNA, 19 nt, Artificial Sequence
  Description of Artificial Sequence: Synthetic oligonucleotide
  Antisense strand to SEQ ID NO: 1756863
ugugauagaggucaugccc

SEQ ID NO: 1756865 - RNA, 19 nt, Artificial Sequence
  Description of Artificial Sequence: Synthetic oligonucleotide
  Sense strand starting at position 3540 of SEQ ID NO: 1562570
gcaccuggccaguguguua

SEQ ID NO: 1756866 - RNA, 19 nt, Artificial Sequence
  Description of Artificial Sequence: Synthetic oligonucleotide
  Antisense strand to SEQ ID NO: 1756865
uaacacacuggccaggugc

SEQ ID NO: 1756867 - RNA, 19 nt, Artificial Sequence
  Description of Artificial Sequence: Synthetic oligonucleotide
  Sense strand starting at position 3545 of SEQ ID NO: 1562570
uggccaguguguuaggaga

SEQ ID NO: 1756868 - RNA, 19 nt, Artificial Sequence
  Description of Artificial Sequence: Synthetic oligonucleotide
  Antisense strand to SEQ ID NO: 1756867
ucuccuaacacacuggcca

SEQ ID NO: 1756869 - RNA, 19 nt, Artificial Sequence
  Description of Artificial Sequence: Synthetic oligonucleotide
  Sense strand starting at position 3547 of SEQ ID NO: 1562570
gccaguguguuaggagaag

SEQ ID NO: 1756870 - RNA, 19 nt, Artificial Sequence
  Description of Artificial Sequence: Synthetic oligonucleotide
  Antisense strand to SEQ ID NO: 1756869
cuucuccuaacacacuggc

SEQ ID NO: 1756871 - RNA, 19 nt, Artificial Sequence
  Description of Artificial Sequence: Synthetic oligonucleotide
  Sense strand starting at position 3629 of SEQ ID NO: 1562570
cuggcuuauuccugggauc

SEQ ID NO: 1756872 - RNA, 19 nt, Artificial Sequence
  Description of Artificial Sequence: Synthetic oligonucleotide
  Antisense strand to SEQ ID NO: 1756871
gaucccaggaauaagccag

SEQ ID NO: 1756873 - RNA, 19 nt, Artificial Sequence
  Description of Artificial Sequence: Synthetic oligonucleotide
  Sense strand starting at position 3631 of SEQ ID NO: 1562570
ggcuuauuccugggaucga

SEQ ID NO: 1756874 - RNA, 19 nt, Artificial Sequence
  Description of Artificial Sequence: Synthetic oligonucleotide
  Antisense strand to SEQ ID NO: 1756873
ucgaucccaggaauaagcc

SEQ ID NO: 1756875 - RNA, 19 nt, Artificial Sequence
  Description of Artificial Sequence: Synthetic oligonucleotide
  Sense strand starting at position 3632 of SEQ ID NO: 1562570
gcuuauuccugggaucgaa

SEQ ID NO: 1756876 - RNA, 19 nt, Artificial Sequence
  Description of Artificial Sequence: Synthetic oligonucleotide
  Antisense strand to SEQ ID NO: 1756875
uucgaucccaggaauaagc

SEQ ID NO: 1756877 - RNA, 19 nt, Artificial Sequence
  Description of Artificial Sequence: Synthetic oligonucleotide
  Sense strand starting at position 3690 of SEQ ID NO: 1562570
ugguccuuguguucccuaa

SEQ ID NO: 1756878 - RNA, 19 nt, Artificial Sequence
  Description of Artificial Sequence: Synthetic oligonucleotide
  Antisense strand to SEQ ID NO: 1756877
uuagggaacacaaggacca

SEQ ID NO: 1756879 - RNA, 19 nt, Artificial Sequence
  Description of Artificial Sequence: Synthetic oligonucleotide
  Sense strand starting at position 3692 of SEQ ID NO: 1562570
guccuuguguucccuaaug

SEQ ID NO: 1756880 - RNA, 19 nt, Artificial Sequence
  Description of Artificial Sequence: Synthetic oligonucleotide
  Antisense strand to SEQ ID NO: 1756879
cauuagggaacacaaggac

SEQ ID NO: 1756881 - RNA, 19 nt, Artificial Sequence
  Description of Artificial Sequence: Synthetic oligonucleotide
  Sense strand starting at position 3694 of SEQ ID NO: 1562570
ccuuguguucccuaauguc

SEQ ID NO: 1756882 - RNA, 19 nt, Artificial Sequence
  Description of Artificial Sequence: Synthetic oligonucleotide
  Antisense strand to SEQ ID NO: 1756881
gacauuagggaacacaagg

SEQ ID NO: 1756883 - RNA, 19 nt, Artificial Sequence
  Description of Artificial Sequence: Synthetic oligonucleotide
  Sense strand starting at position 3697 of SEQ ID NO: 1562570
uguguucccuaauguccaa

SEQ ID NO: 1756884 - RNA, 19 nt, Artificial Sequence
  Description of Artificial Sequence: Synthetic oligonucleotide
  Antisense strand to SEQ ID NO: 1756883
uuggacauuagggaacaca

SEQ ID NO: 1756885 - RNA, 19 nt, Artificial Sequence
  Description of Artificial Sequence: Synthetic oligonucleotide
  Sense strand starting at position 3748 of SEQ ID NO: 1562570
ccuagacagcuugaguuaa

SEQ ID NO: 1756886 - RNA, 19 nt, Artificial Sequence
  Description of Artificial Sequence: Synthetic oligonucleotide
  Antisense strand to SEQ ID NO: 1756885
uuaacucaagcugucuagg

SEQ ID NO: 1756887 - RNA, 19 nt, Artificial Sequence
  Description of Artificial Sequence: Synthetic oligonucleotide
  Sense strand starting at position 3750 of SEQ ID NO: 1562570
uagacagcuugaguuaaac

SEQ ID NO: 1756888 - RNA, 19 nt, Artificial Sequence
  Description of Artificial Sequence: Synthetic oligonucleotide
  Antisense strand to SEQ ID NO: 1756887
guuuaacucaagcugucua

SEQ ID NO: 1756889 - RNA, 19 nt, Artificial Sequence
  Description of Artificial Sequence: Synthetic oligonucleotide
  Sense strand starting at position 3912 of SEQ ID NO: 1562570
ggcuuuccucaguggagga

SEQ ID NO: 1756890 - RNA, 19 nt, Artificial Sequence
  Description of Artificial Sequence: Synthetic oligonucleotide
  Antisense strand to SEQ ID NO: 1756889
uccuccacugaggaaagcc

SEQ ID NO: 1756891 - RNA, 19 nt, Artificial Sequence
  Description of Artificial Sequence: Synthetic oligonucleotide
  Sense strand starting at position 164 of SEQ ID NO: 1562571
ugauguaggcguucuuguu

SEQ ID NO: 1756892 - RNA, 19 nt, Artificial Sequence
  Description of Artificial Sequence: Synthetic oligonucleotide
  Antisense strand to SEQ ID NO: 1756891
aacaagaacgccuacauca

SEQ ID NO: 1756893 - RNA, 19 nt, Artificial Sequence
  Description of Artificial Sequence: Synthetic oligonucleotide
  Sense strand starting at position 170 of SEQ ID NO: 1562571
aggcguucuuguucucuaa

SEQ ID NO: 1756894 - RNA, 19 nt, Artificial Sequence
  Description of Artificial Sequence: Synthetic oligonucleotide
  Antisense strand to SEQ ID NO: 1756893
uuagagaacaagaacgccu

SEQ ID NO: 1756895 - RNA, 19 nt, Artificial Sequence
  Description of Artificial Sequence: Synthetic oligonucleotide
  Sense strand starting at position 172 of SEQ ID NO: 1562571
gcguucuuguucucuaagu

SEQ ID NO: 1756896 - RNA, 19 nt, Artificial Sequence
  Description of Artificial Sequence: Synthetic oligonucleotide
  Antisense strand to SEQ ID NO: 1756895
acuuagagaacaagaacgc

SEQ ID NO: 1756897 - RNA, 19 nt, Artificial Sequence
  Description of Artificial Sequence: Synthetic oligonucleotide
  Sense strand starting at position 173 of SEQ ID NO: 1562571
cguucuuguucucuaagua

SEQ ID NO: 1756898 - RNA, 19 nt, Artificial Sequence
  Description of Artificial Sequence: Synthetic oligonucleotide
  Antisense strand to SEQ ID NO: 1756897
uacuuagagaacaagaacg

SEQ ID NO: 1756899 - RNA, 19 nt, Artificial Sequence
  Description of Artificial Sequence: Synthetic oligonucleotide
  Sense strand starting at position 194 of SEQ ID NO: 1562571
uuucccauuugccggaaau

SEQ ID NO: 1756900 - RNA, 19 nt, Artificial Sequence
  Description of Artificial Sequence: Synthetic oligonucleotide
  Antisense strand to SEQ ID NO: 1756899
auuuccggcaaaugggaaa

SEQ ID NO: 1756901 - RNA, 19 nt, Artificial Sequence
  Description of Artificial Sequence: Synthetic oligonucleotide
  Sense strand starting at position 195 of SEQ ID NO: 1562571
uucccauuugccggaaauu

SEQ ID NO: 1756902 - RNA, 19 nt, Artificial Sequence
  Description of Artificial Sequence: Synthetic oligonucleotide
  Antisense strand to SEQ ID NO: 1756901
aauuuccggcaaaugggaa

SEQ ID NO: 1756903 - RNA, 19 nt, Artificial Sequence
  Description of Artificial Sequence: Synthetic oligonucleotide
  Sense strand starting at position 289 of SEQ ID NO: 1562571
ugcagaaagguuugcacuu

SEQ ID NO: 1756904 - RNA, 19 nt, Artificial Sequence
  Description of Artificial Sequence: Synthetic oligonucleotide
  Antisense strand to SEQ ID NO: 1756903
aagugcaaaccuuucugca

SEQ ID NO: 1756905 - RNA, 19 nt, Artificial Sequence
  Description of Artificial Sequence: Synthetic oligonucleotide
  Sense strand starting at position 290 of SEQ ID NO: 1562571
gcagaaagguuugcacuuu

SEQ ID NO: 1756906 - RNA, 19 nt, Artificial Sequence
  Description of Artificial Sequence: Synthetic oligonucleotide
  Antisense strand to SEQ ID NO: 1756905
aaagugcaaaccuuucugc

SEQ ID NO: 1756907 - RNA, 19 nt, Artificial Sequence
  Description of Artificial Sequence: Synthetic oligonucleotide
  Sense strand starting at position 488 of SEQ ID NO: 1562571
gcucauggaugacuuguaa

SEQ ID NO: 1756908 - RNA, 19 nt, Artificial Sequence
  Description of Artificial Sequence: Synthetic oligonucleotide
  Antisense strand to SEQ ID NO: 1756907
uuacaagucauccaugagc

SEQ ID NO: 1756909 - RNA, 19 nt, Artificial Sequence
  Description of Artificial Sequence: Synthetic oligonucleotide
  Sense strand starting at position 515 of SEQ ID NO: 1562571
agaugaugaucacuuagca

SEQ ID NO: 1756910 - RNA, 19 nt, Artificial Sequence
  Description of Artificial Sequence: Synthetic oligonucleotide
  Antisense strand to SEQ ID NO: 1756909
ugcuaagugaucaucaucu

SEQ ID NO: 1756911 - RNA, 19 nt, Artificial Sequence
  Description of Artificial Sequence: Synthetic oligonucleotide
  Sense strand starting at position 559 of SEQ ID NO: 1562571
gcgccuaacgcuugaagga

SEQ ID NO: 1756912 - RNA, 19 nt, Artificial Sequence
  Description of Artificial Sequence: Synthetic oligonucleotide
  Antisense strand to SEQ ID NO: 1756911
uccuucaagcguuaggcgc

SEQ ID NO: 1756913 - RNA, 19 nt, Artificial Sequence
  Description of Artificial Sequence: Synthetic oligonucleotide
  Sense strand starting at position 774 of SEQ ID NO: 1562571
cacugaagccuugauacgu

SEQ ID NO: 1756914 - RNA, 19 nt, Artificial Sequence
  Description of Artificial Sequence: Synthetic oligonucleotide
  Antisense strand to SEQ ID NO: 1756913
acguaucaaggcuucagug

SEQ ID NO: 1756915 - RNA, 19 nt, Artificial Sequence
  Description of Artificial Sequence: Synthetic oligonucleotide
  Sense strand starting at position 779 of SEQ ID NO: 1562571
aagccuugauacguuauuu

SEQ ID NO: 1756916 - RNA, 19 nt, Artificial Sequence
  Description of Artificial Sequence: Synthetic oligonucleotide
  Antisense strand to SEQ ID NO: 1756915
aaauaacguaucaaggcuu

SEQ ID NO: 1756917 - RNA, 19 nt, Artificial Sequence
  Description of Artificial Sequence: Synthetic oligonucleotide
  Sense strand starting at position 1049 of SEQ ID NO: 1562571
ccaguagaucuacaaguug

SEQ ID NO: 1756918 - RNA, 19 nt, Artificial Sequence
  Description of Artificial Sequence: Synthetic oligonucleotide
  Antisense strand to SEQ ID NO: 1756917
caacuuguagaucuacugg

SEQ ID NO: 1756919 - RNA, 19 nt, Artificial Sequence
  Description of Artificial Sequence: Synthetic oligonucleotide
  Sense strand starting at position 1103 of SEQ ID NO: 1562571
aagaauacugaguggguca

SEQ ID NO: 1756920 - RNA, 19 nt, Artificial Sequence
  Description of Artificial Sequence: Synthetic oligonucleotide
  Antisense strand to SEQ ID NO: 1756919
ugacccacucaguauucuu

SEQ ID NO: 1756921 - RNA, 19 nt, Artificial Sequence
  Description of Artificial Sequence: Synthetic oligonucleotide
  Sense strand starting at position 1104 of SEQ ID NO: 1562571
agaauacugagugggucaa

SEQ ID NO: 1756922 - RNA, 19 nt, Artificial Sequence
  Description of Artificial Sequence: Synthetic oligonucleotide
  Antisense strand to SEQ ID NO: 1756921
uugacccacucaguauucu

SEQ ID NO: 1756923 - RNA, 19 nt, Artificial Sequence
  Description of Artificial Sequence: Synthetic oligonucleotide
  Sense strand starting at position 1105 of SEQ ID NO: 1562571
gaauacugagugggucaaa

SEQ ID NO: 1756924 - RNA, 19 nt, Artificial Sequence
  Description of Artificial Sequence: Synthetic oligonucleotide
  Antisense strand to SEQ ID NO: 1756923
uuugacccacucaguauuc

SEQ ID NO: 1756925 - RNA, 19 nt, Artificial Sequence
  Description of Artificial Sequence: Synthetic oligonucleotide
  Sense strand starting at position 1211 of SEQ ID NO: 1562571
guuuaacuaccucggacaa

SEQ ID NO: 1756926 - RNA, 19 nt, Artificial Sequence
  Description of Artificial Sequence: Synthetic oligonucleotide
  Antisense strand to SEQ ID NO: 1756925
uuguccgagguaguuaaac

SEQ ID NO: 1756927 - RNA, 19 nt, Artificial Sequence
  Description of Artificial Sequence: Synthetic oligonucleotide
  Sense strand starting at position 1212 of SEQ ID NO: 1562571
uuuaacuaccucggacaau

SEQ ID NO: 1756928 - RNA, 19 nt, Artificial Sequence
  Description of Artificial Sequence: Synthetic oligonucleotide
  Antisense strand to SEQ ID NO: 1756927
auuguccgagguaguuaaa

SEQ ID NO: 1756929 - RNA, 19 nt, Artificial Sequence
  Description of Artificial Sequence: Synthetic oligonucleotide
  Sense strand starting at position 1213 of SEQ ID NO: 1562571
uuaacuaccucggacaaua

SEQ ID NO: 1756930 - RNA, 19 nt, Artificial Sequence
  Description of Artificial Sequence: Synthetic oligonucleotide
  Antisense strand to SEQ ID NO: 1756929
uauuguccgagguaguuaa

SEQ ID NO: 1756931 - RNA, 19 nt, Artificial Sequence
  Description of Artificial Sequence: Synthetic oligonucleotide
  Sense strand starting at position 2507 of SEQ ID NO: 1562571
cggaaauacauguguccca

SEQ ID NO: 1756932 - RNA, 19 nt, Artificial Sequence
  Description of Artificial Sequence: Synthetic oligonucleotide
  Antisense strand to SEQ ID NO: 1756931
ugggacacauguauuuccg

SEQ ID NO: 1756933 - RNA, 19 nt, Artificial Sequence
  Description of Artificial Sequence: Synthetic oligonucleotide
  Sense strand starting at position 2512 of SEQ ID NO: 1562571
auacaugugucccaccuau

SEQ ID NO: 1756934 - RNA, 19 nt, Artificial Sequence
  Description of Artificial Sequence: Synthetic oligonucleotide
  Antisense strand to SEQ ID NO: 1756933
auaggugggacacauguau

SEQ ID NO: 1756935 - RNA, 19 nt, Artificial Sequence
  Description of Artificial Sequence: Synthetic oligonucleotide
  Sense strand starting at position 2680 of SEQ ID NO: 1562571
gcgugucuuaggcuaagca

SEQ ID NO: 1756936 - RNA, 19 nt, Artificial Sequence
  Description of Artificial Sequence: Synthetic oligonucleotide
  Antisense strand to SEQ ID NO: 1756935
ugcuuagccuaagacacgc

SEQ ID NO: 1756937 - RNA, 19 nt, Artificial Sequence
  Description of Artificial Sequence: Synthetic oligonucleotide
  Sense strand starting at position 2748 of SEQ ID NO: 1562571
ggagcccucugauggaaga

SEQ ID NO: 1756938 - RNA, 19 nt, Artificial Sequence
  Description of Artificial Sequence: Synthetic oligonucleotide
  Antisense strand to SEQ ID NO: 1756937
ucuuccaucagagggcucc

SEQ ID NO: 1756939 - RNA, 19 nt, Artificial Sequence
  Description of Artificial Sequence: Synthetic oligonucleotide
  Sense strand starting at position 2761 of SEQ ID NO: 1562571
ggaagagcucuccgcuuaa

SEQ ID NO: 1756940 - RNA, 19 nt, Artificial Sequence
  Description of Artificial Sequence: Synthetic oligonucleotide
  Antisense strand to SEQ ID NO: 1756939
uuaagcggagagcucuucc

SEQ ID NO: 1756941 - RNA, 19 nt, Artificial Sequence
  Description of Artificial Sequence: Synthetic oligonucleotide
  Sense strand starting at position 2765 of SEQ ID NO: 1562571
gagcucuccgcuuaagaag

SEQ ID NO: 1756942 - RNA, 19 nt, Artificial Sequence
  Description of Artificial Sequence: Synthetic oligonucleotide
  Antisense strand to SEQ ID NO: 1756941
cuucuuaagcggagagcuc

SEQ ID NO: 1756943 - RNA, 19 nt, Artificial Sequence
  Description of Artificial Sequence: Synthetic oligonucleotide
  Sense strand starting at position 2855 of SEQ ID NO: 1562571
gagagaguauuccugucgu

SEQ ID NO: 1756944 - RNA, 19 nt, Artificial Sequence
  Description of Artificial Sequence: Synthetic oligonucleotide
  Antisense strand to SEQ ID NO: 1756943
acgacaggaauacucucuc

SEQ ID NO: 1756945 - RNA, 19 nt, Artificial Sequence
  Description of Artificial Sequence: Synthetic oligonucleotide
  Sense strand starting at position 2861 of SEQ ID NO: 1562571
guauuccugucguuagggu

SEQ ID NO: 1756946 - RNA, 19 nt, Artificial Sequence
  Description of Artificial Sequence: Synthetic oligonucleotide
  Antisense strand to SEQ ID NO: 1756945
acccuaacgacaggaauac

SEQ ID NO: 1756947 - RNA, 19 nt, Artificial Sequence
  Description of Artificial Sequence: Synthetic oligonucleotide
  Sense strand starting at position 3208 of SEQ ID NO: 1562571
accugaauuggucacguau

SEQ ID NO: 1756948 - RNA, 19 nt, Artificial Sequence
  Description of Artificial Sequence: Synthetic oligonucleotide
  Antisense strand to SEQ ID NO: 1756947
auacgugaccaauucaggu

SEQ ID NO: 1756949 - RNA, 19 nt, Artificial Sequence
  Description of Artificial Sequence: Synthetic oligonucleotide
  Sense strand starting at position 3210 of SEQ ID NO: 1562571
cugaauuggucacguauuu

SEQ ID NO: 1756950 - RNA, 19 nt, Artificial Sequence
  Description of Artificial Sequence: Synthetic oligonucleotide
  Antisense strand to SEQ ID NO: 1756949
aaauacgugaccaauucag

SEQ ID NO: 1756951 - RNA, 19 nt, Artificial Sequence
  Description of Artificial Sequence: Synthetic oligonucleotide
  Sense strand starting at position 3220 of SEQ ID NO: 1562571
cacguauuuccaugagccu

SEQ ID NO: 1756952 - RNA, 19 nt, Artificial Sequence
  Description of Artificial Sequence: Synthetic oligonucleotide
  Antisense strand to SEQ ID NO: 1756951
aggcucauggaaauacgug

SEQ ID NO: 1756953 - RNA, 19 nt, Artificial Sequence
  Description of Artificial Sequence: Synthetic oligonucleotide
  Sense strand starting at position 3256 of SEQ ID NO: 1562571
gagugaacguucuguccau

SEQ ID NO: 1756954 - RNA, 19 nt, Artificial Sequence
  Description of Artificial Sequence: Synthetic oligonucleotide
  Antisense strand to SEQ ID NO: 1756953
auggacagaacguucacuc

SEQ ID NO: 1756955 - RNA, 19 nt, Artificial Sequence
  Description of Artificial Sequence: Synthetic oligonucleotide
  Sense strand starting at position 3257 of SEQ ID NO: 1562571
agugaacguucuguccaua

SEQ ID NO: 1756956 - RNA, 19 nt, Artificial Sequence
  Description of Artificial Sequence: Synthetic oligonucleotide
  Antisense strand to SEQ ID NO: 1756955
uauggacagaacguucacu

SEQ ID NO: 1756957 - RNA, 19 nt, Artificial Sequence
  Description of Artificial Sequence: Synthetic oligonucleotide
  Sense strand starting at position 3260 of SEQ ID NO: 1562571
gaacguucuguccauaacu

SEQ ID NO: 1756958 - RNA, 19 nt, Artificial Sequence
  Description of Artificial Sequence: Synthetic oligonucleotide
  Antisense strand to SEQ ID NO: 1756957
aguuauggacagaacguuc

SEQ ID NO: 1756959 - RNA, 19 nt, Artificial Sequence
  Description of Artificial Sequence: Synthetic oligonucleotide
  Sense strand starting at position 3262 of SEQ ID NO: 1562571
acguucuguccauaacuua

SEQ ID NO: 1756960 - RNA, 19 nt, Artificial Sequence
  Description of Artificial Sequence: Synthetic oligonucleotide
  Antisense strand to SEQ ID NO: 1756959
uaaguuauggacagaacgu

SEQ ID NO: 1756961 - RNA, 19 nt, Artificial Sequence
  Description of Artificial Sequence: Synthetic oligonucleotide
  Sense strand starting at position 3355 of SEQ ID NO: 1562571
gccugauucugucaucaaa

SEQ ID NO: 1756962 - RNA, 19 nt, Artificial Sequence
  Description of Artificial Sequence: Synthetic oligonucleotide
  Antisense strand to SEQ ID NO: 1756961
uuugaugacagaaucaggc

SEQ ID NO: 1756963 - RNA, 19 nt, Artificial Sequence
  Description of Artificial Sequence: Synthetic oligonucleotide
  Sense strand starting at position 3854 of SEQ ID NO: 1562571
ggucgucuuugacuucagu

SEQ ID NO: 1756964 - RNA, 19 nt, Artificial Sequence
  Description of Artificial Sequence: Synthetic oligonucleotide
  Antisense strand to SEQ ID NO: 1756963
acugaagucaaagacgacc

SEQ ID NO: 1756965 - RNA, 19 nt, Artificial Sequence
  Description of Artificial Sequence: Synthetic oligonucleotide
  Sense strand starting at position 3911 of SEQ ID NO: 1562571
guauauuaaguuuggaaca

SEQ ID NO: 1756966 - RNA, 19 nt, Artificial Sequence
  Description of Artificial Sequence: Synthetic oligonucleotide
  Antisense strand to SEQ ID NO: 1756965
uguuccaaacuuaauauac

SEQ ID NO: 1756967 - RNA, 19 nt, Artificial Sequence
  Description of Artificial Sequence: Synthetic oligonucleotide
  Sense strand starting at position 3958 of SEQ ID NO: 1562571
ugugcugggugaucuuaga

SEQ ID NO: 1756968 - RNA, 19 nt, Artificial Sequence
  Description of Artificial Sequence: Synthetic oligonucleotide
  Antisense strand to SEQ ID NO: 1756967
ucuaagaucacccagcaca

SEQ ID NO: 1756969 - RNA, 19 nt, Artificial Sequence
  Description of Artificial Sequence: Synthetic oligonucleotide
  Sense strand starting at position 3964 of SEQ ID NO: 1562571
gggugaucuuagaggcagu

SEQ ID NO: 1756970 - RNA, 19 nt, Artificial Sequence
  Description of Artificial Sequence: Synthetic oligonucleotide
  Antisense strand to SEQ ID NO: 1756969
acugccucuaagaucaccc

SEQ ID NO: 1756971 - RNA, 19 nt, Artificial Sequence
  Description of Artificial Sequence: Synthetic oligonucleotide
  Sense strand starting at position 199 of SEQ ID NO: 1562572
ccuuuacagucacagaaga

SEQ ID NO: 1756972 - RNA, 19 nt, Artificial Sequence
  Description of Artificial Sequence: Synthetic oligonucleotide
  Antisense strand to SEQ ID NO: 1756971
ucuucugugacuguaaagg

SEQ ID NO: 1756973 - RNA, 19 nt, Artificial Sequence
  Description of Artificial Sequence: Synthetic oligonucleotide
  Sense strand starting at position 376 of SEQ ID NO: 1562572
gcuacuaaguuauuaugca

SEQ ID NO: 1756974 - RNA, 19 nt, Artificial Sequence
  Description of Artificial Sequence: Synthetic oligonucleotide
  Antisense strand to SEQ ID NO: 1756973
ugcauaauaacuuaguagc

SEQ ID NO: 1756975 - RNA, 19 nt, Artificial Sequence
  Description of Artificial Sequence: Synthetic oligonucleotide
  Sense strand starting at position 564 of SEQ ID NO: 1562572
agaauagaauaucagauga

SEQ ID NO: 1756976 - RNA, 19 nt, Artificial Sequence
  Description of Artificial Sequence: Synthetic oligonucleotide
  Antisense strand to SEQ ID NO: 1756975
ucaucugauauucuauucu

SEQ ID NO: 1756977 - RNA, 19 nt, Artificial Sequence
  Description of Artificial Sequence: Synthetic oligonucleotide
  Sense strand starting at position 645 of SEQ ID NO: 1562572
cgcuaucuacgccaagagu

SEQ ID NO: 1756978 - RNA, 19 nt, Artificial Sequence
  Description of Artificial Sequence: Synthetic oligonucleotide
  Antisense strand to SEQ ID NO: 1756977
acucuuggcguagauagcg

SEQ ID NO: 1756979 - RNA, 19 nt, Artificial Sequence
  Description of Artificial Sequence: Synthetic oligonucleotide
  Sense strand starting at position 648 of SEQ ID NO: 1562572
uaucuacgccaagaguuua

SEQ ID NO: 1756980 - RNA, 19 nt, Artificial Sequence
  Description of Artificial Sequence: Synthetic oligonucleotide
  Antisense strand to SEQ ID NO: 1756979
uaaacucuuggcguagaua

SEQ ID NO: 1756981 - RNA, 19 nt, Artificial Sequence
  Description of Artificial Sequence: Synthetic oligonucleotide
  Sense strand starting at position 653 of SEQ ID NO: 1562572
acgccaagaguuuauuaag

SEQ ID NO: 1756982 - RNA, 19 nt, Artificial Sequence
  Description of Artificial Sequence: Synthetic oligonucleotide
  Antisense strand to SEQ ID NO: 1756981
cuuaauaaacucuuggcgu

SEQ ID NO: 1756983 - RNA, 19 nt, Artificial Sequence
  Description of Artificial Sequence: Synthetic oligonucleotide
  Sense strand starting at position 736 of SEQ ID NO: 1562572
gguuguuuggaggauuaau

SEQ ID NO: 1756984 - RNA, 19 nt, Artificial Sequence
  Description of Artificial Sequence: Synthetic oligonucleotide
  Antisense strand to SEQ ID NO: 1756983
auuaauccuccaaacaacc

SEQ ID NO: 1756985 - RNA, 19 nt, Artificial Sequence
  Description of Artificial Sequence: Synthetic oligonucleotide
  Sense strand starting at position 773 of SEQ ID NO: 1562572
gguuaagaccugggucuca

SEQ ID NO: 1756986 - RNA, 19 nt, Artificial Sequence
  Description of Artificial Sequence: Synthetic oligonucleotide
  Antisense strand to SEQ ID NO: 1756985
ugagacccaggucuuaacc

SEQ ID NO: 1756987 - RNA, 19 nt, Artificial Sequence
  Description of Artificial Sequence: Synthetic oligonucleotide
  Sense strand starting at position 801 of SEQ ID NO: 1562572
aucugaaugucugcuauua

SEQ ID NO: 1756988 - RNA, 19 nt, Artificial Sequence
  Description of Artificial Sequence: Synthetic oligonucleotide
  Antisense strand to SEQ ID NO: 1756987
uaauagcagacauucagau

SEQ ID NO: 1756989 - RNA, 19 nt, Artificial Sequence
  Description of Artificial Sequence: Synthetic oligonucleotide
  Sense strand starting at position 823 of SEQ ID NO: 1562572
uaguguaucgcccaauauu

SEQ ID NO: 1756990 - RNA, 19 nt, Artificial Sequence
  Description of Artificial Sequence: Synthetic oligonucleotide
  Antisense strand to SEQ ID NO: 1756989
aauauugggcgauacacua

SEQ ID NO: 1756991 - RNA, 19 nt, Artificial Sequence
  Description of Artificial Sequence: Synthetic oligonucleotide
  Sense strand starting at position 877 of SEQ ID NO: 1562572
gaaugaaaguuuccuguuu

SEQ ID NO: 1756992 - RNA, 19 nt, Artificial Sequence
  Description of Artificial Sequence: Synthetic oligonucleotide
  Antisense strand to SEQ ID NO: 1756991
aaacaggaaacuuucauuc

SEQ ID NO: 1756993 - RNA, 19 nt, Artificial Sequence
  Description of Artificial Sequence: Synthetic oligonucleotide
  Sense strand starting at position 878 of SEQ ID NO: 1562572
aaugaaaguuuccuguuug

SEQ ID NO: 1756994 - RNA, 19 nt, Artificial Sequence
  Description of Artificial Sequence: Synthetic oligonucleotide
  Antisense strand to SEQ ID NO: 1756993
caaacaggaaacuuucauu

SEQ ID NO: 1756995 - RNA, 19 nt, Artificial Sequence
  Description of Artificial Sequence: Synthetic oligonucleotide
  Sense strand starting at position 895 of SEQ ID NO: 1562572
uggagaguuccaugguaca

SEQ ID NO: 1756996 - RNA, 19 nt, Artificial Sequence
  Description of Artificial Sequence: Synthetic oligonucleotide
  Antisense strand to SEQ ID NO: 1756995
uguaccauggaacucucca

SEQ ID NO: 1756997 - RNA, 19 nt, Artificial Sequence
  Description of Artificial Sequence: Synthetic oligonucleotide
  Sense strand starting at position 929 of SEQ ID NO: 1562572
gucaaauuguuuccauguu

SEQ ID NO: 1756998 - RNA, 19 nt, Artificial Sequence
  Description of Artificial Sequence: Synthetic oligonucleotide
  Antisense strand to SEQ ID NO: 1756997
aacauggaaacaauuugac

SEQ ID NO: 1756999 - RNA, 19 nt, Artificial Sequence
  Description of Artificial Sequence: Synthetic oligonucleotide
  Sense strand starting at position 953 of SEQ ID NO: 1562572
ugccguuugagagggcauu

SEQ ID NO: 1757000 - RNA, 19 nt, Artificial Sequence
  Description of Artificial Sequence: Synthetic oligonucleotide
  Antisense strand to SEQ ID NO: 1756999
aaugcccucucaaacggca

SEQ ID NO: 1757001 - RNA, 19 nt, Artificial Sequence
  Description of Artificial Sequence: Synthetic oligonucleotide
  Sense strand starting at position 987 of SEQ ID NO: 1562572
guggcacuuuccucugaaa

SEQ ID NO: 1757002 - RNA, 19 nt, Artificial Sequence
  Description of Artificial Sequence: Synthetic oligonucleotide
  Antisense strand to SEQ ID NO: 1757001
uuucagaggaaagugccac

SEQ ID NO: 1757003 - RNA, 19 nt, Artificial Sequence
  Description of Artificial Sequence: Synthetic oligonucleotide
  Sense strand starting at position 989 of SEQ ID NO: 1562572
ggcacuuuccucugaaacu

SEQ ID NO: 1757004 - RNA, 19 nt, Artificial Sequence
  Description of Artificial Sequence: Synthetic oligonucleotide
  Antisense strand to SEQ ID NO: 1757003
aguuucagaggaaagugcc

SEQ ID NO: 1757005 - RNA, 19 nt, Artificial Sequence
  Description of Artificial Sequence: Synthetic oligonucleotide
  Sense strand starting at position 999 of SEQ ID NO: 1562572
ucugaaacuugaggagaaa

SEQ ID NO: 1757006 - RNA, 19 nt, Artificial Sequence
  Description of Artificial Sequence: Synthetic oligonucleotide
  Antisense strand to SEQ ID NO: 1757005
uuucuccucaaguuucaga

SEQ ID NO: 1757007 - RNA, 19 nt, Artificial Sequence
  Description of Artificial Sequence: Synthetic oligonucleotide
  Sense strand starting at position 1011 of SEQ ID NO: 1562572
ggagaaacauuaucgcucu

SEQ ID NO: 1757008 - RNA, 19 nt, Artificial Sequence
  Description of Artificial Sequence: Synthetic oligonucleotide
  Antisense strand to SEQ ID NO: 1757007
agagcgauaauguuucucc

SEQ ID NO: 1757009 - RNA, 19 nt, Artificial Sequence
  Description of Artificial Sequence: Synthetic oligonucleotide
  Sense strand starting at position 1051 of SEQ ID NO: 1562572
ucaacucuucuggagcuau

SEQ ID NO: 1757010 - RNA, 19 nt, Artificial Sequence
  Description of Artificial Sequence: Synthetic oligonucleotide
  Antisense strand to SEQ ID NO: 1757009
auagcuccagaagaguuga

SEQ ID NO: 1757011 - RNA, 19 nt, Artificial Sequence
  Description of Artificial Sequence: Synthetic oligonucleotide
  Sense strand starting at position 1086 of SEQ ID NO: 1562572
cuaagaaguucucuaugca

SEQ ID NO: 1757012 - RNA, 19 nt, Artificial Sequence
  Description of Artificial Sequence: Synthetic oligonucleotide
  Antisense strand to SEQ ID NO: 1757011
ugcauagagaacuucuuag

SEQ ID NO: 1757013 - RNA, 19 nt, Artificial Sequence
  Description of Artificial Sequence: Synthetic oligonucleotide
  Sense strand starting at position 1087 of SEQ ID NO: 1562572
uaagaaguucucuaugcag

SEQ ID NO: 1757014 - RNA, 19 nt, Artificial Sequence
  Description of Artificial Sequence: Synthetic oligonucleotide
  Antisense strand to SEQ ID NO: 1757013
cugcauagagaacuucuua

SEQ ID NO: 1757015 - RNA, 19 nt, Artificial Sequence
  Description of Artificial Sequence: Synthetic oligonucleotide
  Sense strand starting at position 1148 of SEQ ID NO: 1562572
cccggagucuucuccuaag

SEQ ID NO: 1757016 - RNA, 19 nt, Artificial Sequence
  Description of Artificial Sequence: Synthetic oligonucleotide
  Antisense strand to SEQ ID NO: 1757015
cuuaggagaagacuccggg

SEQ ID NO: 1757017 - RNA, 19 nt, Artificial Sequence
  Description of Artificial Sequence: Synthetic oligonucleotide
  Sense strand starting at position 1219 of SEQ ID NO: 1562572
ccaguccugucacuaacua

SEQ ID NO: 1757018 - RNA, 19 nt, Artificial Sequence
  Description of Artificial Sequence: Synthetic oligonucleotide
  Antisense strand to SEQ ID NO: 1757017
uaguuagugacaggacugg

SEQ ID NO: 1757019 - RNA, 19 nt, Artificial Sequence
  Description of Artificial Sequence: Synthetic oligonucleotide
  Sense strand starting at position 1308 of SEQ ID NO: 1562572
ccaguuccguucuuaauag

SEQ ID NO: 1757020 - RNA, 19 nt, Artificial Sequence
  Description of Artificial Sequence: Synthetic oligonucleotide
  Antisense strand to SEQ ID NO: 1757019
cuauuaagaacggaacugg

SEQ ID NO: 1757021 - RNA, 19 nt, Artificial Sequence
  Description of Artificial Sequence: Synthetic oligonucleotide
  Sense strand starting at position 2102 of SEQ ID NO: 1562572
cugcuucugccugagaauu

SEQ ID NO: 1757022 - RNA, 19 nt, Artificial Sequence
  Description of Artificial Sequence: Synthetic oligonucleotide
  Antisense strand to SEQ ID NO: 1757021
aauucucaggcagaagcag

SEQ ID NO: 1757023 - RNA, 19 nt, Artificial Sequence
  Description of Artificial Sequence: Synthetic oligonucleotide
  Sense strand starting at position 2129 of SEQ ID NO: 1562572
ucgcuucuuugaccagaaa

SEQ ID NO: 1757024 - RNA, 19 nt, Artificial Sequence
  Description of Artificial Sequence: Synthetic oligonucleotide
  Antisense strand to SEQ ID NO: 1757023
uuucuggucaaagaagcga

SEQ ID NO: 1757025 - RNA, 19 nt, Artificial Sequence
  Description of Artificial Sequence: Synthetic oligonucleotide
  Sense strand starting at position 2130 of SEQ ID NO: 1562572
cgcuucuuugaccagaaac

SEQ ID NO: 1757026 - RNA, 19 nt, Artificial Sequence
  Description of Artificial Sequence: Synthetic oligonucleotide
  Antisense strand to SEQ ID NO: 1757025
guuucuggucaaagaagcg

SEQ ID NO: 1757027 - RNA, 19 nt, Artificial Sequence
  Description of Artificial Sequence: Synthetic oligonucleotide
  Sense strand starting at position 2151 of SEQ ID NO: 1562572
gauugaugcuuccuacguu

SEQ ID NO: 1757028 - RNA, 19 nt, Artificial Sequence
  Description of Artificial Sequence: Synthetic oligonucleotide
  Antisense strand to SEQ ID NO: 1757027
aacguaggaagcaucaauc

SEQ ID NO: 1757029 - RNA, 19 nt, Artificial Sequence
  Description of Artificial Sequence: Synthetic oligonucleotide
  Sense strand starting at position 2154 of SEQ ID NO: 1562572
ugaugcuuccuacguuacu

SEQ ID NO: 1757030 - RNA, 19 nt, Artificial Sequence
  Description of Artificial Sequence: Synthetic oligonucleotide
  Antisense strand to SEQ ID NO: 1757029
aguaacguaggaagcauca

SEQ ID NO: 1757031 - RNA, 19 nt, Artificial Sequence
  Description of Artificial Sequence: Synthetic oligonucleotide
  Sense strand starting at position 2289 of SEQ ID NO: 1562572
ucgcuugaggccgacagau

SEQ ID NO: 1757032 - RNA, 19 nt, Artificial Sequence
  Description of Artificial Sequence: Synthetic oligonucleotide
  Antisense strand to SEQ ID NO: 1757031
aucugucggccucaagcga

SEQ ID NO: 1757033 - RNA, 19 nt, Artificial Sequence
  Description of Artificial Sequence: Synthetic oligonucleotide
  Sense strand starting at position 2446 of SEQ ID NO: 1562572
guguguacgcuugcuguua

SEQ ID NO: 1757034 - RNA, 19 nt, Artificial Sequence
  Description of Artificial Sequence: Synthetic oligonucleotide
  Antisense strand to SEQ ID NO: 1757033
uaacagcaagcguacacac

SEQ ID NO: 1757035 - RNA, 19 nt, Artificial Sequence
  Description of Artificial Sequence: Synthetic oligonucleotide
  Sense strand starting at position 2511 of SEQ ID NO: 1562572
cucggcucuaaggagaaau

SEQ ID NO: 1757036 - RNA, 19 nt, Artificial Sequence
  Description of Artificial Sequence: Synthetic oligonucleotide
  Antisense strand to SEQ ID NO: 1757035
auuucuccuuagagccgag

SEQ ID NO: 1757037 - RNA, 19 nt, Artificial Sequence
  Description of Artificial Sequence: Synthetic oligonucleotide
  Sense strand starting at position 3455 of SEQ ID NO: 1562572
gcuugagcccaguacuaug

SEQ ID NO: 1757038 - RNA, 19 nt, Artificial Sequence
  Description of Artificial Sequence: Synthetic oligonucleotide
  Antisense strand to SEQ ID NO: 1757037
cauaguacugggcucaagc

SEQ ID NO: 1757039 - RNA, 19 nt, Artificial Sequence
  Description of Artificial Sequence: Synthetic oligonucleotide
  Sense strand starting at position 3466 of SEQ ID NO: 1562572
guacuaugcugcuuugaaa

SEQ ID NO: 1757040 - RNA, 19 nt, Artificial Sequence
  Description of Artificial Sequence: Synthetic oligonucleotide
  Antisense strand to SEQ ID NO: 1757039
uuucaaagcagcauaguac

SEQ ID NO: 1757041 - RNA, 19 nt, Artificial Sequence
  Description of Artificial Sequence: Synthetic oligonucleotide
  Sense strand starting at position 3480 of SEQ ID NO: 1562572
ugaaauuacuuguuucuga

SEQ ID NO: 1757042 - RNA, 19 nt, Artificial Sequence
  Description of Artificial Sequence: Synthetic oligonucleotide
  Antisense strand to SEQ ID NO: 1757041
ucagaaacaaguaauuuca

SEQ ID NO: 1757043 - RNA, 19 nt, Artificial Sequence
  Description of Artificial Sequence: Synthetic oligonucleotide
  Sense strand starting at position 3481 of SEQ ID NO: 1562572
gaaauuacuuguuucugag

SEQ ID NO: 1757044 - RNA, 19 nt, Artificial Sequence
  Description of Artificial Sequence: Synthetic oligonucleotide
  Antisense strand to SEQ ID NO: 1757043
cucagaaacaaguaauuuc

SEQ ID NO: 1757045 - RNA, 19 nt, Artificial Sequence
  Description of Artificial Sequence: Synthetic oligonucleotide
  Sense strand starting at position 3491 of SEQ ID NO: 1562572
guuucugagugccuuacua

SEQ ID NO: 1757046 - RNA, 19 nt, Artificial Sequence
  Description of Artificial Sequence: Synthetic oligonucleotide
  Antisense strand to SEQ ID NO: 1757045
uaguaaggcacucagaaac

SEQ ID NO: 1757047 - RNA, 19 nt, Artificial Sequence
  Description of Artificial Sequence: Synthetic oligonucleotide
  Sense strand starting at position 3493 of SEQ ID NO: 1562572
uucugagugccuuacuaaa

SEQ ID NO: 1757048 - RNA, 19 nt, Artificial Sequence
  Description of Artificial Sequence: Synthetic oligonucleotide
  Antisense strand to SEQ ID NO: 1757047
uuuaguaaggcacucagaa

SEQ ID NO: 1757049 - RNA, 19 nt, Artificial Sequence
  Description of Artificial Sequence: Synthetic oligonucleotide
  Sense strand starting at position 3549 of SEQ ID NO: 1562572
uuuauuugcugagaguuaa

SEQ ID NO: 1757050 - RNA, 19 nt, Artificial Sequence
  Description of Artificial Sequence: Synthetic oligonucleotide
  Antisense strand to SEQ ID NO: 1757049
uuaacucucagcaaauaaa

SEQ ID NO: 1757051 - RNA, 19 nt, Artificial Sequence
  Description of Artificial Sequence: Synthetic oligonucleotide
  Sense strand starting at position 21 of SEQ ID NO: 1562573
aacccugcucuguggugaa

SEQ ID NO: 1757052 - RNA, 19 nt, Artificial Sequence
  Description of Artificial Sequence: Synthetic oligonucleotide
  Antisense strand to SEQ ID NO: 1757051
uucaccacagagcaggguu

SEQ ID NO: 1757053 - RNA, 19 nt, Artificial Sequence
  Description of Artificial Sequence: Synthetic oligonucleotide
  Sense strand starting at position 25 of SEQ ID NO: 1562573
cugcucuguggugaacaga

SEQ ID NO: 1757054 - RNA, 19 nt, Artificial Sequence
  Description of Artificial Sequence: Synthetic oligonucleotide
  Antisense strand to SEQ ID NO: 1757053
ucuguucaccacagagcag

SEQ ID NO: 1757055 - RNA, 19 nt, Artificial Sequence
  Description of Artificial Sequence: Synthetic oligonucleotide
  Sense strand starting at position 471 of SEQ ID NO: 1562573
ggcauaagcugccuuguuu

SEQ ID NO: 1757056 - RNA, 19 nt, Artificial Sequence
  Description of Artificial Sequence: Synthetic oligonucleotide
  Antisense strand to SEQ ID NO: 1757055
aaacaaggcagcuuaugcc

SEQ ID NO: 1757057 - RNA, 19 nt, Artificial Sequence
  Description of Artificial Sequence: Synthetic oligonucleotide
  Sense strand starting at position 477 of SEQ ID NO: 1562573
agcugccuuguuugcaaau

SEQ ID NO: 1757058 - RNA, 19 nt, Artificial Sequence
  Description of Artificial Sequence: Synthetic oligonucleotide
  Antisense strand to SEQ ID NO: 1757057
auuugcaaacaaggcagcu

SEQ ID NO: 1757059 - RNA, 19 nt, Artificial Sequence
  Description of Artificial Sequence: Synthetic oligonucleotide
  Sense strand starting at position 479 of SEQ ID NO: 1562573
cugccuuguuugcaaauga

SEQ ID NO: 1757060 - RNA, 19 nt, Artificial Sequence
  Description of Artificial Sequence: Synthetic oligonucleotide
  Antisense strand to SEQ ID NO: 1757059
ucauuugcaaacaaggcag

SEQ ID NO: 1757061 - RNA, 19 nt, Artificial Sequence
  Description of Artificial Sequence: Synthetic oligonucleotide
  Sense strand starting at position 527 of SEQ ID NO: 1562573
uccaguuuccucuggaagu

SEQ ID NO: 1757062 - RNA, 19 nt, Artificial Sequence
  Description of Artificial Sequence: Synthetic oligonucleotide
  Antisense strand to SEQ ID NO: 1757061
acuuccagaggaaacugga

SEQ ID NO: 1757063 - RNA, 19 nt, Artificial Sequence
  Description of Artificial Sequence: Synthetic oligonucleotide
  Sense strand starting at position 528 of SEQ ID NO: 1562573
ccaguuuccucuggaaguu

SEQ ID NO: 1757064 - RNA, 19 nt, Artificial Sequence
  Description of Artificial Sequence: Synthetic oligonucleotide
  Antisense strand to SEQ ID NO: 1757063
aacuuccagaggaaacugg

SEQ ID NO: 1757065 - RNA, 19 nt, Artificial Sequence
  Description of Artificial Sequence: Synthetic oligonucleotide
  Sense strand starting at position 552 of SEQ ID NO: 1562573
ugaagucucacuugaggug

SEQ ID NO: 1757066 - RNA, 19 nt, Artificial Sequence
  Description of Artificial Sequence: Synthetic oligonucleotide
  Antisense strand to SEQ ID NO: 1757065
caccucaagugagacuuca

SEQ ID NO: 1757067 - RNA, 19 nt, Artificial Sequence
  Description of Artificial Sequence: Synthetic oligonucleotide
  Sense strand starting at position 586 of SEQ ID NO: 1562573
uggucugguccagauacca

SEQ ID NO: 1757068 - RNA, 19 nt, Artificial Sequence
  Description of Artificial Sequence: Synthetic oligonucleotide
  Antisense strand to SEQ ID NO: 1757067
ugguaucuggaccagacca

SEQ ID NO: 1757069 - RNA, 19 nt, Artificial Sequence
  Description of Artificial Sequence: Synthetic oligonucleotide
  Sense strand starting at position 1069 of SEQ ID NO: 1562573
cggccuacugugugcuaga

SEQ ID NO: 1757070 - RNA, 19 nt, Artificial Sequence
  Description of Artificial Sequence: Synthetic oligonucleotide
  Antisense strand to SEQ ID NO: 1757069
ucuagcacacaguaggccg

SEQ ID NO: 1757071 - RNA, 19 nt, Artificial Sequence
  Description of Artificial Sequence: Synthetic oligonucleotide
  Sense strand starting at position 1174 of SEQ ID NO: 1562573
gagugcuauuccuugccca

SEQ ID NO: 1757072 - RNA, 19 nt, Artificial Sequence
  Description of Artificial Sequence: Synthetic oligonucleotide
  Antisense strand to SEQ ID NO: 1757071
ugggcaaggaauagcacuc

SEQ ID NO: 1757073 - RNA, 19 nt, Artificial Sequence
  Description of Artificial Sequence: Synthetic oligonucleotide
  Sense strand starting at position 1175 of SEQ ID NO: 1562573
agugcuauuccuugcccau

SEQ ID NO: 1757074 - RNA, 19 nt, Artificial Sequence
  Description of Artificial Sequence: Synthetic oligonucleotide
  Antisense strand to SEQ ID NO: 1757073
augggcaaggaauagcacu

SEQ ID NO: 1757075 - RNA, 19 nt, Artificial Sequence
  Description of Artificial Sequence: Synthetic oligonucleotide
  Sense strand starting at position 1177 of SEQ ID NO: 1562573
ugcuauuccuugcccauga

SEQ ID NO: 1757076 - RNA, 19 nt, Artificial Sequence
  Description of Artificial Sequence: Synthetic oligonucleotide
  Antisense strand to SEQ ID NO: 1757075
ucaugggcaaggaauagca

SEQ ID NO: 1757077 - RNA, 19 nt, Artificial Sequence
  Description of Artificial Sequence: Synthetic oligonucleotide
  Sense strand starting at position 2309 of SEQ ID NO: 1562573
uugaaucacucugagaaac

SEQ ID NO: 1757078 - RNA, 19 nt, Artificial Sequence
  Description of Artificial Sequence: Synthetic oligonucleotide
  Antisense strand to SEQ ID NO: 1757077
guuucucagagugauucaa

SEQ ID NO: 1757079 - RNA, 19 nt, Artificial Sequence
  Description of Artificial Sequence: Synthetic oligonucleotide
  Sense strand starting at position 2804 of SEQ ID NO: 1562573
ggccauccucugggacuau

SEQ ID NO: 1757080 - RNA, 19 nt, Artificial Sequence
  Description of Artificial Sequence: Synthetic oligonucleotide
  Antisense strand to SEQ ID NO: 1757079
auagucccagaggauggcc

SEQ ID NO: 1757081 - RNA, 19 nt, Artificial Sequence
  Description of Artificial Sequence: Synthetic oligonucleotide
  Sense strand starting at position 2805 of SEQ ID NO: 1562573
gccauccucugggacuauu

SEQ ID NO: 1757082 - RNA, 19 nt, Artificial Sequence
  Description of Artificial Sequence: Synthetic oligonucleotide
  Antisense strand to SEQ ID NO: 1757081
aauagucccagaggauggc

SEQ ID NO: 1757083 - RNA, 19 nt, Artificial Sequence
  Description of Artificial Sequence: Synthetic oligonucleotide
  Sense strand starting at position 3201 of SEQ ID NO: 1562573
gacagugugccucauagua

SEQ ID NO: 1757084 - RNA, 19 nt, Artificial Sequence
  Description of Artificial Sequence: Synthetic oligonucleotide
  Antisense strand to SEQ ID NO: 1757083
uacuaugaggcacacuguc

SEQ ID NO: 1757085 - RNA, 19 nt, Artificial Sequence
  Description of Artificial Sequence: Synthetic oligonucleotide
  Sense strand starting at position 3203 of SEQ ID NO: 1562573
cagugugccucauaguaac

SEQ ID NO: 1757086 - RNA, 19 nt, Artificial Sequence
  Description of Artificial Sequence: Synthetic oligonucleotide
  Antisense strand to SEQ ID NO: 1757085
guuacuaugaggcacacug

SEQ ID NO: 1757087 - RNA, 19 nt, Artificial Sequence
  Description of Artificial Sequence: Synthetic oligonucleotide
  Sense strand starting at position 3274 of SEQ ID NO: 1562573
gaaggaaaguucucuuugu

SEQ ID NO: 1757088 - RNA, 19 nt, Artificial Sequence
  Description of Artificial Sequence: Synthetic oligonucleotide
  Antisense strand to SEQ ID NO: 1757087
acaaagagaacuuuccuuc

SEQ ID NO: 1757089 - RNA, 19 nt, Artificial Sequence
  Description of Artificial Sequence: Synthetic oligonucleotide
  Sense strand starting at position 3275 of SEQ ID NO: 1562573
aaggaaaguucucuuugua

SEQ ID NO: 1757090 - RNA, 19 nt, Artificial Sequence
  Description of Artificial Sequence: Synthetic oligonucleotide
  Antisense strand to SEQ ID NO: 1757089
uacaaagagaacuuuccuu

SEQ ID NO: 1757091 - RNA, 19 nt, Artificial Sequence
  Description of Artificial Sequence: Synthetic oligonucleotide
  Sense strand starting at position 3478 of SEQ ID NO: 1562573
aguccuguucugugaccuu

SEQ ID NO: 1757092 - RNA, 19 nt, Artificial Sequence
  Description of Artificial Sequence: Synthetic oligonucleotide
  Antisense strand to SEQ ID NO: 1757091
aaggucacagaacaggacu

SEQ ID NO: 1757093 - RNA, 19 nt, Artificial Sequence
  Description of Artificial Sequence: Synthetic oligonucleotide
  Sense strand starting at position 3540 of SEQ ID NO: 1562573
accgcagguaacugaaaua

SEQ ID NO: 1757094 - RNA, 19 nt, Artificial Sequence
  Description of Artificial Sequence: Synthetic oligonucleotide
  Antisense strand to SEQ ID NO: 1757093
uauuucaguuaccugcggu

SEQ ID NO: 1757095 - RNA, 19 nt, Artificial Sequence
  Description of Artificial Sequence: Synthetic oligonucleotide
  Sense strand starting at position 3821 of SEQ ID NO: 1562573
aucacaagaucuucguaga

SEQ ID NO: 1757096 - RNA, 19 nt, Artificial Sequence
  Description of Artificial Sequence: Synthetic oligonucleotide
  Antisense strand to SEQ ID NO: 1757095
ucuacgaagaucuugugau

SEQ ID NO: 1757097 - RNA, 19 nt, Artificial Sequence
  Description of Artificial Sequence: Synthetic oligonucleotide
  Sense strand starting at position 3824 of SEQ ID NO: 1562573
acaagaucuucguagagca

SEQ ID NO: 1757098 - RNA, 19 nt, Artificial Sequence
  Description of Artificial Sequence: Synthetic oligonucleotide
  Antisense strand to SEQ ID NO: 1757097
ugcucuacgaagaucuugu

SEQ ID NO: 1757099 - RNA, 19 nt, Artificial Sequence
  Description of Artificial Sequence: Synthetic oligonucleotide
  Sense strand starting at position 3826 of SEQ ID NO: 1562573
aagaucuucguagagcaaa

SEQ ID NO: 1757100 - RNA, 19 nt, Artificial Sequence
  Description of Artificial Sequence: Synthetic oligonucleotide
  Antisense strand to SEQ ID NO: 1757099
uuugcucuacgaagaucuu

SEQ ID NO: 1757101 - RNA, 19 nt, Artificial Sequence
  Description of Artificial Sequence: Synthetic oligonucleotide
  Sense strand starting at position 3895 of SEQ ID NO: 1562573
aggcuuaguggagaugcau

SEQ ID NO: 1757102 - RNA, 19 nt, Artificial Sequence
  Description of Artificial Sequence: Synthetic oligonucleotide
  Antisense strand to SEQ ID NO: 1757101
augcaucuccacuaagccu

SEQ ID NO: 1757103 - RNA, 19 nt, Artificial Sequence
  Description of Artificial Sequence: Synthetic oligonucleotide
  Sense strand starting at position 3963 of SEQ ID NO: 1562573
gccugagguccugauauug

SEQ ID NO: 1757104 - RNA, 19 nt, Artificial Sequence
  Description of Artificial Sequence: Synthetic oligonucleotide
  Antisense strand to SEQ ID NO: 1757103
caauaucaggaccucaggc

SEQ ID NO: 1757105 - RNA, 19 nt, Artificial Sequence
  Description of Artificial Sequence: Synthetic oligonucleotide
  Sense strand starting at position 291 of SEQ ID NO: 1562574
gcugauggguaucagguaa

SEQ ID NO: 1757106 - RNA, 19 nt, Artificial Sequence
  Description of Artificial Sequence: Synthetic oligonucleotide
  Antisense strand to SEQ ID NO: 1757105
uuaccugauacccaucagc

SEQ ID NO: 1757107 - RNA, 19 nt, Artificial Sequence
  Description of Artificial Sequence: Synthetic oligonucleotide
  Sense strand starting at position 507 of SEQ ID NO: 1562574
gggagagcuccgcagacau

SEQ ID NO: 1757108 - RNA, 19 nt, Artificial Sequence
  Description of Artificial Sequence: Synthetic oligonucleotide
  Antisense strand to SEQ ID NO: 1757107
augucugcggagcucuccc

SEQ ID NO: 1757109 - RNA, 19 nt, Artificial Sequence
  Description of Artificial Sequence: Synthetic oligonucleotide
  Sense strand starting at position 509 of SEQ ID NO: 1562574
gagagcuccgcagacauga

SEQ ID NO: 1757110 - RNA, 19 nt, Artificial Sequence
  Description of Artificial Sequence: Synthetic oligonucleotide
  Antisense strand to SEQ ID NO: 1757109
ucaugucugcggagcucuc

SEQ ID NO: 1757111 - RNA, 19 nt, Artificial Sequence
  Description of Artificial Sequence: Synthetic oligonucleotide
  Sense strand starting at position 524 of SEQ ID NO: 1562574
augagucuuuaguggagaa

SEQ ID NO: 1757112 - RNA, 19 nt, Artificial Sequence
  Description of Artificial Sequence: Synthetic oligonucleotide
  Antisense strand to SEQ ID NO: 1757111
uucuccacuaaagacucau

SEQ ID NO: 1757113 - RNA, 19 nt, Artificial Sequence
  Description of Artificial Sequence: Synthetic oligonucleotide
  Sense strand starting at position 525 of SEQ ID NO: 1562574
ugagucuuuaguggagaaa

SEQ ID NO: 1757114 - RNA, 19 nt, Artificial Sequence
  Description of Artificial Sequence: Synthetic oligonucleotide
  Antisense strand to SEQ ID NO: 1757113
uuucuccacuaaagacuca

SEQ ID NO: 1757115 - RNA, 19 nt, Artificial Sequence
  Description of Artificial Sequence: Synthetic oligonucleotide
  Sense strand starting at position 577 of SEQ ID NO: 1562574
cccacuucuggcuggagua

SEQ ID NO: 1757116 - RNA, 19 nt, Artificial Sequence
  Description of Artificial Sequence: Synthetic oligonucleotide
  Antisense strand to SEQ ID NO: 1757115
uacuccagccagaaguggg

SEQ ID NO: 1757117 - RNA, 19 nt, Artificial Sequence
  Description of Artificial Sequence: Synthetic oligonucleotide
  Sense strand starting at position 796 of SEQ ID NO: 1562574
ggguaacuugcaugcccua

SEQ ID NO: 1757118 - RNA, 19 nt, Artificial Sequence
  Description of Artificial Sequence: Synthetic oligonucleotide
  Antisense strand to SEQ ID NO: 1757117
uagggcaugcaaguuaccc

SEQ ID NO: 1757119 - RNA, 19 nt, Artificial Sequence
  Description of Artificial Sequence: Synthetic oligonucleotide
  Sense strand starting at position 920 of SEQ ID NO: 1562574
caagaaggguccugcuguu

SEQ ID NO: 1757120 - RNA, 19 nt, Artificial Sequence
  Description of Artificial Sequence: Synthetic oligonucleotide
  Antisense strand to SEQ ID NO: 1757119
aacagcaggacccuucuug

SEQ ID NO: 1757121 - RNA, 19 nt, Artificial Sequence
  Description of Artificial Sequence: Synthetic oligonucleotide
  Sense strand starting at position 1037 of SEQ ID NO: 1562574
gcggcagcguauuaacauu

SEQ ID NO: 1757122 - RNA, 19 nt, Artificial Sequence
  Description of Artificial Sequence: Synthetic oligonucleotide
  Antisense strand to SEQ ID NO: 1757121
aauguuaauacgcugccgc

SEQ ID NO: 1757123 - RNA, 19 nt, Artificial Sequence
  Description of Artificial Sequence: Synthetic oligonucleotide
  Sense strand starting at position 1056 of SEQ ID NO: 1562574
ccgagcggguucuuggaua

SEQ ID NO: 1757124 - RNA, 19 nt, Artificial Sequence
  Description of Artificial Sequence: Synthetic oligonucleotide
  Antisense strand to SEQ ID NO: 1757123
uauccaagaacccgcucgg

SEQ ID NO: 1757125 - RNA, 19 nt, Artificial Sequence
  Description of Artificial Sequence: Synthetic oligonucleotide
  Sense strand starting at position 1439 of SEQ ID NO: 1562574
cggaaagagucuuacauuu

SEQ ID NO: 1757126 - RNA, 19 nt, Artificial Sequence
  Description of Artificial Sequence: Synthetic oligonucleotide
  Antisense strand to SEQ ID NO: 1757125
aaauguaagacucuuuccg

SEQ ID NO: 1757127 - RNA, 19 nt, Artificial Sequence
  Description of Artificial Sequence: Synthetic oligonucleotide
  Sense strand starting at position 1441 of SEQ ID NO: 1562574
gaaagagucuuacauuuga

SEQ ID NO: 1757128 - RNA, 19 nt, Artificial Sequence
  Description of Artificial Sequence: Synthetic oligonucleotide
  Antisense strand to SEQ ID NO: 1757127
ucaaauguaagacucuuuc

SEQ ID NO: 1757129 - RNA, 19 nt, Artificial Sequence
  Description of Artificial Sequence: Synthetic oligonucleotide
  Sense strand starting at position 1473 of SEQ ID NO: 1562574
gcgugagccugaucccaga

SEQ ID NO: 1757130 - RNA, 19 nt, Artificial Sequence
  Description of Artificial Sequence: Synthetic oligonucleotide
  Antisense strand to SEQ ID NO: 1757129
ucugggaucaggcucacgc

SEQ ID NO: 1757131 - RNA, 19 nt, Artificial Sequence
  Description of Artificial Sequence: Synthetic oligonucleotide
  Sense strand starting at position 1557 of SEQ ID NO: 1562574
uggaguuccucugcccgaa

SEQ ID NO: 1757132 - RNA, 19 nt, Artificial Sequence
  Description of Artificial Sequence: Synthetic oligonucleotide
  Antisense strand to SEQ ID NO: 1757131
uucgggcagaggaacucca

SEQ ID NO: 1757133 - RNA, 19 nt, Artificial Sequence
  Description of Artificial Sequence: Synthetic oligonucleotide
  Sense strand starting at position 1605 of SEQ ID NO: 1562574
cugccuugcccaggaaauc

SEQ ID NO: 1757134 - RNA, 19 nt, Artificial Sequence
  Description of Artificial Sequence: Synthetic oligonucleotide
  Antisense strand to SEQ ID NO: 1757133
gauuuccugggcaaggcag

SEQ ID NO: 1757135 - RNA, 19 nt, Artificial Sequence
  Description of Artificial Sequence: Synthetic oligonucleotide
  Sense strand starting at position 1696 of SEQ ID NO: 1562574
ccuccauucucccgggaga

SEQ ID NO: 1757136 - RNA, 19 nt, Artificial Sequence
  Description of Artificial Sequence: Synthetic oligonucleotide
  Antisense strand to SEQ ID NO: 1757135
ucucccgggagaauggagg

SEQ ID NO: 1757137 - RNA, 19 nt, Artificial Sequence
  Description of Artificial Sequence: Synthetic oligonucleotide
  Sense strand starting at position 2050 of SEQ ID NO: 1562574
aacccugcucuguggugaa

SEQ ID NO: 1757138 - RNA, 19 nt, Artificial Sequence
  Description of Artificial Sequence: Synthetic oligonucleotide
  Antisense strand to SEQ ID NO: 1757137
uucaccacagagcaggguu

SEQ ID NO: 1757139 - RNA, 19 nt, Artificial Sequence
  Description of Artificial Sequence: Synthetic oligonucleotide
  Sense strand starting at position 2054 of SEQ ID NO: 1562574
cugcucuguggugaacaga

SEQ ID NO: 1757140 - RNA, 19 nt, Artificial Sequence
  Description of Artificial Sequence: Synthetic oligonucleotide
  Antisense strand to SEQ ID NO: 1757139
ucuguucaccacagagcag

SEQ ID NO: 1757141 - RNA, 19 nt, Artificial Sequence
  Description of Artificial Sequence: Synthetic oligonucleotide
  Sense strand starting at position 2500 of SEQ ID NO: 1562574
ggcauaagcugccuuguuu

SEQ ID NO: 1757142 - RNA, 19 nt, Artificial Sequence
  Description of Artificial Sequence: Synthetic oligonucleotide
  Antisense strand to SEQ ID NO: 1757141
aaacaaggcagcuuaugcc

SEQ ID NO: 1757143 - RNA, 19 nt, Artificial Sequence
  Description of Artificial Sequence: Synthetic oligonucleotide
  Sense strand starting at position 2506 of SEQ ID NO: 1562574
agcugccuuguuugcaaau

SEQ ID NO: 1757144 - RNA, 19 nt, Artificial Sequence
  Description of Artificial Sequence: Synthetic oligonucleotide
  Antisense strand to SEQ ID NO: 1757143
auuugcaaacaaggcagcu

SEQ ID NO: 1757145 - RNA, 19 nt, Artificial Sequence
  Description of Artificial Sequence: Synthetic oligonucleotide
  Sense strand starting at position 2508 of SEQ ID NO: 1562574
cugccuuguuugcaaauga

SEQ ID NO: 1757146 - RNA, 19 nt, Artificial Sequence
  Description of Artificial Sequence: Synthetic oligonucleotide
  Antisense strand to SEQ ID NO: 1757145
ucauuugcaaacaaggcag

SEQ ID NO: 1757147 - RNA, 19 nt, Artificial Sequence
  Description of Artificial Sequence: Synthetic oligonucleotide
  Sense strand starting at position 2556 of SEQ ID NO: 1562574
uccaguuuccucuggaagu

SEQ ID NO: 1757148 - RNA, 19 nt, Artificial Sequence
  Description of Artificial Sequence: Synthetic oligonucleotide
  Antisense strand to SEQ ID NO: 1757147
acuuccagaggaaacugga

SEQ ID NO: 1757149 - RNA, 19 nt, Artificial Sequence
  Description of Artificial Sequence: Synthetic oligonucleotide
  Sense strand starting at position 2557 of SEQ ID NO: 1562574
ccaguuuccucuggaaguu

SEQ ID NO: 1757150 - RNA, 19 nt, Artificial Sequence
  Description of Artificial Sequence: Synthetic oligonucleotide
  Antisense strand to SEQ ID NO: 1757149
aacuuccagaggaaacugg

SEQ ID NO: 1757151 - RNA, 19 nt, Artificial Sequence
  Description of Artificial Sequence: Synthetic oligonucleotide
  Sense strand starting at position 2581 of SEQ ID NO: 1562574
ugaagucucacuugaggug

SEQ ID NO: 1757152 - RNA, 19 nt, Artificial Sequence
  Description of Artificial Sequence: Synthetic oligonucleotide
  Antisense strand to SEQ ID NO: 1757151
caccucaagugagacuuca

SEQ ID NO: 1757153 - RNA, 19 nt, Artificial Sequence
  Description of Artificial Sequence: Synthetic oligonucleotide
  Sense strand starting at position 2615 of SEQ ID NO: 1562574
uggucugguccagauacca

SEQ ID NO: 1757154 - RNA, 19 nt, Artificial Sequence
  Description of Artificial Sequence: Synthetic oligonucleotide
  Antisense strand to SEQ ID NO: 1757153
ugguaucuggaccagacca

SEQ ID NO: 1757155 - RNA, 19 nt, Artificial Sequence
  Description of Artificial Sequence: Synthetic oligonucleotide
  Sense strand starting at position 3098 of SEQ ID NO: 1562574
cggccuacugugugcuaga

SEQ ID NO: 1757156 - RNA, 19 nt, Artificial Sequence
  Description of Artificial Sequence: Synthetic oligonucleotide
  Antisense strand to SEQ ID NO: 1757155
ucuagcacacaguaggccg

SEQ ID NO: 1757157 - RNA, 19 nt, Artificial Sequence
  Description of Artificial Sequence: Synthetic oligonucleotide
  Sense strand starting at position 3203 of SEQ ID NO: 1562574
gagugcuauuccuugccca

SEQ ID NO: 1757158 - RNA, 19 nt, Artificial Sequence
  Description of Artificial Sequence: Synthetic oligonucleotide
  Antisense strand to SEQ ID NO: 1757157
ugggcaaggaauagcacuc

SEQ ID NO: 1757159 - RNA, 19 nt, Artificial Sequence
  Description of Artificial Sequence: Synthetic oligonucleotide
  Sense strand starting at position 3204 of SEQ ID NO: 1562574
agugcuauuccuugcccau

SEQ ID NO: 1757160 - RNA, 19 nt, Artificial Sequence
  Description of Artificial Sequence: Synthetic oligonucleotide
  Antisense strand to SEQ ID NO: 1757159
augggcaaggaauagcacu

SEQ ID NO: 1757161 - RNA, 19 nt, Artificial Sequence
  Description of Artificial Sequence: Synthetic oligonucleotide
  Sense strand starting at position 3206 of SEQ ID NO: 1562574
ugcuauuccuugcccauga

SEQ ID NO: 1757162 - RNA, 19 nt, Artificial Sequence
  Description of Artificial Sequence: Synthetic oligonucleotide
  Antisense strand to SEQ ID NO: 1757161
ucaugggcaaggaauagca

SEQ ID NO: 1757163 - RNA, 19 nt, Artificial Sequence
  Description of Artificial Sequence: Synthetic oligonucleotide
  Sense strand starting at position 546 of SEQ ID NO: 1562575
aggugugccuucugcugau

SEQ ID NO: 1757164 - RNA, 19 nt, Artificial Sequence
  Description of Artificial Sequence: Synthetic oligonucleotide
  Antisense strand to SEQ ID NO: 1757163
aucagcagaaggcacaccu

SEQ ID NO: 1757165 - RNA, 19 nt, Artificial Sequence
  Description of Artificial Sequence: Synthetic oligonucleotide
  Sense strand starting at position 611 of SEQ ID NO: 1562575
ucuggauucucugccagga

SEQ ID NO: 1757166 - RNA, 19 nt, Artificial Sequence
  Description of Artificial Sequence: Synthetic oligonucleotide
  Antisense strand to SEQ ID NO: 1757165
uccuggcagagaauccaga

SEQ ID NO: 1757167 - RNA, 19 nt, Artificial Sequence
  Description of Artificial Sequence: Synthetic oligonucleotide
  Sense strand starting at position 746 of SEQ ID NO: 1562575
agcuguggcuaaucuaagu

SEQ ID NO: 1757168 - RNA, 19 nt, Artificial Sequence
  Description of Artificial Sequence: Synthetic oligonucleotide
  Antisense strand to SEQ ID NO: 1757167
acuuagauuagccacagcu

SEQ ID NO: 1757169 - RNA, 19 nt, Artificial Sequence
  Description of Artificial Sequence: Synthetic oligonucleotide
  Sense strand starting at position 1228 of SEQ ID NO: 1562575
cuggucaaaucagauguua

SEQ ID NO: 1757170 - RNA, 19 nt, Artificial Sequence
  Description of Artificial Sequence: Synthetic oligonucleotide
  Antisense strand to SEQ ID NO: 1757169
uaacaucugauuugaccag

SEQ ID NO: 1757171 - RNA, 19 nt, Artificial Sequence
  Description of Artificial Sequence: Synthetic oligonucleotide
  Sense strand starting at position 1259 of SEQ ID NO: 1562575
uuaaaugugcaguguuauc

SEQ ID NO: 1757172 - RNA, 19 nt, Artificial Sequence
  Description of Artificial Sequence: Synthetic oligonucleotide
  Antisense strand to SEQ ID NO: 1757171
gauaacacugcacauuuaa

SEQ ID NO: 1757173 - RNA, 19 nt, Artificial Sequence
  Description of Artificial Sequence: Synthetic oligonucleotide
  Sense strand starting at position 1298 of SEQ ID NO: 1562575
gcaggaguucucugaaauc

SEQ ID NO: 1757174 - RNA, 19 nt, Artificial Sequence
  Description of Artificial Sequence: Synthetic oligonucleotide
  Antisense strand to SEQ ID NO: 1757173
gauuucagagaacuccugc

SEQ ID NO: 1757175 - RNA, 19 nt, Artificial Sequence
  Description of Artificial Sequence: Synthetic oligonucleotide
  Sense strand starting at position 1666 of SEQ ID NO: 1562575
ggcugugacgcguggacau

SEQ ID NO: 1757176 - RNA, 19 nt, Artificial Sequence
  Description of Artificial Sequence: Synthetic oligonucleotide
  Antisense strand to SEQ ID NO: 1757175
auguccacgcgucacagcc

SEQ ID NO: 1757177 - RNA, 19 nt, Artificial Sequence
  Description of Artificial Sequence: Synthetic oligonucleotide
  Sense strand starting at position 1958 of SEQ ID NO: 1562575
cccucugugcccugaguaa

SEQ ID NO: 1757178 - RNA, 19 nt, Artificial Sequence
  Description of Artificial Sequence: Synthetic oligonucleotide
  Antisense strand to SEQ ID NO: 1757177
uuacucagggcacagaggg

SEQ ID NO: 1757179 - RNA, 19 nt, Artificial Sequence
  Description of Artificial Sequence: Synthetic oligonucleotide
  Sense strand starting at position 1962 of SEQ ID NO: 1562575
cugugcccugaguaaagau

SEQ ID NO: 1757180 - RNA, 19 nt, Artificial Sequence
  Description of Artificial Sequence: Synthetic oligonucleotide
  Antisense strand to SEQ ID NO: 1757179
aucuuuacucagggcacag

SEQ ID NO: 1757181 - RNA, 19 nt, Artificial Sequence
  Description of Artificial Sequence: Synthetic oligonucleotide
  Sense strand starting at position 2105 of SEQ ID NO: 1562575
cucggauugggccauauca

SEQ ID NO: 1757182 - RNA, 19 nt, Artificial Sequence
  Description of Artificial Sequence: Synthetic oligonucleotide
  Antisense strand to SEQ ID NO: 1757181
ugauauggcccaauccgag

SEQ ID NO: 1757183 - RNA, 19 nt, Artificial Sequence
  Description of Artificial Sequence: Synthetic oligonucleotide
  Sense strand starting at position 2428 of SEQ ID NO: 1562575
caaguuuaaccagguggga

SEQ ID NO: 1757184 - RNA, 19 nt, Artificial Sequence
  Description of Artificial Sequence: Synthetic oligonucleotide
  Antisense strand to SEQ ID NO: 1757183
ucccaccugguuaaacuug

SEQ ID NO: 1757185 - RNA, 19 nt, Artificial Sequence
  Description of Artificial Sequence: Synthetic oligonucleotide
  Sense strand starting at position 2917 of SEQ ID NO: 1562575
gccuuuggugccuguguua

SEQ ID NO: 1757186 - RNA, 19 nt, Artificial Sequence
  Description of Artificial Sequence: Synthetic oligonucleotide
  Antisense strand to SEQ ID NO: 1757185
uaacacaggcaccaaaggc

SEQ ID NO: 1757187 - RNA, 19 nt, Artificial Sequence
  Description of Artificial Sequence: Synthetic oligonucleotide
  Sense strand starting at position 2990 of SEQ ID NO: 1562575
cggcuucucccugaggacu

SEQ ID NO: 1757188 - RNA, 19 nt, Artificial Sequence
  Description of Artificial Sequence: Synthetic oligonucleotide
  Antisense strand to SEQ ID NO: 1757187
aguccucagggagaagccg

SEQ ID NO: 1757189 - RNA, 19 nt, Artificial Sequence
  Description of Artificial Sequence: Synthetic oligonucleotide
  Sense strand starting at position 2992 of SEQ ID NO: 1562575
gcuucucccugaggacuaa

SEQ ID NO: 1757190 - RNA, 19 nt, Artificial Sequence
  Description of Artificial Sequence: Synthetic oligonucleotide
  Antisense strand to SEQ ID NO: 1757189
uuaguccucagggagaagc

SEQ ID NO: 1757191 - RNA, 19 nt, Artificial Sequence
  Description of Artificial Sequence: Synthetic oligonucleotide
  Sense strand starting at position 3198 of SEQ ID NO: 1562575
uggcguauugguucggauu

SEQ ID NO: 1757192 - RNA, 19 nt, Artificial Sequence
  Description of Artificial Sequence: Synthetic oligonucleotide
  Antisense strand to SEQ ID NO: 1757191
aauccgaaccaauacgcca

SEQ ID NO: 1757193 - RNA, 19 nt, Artificial Sequence
  Description of Artificial Sequence: Synthetic oligonucleotide
  Sense strand starting at position 3199 of SEQ ID NO: 1562575
ggcguauugguucggauuu

SEQ ID NO: 1757194 - RNA, 19 nt, Artificial Sequence
  Description of Artificial Sequence: Synthetic oligonucleotide
  Antisense strand to SEQ ID NO: 1757193
aaauccgaaccaauacgcc

SEQ ID NO: 1757195 - RNA, 19 nt, Artificial Sequence
  Description of Artificial Sequence: Synthetic oligonucleotide
  Sense strand starting at position 3259 of SEQ ID NO: 1562575
gccuguguuucagcgagau

SEQ ID NO: 1757196 - RNA, 19 nt, Artificial Sequence
  Description of Artificial Sequence: Synthetic oligonucleotide
  Antisense strand to SEQ ID NO: 1757195
aucucgcugaaacacaggc

SEQ ID NO: 1757197 - RNA, 19 nt, Artificial Sequence
  Description of Artificial Sequence: Synthetic oligonucleotide
  Sense strand starting at position 3377 of SEQ ID NO: 1562575
gcagcugugagugccuuaa

SEQ ID NO: 1757198 - RNA, 19 nt, Artificial Sequence
  Description of Artificial Sequence: Synthetic oligonucleotide
  Antisense strand to SEQ ID NO: 1757197
uuaaggcacucacagcugc

SEQ ID NO: 1757199 - RNA, 19 nt, Artificial Sequence
  Description of Artificial Sequence: Synthetic oligonucleotide
  Sense strand starting at position 3528 of SEQ ID NO: 1562575
accagagucagcgaucaaa

SEQ ID NO: 1757200 - RNA, 19 nt, Artificial Sequence
  Description of Artificial Sequence: Synthetic oligonucleotide
  Antisense strand to SEQ ID NO: 1757199
uuugaucgcugacucuggu

SEQ ID NO: 1757201 - RNA, 19 nt, Artificial Sequence
  Description of Artificial Sequence: Synthetic oligonucleotide
  Sense strand starting at position 3560 of SEQ ID NO: 1562575
ggagaagauucuguccaca

SEQ ID NO: 1757202 - RNA, 19 nt, Artificial Sequence
  Description of Artificial Sequence: Synthetic oligonucleotide
  Antisense strand to SEQ ID NO: 1757201
uguggacagaaucuucucc

SEQ ID NO: 1757203 - RNA, 19 nt, Artificial Sequence
  Description of Artificial Sequence: Synthetic oligonucleotide
  Sense strand starting at position 3562 of SEQ ID NO: 1562575
agaagauucuguccacacc

SEQ ID NO: 1757204 - RNA, 19 nt, Artificial Sequence
  Description of Artificial Sequence: Synthetic oligonucleotide
  Antisense strand to SEQ ID NO: 1757203
gguguggacagaaucuucu

SEQ ID NO: 1757205 - RNA, 19 nt, Artificial Sequence
  Description of Artificial Sequence: Synthetic oligonucleotide
  Sense strand starting at position 3586 of SEQ ID NO: 1562575
ucuuguuuccuggaccuua

SEQ ID NO: 1757206 - RNA, 19 nt, Artificial Sequence
  Description of Artificial Sequence: Synthetic oligonucleotide
  Antisense strand to SEQ ID NO: 1757205
uaagguccaggaaacaaga

SEQ ID NO: 1757207 - RNA, 19 nt, Artificial Sequence
  Description of Artificial Sequence: Synthetic oligonucleotide
  Sense strand starting at position 3653 of SEQ ID NO: 1562575
aaccgugucugcugggauu

SEQ ID NO: 1757208 - RNA, 19 nt, Artificial Sequence
  Description of Artificial Sequence: Synthetic oligonucleotide
  Antisense strand to SEQ ID NO: 1757207
aaucccagcagacacgguu

SEQ ID NO: 1757209 - RNA, 19 nt, Artificial Sequence
  Description of Artificial Sequence: Synthetic oligonucleotide
  Sense strand starting at position 3655 of SEQ ID NO: 1562575
ccgugucugcugggauuca

SEQ ID NO: 1757210 - RNA, 19 nt, Artificial Sequence
  Description of Artificial Sequence: Synthetic oligonucleotide
  Antisense strand to SEQ ID NO: 1757209
ugaaucccagcagacacgg

SEQ ID NO: 1757211 - RNA, 19 nt, Artificial Sequence
  Description of Artificial Sequence: Synthetic oligonucleotide
  Sense strand starting at position 3790 of SEQ ID NO: 1562575
gugcguuucuccucaggga

SEQ ID NO: 1757212 - RNA, 19 nt, Artificial Sequence
  Description of Artificial Sequence: Synthetic oligonucleotide
  Antisense strand to SEQ ID NO: 1757211
ucccugaggagaaacgcac

SEQ ID NO: 1757213 - RNA, 19 nt, Artificial Sequence
  Description of Artificial Sequence: Synthetic oligonucleotide
  Sense strand starting at position 3791 of SEQ ID NO: 1562575
ugcguuucuccucagggaa

SEQ ID NO: 1757214 - RNA, 19 nt, Artificial Sequence
  Description of Artificial Sequence: Synthetic oligonucleotide
  Antisense strand to SEQ ID NO: 1757213
uucccugaggagaaacgca

SEQ ID NO: 1757215 - RNA, 19 nt, Artificial Sequence
  Description of Artificial Sequence: Synthetic oligonucleotide
  Sense strand starting at position 3793 of SEQ ID NO: 1562575
cguuucuccucagggaaau

SEQ ID NO: 1757216 - RNA, 19 nt, Artificial Sequence
  Description of Artificial Sequence: Synthetic oligonucleotide
  Antisense strand to SEQ ID NO: 1757215
auuucccugaggagaaacg

SEQ ID NO: 1757217 - RNA, 19 nt, Artificial Sequence
  Description of Artificial Sequence: Synthetic oligonucleotide
  Sense strand starting at position 3794 of SEQ ID NO: 1562575
guuucuccucagggaaauc

SEQ ID NO: 1757218 - RNA, 19 nt, Artificial Sequence
  Description of Artificial Sequence: Synthetic oligonucleotide
  Antisense strand to SEQ ID NO: 1757217
gauuucccugaggagaaac

SEQ ID NO: 1757219 - RNA, 19 nt, Artificial Sequence
  Description of Artificial Sequence: Synthetic oligonucleotide
  Sense strand starting at position 3843 of SEQ ID NO: 1562575
ucaugauucuugggaggua

SEQ ID NO: 1757220 - RNA, 19 nt, Artificial Sequence
  Description of Artificial Sequence: Synthetic oligonucleotide
  Antisense strand to SEQ ID NO: 1757219
uaccucccaagaaucauga

SEQ ID NO: 1757221 - RNA, 19 nt, Artificial Sequence
  Description of Artificial Sequence: Synthetic oligonucleotide
  Sense strand starting at position 3844 of SEQ ID NO: 1562575
caugauucuugggagguaa

SEQ ID NO: 1757222 - RNA, 19 nt, Artificial Sequence
  Description of Artificial Sequence: Synthetic oligonucleotide
  Antisense strand to SEQ ID NO: 1757221
uuaccucccaagaaucaug

SEQ ID NO: 1757223 - RNA, 19 nt, Artificial Sequence
  Description of Artificial Sequence: Synthetic oligonucleotide
  Sense strand starting at position 84 of SEQ ID NO: 1562576
ucaggucuaucaucugcaa

SEQ ID NO: 1757224 - RNA, 19 nt, Artificial Sequence
  Description of Artificial Sequence: Synthetic oligonucleotide
  Antisense strand to SEQ ID NO: 1757223
uugcagaugauagaccuga

SEQ ID NO: 1757225 - RNA, 19 nt, Artificial Sequence
  Description of Artificial Sequence: Synthetic oligonucleotide
  Sense strand starting at position 139 of SEQ ID NO: 1562576
gcaaaugauuuacacagaa

SEQ ID NO: 1757226 - RNA, 19 nt, Artificial Sequence
  Description of Artificial Sequence: Synthetic oligonucleotide
  Antisense strand to SEQ ID NO: 1757225
uucuguguaaaucauuugc

SEQ ID NO: 1757227 - RNA, 19 nt, Artificial Sequence
  Description of Artificial Sequence: Synthetic oligonucleotide
  Sense strand starting at position 209 of SEQ ID NO: 1562576
gucguucccaaaugauuug

SEQ ID NO: 1757228 - RNA, 19 nt, Artificial Sequence
  Description of Artificial Sequence: Synthetic oligonucleotide
  Antisense strand to SEQ ID NO: 1757227
caaaucauuugggaacgac

SEQ ID NO: 1757229 - RNA, 19 nt, Artificial Sequence
  Description of Artificial Sequence: Synthetic oligonucleotide
  Sense strand starting at position 284 of SEQ ID NO: 1562576
augucuuugucaucggaga

SEQ ID NO: 1757230 - RNA, 19 nt, Artificial Sequence
  Description of Artificial Sequence: Synthetic oligonucleotide
  Antisense strand to SEQ ID NO: 1757229
ucuccgaugacaaagacau

SEQ ID NO: 1757231 - RNA, 19 nt, Artificial Sequence
  Description of Artificial Sequence: Synthetic oligonucleotide
  Sense strand starting at position 353 of SEQ ID NO: 1562576
agcacuuuauggucaauac

SEQ ID NO: 1757232 - RNA, 19 nt, Artificial Sequence
  Description of Artificial Sequence: Synthetic oligonucleotide
  Antisense strand to SEQ ID NO: 1757231
guauugaccauaaagugcu

SEQ ID NO: 1757233 - RNA, 19 nt, Artificial Sequence
  Description of Artificial Sequence: Synthetic oligonucleotide
  Sense strand starting at position 354 of SEQ ID NO: 1562576
gcacuuuauggucaauaca

SEQ ID NO: 1757234 - RNA, 19 nt, Artificial Sequence
  Description of Artificial Sequence: Synthetic oligonucleotide
  Antisense strand to SEQ ID NO: 1757233
uguauugaccauaaagugc

SEQ ID NO: 1757235 - RNA, 19 nt, Artificial Sequence
  Description of Artificial Sequence: Synthetic oligonucleotide
  Sense strand starting at position 428 of SEQ ID NO: 1562576
auagccaguccuggaagaa

SEQ ID NO: 1757236 - RNA, 19 nt, Artificial Sequence
  Description of Artificial Sequence: Synthetic oligonucleotide
  Antisense strand to SEQ ID NO: 1757235
uucuuccaggacuggcuau

SEQ ID NO: 1757237 - RNA, 19 nt, Artificial Sequence
  Description of Artificial Sequence: Synthetic oligonucleotide
  Sense strand starting at position 494 of SEQ ID NO: 1562576
ucacccaugcauuguagaa

SEQ ID NO: 1757238 - RNA, 19 nt, Artificial Sequence
  Description of Artificial Sequence: Synthetic oligonucleotide
  Antisense strand to SEQ ID NO: 1757237
uucuacaaugcauggguga

SEQ ID NO: 1757239 - RNA, 19 nt, Artificial Sequence
  Description of Artificial Sequence: Synthetic oligonucleotide
  Sense strand starting at position 550 of SEQ ID NO: 1562576
cgggcugacccggauucua

SEQ ID NO: 1757240 - RNA, 19 nt, Artificial Sequence
  Description of Artificial Sequence: Synthetic oligonucleotide
  Antisense strand to SEQ ID NO: 1757239
uagaauccgggucagcccg

SEQ ID NO: 1757241 - RNA, 19 nt, Artificial Sequence
  Description of Artificial Sequence: Synthetic oligonucleotide
  Sense strand starting at position 585 of SEQ ID NO: 1562576
cuugcuaugugaccuggaa

SEQ ID NO: 1757242 - RNA, 19 nt, Artificial Sequence
  Description of Artificial Sequence: Synthetic oligonucleotide
  Antisense strand to SEQ ID NO: 1757241
uuccaggucacauagcaag

SEQ ID NO: 1757243 - RNA, 19 nt, Artificial Sequence
  Description of Artificial Sequence: Synthetic oligonucleotide
  Sense strand starting at position 587 of SEQ ID NO: 1562576
ugcuaugugaccuggaaua

SEQ ID NO: 1757244 - RNA, 19 nt, Artificial Sequence
  Description of Artificial Sequence: Synthetic oligonucleotide
  Antisense strand to SEQ ID NO: 1757243
uauuccaggucacauagca

SEQ ID NO: 1757245 - RNA, 19 nt, Artificial Sequence
  Description of Artificial Sequence: Synthetic oligonucleotide
  Sense strand starting at position 646 of SEQ ID NO: 1562576
gggaacaauuucuaugucu

SEQ ID NO: 1757246 - RNA, 19 nt, Artificial Sequence
  Description of Artificial Sequence: Synthetic oligonucleotide
  Antisense strand to SEQ ID NO: 1757245
agacauagaaauuguuccc

SEQ ID NO: 1757247 - RNA, 19 nt, Artificial Sequence
  Description of Artificial Sequence: Synthetic oligonucleotide
  Sense strand starting at position 653 of SEQ ID NO: 1562576
auuucuaugucucaaagag

SEQ ID NO: 1757248 - RNA, 19 nt, Artificial Sequence
  Description of Artificial Sequence: Synthetic oligonucleotide
  Antisense strand to SEQ ID NO: 1757247
cucuuugagacauagaaau

SEQ ID NO: 1757249 - RNA, 19 nt, Artificial Sequence
  Description of Artificial Sequence: Synthetic oligonucleotide
  Sense strand starting at position 670 of SEQ ID NO: 1562576
aguucuugugaggacagau

SEQ ID NO: 1757250 - RNA, 19 nt, Artificial Sequence
  Description of Artificial Sequence: Synthetic oligonucleotide
  Antisense strand to SEQ ID NO: 1757249
aucuguccucacaagaacu

SEQ ID NO: 1757251 - RNA, 19 nt, Artificial Sequence
  Description of Artificial Sequence: Synthetic oligonucleotide
  Sense strand starting at position 817 of SEQ ID NO: 1562576
cuguuaugccaguacuuug

SEQ ID NO: 1757252 - RNA, 19 nt, Artificial Sequence
  Description of Artificial Sequence: Synthetic oligonucleotide
  Antisense strand to SEQ ID NO: 1757251
caaaguacuggcauaacag

SEQ ID NO: 1757253 - RNA, 19 nt, Artificial Sequence
  Description of Artificial Sequence: Synthetic oligonucleotide
  Sense strand starting at position 1134 of SEQ ID NO: 1562576
guugaaagggucuaucauu

SEQ ID NO: 1757254 - RNA, 19 nt, Artificial Sequence
  Description of Artificial Sequence: Synthetic oligonucleotide
  Antisense strand to SEQ ID NO: 1757253
aaugauagacccuuucaac

SEQ ID NO: 1757255 - RNA, 19 nt, Artificial Sequence
  Description of Artificial Sequence: Synthetic oligonucleotide
  Sense strand starting at position 1142 of SEQ ID NO: 1562576
ggucuaucauuugcccuaa

SEQ ID NO: 1757256 - RNA, 19 nt, Artificial Sequence
  Description of Artificial Sequence: Synthetic oligonucleotide
  Antisense strand to SEQ ID NO: 1757255
uuagggcaaaugauagacc

SEQ ID NO: 1757257 - RNA, 19 nt, Artificial Sequence
  Description of Artificial Sequence: Synthetic oligonucleotide
  Sense strand starting at position 1159 of SEQ ID NO: 1562576
aaggucuaacugugguaaa

SEQ ID NO: 1757258 - RNA, 19 nt, Artificial Sequence
  Description of Artificial Sequence: Synthetic oligonucleotide
  Antisense strand to SEQ ID NO: 1757257
uuuaccacaguuagaccuu

SEQ ID NO: 1757259 - RNA, 19 nt, Artificial Sequence
  Description of Artificial Sequence: Synthetic oligonucleotide
  Sense strand starting at position 1180 of SEQ ID NO: 1562576
aguccaaguccgugcauuu

SEQ ID NO: 1757260 - RNA, 19 nt, Artificial Sequence
  Description of Artificial Sequence: Synthetic oligonucleotide
  Antisense strand to SEQ ID NO: 1757259
aaaugcacggacuuggacu

SEQ ID NO: 1757261 - RNA, 19 nt, Artificial Sequence
  Description of Artificial Sequence: Synthetic oligonucleotide
  Sense strand starting at position 1297 of SEQ ID NO: 1562576
uuccgagucaugggaaguu

SEQ ID NO: 1757262 - RNA, 19 nt, Artificial Sequence
  Description of Artificial Sequence: Synthetic oligonucleotide
  Antisense strand to SEQ ID NO: 1757261
aacuucccaugacucggaa

SEQ ID NO: 1757263 - RNA, 19 nt, Artificial Sequence
  Description of Artificial Sequence: Synthetic oligonucleotide
  Sense strand starting at position 2446 of SEQ ID NO: 1562576
ucucuugaucucgagaugu

SEQ ID NO: 1757264 - RNA, 19 nt, Artificial Sequence
  Description of Artificial Sequence: Synthetic oligonucleotide
  Antisense strand to SEQ ID NO: 1757263
acaucucgagaucaagaga

SEQ ID NO: 1757265 - RNA, 19 nt, Artificial Sequence
  Description of Artificial Sequence: Synthetic oligonucleotide
  Sense strand starting at position 2569 of SEQ ID NO: 1562576
gcagauaccuuagcaaauc

SEQ ID NO: 1757266 - RNA, 19 nt, Artificial Sequence
  Description of Artificial Sequence: Synthetic oligonucleotide
  Antisense strand to SEQ ID NO: 1757265
gauuugcuaagguaucugc

SEQ ID NO: 1757267 - RNA, 19 nt, Artificial Sequence
  Description of Artificial Sequence: Synthetic oligonucleotide
  Sense strand starting at position 2644 of SEQ ID NO: 1562576
uguagauauagauguugua

SEQ ID NO: 1757268 - RNA, 19 nt, Artificial Sequence
  Description of Artificial Sequence: Synthetic oligonucleotide
  Antisense strand to SEQ ID NO: 1757267
uacaacaucuauaucuaca

SEQ ID NO: 1757269 - RNA, 19 nt, Artificial Sequence
  Description of Artificial Sequence: Synthetic oligonucleotide
  Sense strand starting at position 2708 of SEQ ID NO: 1562576
ugcauaauguacgugggaa

SEQ ID NO: 1757270 - RNA, 19 nt, Artificial Sequence
  Description of Artificial Sequence: Synthetic oligonucleotide
  Antisense strand to SEQ ID NO: 1757269
uucccacguacauuaugca

SEQ ID NO: 1757271 - RNA, 19 nt, Artificial Sequence
  Description of Artificial Sequence: Synthetic oligonucleotide
  Sense strand starting at position 2709 of SEQ ID NO: 1562576
gcauaauguacgugggaaa

SEQ ID NO: 1757272 - RNA, 19 nt, Artificial Sequence
  Description of Artificial Sequence: Synthetic oligonucleotide
  Antisense strand to SEQ ID NO: 1757271
uuucccacguacauuaugc

SEQ ID NO: 1757273 - RNA, 19 nt, Artificial Sequence
  Description of Artificial Sequence: Synthetic oligonucleotide
  Sense strand starting at position 2737 of SEQ ID NO: 1562576
uguugaaauuuggagauac

SEQ ID NO: 1757274 - RNA, 19 nt, Artificial Sequence
  Description of Artificial Sequence: Synthetic oligonucleotide
  Antisense strand to SEQ ID NO: 1757273
guaucuccaaauuucaaca

SEQ ID NO: 1757275 - RNA, 19 nt, Artificial Sequence
  Description of Artificial Sequence: Synthetic oligonucleotide
  Sense strand starting at position 2760 of SEQ ID NO: 1562576
acaaacugugaguaauagu

SEQ ID NO: 1757276 - RNA, 19 nt, Artificial Sequence
  Description of Artificial Sequence: Synthetic oligonucleotide
  Antisense strand to SEQ ID NO: 1757275
acuauuacucacaguuugu

SEQ ID NO: 1757277 - RNA, 19 nt, Artificial Sequence
  Description of Artificial Sequence: Synthetic oligonucleotide
  Sense strand starting at position 2769 of SEQ ID NO: 1562576
gaguaauagugucuaaaug

SEQ ID NO: 1757278 - RNA, 19 nt, Artificial Sequence
  Description of Artificial Sequence: Synthetic oligonucleotide
  Antisense strand to SEQ ID NO: 1757277
cauuuagacacuauuacuc

SEQ ID NO: 1757279 - RNA, 19 nt, Artificial Sequence
  Description of Artificial Sequence: Synthetic oligonucleotide
  Sense strand starting at position 2802 of SEQ ID NO: 1562576
uagucagaguucucuaggu

SEQ ID NO: 1757280 - RNA, 19 nt, Artificial Sequence
  Description of Artificial Sequence: Synthetic oligonucleotide
  Antisense strand to SEQ ID NO: 1757279
accuagagaacucugacua

SEQ ID NO: 1757281 - RNA, 19 nt, Artificial Sequence
  Description of Artificial Sequence: Synthetic oligonucleotide
  Sense strand starting at position 2804 of SEQ ID NO: 1562576
gucagaguucucuagguaa

SEQ ID NO: 1757282 - RNA, 19 nt, Artificial Sequence
  Description of Artificial Sequence: Synthetic oligonucleotide
  Antisense strand to SEQ ID NO: 1757281
uuaccuagagaacucugac

SEQ ID NO: 1757283 - RNA, 19 nt, Artificial Sequence
  Description of Artificial Sequence: Synthetic oligonucleotide
  Sense strand starting at position 2806 of SEQ ID NO: 1562576
cagaguucucuagguaacc

SEQ ID NO: 1757284 - RNA, 19 nt, Artificial Sequence
  Description of Artificial Sequence: Synthetic oligonucleotide
  Antisense strand to SEQ ID NO: 1757283
gguuaccuagagaacucug

SEQ ID NO: 1757285 - RNA, 19 nt, Artificial Sequence
  Description of Artificial Sequence: Synthetic oligonucleotide
  Sense strand starting at position 2827 of SEQ ID NO: 1562576
gacguagaugacugaucua

SEQ ID NO: 1757286 - RNA, 19 nt, Artificial Sequence
  Description of Artificial Sequence: Synthetic oligonucleotide
  Antisense strand to SEQ ID NO: 1757285
uagaucagucaucuacguc

SEQ ID NO: 1757287 - RNA, 19 nt, Artificial Sequence
  Description of Artificial Sequence: Synthetic oligonucleotide
  Sense strand starting at position 2830 of SEQ ID NO: 1562576
guagaugacugaucuacaa

SEQ ID NO: 1757288 - RNA, 19 nt, Artificial Sequence
  Description of Artificial Sequence: Synthetic oligonucleotide
  Antisense strand to SEQ ID NO: 1757287
uuguagaucagucaucuac

SEQ ID NO: 1757289 - RNA, 19 nt, Artificial Sequence
  Description of Artificial Sequence: Synthetic oligonucleotide
  Sense strand starting at position 2868 of SEQ ID NO: 1562576
auuacauuagagcaauagu

SEQ ID NO: 1757290 - RNA, 19 nt, Artificial Sequence
  Description of Artificial Sequence: Synthetic oligonucleotide
  Antisense strand to SEQ ID NO: 1757289
acuauugcucuaauguaau

SEQ ID NO: 1757291 - RNA, 19 nt, Artificial Sequence
  Description of Artificial Sequence: Synthetic oligonucleotide
  Sense strand starting at position 2871 of SEQ ID NO: 1562576
acauuagagcaauaguuua

SEQ ID NO: 1757292 - RNA, 19 nt, Artificial Sequence
  Description of Artificial Sequence: Synthetic oligonucleotide
  Antisense strand to SEQ ID NO: 1757291
uaaacuauugcucuaaugu

SEQ ID NO: 1757293 - RNA, 19 nt, Artificial Sequence
  Description of Artificial Sequence: Synthetic oligonucleotide
  Sense strand starting at position 2954 of SEQ ID NO: 1562576
cccugagaugcucacaauc

SEQ ID NO: 1757294 - RNA, 19 nt, Artificial Sequence
  Description of Artificial Sequence: Synthetic oligonucleotide
  Antisense strand to SEQ ID NO: 1757293
gauugugagcaucucaggg

SEQ ID NO: 1757295 - RNA, 19 nt, Artificial Sequence
  Description of Artificial Sequence: Synthetic oligonucleotide
  Sense strand starting at position 2997 of SEQ ID NO: 1562576
auaaguguuccucaagcaa

SEQ ID NO: 1757296 - RNA, 19 nt, Artificial Sequence
  Description of Artificial Sequence: Synthetic oligonucleotide
  Antisense strand to SEQ ID NO: 1757295
uugcuugaggaacacuuau

SEQ ID NO: 1757297 - RNA, 19 nt, Artificial Sequence
  Description of Artificial Sequence: Synthetic oligonucleotide
  Sense strand starting at position 3887 of SEQ ID NO: 1562576
caguguuugcagucgccau

SEQ ID NO: 1757298 - RNA, 19 nt, Artificial Sequence
  Description of Artificial Sequence: Synthetic oligonucleotide
  Antisense strand to SEQ ID NO: 1757297
auggcgacugcaaacacug

SEQ ID NO: 1757299 - RNA, 19 nt, Artificial Sequence
  Description of Artificial Sequence: Synthetic oligonucleotide
  Sense strand starting at position 3908 of SEQ ID NO: 1562576
ugagguuuaucauuguacu

SEQ ID NO: 1757300 - RNA, 19 nt, Artificial Sequence
  Description of Artificial Sequence: Synthetic oligonucleotide
  Antisense strand to SEQ ID NO: 1757299
aguacaaugauaaaccuca

SEQ ID NO: 1757301 - RNA, 19 nt, Artificial Sequence
  Description of Artificial Sequence: Synthetic oligonucleotide
  Sense strand starting at position 3909 of SEQ ID NO: 1562576
gagguuuaucauuguacua

SEQ ID NO: 1757302 - RNA, 19 nt, Artificial Sequence
  Description of Artificial Sequence: Synthetic oligonucleotide
  Antisense strand to SEQ ID NO: 1757301
uaguacaaugauaaaccuc

SEQ ID NO: 1757303 - RNA, 19 nt, Artificial Sequence
  Description of Artificial Sequence: Synthetic oligonucleotide
  Sense strand starting at position 197 of SEQ ID NO: 1562577
uguugaugucagggaaacu

SEQ ID NO: 1757304 - RNA, 19 nt, Artificial Sequence
  Description of Artificial Sequence: Synthetic oligonucleotide
  Antisense strand to SEQ ID NO: 1757303
aguuucccugacaucaaca

SEQ ID NO: 1757305 - RNA, 19 nt, Artificial Sequence
  Description of Artificial Sequence: Synthetic oligonucleotide
  Sense strand starting at position 219 of SEQ ID NO: 1562577
gcagaauugaagcaaguga

SEQ ID NO: 1757306 - RNA, 19 nt, Artificial Sequence
  Description of Artificial Sequence: Synthetic oligonucleotide
  Antisense strand to SEQ ID NO: 1757305
ucacuugcuucaauucugc

SEQ ID NO: 1757307 - RNA, 19 nt, Artificial Sequence
  Description of Artificial Sequence: Synthetic oligonucleotide
  Sense strand starting at position 233 of SEQ ID NO: 1562577
agugaauauccgcaaugga

SEQ ID NO: 1757308 - RNA, 19 nt, Artificial Sequence
  Description of Artificial Sequence: Synthetic oligonucleotide
  Antisense strand to SEQ ID NO: 1757307
uccauugcggauauucacu

SEQ ID NO: 1757309 - RNA, 19 nt, Artificial Sequence
  Description of Artificial Sequence: Synthetic oligonucleotide
  Sense strand starting at position 236 of SEQ ID NO: 1562577
gaauauccgcaauggaaug

SEQ ID NO: 1757310 - RNA, 19 nt, Artificial Sequence
  Description of Artificial Sequence: Synthetic oligonucleotide
  Antisense strand to SEQ ID NO: 1757309
cauuccauugcggauauuc

SEQ ID NO: 1757311 - RNA, 19 nt, Artificial Sequence
  Description of Artificial Sequence: Synthetic oligonucleotide
  Sense strand starting at position 350 of SEQ ID NO: 1562577
cugcauauuucucagaaag

SEQ ID NO: 1757312 - RNA, 19 nt, Artificial Sequence
  Description of Artificial Sequence: Synthetic oligonucleotide
  Antisense strand to SEQ ID NO: 1757311
cuuucugagaaauaugcag

SEQ ID NO: 1757313 - RNA, 19 nt, Artificial Sequence
  Description of Artificial Sequence: Synthetic oligonucleotide
  Sense strand starting at position 371 of SEQ ID NO: 1562577
aaagauucuuccucugggu

SEQ ID NO: 1757314 - RNA, 19 nt, Artificial Sequence
  Description of Artificial Sequence: Synthetic oligonucleotide
  Antisense strand to SEQ ID NO: 1757313
acccagaggaagaaucuuu

SEQ ID NO: 1757315 - RNA, 19 nt, Artificial Sequence
  Description of Artificial Sequence: Synthetic oligonucleotide
  Sense strand starting at position 384 of SEQ ID NO: 1562577
cuggguaccuucuuccaga

SEQ ID NO: 1757316 - RNA, 19 nt, Artificial Sequence
  Description of Artificial Sequence: Synthetic oligonucleotide
  Antisense strand to SEQ ID NO: 1757315
ucuggaagaagguacccag

SEQ ID NO: 1757317 - RNA, 19 nt, Artificial Sequence
  Description of Artificial Sequence: Synthetic oligonucleotide
  Sense strand starting at position 385 of SEQ ID NO: 1562577
uggguaccuucuuccagaa

SEQ ID NO: 1757318 - RNA, 19 nt, Artificial Sequence
  Description of Artificial Sequence: Synthetic oligonucleotide
  Antisense strand to SEQ ID NO: 1757317
uucuggaagaagguaccca

SEQ ID NO: 1757319 - RNA, 19 nt, Artificial Sequence
  Description of Artificial Sequence: Synthetic oligonucleotide
  Sense strand starting at position 485 of SEQ ID NO: 1562577
agaaguucucgacaaucuu

SEQ ID NO: 1757320 - RNA, 19 nt, Artificial Sequence
  Description of Artificial Sequence: Synthetic oligonucleotide
  Antisense strand to SEQ ID NO: 1757319
aagauugucgagaacuucu

SEQ ID NO: 1757321 - RNA, 19 nt, Artificial Sequence
  Description of Artificial Sequence: Synthetic oligonucleotide
  Sense strand starting at position 534 of SEQ ID NO: 1562577
gucucacuguucccuaaag

SEQ ID NO: 1757322 - RNA, 19 nt, Artificial Sequence
  Description of Artificial Sequence: Synthetic oligonucleotide
  Antisense strand to SEQ ID NO: 1757321
cuuuagggaacagugagac

SEQ ID NO: 1757323 - RNA, 19 nt, Artificial Sequence
  Description of Artificial Sequence: Synthetic oligonucleotide
  Sense strand starting at position 536 of SEQ ID NO: 1562577
cucacuguucccuaaaguc

SEQ ID NO: 1757324 - RNA, 19 nt, Artificial Sequence
  Description of Artificial Sequence: Synthetic oligonucleotide
  Antisense strand to SEQ ID NO: 1757323
gacuuuagggaacagugag

SEQ ID NO: 1757325 - RNA, 19 nt, Artificial Sequence
  Description of Artificial Sequence: Synthetic oligonucleotide
  Sense strand starting at position 563 of SEQ ID NO: 1562577
cuuagacucuugcccugaa

SEQ ID NO: 1757326 - RNA, 19 nt, Artificial Sequence
  Description of Artificial Sequence: Synthetic oligonucleotide
  Antisense strand to SEQ ID NO: 1757325
uucagggcaagagucuaag

SEQ ID NO: 1757327 - RNA, 19 nt, Artificial Sequence
  Description of Artificial Sequence: Synthetic oligonucleotide
  Sense strand starting at position 564 of SEQ ID NO: 1562577
uuagacucuugcccugaaa

SEQ ID NO: 1757328 - RNA, 19 nt, Artificial Sequence
  Description of Artificial Sequence: Synthetic oligonucleotide
  Antisense strand to SEQ ID NO: 1757327
uuucagggcaagagucuaa

SEQ ID NO: 1757329 - RNA, 19 nt, Artificial Sequence
  Description of Artificial Sequence: Synthetic oligonucleotide
  Sense strand starting at position 567 of SEQ ID NO: 1562577
gacucuugcccugaaaggu

SEQ ID NO: 1757330 - RNA, 19 nt, Artificial Sequence
  Description of Artificial Sequence: Synthetic oligonucleotide
  Antisense strand to SEQ ID NO: 1757329
accuuucagggcaagaguc

SEQ ID NO: 1757331 - RNA, 19 nt, Artificial Sequence
  Description of Artificial Sequence: Synthetic oligonucleotide
  Sense strand starting at position 623 of SEQ ID NO: 1562577
uaaagaaaguaagucgaau

SEQ ID NO: 1757332 - RNA, 19 nt, Artificial Sequence
  Description of Artificial Sequence: Synthetic oligonucleotide
  Antisense strand to SEQ ID NO: 1757331
auucgacuuacuuucuuua

SEQ ID NO: 1757333 - RNA, 19 nt, Artificial Sequence
  Description of Artificial Sequence: Synthetic oligonucleotide
  Sense strand starting at position 673 of SEQ ID NO: 1562577
aggcuacaucgugacauaa

SEQ ID NO: 1757334 - RNA, 19 nt, Artificial Sequence
  Description of Artificial Sequence: Synthetic oligonucleotide
  Antisense strand to SEQ ID NO: 1757333
uuaugucacgauguagccu

SEQ ID NO: 1757335 - RNA, 19 nt, Artificial Sequence
  Description of Artificial Sequence: Synthetic oligonucleotide
  Sense strand starting at position 1133 of SEQ ID NO: 1562577
cccgaaugaccuuacaugu

SEQ ID NO: 1757336 - RNA, 19 nt, Artificial Sequence
  Description of Artificial Sequence: Synthetic oligonucleotide
  Antisense strand to SEQ ID NO: 1757335
acauguaaggucauucggg

SEQ ID NO: 1757337 - RNA, 19 nt, Artificial Sequence
  Description of Artificial Sequence: Synthetic oligonucleotide
  Sense strand starting at position 1139 of SEQ ID NO: 1562577
ugaccuuacaugugggauu

SEQ ID NO: 1757338 - RNA, 19 nt, Artificial Sequence
  Description of Artificial Sequence: Synthetic oligonucleotide
  Antisense strand to SEQ ID NO: 1757337
aaucccacauguaagguca

SEQ ID NO: 1757339 - RNA, 19 nt, Artificial Sequence
  Description of Artificial Sequence: Synthetic oligonucleotide
  Sense strand starting at position 1142 of SEQ ID NO: 1562577
ccuuacaugugggauuuaa

SEQ ID NO: 1757340 - RNA, 19 nt, Artificial Sequence
  Description of Artificial Sequence: Synthetic oligonucleotide
  Antisense strand to SEQ ID NO: 1757339
uuaaaucccacauguaagg

SEQ ID NO: 1757341 - RNA, 19 nt, Artificial Sequence
  Description of Artificial Sequence: Synthetic oligonucleotide
  Sense strand starting at position 1174 of SEQ ID NO: 1562577
caggguccucaucgauaaa

SEQ ID NO: 1757342 - RNA, 19 nt, Artificial Sequence
  Description of Artificial Sequence: Synthetic oligonucleotide
  Antisense strand to SEQ ID NO: 1757341
uuuaucgaugaggacccug

SEQ ID NO: 1757343 - RNA, 19 nt, Artificial Sequence
  Description of Artificial Sequence: Synthetic oligonucleotide
  Sense strand starting at position 1210 of SEQ ID NO: 1562577
ccacaaagguugcugugaa

SEQ ID NO: 1757344 - RNA, 19 nt, Artificial Sequence
  Description of Artificial Sequence: Synthetic oligonucleotide
  Antisense strand to SEQ ID NO: 1757343
uucacagcaaccuuugugg

SEQ ID NO: 1757345 - RNA, 19 nt, Artificial Sequence
  Description of Artificial Sequence: Synthetic oligonucleotide
  Sense strand starting at position 1220 of SEQ ID NO: 1562577
ugcugugaaguuuaaaugu

SEQ ID NO: 1757346 - RNA, 19 nt, Artificial Sequence
  Description of Artificial Sequence: Synthetic oligonucleotide
  Antisense strand to SEQ ID NO: 1757345
acauuuaaacuucacagca

SEQ ID NO: 1757347 - RNA, 19 nt, Artificial Sequence
  Description of Artificial Sequence: Synthetic oligonucleotide
  Sense strand starting at position 1350 of SEQ ID NO: 1562577
caguuaacuugucuuagag

SEQ ID NO: 1757348 - RNA, 19 nt, Artificial Sequence
  Description of Artificial Sequence: Synthetic oligonucleotide
  Antisense strand to SEQ ID NO: 1757347
cucuaagacaaguuaacug

SEQ ID NO: 1757349 - RNA, 19 nt, Artificial Sequence
  Description of Artificial Sequence: Synthetic oligonucleotide
  Sense strand starting at position 1468 of SEQ ID NO: 1562577
gagauaacgcccugaacaa

SEQ ID NO: 1757350 - RNA, 19 nt, Artificial Sequence
  Description of Artificial Sequence: Synthetic oligonucleotide
  Antisense strand to SEQ ID NO: 1757349
uuguucagggcguuaucuc

SEQ ID NO: 1757351 - RNA, 19 nt, Artificial Sequence
  Description of Artificial Sequence: Synthetic oligonucleotide
  Sense strand starting at position 1509 of SEQ ID NO: 1562577
uggaggugaguccgaaaga

SEQ ID NO: 1757352 - RNA, 19 nt, Artificial Sequence
  Description of Artificial Sequence: Synthetic oligonucleotide
  Antisense strand to SEQ ID NO: 1757351
ucuuucggacucaccucca

SEQ ID NO: 1757353 - RNA, 19 nt, Artificial Sequence
  Description of Artificial Sequence: Synthetic oligonucleotide
  Sense strand starting at position 1530 of SEQ ID NO: 1562577
aaaucagagcccgaagagu

SEQ ID NO: 1757354 - RNA, 19 nt, Artificial Sequence
  Description of Artificial Sequence: Synthetic oligonucleotide
  Antisense strand to SEQ ID NO: 1757353
acucuucgggcucugauuu

SEQ ID NO: 1757355 - RNA, 19 nt, Artificial Sequence
  Description of Artificial Sequence: Synthetic oligonucleotide
  Sense strand starting at position 2087 of SEQ ID NO: 1562577
ggaagagcccaacgguauu

SEQ ID NO: 1757356 - RNA, 19 nt, Artificial Sequence
  Description of Artificial Sequence: Synthetic oligonucleotide
  Antisense strand to SEQ ID NO: 1757355
aauaccguugggcucuucc

SEQ ID NO: 1757357 - RNA, 19 nt, Artificial Sequence
  Description of Artificial Sequence: Synthetic oligonucleotide
  Sense strand starting at position 2222 of SEQ ID NO: 1562577
uccaucuucuguguaaaga

SEQ ID NO: 1757358 - RNA, 19 nt, Artificial Sequence
  Description of Artificial Sequence: Synthetic oligonucleotide
  Antisense strand to SEQ ID NO: 1757357
ucuuuacacagaagaugga

SEQ ID NO: 1757359 - RNA, 19 nt, Artificial Sequence
  Description of Artificial Sequence: Synthetic oligonucleotide
  Sense strand starting at position 2223 of SEQ ID NO: 1562577
ccaucuucuguguaaagac

SEQ ID NO: 1757360 - RNA, 19 nt, Artificial Sequence
  Description of Artificial Sequence: Synthetic oligonucleotide
  Antisense strand to SEQ ID NO: 1757359
gucuuuacacagaagaugg

SEQ ID NO: 1757361 - RNA, 19 nt, Artificial Sequence
  Description of Artificial Sequence: Synthetic oligonucleotide
  Sense strand starting at position 2275 of SEQ ID NO: 1562577
ugcucaaggucacucauuu

SEQ ID NO: 1757362 - RNA, 19 nt, Artificial Sequence
  Description of Artificial Sequence: Synthetic oligonucleotide
  Antisense strand to SEQ ID NO: 1757361
aaaugagugaccuugagca

SEQ ID NO: 1757363 - RNA, 19 nt, Artificial Sequence
  Description of Artificial Sequence: Synthetic oligonucleotide
  Sense strand starting at position 2453 of SEQ ID NO: 1562577
ccggcuaauuacuuauuau

SEQ ID NO: 1757364 - RNA, 19 nt, Artificial Sequence
  Description of Artificial Sequence: Synthetic oligonucleotide
  Antisense strand to SEQ ID NO: 1757363
auaauaaguaauuagccgg

SEQ ID NO: 1757365 - RNA, 19 nt, Artificial Sequence
  Description of Artificial Sequence: Synthetic oligonucleotide
  Sense strand starting at position 2597 of SEQ ID NO: 1562577
uguccaaacuagguuuaca

SEQ ID NO: 1757366 - RNA, 19 nt, Artificial Sequence
  Description of Artificial Sequence: Synthetic oligonucleotide
  Antisense strand to SEQ ID NO: 1757365
uguaaaccuaguuuggaca

SEQ ID NO: 1757367 - RNA, 19 nt, Artificial Sequence
  Description of Artificial Sequence: Synthetic oligonucleotide
  Sense strand starting at position 2638 of SEQ ID NO: 1562577
ucuuaagaugagugaccuu

SEQ ID NO: 1757368 - RNA, 19 nt, Artificial Sequence
  Description of Artificial Sequence: Synthetic oligonucleotide
  Antisense strand to SEQ ID NO: 1757367
aaggucacucaucuuaaga

SEQ ID NO: 1757369 - RNA, 19 nt, Artificial Sequence
  Description of Artificial Sequence: Synthetic oligonucleotide
  Sense strand starting at position 3177 of SEQ ID NO: 1562577
uggugaauauucuuccaaa

SEQ ID NO: 1757370 - RNA, 19 nt, Artificial Sequence
  Description of Artificial Sequence: Synthetic oligonucleotide
  Antisense strand to SEQ ID NO: 1757369
uuuggaagaauauucacca

SEQ ID NO: 1757371 - RNA, 19 nt, Artificial Sequence
  Description of Artificial Sequence: Synthetic oligonucleotide
  Sense strand starting at position 3178 of SEQ ID NO: 1562577
ggugaauauucuuccaaac

SEQ ID NO: 1757372 - RNA, 19 nt, Artificial Sequence
  Description of Artificial Sequence: Synthetic oligonucleotide
  Antisense strand to SEQ ID NO: 1757371
guuuggaagaauauucacc

SEQ ID NO: 1757373 - RNA, 19 nt, Artificial Sequence
  Description of Artificial Sequence: Synthetic oligonucleotide
  Sense strand starting at position 3495 of SEQ ID NO: 1562577
gcgugagccacuguuggua

SEQ ID NO: 1757374 - RNA, 19 nt, Artificial Sequence
  Description of Artificial Sequence: Synthetic oligonucleotide
  Antisense strand to SEQ ID NO: 1757373
uaccaacaguggcucacgc

SEQ ID NO: 1757375 - RNA, 19 nt, Artificial Sequence
  Description of Artificial Sequence: Synthetic oligonucleotide
  Sense strand starting at position 3582 of SEQ ID NO: 1562577
ccaguaucugcauaguauu

SEQ ID NO: 1757376 - RNA, 19 nt, Artificial Sequence
  Description of Artificial Sequence: Synthetic oligonucleotide
  Antisense strand to SEQ ID NO: 1757375
aauacuaugcagauacugg

SEQ ID NO: 1757377 - RNA, 19 nt, Artificial Sequence
  Description of Artificial Sequence: Synthetic oligonucleotide
  Sense strand starting at position 3599 of SEQ ID NO: 1562577
uuccauuacguggauggua

SEQ ID NO: 1757378 - RNA, 19 nt, Artificial Sequence
  Description of Artificial Sequence: Synthetic oligonucleotide
  Antisense strand to SEQ ID NO: 1757377
uaccauccacguaauggaa

SEQ ID NO: 1757379 - RNA, 19 nt, Artificial Sequence
  Description of Artificial Sequence: Synthetic oligonucleotide
  Sense strand starting at position 3613 of SEQ ID NO: 1562577
ugguacugcuaaucucaaa

SEQ ID NO: 1757380 - RNA, 19 nt, Artificial Sequence
  Description of Artificial Sequence: Synthetic oligonucleotide
  Antisense strand to SEQ ID NO: 1757379
uuugagauuagcaguacca

SEQ ID NO: 1757381 - RNA, 19 nt, Artificial Sequence
  Description of Artificial Sequence: Synthetic oligonucleotide
  Sense strand starting at position 3642 of SEQ ID NO: 1562577
ugagguuguuauccaucuu

SEQ ID NO: 1757382 - RNA, 19 nt, Artificial Sequence
  Description of Artificial Sequence: Synthetic oligonucleotide
  Antisense strand to SEQ ID NO: 1757381
aagauggauaacaaccuca

SEQ ID NO: 1757383 - RNA, 19 nt, Artificial Sequence
  Description of Artificial Sequence: Synthetic oligonucleotide
  Sense strand starting at position 268 of SEQ ID NO: 1562578
gucuuauucuguggccuca

SEQ ID NO: 1757384 - RNA, 19 nt, Artificial Sequence
  Description of Artificial Sequence: Synthetic oligonucleotide
  Antisense strand to SEQ ID NO: 1757383
ugaggccacagaauaagac

SEQ ID NO: 1757385 - RNA, 19 nt, Artificial Sequence
  Description of Artificial Sequence: Synthetic oligonucleotide
  Sense strand starting at position 451 of SEQ ID NO: 1562578
ucggguaauucauaggauu

SEQ ID NO: 1757386 - RNA, 19 nt, Artificial Sequence
  Description of Artificial Sequence: Synthetic oligonucleotide
  Antisense strand to SEQ ID NO: 1757385
aauccuaugaauuacccga

SEQ ID NO: 1757387 - RNA, 19 nt, Artificial Sequence
  Description of Artificial Sequence: Synthetic oligonucleotide
  Sense strand starting at position 503 of SEQ ID NO: 1562578
aaaugugcuucucaggcaa

SEQ ID NO: 1757388 - RNA, 19 nt, Artificial Sequence
  Description of Artificial Sequence: Synthetic oligonucleotide
  Antisense strand to SEQ ID NO: 1757387
uugccugagaagcacauuu

SEQ ID NO: 1757389 - RNA, 19 nt, Artificial Sequence
  Description of Artificial Sequence: Synthetic oligonucleotide
  Sense strand starting at position 505 of SEQ ID NO: 1562578
augugcuucucaggcaauu

SEQ ID NO: 1757390 - RNA, 19 nt, Artificial Sequence
  Description of Artificial Sequence: Synthetic oligonucleotide
  Antisense strand to SEQ ID NO: 1757389
aauugccugagaagcacau

SEQ ID NO: 1757391 - RNA, 19 nt, Artificial Sequence
  Description of Artificial Sequence: Synthetic oligonucleotide
  Sense strand starting at position 507 of SEQ ID NO: 1562578
gugcuucucaggcaauuga

SEQ ID NO: 1757392 - RNA, 19 nt, Artificial Sequence
  Description of Artificial Sequence: Synthetic oligonucleotide
  Antisense strand to SEQ ID NO: 1757391
ucaauugccugagaagcac

SEQ ID NO: 1757393 - RNA, 19 nt, Artificial Sequence
  Description of Artificial Sequence: Synthetic oligonucleotide
  Sense strand starting at position 604 of SEQ ID NO: 1562578
cugacauaaucagaauuag

SEQ ID NO: 1757394 - RNA, 19 nt, Artificial Sequence
  Description of Artificial Sequence: Synthetic oligonucleotide
  Antisense strand to SEQ ID NO: 1757393
cuaauucugauuaugucag

SEQ ID NO: 1757395 - RNA, 19 nt, Artificial Sequence
  Description of Artificial Sequence: Synthetic oligonucleotide
  Sense strand starting at position 1077 of SEQ ID NO: 1562578
agggaaauauuggaagaaa

SEQ ID NO: 1757396 - RNA, 19 nt, Artificial Sequence
  Description of Artificial Sequence: Synthetic oligonucleotide
  Antisense strand to SEQ ID NO: 1757395
uuucuuccaauauuucccu

SEQ ID NO: 1757397 - RNA, 19 nt, Artificial Sequence
  Description of Artificial Sequence: Synthetic oligonucleotide
  Sense strand starting at position 1297 of SEQ ID NO: 1562578
gcaugaaucugggcucuac

SEQ ID NO: 1757398 - RNA, 19 nt, Artificial Sequence
  Description of Artificial Sequence: Synthetic oligonucleotide
  Antisense strand to SEQ ID NO: 1757397
guagagcccagauucaugc

SEQ ID NO: 1757399 - RNA, 19 nt, Artificial Sequence
  Description of Artificial Sequence: Synthetic oligonucleotide
  Sense strand starting at position 1322 of SEQ ID NO: 1562578
cuugcucuguguucucaaa

SEQ ID NO: 1757400 - RNA, 19 nt, Artificial Sequence
  Description of Artificial Sequence: Synthetic oligonucleotide
  Antisense strand to SEQ ID NO: 1757399
uuugagaacacagagcaag

SEQ ID NO: 1757401 - RNA, 19 nt, Artificial Sequence
  Description of Artificial Sequence: Synthetic oligonucleotide
  Sense strand starting at position 1393 of SEQ ID NO: 1562578
uucuuaauauuagggagaa

SEQ ID NO: 1757402 - RNA, 19 nt, Artificial Sequence
  Description of Artificial Sequence: Synthetic oligonucleotide
  Antisense strand to SEQ ID NO: 1757401
uucucccuaauauuaagaa

SEQ ID NO: 1757403 - RNA, 19 nt, Artificial Sequence
  Description of Artificial Sequence: Synthetic oligonucleotide
  Sense strand starting at position 1394 of SEQ ID NO: 1562578
ucuuaauauuagggagaac

SEQ ID NO: 1757404 - RNA, 19 nt, Artificial Sequence
  Description of Artificial Sequence: Synthetic oligonucleotide
  Antisense strand to SEQ ID NO: 1757403
guucucccuaauauuaaga

SEQ ID NO: 1757405 - RNA, 19 nt, Artificial Sequence
  Description of Artificial Sequence: Synthetic oligonucleotide
  Sense strand starting at position 1441 of SEQ ID NO: 1562578
aggccaaguccagauacau

SEQ ID NO: 1757406 - RNA, 19 nt, Artificial Sequence
  Description of Artificial Sequence: Synthetic oligonucleotide
  Antisense strand to SEQ ID NO: 1757405
auguaucuggacuuggccu

SEQ ID NO: 1757407 - RNA, 19 nt, Artificial Sequence
  Description of Artificial Sequence: Synthetic oligonucleotide
  Sense strand starting at position 1548 of SEQ ID NO: 1562578
accauuaucuauugggauu

SEQ ID NO: 1757408 - RNA, 19 nt, Artificial Sequence
  Description of Artificial Sequence: Synthetic oligonucleotide
  Antisense strand to SEQ ID NO: 1757407
aaucccaauagauaauggu

SEQ ID NO: 1757409 - RNA, 19 nt, Artificial Sequence
  Description of Artificial Sequence: Synthetic oligonucleotide
  Sense strand starting at position 2023 of SEQ ID NO: 1562578
ccucauuagcgucagaaca

SEQ ID NO: 1757410 - RNA, 19 nt, Artificial Sequence
  Description of Artificial Sequence: Synthetic oligonucleotide
  Antisense strand to SEQ ID NO: 1757409
uguucugacgcuaaugagg

SEQ ID NO: 1757411 - RNA, 19 nt, Artificial Sequence
  Description of Artificial Sequence: Synthetic oligonucleotide
  Sense strand starting at position 2025 of SEQ ID NO: 1562578
ucauuagcgucagaacaag

SEQ ID NO: 1757412 - RNA, 19 nt, Artificial Sequence
  Description of Artificial Sequence: Synthetic oligonucleotide
  Antisense strand to SEQ ID NO: 1757411
cuuguucugacgcuaauga

SEQ ID NO: 1757413 - RNA, 19 nt, Artificial Sequence
  Description of Artificial Sequence: Synthetic oligonucleotide
  Sense strand starting at position 2040 of SEQ ID NO: 1562578
caaggaaguucucugccau

SEQ ID NO: 1757414 - RNA, 19 nt, Artificial Sequence
  Description of Artificial Sequence: Synthetic oligonucleotide
  Antisense strand to SEQ ID NO: 1757413
auggcagagaacuuccuug

SEQ ID NO: 1757415 - RNA, 19 nt, Artificial Sequence
  Description of Artificial Sequence: Synthetic oligonucleotide
  Sense strand starting at position 2041 of SEQ ID NO: 1562578
aaggaaguucucugccaug

SEQ ID NO: 1757416 - RNA, 19 nt, Artificial Sequence
  Description of Artificial Sequence: Synthetic oligonucleotide
  Antisense strand to SEQ ID NO: 1757415
cauggcagagaacuuccuu

SEQ ID NO: 1757417 - RNA, 19 nt, Artificial Sequence
  Description of Artificial Sequence: Synthetic oligonucleotide
  Sense strand starting at position 2112 of SEQ ID NO: 1562578
gacacuguggagugacaau

SEQ ID NO: 1757418 - RNA, 19 nt, Artificial Sequence
  Description of Artificial Sequence: Synthetic oligonucleotide
  Antisense strand to SEQ ID NO: 1757417
auugucacuccacaguguc

SEQ ID NO: 1757419 - RNA, 19 nt, Artificial Sequence
  Description of Artificial Sequence: Synthetic oligonucleotide
  Sense strand starting at position 2382 of SEQ ID NO: 1562578
cuucccuggcugugaagau

SEQ ID NO: 1757420 - RNA, 19 nt, Artificial Sequence
  Description of Artificial Sequence: Synthetic oligonucleotide
  Antisense strand to SEQ ID NO: 1757419
aucuucacagccagggaag

SEQ ID NO: 1757421 - RNA, 19 nt, Artificial Sequence
  Description of Artificial Sequence: Synthetic oligonucleotide
  Sense strand starting at position 2423 of SEQ ID NO: 1562578
ccuccuaugcaucagugua

SEQ ID NO: 1757422 - RNA, 19 nt, Artificial Sequence
  Description of Artificial Sequence: Synthetic oligonucleotide
  Antisense strand to SEQ ID NO: 1757421
uacacugaugcauaggagg

SEQ ID NO: 1757423 - RNA, 19 nt, Artificial Sequence
  Description of Artificial Sequence: Synthetic oligonucleotide
  Sense strand starting at position 2431 of SEQ ID NO: 1562578
gcaucaguguaucuaauaa

SEQ ID NO: 1757424 - RNA, 19 nt, Artificial Sequence
  Description of Artificial Sequence: Synthetic oligonucleotide
  Antisense strand to SEQ ID NO: 1757423
uuauuagauacacugaugc

SEQ ID NO: 1757425 - RNA, 19 nt, Artificial Sequence
  Description of Artificial Sequence: Synthetic oligonucleotide
  Sense strand starting at position 2499 of SEQ ID NO: 1562578
gcuaaaggcucugaaaggu

SEQ ID NO: 1757426 - RNA, 19 nt, Artificial Sequence
  Description of Artificial Sequence: Synthetic oligonucleotide
  Antisense strand to SEQ ID NO: 1757425
accuuucagagccuuuagc

SEQ ID NO: 1757427 - RNA, 19 nt, Artificial Sequence
  Description of Artificial Sequence: Synthetic oligonucleotide
  Sense strand starting at position 2793 of SEQ ID NO: 1562578
uguucuggcucuuacuaga

SEQ ID NO: 1757428 - RNA, 19 nt, Artificial Sequence
  Description of Artificial Sequence: Synthetic oligonucleotide
  Antisense strand to SEQ ID NO: 1757427
ucuaguaagagccagaaca

SEQ ID NO: 1757429 - RNA, 19 nt, Artificial Sequence
  Description of Artificial Sequence: Synthetic oligonucleotide
  Sense strand starting at position 2816 of SEQ ID NO: 1562578
ccugucuuuggccagcaau

SEQ ID NO: 1757430 - RNA, 19 nt, Artificial Sequence
  Description of Artificial Sequence: Synthetic oligonucleotide
  Antisense strand to SEQ ID NO: 1757429
auugcuggccaaagacagg

SEQ ID NO: 1757431 - RNA, 19 nt, Artificial Sequence
  Description of Artificial Sequence: Synthetic oligonucleotide
  Sense strand starting at position 2920 of SEQ ID NO: 1562578
ccauucugucuccagaugu

SEQ ID NO: 1757432 - RNA, 19 nt, Artificial Sequence
  Description of Artificial Sequence: Synthetic oligonucleotide
  Antisense strand to SEQ ID NO: 1757431
acaucuggagacagaaugg

SEQ ID NO: 1757433 - RNA, 19 nt, Artificial Sequence
  Description of Artificial Sequence: Synthetic oligonucleotide
  Sense strand starting at position 2937 of SEQ ID NO: 1562578
guuggacucuucuagucaa

SEQ ID NO: 1757434 - RNA, 19 nt, Artificial Sequence
  Description of Artificial Sequence: Synthetic oligonucleotide
  Antisense strand to SEQ ID NO: 1757433
uugacuagaagaguccaac

SEQ ID NO: 1757435 - RNA, 19 nt, Artificial Sequence
  Description of Artificial Sequence: Synthetic oligonucleotide
  Sense strand starting at position 2940 of SEQ ID NO: 1562578
ggacucuucuagucaagaa

SEQ ID NO: 1757436 - RNA, 19 nt, Artificial Sequence
  Description of Artificial Sequence: Synthetic oligonucleotide
  Antisense strand to SEQ ID NO: 1757435
uucuugacuagaagagucc

SEQ ID NO: 1757437 - RNA, 19 nt, Artificial Sequence
  Description of Artificial Sequence: Synthetic oligonucleotide
  Sense strand starting at position 2973 of SEQ ID NO: 1562578
gcagucaacugccauuuga

SEQ ID NO: 1757438 - RNA, 19 nt, Artificial Sequence
  Description of Artificial Sequence: Synthetic oligonucleotide
  Antisense strand to SEQ ID NO: 1757437
ucaaauggcaguugacugc

SEQ ID NO: 1757439 - RNA, 19 nt, Artificial Sequence
  Description of Artificial Sequence: Synthetic oligonucleotide
  Sense strand starting at position 3134 of SEQ ID NO: 1562578
guaccaacuuugggaggau

SEQ ID NO: 1757440 - RNA, 19 nt, Artificial Sequence
  Description of Artificial Sequence: Synthetic oligonucleotide
  Antisense strand to SEQ ID NO: 1757439
auccucccaaaguugguac

SEQ ID NO: 1757441 - RNA, 19 nt, Artificial Sequence
  Description of Artificial Sequence: Synthetic oligonucleotide
  Sense strand starting at position 3512 of SEQ ID NO: 1562578
agguccagaucuuccagaa

SEQ ID NO: 1757442 - RNA, 19 nt, Artificial Sequence
  Description of Artificial Sequence: Synthetic oligonucleotide
  Antisense strand to SEQ ID NO: 1757441
uucuggaagaucuggaccu

SEQ ID NO: 1757443 - RNA, 19 nt, Artificial Sequence
  Description of Artificial Sequence: Synthetic oligonucleotide
  Sense strand starting at position 3516 of SEQ ID NO: 1562578
ccagaucuuccagaauguc

SEQ ID NO: 1757444 - RNA, 19 nt, Artificial Sequence
  Description of Artificial Sequence: Synthetic oligonucleotide
  Antisense strand to SEQ ID NO: 1757443
gacauucuggaagaucugg

SEQ ID NO: 1757445 - RNA, 19 nt, Artificial Sequence
  Description of Artificial Sequence: Synthetic oligonucleotide
  Sense strand starting at position 3532 of SEQ ID NO: 1562578
gucuccaaaucuguaagau

SEQ ID NO: 1757446 - RNA, 19 nt, Artificial Sequence
  Description of Artificial Sequence: Synthetic oligonucleotide
  Antisense strand to SEQ ID NO: 1757445
aucuuacagauuuggagac

SEQ ID NO: 1757447 - RNA, 19 nt, Artificial Sequence
  Description of Artificial Sequence: Synthetic oligonucleotide
  Sense strand starting at position 3583 of SEQ ID NO: 1562578
uugucuguuucucuuucua

SEQ ID NO: 1757448 - RNA, 19 nt, Artificial Sequence
  Description of Artificial Sequence: Synthetic oligonucleotide
  Antisense strand to SEQ ID NO: 1757447
uagaaagagaaacagacaa

SEQ ID NO: 1757449 - RNA, 19 nt, Artificial Sequence
  Description of Artificial Sequence: Synthetic oligonucleotide
  Sense strand starting at position 3618 of SEQ ID NO: 1562578
agguuagacuaucagcaca

SEQ ID NO: 1757450 - RNA, 19 nt, Artificial Sequence
  Description of Artificial Sequence: Synthetic oligonucleotide
  Antisense strand to SEQ ID NO: 1757449
ugugcugauagucuaaccu

SEQ ID NO: 1757451 - RNA, 19 nt, Artificial Sequence
  Description of Artificial Sequence: Synthetic oligonucleotide
  Sense strand starting at position 3647 of SEQ ID NO: 1562578
ugugaaccuucucaucuga

SEQ ID NO: 1757452 - RNA, 19 nt, Artificial Sequence
  Description of Artificial Sequence: Synthetic oligonucleotide
  Antisense strand to SEQ ID NO: 1757451
ucagaugagaagguucaca

SEQ ID NO: 1757453 - RNA, 19 nt, Artificial Sequence
  Description of Artificial Sequence: Synthetic oligonucleotide
  Sense strand starting at position 3735 of SEQ ID NO: 1562578
cucaguaacucacuguaca

SEQ ID NO: 1757454 - RNA, 19 nt, Artificial Sequence
  Description of Artificial Sequence: Synthetic oligonucleotide
  Antisense strand to SEQ ID NO: 1757453
uguacagugaguuacugag

SEQ ID NO: 1757455 - RNA, 19 nt, Artificial Sequence
  Description of Artificial Sequence: Synthetic oligonucleotide
  Sense strand starting at position 3736 of SEQ ID NO: 1562578
ucaguaacucacuguacaa

SEQ ID NO: 1757456 - RNA, 19 nt, Artificial Sequence
  Description of Artificial Sequence: Synthetic oligonucleotide
  Antisense strand to SEQ ID NO: 1757455
uuguacagugaguuacuga

SEQ ID NO: 1757457 - RNA, 19 nt, Artificial Sequence
  Description of Artificial Sequence: Synthetic oligonucleotide
  Sense strand starting at position 364 of SEQ ID NO: 1562579
aggguuaacuccuaccaca

SEQ ID NO: 1757458 - RNA, 19 nt, Artificial Sequence
  Description of Artificial Sequence: Synthetic oligonucleotide
  Antisense strand to SEQ ID NO: 1757457
ugugguaggaguuaacccu

SEQ ID NO: 1757459 - RNA, 19 nt, Artificial Sequence
  Description of Artificial Sequence: Synthetic oligonucleotide
  Sense strand starting at position 451 of SEQ ID NO: 1562579
ucggguaauucauaggauu

SEQ ID NO: 1757460 - RNA, 19 nt, Artificial Sequence
  Description of Artificial Sequence: Synthetic oligonucleotide
  Antisense strand to SEQ ID NO: 1757459
aauccuaugaauuacccga

SEQ ID NO: 1757461 - RNA, 19 nt, Artificial Sequence
  Description of Artificial Sequence: Synthetic oligonucleotide
  Sense strand starting at position 503 of SEQ ID NO: 1562579
aaaugugcuucucaggcaa

SEQ ID NO: 1757462 - RNA, 19 nt, Artificial Sequence
  Description of Artificial Sequence: Synthetic oligonucleotide
  Antisense strand to SEQ ID NO: 1757461
uugccugagaagcacauuu

SEQ ID NO: 1757463 - RNA, 19 nt, Artificial Sequence
  Description of Artificial Sequence: Synthetic oligonucleotide
  Sense strand starting at position 507 of SEQ ID NO: 1562579
gugcuucucaggcaauuga

SEQ ID NO: 1757464 - RNA, 19 nt, Artificial Sequence
  Description of Artificial Sequence: Synthetic oligonucleotide
  Antisense strand to SEQ ID NO: 1757463
ucaauugccugagaagcac

SEQ ID NO: 1757465 - RNA, 19 nt, Artificial Sequence
  Description of Artificial Sequence: Synthetic oligonucleotide
  Sense strand starting at position 604 of SEQ ID NO: 1562579
cugacauaaucagaauuag

SEQ ID NO: 1757466 - RNA, 19 nt, Artificial Sequence
  Description of Artificial Sequence: Synthetic oligonucleotide
  Antisense strand to SEQ ID NO: 1757465
cuaauucugauuaugucag

SEQ ID NO: 1757467 - RNA, 19 nt, Artificial Sequence
  Description of Artificial Sequence: Synthetic oligonucleotide
  Sense strand starting at position 1077 of SEQ ID NO: 1562579
agggaaauauuggaagaaa

SEQ ID NO: 1757468 - RNA, 19 nt, Artificial Sequence
  Description of Artificial Sequence: Synthetic oligonucleotide
  Antisense strand to SEQ ID NO: 1757467
uuucuuccaauauuucccu

SEQ ID NO: 1757469 - RNA, 19 nt, Artificial Sequence
  Description of Artificial Sequence: Synthetic oligonucleotide
  Sense strand starting at position 1297 of SEQ ID NO: 1562579
gcaugaaucugggcucuac

SEQ ID NO: 1757470 - RNA, 19 nt, Artificial Sequence
  Description of Artificial Sequence: Synthetic oligonucleotide
  Antisense strand to SEQ ID NO: 1757469
guagagcccagauucaugc

SEQ ID NO: 1757471 - RNA, 19 nt, Artificial Sequence
  Description of Artificial Sequence: Synthetic oligonucleotide
  Sense strand starting at position 1322 of SEQ ID NO: 1562579
cuugcucuguguucucaaa

SEQ ID NO: 1757472 - RNA, 19 nt, Artificial Sequence
  Description of Artificial Sequence: Synthetic oligonucleotide
  Antisense strand to SEQ ID NO: 1757471
uuugagaacacagagcaag

SEQ ID NO: 1757473 - RNA, 19 nt, Artificial Sequence
  Description of Artificial Sequence: Synthetic oligonucleotide
  Sense strand starting at position 1393 of SEQ ID NO: 1562579
uucuuaauauuagggagaa

SEQ ID NO: 1757474 - RNA, 19 nt, Artificial Sequence
  Description of Artificial Sequence: Synthetic oligonucleotide
  Antisense strand to SEQ ID NO: 1757473
uucucccuaauauuaagaa

SEQ ID NO: 1757475 - RNA, 19 nt, Artificial Sequence
  Description of Artificial Sequence: Synthetic oligonucleotide
  Sense strand starting at position 1394 of SEQ ID NO: 1562579
ucuuaauauuagggagaac

SEQ ID NO: 1757476 - RNA, 19 nt, Artificial Sequence
  Description of Artificial Sequence: Synthetic oligonucleotide
  Antisense strand to SEQ ID NO: 1757475
guucucccuaauauuaaga

SEQ ID NO: 1757477 - RNA, 19 nt, Artificial Sequence
  Description of Artificial Sequence: Synthetic oligonucleotide
  Sense strand starting at position 1441 of SEQ ID NO: 1562579
aggccaaguccagauacau

SEQ ID NO: 1757478 - RNA, 19 nt, Artificial Sequence
  Description of Artificial Sequence: Synthetic oligonucleotide
  Antisense strand to SEQ ID NO: 1757477
auguaucuggacuuggccu

SEQ ID NO: 1757479 - RNA, 19 nt, Artificial Sequence
  Description of Artificial Sequence: Synthetic oligonucleotide
  Sense strand starting at position 1458 of SEQ ID NO: 1562579
auggaacauuugcaagaaa

SEQ ID NO: 1757480 - RNA, 19 nt, Artificial Sequence
  Description of Artificial Sequence: Synthetic oligonucleotide
  Antisense strand to SEQ ID NO: 1757479
uuucuugcaaauguuccau

SEQ ID NO: 1757481 - RNA, 19 nt, Artificial Sequence
  Description of Artificial Sequence: Synthetic oligonucleotide
  Sense strand starting at position 1548 of SEQ ID NO: 1562579
accauuaucuauugggauu

SEQ ID NO: 1757482 - RNA, 19 nt, Artificial Sequence
  Description of Artificial Sequence: Synthetic oligonucleotide
  Antisense strand to SEQ ID NO: 1757481
aaucccaauagauaauggu

SEQ ID NO: 1757483 - RNA, 19 nt, Artificial Sequence
  Description of Artificial Sequence: Synthetic oligonucleotide
  Sense strand starting at position 1727 of SEQ ID NO: 1562579
gugagaggugagugcucau

SEQ ID NO: 1757484 - RNA, 19 nt, Artificial Sequence
  Description of Artificial Sequence: Synthetic oligonucleotide
  Antisense strand to SEQ ID NO: 1757483
augagcacucaccucucac

SEQ ID NO: 1757485 - RNA, 19 nt, Artificial Sequence
  Description of Artificial Sequence: Synthetic oligonucleotide
  Sense strand starting at position 2023 of SEQ ID NO: 1562579
ccucauuagcgucagaaca

SEQ ID NO: 1757486 - RNA, 19 nt, Artificial Sequence
  Description of Artificial Sequence: Synthetic oligonucleotide
  Antisense strand to SEQ ID NO: 1757485
uguucugacgcuaaugagg

SEQ ID NO: 1757487 - RNA, 19 nt, Artificial Sequence
  Description of Artificial Sequence: Synthetic oligonucleotide
  Sense strand starting at position 2025 of SEQ ID NO: 1562579
ucauuagcgucagaacaag

SEQ ID NO: 1757488 - RNA, 19 nt, Artificial Sequence
  Description of Artificial Sequence: Synthetic oligonucleotide
  Antisense strand to SEQ ID NO: 1757487
cuuguucugacgcuaauga

SEQ ID NO: 1757489 - RNA, 19 nt, Artificial Sequence
  Description of Artificial Sequence: Synthetic oligonucleotide
  Sense strand starting at position 2040 of SEQ ID NO: 1562579
caaggaaguucucugccau

SEQ ID NO: 1757490 - RNA, 19 nt, Artificial Sequence
  Description of Artificial Sequence: Synthetic oligonucleotide
  Antisense strand to SEQ ID NO: 1757489
auggcagagaacuuccuug

SEQ ID NO: 1757491 - RNA, 19 nt, Artificial Sequence
  Description of Artificial Sequence: Synthetic oligonucleotide
  Sense strand starting at position 2041 of SEQ ID NO: 1562579
aaggaaguucucugccaug

SEQ ID NO: 1757492 - RNA, 19 nt, Artificial Sequence
  Description of Artificial Sequence: Synthetic oligonucleotide
  Antisense strand to SEQ ID NO: 1757491
cauggcagagaacuuccuu

SEQ ID NO: 1757493 - RNA, 19 nt, Artificial Sequence
  Description of Artificial Sequence: Synthetic oligonucleotide
  Sense strand starting at position 2112 of SEQ ID NO: 1562579
gacacuguggagugacaau

SEQ ID NO: 1757494 - RNA, 19 nt, Artificial Sequence
  Description of Artificial Sequence: Synthetic oligonucleotide
  Antisense strand to SEQ ID NO: 1757493
auugucacuccacaguguc

SEQ ID NO: 1757495 - RNA, 19 nt, Artificial Sequence
  Description of Artificial Sequence: Synthetic oligonucleotide
  Sense strand starting at position 2382 of SEQ ID NO: 1562579
cuucccuggcugugaagau

SEQ ID NO: 1757496 - RNA, 19 nt, Artificial Sequence
  Description of Artificial Sequence: Synthetic oligonucleotide
  Antisense strand to SEQ ID NO: 1757495
aucuucacagccagggaag

SEQ ID NO: 1757497 - RNA, 19 nt, Artificial Sequence
  Description of Artificial Sequence: Synthetic oligonucleotide
  Sense strand starting at position 2423 of SEQ ID NO: 1562579
ccuccuaugcaucagugua

SEQ ID NO: 1757498 - RNA, 19 nt, Artificial Sequence
  Description of Artificial Sequence: Synthetic oligonucleotide
  Antisense strand to SEQ ID NO: 1757497
uacacugaugcauaggagg

SEQ ID NO: 1757499 - RNA, 19 nt, Artificial Sequence
  Description of Artificial Sequence: Synthetic oligonucleotide
  Sense strand starting at position 2431 of SEQ ID NO: 1562579
gcaucaguguaucuaauaa

SEQ ID NO: 1757500 - RNA, 19 nt, Artificial Sequence
  Description of Artificial Sequence: Synthetic oligonucleotide
  Antisense strand to SEQ ID NO: 1757499
uuauuagauacacugaugc

SEQ ID NO: 1757501 - RNA, 19 nt, Artificial Sequence
  Description of Artificial Sequence: Synthetic oligonucleotide
  Sense strand starting at position 2499 of SEQ ID NO: 1562579
gcuaaaggcucugaaaggu

SEQ ID NO: 1757502 - RNA, 19 nt, Artificial Sequence
  Description of Artificial Sequence: Synthetic oligonucleotide
  Antisense strand to SEQ ID NO: 1757501
accuuucagagccuuuagc

SEQ ID NO: 1757503 - RNA, 19 nt, Artificial Sequence
  Description of Artificial Sequence: Synthetic oligonucleotide
  Sense strand starting at position 2816 of SEQ ID NO: 1562579
ccugucuuuggccagcaau

SEQ ID NO: 1757504 - RNA, 19 nt, Artificial Sequence
  Description of Artificial Sequence: Synthetic oligonucleotide
  Antisense strand to SEQ ID NO: 1757503
auugcuggccaaagacagg

SEQ ID NO: 1757505 - RNA, 19 nt, Artificial Sequence
  Description of Artificial Sequence: Synthetic oligonucleotide
  Sense strand starting at position 2920 of SEQ ID NO: 1562579
ccauucugucuccagaugu

SEQ ID NO: 1757506 - RNA, 19 nt, Artificial Sequence
  Description of Artificial Sequence: Synthetic oligonucleotide
  Antisense strand to SEQ ID NO: 1757505
acaucuggagacagaaugg

SEQ ID NO: 1757507 - RNA, 19 nt, Artificial Sequence
  Description of Artificial Sequence: Synthetic oligonucleotide
  Sense strand starting at position 2937 of SEQ ID NO: 1562579
guuggacucuucuagucaa

SEQ ID NO: 1757508 - RNA, 19 nt, Artificial Sequence
  Description of Artificial Sequence: Synthetic oligonucleotide
  Antisense strand to SEQ ID NO: 1757507
uugacuagaagaguccaac

SEQ ID NO: 1757509 - RNA, 19 nt, Artificial Sequence
  Description of Artificial Sequence: Synthetic oligonucleotide
  Sense strand starting at position 2940 of SEQ ID NO: 1562579
ggacucuucuagucaagaa

SEQ ID NO: 1757510 - RNA, 19 nt, Artificial Sequence
  Description of Artificial Sequence: Synthetic oligonucleotide
  Antisense strand to SEQ ID NO: 1757509
uucuugacuagaagagucc

SEQ ID NO: 1757511 - RNA, 19 nt, Artificial Sequence
  Description of Artificial Sequence: Synthetic oligonucleotide
  Sense strand starting at position 2973 of SEQ ID NO: 1562579
gcagucaacugccauuuga

SEQ ID NO: 1757512 - RNA, 19 nt, Artificial Sequence
  Description of Artificial Sequence: Synthetic oligonucleotide
  Antisense strand to SEQ ID NO: 1757511
ucaaauggcaguugacugc

SEQ ID NO: 1757513 - RNA, 19 nt, Artificial Sequence
  Description of Artificial Sequence: Synthetic oligonucleotide
  Sense strand starting at position 3012 of SEQ ID NO: 1562579
gagcucaucuugguguguu

SEQ ID NO: 1757514 - RNA, 19 nt, Artificial Sequence
  Description of Artificial Sequence: Synthetic oligonucleotide
  Antisense strand to SEQ ID NO: 1757513
aacacaccaagaugagcuc

SEQ ID NO: 1757515 - RNA, 19 nt, Artificial Sequence
  Description of Artificial Sequence: Synthetic oligonucleotide
  Sense strand starting at position 3022 of SEQ ID NO: 1562579
ugguguguugugugagucu

SEQ ID NO: 1757516 - RNA, 19 nt, Artificial Sequence
  Description of Artificial Sequence: Synthetic oligonucleotide
  Antisense strand to SEQ ID NO: 1757515
agacucacacaacacacca

SEQ ID NO: 1757517 - RNA, 19 nt, Artificial Sequence
  Description of Artificial Sequence: Synthetic oligonucleotide
  Sense strand starting at position 3029 of SEQ ID NO: 1562579
uugugugagucugaccaga

SEQ ID NO: 1757518 - RNA, 19 nt, Artificial Sequence
  Description of Artificial Sequence: Synthetic oligonucleotide
  Antisense strand to SEQ ID NO: 1757517
ucuggucagacucacacaa

SEQ ID NO: 1757519 - RNA, 19 nt, Artificial Sequence
  Description of Artificial Sequence: Synthetic oligonucleotide
  Sense strand starting at position 3134 of SEQ ID NO: 1562579
guaccaacuuugggaggau

SEQ ID NO: 1757520 - RNA, 19 nt, Artificial Sequence
  Description of Artificial Sequence: Synthetic oligonucleotide
  Antisense strand to SEQ ID NO: 1757519
auccucccaaaguugguac

SEQ ID NO: 1757521 - RNA, 19 nt, Artificial Sequence
  Description of Artificial Sequence: Synthetic oligonucleotide
  Sense strand starting at position 3512 of SEQ ID NO: 1562579
agguccagaucuuccagaa

SEQ ID NO: 1757522 - RNA, 19 nt, Artificial Sequence
  Description of Artificial Sequence: Synthetic oligonucleotide
  Antisense strand to SEQ ID NO: 1757521
uucuggaagaucuggaccu

SEQ ID NO: 1757523 - RNA, 19 nt, Artificial Sequence
  Description of Artificial Sequence: Synthetic oligonucleotide
  Sense strand starting at position 3516 of SEQ ID NO: 1562579
ccagaucuuccagaauguc

SEQ ID NO: 1757524 - RNA, 19 nt, Artificial Sequence
  Description of Artificial Sequence: Synthetic oligonucleotide
  Antisense strand to SEQ ID NO: 1757523
gacauucuggaagaucugg

SEQ ID NO: 1757525 - RNA, 19 nt, Artificial Sequence
  Description of Artificial Sequence: Synthetic oligonucleotide
  Sense strand starting at position 3532 of SEQ ID NO: 1562579
gucuccaaaucuguaagau

SEQ ID NO: 1757526 - RNA, 19 nt, Artificial Sequence
  Description of Artificial Sequence: Synthetic oligonucleotide
  Antisense strand to SEQ ID NO: 1757525
aucuuacagauuuggagac

SEQ ID NO: 1757527 - RNA, 19 nt, Artificial Sequence
  Description of Artificial Sequence: Synthetic oligonucleotide
  Sense strand starting at position 3583 of SEQ ID NO: 1562579
uugucuguuucucuuucua

SEQ ID NO: 1757528 - RNA, 19 nt, Artificial Sequence
  Description of Artificial Sequence: Synthetic oligonucleotide
  Antisense strand to SEQ ID NO: 1757527
uagaaagagaaacagacaa

SEQ ID NO: 1757529 - RNA, 19 nt, Artificial Sequence
  Description of Artificial Sequence: Synthetic oligonucleotide
  Sense strand starting at position 3618 of SEQ ID NO: 1562579
agguuagacuaucagcaca

SEQ ID NO: 1757530 - RNA, 19 nt, Artificial Sequence
  Description of Artificial Sequence: Synthetic oligonucleotide
  Antisense strand to SEQ ID NO: 1757529
ugugcugauagucuaaccu

SEQ ID NO: 1757531 - RNA, 19 nt, Artificial Sequence
  Description of Artificial Sequence: Synthetic oligonucleotide
  Sense strand starting at position 3647 of SEQ ID NO: 1562579
ugugaaccuucucaucuga

SEQ ID NO: 1757532 - RNA, 19 nt, Artificial Sequence
  Description of Artificial Sequence: Synthetic oligonucleotide
  Antisense strand to SEQ ID NO: 1757531
ucagaugagaagguucaca

SEQ ID NO: 1757533 - RNA, 19 nt, Artificial Sequence
  Description of Artificial Sequence: Synthetic oligonucleotide
  Sense strand starting at position 3735 of SEQ ID NO: 1562579
cucaguaacucacuguaca

SEQ ID NO: 1757534 - RNA, 19 nt, Artificial Sequence
  Description of Artificial Sequence: Synthetic oligonucleotide
  Antisense strand to SEQ ID NO: 1757533
uguacagugaguuacugag

SEQ ID NO: 1757535 - RNA, 19 nt, Artificial Sequence
  Description of Artificial Sequence: Synthetic oligonucleotide
  Sense strand starting at position 3736 of SEQ ID NO: 1562579
ucaguaacucacuguacaa

SEQ ID NO: 1757536 - RNA, 19 nt, Artificial Sequence
  Description of Artificial Sequence: Synthetic oligonucleotide
  Antisense strand to SEQ ID NO: 1757535
uuguacagugaguuacuga

SEQ ID NO: 1757537 - RNA, 19 nt, Artificial Sequence
  Description of Artificial Sequence: Synthetic oligonucleotide
  Sense strand starting at position 15 of SEQ ID NO: 1562580
cucagucugucuuuguuaa

SEQ ID NO: 1757538 - RNA, 19 nt, Artificial Sequence
  Description of Artificial Sequence: Synthetic oligonucleotide
  Antisense strand to SEQ ID NO: 1757537
uuaacaaagacagacugag

SEQ ID NO: 1757539 - RNA, 19 nt, Artificial Sequence
  Description of Artificial Sequence: Synthetic oligonucleotide
  Sense strand starting at position 16 of SEQ ID NO: 1562580
ucagucugucuuuguuaag

SEQ ID NO: 1757540 - RNA, 19 nt, Artificial Sequence
  Description of Artificial Sequence: Synthetic oligonucleotide
  Antisense strand to SEQ ID NO: 1757539
cuuaacaaagacagacuga

SEQ ID NO: 1757541 - RNA, 19 nt, Artificial Sequence
  Description of Artificial Sequence: Synthetic oligonucleotide
  Sense strand starting at position 49 of SEQ ID NO: 1562580
ggaugugagucugcugaac

SEQ ID NO: 1757542 - RNA, 19 nt, Artificial Sequence
  Description of Artificial Sequence: Synthetic oligonucleotide
  Antisense strand to SEQ ID NO: 1757541
guucagcagacucacaucc

SEQ ID NO: 1757543 - RNA, 19 nt, Artificial Sequence
  Description of Artificial Sequence: Synthetic oligonucleotide
  Sense strand starting at position 51 of SEQ ID NO: 1562580
augugagucugcugaacca

SEQ ID NO: 1757544 - RNA, 19 nt, Artificial Sequence
  Description of Artificial Sequence: Synthetic oligonucleotide
  Antisense strand to SEQ ID NO: 1757543
ugguucagcagacucacau

SEQ ID NO: 1757545 - RNA, 19 nt, Artificial Sequence
  Description of Artificial Sequence: Synthetic oligonucleotide
  Sense strand starting at position 90 of SEQ ID NO: 1562580
cugucucacccauaucagu

SEQ ID NO: 1757546 - RNA, 19 nt, Artificial Sequence
  Description of Artificial Sequence: Synthetic oligonucleotide
  Antisense strand to SEQ ID NO: 1757545
acugauaugggugagacag

SEQ ID NO: 1757547 - RNA, 19 nt, Artificial Sequence
  Description of Artificial Sequence: Synthetic oligonucleotide
  Sense strand starting at position 129 of SEQ ID NO: 1562580
ugcaacacugccugugauu

SEQ ID NO: 1757548 - RNA, 19 nt, Artificial Sequence
  Description of Artificial Sequence: Synthetic oligonucleotide
  Antisense strand to SEQ ID NO: 1757547
aaucacaggcaguguugca

SEQ ID NO: 1757549 - RNA, 19 nt, Artificial Sequence
  Description of Artificial Sequence: Synthetic oligonucleotide
  Sense strand starting at position 140 of SEQ ID NO: 1562580
cugugauucgauugaaguu

SEQ ID NO: 1757550 - RNA, 19 nt, Artificial Sequence
  Description of Artificial Sequence: Synthetic oligonucleotide
  Antisense strand to SEQ ID NO: 1757549
aacuucaaucgaaucacag

SEQ ID NO: 1757551 - RNA, 19 nt, Artificial Sequence
  Description of Artificial Sequence: Synthetic oligonucleotide
  Sense strand starting at position 141 of SEQ ID NO: 1562580
ugugauucgauugaaguuu

SEQ ID NO: 1757552 - RNA, 19 nt, Artificial Sequence
  Description of Artificial Sequence: Synthetic oligonucleotide
  Antisense strand to SEQ ID NO: 1757551
aaacuucaaucgaaucaca

SEQ ID NO: 1757553 - RNA, 19 nt, Artificial Sequence
  Description of Artificial Sequence: Synthetic oligonucleotide
  Sense strand starting at position 149 of SEQ ID NO: 1562580
gauugaaguuuggguggua

SEQ ID NO: 1757554 - RNA, 19 nt, Artificial Sequence
  Description of Artificial Sequence: Synthetic oligonucleotide
  Antisense strand to SEQ ID NO: 1757553
uaccacccaaacuucaauc

SEQ ID NO: 1757555 - RNA, 19 nt, Artificial Sequence
  Description of Artificial Sequence: Synthetic oligonucleotide
  Sense strand starting at position 942 of SEQ ID NO: 1562580
acggauccuguaggagaaa

SEQ ID NO: 1757556 - RNA, 19 nt, Artificial Sequence
  Description of Artificial Sequence: Synthetic oligonucleotide
  Antisense strand to SEQ ID NO: 1757555
uuucuccuacaggauccgu

SEQ ID NO: 1757557 - RNA, 19 nt, Artificial Sequence
  Description of Artificial Sequence: Synthetic oligonucleotide
  Sense strand starting at position 1047 of SEQ ID NO: 1562580
auuccauguuacugaucau

SEQ ID NO: 1757558 - RNA, 19 nt, Artificial Sequence
  Description of Artificial Sequence: Synthetic oligonucleotide
  Antisense strand to SEQ ID NO: 1757557
augaucaguaacauggaau

SEQ ID NO: 1757559 - RNA, 19 nt, Artificial Sequence
  Description of Artificial Sequence: Synthetic oligonucleotide
  Sense strand starting at position 1050 of SEQ ID NO: 1562580
ccauguuacugaucauguu

SEQ ID NO: 1757560 - RNA, 19 nt, Artificial Sequence
  Description of Artificial Sequence: Synthetic oligonucleotide
  Antisense strand to SEQ ID NO: 1757559
aacaugaucaguaacaugg

SEQ ID NO: 1757561 - RNA, 19 nt, Artificial Sequence
  Description of Artificial Sequence: Synthetic oligonucleotide
  Sense strand starting at position 1053 of SEQ ID NO: 1562580
uguuacugaucauguucuu

SEQ ID NO: 1757562 - RNA, 19 nt, Artificial Sequence
  Description of Artificial Sequence: Synthetic oligonucleotide
  Antisense strand to SEQ ID NO: 1757561
aagaacaugaucaguaaca

SEQ ID NO: 1757563 - RNA, 19 nt, Artificial Sequence
  Description of Artificial Sequence: Synthetic oligonucleotide
  Sense strand starting at position 1177 of SEQ ID NO: 1562580
gccuaaaccuccugaguau

SEQ ID NO: 1757564 - RNA, 19 nt, Artificial Sequence
  Description of Artificial Sequence: Synthetic oligonucleotide
  Antisense strand to SEQ ID NO: 1757563
auacucaggagguuuaggc

SEQ ID NO: 1757565 - RNA, 19 nt, Artificial Sequence
  Description of Artificial Sequence: Synthetic oligonucleotide
  Sense strand starting at position 1451 of SEQ ID NO: 1562580
cacgauuuaucaugugcuu

SEQ ID NO: 1757566 - RNA, 19 nt, Artificial Sequence
  Description of Artificial Sequence: Synthetic oligonucleotide
  Antisense strand to SEQ ID NO: 1757565
aagcacaugauaaaucgug

SEQ ID NO: 1757567 - RNA, 19 nt, Artificial Sequence
  Description of Artificial Sequence: Synthetic oligonucleotide
  Sense strand starting at position 1564 of SEQ ID NO: 1562580
augccugauugcuccaauu

SEQ ID NO: 1757568 - RNA, 19 nt, Artificial Sequence
  Description of Artificial Sequence: Synthetic oligonucleotide
  Antisense strand to SEQ ID NO: 1757567
aauuggagcaaucaggcau

SEQ ID NO: 1757569 - RNA, 19 nt, Artificial Sequence
  Description of Artificial Sequence: Synthetic oligonucleotide
  Sense strand starting at position 1566 of SEQ ID NO: 1562580
gccugauugcuccaauuac

SEQ ID NO: 1757570 - RNA, 19 nt, Artificial Sequence
  Description of Artificial Sequence: Synthetic oligonucleotide
  Antisense strand to SEQ ID NO: 1757569
guaauuggagcaaucaggc

SEQ ID NO: 1757571 - RNA, 19 nt, Artificial Sequence
  Description of Artificial Sequence: Synthetic oligonucleotide
  Sense strand starting at position 1673 of SEQ ID NO: 1562580
cgggcaugacuuuaaggga

SEQ ID NO: 1757572 - RNA, 19 nt, Artificial Sequence
  Description of Artificial Sequence: Synthetic oligonucleotide
  Antisense strand to SEQ ID NO: 1757571
ucccuuaaagucaugcccg

SEQ ID NO: 1757573 - RNA, 19 nt, Artificial Sequence
  Description of Artificial Sequence: Synthetic oligonucleotide
  Sense strand starting at position 2625 of SEQ ID NO: 1562580
aagggagaagggugucuau

SEQ ID NO: 1757574 - RNA, 19 nt, Artificial Sequence
  Description of Artificial Sequence: Synthetic oligonucleotide
  Antisense strand to SEQ ID NO: 1757573
auagacacccuucucccuu

SEQ ID NO: 1757575 - RNA, 19 nt, Artificial Sequence
  Description of Artificial Sequence: Synthetic oligonucleotide
  Sense strand starting at position 2676 of SEQ ID NO: 1562580
gguucuuugugggccaaga

SEQ ID NO: 1757576 - RNA, 19 nt, Artificial Sequence
  Description of Artificial Sequence: Synthetic oligonucleotide
  Antisense strand to SEQ ID NO: 1757575
ucuuggcccacaaagaacc

SEQ ID NO: 1757577 - RNA, 19 nt, Artificial Sequence
  Description of Artificial Sequence: Synthetic oligonucleotide
  Sense strand starting at position 2678 of SEQ ID NO: 1562580
uucuuugugggccaagaaa

SEQ ID NO: 1757578 - RNA, 19 nt, Artificial Sequence
  Description of Artificial Sequence: Synthetic oligonucleotide
  Antisense strand to SEQ ID NO: 1757577
uuucuuggcccacaaagaa

SEQ ID NO: 1757579 - RNA, 19 nt, Artificial Sequence
  Description of Artificial Sequence: Synthetic oligonucleotide
  Sense strand starting at position 2719 of SEQ ID NO: 1562580
gcuuucugauuauuuaagu

SEQ ID NO: 1757580 - RNA, 19 nt, Artificial Sequence
  Description of Artificial Sequence: Synthetic oligonucleotide
  Antisense strand to SEQ ID NO: 1757579
acuuaaauaaucagaaagc

SEQ ID NO: 1757581 - RNA, 19 nt, Artificial Sequence
  Description of Artificial Sequence: Synthetic oligonucleotide
  Sense strand starting at position 2809 of SEQ ID NO: 1562580
guuuguuccagcuggagaa

SEQ ID NO: 1757582 - RNA, 19 nt, Artificial Sequence
  Description of Artificial Sequence: Synthetic oligonucleotide
  Antisense strand to SEQ ID NO: 1757581
uucuccagcuggaacaaac

SEQ ID NO: 1757583 - RNA, 19 nt, Artificial Sequence
  Description of Artificial Sequence: Synthetic oligonucleotide
  Sense strand starting at position 2932 of SEQ ID NO: 1562580
ugcacagaagcuuguccaa

SEQ ID NO: 1757584 - RNA, 19 nt, Artificial Sequence
  Description of Artificial Sequence: Synthetic oligonucleotide
  Antisense strand to SEQ ID NO: 1757583
uuggacaagcuucugugca

SEQ ID NO: 1757585 - RNA, 19 nt, Artificial Sequence
  Description of Artificial Sequence: Synthetic oligonucleotide
  Sense strand starting at position 3299 of SEQ ID NO: 1562580
uucuguugccgucagaaag

SEQ ID NO: 1757586 - RNA, 19 nt, Artificial Sequence
  Description of Artificial Sequence: Synthetic oligonucleotide
  Antisense strand to SEQ ID NO: 1757585
cuuucugacggcaacagaa

SEQ ID NO: 1757587 - RNA, 19 nt, Artificial Sequence
  Description of Artificial Sequence: Synthetic oligonucleotide
  Sense strand starting at position 3331 of SEQ ID NO: 1562580
auaagaccaucgguggaaa

SEQ ID NO: 1757588 - RNA, 19 nt, Artificial Sequence
  Description of Artificial Sequence: Synthetic oligonucleotide
  Antisense strand to SEQ ID NO: 1757587
uuuccaccgauggucuuau

SEQ ID NO: 1757589 - RNA, 19 nt, Artificial Sequence
  Description of Artificial Sequence: Synthetic oligonucleotide
  Sense strand starting at position 3353 of SEQ ID NO: 1562580
aacaguuccguuuaucaga

SEQ ID NO: 1757590 - RNA, 19 nt, Artificial Sequence
  Description of Artificial Sequence: Synthetic oligonucleotide
  Antisense strand to SEQ ID NO: 1757589
ucugauaaacggaacuguu

SEQ ID NO: 1757591 - RNA, 19 nt, Artificial Sequence
  Description of Artificial Sequence: Synthetic oligonucleotide
  Sense strand starting at position 3355 of SEQ ID NO: 1562580
caguuccguuuaucagaaa

SEQ ID NO: 1757592 - RNA, 19 nt, Artificial Sequence
  Description of Artificial Sequence: Synthetic oligonucleotide
  Antisense strand to SEQ ID NO: 1757591
uuucugauaaacggaacug

SEQ ID NO: 1757593 - RNA, 19 nt, Artificial Sequence
  Description of Artificial Sequence: Synthetic oligonucleotide
  Sense strand starting at position 3358 of SEQ ID NO: 1562580
uuccguuuaucagaaacau

SEQ ID NO: 1757594 - RNA, 19 nt, Artificial Sequence
  Description of Artificial Sequence: Synthetic oligonucleotide
  Antisense strand to SEQ ID NO: 1757593
auguuucugauaaacggaa

SEQ ID NO: 1757595 - RNA, 19 nt, Artificial Sequence
  Description of Artificial Sequence: Synthetic oligonucleotide
  Sense strand starting at position 3553 of SEQ ID NO: 1562580
ccucuaauugcaggcguga

SEQ ID NO: 1757596 - RNA, 19 nt, Artificial Sequence
  Description of Artificial Sequence: Synthetic oligonucleotide
  Antisense strand to SEQ ID NO: 1757595
ucacgccugcaauuagagg

SEQ ID NO: 1757597 - RNA, 19 nt, Artificial Sequence
  Description of Artificial Sequence: Synthetic oligonucleotide
  Sense strand starting at position 3621 of SEQ ID NO: 1562580
ugugguagcucauaccagu

SEQ ID NO: 1757598 - RNA, 19 nt, Artificial Sequence
  Description of Artificial Sequence: Synthetic oligonucleotide
  Antisense strand to SEQ ID NO: 1757597
acugguaugagcuaccaca

SEQ ID NO: 1757599 - RNA, 19 nt, Artificial Sequence
  Description of Artificial Sequence: Synthetic oligonucleotide
  Sense strand starting at position 3937 of SEQ ID NO: 1562580
uuauauauggcugagugca

SEQ ID NO: 1757600 - RNA, 19 nt, Artificial Sequence
  Description of Artificial Sequence: Synthetic oligonucleotide
  Antisense strand to SEQ ID NO: 1757599
ugcacucagccauauauaa

SEQ ID NO: 1757601 - RNA, 19 nt, Artificial Sequence
  Description of Artificial Sequence: Synthetic oligonucleotide
  Sense strand starting at position 386 of SEQ ID NO: 1562581
auagaaauguggcaggaaa

SEQ ID NO: 1757602 - RNA, 19 nt, Artificial Sequence
  Description of Artificial Sequence: Synthetic oligonucleotide
  Antisense strand to SEQ ID NO: 1757601
uuuccugccacauuucuau

SEQ ID NO: 1757603 - RNA, 19 nt, Artificial Sequence
  Description of Artificial Sequence: Synthetic oligonucleotide
  Sense strand starting at position 388 of SEQ ID NO: 1562581
agaaauguggcaggaaagu

SEQ ID NO: 1757604 - RNA, 19 nt, Artificial Sequence
  Description of Artificial Sequence: Synthetic oligonucleotide
  Antisense strand to SEQ ID NO: 1757603
acuuuccugccacauuucu

SEQ ID NO: 1757605 - RNA, 19 nt, Artificial Sequence
  Description of Artificial Sequence: Synthetic oligonucleotide
  Sense strand starting at position 792 of SEQ ID NO: 1562581
cugagaaugucugcugcuu

SEQ ID NO: 1757606 - RNA, 19 nt, Artificial Sequence
  Description of Artificial Sequence: Synthetic oligonucleotide
  Antisense strand to SEQ ID NO: 1757605
aagcagcagacauucucag

SEQ ID NO: 1757607 - RNA, 19 nt, Artificial Sequence
  Description of Artificial Sequence: Synthetic oligonucleotide
  Sense strand starting at position 1304 of SEQ ID NO: 1562581
gucauucugaaaggugaac

SEQ ID NO: 1757608 - RNA, 19 nt, Artificial Sequence
  Description of Artificial Sequence: Synthetic oligonucleotide
  Antisense strand to SEQ ID NO: 1757607
guucaccuuucagaaugac

SEQ ID NO: 1757609 - RNA, 19 nt, Artificial Sequence
  Description of Artificial Sequence: Synthetic oligonucleotide
  Sense strand starting at position 1316 of SEQ ID NO: 1562581
ggugaacggugcucacaga

SEQ ID NO: 1757610 - RNA, 19 nt, Artificial Sequence
  Description of Artificial Sequence: Synthetic oligonucleotide
  Antisense strand to SEQ ID NO: 1757609
ucugugagcaccguucacc

SEQ ID NO: 1757611 - RNA, 19 nt, Artificial Sequence
  Description of Artificial Sequence: Synthetic oligonucleotide
  Sense strand starting at position 1512 of SEQ ID NO: 1562581
augccugauugcucaaauc

SEQ ID NO: 1757612 - RNA, 19 nt, Artificial Sequence
  Description of Artificial Sequence: Synthetic oligonucleotide
  Antisense strand to SEQ ID NO: 1757611
gauuugagcaaucaggcau

SEQ ID NO: 1757613 - RNA, 19 nt, Artificial Sequence
  Description of Artificial Sequence: Synthetic oligonucleotide
  Sense strand starting at position 1557 of SEQ ID NO: 1562581
cagagcucccaggaauagu

SEQ ID NO: 1757614 - RNA, 19 nt, Artificial Sequence
  Description of Artificial Sequence: Synthetic oligonucleotide
  Antisense strand to SEQ ID NO: 1757613
acuauuccugggagcucug

SEQ ID NO: 1757615 - RNA, 19 nt, Artificial Sequence
  Description of Artificial Sequence: Synthetic oligonucleotide
  Sense strand starting at position 2008 of SEQ ID NO: 1562581
cucccagggccuugugaau

SEQ ID NO: 1757616 - RNA, 19 nt, Artificial Sequence
  Description of Artificial Sequence: Synthetic oligonucleotide
  Antisense strand to SEQ ID NO: 1757615
auucacaaggcccugggag

SEQ ID NO: 1757617 - RNA, 19 nt, Artificial Sequence
  Description of Artificial Sequence: Synthetic oligonucleotide
  Sense strand starting at position 2138 of SEQ ID NO: 1562581
agaggaaccuccgauaaag

SEQ ID NO: 1757618 - RNA, 19 nt, Artificial Sequence
  Description of Artificial Sequence: Synthetic oligonucleotide
  Antisense strand to SEQ ID NO: 1757617
cuuuaucggagguuccucu

SEQ ID NO: 1757619 - RNA, 19 nt, Artificial Sequence
  Description of Artificial Sequence: Synthetic oligonucleotide
  Sense strand starting at position 2558 of SEQ ID NO: 1562581
gagaugugggcggaggauu

SEQ ID NO: 1757620 - RNA, 19 nt, Artificial Sequence
  Description of Artificial Sequence: Synthetic oligonucleotide
  Antisense strand to SEQ ID NO: 1757619
aauccuccgcccacaucuc

SEQ ID NO: 1757621 - RNA, 19 nt, Artificial Sequence
  Description of Artificial Sequence: Synthetic oligonucleotide
  Sense strand starting at position 2672 of SEQ ID NO: 1562581
cagagaugaucauggacau

SEQ ID NO: 1757622 - RNA, 19 nt, Artificial Sequence
  Description of Artificial Sequence: Synthetic oligonucleotide
  Antisense strand to SEQ ID NO: 1757621
auguccaugaucaucucug

SEQ ID NO: 1757623 - RNA, 19 nt, Artificial Sequence
  Description of Artificial Sequence: Synthetic oligonucleotide
  Sense strand starting at position 2692 of SEQ ID NO: 1562581
aucaaucauuaguguagau

SEQ ID NO: 1757624 - RNA, 19 nt, Artificial Sequence
  Description of Artificial Sequence: Synthetic oligonucleotide
  Antisense strand to SEQ ID NO: 1757623
aucuacacuaaugauugau

SEQ ID NO: 1757625 - RNA, 19 nt, Artificial Sequence
  Description of Artificial Sequence: Synthetic oligonucleotide
  Sense strand starting at position 2765 of SEQ ID NO: 1562581
agaaauaaccgguggguau

SEQ ID NO: 1757626 - RNA, 19 nt, Artificial Sequence
  Description of Artificial Sequence: Synthetic oligonucleotide
  Antisense strand to SEQ ID NO: 1757625
auacccaccgguuauuucu

SEQ ID NO: 1757627 - RNA, 19 nt, Artificial Sequence
  Description of Artificial Sequence: Synthetic oligonucleotide
  Sense strand starting at position 2766 of SEQ ID NO: 1562581
gaaauaaccgguggguaua

SEQ ID NO: 1757628 - RNA, 19 nt, Artificial Sequence
  Description of Artificial Sequence: Synthetic oligonucleotide
  Antisense strand to SEQ ID NO: 1757627
uauacccaccgguuauuuc

SEQ ID NO: 1757629 - RNA, 19 nt, Artificial Sequence
  Description of Artificial Sequence: Synthetic oligonucleotide
  Sense strand starting at position 2798 of SEQ ID NO: 1562581
aagggcuguugugagaagu

SEQ ID NO: 1757630 - RNA, 19 nt, Artificial Sequence
  Description of Artificial Sequence: Synthetic oligonucleotide
  Antisense strand to SEQ ID NO: 1757629
acuucucacaacagcccuu

SEQ ID NO: 1757631 - RNA, 19 nt, Artificial Sequence
  Description of Artificial Sequence: Synthetic oligonucleotide
  Sense strand starting at position 2800 of SEQ ID NO: 1562581
gggcuguugugagaaguga

SEQ ID NO: 1757632 - RNA, 19 nt, Artificial Sequence
  Description of Artificial Sequence: Synthetic oligonucleotide
  Antisense strand to SEQ ID NO: 1757631
ucacuucucacaacagccc

SEQ ID NO: 1757633 - RNA, 19 nt, Artificial Sequence
  Description of Artificial Sequence: Synthetic oligonucleotide
  Sense strand starting at position 2808 of SEQ ID NO: 1562581
gugagaagugaccgagaau

SEQ ID NO: 1757634 - RNA, 19 nt, Artificial Sequence
  Description of Artificial Sequence: Synthetic oligonucleotide
  Antisense strand to SEQ ID NO: 1757633
auucucggucacuucucac

SEQ ID NO: 1757635 - RNA, 19 nt, Artificial Sequence
  Description of Artificial Sequence: Synthetic oligonucleotide
  Sense strand starting at position 2902 of SEQ ID NO: 1562581
cuaggaaggcaucguuacu

SEQ ID NO: 1757636 - RNA, 19 nt, Artificial Sequence
  Description of Artificial Sequence: Synthetic oligonucleotide
  Antisense strand to SEQ ID NO: 1757635
aguaacgaugccuuccuag

SEQ ID NO: 1757637 - RNA, 19 nt, Artificial Sequence
  Description of Artificial Sequence: Synthetic oligonucleotide
  Sense strand starting at position 3113 of SEQ ID NO: 1562581
cuuugaaguucucagaaga

SEQ ID NO: 1757638 - RNA, 19 nt, Artificial Sequence
  Description of Artificial Sequence: Synthetic oligonucleotide
  Antisense strand to SEQ ID NO: 1757637
ucuucugagaacuucaaag

SEQ ID NO: 1757639 - RNA, 19 nt, Artificial Sequence
  Description of Artificial Sequence: Synthetic oligonucleotide
  Sense strand starting at position 3124 of SEQ ID NO: 1562581
ucagaagauagcgguagaa

SEQ ID NO: 1757640 - RNA, 19 nt, Artificial Sequence
  Description of Artificial Sequence: Synthetic oligonucleotide
  Antisense strand to SEQ ID NO: 1757639
uucuaccgcuaucuucuga

SEQ ID NO: 1757641 - RNA, 19 nt, Artificial Sequence
  Description of Artificial Sequence: Synthetic oligonucleotide
  Sense strand starting at position 3165 of SEQ ID NO: 1562581
cuuugaucuuucugauagg

SEQ ID NO: 1757642 - RNA, 19 nt, Artificial Sequence
  Description of Artificial Sequence: Synthetic oligonucleotide
  Antisense strand to SEQ ID NO: 1757641
ccuaucagaaagaucaaag

SEQ ID NO: 1757643 - RNA, 19 nt, Artificial Sequence
  Description of Artificial Sequence: Synthetic oligonucleotide
  Sense strand starting at position 3166 of SEQ ID NO: 1562581
uuugaucuuucugauaggu

SEQ ID NO: 1757644 - RNA, 19 nt, Artificial Sequence
  Description of Artificial Sequence: Synthetic oligonucleotide
  Antisense strand to SEQ ID NO: 1757643
accuaucagaaagaucaaa

SEQ ID NO: 1757645 - RNA, 19 nt, Artificial Sequence
  Description of Artificial Sequence: Synthetic oligonucleotide
  Sense strand starting at position 3171 of SEQ ID NO: 1562581
ucuuucugauaggugcaua

SEQ ID NO: 1757646 - RNA, 19 nt, Artificial Sequence
  Description of Artificial Sequence: Synthetic oligonucleotide
  Antisense strand to SEQ ID NO: 1757645
uaugcaccuaucagaaaga

SEQ ID NO: 1757647 - RNA, 19 nt, Artificial Sequence
  Description of Artificial Sequence: Synthetic oligonucleotide
  Sense strand starting at position 3174 of SEQ ID NO: 1562581
uucugauaggugcauagaa

SEQ ID NO: 1757648 - RNA, 19 nt, Artificial Sequence
  Description of Artificial Sequence: Synthetic oligonucleotide
  Antisense strand to SEQ ID NO: 1757647
uucuaugcaccuaucagaa

SEQ ID NO: 1757649 - RNA, 19 nt, Artificial Sequence
  Description of Artificial Sequence: Synthetic oligonucleotide
  Sense strand starting at position 3267 of SEQ ID NO: 1562581
acgugacuugcucgaccuu

SEQ ID NO: 1757650 - RNA, 19 nt, Artificial Sequence
  Description of Artificial Sequence: Synthetic oligonucleotide
  Antisense strand to SEQ ID NO: 1757649
aaggucgagcaagucacgu

SEQ ID NO: 1757651 - RNA, 19 nt, Artificial Sequence
  Description of Artificial Sequence: Synthetic oligonucleotide
  Sense strand starting at position 3268 of SEQ ID NO: 1562581
cgugacuugcucgaccuua

SEQ ID NO: 1757652 - RNA, 19 nt, Artificial Sequence
  Description of Artificial Sequence: Synthetic oligonucleotide
  Antisense strand to SEQ ID NO: 1757651
uaaggucgagcaagucacg

SEQ ID NO: 1757653 - RNA, 19 nt, Artificial Sequence
  Description of Artificial Sequence: Synthetic oligonucleotide
  Sense strand starting at position 3273 of SEQ ID NO: 1562581
cuugcucgaccuuaucaau

SEQ ID NO: 1757654 - RNA, 19 nt, Artificial Sequence
  Description of Artificial Sequence: Synthetic oligonucleotide
  Antisense strand to SEQ ID NO: 1757653
auugauaaggucgagcaag

SEQ ID NO: 1757655 - RNA, 19 nt, Artificial Sequence
  Description of Artificial Sequence: Synthetic oligonucleotide
  Sense strand starting at position 3425 of SEQ ID NO: 1562581
cgcuuuaucucuuugucuu

SEQ ID NO: 1757656 - RNA, 19 nt, Artificial Sequence
  Description of Artificial Sequence: Synthetic oligonucleotide
  Antisense strand to SEQ ID NO: 1757655
aagacaaagagauaaagcg

SEQ ID NO: 1757657 - RNA, 19 nt, Artificial Sequence
  Description of Artificial Sequence: Synthetic oligonucleotide
  Sense strand starting at position 3426 of SEQ ID NO: 1562581
gcuuuaucucuuugucuug

SEQ ID NO: 1757658 - RNA, 19 nt, Artificial Sequence
  Description of Artificial Sequence: Synthetic oligonucleotide
  Antisense strand to SEQ ID NO: 1757657
caagacaaagagauaaagc

SEQ ID NO: 1757659 - RNA, 19 nt, Artificial Sequence
  Description of Artificial Sequence: Synthetic oligonucleotide
  Sense strand starting at position 3529 of SEQ ID NO: 1562581
cugcgaugucugcgacauc

SEQ ID NO: 1757660 - RNA, 19 nt, Artificial Sequence
  Description of Artificial Sequence: Synthetic oligonucleotide
  Antisense strand to SEQ ID NO: 1757659
gaugucgcagacaucgcag

SEQ ID NO: 1757661 - RNA, 19 nt, Artificial Sequence
  Description of Artificial Sequence: Synthetic oligonucleotide
  Sense strand starting at position 3532 of SEQ ID NO: 1562581
cgaugucugcgacaucaag

SEQ ID NO: 1757662 - RNA, 19 nt, Artificial Sequence
  Description of Artificial Sequence: Synthetic oligonucleotide
  Antisense strand to SEQ ID NO: 1757661
cuugaugucgcagacaucg

SEQ ID NO: 1757663 - RNA, 19 nt, Artificial Sequence
  Description of Artificial Sequence: Synthetic oligonucleotide
  Sense strand starting at position 3555 of SEQ ID NO: 1562581
ggaagcaagugucuacaaa

SEQ ID NO: 1757664 - RNA, 19 nt, Artificial Sequence
  Description of Artificial Sequence: Synthetic oligonucleotide
  Antisense strand to SEQ ID NO: 1757663
uuuguagacacuugcuucc

SEQ ID NO: 1757665 - RNA, 19 nt, Artificial Sequence
  Description of Artificial Sequence: Synthetic oligonucleotide
  Sense strand starting at position 3556 of SEQ ID NO: 1562581
gaagcaagugucuacaaac

SEQ ID NO: 1757666 - RNA, 19 nt, Artificial Sequence
  Description of Artificial Sequence: Synthetic oligonucleotide
  Antisense strand to SEQ ID NO: 1757665
guuuguagacacuugcuuc

SEQ ID NO: 1757667 - RNA, 19 nt, Artificial Sequence
  Description of Artificial Sequence: Synthetic oligonucleotide
  Sense strand starting at position 3607 of SEQ ID NO: 1562581
uuccguguggaccaagaaa

SEQ ID NO: 1757668 - RNA, 19 nt, Artificial Sequence
  Description of Artificial Sequence: Synthetic oligonucleotide
  Antisense strand to SEQ ID NO: 1757667
uuucuugguccacacggaa

SEQ ID NO: 1757669 - RNA, 19 nt, Artificial Sequence
  Description of Artificial Sequence: Synthetic oligonucleotide
  Sense strand starting at position 3695 of SEQ ID NO: 1562581
uguacauuguauccuugaa

SEQ ID NO: 1757670 - RNA, 19 nt, Artificial Sequence
  Description of Artificial Sequence: Synthetic oligonucleotide
  Antisense strand to SEQ ID NO: 1757669
uucaaggauacaauguaca

SEQ ID NO: 1757671 - RNA, 19 nt, Artificial Sequence
  Description of Artificial Sequence: Synthetic oligonucleotide
  Sense strand starting at position 3773 of SEQ ID NO: 1562581
agaugagacuguuauugug

SEQ ID NO: 1757672 - RNA, 19 nt, Artificial Sequence
  Description of Artificial Sequence: Synthetic oligonucleotide
  Antisense strand to SEQ ID NO: 1757671
cacaauaacagucucaucu

SEQ ID NO: 1757673 - RNA, 19 nt, Artificial Sequence
  Description of Artificial Sequence: Synthetic oligonucleotide
  Sense strand starting at position 3820 of SEQ ID NO: 1562581
acuccauugugaucuguac

SEQ ID NO: 1757674 - RNA, 19 nt, Artificial Sequence
  Description of Artificial Sequence: Synthetic oligonucleotide
  Antisense strand to SEQ ID NO: 1757673
guacagaucacaauggagu

SEQ ID NO: 1757675 - RNA, 19 nt, Artificial Sequence
  Description of Artificial Sequence: Synthetic oligonucleotide
  Sense strand starting at position 3827 of SEQ ID NO: 1562581
ugugaucuguacuaagaaa

SEQ ID NO: 1757676 - RNA, 19 nt, Artificial Sequence
  Description of Artificial Sequence: Synthetic oligonucleotide
  Antisense strand to SEQ ID NO: 1757675
uuucuuaguacagaucaca

SEQ ID NO: 1757677 - RNA, 19 nt, Artificial Sequence
  Description of Artificial Sequence: Synthetic oligonucleotide
  Sense strand starting at position 3973 of SEQ ID NO: 1562581
uguguuugcaggcaauaag

SEQ ID NO: 1757678 - RNA, 19 nt, Artificial Sequence
  Description of Artificial Sequence: Synthetic oligonucleotide
  Antisense strand to SEQ ID NO: 1757677
cuuauugccugcaaacaca

SEQ ID NO: 1757679 - RNA, 19 nt, Artificial Sequence
  Description of Artificial Sequence: Synthetic oligonucleotide
  Sense strand starting at position 3982 of SEQ ID NO: 1562581
aggcaauaagcuugguaaa

SEQ ID NO: 1757680 - RNA, 19 nt, Artificial Sequence
  Description of Artificial Sequence: Synthetic oligonucleotide
  Antisense strand to SEQ ID NO: 1757679
uuuaccaagcuuauugccu

SEQ ID NO: 1757681 - RNA, 19 nt, Artificial Sequence
  Description of Artificial Sequence: Synthetic oligonucleotide
  Sense strand starting at position 96 of SEQ ID NO: 1562582
uuaccuccugccugugauu

SEQ ID NO: 1757682 - RNA, 19 nt, Artificial Sequence
  Description of Artificial Sequence: Synthetic oligonucleotide
  Antisense strand to SEQ ID NO: 1757681
aaucacaggcaggagguaa

SEQ ID NO: 1757683 - RNA, 19 nt, Artificial Sequence
  Description of Artificial Sequence: Synthetic oligonucleotide
  Sense strand starting at position 978 of SEQ ID NO: 1562582
uccugaucaucgcguucuu

SEQ ID NO: 1757684 - RNA, 19 nt, Artificial Sequence
  Description of Artificial Sequence: Synthetic oligonucleotide
  Antisense strand to SEQ ID NO: 1757683
aagaacgcgaugaucagga

SEQ ID NO: 1757685 - RNA, 19 nt, Artificial Sequence
  Description of Artificial Sequence: Synthetic oligonucleotide
  Sense strand starting at position 987 of SEQ ID NO: 1562582
ucgcguucuuucucacauu

SEQ ID NO: 1757686 - RNA, 19 nt, Artificial Sequence
  Description of Artificial Sequence: Synthetic oligonucleotide
  Antisense strand to SEQ ID NO: 1757685
aaugugagaaagaacgcga

SEQ ID NO: 1757687 - RNA, 19 nt, Artificial Sequence
  Description of Artificial Sequence: Synthetic oligonucleotide
  Sense strand starting at position 1003 of SEQ ID NO: 1562582
auuccauguuacuggucau

SEQ ID NO: 1757688 - RNA, 19 nt, Artificial Sequence
  Description of Artificial Sequence: Synthetic oligonucleotide
  Antisense strand to SEQ ID NO: 1757687
augaccaguaacauggaau

SEQ ID NO: 1757689 - RNA, 19 nt, Artificial Sequence
  Description of Artificial Sequence: Synthetic oligonucleotide
  Sense strand starting at position 1006 of SEQ ID NO: 1562582
ccauguuacuggucauguu

SEQ ID NO: 1757690 - RNA, 19 nt, Artificial Sequence
  Description of Artificial Sequence: Synthetic oligonucleotide
  Antisense strand to SEQ ID NO: 1757689
aacaugaccaguaacaugg

SEQ ID NO: 1757691 - RNA, 19 nt, Artificial Sequence
  Description of Artificial Sequence: Synthetic oligonucleotide
  Sense strand starting at position 1009 of SEQ ID NO: 1562582
uguuacuggucauguucua

SEQ ID NO: 1757692 - RNA, 19 nt, Artificial Sequence
  Description of Artificial Sequence: Synthetic oligonucleotide
  Antisense strand to SEQ ID NO: 1757691
uagaacaugaccaguaaca

SEQ ID NO: 1757693 - RNA, 19 nt, Artificial Sequence
  Description of Artificial Sequence: Synthetic oligonucleotide
  Sense strand starting at position 1081 of SEQ ID NO: 1562582
uggagucauccuuggacga

SEQ ID NO: 1757694 - RNA, 19 nt, Artificial Sequence
  Description of Artificial Sequence: Synthetic oligonucleotide
  Antisense strand to SEQ ID NO: 1757693
ucguccaaggaugacucca

SEQ ID NO: 1757695 - RNA, 19 nt, Artificial Sequence
  Description of Artificial Sequence: Synthetic oligonucleotide
  Sense strand starting at position 1082 of SEQ ID NO: 1562582
ggagucauccuuggacgau

SEQ ID NO: 1757696 - RNA, 19 nt, Artificial Sequence
  Description of Artificial Sequence: Synthetic oligonucleotide
  Antisense strand to SEQ ID NO: 1757695
aucguccaaggaugacucc

SEQ ID NO: 1757697 - RNA, 19 nt, Artificial Sequence
  Description of Artificial Sequence: Synthetic oligonucleotide
  Sense strand starting at position 1083 of SEQ ID NO: 1562582
gagucauccuuggacgaug

SEQ ID NO: 1757698 - RNA, 19 nt, Artificial Sequence
  Description of Artificial Sequence: Synthetic oligonucleotide
  Antisense strand to SEQ ID NO: 1757697
caucguccaaggaugacuc

SEQ ID NO: 1757699 - RNA, 19 nt, Artificial Sequence
  Description of Artificial Sequence: Synthetic oligonucleotide
  Sense strand starting at position 1088 of SEQ ID NO: 1562582
auccuuggacgaugugauu

SEQ ID NO: 1757700 - RNA, 19 nt, Artificial Sequence
  Description of Artificial Sequence: Synthetic oligonucleotide
  Antisense strand to SEQ ID NO: 1757699
aaucacaucguccaaggau

SEQ ID NO: 1757701 - RNA, 19 nt, Artificial Sequence
  Description of Artificial Sequence: Synthetic oligonucleotide
  Sense strand starting at position 1091 of SEQ ID NO: 1562582
cuuggacgaugugauuuau

SEQ ID NO: 1757702 - RNA, 19 nt, Artificial Sequence
  Description of Artificial Sequence: Synthetic oligonucleotide
  Antisense strand to SEQ ID NO: 1757701
auaaaucacaucguccaag

SEQ ID NO: 1757703 - RNA, 19 nt, Artificial Sequence
  Description of Artificial Sequence: Synthetic oligonucleotide
  Sense strand starting at position 1097 of SEQ ID NO: 1562582
cgaugugauuuaucuugug

SEQ ID NO: 1757704 - RNA, 19 nt, Artificial Sequence
  Description of Artificial Sequence: Synthetic oligonucleotide
  Antisense strand to SEQ ID NO: 1757703
cacaagauaaaucacaucg

SEQ ID NO: 1757705 - RNA, 19 nt, Artificial Sequence
  Description of Artificial Sequence: Synthetic oligonucleotide
  Sense strand starting at position 1100 of SEQ ID NO: 1562582
ugugauuuaucuugugcuu

SEQ ID NO: 1757706 - RNA, 19 nt, Artificial Sequence
  Description of Artificial Sequence: Synthetic oligonucleotide
  Antisense strand to SEQ ID NO: 1757705
aagcacaagauaaaucaca

SEQ ID NO: 1757707 - RNA, 19 nt, Artificial Sequence
  Description of Artificial Sequence: Synthetic oligonucleotide
  Sense strand starting at position 2578 of SEQ ID NO: 1562582
ccaucuccugcccgaagau

SEQ ID NO: 1757708 - RNA, 19 nt, Artificial Sequence
  Description of Artificial Sequence: Synthetic oligonucleotide
  Antisense strand to SEQ ID NO: 1757707
aucuucgggcaggagaugg

SEQ ID NO: 1757709 - RNA, 19 nt, Artificial Sequence
  Description of Artificial Sequence: Synthetic oligonucleotide
  Sense strand starting at position 2600 of SEQ ID NO: 1562582
ccguguugggcugaacuuu

SEQ ID NO: 1757710 - RNA, 19 nt, Artificial Sequence
  Description of Artificial Sequence: Synthetic oligonucleotide
  Antisense strand to SEQ ID NO: 1757709
aaaguucagcccaacacgg

SEQ ID NO: 1757711 - RNA, 19 nt, Artificial Sequence
  Description of Artificial Sequence: Synthetic oligonucleotide
  Sense strand starting at position 2734 of SEQ ID NO: 1562582
cgcggugaccuacaaauua

SEQ ID NO: 1757712 - RNA, 19 nt, Artificial Sequence
  Description of Artificial Sequence: Synthetic oligonucleotide
  Antisense strand to SEQ ID NO: 1757711
uaauuuguaggucaccgcg

SEQ ID NO: 1757713 - RNA, 19 nt, Artificial Sequence
  Description of Artificial Sequence: Synthetic oligonucleotide
  Sense strand starting at position 2892 of SEQ ID NO: 1562582
ggagcuuuaugcugaagag

SEQ ID NO: 1757714 - RNA, 19 nt, Artificial Sequence
  Description of Artificial Sequence: Synthetic oligonucleotide
  Antisense strand to SEQ ID NO: 1757713
cucuucagcauaaagcucc

SEQ ID NO: 1757715 - RNA, 19 nt, Artificial Sequence
  Description of Artificial Sequence: Synthetic oligonucleotide
  Sense strand starting at position 2901 of SEQ ID NO: 1562582
ugcugaagagguuggcuaa

SEQ ID NO: 1757716 - RNA, 19 nt, Artificial Sequence
  Description of Artificial Sequence: Synthetic oligonucleotide
  Antisense strand to SEQ ID NO: 1757715
uuagccaaccucuucagca

SEQ ID NO: 1757717 - RNA, 19 nt, Artificial Sequence
  Description of Artificial Sequence: Synthetic oligonucleotide
  Sense strand starting at position 2902 of SEQ ID NO: 1562582
gcugaagagguuggcuaaa

SEQ ID NO: 1757718 - RNA, 19 nt, Artificial Sequence
  Description of Artificial Sequence: Synthetic oligonucleotide
  Antisense strand to SEQ ID NO: 1757717
uuuagccaaccucuucagc

SEQ ID NO: 1757719 - RNA, 19 nt, Artificial Sequence
  Description of Artificial Sequence: Synthetic oligonucleotide
  Sense strand starting at position 2904 of SEQ ID NO: 1562582
ugaagagguuggcuaaaca

SEQ ID NO: 1757720 - RNA, 19 nt, Artificial Sequence
  Description of Artificial Sequence: Synthetic oligonucleotide
  Antisense strand to SEQ ID NO: 1757719
uguuuagccaaccucuuca

SEQ ID NO: 1757721 - RNA, 19 nt, Artificial Sequence
  Description of Artificial Sequence: Synthetic oligonucleotide
  Sense strand starting at position 2970 of SEQ ID NO: 1562582
gguugcaguccaugcuuau

SEQ ID NO: 1757722 - RNA, 19 nt, Artificial Sequence
  Description of Artificial Sequence: Synthetic oligonucleotide
  Antisense strand to SEQ ID NO: 1757721
auaagcauggacugcaacc

SEQ ID NO: 1757723 - RNA, 19 nt, Artificial Sequence
  Description of Artificial Sequence: Synthetic oligonucleotide
  Sense strand starting at position 2971 of SEQ ID NO: 1562582
guugcaguccaugcuuauu

SEQ ID NO: 1757724 - RNA, 19 nt, Artificial Sequence
  Description of Artificial Sequence: Synthetic oligonucleotide
  Antisense strand to SEQ ID NO: 1757723
aauaagcauggacugcaac

SEQ ID NO: 1757725 - RNA, 19 nt, Artificial Sequence
  Description of Artificial Sequence: Synthetic oligonucleotide
  Sense strand starting at position 2974 of SEQ ID NO: 1562582
gcaguccaugcuuauugaa

SEQ ID NO: 1757726 - RNA, 19 nt, Artificial Sequence
  Description of Artificial Sequence: Synthetic oligonucleotide
  Antisense strand to SEQ ID NO: 1757725
uucaauaagcauggacugc

SEQ ID NO: 1757727 - RNA, 19 nt, Artificial Sequence
  Description of Artificial Sequence: Synthetic oligonucleotide
  Sense strand starting at position 2976 of SEQ ID NO: 1562582
aguccaugcuuauugaaca

SEQ ID NO: 1757728 - RNA, 19 nt, Artificial Sequence
  Description of Artificial Sequence: Synthetic oligonucleotide
  Antisense strand to SEQ ID NO: 1757727
uguucaauaagcauggacu

SEQ ID NO: 1757729 - RNA, 19 nt, Artificial Sequence
  Description of Artificial Sequence: Synthetic oligonucleotide
  Sense strand starting at position 2977 of SEQ ID NO: 1562582
guccaugcuuauugaacaa

SEQ ID NO: 1757730 - RNA, 19 nt, Artificial Sequence
  Description of Artificial Sequence: Synthetic oligonucleotide
  Antisense strand to SEQ ID NO: 1757729
uuguucaauaagcauggac

SEQ ID NO: 1757731 - RNA, 19 nt, Artificial Sequence
  Description of Artificial Sequence: Synthetic oligonucleotide
  Sense strand starting at position 2989 of SEQ ID NO: 1562582
ugaacaaacauguguggaa

SEQ ID NO: 1757732 - RNA, 19 nt, Artificial Sequence
  Description of Artificial Sequence: Synthetic oligonucleotide
  Antisense strand to SEQ ID NO: 1757731
uuccacacauguuuguuca

SEQ ID NO: 1757733 - RNA, 19 nt, Artificial Sequence
  Description of Artificial Sequence: Synthetic oligonucleotide
  Sense strand starting at position 2992 of SEQ ID NO: 1562582
acaaacauguguggaacau

SEQ ID NO: 1757734 - RNA, 19 nt, Artificial Sequence
  Description of Artificial Sequence: Synthetic oligonucleotide
  Antisense strand to SEQ ID NO: 1757733
auguuccacacauguuugu

SEQ ID NO: 1757735 - RNA, 19 nt, Artificial Sequence
  Description of Artificial Sequence: Synthetic oligonucleotide
  Sense strand starting at position 3347 of SEQ ID NO: 1562582
gugcgugugcauagaggaa

SEQ ID NO: 1757736 - RNA, 19 nt, Artificial Sequence
  Description of Artificial Sequence: Synthetic oligonucleotide
  Antisense strand to SEQ ID NO: 1757735
uuccucuaugcacacgcac

SEQ ID NO: 1757737 - RNA, 19 nt, Artificial Sequence
  Description of Artificial Sequence: Synthetic oligonucleotide
  Sense strand starting at position 3534 of SEQ ID NO: 1562582
acagcaugaaagggucauu

SEQ ID NO: 1757738 - RNA, 19 nt, Artificial Sequence
  Description of Artificial Sequence: Synthetic oligonucleotide
  Antisense strand to SEQ ID NO: 1757737
aaugacccuuucaugcugu

SEQ ID NO: 1757739 - RNA, 19 nt, Artificial Sequence
  Description of Artificial Sequence: Synthetic oligonucleotide
  Sense strand starting at position 3713 of SEQ ID NO: 1562582
agagcaaagagauggcaau

SEQ ID NO: 1757740 - RNA, 19 nt, Artificial Sequence
  Description of Artificial Sequence: Synthetic oligonucleotide
  Antisense strand to SEQ ID NO: 1757739
auugccaucucuuugcucu

SEQ ID NO: 1757741 - RNA, 19 nt, Artificial Sequence
  Description of Artificial Sequence: Synthetic oligonucleotide
  Sense strand starting at position 3714 of SEQ ID NO: 1562582
gagcaaagagauggcaauu

SEQ ID NO: 1757742 - RNA, 19 nt, Artificial Sequence
  Description of Artificial Sequence: Synthetic oligonucleotide
  Antisense strand to SEQ ID NO: 1757741
aauugccaucucuuugcuc

SEQ ID NO: 1757743 - RNA, 19 nt, Artificial Sequence
  Description of Artificial Sequence: Synthetic oligonucleotide
  Sense strand starting at position 3747 of SEQ ID NO: 1562582
guucucuugcccuauguaa

SEQ ID NO: 1757744 - RNA, 19 nt, Artificial Sequence
  Description of Artificial Sequence: Synthetic oligonucleotide
  Antisense strand to SEQ ID NO: 1757743
uuacauagggcaagagaac

SEQ ID NO: 1757745 - RNA, 19 nt, Artificial Sequence
  Description of Artificial Sequence: Synthetic oligonucleotide
  Sense strand starting at position 3749 of SEQ ID NO: 1562582
ucucuugcccuauguaaag

SEQ ID NO: 1757746 - RNA, 19 nt, Artificial Sequence
  Description of Artificial Sequence: Synthetic oligonucleotide
  Antisense strand to SEQ ID NO: 1757745
cuuuacauagggcaagaga

SEQ ID NO: 1757747 - RNA, 19 nt, Artificial Sequence
  Description of Artificial Sequence: Synthetic oligonucleotide
  Sense strand starting at position 3926 of SEQ ID NO: 1562582
gaaguccauuucggaaaca

SEQ ID NO: 1757748 - RNA, 19 nt, Artificial Sequence
  Description of Artificial Sequence: Synthetic oligonucleotide
  Antisense strand to SEQ ID NO: 1757747
uguuuccgaaauggacuuc

SEQ ID NO: 1757749 - RNA, 19 nt, Artificial Sequence
  Description of Artificial Sequence: Synthetic oligonucleotide
  Sense strand starting at position 16 of SEQ ID NO: 1562583
ucuccaacgcauuaguaaa

SEQ ID NO: 1757750 - RNA, 19 nt, Artificial Sequence
  Description of Artificial Sequence: Synthetic oligonucleotide
  Antisense strand to SEQ ID NO: 1757749
uuuacuaaugcguuggaga

SEQ ID NO: 1757751 - RNA, 19 nt, Artificial Sequence
  Description of Artificial Sequence: Synthetic oligonucleotide
  Sense strand starting at position 48 of SEQ ID NO: 1562583
caaaguucuuggcuggaca

SEQ ID NO: 1757752 - RNA, 19 nt, Artificial Sequence
  Description of Artificial Sequence: Synthetic oligonucleotide
  Antisense strand to SEQ ID NO: 1757751
uguccagccaagaacuuug

SEQ ID NO: 1757753 - RNA, 19 nt, Artificial Sequence
  Description of Artificial Sequence: Synthetic oligonucleotide
  Sense strand starting at position 49 of SEQ ID NO: 1562583
aaaguucuuggcuggacau

SEQ ID NO: 1757754 - RNA, 19 nt, Artificial Sequence
  Description of Artificial Sequence: Synthetic oligonucleotide
  Antisense strand to SEQ ID NO: 1757753
auguccagccaagaacuuu

SEQ ID NO: 1757755 - RNA, 19 nt, Artificial Sequence
  Description of Artificial Sequence: Synthetic oligonucleotide
  Sense strand starting at position 50 of SEQ ID NO: 1562583
aaguucuuggcuggacauu

SEQ ID NO: 1757756 - RNA, 19 nt, Artificial Sequence
  Description of Artificial Sequence: Synthetic oligonucleotide
  Antisense strand to SEQ ID NO: 1757755
aauguccagccaagaacuu

SEQ ID NO: 1757757 - RNA, 19 nt, Artificial Sequence
  Description of Artificial Sequence: Synthetic oligonucleotide
  Sense strand starting at position 51 of SEQ ID NO: 1562583
aguucuuggcuggacauua

SEQ ID NO: 1757758 - RNA, 19 nt, Artificial Sequence
  Description of Artificial Sequence: Synthetic oligonucleotide
  Antisense strand to SEQ ID NO: 1757757
uaauguccagccaagaacu

SEQ ID NO: 1757759 - RNA, 19 nt, Artificial Sequence
  Description of Artificial Sequence: Synthetic oligonucleotide
  Sense strand starting at position 410 of SEQ ID NO: 1562583
gccaguuccuucugacauu

SEQ ID NO: 1757760 - RNA, 19 nt, Artificial Sequence
  Description of Artificial Sequence: Synthetic oligonucleotide
  Antisense strand to SEQ ID NO: 1757759
aaugucagaaggaacuggc

SEQ ID NO: 1757761 - RNA, 19 nt, Artificial Sequence
  Description of Artificial Sequence: Synthetic oligonucleotide
  Sense strand starting at position 411 of SEQ ID NO: 1562583
ccaguuccuucugacauuu

SEQ ID NO: 1757762 - RNA, 19 nt, Artificial Sequence
  Description of Artificial Sequence: Synthetic oligonucleotide
  Antisense strand to SEQ ID NO: 1757761
aaaugucagaaggaacugg

SEQ ID NO: 1757763 - RNA, 19 nt, Artificial Sequence
  Description of Artificial Sequence: Synthetic oligonucleotide
  Sense strand starting at position 700 of SEQ ID NO: 1562583
ggaccagacucucuucuua

SEQ ID NO: 1757764 - RNA, 19 nt, Artificial Sequence
  Description of Artificial Sequence: Synthetic oligonucleotide
  Antisense strand to SEQ ID NO: 1757763
uaagaagagagucuggucc

SEQ ID NO: 1757765 - RNA, 19 nt, Artificial Sequence
  Description of Artificial Sequence: Synthetic oligonucleotide
  Sense strand starting at position 809 of SEQ ID NO: 1562583
gacgaaauuuggcucuugu

SEQ ID NO: 1757766 - RNA, 19 nt, Artificial Sequence
  Description of Artificial Sequence: Synthetic oligonucleotide
  Antisense strand to SEQ ID NO: 1757765
acaagagccaaauuucguc

SEQ ID NO: 1757767 - RNA, 19 nt, Artificial Sequence
  Description of Artificial Sequence: Synthetic oligonucleotide
  Sense strand starting at position 911 of SEQ ID NO: 1562583
uguggaguagcuggauuau

SEQ ID NO: 1757768 - RNA, 19 nt, Artificial Sequence
  Description of Artificial Sequence: Synthetic oligonucleotide
  Antisense strand to SEQ ID NO: 1757767
auaauccagcuacuccaca

SEQ ID NO: 1757769 - RNA, 19 nt, Artificial Sequence
  Description of Artificial Sequence: Synthetic oligonucleotide
  Sense strand starting at position 983 of SEQ ID NO: 1562583
uauccauguugaucaggau

SEQ ID NO: 1757770 - RNA, 19 nt, Artificial Sequence
  Description of Artificial Sequence: Synthetic oligonucleotide
  Antisense strand to SEQ ID NO: 1757769
auccugaucaacauggaua

SEQ ID NO: 1757771 - RNA, 19 nt, Artificial Sequence
  Description of Artificial Sequence: Synthetic oligonucleotide
  Sense strand starting at position 1094 of SEQ ID NO: 1562583
uuccauguuacucguguca

SEQ ID NO: 1757772 - RNA, 19 nt, Artificial Sequence
  Description of Artificial Sequence: Synthetic oligonucleotide
  Antisense strand to SEQ ID NO: 1757771
ugacacgaguaacauggaa

SEQ ID NO: 1757773 - RNA, 19 nt, Artificial Sequence
  Description of Artificial Sequence: Synthetic oligonucleotide
  Sense strand starting at position 1096 of SEQ ID NO: 1562583
ccauguuacucgugucauu

SEQ ID NO: 1757774 - RNA, 19 nt, Artificial Sequence
  Description of Artificial Sequence: Synthetic oligonucleotide
  Antisense strand to SEQ ID NO: 1757773
aaugacacgaguaacaugg

SEQ ID NO: 1757775 - RNA, 19 nt, Artificial Sequence
  Description of Artificial Sequence: Synthetic oligonucleotide
  Sense strand starting at position 1099 of SEQ ID NO: 1562583
uguuacucgugucauuuau

SEQ ID NO: 1757776 - RNA, 19 nt, Artificial Sequence
  Description of Artificial Sequence: Synthetic oligonucleotide
  Antisense strand to SEQ ID NO: 1757775
auaaaugacacgaguaaca

SEQ ID NO: 1757777 - RNA, 19 nt, Artificial Sequence
  Description of Artificial Sequence: Synthetic oligonucleotide
  Sense strand starting at position 1101 of SEQ ID NO: 1562583
uuacucgugucauuuauaa

SEQ ID NO: 1757778 - RNA, 19 nt, Artificial Sequence
  Description of Artificial Sequence: Synthetic oligonucleotide
  Antisense strand to SEQ ID NO: 1757777
uuauaaaugacacgaguaa

SEQ ID NO: 1757779 - RNA, 19 nt, Artificial Sequence
  Description of Artificial Sequence: Synthetic oligonucleotide
  Sense strand starting at position 1105 of SEQ ID NO: 1562583
ucgugucauuuauaaacag

SEQ ID NO: 1757780 - RNA, 19 nt, Artificial Sequence
  Description of Artificial Sequence: Synthetic oligonucleotide
  Antisense strand to SEQ ID NO: 1757779
cuguuuauaaaugacacga

SEQ ID NO: 1757781 - RNA, 19 nt, Artificial Sequence
  Description of Artificial Sequence: Synthetic oligonucleotide
  Sense strand starting at position 1189 of SEQ ID NO: 1562583
gagacauccuuggaagaua

SEQ ID NO: 1757782 - RNA, 19 nt, Artificial Sequence
  Description of Artificial Sequence: Synthetic oligonucleotide
  Antisense strand to SEQ ID NO: 1757781
uaucuuccaaggaugucuc

SEQ ID NO: 1757783 - RNA, 19 nt, Artificial Sequence
  Description of Artificial Sequence: Synthetic oligonucleotide
  Sense strand starting at position 1197 of SEQ ID NO: 1562583
cuuggaagauacgauuuau

SEQ ID NO: 1757784 - RNA, 19 nt, Artificial Sequence
  Description of Artificial Sequence: Synthetic oligonucleotide
  Antisense strand to SEQ ID NO: 1757783
auaaaucguaucuuccaag

SEQ ID NO: 1757785 - RNA, 19 nt, Artificial Sequence
  Description of Artificial Sequence: Synthetic oligonucleotide
  Sense strand starting at position 1206 of SEQ ID NO: 1562583
uacgauuuaucuugugcuu

SEQ ID NO: 1757786 - RNA, 19 nt, Artificial Sequence
  Description of Artificial Sequence: Synthetic oligonucleotide
  Antisense strand to SEQ ID NO: 1757785
aagcacaagauaaaucgua

SEQ ID NO: 1757787 - RNA, 19 nt, Artificial Sequence
  Description of Artificial Sequence: Synthetic oligonucleotide
  Sense strand starting at position 1260 of SEQ ID NO: 1562583
cuugcuauuuaagcaaagu

SEQ ID NO: 1757788 - RNA, 19 nt, Artificial Sequence
  Description of Artificial Sequence: Synthetic oligonucleotide
  Antisense strand to SEQ ID NO: 1757787
acuuugcuuaaauagcaag

SEQ ID NO: 1757789 - RNA, 19 nt, Artificial Sequence
  Description of Artificial Sequence: Synthetic oligonucleotide
  Sense strand starting at position 1295 of SEQ ID NO: 1562583
ccaucaaagcacugugaac

SEQ ID NO: 1757790 - RNA, 19 nt, Artificial Sequence
  Description of Artificial Sequence: Synthetic oligonucleotide
  Antisense strand to SEQ ID NO: 1757789
guucacagugcuuugaugg

SEQ ID NO: 1757791 - RNA, 19 nt, Artificial Sequence
  Description of Artificial Sequence: Synthetic oligonucleotide
  Sense strand starting at position 2724 of SEQ ID NO: 1562583
ccauguaacugcgauuaca

SEQ ID NO: 1757792 - RNA, 19 nt, Artificial Sequence
  Description of Artificial Sequence: Synthetic oligonucleotide
  Antisense strand to SEQ ID NO: 1757791
uguaaucgcaguuacaugg

SEQ ID NO: 1757793 - RNA, 19 nt, Artificial Sequence
  Description of Artificial Sequence: Synthetic oligonucleotide
  Sense strand starting at position 2981 of SEQ ID NO: 1562583
uguauaaauuuggaaagga

SEQ ID NO: 1757794 - RNA, 19 nt, Artificial Sequence
  Description of Artificial Sequence: Synthetic oligonucleotide
  Antisense strand to SEQ ID NO: 1757793
uccuuuccaaauuuauaca

SEQ ID NO: 1757795 - RNA, 19 nt, Artificial Sequence
  Description of Artificial Sequence: Synthetic oligonucleotide
  Sense strand starting at position 3717 of SEQ ID NO: 1562583
gugaauaaauggcguuauu

SEQ ID NO: 1757796 - RNA, 19 nt, Artificial Sequence
  Description of Artificial Sequence: Synthetic oligonucleotide
  Antisense strand to SEQ ID NO: 1757795
aauaacgccauuuauucac

SEQ ID NO: 1757797 - RNA, 19 nt, Artificial Sequence
  Description of Artificial Sequence: Synthetic oligonucleotide
  Sense strand starting at position 3720 of SEQ ID NO: 1562583
aauaaauggcguuauugcu

SEQ ID NO: 1757798 - RNA, 19 nt, Artificial Sequence
  Description of Artificial Sequence: Synthetic oligonucleotide
  Antisense strand to SEQ ID NO: 1757797
agcaauaacgccauuuauu

SEQ ID NO: 1757799 - RNA, 19 nt, Artificial Sequence
  Description of Artificial Sequence: Synthetic oligonucleotide
  Sense strand starting at position 3726 of SEQ ID NO: 1562583
uggcguuauugcuuacaca

SEQ ID NO: 1757800 - RNA, 19 nt, Artificial Sequence
  Description of Artificial Sequence: Synthetic oligonucleotide
  Antisense strand to SEQ ID NO: 1757799
uguguaagcaauaacgcca

SEQ ID NO: 1757801 - RNA, 19 nt, Artificial Sequence
  Description of Artificial Sequence: Synthetic oligonucleotide
  Sense strand starting at position 3727 of SEQ ID NO: 1562583
ggcguuauugcuuacacaa

SEQ ID NO: 1757802 - RNA, 19 nt, Artificial Sequence
  Description of Artificial Sequence: Synthetic oligonucleotide
  Antisense strand to SEQ ID NO: 1757801
uuguguaagcaauaacgcc

SEQ ID NO: 1757803 - RNA, 19 nt, Artificial Sequence
  Description of Artificial Sequence: Synthetic oligonucleotide
  Sense strand starting at position 3729 of SEQ ID NO: 1562583
cguuauugcuuacacaaag

SEQ ID NO: 1757804 - RNA, 19 nt, Artificial Sequence
  Description of Artificial Sequence: Synthetic oligonucleotide
  Antisense strand to SEQ ID NO: 1757803
cuuuguguaagcaauaacg

SEQ ID NO: 1757805 - RNA, 19 nt, Artificial Sequence
  Description of Artificial Sequence: Synthetic oligonucleotide
  Sense strand starting at position 129 of SEQ ID NO: 1562584
cgggcugauguccacuaaa

SEQ ID NO: 1757806 - RNA, 19 nt, Artificial Sequence
  Description of Artificial Sequence: Synthetic oligonucleotide
  Antisense strand to SEQ ID NO: 1757805
uuuaguggacaucagcccg

SEQ ID NO: 1757807 - RNA, 19 nt, Artificial Sequence
  Description of Artificial Sequence: Synthetic oligonucleotide
  Sense strand starting at position 344 of SEQ ID NO: 1562584
cucaguuccuuccugacau

SEQ ID NO: 1757808 - RNA, 19 nt, Artificial Sequence
  Description of Artificial Sequence: Synthetic oligonucleotide
  Antisense strand to SEQ ID NO: 1757807
augucaggaaggaacugag

SEQ ID NO: 1757809 - RNA, 19 nt, Artificial Sequence
  Description of Artificial Sequence: Synthetic oligonucleotide
  Sense strand starting at position 345 of SEQ ID NO: 1562584
ucaguuccuuccugacauu

SEQ ID NO: 1757810 - RNA, 19 nt, Artificial Sequence
  Description of Artificial Sequence: Synthetic oligonucleotide
  Antisense strand to SEQ ID NO: 1757809
aaugucaggaaggaacuga

SEQ ID NO: 1757811 - RNA, 19 nt, Artificial Sequence
  Description of Artificial Sequence: Synthetic oligonucleotide
  Sense strand starting at position 416 of SEQ ID NO: 1562584
ccaggccagucuucuaagu

SEQ ID NO: 1757812 - RNA, 19 nt, Artificial Sequence
  Description of Artificial Sequence: Synthetic oligonucleotide
  Antisense strand to SEQ ID NO: 1757811
acuuagaagacuggccugg

SEQ ID NO: 1757813 - RNA, 19 nt, Artificial Sequence
  Description of Artificial Sequence: Synthetic oligonucleotide
  Sense strand starting at position 639 of SEQ ID NO: 1562584
cgggcucucuucuuacuaa

SEQ ID NO: 1757814 - RNA, 19 nt, Artificial Sequence
  Description of Artificial Sequence: Synthetic oligonucleotide
  Antisense strand to SEQ ID NO: 1757813
uuaguaagaagagagcccg

SEQ ID NO: 1757815 - RNA, 19 nt, Artificial Sequence
  Description of Artificial Sequence: Synthetic oligonucleotide
  Sense strand starting at position 640 of SEQ ID NO: 1562584
gggcucucuucuuacuaaa

SEQ ID NO: 1757816 - RNA, 19 nt, Artificial Sequence
  Description of Artificial Sequence: Synthetic oligonucleotide
  Antisense strand to SEQ ID NO: 1757815
uuuaguaagaagagagccc

SEQ ID NO: 1757817 - RNA, 19 nt, Artificial Sequence
  Description of Artificial Sequence: Synthetic oligonucleotide
  Sense strand starting at position 676 of SEQ ID NO: 1562584
uccuccugaucauugaguu

SEQ ID NO: 1757818 - RNA, 19 nt, Artificial Sequence
  Description of Artificial Sequence: Synthetic oligonucleotide
  Antisense strand to SEQ ID NO: 1757817
aacucaaugaucaggagga

SEQ ID NO: 1757819 - RNA, 19 nt, Artificial Sequence
  Description of Artificial Sequence: Synthetic oligonucleotide
  Sense strand starting at position 677 of SEQ ID NO: 1562584
ccuccugaucauugaguuu

SEQ ID NO: 1757820 - RNA, 19 nt, Artificial Sequence
  Description of Artificial Sequence: Synthetic oligonucleotide
  Antisense strand to SEQ ID NO: 1757819
aaacucaaugaucaggagg

SEQ ID NO: 1757821 - RNA, 19 nt, Artificial Sequence
  Description of Artificial Sequence: Synthetic oligonucleotide
  Sense strand starting at position 918 of SEQ ID NO: 1562584
aggguuuauccaugcuggu

SEQ ID NO: 1757822 - RNA, 19 nt, Artificial Sequence
  Description of Artificial Sequence: Synthetic oligonucleotide
  Antisense strand to SEQ ID NO: 1757821
accagcauggauaaacccu

SEQ ID NO: 1757823 - RNA, 19 nt, Artificial Sequence
  Description of Artificial Sequence: Synthetic oligonucleotide
  Sense strand starting at position 1037 of SEQ ID NO: 1562584
ccauguuacuggugucauu

SEQ ID NO: 1757824 - RNA, 19 nt, Artificial Sequence
  Description of Artificial Sequence: Synthetic oligonucleotide
  Antisense strand to SEQ ID NO: 1757823
aaugacaccaguaacaugg

SEQ ID NO: 1757825 - RNA, 19 nt, Artificial Sequence
  Description of Artificial Sequence: Synthetic oligonucleotide
  Sense strand starting at position 1040 of SEQ ID NO: 1562584
uguuacuggugucauuuau

SEQ ID NO: 1757826 - RNA, 19 nt, Artificial Sequence
  Description of Artificial Sequence: Synthetic oligonucleotide
  Antisense strand to SEQ ID NO: 1757825
auaaaugacaccaguaaca

SEQ ID NO: 1757827 - RNA, 19 nt, Artificial Sequence
  Description of Artificial Sequence: Synthetic oligonucleotide
  Sense strand starting at position 1236 of SEQ ID NO: 1562584
ccaucaaagcccugugaac

SEQ ID NO: 1757828 - RNA, 19 nt, Artificial Sequence
  Description of Artificial Sequence: Synthetic oligonucleotide
  Antisense strand to SEQ ID NO: 1757827
guucacagggcuuugaugg

SEQ ID NO: 1757829 - RNA, 19 nt, Artificial Sequence
  Description of Artificial Sequence: Synthetic oligonucleotide
  Sense strand starting at position 1238 of SEQ ID NO: 1562584
aucaaagcccugugaacaa

SEQ ID NO: 1757830 - RNA, 19 nt, Artificial Sequence
  Description of Artificial Sequence: Synthetic oligonucleotide
  Antisense strand to SEQ ID NO: 1757829
uuguucacagggcuuugau

SEQ ID NO: 1757831 - RNA, 19 nt, Artificial Sequence
  Description of Artificial Sequence: Synthetic oligonucleotide
  Sense strand starting at position 2466 of SEQ ID NO: 1562584
cguggugaccuacaaauua

SEQ ID NO: 1757832 - RNA, 19 nt, Artificial Sequence
  Description of Artificial Sequence: Synthetic oligonucleotide
  Antisense strand to SEQ ID NO: 1757831
uaauuuguaggucaccacg

SEQ ID NO: 1757833 - RNA, 19 nt, Artificial Sequence
  Description of Artificial Sequence: Synthetic oligonucleotide
  Sense strand starting at position 3120 of SEQ ID NO: 1562584
cgccuuugacuguaacuuu

SEQ ID NO: 1757834 - RNA, 19 nt, Artificial Sequence
  Description of Artificial Sequence: Synthetic oligonucleotide
  Antisense strand to SEQ ID NO: 1757833
aaaguuacagucaaaggcg

SEQ ID NO: 1757835 - RNA, 19 nt, Artificial Sequence
  Description of Artificial Sequence: Synthetic oligonucleotide
  Sense strand starting at position 3226 of SEQ ID NO: 1562584
gugaauaaauggcauuauu

SEQ ID NO: 1757836 - RNA, 19 nt, Artificial Sequence
  Description of Artificial Sequence: Synthetic oligonucleotide
  Antisense strand to SEQ ID NO: 1757835
aauaaugccauuuauucac

SEQ ID NO: 1757837 - RNA, 19 nt, Artificial Sequence
  Description of Artificial Sequence: Synthetic oligonucleotide
  Sense strand starting at position 3235 of SEQ ID NO: 1562584
uggcauuauugcuuacaca

SEQ ID NO: 1757838 - RNA, 19 nt, Artificial Sequence
  Description of Artificial Sequence: Synthetic oligonucleotide
  Antisense strand to SEQ ID NO: 1757837
uguguaagcaauaaugcca

SEQ ID NO: 1757839 - RNA, 19 nt, Artificial Sequence
  Description of Artificial Sequence: Synthetic oligonucleotide
  Sense strand starting at position 3236 of SEQ ID NO: 1562584
ggcauuauugcuuacacaa

SEQ ID NO: 1757840 - RNA, 19 nt, Artificial Sequence
  Description of Artificial Sequence: Synthetic oligonucleotide
  Antisense strand to SEQ ID NO: 1757839
uuguguaagcaauaaugcc

SEQ ID NO: 1757841 - RNA, 19 nt, Artificial Sequence
  Description of Artificial Sequence: Synthetic oligonucleotide
  Sense strand starting at position 3271 of SEQ ID NO: 1562584
cuucuauauggacauguau

SEQ ID NO: 1757842 - RNA, 19 nt, Artificial Sequence
  Description of Artificial Sequence: Synthetic oligonucleotide
  Antisense strand to SEQ ID NO: 1757841
auacauguccauauagaag

SEQ ID NO: 1757843 - RNA, 19 nt, Artificial Sequence
  Description of Artificial Sequence: Synthetic oligonucleotide
  Sense strand starting at position 3277 of SEQ ID NO: 1562584
uauggacauguaugacagu

SEQ ID NO: 1757844 - RNA, 19 nt, Artificial Sequence
  Description of Artificial Sequence: Synthetic oligonucleotide
  Antisense strand to SEQ ID NO: 1757843
acugucauacauguccaua

SEQ ID NO: 1757845 - RNA, 19 nt, Artificial Sequence
  Description of Artificial Sequence: Synthetic oligonucleotide
  Sense strand starting at position 3284 of SEQ ID NO: 1562584
auguaugacagucaggagu

SEQ ID NO: 1757846 - RNA, 19 nt, Artificial Sequence
  Description of Artificial Sequence: Synthetic oligonucleotide
  Antisense strand to SEQ ID NO: 1757845
acuccugacugucauacau

SEQ ID NO: 1757847 - RNA, 19 nt, Artificial Sequence
  Description of Artificial Sequence: Synthetic oligonucleotide
  Sense strand starting at position 3286 of SEQ ID NO: 1562584
guaugacagucaggaguuc

SEQ ID NO: 1757848 - RNA, 19 nt, Artificial Sequence
  Description of Artificial Sequence: Synthetic oligonucleotide
  Antisense strand to SEQ ID NO: 1757847
gaacuccugacugucauac

SEQ ID NO: 1757849 - RNA, 19 nt, Artificial Sequence
  Description of Artificial Sequence: Synthetic oligonucleotide
  Sense strand starting at position 3370 of SEQ ID NO: 1562584
ggugccaugugccugaaau

SEQ ID NO: 1757850 - RNA, 19 nt, Artificial Sequence
  Description of Artificial Sequence: Synthetic oligonucleotide
  Antisense strand to SEQ ID NO: 1757849
auuucaggcacauggcacc

SEQ ID NO: 1757851 - RNA, 19 nt, Artificial Sequence
  Description of Artificial Sequence: Synthetic oligonucleotide
  Sense strand starting at position 3371 of SEQ ID NO: 1562584
gugccaugugccugaaauc

SEQ ID NO: 1757852 - RNA, 19 nt, Artificial Sequence
  Description of Artificial Sequence: Synthetic oligonucleotide
  Antisense strand to SEQ ID NO: 1757851
gauuucaggcacauggcac

SEQ ID NO: 1757853 - RNA, 19 nt, Artificial Sequence
  Description of Artificial Sequence: Synthetic oligonucleotide
  Sense strand starting at position 3561 of SEQ ID NO: 1562584
gcuguauuauccguccuca

SEQ ID NO: 1757854 - RNA, 19 nt, Artificial Sequence
  Description of Artificial Sequence: Synthetic oligonucleotide
  Antisense strand to SEQ ID NO: 1757853
ugaggacggauaauacagc

SEQ ID NO: 1757855 - RNA, 19 nt, Artificial Sequence
  Description of Artificial Sequence: Synthetic oligonucleotide
  Sense strand starting at position 3718 of SEQ ID NO: 1562584
uggagaaaguuacagaaau

SEQ ID NO: 1757856 - RNA, 19 nt, Artificial Sequence
  Description of Artificial Sequence: Synthetic oligonucleotide
  Antisense strand to SEQ ID NO: 1757855
auuucuguaacuuucucca

SEQ ID NO: 1757857 - RNA, 19 nt, Artificial Sequence
  Description of Artificial Sequence: Synthetic oligonucleotide
  Sense strand starting at position 3737 of SEQ ID NO: 1562584
cagucucuugcucagggaa

SEQ ID NO: 1757858 - RNA, 19 nt, Artificial Sequence
  Description of Artificial Sequence: Synthetic oligonucleotide
  Antisense strand to SEQ ID NO: 1757857
uucccugagcaagagacug

SEQ ID NO: 1757859 - RNA, 19 nt, Artificial Sequence
  Description of Artificial Sequence: Synthetic oligonucleotide
  Sense strand starting at position 3739 of SEQ ID NO: 1562584
gucucuugcucagggaaag

SEQ ID NO: 1757860 - RNA, 19 nt, Artificial Sequence
  Description of Artificial Sequence: Synthetic oligonucleotide
  Antisense strand to SEQ ID NO: 1757859
cuuucccugagcaagagac

SEQ ID NO: 1757861 - RNA, 19 nt, Artificial Sequence
  Description of Artificial Sequence: Synthetic oligonucleotide
  Sense strand starting at position 3740 of SEQ ID NO: 1562584
ucucuugcucagggaaagu

SEQ ID NO: 1757862 - RNA, 19 nt, Artificial Sequence
  Description of Artificial Sequence: Synthetic oligonucleotide
  Antisense strand to SEQ ID NO: 1757861
acuuucccugagcaagaga

SEQ ID NO: 1757863 - RNA, 19 nt, Artificial Sequence
  Description of Artificial Sequence: Synthetic oligonucleotide
  Sense strand starting at position 3877 of SEQ ID NO: 1562584
aaucuuguggcaggcagaa

SEQ ID NO: 1757864 - RNA, 19 nt, Artificial Sequence
  Description of Artificial Sequence: Synthetic oligonucleotide
  Antisense strand to SEQ ID NO: 1757863
uucugccugccacaagauu

SEQ ID NO: 1757865 - RNA, 19 nt, Artificial Sequence
  Description of Artificial Sequence: Synthetic oligonucleotide
  Sense strand starting at position 370 of SEQ ID NO: 1562585
uuuggccugucugauugau

SEQ ID NO: 1757866 - RNA, 19 nt, Artificial Sequence
  Description of Artificial Sequence: Synthetic oligonucleotide
  Antisense strand to SEQ ID NO: 1757865
aucaaucagacaggccaaa

SEQ ID NO: 1757867 - RNA, 19 nt, Artificial Sequence
  Description of Artificial Sequence: Synthetic oligonucleotide
  Sense strand starting at position 374 of SEQ ID NO: 1562585
gccugucugauugaugguu

SEQ ID NO: 1757868 - RNA, 19 nt, Artificial Sequence
  Description of Artificial Sequence: Synthetic oligonucleotide
  Antisense strand to SEQ ID NO: 1757867
aaccaucaaucagacaggc

SEQ ID NO: 1757869 - RNA, 19 nt, Artificial Sequence
  Description of Artificial Sequence: Synthetic oligonucleotide
  Sense strand starting at position 383 of SEQ ID NO: 1562585
auugaugguugcccaucua

SEQ ID NO: 1757870 - RNA, 19 nt, Artificial Sequence
  Description of Artificial Sequence: Synthetic oligonucleotide
  Antisense strand to SEQ ID NO: 1757869
uagaugggcaaccaucaau

SEQ ID NO: 1757871 - RNA, 19 nt, Artificial Sequence
  Description of Artificial Sequence: Synthetic oligonucleotide
  Sense strand starting at position 406 of SEQ ID NO: 1562585
cuauucugcuuucuggaaa

SEQ ID NO: 1757872 - RNA, 19 nt, Artificial Sequence
  Description of Artificial Sequence: Synthetic oligonucleotide
  Antisense strand to SEQ ID NO: 1757871
uuuccagaaagcagaauag

SEQ ID NO: 1757873 - RNA, 19 nt, Artificial Sequence
  Description of Artificial Sequence: Synthetic oligonucleotide
  Sense strand starting at position 442 of SEQ ID NO: 1562585
gccuccaaguccugagaau

SEQ ID NO: 1757874 - RNA, 19 nt, Artificial Sequence
  Description of Artificial Sequence: Synthetic oligonucleotide
  Antisense strand to SEQ ID NO: 1757873
auucucaggacuuggaggc

SEQ ID NO: 1757875 - RNA, 19 nt, Artificial Sequence
  Description of Artificial Sequence: Synthetic oligonucleotide
  Sense strand starting at position 443 of SEQ ID NO: 1562585
ccuccaaguccugagaauu

SEQ ID NO: 1757876 - RNA, 19 nt, Artificial Sequence
  Description of Artificial Sequence: Synthetic oligonucleotide
  Antisense strand to SEQ ID NO: 1757875
aauucucaggacuuggagg

SEQ ID NO: 1757877 - RNA, 19 nt, Artificial Sequence
  Description of Artificial Sequence: Synthetic oligonucleotide
  Sense strand starting at position 453 of SEQ ID NO: 1562585
cugagaauuucugcagcuu

SEQ ID NO: 1757878 - RNA, 19 nt, Artificial Sequence
  Description of Artificial Sequence: Synthetic oligonucleotide
  Antisense strand to SEQ ID NO: 1757877
aagcugcagaaauucucag

SEQ ID NO: 1757879 - RNA, 19 nt, Artificial Sequence
  Description of Artificial Sequence: Synthetic oligonucleotide
  Sense strand starting at position 567 of SEQ ID NO: 1562585
uggucuuuccagggaugga

SEQ ID NO: 1757880 - RNA, 19 nt, Artificial Sequence
  Description of Artificial Sequence: Synthetic oligonucleotide
  Antisense strand to SEQ ID NO: 1757879
uccaucccuggaaagacca

SEQ ID NO: 1757881 - RNA, 19 nt, Artificial Sequence
  Description of Artificial Sequence: Synthetic oligonucleotide
  Sense strand starting at position 798 of SEQ ID NO: 1562585
ggccuuuagugaugauccu

SEQ ID NO: 1757882 - RNA, 19 nt, Artificial Sequence
  Description of Artificial Sequence: Synthetic oligonucleotide
  Antisense strand to SEQ ID NO: 1757881
aggaucaucacuaaaggcc

SEQ ID NO: 1757883 - RNA, 19 nt, Artificial Sequence
  Description of Artificial Sequence: Synthetic oligonucleotide
  Sense strand starting at position 1025 of SEQ ID NO: 1562585
cuucuaagugcugagagga

SEQ ID NO: 1757884 - RNA, 19 nt, Artificial Sequence
  Description of Artificial Sequence: Synthetic oligonucleotide
  Antisense strand to SEQ ID NO: 1757883
uccucucagcacuuagaag

SEQ ID NO: 1757885 - RNA, 19 nt, Artificial Sequence
  Description of Artificial Sequence: Synthetic oligonucleotide
  Sense strand starting at position 1078 of SEQ ID NO: 1562585
gggccauucucaucuuaca

SEQ ID NO: 1757886 - RNA, 19 nt, Artificial Sequence
  Description of Artificial Sequence: Synthetic oligonucleotide
  Antisense strand to SEQ ID NO: 1757885
uguaagaugagaauggccc

SEQ ID NO: 1757887 - RNA, 19 nt, Artificial Sequence
  Description of Artificial Sequence: Synthetic oligonucleotide
  Sense strand starting at position 1278 of SEQ ID NO: 1562585
uccguauauuccguguuac

SEQ ID NO: 1757888 - RNA, 19 nt, Artificial Sequence
  Description of Artificial Sequence: Synthetic oligonucleotide
  Antisense strand to SEQ ID NO: 1757887
guaacacggaauauacgga

SEQ ID NO: 1757889 - RNA, 19 nt, Artificial Sequence
  Description of Artificial Sequence: Synthetic oligonucleotide
  Sense strand starting at position 1279 of SEQ ID NO: 1562585
ccguauauuccguguuacu

SEQ ID NO: 1757890 - RNA, 19 nt, Artificial Sequence
  Description of Artificial Sequence: Synthetic oligonucleotide
  Antisense strand to SEQ ID NO: 1757889
aguaacacggaauauacgg

SEQ ID NO: 1757891 - RNA, 19 nt, Artificial Sequence
  Description of Artificial Sequence: Synthetic oligonucleotide
  Sense strand starting at position 1280 of SEQ ID NO: 1562585
cguauauuccguguuacug

SEQ ID NO: 1757892 - RNA, 19 nt, Artificial Sequence
  Description of Artificial Sequence: Synthetic oligonucleotide
  Antisense strand to SEQ ID NO: 1757891
caguaacacggaauauacg

SEQ ID NO: 1757893 - RNA, 19 nt, Artificial Sequence
  Description of Artificial Sequence: Synthetic oligonucleotide
  Sense strand starting at position 1286 of SEQ ID NO: 1562585
uuccguguuacugguguca

SEQ ID NO: 1757894 - RNA, 19 nt, Artificial Sequence
  Description of Artificial Sequence: Synthetic oligonucleotide
  Antisense strand to SEQ ID NO: 1757893
ugacaccaguaacacggaa

SEQ ID NO: 1757895 - RNA, 19 nt, Artificial Sequence
  Description of Artificial Sequence: Synthetic oligonucleotide
  Sense strand starting at position 1288 of SEQ ID NO: 1562585
ccguguuacuggugucauu

SEQ ID NO: 1757896 - RNA, 19 nt, Artificial Sequence
  Description of Artificial Sequence: Synthetic oligonucleotide
  Antisense strand to SEQ ID NO: 1757895
aaugacaccaguaacacgg

SEQ ID NO: 1757897 - RNA, 19 nt, Artificial Sequence
  Description of Artificial Sequence: Synthetic oligonucleotide
  Sense strand starting at position 1291 of SEQ ID NO: 1562585
uguuacuggugucauuaua

SEQ ID NO: 1757898 - RNA, 19 nt, Artificial Sequence
  Description of Artificial Sequence: Synthetic oligonucleotide
  Antisense strand to SEQ ID NO: 1757897
uauaaugacaccaguaaca

SEQ ID NO: 1757899 - RNA, 19 nt, Artificial Sequence
  Description of Artificial Sequence: Synthetic oligonucleotide
  Sense strand starting at position 1300 of SEQ ID NO: 1562585
ugucauuauaaacggugaa

SEQ ID NO: 1757900 - RNA, 19 nt, Artificial Sequence
  Description of Artificial Sequence: Synthetic oligonucleotide
  Antisense strand to SEQ ID NO: 1757899
uucaccguuuauaaugaca

SEQ ID NO: 1757901 - RNA, 19 nt, Artificial Sequence
  Description of Artificial Sequence: Synthetic oligonucleotide
  Sense strand starting at position 1301 of SEQ ID NO: 1562585
gucauuauaaacggugaau

SEQ ID NO: 1757902 - RNA, 19 nt, Artificial Sequence
  Description of Artificial Sequence: Synthetic oligonucleotide
  Antisense strand to SEQ ID NO: 1757901
auucaccguuuauaaugac

SEQ ID NO: 1757903 - RNA, 19 nt, Artificial Sequence
  Description of Artificial Sequence: Synthetic oligonucleotide
  Sense strand starting at position 1303 of SEQ ID NO: 1562585
cauuauaaacggugaaugu

SEQ ID NO: 1757904 - RNA, 19 nt, Artificial Sequence
  Description of Artificial Sequence: Synthetic oligonucleotide
  Antisense strand to SEQ ID NO: 1757903
acauucaccguuuauaaug

SEQ ID NO: 1757905 - RNA, 19 nt, Artificial Sequence
  Description of Artificial Sequence: Synthetic oligonucleotide
  Sense strand starting at position 1316 of SEQ ID NO: 1562585
gaaugugaauacugaucau

SEQ ID NO: 1757906 - RNA, 19 nt, Artificial Sequence
  Description of Artificial Sequence: Synthetic oligonucleotide
  Antisense strand to SEQ ID NO: 1757905
augaucaguauucacauuc

SEQ ID NO: 1757907 - RNA, 19 nt, Artificial Sequence
  Description of Artificial Sequence: Synthetic oligonucleotide
  Sense strand starting at position 1319 of SEQ ID NO: 1562585
ugugaauacugaucaugga

SEQ ID NO: 1757908 - RNA, 19 nt, Artificial Sequence
  Description of Artificial Sequence: Synthetic oligonucleotide
  Antisense strand to SEQ ID NO: 1757907
uccaugaucaguauucaca

SEQ ID NO: 1757909 - RNA, 19 nt, Artificial Sequence
  Description of Artificial Sequence: Synthetic oligonucleotide
  Sense strand starting at position 1322 of SEQ ID NO: 1562585
gaauacugaucauggagga

SEQ ID NO: 1757910 - RNA, 19 nt, Artificial Sequence
  Description of Artificial Sequence: Synthetic oligonucleotide
  Antisense strand to SEQ ID NO: 1757909
uccuccaugaucaguauuc

SEQ ID NO: 1757911 - RNA, 19 nt, Artificial Sequence
  Description of Artificial Sequence: Synthetic oligonucleotide
  Sense strand starting at position 1403 of SEQ ID NO: 1562585
gaugauuugccuugugcuu

SEQ ID NO: 1757912 - RNA, 19 nt, Artificial Sequence
  Description of Artificial Sequence: Synthetic oligonucleotide
  Antisense strand to SEQ ID NO: 1757911
aagcacaaggcaaaucauc

SEQ ID NO: 1757913 - RNA, 19 nt, Artificial Sequence
  Description of Artificial Sequence: Synthetic oligonucleotide
  Sense strand starting at position 1491 of SEQ ID NO: 1562585
ucaucaaagcacugugaac

SEQ ID NO: 1757914 - RNA, 19 nt, Artificial Sequence
  Description of Artificial Sequence: Synthetic oligonucleotide
  Antisense strand to SEQ ID NO: 1757913
guucacagugcuuugauga

SEQ ID NO: 1757915 - RNA, 19 nt, Artificial Sequence
  Description of Artificial Sequence: Synthetic oligonucleotide
  Sense strand starting at position 2871 of SEQ ID NO: 1562585
cccugagccugaugugaaa

SEQ ID NO: 1757916 - RNA, 19 nt, Artificial Sequence
  Description of Artificial Sequence: Synthetic oligonucleotide
  Antisense strand to SEQ ID NO: 1757915
uuucacaucaggcucaggg

SEQ ID NO: 1757917 - RNA, 19 nt, Artificial Sequence
  Description of Artificial Sequence: Synthetic oligonucleotide
  Sense strand starting at position 2981 of SEQ ID NO: 1562585
cagugauccugacagucag

SEQ ID NO: 1757918 - RNA, 19 nt, Artificial Sequence
  Description of Artificial Sequence: Synthetic oligonucleotide
  Antisense strand to SEQ ID NO: 1757917
cugacugucaggaucacug

SEQ ID NO: 1757919 - RNA, 19 nt, Artificial Sequence
  Description of Artificial Sequence: Synthetic oligonucleotide
  Sense strand starting at position 3172 of SEQ ID NO: 1562585
gggacuuacugcuccuaaa

SEQ ID NO: 1757920 - RNA, 19 nt, Artificial Sequence
  Description of Artificial Sequence: Synthetic oligonucleotide
  Antisense strand to SEQ ID NO: 1757919
uuuaggagcaguaaguccc

SEQ ID NO: 1757921 - RNA, 19 nt, Artificial Sequence
  Description of Artificial Sequence: Synthetic oligonucleotide
  Sense strand starting at position 3707 of SEQ ID NO: 1562585
cccagcuugucccuccaua

SEQ ID NO: 1757922 - RNA, 19 nt, Artificial Sequence
  Description of Artificial Sequence: Synthetic oligonucleotide
  Antisense strand to SEQ ID NO: 1757921
uauggagggacaagcuggg

SEQ ID NO: 1757923 - RNA, 19 nt, Artificial Sequence
  Description of Artificial Sequence: Synthetic oligonucleotide
  Sense strand starting at position 3786 of SEQ ID NO: 1562585
gagcuugggugagaauuua

SEQ ID NO: 1757924 - RNA, 19 nt, Artificial Sequence
  Description of Artificial Sequence: Synthetic oligonucleotide
  Antisense strand to SEQ ID NO: 1757923
uaaauucucacccaagcuc

SEQ ID NO: 1757925 - RNA, 19 nt, Artificial Sequence
  Description of Artificial Sequence: Synthetic oligonucleotide
  Sense strand starting at position 3801 of SEQ ID NO: 1562585
uuuagaagguuccugggaa

SEQ ID NO: 1757926 - RNA, 19 nt, Artificial Sequence
  Description of Artificial Sequence: Synthetic oligonucleotide
  Antisense strand to SEQ ID NO: 1757925
uucccaggaaccuucuaaa

SEQ ID NO: 1757927 - RNA, 19 nt, Artificial Sequence
  Description of Artificial Sequence: Synthetic oligonucleotide
  Sense strand starting at position 3802 of SEQ ID NO: 1562585
uuagaagguuccugggaau

SEQ ID NO: 1757928 - RNA, 19 nt, Artificial Sequence
  Description of Artificial Sequence: Synthetic oligonucleotide
  Antisense strand to SEQ ID NO: 1757927
auucccaggaaccuucuaa

SEQ ID NO: 1757929 - RNA, 19 nt, Artificial Sequence
  Description of Artificial Sequence: Synthetic oligonucleotide
  Sense strand starting at position 3834 of SEQ ID NO: 1562585
cccuaucuguccuaaaugu

SEQ ID NO: 1757930 - RNA, 19 nt, Artificial Sequence
  Description of Artificial Sequence: Synthetic oligonucleotide
  Antisense strand to SEQ ID NO: 1757929
acauuuaggacagauaggg

SEQ ID NO: 1757931 - RNA, 19 nt, Artificial Sequence
  Description of Artificial Sequence: Synthetic oligonucleotide
  Sense strand starting at position 3856 of SEQ ID NO: 1562585
ggcuacaguccauggaaga

SEQ ID NO: 1757932 - RNA, 19 nt, Artificial Sequence
  Description of Artificial Sequence: Synthetic oligonucleotide
  Antisense strand to SEQ ID NO: 1757931
ucuuccauggacuguagcc

SEQ ID NO: 1757933 - RNA, 19 nt, Artificial Sequence
  Description of Artificial Sequence: Synthetic oligonucleotide
  Sense strand starting at position 3857 of SEQ ID NO: 1562585
gcuacaguccauggaagau

SEQ ID NO: 1757934 - RNA, 19 nt, Artificial Sequence
  Description of Artificial Sequence: Synthetic oligonucleotide
  Antisense strand to SEQ ID NO: 1757933
aucuuccauggacuguagc

SEQ ID NO: 1757935 - RNA, 19 nt, Artificial Sequence
  Description of Artificial Sequence: Synthetic oligonucleotide
  Sense strand starting at position 3866 of SEQ ID NO: 1562585
cauggaagauuccagaaug

SEQ ID NO: 1757936 - RNA, 19 nt, Artificial Sequence
  Description of Artificial Sequence: Synthetic oligonucleotide
  Antisense strand to SEQ ID NO: 1757935
cauucuggaaucuuccaug

SEQ ID NO: 1757937 - RNA, 19 nt, Artificial Sequence
  Description of Artificial Sequence: Synthetic oligonucleotide
  Sense strand starting at position 3908 of SEQ ID NO: 1562585
aucagaucugcacacugua

SEQ ID NO: 1757938 - RNA, 19 nt, Artificial Sequence
  Description of Artificial Sequence: Synthetic oligonucleotide
  Antisense strand to SEQ ID NO: 1757937
uacagugugcagaucugau

SEQ ID NO: 1757939 - RNA, 19 nt, Artificial Sequence
  Description of Artificial Sequence: Synthetic oligonucleotide
  Sense strand starting at position 3920 of SEQ ID NO: 1562585
cacuguagugcugguuaau

SEQ ID NO: 1757940 - RNA, 19 nt, Artificial Sequence
  Description of Artificial Sequence: Synthetic oligonucleotide
  Antisense strand to SEQ ID NO: 1757939
auuaaccagcacuacagug

SEQ ID NO: 1757941 - RNA, 19 nt, Artificial Sequence
  Description of Artificial Sequence: Synthetic oligonucleotide
  Sense strand starting at position 3926 of SEQ ID NO: 1562585
agugcugguuaaucacaga

SEQ ID NO: 1757942 - RNA, 19 nt, Artificial Sequence
  Description of Artificial Sequence: Synthetic oligonucleotide
  Antisense strand to SEQ ID NO: 1757941
ucugugauuaaccagcacu

SEQ ID NO: 1757943 - RNA, 19 nt, Artificial Sequence
  Description of Artificial Sequence: Synthetic oligonucleotide
  Sense strand starting at position 3931 of SEQ ID NO: 1562585
ugguuaaucacagagcuga

SEQ ID NO: 1757944 - RNA, 19 nt, Artificial Sequence
  Description of Artificial Sequence: Synthetic oligonucleotide
  Antisense strand to SEQ ID NO: 1757943
ucagcucugugauuaacca

SEQ ID NO: 1757945 - RNA, 19 nt, Artificial Sequence
  Description of Artificial Sequence: Synthetic oligonucleotide
  Sense strand starting at position 165 of SEQ ID NO: 1562586
ugugcuccuccugagaaau

SEQ ID NO: 1757946 - RNA, 19 nt, Artificial Sequence
  Description of Artificial Sequence: Synthetic oligonucleotide
  Antisense strand to SEQ ID NO: 1757945
auuucucaggaggagcaca

SEQ ID NO: 1757947 - RNA, 19 nt, Artificial Sequence
  Description of Artificial Sequence: Synthetic oligonucleotide
  Sense strand starting at position 251 of SEQ ID NO: 1562586
gggcgaucuaggcucgcua

SEQ ID NO: 1757948 - RNA, 19 nt, Artificial Sequence
  Description of Artificial Sequence: Synthetic oligonucleotide
  Antisense strand to SEQ ID NO: 1757947
uagcgagccuagaucgccc

SEQ ID NO: 1757949 - RNA, 19 nt, Artificial Sequence
  Description of Artificial Sequence: Synthetic oligonucleotide
  Sense strand starting at position 539 of SEQ ID NO: 1562586
gggcuuugacaccauccua

SEQ ID NO: 1757950 - RNA, 19 nt, Artificial Sequence
  Description of Artificial Sequence: Synthetic oligonucleotide
  Antisense strand to SEQ ID NO: 1757949
uaggauggugucaaagccc

SEQ ID NO: 1757951 - RNA, 19 nt, Artificial Sequence
  Description of Artificial Sequence: Synthetic oligonucleotide
  Sense strand starting at position 569 of SEQ ID NO: 1562586
ccuagaucuguugggcuca

SEQ ID NO: 1757952 - RNA, 19 nt, Artificial Sequence
  Description of Artificial Sequence: Synthetic oligonucleotide
  Antisense strand to SEQ ID NO: 1757951
ugagcccaacagaucuagg

SEQ ID NO: 1757953 - RNA, 19 nt, Artificial Sequence
  Description of Artificial Sequence: Synthetic oligonucleotide
  Sense strand starting at position 574 of SEQ ID NO: 1562586
aucuguugggcucaaguga

SEQ ID NO: 1757954 - RNA, 19 nt, Artificial Sequence
  Description of Artificial Sequence: Synthetic oligonucleotide
  Antisense strand to SEQ ID NO: 1757953
ucacuugagcccaacagau

SEQ ID NO: 1757955 - RNA, 19 nt, Artificial Sequence
  Description of Artificial Sequence: Synthetic oligonucleotide
  Sense strand starting at position 904 of SEQ ID NO: 1562586
aggugaauuucccagaguc

SEQ ID NO: 1757956 - RNA, 19 nt, Artificial Sequence
  Description of Artificial Sequence: Synthetic oligonucleotide
  Antisense strand to SEQ ID NO: 1757955
gacucugggaaauucaccu

SEQ ID NO: 1757957 - RNA, 19 nt, Artificial Sequence
  Description of Artificial Sequence: Synthetic oligonucleotide
  Sense strand starting at position 958 of SEQ ID NO: 1562586
cugcccuugugacucuaau

SEQ ID NO: 1757958 - RNA, 19 nt, Artificial Sequence
  Description of Artificial Sequence: Synthetic oligonucleotide
  Antisense strand to SEQ ID NO: 1757957
auuagagucacaagggcag

SEQ ID NO: 1757959 - RNA, 19 nt, Artificial Sequence
  Description of Artificial Sequence: Synthetic oligonucleotide
  Sense strand starting at position 1019 of SEQ ID NO: 1562586
agguuugauucuccuucua

SEQ ID NO: 1757960 - RNA, 19 nt, Artificial Sequence
  Description of Artificial Sequence: Synthetic oligonucleotide
  Antisense strand to SEQ ID NO: 1757959
uagaaggagaaucaaaccu

SEQ ID NO: 1757961 - RNA, 19 nt, Artificial Sequence
  Description of Artificial Sequence: Synthetic oligonucleotide
  Sense strand starting at position 1021 of SEQ ID NO: 1562586
guuugauucuccuucuaug

SEQ ID NO: 1757962 - RNA, 19 nt, Artificial Sequence
  Description of Artificial Sequence: Synthetic oligonucleotide
  Antisense strand to SEQ ID NO: 1757961
cauagaaggagaaucaaac

SEQ ID NO: 1757963 - RNA, 19 nt, Artificial Sequence
  Description of Artificial Sequence: Synthetic oligonucleotide
  Sense strand starting at position 1056 of SEQ ID NO: 1562586
cucucacuccuguaguuau

SEQ ID NO: 1757964 - RNA, 19 nt, Artificial Sequence
  Description of Artificial Sequence: Synthetic oligonucleotide
  Antisense strand to SEQ ID NO: 1757963
auaacuacaggagugagag

SEQ ID NO: 1757965 - RNA, 19 nt, Artificial Sequence
  Description of Artificial Sequence: Synthetic oligonucleotide
  Sense strand starting at position 1267 of SEQ ID NO: 1562586
cguggaguccuaugaucua

SEQ ID NO: 1757966 - RNA, 19 nt, Artificial Sequence
  Description of Artificial Sequence: Synthetic oligonucleotide
  Antisense strand to SEQ ID NO: 1757965
uagaucauaggacuccacg

SEQ ID NO: 1757967 - RNA, 19 nt, Artificial Sequence
  Description of Artificial Sequence: Synthetic oligonucleotide
  Sense strand starting at position 1363 of SEQ ID NO: 1562586
acaaguuggugcucagacu

SEQ ID NO: 1757968 - RNA, 19 nt, Artificial Sequence
  Description of Artificial Sequence: Synthetic oligonucleotide
  Antisense strand to SEQ ID NO: 1757967
agucugagcaccaacuugu

SEQ ID NO: 1757969 - RNA, 19 nt, Artificial Sequence
  Description of Artificial Sequence: Synthetic oligonucleotide
  Sense strand starting at position 1391 of SEQ ID NO: 1562586
ugagaugaccucugaacuc

SEQ ID NO: 1757970 - RNA, 19 nt, Artificial Sequence
  Description of Artificial Sequence: Synthetic oligonucleotide
  Antisense strand to SEQ ID NO: 1757969
gaguucagaggucaucuca

SEQ ID NO: 1757971 - RNA, 19 nt, Artificial Sequence
  Description of Artificial Sequence: Synthetic oligonucleotide
  Sense strand starting at position 2303 of SEQ ID NO: 1562586
ccacacaugccuuguggau

SEQ ID NO: 1757972 - RNA, 19 nt, Artificial Sequence
  Description of Artificial Sequence: Synthetic oligonucleotide
  Antisense strand to SEQ ID NO: 1757971
auccacaaggcaugugugg

SEQ ID NO: 1757973 - RNA, 19 nt, Artificial Sequence
  Description of Artificial Sequence: Synthetic oligonucleotide
  Sense strand starting at position 2315 of SEQ ID NO: 1562586
uguggaugcuuauuguaua

SEQ ID NO: 1757974 - RNA, 19 nt, Artificial Sequence
  Description of Artificial Sequence: Synthetic oligonucleotide
  Antisense strand to SEQ ID NO: 1757973
uauacaauaagcauccaca

SEQ ID NO: 1757975 - RNA, 19 nt, Artificial Sequence
  Description of Artificial Sequence: Synthetic oligonucleotide
  Sense strand starting at position 2388 of SEQ ID NO: 1562586
gucugucaccaagacugaa

SEQ ID NO: 1757976 - RNA, 19 nt, Artificial Sequence
  Description of Artificial Sequence: Synthetic oligonucleotide
  Antisense strand to SEQ ID NO: 1757975
uucagucuuggugacagac

SEQ ID NO: 1757977 - RNA, 19 nt, Artificial Sequence
  Description of Artificial Sequence: Synthetic oligonucleotide
  Sense strand starting at position 2486 of SEQ ID NO: 1562586
gcugguucuacagguauca

SEQ ID NO: 1757978 - RNA, 19 nt, Artificial Sequence
  Description of Artificial Sequence: Synthetic oligonucleotide
  Antisense strand to SEQ ID NO: 1757977
ugauaccuguagaaccagc

SEQ ID NO: 1757979 - RNA, 19 nt, Artificial Sequence
  Description of Artificial Sequence: Synthetic oligonucleotide
  Sense strand starting at position 2544 of SEQ ID NO: 1562586
gauggugccucacuauauu

SEQ ID NO: 1757980 - RNA, 19 nt, Artificial Sequence
  Description of Artificial Sequence: Synthetic oligonucleotide
  Antisense strand to SEQ ID NO: 1757979
aauauagugaggcaccauc

SEQ ID NO: 1757981 - RNA, 19 nt, Artificial Sequence
  Description of Artificial Sequence: Synthetic oligonucleotide
  Sense strand starting at position 2660 of SEQ ID NO: 1562586
gcuucuagauauuugcuua

SEQ ID NO: 1757982 - RNA, 19 nt, Artificial Sequence
  Description of Artificial Sequence: Synthetic oligonucleotide
  Antisense strand to SEQ ID NO: 1757981
uaagcaaauaucuagaagc

SEQ ID NO: 1757983 - RNA, 19 nt, Artificial Sequence
  Description of Artificial Sequence: Synthetic oligonucleotide
  Sense strand starting at position 2886 of SEQ ID NO: 1562586
augcaaccagauugcuauu

SEQ ID NO: 1757984 - RNA, 19 nt, Artificial Sequence
  Description of Artificial Sequence: Synthetic oligonucleotide
  Antisense strand to SEQ ID NO: 1757983
aauagcaaucugguugcau

SEQ ID NO: 1757985 - RNA, 19 nt, Artificial Sequence
  Description of Artificial Sequence: Synthetic oligonucleotide
  Sense strand starting at position 3068 of SEQ ID NO: 1562586
gcaggaagagaauggugau

SEQ ID NO: 1757986 - RNA, 19 nt, Artificial Sequence
  Description of Artificial Sequence: Synthetic oligonucleotide
  Antisense strand to SEQ ID NO: 1757985
aucaccauucucuuccugc

SEQ ID NO: 1757987 - RNA, 19 nt, Artificial Sequence
  Description of Artificial Sequence: Synthetic oligonucleotide
  Sense strand starting at position 3167 of SEQ ID NO: 1562586
cccucaaugggccaggauu

SEQ ID NO: 1757988 - RNA, 19 nt, Artificial Sequence
  Description of Artificial Sequence: Synthetic oligonucleotide
  Antisense strand to SEQ ID NO: 1757987
aauccuggcccauugaggg

SEQ ID NO: 1757989 - RNA, 19 nt, Artificial Sequence
  Description of Artificial Sequence: Synthetic oligonucleotide
  Sense strand starting at position 3169 of SEQ ID NO: 1562586
cucaaugggccaggauuau

SEQ ID NO: 1757990 - RNA, 19 nt, Artificial Sequence
  Description of Artificial Sequence: Synthetic oligonucleotide
  Antisense strand to SEQ ID NO: 1757989
auaauccuggcccauugag

SEQ ID NO: 1757991 - RNA, 19 nt, Artificial Sequence
  Description of Artificial Sequence: Synthetic oligonucleotide
  Sense strand starting at position 3178 of SEQ ID NO: 1562586
ccaggauuaugaucugauu

SEQ ID NO: 1757992 - RNA, 19 nt, Artificial Sequence
  Description of Artificial Sequence: Synthetic oligonucleotide
  Antisense strand to SEQ ID NO: 1757991
aaucagaucauaauccugg

SEQ ID NO: 1757993 - RNA, 19 nt, Artificial Sequence
  Description of Artificial Sequence: Synthetic oligonucleotide
  Sense strand starting at position 3258 of SEQ ID NO: 1562586
ggaggcaagacuuguaaac

SEQ ID NO: 1757994 - RNA, 19 nt, Artificial Sequence
  Description of Artificial Sequence: Synthetic oligonucleotide
  Antisense strand to SEQ ID NO: 1757993
guuuacaagucuugccucc

SEQ ID NO: 1757995 - RNA, 19 nt, Artificial Sequence
  Description of Artificial Sequence: Synthetic oligonucleotide
  Sense strand starting at position 3292 of SEQ ID NO: 1562586
acacgucucagucaguuua

SEQ ID NO: 1757996 - RNA, 19 nt, Artificial Sequence
  Description of Artificial Sequence: Synthetic oligonucleotide
  Antisense strand to SEQ ID NO: 1757995
uaaacugacugagacgugu

SEQ ID NO: 1757997 - RNA, 19 nt, Artificial Sequence
  Description of Artificial Sequence: Synthetic oligonucleotide
  Sense strand starting at position 3308 of SEQ ID NO: 1562586
uuagauguuuacucugcca

SEQ ID NO: 1757998 - RNA, 19 nt, Artificial Sequence
  Description of Artificial Sequence: Synthetic oligonucleotide
  Antisense strand to SEQ ID NO: 1757997
uggcagaguaaacaucuaa

SEQ ID NO: 1757999 - RNA, 19 nt, Artificial Sequence
  Description of Artificial Sequence: Synthetic oligonucleotide
  Sense strand starting at position 3310 of SEQ ID NO: 1562586
agauguuuacucugccaag

SEQ ID NO: 1758000 - RNA, 19 nt, Artificial Sequence
  Description of Artificial Sequence: Synthetic oligonucleotide
  Antisense strand to SEQ ID NO: 1757999
cuuggcagaguaaacaucu

SEQ ID NO: 1758001 - RNA, 19 nt, Artificial Sequence
  Description of Artificial Sequence: Synthetic oligonucleotide
  Sense strand starting at position 3355 of SEQ ID NO: 1562586
acacaagucacaggagguu

SEQ ID NO: 1758002 - RNA, 19 nt, Artificial Sequence
  Description of Artificial Sequence: Synthetic oligonucleotide
  Antisense strand to SEQ ID NO: 1758001
aaccuccugugacuugugu

SEQ ID NO: 1758003 - RNA, 19 nt, Artificial Sequence
  Description of Artificial Sequence: Synthetic oligonucleotide
  Sense strand starting at position 3488 of SEQ ID NO: 1562586
guggucacauucuugugaa

SEQ ID NO: 1758004 - RNA, 19 nt, Artificial Sequence
  Description of Artificial Sequence: Synthetic oligonucleotide
  Antisense strand to SEQ ID NO: 1758003
uucacaagaaugugaccac

SEQ ID NO: 1758005 - RNA, 19 nt, Artificial Sequence
  Description of Artificial Sequence: Synthetic oligonucleotide
  Sense strand starting at position 3529 of SEQ ID NO: 1562586
uccacagguugucuaugaa

SEQ ID NO: 1758006 - RNA, 19 nt, Artificial Sequence
  Description of Artificial Sequence: Synthetic oligonucleotide
  Antisense strand to SEQ ID NO: 1758005
uucauagacaaccugugga

SEQ ID NO: 1758007 - RNA, 19 nt, Artificial Sequence
  Description of Artificial Sequence: Synthetic oligonucleotide
  Sense strand starting at position 3532 of SEQ ID NO: 1562586
acagguugucuaugaaagg

SEQ ID NO: 1758008 - RNA, 19 nt, Artificial Sequence
  Description of Artificial Sequence: Synthetic oligonucleotide
  Antisense strand to SEQ ID NO: 1758007
ccuuucauagacaaccugu

SEQ ID NO: 1758009 - RNA, 19 nt, Artificial Sequence
  Description of Artificial Sequence: Synthetic oligonucleotide
  Sense strand starting at position 3672 of SEQ ID NO: 1562586
gcagaagucuuguuauuua

SEQ ID NO: 1758010 - RNA, 19 nt, Artificial Sequence
  Description of Artificial Sequence: Synthetic oligonucleotide
  Antisense strand to SEQ ID NO: 1758009
uaaauaacaagacuucugc

SEQ ID NO: 1758011 - RNA, 19 nt, Artificial Sequence
  Description of Artificial Sequence: Synthetic oligonucleotide
  Sense strand starting at position 3714 of SEQ ID NO: 1562586
gcuaauuugcauugucaca

SEQ ID NO: 1758012 - RNA, 19 nt, Artificial Sequence
  Description of Artificial Sequence: Synthetic oligonucleotide
  Antisense strand to SEQ ID NO: 1758011
ugugacaaugcaaauuagc

SEQ ID NO: 1758013 - RNA, 19 nt, Artificial Sequence
  Description of Artificial Sequence: Synthetic oligonucleotide
  Sense strand starting at position 3744 of SEQ ID NO: 1562586
caaagucugccucagggua

SEQ ID NO: 1758014 - RNA, 19 nt, Artificial Sequence
  Description of Artificial Sequence: Synthetic oligonucleotide
  Antisense strand to SEQ ID NO: 1758013
uacccugaggcagacuuug

SEQ ID NO: 1758015 - RNA, 19 nt, Artificial Sequence
  Description of Artificial Sequence: Synthetic oligonucleotide
  Sense strand starting at position 3780 of SEQ ID NO: 1562586
caaggaguuuccuugugag

SEQ ID NO: 1758016 - RNA, 19 nt, Artificial Sequence
  Description of Artificial Sequence: Synthetic oligonucleotide
  Antisense strand to SEQ ID NO: 1758015
cucacaaggaaacuccuug

SEQ ID NO: 1758017 - RNA, 19 nt, Artificial Sequence
  Description of Artificial Sequence: Synthetic oligonucleotide
  Sense strand starting at position 3786 of SEQ ID NO: 1562586
guuuccuugugagcaauuu

SEQ ID NO: 1758018 - RNA, 19 nt, Artificial Sequence
  Description of Artificial Sequence: Synthetic oligonucleotide
  Antisense strand to SEQ ID NO: 1758017
aaauugcucacaaggaaac

SEQ ID NO: 1758019 - RNA, 19 nt, Artificial Sequence
  Description of Artificial Sequence: Synthetic oligonucleotide
  Sense strand starting at position 3844 of SEQ ID NO: 1562586
ucgcaaauaucugcuuaga

SEQ ID NO: 1758020 - RNA, 19 nt, Artificial Sequence
  Description of Artificial Sequence: Synthetic oligonucleotide
  Antisense strand to SEQ ID NO: 1758019
ucuaagcagauauuugcga

SEQ ID NO: 1758021 - RNA, 19 nt, Artificial Sequence
  Description of Artificial Sequence: Synthetic oligonucleotide
  Sense strand starting at position 3846 of SEQ ID NO: 1562586
gcaaauaucugcuuagaag

SEQ ID NO: 1758022 - RNA, 19 nt, Artificial Sequence
  Description of Artificial Sequence: Synthetic oligonucleotide
  Antisense strand to SEQ ID NO: 1758021
cuucuaagcagauauuugc

SEQ ID NO: 1758023 - RNA, 19 nt, Artificial Sequence
  Description of Artificial Sequence: Synthetic oligonucleotide
  Sense strand starting at position 3884 of SEQ ID NO: 1562586
uggagugacuccguuucua

SEQ ID NO: 1758024 - RNA, 19 nt, Artificial Sequence
  Description of Artificial Sequence: Synthetic oligonucleotide
  Antisense strand to SEQ ID NO: 1758023
uagaaacggagucacucca

SEQ ID NO: 1758025 - RNA, 19 nt, Artificial Sequence
  Description of Artificial Sequence: Synthetic oligonucleotide
  Sense strand starting at position 60 of SEQ ID NO: 1562587
acugcacccuucugaggaa

SEQ ID NO: 1758026 - RNA, 19 nt, Artificial Sequence
  Description of Artificial Sequence: Synthetic oligonucleotide
  Antisense strand to SEQ ID NO: 1758025
uuccucagaagggugcagu

SEQ ID NO: 1758027 - RNA, 19 nt, Artificial Sequence
  Description of Artificial Sequence: Synthetic oligonucleotide
  Sense strand starting at position 61 of SEQ ID NO: 1562587
cugcacccuucugaggaau

SEQ ID NO: 1758028 - RNA, 19 nt, Artificial Sequence
  Description of Artificial Sequence: Synthetic oligonucleotide
  Antisense strand to SEQ ID NO: 1758027
auuccucagaagggugcag

SEQ ID NO: 1758029 - RNA, 19 nt, Artificial Sequence
  Description of Artificial Sequence: Synthetic oligonucleotide
  Sense strand starting at position 328 of SEQ ID NO: 1562587
agucaccuguccucagaga

SEQ ID NO: 1758030 - RNA, 19 nt, Artificial Sequence
  Description of Artificial Sequence: Synthetic oligonucleotide
  Antisense strand to SEQ ID NO: 1758029
ucucugaggacaggugacu

SEQ ID NO: 1758031 - RNA, 19 nt, Artificial Sequence
  Description of Artificial Sequence: Synthetic oligonucleotide
  Sense strand starting at position 421 of SEQ ID NO: 1562587
gggagcucuaccuguaugu

SEQ ID NO: 1758032 - RNA, 19 nt, Artificial Sequence
  Description of Artificial Sequence: Synthetic oligonucleotide
  Antisense strand to SEQ ID NO: 1758031
acauacagguagagcuccc

SEQ ID NO: 1758033 - RNA, 19 nt, Artificial Sequence
  Description of Artificial Sequence: Synthetic oligonucleotide
  Sense strand starting at position 578 of SEQ ID NO: 1562587
ggaggcauuacuugaacua

SEQ ID NO: 1758034 - RNA, 19 nt, Artificial Sequence
  Description of Artificial Sequence: Synthetic oligonucleotide
  Antisense strand to SEQ ID NO: 1758033
uaguucaaguaaugccucc

SEQ ID NO: 1758035 - RNA, 19 nt, Artificial Sequence
  Description of Artificial Sequence: Synthetic oligonucleotide
  Sense strand starting at position 873 of SEQ ID NO: 1562587
ccuugugacucugauauug

SEQ ID NO: 1758036 - RNA, 19 nt, Artificial Sequence
  Description of Artificial Sequence: Synthetic oligonucleotide
  Antisense strand to SEQ ID NO: 1758035
caauaucagagucacaagg

SEQ ID NO: 1758037 - RNA, 19 nt, Artificial Sequence
  Description of Artificial Sequence: Synthetic oligonucleotide
  Sense strand starting at position 875 of SEQ ID NO: 1562587
uugugacucugauauugaa

SEQ ID NO: 1758038 - RNA, 19 nt, Artificial Sequence
  Description of Artificial Sequence: Synthetic oligonucleotide
  Antisense strand to SEQ ID NO: 1758037
uucaauaucagagucacaa

SEQ ID NO: 1758039 - RNA, 19 nt, Artificial Sequence
  Description of Artificial Sequence: Synthetic oligonucleotide
  Sense strand starting at position 878 of SEQ ID NO: 1562587
ugacucugauauugaagca

SEQ ID NO: 1758040 - RNA, 19 nt, Artificial Sequence
  Description of Artificial Sequence: Synthetic oligonucleotide
  Antisense strand to SEQ ID NO: 1758039
ugcuucaauaucagaguca

SEQ ID NO: 1758041 - RNA, 19 nt, Artificial Sequence
  Description of Artificial Sequence: Synthetic oligonucleotide
  Sense strand starting at position 967 of SEQ ID NO: 1562587
cucucacuccuguaguuau

SEQ ID NO: 1758042 - RNA, 19 nt, Artificial Sequence
  Description of Artificial Sequence: Synthetic oligonucleotide
  Antisense strand to SEQ ID NO: 1758041
auaacuacaggagugagag

SEQ ID NO: 1758043 - RNA, 19 nt, Artificial Sequence
  Description of Artificial Sequence: Synthetic oligonucleotide
  Sense strand starting at position 1009 of SEQ ID NO: 1562587
uuugaaucucaugauugca

SEQ ID NO: 1758044 - RNA, 19 nt, Artificial Sequence
  Description of Artificial Sequence: Synthetic oligonucleotide
  Antisense strand to SEQ ID NO: 1758043
ugcaaucaugagauucaaa

SEQ ID NO: 1758045 - RNA, 19 nt, Artificial Sequence
  Description of Artificial Sequence: Synthetic oligonucleotide
  Sense strand starting at position 1011 of SEQ ID NO: 1562587
ugaaucucaugauugcaaa

SEQ ID NO: 1758046 - RNA, 19 nt, Artificial Sequence
  Description of Artificial Sequence: Synthetic oligonucleotide
  Antisense strand to SEQ ID NO: 1758045
uuugcaaucaugagauuca

SEQ ID NO: 1758047 - RNA, 19 nt, Artificial Sequence
  Description of Artificial Sequence: Synthetic oligonucleotide
  Sense strand starting at position 1085 of SEQ ID NO: 1562587
ucagccauguuucccauua

SEQ ID NO: 1758048 - RNA, 19 nt, Artificial Sequence
  Description of Artificial Sequence: Synthetic oligonucleotide
  Antisense strand to SEQ ID NO: 1758047
uaaugggaaacauggcuga

SEQ ID NO: 1758049 - RNA, 19 nt, Artificial Sequence
  Description of Artificial Sequence: Synthetic oligonucleotide
  Sense strand starting at position 1117 of SEQ ID NO: 1562587
gccuguuucuucucuauca

SEQ ID NO: 1758050 - RNA, 19 nt, Artificial Sequence
  Description of Artificial Sequence: Synthetic oligonucleotide
  Antisense strand to SEQ ID NO: 1758049
ugauagagaagaaacaggc

SEQ ID NO: 1758051 - RNA, 19 nt, Artificial Sequence
  Description of Artificial Sequence: Synthetic oligonucleotide
  Sense strand starting at position 1178 of SEQ ID NO: 1562587
cgugaaguccuaugaucug

SEQ ID NO: 1758052 - RNA, 19 nt, Artificial Sequence
  Description of Artificial Sequence: Synthetic oligonucleotide
  Antisense strand to SEQ ID NO: 1758051
cagaucauaggacuucacg

SEQ ID NO: 1758053 - RNA, 19 nt, Artificial Sequence
  Description of Artificial Sequence: Synthetic oligonucleotide
  Sense strand starting at position 1310 of SEQ ID NO: 1562587
cucugaguuccuugugucu

SEQ ID NO: 1758054 - RNA, 19 nt, Artificial Sequence
  Description of Artificial Sequence: Synthetic oligonucleotide
  Antisense strand to SEQ ID NO: 1758053
agacacaaggaacucagag

SEQ ID NO: 1758055 - RNA, 19 nt, Artificial Sequence
  Description of Artificial Sequence: Synthetic oligonucleotide
  Sense strand starting at position 1313 of SEQ ID NO: 1562587
ugaguuccuugugucucaa

SEQ ID NO: 1758056 - RNA, 19 nt, Artificial Sequence
  Description of Artificial Sequence: Synthetic oligonucleotide
  Antisense strand to SEQ ID NO: 1758055
uugagacacaaggaacuca

SEQ ID NO: 1758057 - RNA, 19 nt, Artificial Sequence
  Description of Artificial Sequence: Synthetic oligonucleotide
  Sense strand starting at position 1333 of SEQ ID NO: 1562587
agaaaucuguuguucccau

SEQ ID NO: 1758058 - RNA, 19 nt, Artificial Sequence
  Description of Artificial Sequence: Synthetic oligonucleotide
  Antisense strand to SEQ ID NO: 1758057
augggaacaacagauuucu

SEQ ID NO: 1758059 - RNA, 19 nt, Artificial Sequence
  Description of Artificial Sequence: Synthetic oligonucleotide
  Sense strand starting at position 1723 of SEQ ID NO: 1562587
gcugaaugauccuucccuu

SEQ ID NO: 1758060 - RNA, 19 nt, Artificial Sequence
  Description of Artificial Sequence: Synthetic oligonucleotide
  Antisense strand to SEQ ID NO: 1758059
aagggaaggaucauucagc

SEQ ID NO: 1758061 - RNA, 19 nt, Artificial Sequence
  Description of Artificial Sequence: Synthetic oligonucleotide
  Sense strand starting at position 1866 of SEQ ID NO: 1562587
agcugugcaucuguguaau

SEQ ID NO: 1758062 - RNA, 19 nt, Artificial Sequence
  Description of Artificial Sequence: Synthetic oligonucleotide
  Antisense strand to SEQ ID NO: 1758061
auuacacagaugcacagcu

SEQ ID NO: 1758063 - RNA, 19 nt, Artificial Sequence
  Description of Artificial Sequence: Synthetic oligonucleotide
  Sense strand starting at position 1868 of SEQ ID NO: 1562587
cugugcaucuguguaauaa

SEQ ID NO: 1758064 - RNA, 19 nt, Artificial Sequence
  Description of Artificial Sequence: Synthetic oligonucleotide
  Antisense strand to SEQ ID NO: 1758063
uuauuacacagaugcacag

SEQ ID NO: 1758065 - RNA, 19 nt, Artificial Sequence
  Description of Artificial Sequence: Synthetic oligonucleotide
  Sense strand starting at position 1869 of SEQ ID NO: 1562587
ugugcaucuguguaauaac

SEQ ID NO: 1758066 - RNA, 19 nt, Artificial Sequence
  Description of Artificial Sequence: Synthetic oligonucleotide
  Antisense strand to SEQ ID NO: 1758065
guuauuacacagaugcaca

SEQ ID NO: 1758067 - RNA, 19 nt, Artificial Sequence
  Description of Artificial Sequence: Synthetic oligonucleotide
  Sense strand starting at position 1878 of SEQ ID NO: 1562587
guguaauaaccagacacgu

SEQ ID NO: 1758068 - RNA, 19 nt, Artificial Sequence
  Description of Artificial Sequence: Synthetic oligonucleotide
  Antisense strand to SEQ ID NO: 1758067
acgugucugguuauuacac

SEQ ID NO: 1758069 - RNA, 19 nt, Artificial Sequence
  Description of Artificial Sequence: Synthetic oligonucleotide
  Sense strand starting at position 1908 of SEQ ID NO: 1562587
ccagauauacccuggaauu

SEQ ID NO: 1758070 - RNA, 19 nt, Artificial Sequence
  Description of Artificial Sequence: Synthetic oligonucleotide
  Antisense strand to SEQ ID NO: 1758069
aauuccaggguauaucugg

SEQ ID NO: 1758071 - RNA, 19 nt, Artificial Sequence
  Description of Artificial Sequence: Synthetic oligonucleotide
  Sense strand starting at position 2091 of SEQ ID NO: 1562587
gccucacauccucaggauu

SEQ ID NO: 1758072 - RNA, 19 nt, Artificial Sequence
  Description of Artificial Sequence: Synthetic oligonucleotide
  Antisense strand to SEQ ID NO: 1758071
aauccugaggaugugaggc

SEQ ID NO: 1758073 - RNA, 19 nt, Artificial Sequence
  Description of Artificial Sequence: Synthetic oligonucleotide
  Sense strand starting at position 2262 of SEQ ID NO: 1562587
acucaagccucagugcaau

SEQ ID NO: 1758074 - RNA, 19 nt, Artificial Sequence
  Description of Artificial Sequence: Synthetic oligonucleotide
  Antisense strand to SEQ ID NO: 1758073
auugcacugaggcuugagu

SEQ ID NO: 1758075 - RNA, 19 nt, Artificial Sequence
  Description of Artificial Sequence: Synthetic oligonucleotide
  Sense strand starting at position 2329 of SEQ ID NO: 1562587
ccuuucugagcucaagaaa

SEQ ID NO: 1758076 - RNA, 19 nt, Artificial Sequence
  Description of Artificial Sequence: Synthetic oligonucleotide
  Antisense strand to SEQ ID NO: 1758075
uuucuugagcucagaaagg

SEQ ID NO: 1758077 - RNA, 19 nt, Artificial Sequence
  Description of Artificial Sequence: Synthetic oligonucleotide
  Sense strand starting at position 2476 of SEQ ID NO: 1562587
gguggaugcuuauugcaua

SEQ ID NO: 1758078 - RNA, 19 nt, Artificial Sequence
  Description of Artificial Sequence: Synthetic oligonucleotide
  Antisense strand to SEQ ID NO: 1758077
uaugcaauaagcauccacc

SEQ ID NO: 1758079 - RNA, 19 nt, Artificial Sequence
  Description of Artificial Sequence: Synthetic oligonucleotide
  Sense strand starting at position 2490 of SEQ ID NO: 1562587
gcauauuuauuguaaugcu

SEQ ID NO: 1758080 - RNA, 19 nt, Artificial Sequence
  Description of Artificial Sequence: Synthetic oligonucleotide
  Antisense strand to SEQ ID NO: 1758079
agcauuacaauaaauaugc

SEQ ID NO: 1758081 - RNA, 19 nt, Artificial Sequence
  Description of Artificial Sequence: Synthetic oligonucleotide
  Sense strand starting at position 2540 of SEQ ID NO: 1562587
uauagagucuugcucugua

SEQ ID NO: 1758082 - RNA, 19 nt, Artificial Sequence
  Description of Artificial Sequence: Synthetic oligonucleotide
  Antisense strand to SEQ ID NO: 1758081
uacagagcaagacucuaua

SEQ ID NO: 1758083 - RNA, 19 nt, Artificial Sequence
  Description of Artificial Sequence: Synthetic oligonucleotide
  Sense strand starting at position 2910 of SEQ ID NO: 1562587
ucagaauaaugguguccaa

SEQ ID NO: 1758084 - RNA, 19 nt, Artificial Sequence
  Description of Artificial Sequence: Synthetic oligonucleotide
  Antisense strand to SEQ ID NO: 1758083
uuggacaccauuauucuga

SEQ ID NO: 1758085 - RNA, 19 nt, Artificial Sequence
  Description of Artificial Sequence: Synthetic oligonucleotide
  Sense strand starting at position 2913 of SEQ ID NO: 1562587
gaauaaugguguccaacuu

SEQ ID NO: 1758086 - RNA, 19 nt, Artificial Sequence
  Description of Artificial Sequence: Synthetic oligonucleotide
  Antisense strand to SEQ ID NO: 1758085
aaguuggacaccauuauuc

SEQ ID NO: 1758087 - RNA, 19 nt, Artificial Sequence
  Description of Artificial Sequence: Synthetic oligonucleotide
  Sense strand starting at position 2932 of SEQ ID NO: 1562587
cauccagauuguuacggau

SEQ ID NO: 1758088 - RNA, 19 nt, Artificial Sequence
  Description of Artificial Sequence: Synthetic oligonucleotide
  Antisense strand to SEQ ID NO: 1758087
auccguaacaaucuggaug

SEQ ID NO: 1758089 - RNA, 19 nt, Artificial Sequence
  Description of Artificial Sequence: Synthetic oligonucleotide
  Sense strand starting at position 2938 of SEQ ID NO: 1562587
gauuguuacggaugccauu

SEQ ID NO: 1758090 - RNA, 19 nt, Artificial Sequence
  Description of Artificial Sequence: Synthetic oligonucleotide
  Antisense strand to SEQ ID NO: 1758089
aauggcauccguaacaauc

SEQ ID NO: 1758091 - RNA, 19 nt, Artificial Sequence
  Description of Artificial Sequence: Synthetic oligonucleotide
  Sense strand starting at position 3059 of SEQ ID NO: 1562587
uccacuuguuggcugauga

SEQ ID NO: 1758092 - RNA, 19 nt, Artificial Sequence
  Description of Artificial Sequence: Synthetic oligonucleotide
  Antisense strand to SEQ ID NO: 1758091
ucaucagccaacaagugga

SEQ ID NO: 1758093 - RNA, 19 nt, Artificial Sequence
  Description of Artificial Sequence: Synthetic oligonucleotide
  Sense strand starting at position 3164 of SEQ ID NO: 1562587
uuucuccucuggguagaua

SEQ ID NO: 1758094 - RNA, 19 nt, Artificial Sequence
  Description of Artificial Sequence: Synthetic oligonucleotide
  Antisense strand to SEQ ID NO: 1758093
uaucuacccagaggagaaa

SEQ ID NO: 1758095 - RNA, 19 nt, Artificial Sequence
  Description of Artificial Sequence: Synthetic oligonucleotide
  Sense strand starting at position 3461 of SEQ ID NO: 1562587
ggaguaagguggcaacuua

SEQ ID NO: 1758096 - RNA, 19 nt, Artificial Sequence
  Description of Artificial Sequence: Synthetic oligonucleotide
  Antisense strand to SEQ ID NO: 1758095
uaaguugccaccuuacucc

SEQ ID NO: 1758097 - RNA, 19 nt, Artificial Sequence
  Description of Artificial Sequence: Synthetic oligonucleotide
  Sense strand starting at position 3639 of SEQ ID NO: 1562587
uugaguuccuuguagaaac

SEQ ID NO: 1758098 - RNA, 19 nt, Artificial Sequence
  Description of Artificial Sequence: Synthetic oligonucleotide
  Antisense strand to SEQ ID NO: 1758097
guuucuacaaggaacucaa

SEQ ID NO: 1758099 - RNA, 19 nt, Artificial Sequence
  Description of Artificial Sequence: Synthetic oligonucleotide
  Sense strand starting at position 3707 of SEQ ID NO: 1562587
cuuugaggguugucuguuu

SEQ ID NO: 1758100 - RNA, 19 nt, Artificial Sequence
  Description of Artificial Sequence: Synthetic oligonucleotide
  Antisense strand to SEQ ID NO: 1758099
aaacagacaacccucaaag

SEQ ID NO: 1758101 - RNA, 19 nt, Artificial Sequence
  Description of Artificial Sequence: Synthetic oligonucleotide
  Sense strand starting at position 3818 of SEQ ID NO: 1562587
guucuugguccugaauucu

SEQ ID NO: 1758102 - RNA, 19 nt, Artificial Sequence
  Description of Artificial Sequence: Synthetic oligonucleotide
  Antisense strand to SEQ ID NO: 1758101
agaauucaggaccaagaac

SEQ ID NO: 1758103 - RNA, 19 nt, Artificial Sequence
  Description of Artificial Sequence: Synthetic oligonucleotide
  Sense strand starting at position 3844 of SEQ ID NO: 1562587
agccaaugucuggaggagu

SEQ ID NO: 1758104 - RNA, 19 nt, Artificial Sequence
  Description of Artificial Sequence: Synthetic oligonucleotide
  Antisense strand to SEQ ID NO: 1758103
acuccuccagacauuggcu

SEQ ID NO: 1758105 - RNA, 19 nt, Artificial Sequence
  Description of Artificial Sequence: Synthetic oligonucleotide
  Sense strand starting at position 17 of SEQ ID NO: 1562588
agucaccuguccucagaga

SEQ ID NO: 1758106 - RNA, 19 nt, Artificial Sequence
  Description of Artificial Sequence: Synthetic oligonucleotide
  Antisense strand to SEQ ID NO: 1758105
ucucugaggacaggugacu

SEQ ID NO: 1758107 - RNA, 19 nt, Artificial Sequence
  Description of Artificial Sequence: Synthetic oligonucleotide
  Sense strand starting at position 110 of SEQ ID NO: 1562588
gggagcucuaccuguaugu

SEQ ID NO: 1758108 - RNA, 19 nt, Artificial Sequence
  Description of Artificial Sequence: Synthetic oligonucleotide
  Antisense strand to SEQ ID NO: 1758107
acauacagguagagcuccc

SEQ ID NO: 1758109 - RNA, 19 nt, Artificial Sequence
  Description of Artificial Sequence: Synthetic oligonucleotide
  Sense strand starting at position 267 of SEQ ID NO: 1562588
ggaggcauuacuugaacua

SEQ ID NO: 1758110 - RNA, 19 nt, Artificial Sequence
  Description of Artificial Sequence: Synthetic oligonucleotide
  Antisense strand to SEQ ID NO: 1758109
uaguucaaguaaugccucc

SEQ ID NO: 1758111 - RNA, 19 nt, Artificial Sequence
  Description of Artificial Sequence: Synthetic oligonucleotide
  Sense strand starting at position 564 of SEQ ID NO: 1562588
uugugacucugauauugaa

SEQ ID NO: 1758112 - RNA, 19 nt, Artificial Sequence
  Description of Artificial Sequence: Synthetic oligonucleotide
  Antisense strand to SEQ ID NO: 1758111
uucaauaucagagucacaa

SEQ ID NO: 1758113 - RNA, 19 nt, Artificial Sequence
  Description of Artificial Sequence: Synthetic oligonucleotide
  Sense strand starting at position 656 of SEQ ID NO: 1562588
cucucacuccuguaguuau

SEQ ID NO: 1758114 - RNA, 19 nt, Artificial Sequence
  Description of Artificial Sequence: Synthetic oligonucleotide
  Antisense strand to SEQ ID NO: 1758113
auaacuacaggagugagag

SEQ ID NO: 1758115 - RNA, 19 nt, Artificial Sequence
  Description of Artificial Sequence: Synthetic oligonucleotide
  Sense strand starting at position 698 of SEQ ID NO: 1562588
uuugaaucucaugauugca

SEQ ID NO: 1758116 - RNA, 19 nt, Artificial Sequence
  Description of Artificial Sequence: Synthetic oligonucleotide
  Antisense strand to SEQ ID NO: 1758115
ugcaaucaugagauucaaa

SEQ ID NO: 1758117 - RNA, 19 nt, Artificial Sequence
  Description of Artificial Sequence: Synthetic oligonucleotide
  Sense strand starting at position 700 of SEQ ID NO: 1562588
ugaaucucaugauugcaaa

SEQ ID NO: 1758118 - RNA, 19 nt, Artificial Sequence
  Description of Artificial Sequence: Synthetic oligonucleotide
  Antisense strand to SEQ ID NO: 1758117
uuugcaaucaugagauuca

SEQ ID NO: 1758119 - RNA, 19 nt, Artificial Sequence
  Description of Artificial Sequence: Synthetic oligonucleotide
  Sense strand starting at position 774 of SEQ ID NO: 1562588
ucagccauguuucccauua

SEQ ID NO: 1758120 - RNA, 19 nt, Artificial Sequence
  Description of Artificial Sequence: Synthetic oligonucleotide
  Antisense strand to SEQ ID NO: 1758119
uaaugggaaacauggcuga

SEQ ID NO: 1758121 - RNA, 19 nt, Artificial Sequence
  Description of Artificial Sequence: Synthetic oligonucleotide
  Sense strand starting at position 806 of SEQ ID NO: 1562588
gccuguuucuucucuauca

SEQ ID NO: 1758122 - RNA, 19 nt, Artificial Sequence
  Description of Artificial Sequence: Synthetic oligonucleotide
  Antisense strand to SEQ ID NO: 1758121
ugauagagaagaaacaggc

SEQ ID NO: 1758123 - RNA, 19 nt, Artificial Sequence
  Description of Artificial Sequence: Synthetic oligonucleotide
  Sense strand starting at position 867 of SEQ ID NO: 1562588
cgugaaguccuaugaucug

SEQ ID NO: 1758124 - RNA, 19 nt, Artificial Sequence
  Description of Artificial Sequence: Synthetic oligonucleotide
  Antisense strand to SEQ ID NO: 1758123
cagaucauaggacuucacg

SEQ ID NO: 1758125 - RNA, 19 nt, Artificial Sequence
  Description of Artificial Sequence: Synthetic oligonucleotide
  Sense strand starting at position 999 of SEQ ID NO: 1562588
cucugaguuccuugugucu

SEQ ID NO: 1758126 - RNA, 19 nt, Artificial Sequence
  Description of Artificial Sequence: Synthetic oligonucleotide
  Antisense strand to SEQ ID NO: 1758125
agacacaaggaacucagag

SEQ ID NO: 1758127 - RNA, 19 nt, Artificial Sequence
  Description of Artificial Sequence: Synthetic oligonucleotide
  Sense strand starting at position 1002 of SEQ ID NO: 1562588
ugaguuccuugugucucaa

SEQ ID NO: 1758128 - RNA, 19 nt, Artificial Sequence
  Description of Artificial Sequence: Synthetic oligonucleotide
  Antisense strand to SEQ ID NO: 1758127
uugagacacaaggaacuca

SEQ ID NO: 1758129 - RNA, 19 nt, Artificial Sequence
  Description of Artificial Sequence: Synthetic oligonucleotide
  Sense strand starting at position 1022 of SEQ ID NO: 1562588
agaaaucuguuguucccau

SEQ ID NO: 1758130 - RNA, 19 nt, Artificial Sequence
  Description of Artificial Sequence: Synthetic oligonucleotide
  Antisense strand to SEQ ID NO: 1758129
augggaacaacagauuucu

SEQ ID NO: 1758131 - RNA, 19 nt, Artificial Sequence
  Description of Artificial Sequence: Synthetic oligonucleotide
  Sense strand starting at position 1412 of SEQ ID NO: 1562588
gcugaaugauccuucccuu

SEQ ID NO: 1758132 - RNA, 19 nt, Artificial Sequence
  Description of Artificial Sequence: Synthetic oligonucleotide
  Antisense strand to SEQ ID NO: 1758131
aagggaaggaucauucagc

SEQ ID NO: 1758133 - RNA, 19 nt, Artificial Sequence
  Description of Artificial Sequence: Synthetic oligonucleotide
  Sense strand starting at position 1555 of SEQ ID NO: 1562588
agcugugcaucuguguaau

SEQ ID NO: 1758134 - RNA, 19 nt, Artificial Sequence
  Description of Artificial Sequence: Synthetic oligonucleotide
  Antisense strand to SEQ ID NO: 1758133
auuacacagaugcacagcu

SEQ ID NO: 1758135 - RNA, 19 nt, Artificial Sequence
  Description of Artificial Sequence: Synthetic oligonucleotide
  Sense strand starting at position 1557 of SEQ ID NO: 1562588
cugugcaucuguguaauaa

SEQ ID NO: 1758136 - RNA, 19 nt, Artificial Sequence
  Description of Artificial Sequence: Synthetic oligonucleotide
  Antisense strand to SEQ ID NO: 1758135
uuauuacacagaugcacag

SEQ ID NO: 1758137 - RNA, 19 nt, Artificial Sequence
  Description of Artificial Sequence: Synthetic oligonucleotide
  Sense strand starting at position 1558 of SEQ ID NO: 1562588
ugugcaucuguguaauaac

SEQ ID NO: 1758138 - RNA, 19 nt, Artificial Sequence
  Description of Artificial Sequence: Synthetic oligonucleotide
  Antisense strand to SEQ ID NO: 1758137
guuauuacacagaugcaca

SEQ ID NO: 1758139 - RNA, 19 nt, Artificial Sequence
  Description of Artificial Sequence: Synthetic oligonucleotide
  Sense strand starting at position 1567 of SEQ ID NO: 1562588
guguaauaaccagacacgu

SEQ ID NO: 1758140 - RNA, 19 nt, Artificial Sequence
  Description of Artificial Sequence: Synthetic oligonucleotide
  Antisense strand to SEQ ID NO: 1758139
acgugucugguuauuacac

SEQ ID NO: 1758141 - RNA, 19 nt, Artificial Sequence
  Description of Artificial Sequence: Synthetic oligonucleotide
  Sense strand starting at position 1597 of SEQ ID NO: 1562588
ccagauauacccuggaauu

SEQ ID NO: 1758142 - RNA, 19 nt, Artificial Sequence
  Description of Artificial Sequence: Synthetic oligonucleotide
  Antisense strand to SEQ ID NO: 1758141
aauuccaggguauaucugg

SEQ ID NO: 1758143 - RNA, 19 nt, Artificial Sequence
  Description of Artificial Sequence: Synthetic oligonucleotide
  Sense strand starting at position 1780 of SEQ ID NO: 1562588
gccucacauccucaggauu

SEQ ID NO: 1758144 - RNA, 19 nt, Artificial Sequence
  Description of Artificial Sequence: Synthetic oligonucleotide
  Antisense strand to SEQ ID NO: 1758143
aauccugaggaugugaggc

SEQ ID NO: 1758145 - RNA, 19 nt, Artificial Sequence
  Description of Artificial Sequence: Synthetic oligonucleotide
  Sense strand starting at position 1951 of SEQ ID NO: 1562588
acucaagccucagugcaau

SEQ ID NO: 1758146 - RNA, 19 nt, Artificial Sequence
  Description of Artificial Sequence: Synthetic oligonucleotide
  Antisense strand to SEQ ID NO: 1758145
auugcacugaggcuugagu

SEQ ID NO: 1758147 - RNA, 19 nt, Artificial Sequence
  Description of Artificial Sequence: Synthetic oligonucleotide
  Sense strand starting at position 2018 of SEQ ID NO: 1562588
ccuuucugagcucaagaaa

SEQ ID NO: 1758148 - RNA, 19 nt, Artificial Sequence
  Description of Artificial Sequence: Synthetic oligonucleotide
  Antisense strand to SEQ ID NO: 1758147
uuucuugagcucagaaagg

SEQ ID NO: 1758149 - RNA, 19 nt, Artificial Sequence
  Description of Artificial Sequence: Synthetic oligonucleotide
  Sense strand starting at position 2165 of SEQ ID NO: 1562588
gguggaugcuuauugcaua

SEQ ID NO: 1758150 - RNA, 19 nt, Artificial Sequence
  Description of Artificial Sequence: Synthetic oligonucleotide
  Antisense strand to SEQ ID NO: 1758149
uaugcaauaagcauccacc

SEQ ID NO: 1758151 - RNA, 19 nt, Artificial Sequence
  Description of Artificial Sequence: Synthetic oligonucleotide
  Sense strand starting at position 2179 of SEQ ID NO: 1562588
gcauauuuauuguaaugcu

SEQ ID NO: 1758152 - RNA, 19 nt, Artificial Sequence
  Description of Artificial Sequence: Synthetic oligonucleotide
  Antisense strand to SEQ ID NO: 1758151
agcauuacaauaaauaugc

SEQ ID NO: 1758153 - RNA, 19 nt, Artificial Sequence
  Description of Artificial Sequence: Synthetic oligonucleotide
  Sense strand starting at position 2229 of SEQ ID NO: 1562588
uauagagucuugcucugua

SEQ ID NO: 1758154 - RNA, 19 nt, Artificial Sequence
  Description of Artificial Sequence: Synthetic oligonucleotide
  Antisense strand to SEQ ID NO: 1758153
uacagagcaagacucuaua

SEQ ID NO: 1758155 - RNA, 19 nt, Artificial Sequence
  Description of Artificial Sequence: Synthetic oligonucleotide
  Sense strand starting at position 2602 of SEQ ID NO: 1562588
gaauaaugguguccaacuu

SEQ ID NO: 1758156 - RNA, 19 nt, Artificial Sequence
  Description of Artificial Sequence: Synthetic oligonucleotide
  Antisense strand to SEQ ID NO: 1758155
aaguuggacaccauuauuc

SEQ ID NO: 1758157 - RNA, 19 nt, Artificial Sequence
  Description of Artificial Sequence: Synthetic oligonucleotide
  Sense strand starting at position 2627 of SEQ ID NO: 1562588
gauuguuacggaugccauu

SEQ ID NO: 1758158 - RNA, 19 nt, Artificial Sequence
  Description of Artificial Sequence: Synthetic oligonucleotide
  Antisense strand to SEQ ID NO: 1758157
aauggcauccguaacaauc

SEQ ID NO: 1758159 - RNA, 19 nt, Artificial Sequence
  Description of Artificial Sequence: Synthetic oligonucleotide
  Sense strand starting at position 2748 of SEQ ID NO: 1562588
uccacuuguuggcugauga

SEQ ID NO: 1758160 - RNA, 19 nt, Artificial Sequence
  Description of Artificial Sequence: Synthetic oligonucleotide
  Antisense strand to SEQ ID NO: 1758159
ucaucagccaacaagugga

SEQ ID NO: 1758161 - RNA, 19 nt, Artificial Sequence
  Description of Artificial Sequence: Synthetic oligonucleotide
  Sense strand starting at position 2853 of SEQ ID NO: 1562588
uuucuccucuggguagaua

SEQ ID NO: 1758162 - RNA, 19 nt, Artificial Sequence
  Description of Artificial Sequence: Synthetic oligonucleotide
  Antisense strand to SEQ ID NO: 1758161
uaucuacccagaggagaaa

SEQ ID NO: 1758163 - RNA, 19 nt, Artificial Sequence
  Description of Artificial Sequence: Synthetic oligonucleotide
  Sense strand starting at position 3150 of SEQ ID NO: 1562588
ggaguaagguggcaacuua

SEQ ID NO: 1758164 - RNA, 19 nt, Artificial Sequence
  Description of Artificial Sequence: Synthetic oligonucleotide
  Antisense strand to SEQ ID NO: 1758163
uaaguugccaccuuacucc

SEQ ID NO: 1758165 - RNA, 19 nt, Artificial Sequence
  Description of Artificial Sequence: Synthetic oligonucleotide
  Sense strand starting at position 3328 of SEQ ID NO: 1562588
uugaguuccuuguagaaac

SEQ ID NO: 1758166 - RNA, 19 nt, Artificial Sequence
  Description of Artificial Sequence: Synthetic oligonucleotide
  Antisense strand to SEQ ID NO: 1758165
guuucuacaaggaacucaa

SEQ ID NO: 1758167 - RNA, 19 nt, Artificial Sequence
  Description of Artificial Sequence: Synthetic oligonucleotide
  Sense strand starting at position 3396 of SEQ ID NO: 1562588
cuuugaggguugucuguuu

SEQ ID NO: 1758168 - RNA, 19 nt, Artificial Sequence
  Description of Artificial Sequence: Synthetic oligonucleotide
  Antisense strand to SEQ ID NO: 1758167
aaacagacaacccucaaag

SEQ ID NO: 1758169 - RNA, 19 nt, Artificial Sequence
  Description of Artificial Sequence: Synthetic oligonucleotide
  Sense strand starting at position 3507 of SEQ ID NO: 1562588
guucuugguccugaauucu

SEQ ID NO: 1758170 - RNA, 19 nt, Artificial Sequence
  Description of Artificial Sequence: Synthetic oligonucleotide
  Antisense strand to SEQ ID NO: 1758169
agaauucaggaccaagaac

SEQ ID NO: 1758171 - RNA, 19 nt, Artificial Sequence
  Description of Artificial Sequence: Synthetic oligonucleotide
  Sense strand starting at position 3533 of SEQ ID NO: 1562588
agccaaugucuggaggagu

SEQ ID NO: 1758172 - RNA, 19 nt, Artificial Sequence
  Description of Artificial Sequence: Synthetic oligonucleotide
  Antisense strand to SEQ ID NO: 1758171
acuccuccagacauuggcu

SEQ ID NO: 1758173 - RNA, 19 nt, Artificial Sequence
  Description of Artificial Sequence: Synthetic oligonucleotide
  Sense strand starting at position 3700 of SEQ ID NO: 1562588
guguccuuuccgcacuaua

SEQ ID NO: 1758174 - RNA, 19 nt, Artificial Sequence
  Description of Artificial Sequence: Synthetic oligonucleotide
  Antisense strand to SEQ ID NO: 1758173
uauagugcggaaaggacac

SEQ ID NO: 1758175 - RNA, 19 nt, Artificial Sequence
  Description of Artificial Sequence: Synthetic oligonucleotide
  Sense strand starting at position 3738 of SEQ ID NO: 1562588
aaagacuaguuagcugaaa

SEQ ID NO: 1758176 - RNA, 19 nt, Artificial Sequence
  Description of Artificial Sequence: Synthetic oligonucleotide
  Antisense strand to SEQ ID NO: 1758175
uuucagcuaacuagucuuu

SEQ ID NO: 1758177 - RNA, 19 nt, Artificial Sequence
  Description of Artificial Sequence: Synthetic oligonucleotide
  Sense strand starting at position 3740 of SEQ ID NO: 1562588
agacuaguuagcugaaagu

SEQ ID NO: 1758178 - RNA, 19 nt, Artificial Sequence
  Description of Artificial Sequence: Synthetic oligonucleotide
  Antisense strand to SEQ ID NO: 1758177
acuuucagcuaacuagucu

SEQ ID NO: 1758179 - RNA, 19 nt, Artificial Sequence
  Description of Artificial Sequence: Synthetic oligonucleotide
  Sense strand starting at position 3749 of SEQ ID NO: 1562588
agcugaaaguauuuggcuu

SEQ ID NO: 1758180 - RNA, 19 nt, Artificial Sequence
  Description of Artificial Sequence: Synthetic oligonucleotide
  Antisense strand to SEQ ID NO: 1758179
aagccaaauacuuucagcu

SEQ ID NO: 1758181 - RNA, 19 nt, Artificial Sequence
  Description of Artificial Sequence: Synthetic oligonucleotide
  Sense strand starting at position 3794 of SEQ ID NO: 1562588
cuugaucuaugugccuauu

SEQ ID NO: 1758182 - RNA, 19 nt, Artificial Sequence
  Description of Artificial Sequence: Synthetic oligonucleotide
  Antisense strand to SEQ ID NO: 1758181
aauaggcacauagaucaag

SEQ ID NO: 1758183 - RNA, 19 nt, Artificial Sequence
  Description of Artificial Sequence: Synthetic oligonucleotide
  Sense strand starting at position 3820 of SEQ ID NO: 1562588
cgguaccauucugccauua

SEQ ID NO: 1758184 - RNA, 19 nt, Artificial Sequence
  Description of Artificial Sequence: Synthetic oligonucleotide
  Antisense strand to SEQ ID NO: 1758183
uaauggcagaaugguaccg

SEQ ID NO: 1758185 - RNA, 19 nt, Artificial Sequence
  Description of Artificial Sequence: Synthetic oligonucleotide
  Sense strand starting at position 15 of SEQ ID NO: 1562589
cugaauagcaggugugagu

SEQ ID NO: 1758186 - RNA, 19 nt, Artificial Sequence
  Description of Artificial Sequence: Synthetic oligonucleotide
  Antisense strand to SEQ ID NO: 1758185
acucacaccugcuauucag

SEQ ID NO: 1758187 - RNA, 19 nt, Artificial Sequence
  Description of Artificial Sequence: Synthetic oligonucleotide
  Sense strand starting at position 128 of SEQ ID NO: 1562589
guaauugcaccugaguuua

SEQ ID NO: 1758188 - RNA, 19 nt, Artificial Sequence
  Description of Artificial Sequence: Synthetic oligonucleotide
  Antisense strand to SEQ ID NO: 1758187
uaaacucaggugcaauuac

SEQ ID NO: 1758189 - RNA, 19 nt, Artificial Sequence
  Description of Artificial Sequence: Synthetic oligonucleotide
  Sense strand starting at position 486 of SEQ ID NO: 1562589
ugacucugacauugaagca

SEQ ID NO: 1758190 - RNA, 19 nt, Artificial Sequence
  Description of Artificial Sequence: Synthetic oligonucleotide
  Antisense strand to SEQ ID NO: 1758189
ugcuucaaugucagaguca

SEQ ID NO: 1758191 - RNA, 19 nt, Artificial Sequence
  Description of Artificial Sequence: Synthetic oligonucleotide
  Sense strand starting at position 585 of SEQ ID NO: 1562589
cacaguuaugcucacgcuu

SEQ ID NO: 1758192 - RNA, 19 nt, Artificial Sequence
  Description of Artificial Sequence: Synthetic oligonucleotide
  Antisense strand to SEQ ID NO: 1758191
aagcgugagcauaacugug

SEQ ID NO: 1758193 - RNA, 19 nt, Artificial Sequence
  Description of Artificial Sequence: Synthetic oligonucleotide
  Sense strand starting at position 621 of SEQ ID NO: 1562589
aucucaugauugucaagcu

SEQ ID NO: 1758194 - RNA, 19 nt, Artificial Sequence
  Description of Artificial Sequence: Synthetic oligonucleotide
  Antisense strand to SEQ ID NO: 1758193
agcuugacaaucaugagau

SEQ ID NO: 1758195 - RNA, 19 nt, Artificial Sequence
  Description of Artificial Sequence: Synthetic oligonucleotide
  Sense strand starting at position 781 of SEQ ID NO: 1562589
cauggaguccugugaucua

SEQ ID NO: 1758196 - RNA, 19 nt, Artificial Sequence
  Description of Artificial Sequence: Synthetic oligonucleotide
  Antisense strand to SEQ ID NO: 1758195
uagaucacaggacuccaug

SEQ ID NO: 1758197 - RNA, 19 nt, Artificial Sequence
  Description of Artificial Sequence: Synthetic oligonucleotide
  Sense strand starting at position 830 of SEQ ID NO: 1562589
gcgagucacucaucuccca

SEQ ID NO: 1758198 - RNA, 19 nt, Artificial Sequence
  Description of Artificial Sequence: Synthetic oligonucleotide
  Antisense strand to SEQ ID NO: 1758197
ugggagaugagugacucgc

SEQ ID NO: 1758199 - RNA, 19 nt, Artificial Sequence
  Description of Artificial Sequence: Synthetic oligonucleotide
  Sense strand starting at position 843 of SEQ ID NO: 1562589
cucccauggccucaguuua

SEQ ID NO: 1758200 - RNA, 19 nt, Artificial Sequence
  Description of Artificial Sequence: Synthetic oligonucleotide
  Antisense strand to SEQ ID NO: 1758199
uaaacugaggccaugggag

SEQ ID NO: 1758201 - RNA, 19 nt, Artificial Sequence
  Description of Artificial Sequence: Synthetic oligonucleotide
  Sense strand starting at position 877 of SEQ ID NO: 1562589
ucaaguaggugcucagagu

SEQ ID NO: 1758202 - RNA, 19 nt, Artificial Sequence
  Description of Artificial Sequence: Synthetic oligonucleotide
  Antisense strand to SEQ ID NO: 1758201
acucugagcaccuacuuga

SEQ ID NO: 1758203 - RNA, 19 nt, Artificial Sequence
  Description of Artificial Sequence: Synthetic oligonucleotide
  Sense strand starting at position 1753 of SEQ ID NO: 1562589
cuugaaagagugugagcaa

SEQ ID NO: 1758204 - RNA, 19 nt, Artificial Sequence
  Description of Artificial Sequence: Synthetic oligonucleotide
  Antisense strand to SEQ ID NO: 1758203
uugcucacacucuuucaag

SEQ ID NO: 1758205 - RNA, 19 nt, Artificial Sequence
  Description of Artificial Sequence: Synthetic oligonucleotide
  Sense strand starting at position 1756 of SEQ ID NO: 1562589
gaaagagugugagcaagau

SEQ ID NO: 1758206 - RNA, 19 nt, Artificial Sequence
  Description of Artificial Sequence: Synthetic oligonucleotide
  Antisense strand to SEQ ID NO: 1758205
aucuugcucacacucuuuc

SEQ ID NO: 1758207 - RNA, 19 nt, Artificial Sequence
  Description of Artificial Sequence: Synthetic oligonucleotide
  Sense strand starting at position 1811 of SEQ ID NO: 1562589
cgugcaucugcauaauaac

SEQ ID NO: 1758208 - RNA, 19 nt, Artificial Sequence
  Description of Artificial Sequence: Synthetic oligonucleotide
  Antisense strand to SEQ ID NO: 1758207
guuauuaugcagaugcacg

SEQ ID NO: 1758209 - RNA, 19 nt, Artificial Sequence
  Description of Artificial Sequence: Synthetic oligonucleotide
  Sense strand starting at position 1820 of SEQ ID NO: 1562589
gcauaauaaccagacacgu

SEQ ID NO: 1758210 - RNA, 19 nt, Artificial Sequence
  Description of Artificial Sequence: Synthetic oligonucleotide
  Antisense strand to SEQ ID NO: 1758209
acgugucugguuauuaugc

SEQ ID NO: 1758211 - RNA, 19 nt, Artificial Sequence
  Description of Artificial Sequence: Synthetic oligonucleotide
  Sense strand starting at position 1838 of SEQ ID NO: 1562589
uucuccaggcucugagaua

SEQ ID NO: 1758212 - RNA, 19 nt, Artificial Sequence
  Description of Artificial Sequence: Synthetic oligonucleotide
  Antisense strand to SEQ ID NO: 1758211
uaucucagagccuggagaa

SEQ ID NO: 1758213 - RNA, 19 nt, Artificial Sequence
  Description of Artificial Sequence: Synthetic oligonucleotide
  Sense strand starting at position 1897 of SEQ ID NO: 1562589
gcagcagcuccugaucaaa

SEQ ID NO: 1758214 - RNA, 19 nt, Artificial Sequence
  Description of Artificial Sequence: Synthetic oligonucleotide
  Antisense strand to SEQ ID NO: 1758213
uuugaucaggagcugcugc

SEQ ID NO: 1758215 - RNA, 19 nt, Artificial Sequence
  Description of Artificial Sequence: Synthetic oligonucleotide
  Sense strand starting at position 1899 of SEQ ID NO: 1562589
agcagcuccugaucaaaca

SEQ ID NO: 1758216 - RNA, 19 nt, Artificial Sequence
  Description of Artificial Sequence: Synthetic oligonucleotide
  Antisense strand to SEQ ID NO: 1758215
uguuugaucaggagcugcu

SEQ ID NO: 1758217 - RNA, 19 nt, Artificial Sequence
  Description of Artificial Sequence: Synthetic oligonucleotide
  Sense strand starting at position 1900 of SEQ ID NO: 1562589
gcagcuccugaucaaacau

SEQ ID NO: 1758218 - RNA, 19 nt, Artificial Sequence
  Description of Artificial Sequence: Synthetic oligonucleotide
  Antisense strand to SEQ ID NO: 1758217
auguuugaucaggagcugc

SEQ ID NO: 1758219 - RNA, 19 nt, Artificial Sequence
  Description of Artificial Sequence: Synthetic oligonucleotide
  Sense strand starting at position 2222 of SEQ ID NO: 1562589
acgcuuauugcauauugau

SEQ ID NO: 1758220 - RNA, 19 nt, Artificial Sequence
  Description of Artificial Sequence: Synthetic oligonucleotide
  Antisense strand to SEQ ID NO: 1758219
aucaauaugcaauaagcgu

SEQ ID NO: 1758221 - RNA, 19 nt, Artificial Sequence
  Description of Artificial Sequence: Synthetic oligonucleotide
  Sense strand starting at position 2582 of SEQ ID NO: 1562589
guggguucuucugccagga

SEQ ID NO: 1758222 - RNA, 19 nt, Artificial Sequence
  Description of Artificial Sequence: Synthetic oligonucleotide
  Antisense strand to SEQ ID NO: 1758221
uccuggcagaagaacccac

SEQ ID NO: 1758223 - RNA, 19 nt, Artificial Sequence
  Description of Artificial Sequence: Synthetic oligonucleotide
  Sense strand starting at position 2743 of SEQ ID NO: 1562589
uguuguaauuggccacagu

SEQ ID NO: 1758224 - RNA, 19 nt, Artificial Sequence
  Description of Artificial Sequence: Synthetic oligonucleotide
  Antisense strand to SEQ ID NO: 1758223
acuguggccaauuacaaca

SEQ ID NO: 1758225 - RNA, 19 nt, Artificial Sequence
  Description of Artificial Sequence: Synthetic oligonucleotide
  Sense strand starting at position 2817 of SEQ ID NO: 1562589
aagaguauauuaggaagaa

SEQ ID NO: 1758226 - RNA, 19 nt, Artificial Sequence
  Description of Artificial Sequence: Synthetic oligonucleotide
  Antisense strand to SEQ ID NO: 1758225
uucuuccuaauauacucuu

SEQ ID NO: 1758227 - RNA, 19 nt, Artificial Sequence
  Description of Artificial Sequence: Synthetic oligonucleotide
  Sense strand starting at position 2818 of SEQ ID NO: 1562589
agaguauauuaggaagaag

SEQ ID NO: 1758228 - RNA, 19 nt, Artificial Sequence
  Description of Artificial Sequence: Synthetic oligonucleotide
  Antisense strand to SEQ ID NO: 1758227
cuucuuccuaauauacucu

SEQ ID NO: 1758229 - RNA, 19 nt, Artificial Sequence
  Description of Artificial Sequence: Synthetic oligonucleotide
  Sense strand starting at position 2863 of SEQ ID NO: 1562589
gaacaagggcucugagcuu

SEQ ID NO: 1758230 - RNA, 19 nt, Artificial Sequence
  Description of Artificial Sequence: Synthetic oligonucleotide
  Antisense strand to SEQ ID NO: 1758229
aagcucagagcccuuguuc

SEQ ID NO: 1758231 - RNA, 19 nt, Artificial Sequence
  Description of Artificial Sequence: Synthetic oligonucleotide
  Sense strand starting at position 2953 of SEQ ID NO: 1562589
gucagucagccguuugguu

SEQ ID NO: 1758232 - RNA, 19 nt, Artificial Sequence
  Description of Artificial Sequence: Synthetic oligonucleotide
  Antisense strand to SEQ ID NO: 1758231
aaccaaacggcugacugac

SEQ ID NO: 1758233 - RNA, 19 nt, Artificial Sequence
  Description of Artificial Sequence: Synthetic oligonucleotide
  Sense strand starting at position 3009 of SEQ ID NO: 1562589
ggugcuagauaucccaaca

SEQ ID NO: 1758234 - RNA, 19 nt, Artificial Sequence
  Description of Artificial Sequence: Synthetic oligonucleotide
  Antisense strand to SEQ ID NO: 1758233
uguugggauaucuagcacc

SEQ ID NO: 1758235 - RNA, 19 nt, Artificial Sequence
  Description of Artificial Sequence: Synthetic oligonucleotide
  Sense strand starting at position 3144 of SEQ ID NO: 1562589
ucauauagccuccagugaa

SEQ ID NO: 1758236 - RNA, 19 nt, Artificial Sequence
  Description of Artificial Sequence: Synthetic oligonucleotide
  Antisense strand to SEQ ID NO: 1758235
uucacuggaggcuauauga

SEQ ID NO: 1758237 - RNA, 19 nt, Artificial Sequence
  Description of Artificial Sequence: Synthetic oligonucleotide
  Sense strand starting at position 3147 of SEQ ID NO: 1562589
uauagccuccagugaaaug

SEQ ID NO: 1758238 - RNA, 19 nt, Artificial Sequence
  Description of Artificial Sequence: Synthetic oligonucleotide
  Antisense strand to SEQ ID NO: 1758237
cauuucacuggaggcuaua

SEQ ID NO: 1758239 - RNA, 19 nt, Artificial Sequence
  Description of Artificial Sequence: Synthetic oligonucleotide
  Sense strand starting at position 3208 of SEQ ID NO: 1562589
ggcaguuaaguagacauua

SEQ ID NO: 1758240 - RNA, 19 nt, Artificial Sequence
  Description of Artificial Sequence: Synthetic oligonucleotide
  Antisense strand to SEQ ID NO: 1758239
uaaugucuacuuaacugcc

SEQ ID NO: 1758241 - RNA, 19 nt, Artificial Sequence
  Description of Artificial Sequence: Synthetic oligonucleotide
  Sense strand starting at position 3340 of SEQ ID NO: 1562589
auaguuuguggccagcaca

SEQ ID NO: 1758242 - RNA, 19 nt, Artificial Sequence
  Description of Artificial Sequence: Synthetic oligonucleotide
  Antisense strand to SEQ ID NO: 1758241
ugugcuggccacaaacuau

SEQ ID NO: 1758243 - RNA, 19 nt, Artificial Sequence
  Description of Artificial Sequence: Synthetic oligonucleotide
  Sense strand starting at position 3758 of SEQ ID NO: 1562589
ggaguuagccugcaauugu

SEQ ID NO: 1758244 - RNA, 19 nt, Artificial Sequence
  Description of Artificial Sequence: Synthetic oligonucleotide
  Antisense strand to SEQ ID NO: 1758243
acaauugcaggcuaacucc

SEQ ID NO: 1758245 - RNA, 19 nt, Artificial Sequence
  Description of Artificial Sequence: Synthetic oligonucleotide
  Sense strand starting at position 3797 of SEQ ID NO: 1562589
ugagauuacugguccagaa

SEQ ID NO: 1758246 - RNA, 19 nt, Artificial Sequence
  Description of Artificial Sequence: Synthetic oligonucleotide
  Antisense strand to SEQ ID NO: 1758245
uucuggaccaguaaucuca

SEQ ID NO: 1758247 - RNA, 19 nt, Artificial Sequence
  Description of Artificial Sequence: Synthetic oligonucleotide
  Sense strand starting at position 3822 of SEQ ID NO: 1562589
cucuguuaaucuccucagu

SEQ ID NO: 1758248 - RNA, 19 nt, Artificial Sequence
  Description of Artificial Sequence: Synthetic oligonucleotide
  Antisense strand to SEQ ID NO: 1758247
acugaggagauuaacagag

SEQ ID NO: 1758249 - RNA, 19 nt, Artificial Sequence
  Description of Artificial Sequence: Synthetic oligonucleotide
  Sense strand starting at position 3824 of SEQ ID NO: 1562589
cuguuaaucuccucaguua

SEQ ID NO: 1758250 - RNA, 19 nt, Artificial Sequence
  Description of Artificial Sequence: Synthetic oligonucleotide
  Antisense strand to SEQ ID NO: 1758249
uaacugaggagauuaacag

SEQ ID NO: 1758251 - RNA, 19 nt, Artificial Sequence
  Description of Artificial Sequence: Synthetic oligonucleotide
  Sense strand starting at position 3825 of SEQ ID NO: 1562589
uguuaaucuccucaguuaa

SEQ ID NO: 1758252 - RNA, 19 nt, Artificial Sequence
  Description of Artificial Sequence: Synthetic oligonucleotide
  Antisense strand to SEQ ID NO: 1758251
uuaacugaggagauuaaca

SEQ ID NO: 1758253 - RNA, 19 nt, Artificial Sequence
  Description of Artificial Sequence: Synthetic oligonucleotide
  Sense strand starting at position 3846 of SEQ ID NO: 1562589
gauccaucccagcgcagaa

SEQ ID NO: 1758254 - RNA, 19 nt, Artificial Sequence
  Description of Artificial Sequence: Synthetic oligonucleotide
  Antisense strand to SEQ ID NO: 1758253
uucugcgcugggauggauc

SEQ ID NO: 1758255 - RNA, 19 nt, Artificial Sequence
  Description of Artificial Sequence: Synthetic oligonucleotide
  Sense strand starting at position 3856 of SEQ ID NO: 1562589
agcgcagaauuccugguaa

SEQ ID NO: 1758256 - RNA, 19 nt, Artificial Sequence
  Description of Artificial Sequence: Synthetic oligonucleotide
  Antisense strand to SEQ ID NO: 1758255
uuaccaggaauucugcgcu

SEQ ID NO: 1758257 - RNA, 19 nt, Artificial Sequence
  Description of Artificial Sequence: Synthetic oligonucleotide
  Sense strand starting at position 3858 of SEQ ID NO: 1562589
cgcagaauuccugguaaua

SEQ ID NO: 1758258 - RNA, 19 nt, Artificial Sequence
  Description of Artificial Sequence: Synthetic oligonucleotide
  Antisense strand to SEQ ID NO: 1758257
uauuaccaggaauucugcg

SEQ ID NO: 1758259 - RNA, 19 nt, Artificial Sequence
  Description of Artificial Sequence: Synthetic oligonucleotide
  Sense strand starting at position 3870 of SEQ ID NO: 1562589
gguaauaucuuagugcugu

SEQ ID NO: 1758260 - RNA, 19 nt, Artificial Sequence
  Description of Artificial Sequence: Synthetic oligonucleotide
  Antisense strand to SEQ ID NO: 1758259
acagcacuaagauauuacc

SEQ ID NO: 1758261 - RNA, 19 nt, Artificial Sequence
  Description of Artificial Sequence: Synthetic oligonucleotide
  Sense strand starting at position 3881 of SEQ ID NO: 1562589
agugcugugaccuggauga

SEQ ID NO: 1758262 - RNA, 19 nt, Artificial Sequence
  Description of Artificial Sequence: Synthetic oligonucleotide
  Antisense strand to SEQ ID NO: 1758261
ucauccaggucacagcacu

SEQ ID NO: 1758263 - RNA, 19 nt, Artificial Sequence
  Description of Artificial Sequence: Synthetic oligonucleotide
  Sense strand starting at position 3883 of SEQ ID NO: 1562589
ugcugugaccuggaugauu

SEQ ID NO: 1758264 - RNA, 19 nt, Artificial Sequence
  Description of Artificial Sequence: Synthetic oligonucleotide
  Antisense strand to SEQ ID NO: 1758263
aaucauccaggucacagca

SEQ ID NO: 1758265 - RNA, 19 nt, Artificial Sequence
  Description of Artificial Sequence: Synthetic oligonucleotide
  Sense strand starting at position 86 of SEQ ID NO: 1562590
ugcuucugaguggaaucaa

SEQ ID NO: 1758266 - RNA, 19 nt, Artificial Sequence
  Description of Artificial Sequence: Synthetic oligonucleotide
  Antisense strand to SEQ ID NO: 1758265
uugauuccacucagaagca

SEQ ID NO: 1758267 - RNA, 19 nt, Artificial Sequence
  Description of Artificial Sequence: Synthetic oligonucleotide
  Sense strand starting at position 130 of SEQ ID NO: 1562590
cuguuaaccgaccagaaua

SEQ ID NO: 1758268 - RNA, 19 nt, Artificial Sequence
  Description of Artificial Sequence: Synthetic oligonucleotide
  Antisense strand to SEQ ID NO: 1758267
uauucuggucgguuaacag

SEQ ID NO: 1758269 - RNA, 19 nt, Artificial Sequence
  Description of Artificial Sequence: Synthetic oligonucleotide
  Sense strand starting at position 378 of SEQ ID NO: 1562590
ucagcuuagucacugacaa

SEQ ID NO: 1758270 - RNA, 19 nt, Artificial Sequence
  Description of Artificial Sequence: Synthetic oligonucleotide
  Antisense strand to SEQ ID NO: 1758269
uugucagugacuaagcuga

SEQ ID NO: 1758271 - RNA, 19 nt, Artificial Sequence
  Description of Artificial Sequence: Synthetic oligonucleotide
  Sense strand starting at position 616 of SEQ ID NO: 1562590
ucacaauauugguugggau

SEQ ID NO: 1758272 - RNA, 19 nt, Artificial Sequence
  Description of Artificial Sequence: Synthetic oligonucleotide
  Antisense strand to SEQ ID NO: 1758271
aucccaaccaauauuguga

SEQ ID NO: 1758273 - RNA, 19 nt, Artificial Sequence
  Description of Artificial Sequence: Synthetic oligonucleotide
  Sense strand starting at position 728 of SEQ ID NO: 1562590
uccacuucugaggguauua

SEQ ID NO: 1758274 - RNA, 19 nt, Artificial Sequence
  Description of Artificial Sequence: Synthetic oligonucleotide
  Antisense strand to SEQ ID NO: 1758273
uaauacccucagaagugga

SEQ ID NO: 1758275 - RNA, 19 nt, Artificial Sequence
  Description of Artificial Sequence: Synthetic oligonucleotide
  Sense strand starting at position 1143 of SEQ ID NO: 1562590
gucuuaugaaauugaugag

SEQ ID NO: 1758276 - RNA, 19 nt, Artificial Sequence
  Description of Artificial Sequence: Synthetic oligonucleotide
  Antisense strand to SEQ ID NO: 1758275
cucaucaauuucauaagac

SEQ ID NO: 1758277 - RNA, 19 nt, Artificial Sequence
  Description of Artificial Sequence: Synthetic oligonucleotide
  Sense strand starting at position 1308 of SEQ ID NO: 1562590
ggaggcuuugacuggugga

SEQ ID NO: 1758278 - RNA, 19 nt, Artificial Sequence
  Description of Artificial Sequence: Synthetic oligonucleotide
  Antisense strand to SEQ ID NO: 1758277
uccaccagucaaagccucc

SEQ ID NO: 1758279 - RNA, 19 nt, Artificial Sequence
  Description of Artificial Sequence: Synthetic oligonucleotide
  Sense strand starting at position 1309 of SEQ ID NO: 1562590
gaggcuuugacugguggaa

SEQ ID NO: 1758280 - RNA, 19 nt, Artificial Sequence
  Description of Artificial Sequence: Synthetic oligonucleotide
  Antisense strand to SEQ ID NO: 1758279
uuccaccagucaaagccuc

SEQ ID NO: 1758281 - RNA, 19 nt, Artificial Sequence
  Description of Artificial Sequence: Synthetic oligonucleotide
  Sense strand starting at position 1496 of SEQ ID NO: 1562590
aggucucaaccaugucuga

SEQ ID NO: 1758282 - RNA, 19 nt, Artificial Sequence
  Description of Artificial Sequence: Synthetic oligonucleotide
  Antisense strand to SEQ ID NO: 1758281
ucagacaugguugagaccu

SEQ ID NO: 1758283 - RNA, 19 nt, Artificial Sequence
  Description of Artificial Sequence: Synthetic oligonucleotide
  Sense strand starting at position 1618 of SEQ ID NO: 1562590
gcaggaaguagccagauua

SEQ ID NO: 1758284 - RNA, 19 nt, Artificial Sequence
  Description of Artificial Sequence: Synthetic oligonucleotide
  Antisense strand to SEQ ID NO: 1758283
uaaucuggcuacuuccugc

SEQ ID NO: 1758285 - RNA, 19 nt, Artificial Sequence
  Description of Artificial Sequence: Synthetic oligonucleotide
  Sense strand starting at position 1629 of SEQ ID NO: 1562590
ccagauuaauugucaccga

SEQ ID NO: 1758286 - RNA, 19 nt, Artificial Sequence
  Description of Artificial Sequence: Synthetic oligonucleotide
  Antisense strand to SEQ ID NO: 1758285
ucggugacaauuaaucugg

SEQ ID NO: 1758287 - RNA, 19 nt, Artificial Sequence
  Description of Artificial Sequence: Synthetic oligonucleotide
  Sense strand starting at position 1633 of SEQ ID NO: 1562590
auuaauugucaccgaucua

SEQ ID NO: 1758288 - RNA, 19 nt, Artificial Sequence
  Description of Artificial Sequence: Synthetic oligonucleotide
  Antisense strand to SEQ ID NO: 1758287
uagaucggugacaauuaau

SEQ ID NO: 1758289 - RNA, 19 nt, Artificial Sequence
  Description of Artificial Sequence: Synthetic oligonucleotide
  Sense strand starting at position 1682 of SEQ ID NO: 1562590
gggaaauauuagguaguua

SEQ ID NO: 1758290 - RNA, 19 nt, Artificial Sequence
  Description of Artificial Sequence: Synthetic oligonucleotide
  Antisense strand to SEQ ID NO: 1758289
uaacuaccuaauauuuccc

SEQ ID NO: 1758291 - RNA, 19 nt, Artificial Sequence
  Description of Artificial Sequence: Synthetic oligonucleotide
  Sense strand starting at position 1805 of SEQ ID NO: 1562590
cauccuaauggauggaguu

SEQ ID NO: 1758292 - RNA, 19 nt, Artificial Sequence
  Description of Artificial Sequence: Synthetic oligonucleotide
  Antisense strand to SEQ ID NO: 1758291
aacuccauccauuaggaug

SEQ ID NO: 1758293 - RNA, 19 nt, Artificial Sequence
  Description of Artificial Sequence: Synthetic oligonucleotide
  Sense strand starting at position 1806 of SEQ ID NO: 1562590
auccuaauggauggaguuu

SEQ ID NO: 1758294 - RNA, 19 nt, Artificial Sequence
  Description of Artificial Sequence: Synthetic oligonucleotide
  Antisense strand to SEQ ID NO: 1758293
aaacuccauccauuaggau

SEQ ID NO: 1758295 - RNA, 19 nt, Artificial Sequence
  Description of Artificial Sequence: Synthetic oligonucleotide
  Sense strand starting at position 2010 of SEQ ID NO: 1562590
uguauaaaugauggguaaa

SEQ ID NO: 1758296 - RNA, 19 nt, Artificial Sequence
  Description of Artificial Sequence: Synthetic oligonucleotide
  Antisense strand to SEQ ID NO: 1758295
uuuacccaucauuuauaca

SEQ ID NO: 1758297 - RNA, 19 nt, Artificial Sequence
  Description of Artificial Sequence: Synthetic oligonucleotide
  Sense strand starting at position 2082 of SEQ ID NO: 1562590
ucauccuguuacucagaca

SEQ ID NO: 1758298 - RNA, 19 nt, Artificial Sequence
  Description of Artificial Sequence: Synthetic oligonucleotide
  Antisense strand to SEQ ID NO: 1758297
ugucugaguaacaggauga

SEQ ID NO: 1758299 - RNA, 19 nt, Artificial Sequence
  Description of Artificial Sequence: Synthetic oligonucleotide
  Sense strand starting at position 2196 of SEQ ID NO: 1562590
ucccucugagaguauauua

SEQ ID NO: 1758300 - RNA, 19 nt, Artificial Sequence
  Description of Artificial Sequence: Synthetic oligonucleotide
  Antisense strand to SEQ ID NO: 1758299
uaauauacucucagaggga

SEQ ID NO: 1758301 - RNA, 19 nt, Artificial Sequence
  Description of Artificial Sequence: Synthetic oligonucleotide
  Sense strand starting at position 2347 of SEQ ID NO: 1562590
aucccagugcaggauuauu

SEQ ID NO: 1758302 - RNA, 19 nt, Artificial Sequence
  Description of Artificial Sequence: Synthetic oligonucleotide
  Antisense strand to SEQ ID NO: 1758301
aauaauccugcacugggau

SEQ ID NO: 1758303 - RNA, 19 nt, Artificial Sequence
  Description of Artificial Sequence: Synthetic oligonucleotide
  Sense strand starting at position 2352 of SEQ ID NO: 1562590
agugcaggauuauugguaa

SEQ ID NO: 1758304 - RNA, 19 nt, Artificial Sequence
  Description of Artificial Sequence: Synthetic oligonucleotide
  Antisense strand to SEQ ID NO: 1758303
uuaccaauaauccugcacu

SEQ ID NO: 1758305 - RNA, 19 nt, Artificial Sequence
  Description of Artificial Sequence: Synthetic oligonucleotide
  Sense strand starting at position 2355 of SEQ ID NO: 1562590
gcaggauuauugguaacac

SEQ ID NO: 1758306 - RNA, 19 nt, Artificial Sequence
  Description of Artificial Sequence: Synthetic oligonucleotide
  Antisense strand to SEQ ID NO: 1758305
guguuaccaauaauccugc

SEQ ID NO: 1758307 - RNA, 19 nt, Artificial Sequence
  Description of Artificial Sequence: Synthetic oligonucleotide
  Sense strand starting at position 2424 of SEQ ID NO: 1562590
gaaggcgugcugucggauu

SEQ ID NO: 1758308 - RNA, 19 nt, Artificial Sequence
  Description of Artificial Sequence: Synthetic oligonucleotide
  Antisense strand to SEQ ID NO: 1758307
aauccgacagcacgccuuc

SEQ ID NO: 1758309 - RNA, 19 nt, Artificial Sequence
  Description of Artificial Sequence: Synthetic oligonucleotide
  Sense strand starting at position 2618 of SEQ ID NO: 1562590
acaagaacuguacgauaca

SEQ ID NO: 1758310 - RNA, 19 nt, Artificial Sequence
  Description of Artificial Sequence: Synthetic oligonucleotide
  Antisense strand to SEQ ID NO: 1758309
uguaucguacaguucuugu

SEQ ID NO: 1758311 - RNA, 19 nt, Artificial Sequence
  Description of Artificial Sequence: Synthetic oligonucleotide
  Sense strand starting at position 2621 of SEQ ID NO: 1562590
agaacuguacgauacacuu

SEQ ID NO: 1758312 - RNA, 19 nt, Artificial Sequence
  Description of Artificial Sequence: Synthetic oligonucleotide
  Antisense strand to SEQ ID NO: 1758311
aaguguaucguacaguucu

SEQ ID NO: 1758313 - RNA, 19 nt, Artificial Sequence
  Description of Artificial Sequence: Synthetic oligonucleotide
  Sense strand starting at position 2665 of SEQ ID NO: 1562590
auuggaauuugauaaccau

SEQ ID NO: 1758314 - RNA, 19 nt, Artificial Sequence
  Description of Artificial Sequence: Synthetic oligonucleotide
  Antisense strand to SEQ ID NO: 1758313
augguuaucaaauuccaau

SEQ ID NO: 1758315 - RNA, 19 nt, Artificial Sequence
  Description of Artificial Sequence: Synthetic oligonucleotide
  Sense strand starting at position 2687 of SEQ ID NO: 1562590
uuaaaugggccaggaguau

SEQ ID NO: 1758316 - RNA, 19 nt, Artificial Sequence
  Description of Artificial Sequence: Synthetic oligonucleotide
  Antisense strand to SEQ ID NO: 1758315
auacuccuggcccauuuaa

SEQ ID NO: 1758317 - RNA, 19 nt, Artificial Sequence
  Description of Artificial Sequence: Synthetic oligonucleotide
  Sense strand starting at position 2696 of SEQ ID NO: 1562590
ccaggaguaugaucugagu

SEQ ID NO: 1758318 - RNA, 19 nt, Artificial Sequence
  Description of Artificial Sequence: Synthetic oligonucleotide
  Antisense strand to SEQ ID NO: 1758317
acucagaucauacuccugg

SEQ ID NO: 1758319 - RNA, 19 nt, Artificial Sequence
  Description of Artificial Sequence: Synthetic oligonucleotide
  Sense strand starting at position 2698 of SEQ ID NO: 1562590
aggaguaugaucugaguuu

SEQ ID NO: 1758320 - RNA, 19 nt, Artificial Sequence
  Description of Artificial Sequence: Synthetic oligonucleotide
  Antisense strand to SEQ ID NO: 1758319
aaacucagaucauacuccu

SEQ ID NO: 1758321 - RNA, 19 nt, Artificial Sequence
  Description of Artificial Sequence: Synthetic oligonucleotide
  Sense strand starting at position 2710 of SEQ ID NO: 1562590
ugaguuuacaggugaggaa

SEQ ID NO: 1758322 - RNA, 19 nt, Artificial Sequence
  Description of Artificial Sequence: Synthetic oligonucleotide
  Antisense strand to SEQ ID NO: 1758321
uuccucaccuguaaacuca

SEQ ID NO: 1758323 - RNA, 19 nt, Artificial Sequence
  Description of Artificial Sequence: Synthetic oligonucleotide
  Sense strand starting at position 2801 of SEQ ID NO: 1562590
gcgucugagacagaucuca

SEQ ID NO: 1758324 - RNA, 19 nt, Artificial Sequence
  Description of Artificial Sequence: Synthetic oligonucleotide
  Antisense strand to SEQ ID NO: 1758323
ugagaucugucucagacgc

SEQ ID NO: 1758325 - RNA, 19 nt, Artificial Sequence
  Description of Artificial Sequence: Synthetic oligonucleotide
  Sense strand starting at position 2821 of SEQ ID NO: 1562590
uccguuuagugguuuauuu

SEQ ID NO: 1758326 - RNA, 19 nt, Artificial Sequence
  Description of Artificial Sequence: Synthetic oligonucleotide
  Antisense strand to SEQ ID NO: 1758325
aaauaaaccacuaaacgga

SEQ ID NO: 1758327 - RNA, 19 nt, Artificial Sequence
  Description of Artificial Sequence: Synthetic oligonucleotide
  Sense strand starting at position 3002 of SEQ ID NO: 1562590
ugagaagaguugucacauu

SEQ ID NO: 1758328 - RNA, 19 nt, Artificial Sequence
  Description of Artificial Sequence: Synthetic oligonucleotide
  Antisense strand to SEQ ID NO: 1758327
aaugugacaacucuucuca

SEQ ID NO: 1758329 - RNA, 19 nt, Artificial Sequence
  Description of Artificial Sequence: Synthetic oligonucleotide
  Sense strand starting at position 3204 of SEQ ID NO: 1562590
cuuggaucaccuggaguca

SEQ ID NO: 1758330 - RNA, 19 nt, Artificial Sequence
  Description of Artificial Sequence: Synthetic oligonucleotide
  Antisense strand to SEQ ID NO: 1758329
ugacuccaggugauccaag

SEQ ID NO: 1758331 - RNA, 19 nt, Artificial Sequence
  Description of Artificial Sequence: Synthetic oligonucleotide
  Sense strand starting at position 3516 of SEQ ID NO: 1562590
gguaauuucuagucuuggu

SEQ ID NO: 1758332 - RNA, 19 nt, Artificial Sequence
  Description of Artificial Sequence: Synthetic oligonucleotide
  Antisense strand to SEQ ID NO: 1758331
accaagacuagaaauuacc

SEQ ID NO: 1758333 - RNA, 19 nt, Artificial Sequence
  Description of Artificial Sequence: Synthetic oligonucleotide
  Sense strand starting at position 3694 of SEQ ID NO: 1562590
gcagauaccuguuuaggga

SEQ ID NO: 1758334 - RNA, 19 nt, Artificial Sequence
  Description of Artificial Sequence: Synthetic oligonucleotide
  Antisense strand to SEQ ID NO: 1758333
ucccuaaacagguaucugc

SEQ ID NO: 1758335 - RNA, 19 nt, Artificial Sequence
  Description of Artificial Sequence: Synthetic oligonucleotide
  Sense strand starting at position 3763 of SEQ ID NO: 1562590
uucuuuggcauagagaguu

SEQ ID NO: 1758336 - RNA, 19 nt, Artificial Sequence
  Description of Artificial Sequence: Synthetic oligonucleotide
  Antisense strand to SEQ ID NO: 1758335
aacucucuaugccaaagaa

SEQ ID NO: 1758337 - RNA, 19 nt, Artificial Sequence
  Description of Artificial Sequence: Synthetic oligonucleotide
  Sense strand starting at position 3851 of SEQ ID NO: 1562590
uggagaugcaaaugagucu

SEQ ID NO: 1758338 - RNA, 19 nt, Artificial Sequence
  Description of Artificial Sequence: Synthetic oligonucleotide
  Antisense strand to SEQ ID NO: 1758337
agacucauuugcaucucca

SEQ ID NO: 1758339 - RNA, 19 nt, Artificial Sequence
  Description of Artificial Sequence: Synthetic oligonucleotide
  Sense strand starting at position 3900 of SEQ ID NO: 1562590
gaugaaguugucuaguuuc

SEQ ID NO: 1758340 - RNA, 19 nt, Artificial Sequence
  Description of Artificial Sequence: Synthetic oligonucleotide
  Antisense strand to SEQ ID NO: 1758339
gaaacuagacaacuucauc

SEQ ID NO: 1758341 - RNA, 19 nt, Artificial Sequence
  Description of Artificial Sequence: Synthetic oligonucleotide
  Sense strand starting at position 3925 of SEQ ID NO: 1562590
uaggguguucagggaagca

SEQ ID NO: 1758342 - RNA, 19 nt, Artificial Sequence
  Description of Artificial Sequence: Synthetic oligonucleotide
  Antisense strand to SEQ ID NO: 1758341
ugcuucccugaacacccua

SEQ ID NO: 1758343 - RNA, 19 nt, Artificial Sequence
  Description of Artificial Sequence: Synthetic oligonucleotide
  Sense strand starting at position 3958 of SEQ ID NO: 1562590
ggugauuccgagugagaaa

SEQ ID NO: 1758344 - RNA, 19 nt, Artificial Sequence
  Description of Artificial Sequence: Synthetic oligonucleotide
  Antisense strand to SEQ ID NO: 1758343
uuucucacucggaaucacc

SEQ ID NO: 1758345 - RNA, 19 nt, Artificial Sequence
  Description of Artificial Sequence: Synthetic oligonucleotide
  Sense strand starting at position 435 of SEQ ID NO: 1562591
ccgccuucuggucaacaau

SEQ ID NO: 1758346 - RNA, 19 nt, Artificial Sequence
  Description of Artificial Sequence: Synthetic oligonucleotide
  Antisense strand to SEQ ID NO: 1758345
auuguugaccagaaggcgg

SEQ ID NO: 1758347 - RNA, 19 nt, Artificial Sequence
  Description of Artificial Sequence: Synthetic oligonucleotide
  Sense strand starting at position 446 of SEQ ID NO: 1562591
ucaacaaugcacuggauau

SEQ ID NO: 1758348 - RNA, 19 nt, Artificial Sequence
  Description of Artificial Sequence: Synthetic oligonucleotide
  Antisense strand to SEQ ID NO: 1758347
auauccagugcauuguuga

SEQ ID NO: 1758349 - RNA, 19 nt, Artificial Sequence
  Description of Artificial Sequence: Synthetic oligonucleotide
  Sense strand starting at position 575 of SEQ ID NO: 1562591
auaacauucguauguagaa

SEQ ID NO: 1758350 - RNA, 19 nt, Artificial Sequence
  Description of Artificial Sequence: Synthetic oligonucleotide
  Antisense strand to SEQ ID NO: 1758349
uucuacauacgaauguuau

SEQ ID NO: 1758351 - RNA, 19 nt, Artificial Sequence
  Description of Artificial Sequence: Synthetic oligonucleotide
  Sense strand starting at position 576 of SEQ ID NO: 1562591
uaacauucguauguagaag

SEQ ID NO: 1758352 - RNA, 19 nt, Artificial Sequence
  Description of Artificial Sequence: Synthetic oligonucleotide
  Antisense strand to SEQ ID NO: 1758351
cuucuacauacgaauguua

SEQ ID NO: 1758353 - RNA, 19 nt, Artificial Sequence
  Description of Artificial Sequence: Synthetic oligonucleotide
  Sense strand starting at position 865 of SEQ ID NO: 1562591
gcaagaugauagcauuuau

SEQ ID NO: 1758354 - RNA, 19 nt, Artificial Sequence
  Description of Artificial Sequence: Synthetic oligonucleotide
  Antisense strand to SEQ ID NO: 1758353
auaaaugcuaucaucuugc

SEQ ID NO: 1758355 - RNA, 19 nt, Artificial Sequence
  Description of Artificial Sequence: Synthetic oligonucleotide
  Sense strand starting at position 1177 of SEQ ID NO: 1562591
cauggaguccuaugaucua

SEQ ID NO: 1758356 - RNA, 19 nt, Artificial Sequence
  Description of Artificial Sequence: Synthetic oligonucleotide
  Antisense strand to SEQ ID NO: 1758355
uagaucauaggacuccaug

SEQ ID NO: 1758357 - RNA, 19 nt, Artificial Sequence
  Description of Artificial Sequence: Synthetic oligonucleotide
  Sense strand starting at position 1544 of SEQ ID NO: 1562591
cccagagagcuuugugaac

SEQ ID NO: 1758358 - RNA, 19 nt, Artificial Sequence
  Description of Artificial Sequence: Synthetic oligonucleotide
  Antisense strand to SEQ ID NO: 1758357
guucacaaagcucucuggg

SEQ ID NO: 1758359 - RNA, 19 nt, Artificial Sequence
  Description of Artificial Sequence: Synthetic oligonucleotide
  Sense strand starting at position 1669 of SEQ ID NO: 1562591
uccugucugaucugaacga

SEQ ID NO: 1758360 - RNA, 19 nt, Artificial Sequence
  Description of Artificial Sequence: Synthetic oligonucleotide
  Antisense strand to SEQ ID NO: 1758359
ucguucagaucagacagga

SEQ ID NO: 1758361 - RNA, 19 nt, Artificial Sequence
  Description of Artificial Sequence: Synthetic oligonucleotide
  Sense strand starting at position 1673 of SEQ ID NO: 1562591
gucugaucugaacgaguua

SEQ ID NO: 1758362 - RNA, 19 nt, Artificial Sequence
  Description of Artificial Sequence: Synthetic oligonucleotide
  Antisense strand to SEQ ID NO: 1758361
uaacucguucagaucagac

SEQ ID NO: 1758363 - RNA, 19 nt, Artificial Sequence
  Description of Artificial Sequence: Synthetic oligonucleotide
  Sense strand starting at position 1700 of SEQ ID NO: 1562591
cuccgagcuuaucuacaaa

SEQ ID NO: 1758364 - RNA, 19 nt, Artificial Sequence
  Description of Artificial Sequence: Synthetic oligonucleotide
  Antisense strand to SEQ ID NO: 1758363
uuuguagauaagcucggag

SEQ ID NO: 1758365 - RNA, 19 nt, Artificial Sequence
  Description of Artificial Sequence: Synthetic oligonucleotide
  Sense strand starting at position 1742 of SEQ ID NO: 1562591
gagcuauugcgagaauaag

SEQ ID NO: 1758366 - RNA, 19 nt, Artificial Sequence
  Description of Artificial Sequence: Synthetic oligonucleotide
  Antisense strand to SEQ ID NO: 1758365
cuuauucucgcaauagcuc

SEQ ID NO: 1758367 - RNA, 19 nt, Artificial Sequence
  Description of Artificial Sequence: Synthetic oligonucleotide
  Sense strand starting at position 2261 of SEQ ID NO: 1562591
ccaaguggauccuuauugu

SEQ ID NO: 1758368 - RNA, 19 nt, Artificial Sequence
  Description of Artificial Sequence: Synthetic oligonucleotide
  Antisense strand to SEQ ID NO: 1758367
acaauaaggauccacuugg

SEQ ID NO: 1758369 - RNA, 19 nt, Artificial Sequence
  Description of Artificial Sequence: Synthetic oligonucleotide
  Sense strand starting at position 2264 of SEQ ID NO: 1562591
aguggauccuuauuguaua

SEQ ID NO: 1758370 - RNA, 19 nt, Artificial Sequence
  Description of Artificial Sequence: Synthetic oligonucleotide
  Antisense strand to SEQ ID NO: 1758369
uauacaauaaggauccacu

SEQ ID NO: 1758371 - RNA, 19 nt, Artificial Sequence
  Description of Artificial Sequence: Synthetic oligonucleotide
  Sense strand starting at position 2267 of SEQ ID NO: 1562591
ggauccuuauuguauauuu

SEQ ID NO: 1758372 - RNA, 19 nt, Artificial Sequence
  Description of Artificial Sequence: Synthetic oligonucleotide
  Antisense strand to SEQ ID NO: 1758371
aaauauacaauaaggaucc

SEQ ID NO: 1758373 - RNA, 19 nt, Artificial Sequence
  Description of Artificial Sequence: Synthetic oligonucleotide
  Sense strand starting at position 2483 of SEQ ID NO: 1562591
uuauauuagagaugguguc

SEQ ID NO: 1758374 - RNA, 19 nt, Artificial Sequence
  Description of Artificial Sequence: Synthetic oligonucleotide
  Antisense strand to SEQ ID NO: 1758373
gacaccaucucuaauauaa

SEQ ID NO: 1758375 - RNA, 19 nt, Artificial Sequence
  Description of Artificial Sequence: Synthetic oligonucleotide
  Sense strand starting at position 2503 of SEQ ID NO: 1562591
cacuauauugacugggcua

SEQ ID NO: 1758376 - RNA, 19 nt, Artificial Sequence
  Description of Artificial Sequence: Synthetic oligonucleotide
  Antisense strand to SEQ ID NO: 1758375
uagcccagucaauauagug

SEQ ID NO: 1758377 - RNA, 19 nt, Artificial Sequence
  Description of Artificial Sequence: Synthetic oligonucleotide
  Sense strand starting at position 2609 of SEQ ID NO: 1562591
gcuucuagauauuugcuua

SEQ ID NO: 1758378 - RNA, 19 nt, Artificial Sequence
  Description of Artificial Sequence: Synthetic oligonucleotide
  Antisense strand to SEQ ID NO: 1758377
uaagcaaauaucuagaagc

SEQ ID NO: 1758379 - RNA, 19 nt, Artificial Sequence
  Description of Artificial Sequence: Synthetic oligonucleotide
  Sense strand starting at position 2612 of SEQ ID NO: 1562591
ucuagauauuugcuuaugu

SEQ ID NO: 1758380 - RNA, 19 nt, Artificial Sequence
  Description of Artificial Sequence: Synthetic oligonucleotide
  Antisense strand to SEQ ID NO: 1758379
acauaagcaaauaucuaga

SEQ ID NO: 1758381 - RNA, 19 nt, Artificial Sequence
  Description of Artificial Sequence: Synthetic oligonucleotide
  Sense strand starting at position 2810 of SEQ ID NO: 1562591
gccacacuucuauggcuaa

SEQ ID NO: 1758382 - RNA, 19 nt, Artificial Sequence
  Description of Artificial Sequence: Synthetic oligonucleotide
  Antisense strand to SEQ ID NO: 1758381
uuagccauagaaguguggc

SEQ ID NO: 1758383 - RNA, 19 nt, Artificial Sequence
  Description of Artificial Sequence: Synthetic oligonucleotide
  Sense strand starting at position 2813 of SEQ ID NO: 1562591
acacuucuauggcuaagaa

SEQ ID NO: 1758384 - RNA, 19 nt, Artificial Sequence
  Description of Artificial Sequence: Synthetic oligonucleotide
  Antisense strand to SEQ ID NO: 1758383
uucuuagccauagaagugu

SEQ ID NO: 1758385 - RNA, 19 nt, Artificial Sequence
  Description of Artificial Sequence: Synthetic oligonucleotide
  Sense strand starting at position 2822 of SEQ ID NO: 1562591
uggcuaagaagucaugcaa

SEQ ID NO: 1758386 - RNA, 19 nt, Artificial Sequence
  Description of Artificial Sequence: Synthetic oligonucleotide
  Antisense strand to SEQ ID NO: 1758385
uugcaugacuucuuagcca

SEQ ID NO: 1758387 - RNA, 19 nt, Artificial Sequence
  Description of Artificial Sequence: Synthetic oligonucleotide
  Sense strand starting at position 2835 of SEQ ID NO: 1562591
augcaaccagauugcuauu

SEQ ID NO: 1758388 - RNA, 19 nt, Artificial Sequence
  Description of Artificial Sequence: Synthetic oligonucleotide
  Antisense strand to SEQ ID NO: 1758387
aauagcaaucugguugcau

SEQ ID NO: 1758389 - RNA, 19 nt, Artificial Sequence
  Description of Artificial Sequence: Synthetic oligonucleotide
  Sense strand starting at position 3114 of SEQ ID NO: 1562591
cccucaaugggccaggauu

SEQ ID NO: 1758390 - RNA, 19 nt, Artificial Sequence
  Description of Artificial Sequence: Synthetic oligonucleotide
  Antisense strand to SEQ ID NO: 1758389
aauccuggcccauugaggg

SEQ ID NO: 1758391 - RNA, 19 nt, Artificial Sequence
  Description of Artificial Sequence: Synthetic oligonucleotide
  Sense strand starting at position 3116 of SEQ ID NO: 1562591
cucaaugggccaggauuau

SEQ ID NO: 1758392 - RNA, 19 nt, Artificial Sequence
  Description of Artificial Sequence: Synthetic oligonucleotide
  Antisense strand to SEQ ID NO: 1758391
auaauccuggcccauugag

SEQ ID NO: 1758393 - RNA, 19 nt, Artificial Sequence
  Description of Artificial Sequence: Synthetic oligonucleotide
  Sense strand starting at position 3125 of SEQ ID NO: 1562591
ccaggauuaugaucuaagu

SEQ ID NO: 1758394 - RNA, 19 nt, Artificial Sequence
  Description of Artificial Sequence: Synthetic oligonucleotide
  Antisense strand to SEQ ID NO: 1758393
acuuagaucauaauccugg

SEQ ID NO: 1758395 - RNA, 19 nt, Artificial Sequence
  Description of Artificial Sequence: Synthetic oligonucleotide
  Sense strand starting at position 3172 of SEQ ID NO: 1562591
cgaggaaguugcuuucauc

SEQ ID NO: 1758396 - RNA, 19 nt, Artificial Sequence
  Description of Artificial Sequence: Synthetic oligonucleotide
  Antisense strand to SEQ ID NO: 1758395
gaugaaagcaacuuccucg

SEQ ID NO: 1758397 - RNA, 19 nt, Artificial Sequence
  Description of Artificial Sequence: Synthetic oligonucleotide
  Sense strand starting at position 3239 of SEQ ID NO: 1562591
acacgucucagucaguuua

SEQ ID NO: 1758398 - RNA, 19 nt, Artificial Sequence
  Description of Artificial Sequence: Synthetic oligonucleotide
  Antisense strand to SEQ ID NO: 1758397
uaaacugacugagacgugu

SEQ ID NO: 1758399 - RNA, 19 nt, Artificial Sequence
  Description of Artificial Sequence: Synthetic oligonucleotide
  Sense strand starting at position 3257 of SEQ ID NO: 1562591
agagguuuacucugccaag

SEQ ID NO: 1758400 - RNA, 19 nt, Artificial Sequence
  Description of Artificial Sequence: Synthetic oligonucleotide
  Antisense strand to SEQ ID NO: 1758399
cuuggcagaguaaaccucu

SEQ ID NO: 1758401 - RNA, 19 nt, Artificial Sequence
  Description of Artificial Sequence: Synthetic oligonucleotide
  Sense strand starting at position 3302 of SEQ ID NO: 1562591
acgcaagucacaggaagau

SEQ ID NO: 1758402 - RNA, 19 nt, Artificial Sequence
  Description of Artificial Sequence: Synthetic oligonucleotide
  Antisense strand to SEQ ID NO: 1758401
aucuuccugugacuugcgu

SEQ ID NO: 1758403 - RNA, 19 nt, Artificial Sequence
  Description of Artificial Sequence: Synthetic oligonucleotide
  Sense strand starting at position 3332 of SEQ ID NO: 1562591
ucauuauucccagaggguu

SEQ ID NO: 1758404 - RNA, 19 nt, Artificial Sequence
  Description of Artificial Sequence: Synthetic oligonucleotide
  Antisense strand to SEQ ID NO: 1758403
aacccucugggaauaauga

SEQ ID NO: 1758405 - RNA, 19 nt, Artificial Sequence
  Description of Artificial Sequence: Synthetic oligonucleotide
  Sense strand starting at position 3427 of SEQ ID NO: 1562591
ugagcugaguggucacauu

SEQ ID NO: 1758406 - RNA, 19 nt, Artificial Sequence
  Description of Artificial Sequence: Synthetic oligonucleotide
  Antisense strand to SEQ ID NO: 1758405
aaugugaccacucagcuca

SEQ ID NO: 1758407 - RNA, 19 nt, Artificial Sequence
  Description of Artificial Sequence: Synthetic oligonucleotide
  Sense strand starting at position 3479 of SEQ ID NO: 1562591
auagguuccaugugaaagg

SEQ ID NO: 1758408 - RNA, 19 nt, Artificial Sequence
  Description of Artificial Sequence: Synthetic oligonucleotide
  Antisense strand to SEQ ID NO: 1758407
ccuuucacauggaaccuau

SEQ ID NO: 1758409 - RNA, 19 nt, Artificial Sequence
  Description of Artificial Sequence: Synthetic oligonucleotide
  Sense strand starting at position 3525 of SEQ ID NO: 1562591
ucuucuugugcacaguuaa

SEQ ID NO: 1758410 - RNA, 19 nt, Artificial Sequence
  Description of Artificial Sequence: Synthetic oligonucleotide
  Antisense strand to SEQ ID NO: 1758409
uuaacugugcacaagaaga

SEQ ID NO: 1758411 - RNA, 19 nt, Artificial Sequence
  Description of Artificial Sequence: Synthetic oligonucleotide
  Sense strand starting at position 3532 of SEQ ID NO: 1562591
gugcacaguuaaucuacau

SEQ ID NO: 1758412 - RNA, 19 nt, Artificial Sequence
  Description of Artificial Sequence: Synthetic oligonucleotide
  Antisense strand to SEQ ID NO: 1758411
auguagauuaacugugcac

SEQ ID NO: 1758413 - RNA, 19 nt, Artificial Sequence
  Description of Artificial Sequence: Synthetic oligonucleotide
  Sense strand starting at position 3640 of SEQ ID NO: 1562591
gucauuguuagguaccagu

SEQ ID NO: 1758414 - RNA, 19 nt, Artificial Sequence
  Description of Artificial Sequence: Synthetic oligonucleotide
  Antisense strand to SEQ ID NO: 1758413
acugguaccuaacaaugac

SEQ ID NO: 1758415 - RNA, 19 nt, Artificial Sequence
  Description of Artificial Sequence: Synthetic oligonucleotide
  Sense strand starting at position 3650 of SEQ ID NO: 1562591
gguaccagucaagauaagu

SEQ ID NO: 1758416 - RNA, 19 nt, Artificial Sequence
  Description of Artificial Sequence: Synthetic oligonucleotide
  Antisense strand to SEQ ID NO: 1758415
acuuaucuugacugguacc

SEQ ID NO: 1758417 - RNA, 19 nt, Artificial Sequence
  Description of Artificial Sequence: Synthetic oligonucleotide
  Sense strand starting at position 3659 of SEQ ID NO: 1562591
caagauaaguugccaguuu

SEQ ID NO: 1758418 - RNA, 19 nt, Artificial Sequence
  Description of Artificial Sequence: Synthetic oligonucleotide
  Antisense strand to SEQ ID NO: 1758417
aaacuggcaacuuaucuug

SEQ ID NO: 1758419 - RNA, 19 nt, Artificial Sequence
  Description of Artificial Sequence: Synthetic oligonucleotide
  Sense strand starting at position 3801 of SEQ ID NO: 1562591
gcaaauaucuguuuagaaa

SEQ ID NO: 1758420 - RNA, 19 nt, Artificial Sequence
  Description of Artificial Sequence: Synthetic oligonucleotide
  Antisense strand to SEQ ID NO: 1758419
uuucuaaacagauauuugc

SEQ ID NO: 1758421 - RNA, 19 nt, Artificial Sequence
  Description of Artificial Sequence: Synthetic oligonucleotide
  Sense strand starting at position 3839 of SEQ ID NO: 1562591
uggagugacucuguuucca

SEQ ID NO: 1758422 - RNA, 19 nt, Artificial Sequence
  Description of Artificial Sequence: Synthetic oligonucleotide
  Antisense strand to SEQ ID NO: 1758421
uggaaacagagucacucca

SEQ ID NO: 1758423 - RNA, 19 nt, Artificial Sequence
  Description of Artificial Sequence: Synthetic oligonucleotide
  Sense strand starting at position 3868 of SEQ ID NO: 1562591
guuccacugguauagugaa

SEQ ID NO: 1758424 - RNA, 19 nt, Artificial Sequence
  Description of Artificial Sequence: Synthetic oligonucleotide
  Antisense strand to SEQ ID NO: 1758423
uucacuauaccaguggaac

SEQ ID NO: 1758425 - RNA, 19 nt, Artificial Sequence
  Description of Artificial Sequence: Synthetic oligonucleotide
  Sense strand starting at position 50 of SEQ ID NO: 1562592
ggguuagaacccuggagua

SEQ ID NO: 1758426 - RNA, 19 nt, Artificial Sequence
  Description of Artificial Sequence: Synthetic oligonucleotide
  Antisense strand to SEQ ID NO: 1758425
uacuccaggguucuaaccc

SEQ ID NO: 1758427 - RNA, 19 nt, Artificial Sequence
  Description of Artificial Sequence: Synthetic oligonucleotide
  Sense strand starting at position 83 of SEQ ID NO: 1562592
ucugcuuuguccuuccgau

SEQ ID NO: 1758428 - RNA, 19 nt, Artificial Sequence
  Description of Artificial Sequence: Synthetic oligonucleotide
  Antisense strand to SEQ ID NO: 1758427
aucggaaggacaaagcaga

SEQ ID NO: 1758429 - RNA, 19 nt, Artificial Sequence
  Description of Artificial Sequence: Synthetic oligonucleotide
  Sense strand starting at position 355 of SEQ ID NO: 1562592
gggccauguuaauugauaa

SEQ ID NO: 1758430 - RNA, 19 nt, Artificial Sequence
  Description of Artificial Sequence: Synthetic oligonucleotide
  Antisense strand to SEQ ID NO: 1758429
uuaucaauuaacauggccc

SEQ ID NO: 1758431 - RNA, 19 nt, Artificial Sequence
  Description of Artificial Sequence: Synthetic oligonucleotide
  Sense strand starting at position 422 of SEQ ID NO: 1562592
caucuauagcccugagaga

SEQ ID NO: 1758432 - RNA, 19 nt, Artificial Sequence
  Description of Artificial Sequence: Synthetic oligonucleotide
  Antisense strand to SEQ ID NO: 1758431
ucucucagggcuauagaug

SEQ ID NO: 1758433 - RNA, 19 nt, Artificial Sequence
  Description of Artificial Sequence: Synthetic oligonucleotide
  Sense strand starting at position 923 of SEQ ID NO: 1562592
aguuguugcaauuauaggu

SEQ ID NO: 1758434 - RNA, 19 nt, Artificial Sequence
  Description of Artificial Sequence: Synthetic oligonucleotide
  Antisense strand to SEQ ID NO: 1758433
accuauaauugcaacaacu

SEQ ID NO: 1758435 - RNA, 19 nt, Artificial Sequence
  Description of Artificial Sequence: Synthetic oligonucleotide
  Sense strand starting at position 1146 of SEQ ID NO: 1562592
gcuauacaguuguuauaac

SEQ ID NO: 1758436 - RNA, 19 nt, Artificial Sequence
  Description of Artificial Sequence: Synthetic oligonucleotide
  Antisense strand to SEQ ID NO: 1758435
guuauaacaacuguauagc

SEQ ID NO: 1758437 - RNA, 19 nt, Artificial Sequence
  Description of Artificial Sequence: Synthetic oligonucleotide
  Sense strand starting at position 1201 of SEQ ID NO: 1562592
gaagauguauugucauguu

SEQ ID NO: 1758438 - RNA, 19 nt, Artificial Sequence
  Description of Artificial Sequence: Synthetic oligonucleotide
  Antisense strand to SEQ ID NO: 1758437
aacaugacaauacaucuuc

SEQ ID NO: 1758439 - RNA, 19 nt, Artificial Sequence
  Description of Artificial Sequence: Synthetic oligonucleotide
  Sense strand starting at position 1567 of SEQ ID NO: 1562592
ccagaugaguucuuugaua

SEQ ID NO: 1758440 - RNA, 19 nt, Artificial Sequence
  Description of Artificial Sequence: Synthetic oligonucleotide
  Antisense strand to SEQ ID NO: 1758439
uaucaaagaacucaucugg

SEQ ID NO: 1758441 - RNA, 19 nt, Artificial Sequence
  Description of Artificial Sequence: Synthetic oligonucleotide
  Sense strand starting at position 1569 of SEQ ID NO: 1562592
agaugaguucuuugauaau

SEQ ID NO: 1758442 - RNA, 19 nt, Artificial Sequence
  Description of Artificial Sequence: Synthetic oligonucleotide
  Antisense strand to SEQ ID NO: 1758441
auuaucaaagaacucaucu

SEQ ID NO: 1758443 - RNA, 19 nt, Artificial Sequence
  Description of Artificial Sequence: Synthetic oligonucleotide
  Sense strand starting at position 1580 of SEQ ID NO: 1562592
uugauaaugucgccaccuu

SEQ ID NO: 1758444 - RNA, 19 nt, Artificial Sequence
  Description of Artificial Sequence: Synthetic oligonucleotide
  Antisense strand to SEQ ID NO: 1758443
aagguggcgacauuaucaa

SEQ ID NO: 1758445 - RNA, 19 nt, Artificial Sequence
  Description of Artificial Sequence: Synthetic oligonucleotide
  Sense strand starting at position 1604 of SEQ ID NO: 1562592
gccugcugccucuacuuua

SEQ ID NO: 1758446 - RNA, 19 nt, Artificial Sequence
  Description of Artificial Sequence: Synthetic oligonucleotide
  Antisense strand to SEQ ID NO: 1758445
uaaaguagaggcagcaggc

SEQ ID NO: 1758447 - RNA, 19 nt, Artificial Sequence
  Description of Artificial Sequence: Synthetic oligonucleotide
  Sense strand starting at position 1684 of SEQ ID NO: 1562592
uaaagagcugcuuauguuu

SEQ ID NO: 1758448 - RNA, 19 nt, Artificial Sequence
  Description of Artificial Sequence: Synthetic oligonucleotide
  Antisense strand to SEQ ID NO: 1758447
aaacauaagcagcucuuua

SEQ ID NO: 1758449 - RNA, 19 nt, Artificial Sequence
  Description of Artificial Sequence: Synthetic oligonucleotide
  Sense strand starting at position 1724 of SEQ ID NO: 1562592
aguuaaacuuuacaaagga

SEQ ID NO: 1758450 - RNA, 19 nt, Artificial Sequence
  Description of Artificial Sequence: Synthetic oligonucleotide
  Antisense strand to SEQ ID NO: 1758449
uccuuuguaaaguuuaacu

SEQ ID NO: 1758451 - RNA, 19 nt, Artificial Sequence
  Description of Artificial Sequence: Synthetic oligonucleotide
  Sense strand starting at position 1741 of SEQ ID NO: 1562592
gaaguuauuugauguagua

SEQ ID NO: 1758452 - RNA, 19 nt, Artificial Sequence
  Description of Artificial Sequence: Synthetic oligonucleotide
  Antisense strand to SEQ ID NO: 1758451
uacuacaucaaauaacuuc

SEQ ID NO: 1758453 - RNA, 19 nt, Artificial Sequence
  Description of Artificial Sequence: Synthetic oligonucleotide
  Sense strand starting at position 1777 of SEQ ID NO: 1562592
uugagagggucucaugaua

SEQ ID NO: 1758454 - RNA, 19 nt, Artificial Sequence
  Description of Artificial Sequence: Synthetic oligonucleotide
  Antisense strand to SEQ ID NO: 1758453
uaucaugagacccucucaa

SEQ ID NO: 1758455 - RNA, 19 nt, Artificial Sequence
  Description of Artificial Sequence: Synthetic oligonucleotide
  Sense strand starting at position 1840 of SEQ ID NO: 1562592
auagcauaugguggguaua

SEQ ID NO: 1758456 - RNA, 19 nt, Artificial Sequence
  Description of Artificial Sequence: Synthetic oligonucleotide
  Antisense strand to SEQ ID NO: 1758455
uauacccaccauaugcuau

SEQ ID NO: 1758457 - RNA, 19 nt, Artificial Sequence
  Description of Artificial Sequence: Synthetic oligonucleotide
  Sense strand starting at position 1841 of SEQ ID NO: 1562592
uagcauaugguggguauaa

SEQ ID NO: 1758458 - RNA, 19 nt, Artificial Sequence
  Description of Artificial Sequence: Synthetic oligonucleotide
  Antisense strand to SEQ ID NO: 1758457
uuauacccaccauaugcua

SEQ ID NO: 1758459 - RNA, 19 nt, Artificial Sequence
  Description of Artificial Sequence: Synthetic oligonucleotide
  Sense strand starting at position 1842 of SEQ ID NO: 1562592
agcauaugguggguauaaa

SEQ ID NO: 1758460 - RNA, 19 nt, Artificial Sequence
  Description of Artificial Sequence: Synthetic oligonucleotide
  Antisense strand to SEQ ID NO: 1758459
uuuauacccaccauaugcu

SEQ ID NO: 1758461 - RNA, 19 nt, Artificial Sequence
  Description of Artificial Sequence: Synthetic oligonucleotide
  Sense strand starting at position 1880 of SEQ ID NO: 1562592
uucuauuucugggacaauu

SEQ ID NO: 1758462 - RNA, 19 nt, Artificial Sequence
  Description of Artificial Sequence: Synthetic oligonucleotide
  Antisense strand to SEQ ID NO: 1758461
aauugucccagaaauagaa

SEQ ID NO: 1758463 - RNA, 19 nt, Artificial Sequence
  Description of Artificial Sequence: Synthetic oligonucleotide
  Sense strand starting at position 1897 of SEQ ID NO: 1562592
uuuguacaacgugagaauu

SEQ ID NO: 1758464 - RNA, 19 nt, Artificial Sequence
  Description of Artificial Sequence: Synthetic oligonucleotide
  Antisense strand to SEQ ID NO: 1758463
aauucucacguuguacaaa

SEQ ID NO: 1758465 - RNA, 19 nt, Artificial Sequence
  Description of Artificial Sequence: Synthetic oligonucleotide
  Sense strand starting at position 1905 of SEQ ID NO: 1562592
acgugagaauugcuuguuu

SEQ ID NO: 1758466 - RNA, 19 nt, Artificial Sequence
  Description of Artificial Sequence: Synthetic oligonucleotide
  Antisense strand to SEQ ID NO: 1758465
aaacaagcaauucucacgu

SEQ ID NO: 1758467 - RNA, 19 nt, Artificial Sequence
  Description of Artificial Sequence: Synthetic oligonucleotide
  Sense strand starting at position 2774 of SEQ ID NO: 1562592
ugggaugucucuuaacaug

SEQ ID NO: 1758468 - RNA, 19 nt, Artificial Sequence
  Description of Artificial Sequence: Synthetic oligonucleotide
  Antisense strand to SEQ ID NO: 1758467
cauguuaagagacauccca

SEQ ID NO: 1758469 - RNA, 19 nt, Artificial Sequence
  Description of Artificial Sequence: Synthetic oligonucleotide
  Sense strand starting at position 2777 of SEQ ID NO: 1562592
gaugucucuuaacaugaga

SEQ ID NO: 1758470 - RNA, 19 nt, Artificial Sequence
  Description of Artificial Sequence: Synthetic oligonucleotide
  Antisense strand to SEQ ID NO: 1758469
ucucauguuaagagacauc

SEQ ID NO: 1758471 - RNA, 19 nt, Artificial Sequence
  Description of Artificial Sequence: Synthetic oligonucleotide
  Sense strand starting at position 2780 of SEQ ID NO: 1562592
gucucuuaacaugagaagu

SEQ ID NO: 1758472 - RNA, 19 nt, Artificial Sequence
  Description of Artificial Sequence: Synthetic oligonucleotide
  Antisense strand to SEQ ID NO: 1758471
acuucucauguuaagagac

SEQ ID NO: 1758473 - RNA, 19 nt, Artificial Sequence
  Description of Artificial Sequence: Synthetic oligonucleotide
  Sense strand starting at position 2796 of SEQ ID NO: 1562592
aguacaugugccugacacu

SEQ ID NO: 1758474 - RNA, 19 nt, Artificial Sequence
  Description of Artificial Sequence: Synthetic oligonucleotide
  Antisense strand to SEQ ID NO: 1758473
agugucaggcacauguacu

SEQ ID NO: 1758475 - RNA, 19 nt, Artificial Sequence
  Description of Artificial Sequence: Synthetic oligonucleotide
  Sense strand starting at position 2878 of SEQ ID NO: 1562592
cagacaaacguguauggau

SEQ ID NO: 1758476 - RNA, 19 nt, Artificial Sequence
  Description of Artificial Sequence: Synthetic oligonucleotide
  Antisense strand to SEQ ID NO: 1758475
auccauacacguuugucug

SEQ ID NO: 1758477 - RNA, 19 nt, Artificial Sequence
  Description of Artificial Sequence: Synthetic oligonucleotide
  Sense strand starting at position 2993 of SEQ ID NO: 1562592
aagguuuauggaugugaaa

SEQ ID NO: 1758478 - RNA, 19 nt, Artificial Sequence
  Description of Artificial Sequence: Synthetic oligonucleotide
  Antisense strand to SEQ ID NO: 1758477
uuucacauccauaaaccuu

SEQ ID NO: 1758479 - RNA, 19 nt, Artificial Sequence
  Description of Artificial Sequence: Synthetic oligonucleotide
  Sense strand starting at position 3018 of SEQ ID NO: 1562592
gaggcaaaucuauguacaa

SEQ ID NO: 1758480 - RNA, 19 nt, Artificial Sequence
  Description of Artificial Sequence: Synthetic oligonucleotide
  Antisense strand to SEQ ID NO: 1758479
uuguacauagauuugccuc

SEQ ID NO: 1758481 - RNA, 19 nt, Artificial Sequence
  Description of Artificial Sequence: Synthetic oligonucleotide
  Sense strand starting at position 3019 of SEQ ID NO: 1562592
aggcaaaucuauguacaac

SEQ ID NO: 1758482 - RNA, 19 nt, Artificial Sequence
  Description of Artificial Sequence: Synthetic oligonucleotide
  Antisense strand to SEQ ID NO: 1758481
guuguacauagauuugccu

SEQ ID NO: 1758483 - RNA, 19 nt, Artificial Sequence
  Description of Artificial Sequence: Synthetic oligonucleotide
  Sense strand starting at position 3081 of SEQ ID NO: 1562592
gguugaagaauauguucuu

SEQ ID NO: 1758484 - RNA, 19 nt, Artificial Sequence
  Description of Artificial Sequence: Synthetic oligonucleotide
  Antisense strand to SEQ ID NO: 1758483
aagaacauauucuucaacc

SEQ ID NO: 1758485 - RNA, 19 nt, Artificial Sequence
  Description of Artificial Sequence: Synthetic oligonucleotide
  Sense strand starting at position 3082 of SEQ ID NO: 1562592
guugaagaauauguucuuu

SEQ ID NO: 1758486 - RNA, 19 nt, Artificial Sequence
  Description of Artificial Sequence: Synthetic oligonucleotide
  Antisense strand to SEQ ID NO: 1758485
aaagaacauauucuucaac

SEQ ID NO: 1758487 - RNA, 19 nt, Artificial Sequence
  Description of Artificial Sequence: Synthetic oligonucleotide
  Sense strand starting at position 3125 of SEQ ID NO: 1562592
guacuauauaugugaugua

SEQ ID NO: 1758488 - RNA, 19 nt, Artificial Sequence
  Description of Artificial Sequence: Synthetic oligonucleotide
  Antisense strand to SEQ ID NO: 1758487
uacaucacauauauaguac

SEQ ID NO: 1758489 - RNA, 19 nt, Artificial Sequence
  Description of Artificial Sequence: Synthetic oligonucleotide
  Sense strand starting at position 3130 of SEQ ID NO: 1562592
auauaugugauguaggagu

SEQ ID NO: 1758490 - RNA, 19 nt, Artificial Sequence
  Description of Artificial Sequence: Synthetic oligonucleotide
  Antisense strand to SEQ ID NO: 1758489
acuccuacaucacauauau

SEQ ID NO: 1758491 - RNA, 19 nt, Artificial Sequence
  Description of Artificial Sequence: Synthetic oligonucleotide
  Sense strand starting at position 3261 of SEQ ID NO: 1562592
ugagcuuuguuaccaaagu

SEQ ID NO: 1758492 - RNA, 19 nt, Artificial Sequence
  Description of Artificial Sequence: Synthetic oligonucleotide
  Antisense strand to SEQ ID NO: 1758491
acuuugguaacaaagcuca

SEQ ID NO: 1758493 - RNA, 19 nt, Artificial Sequence
  Description of Artificial Sequence: Synthetic oligonucleotide
  Sense strand starting at position 3657 of SEQ ID NO: 1562592
cucccacuuguacaguaau

SEQ ID NO: 1758494 - RNA, 19 nt, Artificial Sequence
  Description of Artificial Sequence: Synthetic oligonucleotide
  Antisense strand to SEQ ID NO: 1758493
auuacuguacaagugggag

SEQ ID NO: 1758495 - RNA, 19 nt, Artificial Sequence
  Description of Artificial Sequence: Synthetic oligonucleotide
  Sense strand starting at position 3660 of SEQ ID NO: 1562592
ccacuuguacaguaaugca

SEQ ID NO: 1758496 - RNA, 19 nt, Artificial Sequence
  Description of Artificial Sequence: Synthetic oligonucleotide
  Antisense strand to SEQ ID NO: 1758495
ugcauuacuguacaagugg

SEQ ID NO: 1758497 - RNA, 19 nt, Artificial Sequence
  Description of Artificial Sequence: Synthetic oligonucleotide
  Sense strand starting at position 3698 of SEQ ID NO: 1562592
ccaaguacaugguaagaca

SEQ ID NO: 1758498 - RNA, 19 nt, Artificial Sequence
  Description of Artificial Sequence: Synthetic oligonucleotide
  Antisense strand to SEQ ID NO: 1758497
ugucuuaccauguacuugg

SEQ ID NO: 1758499 - RNA, 19 nt, Artificial Sequence
  Description of Artificial Sequence: Synthetic oligonucleotide
  Sense strand starting at position 3766 of SEQ ID NO: 1562592
guugguucuauguaaguuu

SEQ ID NO: 1758500 - RNA, 19 nt, Artificial Sequence
  Description of Artificial Sequence: Synthetic oligonucleotide
  Antisense strand to SEQ ID NO: 1758499
aaacuuacauagaaccaac

SEQ ID NO: 1758501 - RNA, 19 nt, Artificial Sequence
  Description of Artificial Sequence: Synthetic oligonucleotide
  Sense strand starting at position 3826 of SEQ ID NO: 1562592
agguuaucucuuggaugua

SEQ ID NO: 1758502 - RNA, 19 nt, Artificial Sequence
  Description of Artificial Sequence: Synthetic oligonucleotide
  Antisense strand to SEQ ID NO: 1758501
uacauccaagagauaaccu

SEQ ID NO: 1758503 - RNA, 19 nt, Artificial Sequence
  Description of Artificial Sequence: Synthetic oligonucleotide
  Sense strand starting at position 3829 of SEQ ID NO: 1562592
uuaucucuuggauguagaa

SEQ ID NO: 1758504 - RNA, 19 nt, Artificial Sequence
  Description of Artificial Sequence: Synthetic oligonucleotide
  Antisense strand to SEQ ID NO: 1758503
uucuacauccaagagauaa

SEQ ID NO: 1758505 - RNA, 19 nt, Artificial Sequence
  Description of Artificial Sequence: Synthetic oligonucleotide
  Sense strand starting at position 80 of SEQ ID NO: 1562593
ucuacauguuugguuauuu

SEQ ID NO: 1758506 - RNA, 19 nt, Artificial Sequence
  Description of Artificial Sequence: Synthetic oligonucleotide
  Antisense strand to SEQ ID NO: 1758505
aaauaaccaaacauguaga

SEQ ID NO: 1758507 - RNA, 19 nt, Artificial Sequence
  Description of Artificial Sequence: Synthetic oligonucleotide
  Sense strand starting at position 152 of SEQ ID NO: 1562593
cccucuuugguaugugaag

SEQ ID NO: 1758508 - RNA, 19 nt, Artificial Sequence
  Description of Artificial Sequence: Synthetic oligonucleotide
  Antisense strand to SEQ ID NO: 1758507
cuucacauaccaaagaggg

SEQ ID NO: 1758509 - RNA, 19 nt, Artificial Sequence
  Description of Artificial Sequence: Synthetic oligonucleotide
  Sense strand starting at position 331 of SEQ ID NO: 1562593
caggaaagccugugcaauu

SEQ ID NO: 1758510 - RNA, 19 nt, Artificial Sequence
  Description of Artificial Sequence: Synthetic oligonucleotide
  Antisense strand to SEQ ID NO: 1758509
aauugcacaggcuuuccug

SEQ ID NO: 1758511 - RNA, 19 nt, Artificial Sequence
  Description of Artificial Sequence: Synthetic oligonucleotide
  Sense strand starting at position 366 of SEQ ID NO: 1562593
uggaguaguuggucccaaa

SEQ ID NO: 1758512 - RNA, 19 nt, Artificial Sequence
  Description of Artificial Sequence: Synthetic oligonucleotide
  Antisense strand to SEQ ID NO: 1758511
uuugggaccaacuacucca

SEQ ID NO: 1758513 - RNA, 19 nt, Artificial Sequence
  Description of Artificial Sequence: Synthetic oligonucleotide
  Sense strand starting at position 534 of SEQ ID NO: 1562593
cagggaucaccugguugaa

SEQ ID NO: 1758514 - RNA, 19 nt, Artificial Sequence
  Description of Artificial Sequence: Synthetic oligonucleotide
  Antisense strand to SEQ ID NO: 1758513
uucaaccaggugaucccug

SEQ ID NO: 1758515 - RNA, 19 nt, Artificial Sequence
  Description of Artificial Sequence: Synthetic oligonucleotide
  Sense strand starting at position 536 of SEQ ID NO: 1562593
gggaucaccugguugaaca

SEQ ID NO: 1758516 - RNA, 19 nt, Artificial Sequence
  Description of Artificial Sequence: Synthetic oligonucleotide
  Antisense strand to SEQ ID NO: 1758515
uguucaaccaggugauccc

SEQ ID NO: 1758517 - RNA, 19 nt, Artificial Sequence
  Description of Artificial Sequence: Synthetic oligonucleotide
  Sense strand starting at position 537 of SEQ ID NO: 1562593
ggaucaccugguugaacau

SEQ ID NO: 1758518 - RNA, 19 nt, Artificial Sequence
  Description of Artificial Sequence: Synthetic oligonucleotide
  Antisense strand to SEQ ID NO: 1758517
auguucaaccaggugaucc

SEQ ID NO: 1758519 - RNA, 19 nt, Artificial Sequence
  Description of Artificial Sequence: Synthetic oligonucleotide
  Sense strand starting at position 637 of SEQ ID NO: 1562593
acauuaguccuaugggaug

SEQ ID NO: 1758520 - RNA, 19 nt, Artificial Sequence
  Description of Artificial Sequence: Synthetic oligonucleotide
  Antisense strand to SEQ ID NO: 1758519
caucccauaggacuaaugu

SEQ ID NO: 1758521 - RNA, 19 nt, Artificial Sequence
  Description of Artificial Sequence: Synthetic oligonucleotide
  Sense strand starting at position 672 of SEQ ID NO: 1562593
gcaggaaacucaucuaagc

SEQ ID NO: 1758522 - RNA, 19 nt, Artificial Sequence
  Description of Artificial Sequence: Synthetic oligonucleotide
  Antisense strand to SEQ ID NO: 1758521
gcuuagaugaguuuccugc

SEQ ID NO: 1758523 - RNA, 19 nt, Artificial Sequence
  Description of Artificial Sequence: Synthetic oligonucleotide
  Sense strand starting at position 744 of SEQ ID NO: 1562593
uugugagagguuuauugga

SEQ ID NO: 1758524 - RNA, 19 nt, Artificial Sequence
  Description of Artificial Sequence: Synthetic oligonucleotide
  Antisense strand to SEQ ID NO: 1758523
uccaauaaaccucucacaa

SEQ ID NO: 1758525 - RNA, 19 nt, Artificial Sequence
  Description of Artificial Sequence: Synthetic oligonucleotide
  Sense strand starting at position 746 of SEQ ID NO: 1562593
gugagagguuuauuggaag

SEQ ID NO: 1758526 - RNA, 19 nt, Artificial Sequence
  Description of Artificial Sequence: Synthetic oligonucleotide
  Antisense strand to SEQ ID NO: 1758525
cuuccaauaaaccucucac

SEQ ID NO: 1758527 - RNA, 19 nt, Artificial Sequence
  Description of Artificial Sequence: Synthetic oligonucleotide
  Sense strand starting at position 798 of SEQ ID NO: 1562593
acaggauauuuaugacagu

SEQ ID NO: 1758528 - RNA, 19 nt, Artificial Sequence
  Description of Artificial Sequence: Synthetic oligonucleotide
  Antisense strand to SEQ ID NO: 1758527
acugucauaaauauccugu

SEQ ID NO: 1758529 - RNA, 19 nt, Artificial Sequence
  Description of Artificial Sequence: Synthetic oligonucleotide
  Sense strand starting at position 801 of SEQ ID NO: 1562593
ggauauuuaugacagucuu

SEQ ID NO: 1758530 - RNA, 19 nt, Artificial Sequence
  Description of Artificial Sequence: Synthetic oligonucleotide
  Antisense strand to SEQ ID NO: 1758529
aagacugucauaaauaucc

SEQ ID NO: 1758531 - RNA, 19 nt, Artificial Sequence
  Description of Artificial Sequence: Synthetic oligonucleotide
  Sense strand starting at position 1386 of SEQ ID NO: 1562593
cugaauuucuagggaaacg

SEQ ID NO: 1758532 - RNA, 19 nt, Artificial Sequence
  Description of Artificial Sequence: Synthetic oligonucleotide
  Antisense strand to SEQ ID NO: 1758531
cguuucccuagaaauucag

SEQ ID NO: 1758533 - RNA, 19 nt, Artificial Sequence
  Description of Artificial Sequence: Synthetic oligonucleotide
  Sense strand starting at position 1583 of SEQ ID NO: 1562593
agaaguuaauccucagacu

SEQ ID NO: 1758534 - RNA, 19 nt, Artificial Sequence
  Description of Artificial Sequence: Synthetic oligonucleotide
  Antisense strand to SEQ ID NO: 1758533
agucugaggauuaacuucu

SEQ ID NO: 1758535 - RNA, 19 nt, Artificial Sequence
  Description of Artificial Sequence: Synthetic oligonucleotide
  Sense strand starting at position 2029 of SEQ ID NO: 1562593
caguuucucuaauuggaug

SEQ ID NO: 1758536 - RNA, 19 nt, Artificial Sequence
  Description of Artificial Sequence: Synthetic oligonucleotide
  Antisense strand to SEQ ID NO: 1758535
cauccaauuagagaaacug

SEQ ID NO: 1758537 - RNA, 19 nt, Artificial Sequence
  Description of Artificial Sequence: Synthetic oligonucleotide
  Sense strand starting at position 2108 of SEQ ID NO: 1562593
ggcuguguuauaggaugga

SEQ ID NO: 1758538 - RNA, 19 nt, Artificial Sequence
  Description of Artificial Sequence: Synthetic oligonucleotide
  Antisense strand to SEQ ID NO: 1758537
uccauccuauaacacagcc

SEQ ID NO: 1758539 - RNA, 19 nt, Artificial Sequence
  Description of Artificial Sequence: Synthetic oligonucleotide
  Sense strand starting at position 2112 of SEQ ID NO: 1562593
guguuauaggauggaccua

SEQ ID NO: 1758540 - RNA, 19 nt, Artificial Sequence
  Description of Artificial Sequence: Synthetic oligonucleotide
  Antisense strand to SEQ ID NO: 1758539
uagguccauccuauaacac

SEQ ID NO: 1758541 - RNA, 19 nt, Artificial Sequence
  Description of Artificial Sequence: Synthetic oligonucleotide
  Sense strand starting at position 2156 of SEQ ID NO: 1562593
ggcuuagagcuauggugag

SEQ ID NO: 1758542 - RNA, 19 nt, Artificial Sequence
  Description of Artificial Sequence: Synthetic oligonucleotide
  Antisense strand to SEQ ID NO: 1758541
cucaccauagcucuaagcc

SEQ ID NO: 1758543 - RNA, 19 nt, Artificial Sequence
  Description of Artificial Sequence: Synthetic oligonucleotide
  Sense strand starting at position 2231 of SEQ ID NO: 1562593
aucacugauuguucugaaa

SEQ ID NO: 1758544 - RNA, 19 nt, Artificial Sequence
  Description of Artificial Sequence: Synthetic oligonucleotide
  Antisense strand to SEQ ID NO: 1758543
uuucagaacaaucagugau

SEQ ID NO: 1758545 - RNA, 19 nt, Artificial Sequence
  Description of Artificial Sequence: Synthetic oligonucleotide
  Sense strand starting at position 2301 of SEQ ID NO: 1562593
ugaggugcacagcauuaaa

SEQ ID NO: 1758546 - RNA, 19 nt, Artificial Sequence
  Description of Artificial Sequence: Synthetic oligonucleotide
  Antisense strand to SEQ ID NO: 1758545
uuuaaugcugugcaccuca

SEQ ID NO: 1758547 - RNA, 19 nt, Artificial Sequence
  Description of Artificial Sequence: Synthetic oligonucleotide
  Sense strand starting at position 2312 of SEQ ID NO: 1562593
gcauuaaagggcuaauaac

SEQ ID NO: 1758548 - RNA, 19 nt, Artificial Sequence
  Description of Artificial Sequence: Synthetic oligonucleotide
  Antisense strand to SEQ ID NO: 1758547
guuauuagcccuuuaaugc

SEQ ID NO: 1758549 - RNA, 19 nt, Artificial Sequence
  Description of Artificial Sequence: Synthetic oligonucleotide
  Sense strand starting at position 2733 of SEQ ID NO: 1562593
ccugaucuggcaugaauuc

SEQ ID NO: 1758550 - RNA, 19 nt, Artificial Sequence
  Description of Artificial Sequence: Synthetic oligonucleotide
  Antisense strand to SEQ ID NO: 1758549
gaauucaugccagaucagg

SEQ ID NO: 1758551 - RNA, 19 nt, Artificial Sequence
  Description of Artificial Sequence: Synthetic oligonucleotide
  Sense strand starting at position 2791 of SEQ ID NO: 1562593
acagucacugcagaaauau

SEQ ID NO: 1758552 - RNA, 19 nt, Artificial Sequence
  Description of Artificial Sequence: Synthetic oligonucleotide
  Antisense strand to SEQ ID NO: 1758551
auauuucugcagugacugu

SEQ ID NO: 1758553 - RNA, 19 nt, Artificial Sequence
  Description of Artificial Sequence: Synthetic oligonucleotide
  Sense strand starting at position 2848 of SEQ ID NO: 1562593
gguuacauaguacacgaua

SEQ ID NO: 1758554 - RNA, 19 nt, Artificial Sequence
  Description of Artificial Sequence: Synthetic oligonucleotide
  Antisense strand to SEQ ID NO: 1758553
uaucguguacuauguaacc

SEQ ID NO: 1758555 - RNA, 19 nt, Artificial Sequence
  Description of Artificial Sequence: Synthetic oligonucleotide
  Sense strand starting at position 2917 of SEQ ID NO: 1562593
ugcaucuggccucaaggau

SEQ ID NO: 1758556 - RNA, 19 nt, Artificial Sequence
  Description of Artificial Sequence: Synthetic oligonucleotide
  Antisense strand to SEQ ID NO: 1758555
auccuugaggccagaugca

SEQ ID NO: 1758557 - RNA, 19 nt, Artificial Sequence
  Description of Artificial Sequence: Synthetic oligonucleotide
  Sense strand starting at position 2924 of SEQ ID NO: 1562593
ggccucaaggauuggagau

SEQ ID NO: 1758558 - RNA, 19 nt, Artificial Sequence
  Description of Artificial Sequence: Synthetic oligonucleotide
  Antisense strand to SEQ ID NO: 1758557
aucuccaauccuugaggcc

SEQ ID NO: 1758559 - RNA, 19 nt, Artificial Sequence
  Description of Artificial Sequence: Synthetic oligonucleotide
  Sense strand starting at position 2925 of SEQ ID NO: 1562593
gccucaaggauuggagaua

SEQ ID NO: 1758560 - RNA, 19 nt, Artificial Sequence
  Description of Artificial Sequence: Synthetic oligonucleotide
  Antisense strand to SEQ ID NO: 1758559
uaucuccaauccuugaggc

SEQ ID NO: 1758561 - RNA, 19 nt, Artificial Sequence
  Description of Artificial Sequence: Synthetic oligonucleotide
  Sense strand starting at position 3007 of SEQ ID NO: 1562593
gguuguuugugauuacaca

SEQ ID NO: 1758562 - RNA, 19 nt, Artificial Sequence
  Description of Artificial Sequence: Synthetic oligonucleotide
  Antisense strand to SEQ ID NO: 1758561
uguguaaucacaaacaacc

SEQ ID NO: 1758563 - RNA, 19 nt, Artificial Sequence
  Description of Artificial Sequence: Synthetic oligonucleotide
  Sense strand starting at position 3008 of SEQ ID NO: 1562593
guuguuugugauuacacag

SEQ ID NO: 1758564 - RNA, 19 nt, Artificial Sequence
  Description of Artificial Sequence: Synthetic oligonucleotide
  Antisense strand to SEQ ID NO: 1758563
cuguguaaucacaaacaac

SEQ ID NO: 1758565 - RNA, 19 nt, Artificial Sequence
  Description of Artificial Sequence: Synthetic oligonucleotide
  Sense strand starting at position 3042 of SEQ ID NO: 1562593
aggcucugugucuacaaga

SEQ ID NO: 1758566 - RNA, 19 nt, Artificial Sequence
  Description of Artificial Sequence: Synthetic oligonucleotide
  Antisense strand to SEQ ID NO: 1758565
ucuuguagacacagagccu

SEQ ID NO: 1758567 - RNA, 19 nt, Artificial Sequence
  Description of Artificial Sequence: Synthetic oligonucleotide
  Sense strand starting at position 3086 of SEQ ID NO: 1562593
ugagaucugugucucucua

SEQ ID NO: 1758568 - RNA, 19 nt, Artificial Sequence
  Description of Artificial Sequence: Synthetic oligonucleotide
  Antisense strand to SEQ ID NO: 1758567
uagagagacacagaucuca

SEQ ID NO: 1758569 - RNA, 19 nt, Artificial Sequence
  Description of Artificial Sequence: Synthetic oligonucleotide
  Sense strand starting at position 3099 of SEQ ID NO: 1562593
ucucuagcauuugugucaa

SEQ ID NO: 1758570 - RNA, 19 nt, Artificial Sequence
  Description of Artificial Sequence: Synthetic oligonucleotide
  Antisense strand to SEQ ID NO: 1758569
uugacacaaaugcuagaga

SEQ ID NO: 1758571 - RNA, 19 nt, Artificial Sequence
  Description of Artificial Sequence: Synthetic oligonucleotide
  Sense strand starting at position 3101 of SEQ ID NO: 1562593
ucuagcauuugugucaaau

SEQ ID NO: 1758572 - RNA, 19 nt, Artificial Sequence
  Description of Artificial Sequence: Synthetic oligonucleotide
  Antisense strand to SEQ ID NO: 1758571
auuugacacaaaugcuaga

SEQ ID NO: 1758573 - RNA, 19 nt, Artificial Sequence
  Description of Artificial Sequence: Synthetic oligonucleotide
  Sense strand starting at position 3113 of SEQ ID NO: 1562593
gucaaauugugaucagaag

SEQ ID NO: 1758574 - RNA, 19 nt, Artificial Sequence
  Description of Artificial Sequence: Synthetic oligonucleotide
  Antisense strand to SEQ ID NO: 1758573
cuucugaucacaauuugac

SEQ ID NO: 1758575 - RNA, 19 nt, Artificial Sequence
  Description of Artificial Sequence: Synthetic oligonucleotide
  Sense strand starting at position 3135 of SEQ ID NO: 1562593
ugugguuuguuuguauuua

SEQ ID NO: 1758576 - RNA, 19 nt, Artificial Sequence
  Description of Artificial Sequence: Synthetic oligonucleotide
  Antisense strand to SEQ ID NO: 1758575
uaaauacaaacaaaccaca

SEQ ID NO: 1758577 - RNA, 19 nt, Artificial Sequence
  Description of Artificial Sequence: Synthetic oligonucleotide
  Sense strand starting at position 3622 of SEQ ID NO: 1562593
aauguucuguagccaaaug

SEQ ID NO: 1758578 - RNA, 19 nt, Artificial Sequence
  Description of Artificial Sequence: Synthetic oligonucleotide
  Antisense strand to SEQ ID NO: 1758577
cauuuggcuacagaacauu

SEQ ID NO: 1758579 - RNA, 19 nt, Artificial Sequence
  Description of Artificial Sequence: Synthetic oligonucleotide
  Sense strand starting at position 3643 of SEQ ID NO: 1562593
ggaagugcugcuuauguaa

SEQ ID NO: 1758580 - RNA, 19 nt, Artificial Sequence
  Description of Artificial Sequence: Synthetic oligonucleotide
  Antisense strand to SEQ ID NO: 1758579
uuacauaagcagcacuucc

SEQ ID NO: 1758581 - RNA, 19 nt, Artificial Sequence
  Description of Artificial Sequence: Synthetic oligonucleotide
  Sense strand starting at position 3707 of SEQ ID NO: 1562593
ggagucgcuuaauuuccua

SEQ ID NO: 1758582 - RNA, 19 nt, Artificial Sequence
  Description of Artificial Sequence: Synthetic oligonucleotide
  Antisense strand to SEQ ID NO: 1758581
uaggaaauuaagcgacucc

SEQ ID NO: 1758583 - RNA, 19 nt, Artificial Sequence
  Description of Artificial Sequence: Synthetic oligonucleotide
  Sense strand starting at position 3711 of SEQ ID NO: 1562593
ucgcuuaauuuccuagagu

SEQ ID NO: 1758584 - RNA, 19 nt, Artificial Sequence
  Description of Artificial Sequence: Synthetic oligonucleotide
  Antisense strand to SEQ ID NO: 1758583
acucuaggaaauuaagcga

SEQ ID NO: 1758585 - RNA, 19 nt, Artificial Sequence
  Description of Artificial Sequence: Synthetic oligonucleotide
  Sense strand starting at position 89 of SEQ ID NO: 1562594
gagugacugacauggugaa

SEQ ID NO: 1758586 - RNA, 19 nt, Artificial Sequence
  Description of Artificial Sequence: Synthetic oligonucleotide
  Antisense strand to SEQ ID NO: 1758585
uucaccaugucagucacuc

SEQ ID NO: 1758587 - RNA, 19 nt, Artificial Sequence
  Description of Artificial Sequence: Synthetic oligonucleotide
  Sense strand starting at position 90 of SEQ ID NO: 1562594
agugacugacauggugaaa

SEQ ID NO: 1758588 - RNA, 19 nt, Artificial Sequence
  Description of Artificial Sequence: Synthetic oligonucleotide
  Antisense strand to SEQ ID NO: 1758587
uuucaccaugucagucacu

SEQ ID NO: 1758589 - RNA, 19 nt, Artificial Sequence
  Description of Artificial Sequence: Synthetic oligonucleotide
  Sense strand starting at position 696 of SEQ ID NO: 1562594
uggagaauuccuggagccu

SEQ ID NO: 1758590 - RNA, 19 nt, Artificial Sequence
  Description of Artificial Sequence: Synthetic oligonucleotide
  Antisense strand to SEQ ID NO: 1758589
aggcuccaggaauucucca

SEQ ID NO: 1758591 - RNA, 19 nt, Artificial Sequence
  Description of Artificial Sequence: Synthetic oligonucleotide
  Sense strand starting at position 697 of SEQ ID NO: 1562594
ggagaauuccuggagccuu

SEQ ID NO: 1758592 - RNA, 19 nt, Artificial Sequence
  Description of Artificial Sequence: Synthetic oligonucleotide
  Antisense strand to SEQ ID NO: 1758591
aaggcuccaggaauucucc

SEQ ID NO: 1758593 - RNA, 19 nt, Artificial Sequence
  Description of Artificial Sequence: Synthetic oligonucleotide
  Sense strand starting at position 839 of SEQ ID NO: 1562594
uuuguaacacucgggaacu

SEQ ID NO: 1758594 - RNA, 19 nt, Artificial Sequence
  Description of Artificial Sequence: Synthetic oligonucleotide
  Antisense strand to SEQ ID NO: 1758593
aguucccgaguguuacaaa

SEQ ID NO: 1758595 - RNA, 19 nt, Artificial Sequence
  Description of Artificial Sequence: Synthetic oligonucleotide
  Sense strand starting at position 841 of SEQ ID NO: 1562594
uguaacacucgggaacuuu

SEQ ID NO: 1758596 - RNA, 19 nt, Artificial Sequence
  Description of Artificial Sequence: Synthetic oligonucleotide
  Antisense strand to SEQ ID NO: 1758595
aaaguucccgaguguuaca

SEQ ID NO: 1758597 - RNA, 19 nt, Artificial Sequence
  Description of Artificial Sequence: Synthetic oligonucleotide
  Sense strand starting at position 852 of SEQ ID NO: 1562594
ggaacuuucuaugccagca

SEQ ID NO: 1758598 - RNA, 19 nt, Artificial Sequence
  Description of Artificial Sequence: Synthetic oligonucleotide
  Antisense strand to SEQ ID NO: 1758597
ugcuggcauagaaaguucc

SEQ ID NO: 1758599 - RNA, 19 nt, Artificial Sequence
  Description of Artificial Sequence: Synthetic oligonucleotide
  Sense strand starting at position 1200 of SEQ ID NO: 1562594
guagacuacucggcaacuu

SEQ ID NO: 1758600 - RNA, 19 nt, Artificial Sequence
  Description of Artificial Sequence: Synthetic oligonucleotide
  Antisense strand to SEQ ID NO: 1758599
aaguugccgaguagucuac

SEQ ID NO: 1758601 - RNA, 19 nt, Artificial Sequence
  Description of Artificial Sequence: Synthetic oligonucleotide
  Sense strand starting at position 1738 of SEQ ID NO: 1562594
gcuugaagauggucaagau

SEQ ID NO: 1758602 - RNA, 19 nt, Artificial Sequence
  Description of Artificial Sequence: Synthetic oligonucleotide
  Antisense strand to SEQ ID NO: 1758601
aucuugaccaucuucaagc

SEQ ID NO: 1758603 - RNA, 19 nt, Artificial Sequence
  Description of Artificial Sequence: Synthetic oligonucleotide
  Sense strand starting at position 1817 of SEQ ID NO: 1562594
accgguaagagucgacgaa

SEQ ID NO: 1758604 - RNA, 19 nt, Artificial Sequence
  Description of Artificial Sequence: Synthetic oligonucleotide
  Antisense strand to SEQ ID NO: 1758603
uucgucgacucuuaccggu

SEQ ID NO: 1758605 - RNA, 19 nt, Artificial Sequence
  Description of Artificial Sequence: Synthetic oligonucleotide
  Sense strand starting at position 1818 of SEQ ID NO: 1562594
ccgguaagagucgacgaaa

SEQ ID NO: 1758606 - RNA, 19 nt, Artificial Sequence
  Description of Artificial Sequence: Synthetic oligonucleotide
  Antisense strand to SEQ ID NO: 1758605
uuucgucgacucuuaccgg

SEQ ID NO: 1758607 - RNA, 19 nt, Artificial Sequence
  Description of Artificial Sequence: Synthetic oligonucleotide
  Sense strand starting at position 2169 of SEQ ID NO: 1562594
gcugcuuccauggaaaggu

SEQ ID NO: 1758608 - RNA, 19 nt, Artificial Sequence
  Description of Artificial Sequence: Synthetic oligonucleotide
  Antisense strand to SEQ ID NO: 1758607
accuuuccauggaagcagc

SEQ ID NO: 1758609 - RNA, 19 nt, Artificial Sequence
  Description of Artificial Sequence: Synthetic oligonucleotide
  Sense strand starting at position 2621 of SEQ ID NO: 1562594
aagcuuucuuugcccggaa

SEQ ID NO: 1758610 - RNA, 19 nt, Artificial Sequence
  Description of Artificial Sequence: Synthetic oligonucleotide
  Antisense strand to SEQ ID NO: 1758609
uuccgggcaaagaaagcuu

SEQ ID NO: 1758611 - RNA, 19 nt, Artificial Sequence
  Description of Artificial Sequence: Synthetic oligonucleotide
  Sense strand starting at position 2622 of SEQ ID NO: 1562594
agcuuucuuugcccggaaa

SEQ ID NO: 1758612 - RNA, 19 nt, Artificial Sequence
  Description of Artificial Sequence: Synthetic oligonucleotide
  Antisense strand to SEQ ID NO: 1758611
uuuccgggcaaagaaagcu

SEQ ID NO: 1758613 - RNA, 19 nt, Artificial Sequence
  Description of Artificial Sequence: Synthetic oligonucleotide
  Sense strand starting at position 2624 of SEQ ID NO: 1562594
cuuucuuugcccggaaacu

SEQ ID NO: 1758614 - RNA, 19 nt, Artificial Sequence
  Description of Artificial Sequence: Synthetic oligonucleotide
  Antisense strand to SEQ ID NO: 1758613
aguuuccgggcaaagaaag

SEQ ID NO: 1758615 - RNA, 19 nt, Artificial Sequence
  Description of Artificial Sequence: Synthetic oligonucleotide
  Sense strand starting at position 2703 of SEQ ID NO: 1562594
ggcagaagugcucagucag

SEQ ID NO: 1758616 - RNA, 19 nt, Artificial Sequence
  Description of Artificial Sequence: Synthetic oligonucleotide
  Antisense strand to SEQ ID NO: 1758615
cugacugagcacuucugcc

SEQ ID NO: 1758617 - RNA, 19 nt, Artificial Sequence
  Description of Artificial Sequence: Synthetic oligonucleotide
  Sense strand starting at position 2735 of SEQ ID NO: 1562594
agaugagaagcuugacuuu

SEQ ID NO: 1758618 - RNA, 19 nt, Artificial Sequence
  Description of Artificial Sequence: Synthetic oligonucleotide
  Antisense strand to SEQ ID NO: 1758617
aaagucaagcuucucaucu

SEQ ID NO: 1758619 - RNA, 19 nt, Artificial Sequence
  Description of Artificial Sequence: Synthetic oligonucleotide
  Sense strand starting at position 2829 of SEQ ID NO: 1562594
gugccucugucaccacaau

SEQ ID NO: 1758620 - RNA, 19 nt, Artificial Sequence
  Description of Artificial Sequence: Synthetic oligonucleotide
  Antisense strand to SEQ ID NO: 1758619
auuguggugacagaggcac

SEQ ID NO: 1758621 - RNA, 19 nt, Artificial Sequence
  Description of Artificial Sequence: Synthetic oligonucleotide
  Sense strand starting at position 2914 of SEQ ID NO: 1562594
gcacuaccuuggccucaau

SEQ ID NO: 1758622 - RNA, 19 nt, Artificial Sequence
  Description of Artificial Sequence: Synthetic oligonucleotide
  Antisense strand to SEQ ID NO: 1758621
auugaggccaagguagugc

SEQ ID NO: 1758623 - RNA, 19 nt, Artificial Sequence
  Description of Artificial Sequence: Synthetic oligonucleotide
  Sense strand starting at position 2964 of SEQ ID NO: 1562594
ggccuuggucaagacacuu

SEQ ID NO: 1758624 - RNA, 19 nt, Artificial Sequence
  Description of Artificial Sequence: Synthetic oligonucleotide
  Antisense strand to SEQ ID NO: 1758623
aagugucuugaccaaggcc

SEQ ID NO: 1758625 - RNA, 19 nt, Artificial Sequence
  Description of Artificial Sequence: Synthetic oligonucleotide
  Sense strand starting at position 2986 of SEQ ID NO: 1562594
uucucuaaagcaugguuua

SEQ ID NO: 1758626 - RNA, 19 nt, Artificial Sequence
  Description of Artificial Sequence: Synthetic oligonucleotide
  Antisense strand to SEQ ID NO: 1758625
uaaaccaugcuuuagagaa

SEQ ID NO: 1758627 - RNA, 19 nt, Artificial Sequence
  Description of Artificial Sequence: Synthetic oligonucleotide
  Sense strand starting at position 2987 of SEQ ID NO: 1562594
ucucuaaagcaugguuuau

SEQ ID NO: 1758628 - RNA, 19 nt, Artificial Sequence
  Description of Artificial Sequence: Synthetic oligonucleotide
  Antisense strand to SEQ ID NO: 1758627
auaaaccaugcuuuagaga

SEQ ID NO: 1758629 - RNA, 19 nt, Artificial Sequence
  Description of Artificial Sequence: Synthetic oligonucleotide
  Sense strand starting at position 3367 of SEQ ID NO: 1562594
agcagcuuccuagggauau

SEQ ID NO: 1758630 - RNA, 19 nt, Artificial Sequence
  Description of Artificial Sequence: Synthetic oligonucleotide
  Antisense strand to SEQ ID NO: 1758629
auaucccuaggaagcugcu

SEQ ID NO: 1758631 - RNA, 19 nt, Artificial Sequence
  Description of Artificial Sequence: Synthetic oligonucleotide
  Sense strand starting at position 3417 of SEQ ID NO: 1562594
guuagaagucaggaaaugu

SEQ ID NO: 1758632 - RNA, 19 nt, Artificial Sequence
  Description of Artificial Sequence: Synthetic oligonucleotide
  Antisense strand to SEQ ID NO: 1758631
acauuuccugacuucuaac

SEQ ID NO: 1758633 - RNA, 19 nt, Artificial Sequence
  Description of Artificial Sequence: Synthetic oligonucleotide
  Sense strand starting at position 3441 of SEQ ID NO: 1562594
ccaccuaucugcuuggaga

SEQ ID NO: 1758634 - RNA, 19 nt, Artificial Sequence
  Description of Artificial Sequence: Synthetic oligonucleotide
  Antisense strand to SEQ ID NO: 1758633
ucuccaagcagauaggugg

SEQ ID NO: 1758635 - RNA, 19 nt, Artificial Sequence
  Description of Artificial Sequence: Synthetic oligonucleotide
  Sense strand starting at position 3442 of SEQ ID NO: 1562594
caccuaucugcuuggagac

SEQ ID NO: 1758636 - RNA, 19 nt, Artificial Sequence
  Description of Artificial Sequence: Synthetic oligonucleotide
  Antisense strand to SEQ ID NO: 1758635
gucuccaagcagauaggug

SEQ ID NO: 1758637 - RNA, 19 nt, Artificial Sequence
  Description of Artificial Sequence: Synthetic oligonucleotide
  Sense strand starting at position 3476 of SEQ ID NO: 1562594
ggagcuugcagacaaugua

SEQ ID NO: 1758638 - RNA, 19 nt, Artificial Sequence
  Description of Artificial Sequence: Synthetic oligonucleotide
  Antisense strand to SEQ ID NO: 1758637
uacauugucugcaagcucc

SEQ ID NO: 1758639 - RNA, 19 nt, Artificial Sequence
  Description of Artificial Sequence: Synthetic oligonucleotide
  Sense strand starting at position 3571 of SEQ ID NO: 1562594
gguagcucugaugguuuaa

SEQ ID NO: 1758640 - RNA, 19 nt, Artificial Sequence
  Description of Artificial Sequence: Synthetic oligonucleotide
  Antisense strand to SEQ ID NO: 1758639
uuaaaccaucagagcuacc

SEQ ID NO: 1758641 - RNA, 19 nt, Artificial Sequence
  Description of Artificial Sequence: Synthetic oligonucleotide
  Sense strand starting at position 3590 of SEQ ID NO: 1562594
aaguucuuccuguauugag

SEQ ID NO: 1758642 - RNA, 19 nt, Artificial Sequence
  Description of Artificial Sequence: Synthetic oligonucleotide
  Antisense strand to SEQ ID NO: 1758641
cucaauacaggaagaacuu

SEQ ID NO: 1758643 - RNA, 19 nt, Artificial Sequence
  Description of Artificial Sequence: Synthetic oligonucleotide
  Sense strand starting at position 3598 of SEQ ID NO: 1562594
ccuguauugagucgaagua

SEQ ID NO: 1758644 - RNA, 19 nt, Artificial Sequence
  Description of Artificial Sequence: Synthetic oligonucleotide
  Antisense strand to SEQ ID NO: 1758643
uacuucgacucaauacagg

SEQ ID NO: 1758645 - RNA, 19 nt, Artificial Sequence
  Description of Artificial Sequence: Synthetic oligonucleotide
  Sense strand starting at position 3599 of SEQ ID NO: 1562594
cuguauugagucgaaguau

SEQ ID NO: 1758646 - RNA, 19 nt, Artificial Sequence
  Description of Artificial Sequence: Synthetic oligonucleotide
  Antisense strand to SEQ ID NO: 1758645
auacuucgacucaauacag

SEQ ID NO: 1758647 - RNA, 19 nt, Artificial Sequence
  Description of Artificial Sequence: Synthetic oligonucleotide
  Sense strand starting at position 3642 of SEQ ID NO: 1562594
gguacuaguuuggccuuau

SEQ ID NO: 1758648 - RNA, 19 nt, Artificial Sequence
  Description of Artificial Sequence: Synthetic oligonucleotide
  Antisense strand to SEQ ID NO: 1758647
auaaggccaaacuaguacc

SEQ ID NO: 1758649 - RNA, 19 nt, Artificial Sequence
  Description of Artificial Sequence: Synthetic oligonucleotide
  Sense strand starting at position 3662 of SEQ ID NO: 1562594
cagaauaccgggcauguuu

SEQ ID NO: 1758650 - RNA, 19 nt, Artificial Sequence
  Description of Artificial Sequence: Synthetic oligonucleotide
  Antisense strand to SEQ ID NO: 1758649
aaacaugcccgguauucug

SEQ ID NO: 1758651 - RNA, 19 nt, Artificial Sequence
  Description of Artificial Sequence: Synthetic oligonucleotide
  Sense strand starting at position 3710 of SEQ ID NO: 1562594
ugggaaugauggucccauu

SEQ ID NO: 1758652 - RNA, 19 nt, Artificial Sequence
  Description of Artificial Sequence: Synthetic oligonucleotide
  Antisense strand to SEQ ID NO: 1758651
aaugggaccaucauuccca

SEQ ID NO: 1758653 - RNA, 19 nt, Artificial Sequence
  Description of Artificial Sequence: Synthetic oligonucleotide
  Sense strand starting at position 3713 of SEQ ID NO: 1562594
gaaugauggucccauuuac

SEQ ID NO: 1758654 - RNA, 19 nt, Artificial Sequence
  Description of Artificial Sequence: Synthetic oligonucleotide
  Antisense strand to SEQ ID NO: 1758653
guaaaugggaccaucauuc

SEQ ID NO: 1758655 - RNA, 19 nt, Artificial Sequence
  Description of Artificial Sequence: Synthetic oligonucleotide
  Sense strand starting at position 3759 of SEQ ID NO: 1562594
auauuaucagaguagugca

SEQ ID NO: 1758656 - RNA, 19 nt, Artificial Sequence
  Description of Artificial Sequence: Synthetic oligonucleotide
  Antisense strand to SEQ ID NO: 1758655
ugcacuacucugauaauau

SEQ ID NO: 1758657 - RNA, 19 nt, Artificial Sequence
  Description of Artificial Sequence: Synthetic oligonucleotide
  Sense strand starting at position 3764 of SEQ ID NO: 1562594
aucagaguagugcagucua

SEQ ID NO: 1758658 - RNA, 19 nt, Artificial Sequence
  Description of Artificial Sequence: Synthetic oligonucleotide
  Antisense strand to SEQ ID NO: 1758657
uagacugcacuacucugau

SEQ ID NO: 1758659 - RNA, 19 nt, Artificial Sequence
  Description of Artificial Sequence: Synthetic oligonucleotide
  Sense strand starting at position 3884 of SEQ ID NO: 1562594
auacacuaugguugcuuaa

SEQ ID NO: 1758660 - RNA, 19 nt, Artificial Sequence
  Description of Artificial Sequence: Synthetic oligonucleotide
  Antisense strand to SEQ ID NO: 1758659
uuaagcaaccauaguguau

SEQ ID NO: 1758661 - RNA, 19 nt, Artificial Sequence
  Description of Artificial Sequence: Synthetic oligonucleotide
  Sense strand starting at position 3886 of SEQ ID NO: 1562594
acacuaugguugcuuaagu

SEQ ID NO: 1758662 - RNA, 19 nt, Artificial Sequence
  Description of Artificial Sequence: Synthetic oligonucleotide
  Antisense strand to SEQ ID NO: 1758661
acuuaagcaaccauagugu

SEQ ID NO: 1758663 - RNA, 19 nt, Artificial Sequence
  Description of Artificial Sequence: Synthetic oligonucleotide
  Sense strand starting at position 3959 of SEQ ID NO: 1562594
guuaucuggcucuaauuga

SEQ ID NO: 1758664 - RNA, 19 nt, Artificial Sequence
  Description of Artificial Sequence: Synthetic oligonucleotide
  Antisense strand to SEQ ID NO: 1758663
ucaauuagagccagauaac

SEQ ID NO: 1758665 - RNA, 19 nt, Artificial Sequence
  Description of Artificial Sequence: Synthetic oligonucleotide
  Sense strand starting at position 306 of SEQ ID NO: 1562595
agcgaaguaucccuagcca

SEQ ID NO: 1758666 - RNA, 19 nt, Artificial Sequence
  Description of Artificial Sequence: Synthetic oligonucleotide
  Antisense strand to SEQ ID NO: 1758665
uggcuagggauacuucgcu

SEQ ID NO: 1758667 - RNA, 19 nt, Artificial Sequence
  Description of Artificial Sequence: Synthetic oligonucleotide
  Sense strand starting at position 476 of SEQ ID NO: 1562595
gcuggcuguccacaagaau

SEQ ID NO: 1758668 - RNA, 19 nt, Artificial Sequence
  Description of Artificial Sequence: Synthetic oligonucleotide
  Antisense strand to SEQ ID NO: 1758667
auucuuguggacagccagc

SEQ ID NO: 1758669 - RNA, 19 nt, Artificial Sequence
  Description of Artificial Sequence: Synthetic oligonucleotide
  Sense strand starting at position 560 of SEQ ID NO: 1562595
gggaaugguuagucaguga

SEQ ID NO: 1758670 - RNA, 19 nt, Artificial Sequence
  Description of Artificial Sequence: Synthetic oligonucleotide
  Antisense strand to SEQ ID NO: 1758669
ucacugacuaaccauuccc

SEQ ID NO: 1758671 - RNA, 19 nt, Artificial Sequence
  Description of Artificial Sequence: Synthetic oligonucleotide
  Sense strand starting at position 563 of SEQ ID NO: 1562595
aaugguuagucagugaauc

SEQ ID NO: 1758672 - RNA, 19 nt, Artificial Sequence
  Description of Artificial Sequence: Synthetic oligonucleotide
  Antisense strand to SEQ ID NO: 1758671
gauucacugacuaaccauu

SEQ ID NO: 1758673 - RNA, 19 nt, Artificial Sequence
  Description of Artificial Sequence: Synthetic oligonucleotide
  Sense strand starting at position 565 of SEQ ID NO: 1562595
ugguuagucagugaaucga

SEQ ID NO: 1758674 - RNA, 19 nt, Artificial Sequence
  Description of Artificial Sequence: Synthetic oligonucleotide
  Antisense strand to SEQ ID NO: 1758673
ucgauucacugacuaacca

SEQ ID NO: 1758675 - RNA, 19 nt, Artificial Sequence
  Description of Artificial Sequence: Synthetic oligonucleotide
  Sense strand starting at position 654 of SEQ ID NO: 1562595
acggcugagucuuaagcau

SEQ ID NO: 1758676 - RNA, 19 nt, Artificial Sequence
  Description of Artificial Sequence: Synthetic oligonucleotide
  Antisense strand to SEQ ID NO: 1758675
augcuuaagacucagccgu

SEQ ID NO: 1758677 - RNA, 19 nt, Artificial Sequence
  Description of Artificial Sequence: Synthetic oligonucleotide
  Sense strand starting at position 661 of SEQ ID NO: 1562595
agucuuaagcauugaguuc

SEQ ID NO: 1758678 - RNA, 19 nt, Artificial Sequence
  Description of Artificial Sequence: Synthetic oligonucleotide
  Antisense strand to SEQ ID NO: 1758677
gaacucaaugcuuaagacu

SEQ ID NO: 1758679 - RNA, 19 nt, Artificial Sequence
  Description of Artificial Sequence: Synthetic oligonucleotide
  Sense strand starting at position 674 of SEQ ID NO: 1562595
gaguucucagcuggacaaa

SEQ ID NO: 1758680 - RNA, 19 nt, Artificial Sequence
  Description of Artificial Sequence: Synthetic oligonucleotide
  Antisense strand to SEQ ID NO: 1758679
uuuguccagcugagaacuc

SEQ ID NO: 1758681 - RNA, 19 nt, Artificial Sequence
  Description of Artificial Sequence: Synthetic oligonucleotide
  Sense strand starting at position 675 of SEQ ID NO: 1562595
aguucucagcuggacaaau

SEQ ID NO: 1758682 - RNA, 19 nt, Artificial Sequence
  Description of Artificial Sequence: Synthetic oligonucleotide
  Antisense strand to SEQ ID NO: 1758681
auuuguccagcugagaacu

SEQ ID NO: 1758683 - RNA, 19 nt, Artificial Sequence
  Description of Artificial Sequence: Synthetic oligonucleotide
  Sense strand starting at position 882 of SEQ ID NO: 1562595
cggagaaauuuccaaguca

SEQ ID NO: 1758684 - RNA, 19 nt, Artificial Sequence
  Description of Artificial Sequence: Synthetic oligonucleotide
  Antisense strand to SEQ ID NO: 1758683
ugacuuggaaauuucuccg

SEQ ID NO: 1758685 - RNA, 19 nt, Artificial Sequence
  Description of Artificial Sequence: Synthetic oligonucleotide
  Sense strand starting at position 1007 of SEQ ID NO: 1562595
gcuagcggauugguuuaaa

SEQ ID NO: 1758686 - RNA, 19 nt, Artificial Sequence
  Description of Artificial Sequence: Synthetic oligonucleotide
  Antisense strand to SEQ ID NO: 1758685
uuuaaaccaauccgcuagc

SEQ ID NO: 1758687 - RNA, 19 nt, Artificial Sequence
  Description of Artificial Sequence: Synthetic oligonucleotide
  Sense strand starting at position 1010 of SEQ ID NO: 1562595
agcggauugguuuaaacuu

SEQ ID NO: 1758688 - RNA, 19 nt, Artificial Sequence
  Description of Artificial Sequence: Synthetic oligonucleotide
  Antisense strand to SEQ ID NO: 1758687
aaguuuaaaccaauccgcu

SEQ ID NO: 1758689 - RNA, 19 nt, Artificial Sequence
  Description of Artificial Sequence: Synthetic oligonucleotide
  Sense strand starting at position 1018 of SEQ ID NO: 1562595
gguuuaaacuuugggcuuu

SEQ ID NO: 1758690 - RNA, 19 nt, Artificial Sequence
  Description of Artificial Sequence: Synthetic oligonucleotide
  Antisense strand to SEQ ID NO: 1758689
aaagcccaaaguuuaaacc

SEQ ID NO: 1758691 - RNA, 19 nt, Artificial Sequence
  Description of Artificial Sequence: Synthetic oligonucleotide
  Sense strand starting at position 1183 of SEQ ID NO: 1562595
uggugucagucccuguaau

SEQ ID NO: 1758692 - RNA, 19 nt, Artificial Sequence
  Description of Artificial Sequence: Synthetic oligonucleotide
  Antisense strand to SEQ ID NO: 1758691
auuacagggacugacacca

SEQ ID NO: 1758693 - RNA, 19 nt, Artificial Sequence
  Description of Artificial Sequence: Synthetic oligonucleotide
  Sense strand starting at position 1184 of SEQ ID NO: 1562595
ggugucagucccuguaauc

SEQ ID NO: 1758694 - RNA, 19 nt, Artificial Sequence
  Description of Artificial Sequence: Synthetic oligonucleotide
  Antisense strand to SEQ ID NO: 1758693
gauuacagggacugacacc

SEQ ID NO: 1758695 - RNA, 19 nt, Artificial Sequence
  Description of Artificial Sequence: Synthetic oligonucleotide
  Sense strand starting at position 2242 of SEQ ID NO: 1562595
cgggcacuuucuugcugau

SEQ ID NO: 1758696 - RNA, 19 nt, Artificial Sequence
  Description of Artificial Sequence: Synthetic oligonucleotide
  Antisense strand to SEQ ID NO: 1758695
aucagcaagaaagugcccg

SEQ ID NO: 1758697 - RNA, 19 nt, Artificial Sequence
  Description of Artificial Sequence: Synthetic oligonucleotide
  Sense strand starting at position 2245 of SEQ ID NO: 1562595
gcacuuucuugcugaucca

SEQ ID NO: 1758698 - RNA, 19 nt, Artificial Sequence
  Description of Artificial Sequence: Synthetic oligonucleotide
  Antisense strand to SEQ ID NO: 1758697
uggaucagcaagaaagugc

SEQ ID NO: 1758699 - RNA, 19 nt, Artificial Sequence
  Description of Artificial Sequence: Synthetic oligonucleotide
  Sense strand starting at position 2667 of SEQ ID NO: 1562595
agugcagugucuugaacuu

SEQ ID NO: 1758700 - RNA, 19 nt, Artificial Sequence
  Description of Artificial Sequence: Synthetic oligonucleotide
  Antisense strand to SEQ ID NO: 1758699
aaguucaagacacugcacu

SEQ ID NO: 1758701 - RNA, 19 nt, Artificial Sequence
  Description of Artificial Sequence: Synthetic oligonucleotide
  Sense strand starting at position 2887 of SEQ ID NO: 1562595
ggauuacgugccugagcua

SEQ ID NO: 1758702 - RNA, 19 nt, Artificial Sequence
  Description of Artificial Sequence: Synthetic oligonucleotide
  Antisense strand to SEQ ID NO: 1758701
uagcucaggcacguaaucc

SEQ ID NO: 1758703 - RNA, 19 nt, Artificial Sequence
  Description of Artificial Sequence: Synthetic oligonucleotide
  Sense strand starting at position 2942 of SEQ ID NO: 1562595
guggcagaacugggagaau

SEQ ID NO: 1758704 - RNA, 19 nt, Artificial Sequence
  Description of Artificial Sequence: Synthetic oligonucleotide
  Antisense strand to SEQ ID NO: 1758703
auucucccaguucugccac

SEQ ID NO: 1758705 - RNA, 19 nt, Artificial Sequence
  Description of Artificial Sequence: Synthetic oligonucleotide
  Sense strand starting at position 2983 of SEQ ID NO: 1562595
uucccuaggguuuguugaa

SEQ ID NO: 1758706 - RNA, 19 nt, Artificial Sequence
  Description of Artificial Sequence: Synthetic oligonucleotide
  Antisense strand to SEQ ID NO: 1758705
uucaacaaacccuagggaa

SEQ ID NO: 1758707 - RNA, 19 nt, Artificial Sequence
  Description of Artificial Sequence: Synthetic oligonucleotide
  Sense strand starting at position 3002 of SEQ ID NO: 1562595
ggauuuguaucugaggaaa

SEQ ID NO: 1758708 - RNA, 19 nt, Artificial Sequence
  Description of Artificial Sequence: Synthetic oligonucleotide
  Antisense strand to SEQ ID NO: 1758707
uuuccucagauacaaaucc

SEQ ID NO: 1758709 - RNA, 19 nt, Artificial Sequence
  Description of Artificial Sequence: Synthetic oligonucleotide
  Sense strand starting at position 3004 of SEQ ID NO: 1562595
auuuguaucugaggaaagc

SEQ ID NO: 1758710 - RNA, 19 nt, Artificial Sequence
  Description of Artificial Sequence: Synthetic oligonucleotide
  Antisense strand to SEQ ID NO: 1758709
gcuuuccucagauacaaau

SEQ ID NO: 1758711 - RNA, 19 nt, Artificial Sequence
  Description of Artificial Sequence: Synthetic oligonucleotide
  Sense strand starting at position 3005 of SEQ ID NO: 1562595
uuuguaucugaggaaagca

SEQ ID NO: 1758712 - RNA, 19 nt, Artificial Sequence
  Description of Artificial Sequence: Synthetic oligonucleotide
  Antisense strand to SEQ ID NO: 1758711
ugcuuuccucagauacaaa

SEQ ID NO: 1758713 - RNA, 19 nt, Artificial Sequence
  Description of Artificial Sequence: Synthetic oligonucleotide
  Sense strand starting at position 3054 of SEQ ID NO: 1562595
gagaaacaguaguauagga

SEQ ID NO: 1758714 - RNA, 19 nt, Artificial Sequence
  Description of Artificial Sequence: Synthetic oligonucleotide
  Antisense strand to SEQ ID NO: 1758713
uccuauacuacuguuucuc

SEQ ID NO: 1758715 - RNA, 19 nt, Artificial Sequence
  Description of Artificial Sequence: Synthetic oligonucleotide
  Sense strand starting at position 3492 of SEQ ID NO: 1562595
uccugcaacuugugauaca

SEQ ID NO: 1758716 - RNA, 19 nt, Artificial Sequence
  Description of Artificial Sequence: Synthetic oligonucleotide
  Antisense strand to SEQ ID NO: 1758715
uguaucacaaguugcagga

SEQ ID NO: 1758717 - RNA, 19 nt, Artificial Sequence
  Description of Artificial Sequence: Synthetic oligonucleotide
  Sense strand starting at position 3593 of SEQ ID NO: 1562595
ggauauauugggugacacu

SEQ ID NO: 1758718 - RNA, 19 nt, Artificial Sequence
  Description of Artificial Sequence: Synthetic oligonucleotide
  Antisense strand to SEQ ID NO: 1758717
agugucacccaauauaucc

SEQ ID NO: 1758719 - RNA, 19 nt, Artificial Sequence
  Description of Artificial Sequence: Synthetic oligonucleotide
  Sense strand starting at position 3732 of SEQ ID NO: 1562595
aucuuuauaucugugggua

SEQ ID NO: 1758720 - RNA, 19 nt, Artificial Sequence
  Description of Artificial Sequence: Synthetic oligonucleotide
  Antisense strand to SEQ ID NO: 1758719
uacccacagauauaaagau

SEQ ID NO: 1758721 - RNA, 19 nt, Artificial Sequence
  Description of Artificial Sequence: Synthetic oligonucleotide
  Sense strand starting at position 3733 of SEQ ID NO: 1562595
ucuuuauaucuguggguac

SEQ ID NO: 1758722 - RNA, 19 nt, Artificial Sequence
  Description of Artificial Sequence: Synthetic oligonucleotide
  Antisense strand to SEQ ID NO: 1758721
guacccacagauauaaaga

SEQ ID NO: 1758723 - RNA, 19 nt, Artificial Sequence
  Description of Artificial Sequence: Synthetic oligonucleotide
  Sense strand starting at position 3772 of SEQ ID NO: 1562595
agaagugagacaugucaua

SEQ ID NO: 1758724 - RNA, 19 nt, Artificial Sequence
  Description of Artificial Sequence: Synthetic oligonucleotide
  Antisense strand to SEQ ID NO: 1758723
uaugacaugucucacuucu

SEQ ID NO: 1758725 - RNA, 19 nt, Artificial Sequence
  Description of Artificial Sequence: Synthetic oligonucleotide
  Sense strand starting at position 3889 of SEQ ID NO: 1562595
cauaguauuccauguugga

SEQ ID NO: 1758726 - RNA, 19 nt, Artificial Sequence
  Description of Artificial Sequence: Synthetic oligonucleotide
  Antisense strand to SEQ ID NO: 1758725
uccaacauggaauacuaug

SEQ ID NO: 1758727 - RNA, 19 nt, Artificial Sequence
  Description of Artificial Sequence: Synthetic oligonucleotide
  Sense strand starting at position 3903 of SEQ ID NO: 1562595
uuggaaauguaccacauuu

SEQ ID NO: 1758728 - RNA, 19 nt, Artificial Sequence
  Description of Artificial Sequence: Synthetic oligonucleotide
  Antisense strand to SEQ ID NO: 1758727
aaaugugguacauuuccaa

SEQ ID NO: 1758729 - RNA, 19 nt, Artificial Sequence
  Description of Artificial Sequence: Synthetic oligonucleotide
  Sense strand starting at position 325 of SEQ ID NO: 1562596
cccacuauguucuuggcaa

SEQ ID NO: 1758730 - RNA, 19 nt, Artificial Sequence
  Description of Artificial Sequence: Synthetic oligonucleotide
  Antisense strand to SEQ ID NO: 1758729
uugccaagaacauaguggg

SEQ ID NO: 1758731 - RNA, 19 nt, Artificial Sequence
  Description of Artificial Sequence: Synthetic oligonucleotide
  Sense strand starting at position 326 of SEQ ID NO: 1562596
ccacuauguucuuggcaag

SEQ ID NO: 1758732 - RNA, 19 nt, Artificial Sequence
  Description of Artificial Sequence: Synthetic oligonucleotide
  Antisense strand to SEQ ID NO: 1758731
cuugccaagaacauagugg

SEQ ID NO: 1758733 - RNA, 19 nt, Artificial Sequence
  Description of Artificial Sequence: Synthetic oligonucleotide
  Sense strand starting at position 415 of SEQ ID NO: 1562596
uacccauugucugcaguga

SEQ ID NO: 1758734 - RNA, 19 nt, Artificial Sequence
  Description of Artificial Sequence: Synthetic oligonucleotide
  Antisense strand to SEQ ID NO: 1758733
ucacugcagacaaugggua

SEQ ID NO: 1758735 - RNA, 19 nt, Artificial Sequence
  Description of Artificial Sequence: Synthetic oligonucleotide
  Sense strand starting at position 419 of SEQ ID NO: 1562596
cauugucugcagugaagau

SEQ ID NO: 1758736 - RNA, 19 nt, Artificial Sequence
  Description of Artificial Sequence: Synthetic oligonucleotide
  Antisense strand to SEQ ID NO: 1758735
aucuucacugcagacaaug

SEQ ID NO: 1758737 - RNA, 19 nt, Artificial Sequence
  Description of Artificial Sequence: Synthetic oligonucleotide
  Sense strand starting at position 537 of SEQ ID NO: 1562596
gccugaacgcucugcaaag

SEQ ID NO: 1758738 - RNA, 19 nt, Artificial Sequence
  Description of Artificial Sequence: Synthetic oligonucleotide
  Antisense strand to SEQ ID NO: 1758737
cuuugcagagcguucaggc

SEQ ID NO: 1758739 - RNA, 19 nt, Artificial Sequence
  Description of Artificial Sequence: Synthetic oligonucleotide
  Sense strand starting at position 648 of SEQ ID NO: 1562596
caagaucacuuacgugaga

SEQ ID NO: 1758740 - RNA, 19 nt, Artificial Sequence
  Description of Artificial Sequence: Synthetic oligonucleotide
  Antisense strand to SEQ ID NO: 1758739
ucucacguaagugaucuug

SEQ ID NO: 1758741 - RNA, 19 nt, Artificial Sequence
  Description of Artificial Sequence: Synthetic oligonucleotide
  Sense strand starting at position 653 of SEQ ID NO: 1562596
ucacuuacgugagaggcau

SEQ ID NO: 1758742 - RNA, 19 nt, Artificial Sequence
  Description of Artificial Sequence: Synthetic oligonucleotide
  Antisense strand to SEQ ID NO: 1758741
augccucucacguaaguga

SEQ ID NO: 1758743 - RNA, 19 nt, Artificial Sequence
  Description of Artificial Sequence: Synthetic oligonucleotide
  Sense strand starting at position 657 of SEQ ID NO: 1562596
uuacgugagaggcauagua

SEQ ID NO: 1758744 - RNA, 19 nt, Artificial Sequence
  Description of Artificial Sequence: Synthetic oligonucleotide
  Antisense strand to SEQ ID NO: 1758743
uacuaugccucucacguaa

SEQ ID NO: 1758745 - RNA, 19 nt, Artificial Sequence
  Description of Artificial Sequence: Synthetic oligonucleotide
  Sense strand starting at position 659 of SEQ ID NO: 1562596
acgugagaggcauaguaca

SEQ ID NO: 1758746 - RNA, 19 nt, Artificial Sequence
  Description of Artificial Sequence: Synthetic oligonucleotide
  Antisense strand to SEQ ID NO: 1758745
uguacuaugccucucacgu

SEQ ID NO: 1758747 - RNA, 19 nt, Artificial Sequence
  Description of Artificial Sequence: Synthetic oligonucleotide
  Sense strand starting at position 1088 of SEQ ID NO: 1562596
cggccauuccugugaggua

SEQ ID NO: 1758748 - RNA, 19 nt, Artificial Sequence
  Description of Artificial Sequence: Synthetic oligonucleotide
  Antisense strand to SEQ ID NO: 1758747
uaccucacaggaauggccg

SEQ ID NO: 1758749 - RNA, 19 nt, Artificial Sequence
  Description of Artificial Sequence: Synthetic oligonucleotide
  Sense strand starting at position 1089 of SEQ ID NO: 1562596
ggccauuccugugagguag

SEQ ID NO: 1758750 - RNA, 19 nt, Artificial Sequence
  Description of Artificial Sequence: Synthetic oligonucleotide
  Antisense strand to SEQ ID NO: 1758749
cuaccucacaggaauggcc

SEQ ID NO: 1758751 - RNA, 19 nt, Artificial Sequence
  Description of Artificial Sequence: Synthetic oligonucleotide
  Sense strand starting at position 1319 of SEQ ID NO: 1562596
gcaauccauugggaggaaa

SEQ ID NO: 1758752 - RNA, 19 nt, Artificial Sequence
  Description of Artificial Sequence: Synthetic oligonucleotide
  Antisense strand to SEQ ID NO: 1758751
uuuccucccaauggauugc

SEQ ID NO: 1758753 - RNA, 19 nt, Artificial Sequence
  Description of Artificial Sequence: Synthetic oligonucleotide
  Sense strand starting at position 1409 of SEQ ID NO: 1562596
cacguagaagucugugaac

SEQ ID NO: 1758754 - RNA, 19 nt, Artificial Sequence
  Description of Artificial Sequence: Synthetic oligonucleotide
  Antisense strand to SEQ ID NO: 1758753
guucacagacuucuacgug

SEQ ID NO: 1758755 - RNA, 19 nt, Artificial Sequence
  Description of Artificial Sequence: Synthetic oligonucleotide
  Sense strand starting at position 1453 of SEQ ID NO: 1562596
ccagguugggagugguaga

SEQ ID NO: 1758756 - RNA, 19 nt, Artificial Sequence
  Description of Artificial Sequence: Synthetic oligonucleotide
  Antisense strand to SEQ ID NO: 1758755
ucuaccacucccaaccugg

SEQ ID NO: 1758757 - RNA, 19 nt, Artificial Sequence
  Description of Artificial Sequence: Synthetic oligonucleotide
  Sense strand starting at position 1506 of SEQ ID NO: 1562596
ccgaggucgucggcaaaga

SEQ ID NO: 1758758 - RNA, 19 nt, Artificial Sequence
  Description of Artificial Sequence: Synthetic oligonucleotide
  Antisense strand to SEQ ID NO: 1758757
ucuuugccgacgaccucgg

SEQ ID NO: 1758759 - RNA, 19 nt, Artificial Sequence
  Description of Artificial Sequence: Synthetic oligonucleotide
  Sense strand starting at position 1507 of SEQ ID NO: 1562596
cgaggucgucggcaaagau

SEQ ID NO: 1758760 - RNA, 19 nt, Artificial Sequence
  Description of Artificial Sequence: Synthetic oligonucleotide
  Antisense strand to SEQ ID NO: 1758759
aucuuugccgacgaccucg

SEQ ID NO: 1758761 - RNA, 19 nt, Artificial Sequence
  Description of Artificial Sequence: Synthetic oligonucleotide
  Sense strand starting at position 1516 of SEQ ID NO: 1562596
cggcaaagaucagcacgau

SEQ ID NO: 1758762 - RNA, 19 nt, Artificial Sequence
  Description of Artificial Sequence: Synthetic oligonucleotide
  Antisense strand to SEQ ID NO: 1758761
aucgugcugaucuuugccg

SEQ ID NO: 1758763 - RNA, 19 nt, Artificial Sequence
  Description of Artificial Sequence: Synthetic oligonucleotide
  Sense strand starting at position 1519 of SEQ ID NO: 1562596
caaagaucagcacgauguu

SEQ ID NO: 1758764 - RNA, 19 nt, Artificial Sequence
  Description of Artificial Sequence: Synthetic oligonucleotide
  Antisense strand to SEQ ID NO: 1758763
aacaucgugcugaucuuug

SEQ ID NO: 1758765 - RNA, 19 nt, Artificial Sequence
  Description of Artificial Sequence: Synthetic oligonucleotide
  Sense strand starting at position 1656 of SEQ ID NO: 1562596
ggcucuuuccgauaccgca

SEQ ID NO: 1758766 - RNA, 19 nt, Artificial Sequence
  Description of Artificial Sequence: Synthetic oligonucleotide
  Antisense strand to SEQ ID NO: 1758765
ugcgguaucggaaagagcc

SEQ ID NO: 1758767 - RNA, 19 nt, Artificial Sequence
  Description of Artificial Sequence: Synthetic oligonucleotide
  Sense strand starting at position 1821 of SEQ ID NO: 1562596
cagauucucgagcggagau

SEQ ID NO: 1758768 - RNA, 19 nt, Artificial Sequence
  Description of Artificial Sequence: Synthetic oligonucleotide
  Antisense strand to SEQ ID NO: 1758767
aucuccgcucgagaaucug

SEQ ID NO: 1758769 - RNA, 19 nt, Artificial Sequence
  Description of Artificial Sequence: Synthetic oligonucleotide
  Sense strand starting at position 2291 of SEQ ID NO: 1562596
cgggcccuccuguaagaga

SEQ ID NO: 1758770 - RNA, 19 nt, Artificial Sequence
  Description of Artificial Sequence: Synthetic oligonucleotide
  Antisense strand to SEQ ID NO: 1758769
ucucuuacaggagggcccg

SEQ ID NO: 1758771 - RNA, 19 nt, Artificial Sequence
  Description of Artificial Sequence: Synthetic oligonucleotide
  Sense strand starting at position 2502 of SEQ ID NO: 1562596
guguggaguguuugaggca

SEQ ID NO: 1758772 - RNA, 19 nt, Artificial Sequence
  Description of Artificial Sequence: Synthetic oligonucleotide
  Antisense strand to SEQ ID NO: 1758771
ugccucaaacacuccacac

SEQ ID NO: 1758773 - RNA, 19 nt, Artificial Sequence
  Description of Artificial Sequence: Synthetic oligonucleotide
  Sense strand starting at position 2507 of SEQ ID NO: 1562596
gaguguuugaggcaggugu

SEQ ID NO: 1758774 - RNA, 19 nt, Artificial Sequence
  Description of Artificial Sequence: Synthetic oligonucleotide
  Antisense strand to SEQ ID NO: 1758773
acaccugccucaaacacuc

SEQ ID NO: 1758775 - RNA, 19 nt, Artificial Sequence
  Description of Artificial Sequence: Synthetic oligonucleotide
  Sense strand starting at position 2579 of SEQ ID NO: 1562596
uuuguaguguuugagggau

SEQ ID NO: 1758776 - RNA, 19 nt, Artificial Sequence
  Description of Artificial Sequence: Synthetic oligonucleotide
  Antisense strand to SEQ ID NO: 1758775
aucccucaaacacuacaaa

SEQ ID NO: 1758777 - RNA, 19 nt, Artificial Sequence
  Description of Artificial Sequence: Synthetic oligonucleotide
  Sense strand starting at position 2581 of SEQ ID NO: 1562596
uguaguguuugagggauau

SEQ ID NO: 1758778 - RNA, 19 nt, Artificial Sequence
  Description of Artificial Sequence: Synthetic oligonucleotide
  Antisense strand to SEQ ID NO: 1758777
auaucccucaaacacuaca

SEQ ID NO: 1758779 - RNA, 19 nt, Artificial Sequence
  Description of Artificial Sequence: Synthetic oligonucleotide
  Sense strand starting at position 2583 of SEQ ID NO: 1562596
uaguguuugagggauaugu

SEQ ID NO: 1758780 - RNA, 19 nt, Artificial Sequence
  Description of Artificial Sequence: Synthetic oligonucleotide
  Antisense strand to SEQ ID NO: 1758779
acauaucccucaaacacua

SEQ ID NO: 1758781 - RNA, 19 nt, Artificial Sequence
  Description of Artificial Sequence: Synthetic oligonucleotide
  Sense strand starting at position 2585 of SEQ ID NO: 1562596
guguuugagggauaugugu

SEQ ID NO: 1758782 - RNA, 19 nt, Artificial Sequence
  Description of Artificial Sequence: Synthetic oligonucleotide
  Antisense strand to SEQ ID NO: 1758781
acacauaucccucaaacac

SEQ ID NO: 1758783 - RNA, 19 nt, Artificial Sequence
  Description of Artificial Sequence: Synthetic oligonucleotide
  Sense strand starting at position 2659 of SEQ ID NO: 1562596
ggguguguuugguguuuga

SEQ ID NO: 1758784 - RNA, 19 nt, Artificial Sequence
  Description of Artificial Sequence: Synthetic oligonucleotide
  Antisense strand to SEQ ID NO: 1758783
ucaaacaccaaacacaccc

SEQ ID NO: 1758785 - RNA, 19 nt, Artificial Sequence
  Description of Artificial Sequence: Synthetic oligonucleotide
  Sense strand starting at position 2683 of SEQ ID NO: 1562596
gugugugguugagguguau

SEQ ID NO: 1758786 - RNA, 19 nt, Artificial Sequence
  Description of Artificial Sequence: Synthetic oligonucleotide
  Antisense strand to SEQ ID NO: 1758785
auacaccucaaccacacac

SEQ ID NO: 1758787 - RNA, 19 nt, Artificial Sequence
  Description of Artificial Sequence: Synthetic oligonucleotide
  Sense strand starting at position 2714 of SEQ ID NO: 1562596
guguguaguguuugaggca

SEQ ID NO: 1758788 - RNA, 19 nt, Artificial Sequence
  Description of Artificial Sequence: Synthetic oligonucleotide
  Antisense strand to SEQ ID NO: 1758787
ugccucaaacacuacacac

SEQ ID NO: 1758789 - RNA, 19 nt, Artificial Sequence
  Description of Artificial Sequence: Synthetic oligonucleotide
  Sense strand starting at position 2719 of SEQ ID NO: 1562596
uaguguuugaggcacguau

SEQ ID NO: 1758790 - RNA, 19 nt, Artificial Sequence
  Description of Artificial Sequence: Synthetic oligonucleotide
  Antisense strand to SEQ ID NO: 1758789
auacgugccucaaacacua

SEQ ID NO: 1758791 - RNA, 19 nt, Artificial Sequence
  Description of Artificial Sequence: Synthetic oligonucleotide
  Sense strand starting at position 2761 of SEQ ID NO: 1562596
guguuagagguguggcgua

SEQ ID NO: 1758792 - RNA, 19 nt, Artificial Sequence
  Description of Artificial Sequence: Synthetic oligonucleotide
  Antisense strand to SEQ ID NO: 1758791
uacgccacaccucuaacac

SEQ ID NO: 1758793 - RNA, 19 nt, Artificial Sequence
  Description of Artificial Sequence: Synthetic oligonucleotide
  Sense strand starting at position 2781 of SEQ ID NO: 1562596
guguguuugcggugguuga

SEQ ID NO: 1758794 - RNA, 19 nt, Artificial Sequence
  Description of Artificial Sequence: Synthetic oligonucleotide
  Antisense strand to SEQ ID NO: 1758793
ucaaccaccgcaaacacac

SEQ ID NO: 1758795 - RNA, 19 nt, Artificial Sequence
  Description of Artificial Sequence: Synthetic oligonucleotide
  Sense strand starting at position 3533 of SEQ ID NO: 1562596
gugaacucagaaugcagaa

SEQ ID NO: 1758796 - RNA, 19 nt, Artificial Sequence
  Description of Artificial Sequence: Synthetic oligonucleotide
  Antisense strand to SEQ ID NO: 1758795
uucugcauucugaguucac

SEQ ID NO: 1758797 - RNA, 19 nt, Artificial Sequence
  Description of Artificial Sequence: Synthetic oligonucleotide
  Sense strand starting at position 3579 of SEQ ID NO: 1562596
uggugcagucgguaggaua

SEQ ID NO: 1758798 - RNA, 19 nt, Artificial Sequence
  Description of Artificial Sequence: Synthetic oligonucleotide
  Antisense strand to SEQ ID NO: 1758797
uauccuaccgacugcacca

SEQ ID NO: 1758799 - RNA, 19 nt, Artificial Sequence
  Description of Artificial Sequence: Synthetic oligonucleotide
  Sense strand starting at position 3580 of SEQ ID NO: 1562596
ggugcagucgguaggauaa

SEQ ID NO: 1758800 - RNA, 19 nt, Artificial Sequence
  Description of Artificial Sequence: Synthetic oligonucleotide
  Antisense strand to SEQ ID NO: 1758799
uuauccuaccgacugcacc

SEQ ID NO: 1758801 - RNA, 19 nt, Artificial Sequence
  Description of Artificial Sequence: Synthetic oligonucleotide
  Sense strand starting at position 3867 of SEQ ID NO: 1562596
cugucauaaagaggguaga

SEQ ID NO: 1758802 - RNA, 19 nt, Artificial Sequence
  Description of Artificial Sequence: Synthetic oligonucleotide
  Antisense strand to SEQ ID NO: 1758801
ucuacccucuuuaugacag

SEQ ID NO: 1758803 - RNA, 19 nt, Artificial Sequence
  Description of Artificial Sequence: Synthetic oligonucleotide
  Sense strand starting at position 3957 of SEQ ID NO: 1562596
ucggaugcgucuaguuaga

SEQ ID NO: 1758804 - RNA, 19 nt, Artificial Sequence
  Description of Artificial Sequence: Synthetic oligonucleotide
  Antisense strand to SEQ ID NO: 1758803
ucuaacuagacgcauccga

SEQ ID NO: 1758805 - RNA, 19 nt, Artificial Sequence
  Description of Artificial Sequence: Synthetic oligonucleotide
  Sense strand starting at position 3959 of SEQ ID NO: 1562596
ggaugcgucuaguuagaca

SEQ ID NO: 1758806 - RNA, 19 nt, Artificial Sequence
  Description of Artificial Sequence: Synthetic oligonucleotide
  Antisense strand to SEQ ID NO: 1758805
ugucuaacuagacgcaucc

SEQ ID NO: 1758807 - RNA, 19 nt, Artificial Sequence
  Description of Artificial Sequence: Synthetic oligonucleotide
  Sense strand starting at position 3964 of SEQ ID NO: 1562596
cgucuaguuagacagacuu

SEQ ID NO: 1758808 - RNA, 19 nt, Artificial Sequence
  Description of Artificial Sequence: Synthetic oligonucleotide
  Antisense strand to SEQ ID NO: 1758807
aagucugucuaacuagacg

SEQ ID NO: 1758809 - RNA, 19 nt, Artificial Sequence
  Description of Artificial Sequence: Synthetic oligonucleotide
  Sense strand starting at position 98 of SEQ ID NO: 1562597
ccugaaucccuguguagca

SEQ ID NO: 1758810 - RNA, 19 nt, Artificial Sequence
  Description of Artificial Sequence: Synthetic oligonucleotide
  Antisense strand to SEQ ID NO: 1758809
ugcuacacagggauucagg

SEQ ID NO: 1758811 - RNA, 19 nt, Artificial Sequence
  Description of Artificial Sequence: Synthetic oligonucleotide
  Sense strand starting at position 265 of SEQ ID NO: 1562597
acucaaauuuagcaggauu

SEQ ID NO: 1758812 - RNA, 19 nt, Artificial Sequence
  Description of Artificial Sequence: Synthetic oligonucleotide
  Antisense strand to SEQ ID NO: 1758811
aauccugcuaaauuugagu

SEQ ID NO: 1758813 - RNA, 19 nt, Artificial Sequence
  Description of Artificial Sequence: Synthetic oligonucleotide
  Sense strand starting at position 288 of SEQ ID NO: 1562597
gucagaacuuguucuccca

SEQ ID NO: 1758814 - RNA, 19 nt, Artificial Sequence
  Description of Artificial Sequence: Synthetic oligonucleotide
  Antisense strand to SEQ ID NO: 1758813
ugggagaacaaguucugac

SEQ ID NO: 1758815 - RNA, 19 nt, Artificial Sequence
  Description of Artificial Sequence: Synthetic oligonucleotide
  Sense strand starting at position 291 of SEQ ID NO: 1562597
agaacuuguucucccagga

SEQ ID NO: 1758816 - RNA, 19 nt, Artificial Sequence
  Description of Artificial Sequence: Synthetic oligonucleotide
  Antisense strand to SEQ ID NO: 1758815
uccugggagaacaaguucu

SEQ ID NO: 1758817 - RNA, 19 nt, Artificial Sequence
  Description of Artificial Sequence: Synthetic oligonucleotide
  Sense strand starting at position 295 of SEQ ID NO: 1562597
cuuguucucccaggaggaa

SEQ ID NO: 1758818 - RNA, 19 nt, Artificial Sequence
  Description of Artificial Sequence: Synthetic oligonucleotide
  Antisense strand to SEQ ID NO: 1758817
uuccuccugggagaacaag

SEQ ID NO: 1758819 - RNA, 19 nt, Artificial Sequence
  Description of Artificial Sequence: Synthetic oligonucleotide
  Sense strand starting at position 319 of SEQ ID NO: 1562597
gucagaagguccuuguguu

SEQ ID NO: 1758820 - RNA, 19 nt, Artificial Sequence
  Description of Artificial Sequence: Synthetic oligonucleotide
  Antisense strand to SEQ ID NO: 1758819
aacacaaggaccuucugac

SEQ ID NO: 1758821 - RNA, 19 nt, Artificial Sequence
  Description of Artificial Sequence: Synthetic oligonucleotide
  Sense strand starting at position 320 of SEQ ID NO: 1562597
ucagaagguccuuguguuu

SEQ ID NO: 1758822 - RNA, 19 nt, Artificial Sequence
  Description of Artificial Sequence: Synthetic oligonucleotide
  Antisense strand to SEQ ID NO: 1758821
aaacacaaggaccuucuga

SEQ ID NO: 1758823 - RNA, 19 nt, Artificial Sequence
  Description of Artificial Sequence: Synthetic oligonucleotide
  Sense strand starting at position 329 of SEQ ID NO: 1562597
ccuuguguuuaugcugaaa

SEQ ID NO: 1758824 - RNA, 19 nt, Artificial Sequence
  Description of Artificial Sequence: Synthetic oligonucleotide
  Antisense strand to SEQ ID NO: 1758823
uuucagcauaaacacaagg

SEQ ID NO: 1758825 - RNA, 19 nt, Artificial Sequence
  Description of Artificial Sequence: Synthetic oligonucleotide
  Sense strand starting at position 422 of SEQ ID NO: 1562597
acuugagucccuuagcgaa

SEQ ID NO: 1758826 - RNA, 19 nt, Artificial Sequence
  Description of Artificial Sequence: Synthetic oligonucleotide
  Antisense strand to SEQ ID NO: 1758825
uucgcuaagggacucaagu

SEQ ID NO: 1758827 - RNA, 19 nt, Artificial Sequence
  Description of Artificial Sequence: Synthetic oligonucleotide
  Sense strand starting at position 518 of SEQ ID NO: 1562597
gcagacauugcggauagga

SEQ ID NO: 1758828 - RNA, 19 nt, Artificial Sequence
  Description of Artificial Sequence: Synthetic oligonucleotide
  Antisense strand to SEQ ID NO: 1758827
uccuauccgcaaugucugc

SEQ ID NO: 1758829 - RNA, 19 nt, Artificial Sequence
  Description of Artificial Sequence: Synthetic oligonucleotide
  Sense strand starting at position 552 of SEQ ID NO: 1562597
ggaaaugccuucccagaca

SEQ ID NO: 1758830 - RNA, 19 nt, Artificial Sequence
  Description of Artificial Sequence: Synthetic oligonucleotide
  Antisense strand to SEQ ID NO: 1758829
ugucugggaaggcauuucc

SEQ ID NO: 1758831 - RNA, 19 nt, Artificial Sequence
  Description of Artificial Sequence: Synthetic oligonucleotide
  Sense strand starting at position 581 of SEQ ID NO: 1562597
cacacugucgccugaucua

SEQ ID NO: 1758832 - RNA, 19 nt, Artificial Sequence
  Description of Artificial Sequence: Synthetic oligonucleotide
  Antisense strand to SEQ ID NO: 1758831
uagaucaggcgacagugug

SEQ ID NO: 1758833 - RNA, 19 nt, Artificial Sequence
  Description of Artificial Sequence: Synthetic oligonucleotide
  Sense strand starting at position 593 of SEQ ID NO: 1562597
ugaucuaaggccuggauca

SEQ ID NO: 1758834 - RNA, 19 nt, Artificial Sequence
  Description of Artificial Sequence: Synthetic oligonucleotide
  Antisense strand to SEQ ID NO: 1758833
ugauccaggccuuagauca

SEQ ID NO: 1758835 - RNA, 19 nt, Artificial Sequence
  Description of Artificial Sequence: Synthetic oligonucleotide
  Sense strand starting at position 780 of SEQ ID NO: 1562597
cagauaaggcaguaguuaa

SEQ ID NO: 1758836 - RNA, 19 nt, Artificial Sequence
  Description of Artificial Sequence: Synthetic oligonucleotide
  Antisense strand to SEQ ID NO: 1758835
uuaacuacugccuuaucug

SEQ ID NO: 1758837 - RNA, 19 nt, Artificial Sequence
  Description of Artificial Sequence: Synthetic oligonucleotide
  Sense strand starting at position 913 of SEQ ID NO: 1562597
uggguacucaccugagguu

SEQ ID NO: 1758838 - RNA, 19 nt, Artificial Sequence
  Description of Artificial Sequence: Synthetic oligonucleotide
  Antisense strand to SEQ ID NO: 1758837
aaccucaggugaguaccca

SEQ ID NO: 1758839 - RNA, 19 nt, Artificial Sequence
  Description of Artificial Sequence: Synthetic oligonucleotide
  Sense strand starting at position 914 of SEQ ID NO: 1562597
ggguacucaccugagguua

SEQ ID NO: 1758840 - RNA, 19 nt, Artificial Sequence
  Description of Artificial Sequence: Synthetic oligonucleotide
  Antisense strand to SEQ ID NO: 1758839
uaaccucaggugaguaccc

SEQ ID NO: 1758841 - RNA, 19 nt, Artificial Sequence
  Description of Artificial Sequence: Synthetic oligonucleotide
  Sense strand starting at position 929 of SEQ ID NO: 1562597
guuauuagacagcagcauu

SEQ ID NO: 1758842 - RNA, 19 nt, Artificial Sequence
  Description of Artificial Sequence: Synthetic oligonucleotide
  Antisense strand to SEQ ID NO: 1758841
aaugcugcugucuaauaac

SEQ ID NO: 1758843 - RNA, 19 nt, Artificial Sequence
  Description of Artificial Sequence: Synthetic oligonucleotide
  Sense strand starting at position 943 of SEQ ID NO: 1562597
gcauuaagagccuacucua

SEQ ID NO: 1758844 - RNA, 19 nt, Artificial Sequence
  Description of Artificial Sequence: Synthetic oligonucleotide
  Antisense strand to SEQ ID NO: 1758843
uagaguaggcucuuaaugc

SEQ ID NO: 1758845 - RNA, 19 nt, Artificial Sequence
  Description of Artificial Sequence: Synthetic oligonucleotide
  Sense strand starting at position 997 of SEQ ID NO: 1562597
ucuaaauaugccuggaugu

SEQ ID NO: 1758846 - RNA, 19 nt, Artificial Sequence
  Description of Artificial Sequence: Synthetic oligonucleotide
  Antisense strand to SEQ ID NO: 1758845
acauccaggcauauuuaga

SEQ ID NO: 1758847 - RNA, 19 nt, Artificial Sequence
  Description of Artificial Sequence: Synthetic oligonucleotide
  Sense strand starting at position 998 of SEQ ID NO: 1562597
cuaaauaugccuggaugua

SEQ ID NO: 1758848 - RNA, 19 nt, Artificial Sequence
  Description of Artificial Sequence: Synthetic oligonucleotide
  Antisense strand to SEQ ID NO: 1758847
uacauccaggcauauuuag

SEQ ID NO: 1758849 - RNA, 19 nt, Artificial Sequence
  Description of Artificial Sequence: Synthetic oligonucleotide
  Sense strand starting at position 999 of SEQ ID NO: 1562597
uaaauaugccuggauguag

SEQ ID NO: 1758850 - RNA, 19 nt, Artificial Sequence
  Description of Artificial Sequence: Synthetic oligonucleotide
  Antisense strand to SEQ ID NO: 1758849
cuacauccaggcauauuua

SEQ ID NO: 1758851 - RNA, 19 nt, Artificial Sequence
  Description of Artificial Sequence: Synthetic oligonucleotide
  Sense strand starting at position 1085 of SEQ ID NO: 1562597
gaaauauuguaagcagcca

SEQ ID NO: 1758852 - RNA, 19 nt, Artificial Sequence
  Description of Artificial Sequence: Synthetic oligonucleotide
  Antisense strand to SEQ ID NO: 1758851
uggcugcuuacaauauuuc

SEQ ID NO: 1758853 - RNA, 19 nt, Artificial Sequence
  Description of Artificial Sequence: Synthetic oligonucleotide
  Sense strand starting at position 1499 of SEQ ID NO: 1562597
uggagugcucagugcaaga

SEQ ID NO: 1758854 - RNA, 19 nt, Artificial Sequence
  Description of Artificial Sequence: Synthetic oligonucleotide
  Antisense strand to SEQ ID NO: 1758853
ucuugcacugagcacucca

SEQ ID NO: 1758855 - RNA, 19 nt, Artificial Sequence
  Description of Artificial Sequence: Synthetic oligonucleotide
  Sense strand starting at position 2093 of SEQ ID NO: 1562597
uuucccauuggucgagaga

SEQ ID NO: 1758856 - RNA, 19 nt, Artificial Sequence
  Description of Artificial Sequence: Synthetic oligonucleotide
  Antisense strand to SEQ ID NO: 1758855
ucucucgaccaaugggaaa

SEQ ID NO: 1758857 - RNA, 19 nt, Artificial Sequence
  Description of Artificial Sequence: Synthetic oligonucleotide
  Sense strand starting at position 2461 of SEQ ID NO: 1562597
ucgacaucgaauuguauuc

SEQ ID NO: 1758858 - RNA, 19 nt, Artificial Sequence
  Description of Artificial Sequence: Synthetic oligonucleotide
  Antisense strand to SEQ ID NO: 1758857
gaauacaauucgaugucga

SEQ ID NO: 1758859 - RNA, 19 nt, Artificial Sequence
  Description of Artificial Sequence: Synthetic oligonucleotide
  Sense strand starting at position 2549 of SEQ ID NO: 1562597
guucucacuugcuugaaca

SEQ ID NO: 1758860 - RNA, 19 nt, Artificial Sequence
  Description of Artificial Sequence: Synthetic oligonucleotide
  Antisense strand to SEQ ID NO: 1758859
uguucaagcaagugagaac

SEQ ID NO: 1758861 - RNA, 19 nt, Artificial Sequence
  Description of Artificial Sequence: Synthetic oligonucleotide
  Sense strand starting at position 2936 of SEQ ID NO: 1562597
guuacauuuccuugccaga

SEQ ID NO: 1758862 - RNA, 19 nt, Artificial Sequence
  Description of Artificial Sequence: Synthetic oligonucleotide
  Antisense strand to SEQ ID NO: 1758861
ucuggcaaggaaauguaac

SEQ ID NO: 1758863 - RNA, 19 nt, Artificial Sequence
  Description of Artificial Sequence: Synthetic oligonucleotide
  Sense strand starting at position 3070 of SEQ ID NO: 1562597
ugagaugacuucuuagcca

SEQ ID NO: 1758864 - RNA, 19 nt, Artificial Sequence
  Description of Artificial Sequence: Synthetic oligonucleotide
  Antisense strand to SEQ ID NO: 1758863
uggcuaagaagucaucuca

SEQ ID NO: 1758865 - RNA, 19 nt, Artificial Sequence
  Description of Artificial Sequence: Synthetic oligonucleotide
  Sense strand starting at position 3074 of SEQ ID NO: 1562597
augacuucuuagccaguga

SEQ ID NO: 1758866 - RNA, 19 nt, Artificial Sequence
  Description of Artificial Sequence: Synthetic oligonucleotide
  Antisense strand to SEQ ID NO: 1758865
ucacuggcuaagaagucau

SEQ ID NO: 1758867 - RNA, 19 nt, Artificial Sequence
  Description of Artificial Sequence: Synthetic oligonucleotide
  Sense strand starting at position 3146 of SEQ ID NO: 1562597
accaguuccucggcucauu

SEQ ID NO: 1758868 - RNA, 19 nt, Artificial Sequence
  Description of Artificial Sequence: Synthetic oligonucleotide
  Antisense strand to SEQ ID NO: 1758867
aaugagccgaggaacuggu

SEQ ID NO: 1758869 - RNA, 19 nt, Artificial Sequence
  Description of Artificial Sequence: Synthetic oligonucleotide
  Sense strand starting at position 3206 of SEQ ID NO: 1562597
caugcuuaugaguggugga

SEQ ID NO: 1758870 - RNA, 19 nt, Artificial Sequence
  Description of Artificial Sequence: Synthetic oligonucleotide
  Antisense strand to SEQ ID NO: 1758869
uccaccacucauaagcaug

SEQ ID NO: 1758871 - RNA, 19 nt, Artificial Sequence
  Description of Artificial Sequence: Synthetic oligonucleotide
  Sense strand starting at position 3264 of SEQ ID NO: 1562597
gggaguccaguguguucau

SEQ ID NO: 1758872 - RNA, 19 nt, Artificial Sequence
  Description of Artificial Sequence: Synthetic oligonucleotide
  Antisense strand to SEQ ID NO: 1758871
augaacacacuggacuccc

SEQ ID NO: 1758873 - RNA, 19 nt, Artificial Sequence
  Description of Artificial Sequence: Synthetic oligonucleotide
  Sense strand starting at position 3289 of SEQ ID NO: 1562597
auuccuuggccaggacaaa

SEQ ID NO: 1758874 - RNA, 19 nt, Artificial Sequence
  Description of Artificial Sequence: Synthetic oligonucleotide
  Antisense strand to SEQ ID NO: 1758873
uuuguccuggccaaggaau

SEQ ID NO: 1758875 - RNA, 19 nt, Artificial Sequence
  Description of Artificial Sequence: Synthetic oligonucleotide
  Sense strand starting at position 3420 of SEQ ID NO: 1562597
cuaucaaucgauuggagcu

SEQ ID NO: 1758876 - RNA, 19 nt, Artificial Sequence
  Description of Artificial Sequence: Synthetic oligonucleotide
  Antisense strand to SEQ ID NO: 1758875
agcuccaaucgauugauag

SEQ ID NO: 1758877 - RNA, 19 nt, Artificial Sequence
  Description of Artificial Sequence: Synthetic oligonucleotide
  Sense strand starting at position 3504 of SEQ ID NO: 1562597
ugaaguagcugucccuaga

SEQ ID NO: 1758878 - RNA, 19 nt, Artificial Sequence
  Description of Artificial Sequence: Synthetic oligonucleotide
  Antisense strand to SEQ ID NO: 1758877
ucuagggacagcuacuuca

SEQ ID NO: 1758879 - RNA, 19 nt, Artificial Sequence
  Description of Artificial Sequence: Synthetic oligonucleotide
  Sense strand starting at position 3507 of SEQ ID NO: 1562597
aguagcugucccuagaaua

SEQ ID NO: 1758880 - RNA, 19 nt, Artificial Sequence
  Description of Artificial Sequence: Synthetic oligonucleotide
  Antisense strand to SEQ ID NO: 1758879
uauucuagggacagcuacu

SEQ ID NO: 1758881 - RNA, 19 nt, Artificial Sequence
  Description of Artificial Sequence: Synthetic oligonucleotide
  Sense strand starting at position 3574 of SEQ ID NO: 1562597
gugacauucuggcucaggu

SEQ ID NO: 1758882 - RNA, 19 nt, Artificial Sequence
  Description of Artificial Sequence: Synthetic oligonucleotide
  Antisense strand to SEQ ID NO: 1758881
accugagccagaaugucac

SEQ ID NO: 1758883 - RNA, 19 nt, Artificial Sequence
  Description of Artificial Sequence: Synthetic oligonucleotide
  Sense strand starting at position 3608 of SEQ ID NO: 1562597
ggucguuuccuccauuuag

SEQ ID NO: 1758884 - RNA, 19 nt, Artificial Sequence
  Description of Artificial Sequence: Synthetic oligonucleotide
  Antisense strand to SEQ ID NO: 1758883
cuaaauggaggaaacgacc

SEQ ID NO: 1758885 - RNA, 19 nt, Artificial Sequence
  Description of Artificial Sequence: Synthetic oligonucleotide
  Sense strand starting at position 3760 of SEQ ID NO: 1562597
uggacagaccucuguugaa

SEQ ID NO: 1758886 - RNA, 19 nt, Artificial Sequence
  Description of Artificial Sequence: Synthetic oligonucleotide
  Antisense strand to SEQ ID NO: 1758885
uucaacagaggucugucca

SEQ ID NO: 1758887 - RNA, 19 nt, Artificial Sequence
  Description of Artificial Sequence: Synthetic oligonucleotide
  Sense strand starting at position 3894 of SEQ ID NO: 1562597
ggaucauuagcugagguca

SEQ ID NO: 1758888 - RNA, 19 nt, Artificial Sequence
  Description of Artificial Sequence: Synthetic oligonucleotide
  Antisense strand to SEQ ID NO: 1758887
ugaccucagcuaaugaucc

SEQ ID NO: 1758889 - RNA, 19 nt, Artificial Sequence
  Description of Artificial Sequence: Synthetic oligonucleotide
  Sense strand starting at position 187 of SEQ ID NO: 1562598
ugaugauaaccugguggca

SEQ ID NO: 1758890 - RNA, 19 nt, Artificial Sequence
  Description of Artificial Sequence: Synthetic oligonucleotide
  Antisense strand to SEQ ID NO: 1758889
ugccaccagguuaucauca

SEQ ID NO: 1758891 - RNA, 19 nt, Artificial Sequence
  Description of Artificial Sequence: Synthetic oligonucleotide
  Sense strand starting at position 232 of SEQ ID NO: 1562598
gagcaaacaguacguuaau

SEQ ID NO: 1758892 - RNA, 19 nt, Artificial Sequence
  Description of Artificial Sequence: Synthetic oligonucleotide
  Antisense strand to SEQ ID NO: 1758891
auuaacguacuguuugcuc

SEQ ID NO: 1758893 - RNA, 19 nt, Artificial Sequence
  Description of Artificial Sequence: Synthetic oligonucleotide
  Sense strand starting at position 580 of SEQ ID NO: 1562598
ggcacugaugcccagagaa

SEQ ID NO: 1758894 - RNA, 19 nt, Artificial Sequence
  Description of Artificial Sequence: Synthetic oligonucleotide
  Antisense strand to SEQ ID NO: 1758893
uucucugggcaucagugcc

SEQ ID NO: 1758895 - RNA, 19 nt, Artificial Sequence
  Description of Artificial Sequence: Synthetic oligonucleotide
  Sense strand starting at position 595 of SEQ ID NO: 1562598
agaauauuaaggugggcaa

SEQ ID NO: 1758896 - RNA, 19 nt, Artificial Sequence
  Description of Artificial Sequence: Synthetic oligonucleotide
  Antisense strand to SEQ ID NO: 1758895
uugcccaccuuaauauucu

SEQ ID NO: 1758897 - RNA, 19 nt, Artificial Sequence
  Description of Artificial Sequence: Synthetic oligonucleotide
  Sense strand starting at position 596 of SEQ ID NO: 1562598
gaauauuaaggugggcaaa

SEQ ID NO: 1758898 - RNA, 19 nt, Artificial Sequence
  Description of Artificial Sequence: Synthetic oligonucleotide
  Antisense strand to SEQ ID NO: 1758897
uuugcccaccuuaauauuc

SEQ ID NO: 1758899 - RNA, 19 nt, Artificial Sequence
  Description of Artificial Sequence: Synthetic oligonucleotide
  Sense strand starting at position 597 of SEQ ID NO: 1562598
aauauuaaggugggcaaau

SEQ ID NO: 1758900 - RNA, 19 nt, Artificial Sequence
  Description of Artificial Sequence: Synthetic oligonucleotide
  Antisense strand to SEQ ID NO: 1758899
auuugcccaccuuaauauu

SEQ ID NO: 1758901 - RNA, 19 nt, Artificial Sequence
  Description of Artificial Sequence: Synthetic oligonucleotide
  Sense strand starting at position 598 of SEQ ID NO: 1562598
auauuaaggugggcaaaua

SEQ ID NO: 1758902 - RNA, 19 nt, Artificial Sequence
  Description of Artificial Sequence: Synthetic oligonucleotide
  Antisense strand to SEQ ID NO: 1758901
uauuugcccaccuuaauau

SEQ ID NO: 1758903 - RNA, 19 nt, Artificial Sequence
  Description of Artificial Sequence: Synthetic oligonucleotide
  Sense strand starting at position 711 of SEQ ID NO: 1562598
ccaugauguagcuauguag

SEQ ID NO: 1758904 - RNA, 19 nt, Artificial Sequence
  Description of Artificial Sequence: Synthetic oligonucleotide
  Antisense strand to SEQ ID NO: 1758903
cuacauagcuacaucaugg

SEQ ID NO: 1758905 - RNA, 19 nt, Artificial Sequence
  Description of Artificial Sequence: Synthetic oligonucleotide
  Sense strand starting at position 714 of SEQ ID NO: 1562598
ugauguagcuauguagaua

SEQ ID NO: 1758906 - RNA, 19 nt, Artificial Sequence
  Description of Artificial Sequence: Synthetic oligonucleotide
  Antisense strand to SEQ ID NO: 1758905
uaucuacauagcuacauca

SEQ ID NO: 1758907 - RNA, 19 nt, Artificial Sequence
  Description of Artificial Sequence: Synthetic oligonucleotide
  Sense strand starting at position 764 of SEQ ID NO: 1562598
agagaccuggcuugaggaa

SEQ ID NO: 1758908 - RNA, 19 nt, Artificial Sequence
  Description of Artificial Sequence: Synthetic oligonucleotide
  Antisense strand to SEQ ID NO: 1758907
uuccucaagccaggucucu

SEQ ID NO: 1758909 - RNA, 19 nt, Artificial Sequence
  Description of Artificial Sequence: Synthetic oligonucleotide
  Sense strand starting at position 1396 of SEQ ID NO: 1562598
gauggcucugccuauagua

SEQ ID NO: 1758910 - RNA, 19 nt, Artificial Sequence
  Description of Artificial Sequence: Synthetic oligonucleotide
  Antisense strand to SEQ ID NO: 1758909
uacuauaggcagagccauc

SEQ ID NO: 1758911 - RNA, 19 nt, Artificial Sequence
  Description of Artificial Sequence: Synthetic oligonucleotide
  Sense strand starting at position 1431 of SEQ ID NO: 1562598
cugucauagcuuuaaugac

SEQ ID NO: 1758912 - RNA, 19 nt, Artificial Sequence
  Description of Artificial Sequence: Synthetic oligonucleotide
  Antisense strand to SEQ ID NO: 1758911
gucauuaaagcuaugacag

SEQ ID NO: 1758913 - RNA, 19 nt, Artificial Sequence
  Description of Artificial Sequence: Synthetic oligonucleotide
  Sense strand starting at position 1440 of SEQ ID NO: 1562598
cuuuaaugaccuugugcau

SEQ ID NO: 1758914 - RNA, 19 nt, Artificial Sequence
  Description of Artificial Sequence: Synthetic oligonucleotide
  Antisense strand to SEQ ID NO: 1758913
augcacaaggucauuaaag

SEQ ID NO: 1758915 - RNA, 19 nt, Artificial Sequence
  Description of Artificial Sequence: Synthetic oligonucleotide
  Sense strand starting at position 1454 of SEQ ID NO: 1562598
ugcauuugcuugucguuga

SEQ ID NO: 1758916 - RNA, 19 nt, Artificial Sequence
  Description of Artificial Sequence: Synthetic oligonucleotide
  Antisense strand to SEQ ID NO: 1758915
ucaacgacaagcaaaugca

SEQ ID NO: 1758917 - RNA, 19 nt, Artificial Sequence
  Description of Artificial Sequence: Synthetic oligonucleotide
  Sense strand starting at position 1551 of SEQ ID NO: 1562598
uagaucugugucuggcaca

SEQ ID NO: 1758918 - RNA, 19 nt, Artificial Sequence
  Description of Artificial Sequence: Synthetic oligonucleotide
  Antisense strand to SEQ ID NO: 1758917
ugugccagacacagaucua

SEQ ID NO: 1758919 - RNA, 19 nt, Artificial Sequence
  Description of Artificial Sequence: Synthetic oligonucleotide
  Sense strand starting at position 2174 of SEQ ID NO: 1562598
auuacaccucucgggaaau

SEQ ID NO: 1758920 - RNA, 19 nt, Artificial Sequence
  Description of Artificial Sequence: Synthetic oligonucleotide
  Antisense strand to SEQ ID NO: 1758919
auuucccgagagguguaau

SEQ ID NO: 1758921 - RNA, 19 nt, Artificial Sequence
  Description of Artificial Sequence: Synthetic oligonucleotide
  Sense strand starting at position 2314 of SEQ ID NO: 1562598
acauaauguuaagcagaug

SEQ ID NO: 1758922 - RNA, 19 nt, Artificial Sequence
  Description of Artificial Sequence: Synthetic oligonucleotide
  Antisense strand to SEQ ID NO: 1758921
caucugcuuaacauuaugu

SEQ ID NO: 1758923 - RNA, 19 nt, Artificial Sequence
  Description of Artificial Sequence: Synthetic oligonucleotide
  Sense strand starting at position 2379 of SEQ ID NO: 1562598
cagaacucaugaguaguga

SEQ ID NO: 1758924 - RNA, 19 nt, Artificial Sequence
  Description of Artificial Sequence: Synthetic oligonucleotide
  Antisense strand to SEQ ID NO: 1758923
ucacuacucaugaguucug

SEQ ID NO: 1758925 - RNA, 19 nt, Artificial Sequence
  Description of Artificial Sequence: Synthetic oligonucleotide
  Sense strand starting at position 2387 of SEQ ID NO: 1562598
augaguagugaugguguua

SEQ ID NO: 1758926 - RNA, 19 nt, Artificial Sequence
  Description of Artificial Sequence: Synthetic oligonucleotide
  Antisense strand to SEQ ID NO: 1758925
uaacaccaucacuacucau

SEQ ID NO: 1758927 - RNA, 19 nt, Artificial Sequence
  Description of Artificial Sequence: Synthetic oligonucleotide
  Sense strand starting at position 2484 of SEQ ID NO: 1562598
gugguagccauguagaugu

SEQ ID NO: 1758928 - RNA, 19 nt, Artificial Sequence
  Description of Artificial Sequence: Synthetic oligonucleotide
  Antisense strand to SEQ ID NO: 1758927
acaucuacauggcuaccac

SEQ ID NO: 1758929 - RNA, 19 nt, Artificial Sequence
  Description of Artificial Sequence: Synthetic oligonucleotide
  Sense strand starting at position 2556 of SEQ ID NO: 1562598
guauguaugcaauacaguu

SEQ ID NO: 1758930 - RNA, 19 nt, Artificial Sequence
  Description of Artificial Sequence: Synthetic oligonucleotide
  Antisense strand to SEQ ID NO: 1758929
aacuguauugcauacauac

SEQ ID NO: 1758931 - RNA, 19 nt, Artificial Sequence
  Description of Artificial Sequence: Synthetic oligonucleotide
  Sense strand starting at position 2587 of SEQ ID NO: 1562598
guuuaaggaaguuacaagu

SEQ ID NO: 1758932 - RNA, 19 nt, Artificial Sequence
  Description of Artificial Sequence: Synthetic oligonucleotide
  Antisense strand to SEQ ID NO: 1758931
acuuguaacuuccuuaaac

SEQ ID NO: 1758933 - RNA, 19 nt, Artificial Sequence
  Description of Artificial Sequence: Synthetic oligonucleotide
  Sense strand starting at position 2593 of SEQ ID NO: 1562598
ggaaguuacaaguauagcu

SEQ ID NO: 1758934 - RNA, 19 nt, Artificial Sequence
  Description of Artificial Sequence: Synthetic oligonucleotide
  Antisense strand to SEQ ID NO: 1758933
agcuauacuuguaacuucc

SEQ ID NO: 1758935 - RNA, 19 nt, Artificial Sequence
  Description of Artificial Sequence: Synthetic oligonucleotide
  Sense strand starting at position 2651 of SEQ ID NO: 1562598
cagguaauguagguuuagu

SEQ ID NO: 1758936 - RNA, 19 nt, Artificial Sequence
  Description of Artificial Sequence: Synthetic oligonucleotide
  Antisense strand to SEQ ID NO: 1758935
acuaaaccuacauuaccug

SEQ ID NO: 1758937 - RNA, 19 nt, Artificial Sequence
  Description of Artificial Sequence: Synthetic oligonucleotide
  Sense strand starting at position 2660 of SEQ ID NO: 1562598
uagguuuagugguuccuaa

SEQ ID NO: 1758938 - RNA, 19 nt, Artificial Sequence
  Description of Artificial Sequence: Synthetic oligonucleotide
  Antisense strand to SEQ ID NO: 1758937
uuaggaaccacuaaaccua

SEQ ID NO: 1758939 - RNA, 19 nt, Artificial Sequence
  Description of Artificial Sequence: Synthetic oligonucleotide
  Sense strand starting at position 2670 of SEQ ID NO: 1562598
gguuccuaagccugacuau

SEQ ID NO: 1758940 - RNA, 19 nt, Artificial Sequence
  Description of Artificial Sequence: Synthetic oligonucleotide
  Antisense strand to SEQ ID NO: 1758939
auagucaggcuuaggaacc

SEQ ID NO: 1758941 - RNA, 19 nt, Artificial Sequence
  Description of Artificial Sequence: Synthetic oligonucleotide
  Sense strand starting at position 2828 of SEQ ID NO: 1562598
ccacccugggauugugaaa

SEQ ID NO: 1758942 - RNA, 19 nt, Artificial Sequence
  Description of Artificial Sequence: Synthetic oligonucleotide
  Antisense strand to SEQ ID NO: 1758941
uuucacaaucccagggugg

SEQ ID NO: 1758943 - RNA, 19 nt, Artificial Sequence
  Description of Artificial Sequence: Synthetic oligonucleotide
  Sense strand starting at position 2842 of SEQ ID NO: 1562598
ugaaauauuucccaggaca

SEQ ID NO: 1758944 - RNA, 19 nt, Artificial Sequence
  Description of Artificial Sequence: Synthetic oligonucleotide
  Antisense strand to SEQ ID NO: 1758943
uguccugggaaauauuuca

SEQ ID NO: 1758945 - RNA, 19 nt, Artificial Sequence
  Description of Artificial Sequence: Synthetic oligonucleotide
  Sense strand starting at position 2962 of SEQ ID NO: 1562598
agcaaugagucagugugau

SEQ ID NO: 1758946 - RNA, 19 nt, Artificial Sequence
  Description of Artificial Sequence: Synthetic oligonucleotide
  Antisense strand to SEQ ID NO: 1758945
aucacacugacucauugcu

SEQ ID NO: 1758947 - RNA, 19 nt, Artificial Sequence
  Description of Artificial Sequence: Synthetic oligonucleotide
  Sense strand starting at position 2977 of SEQ ID NO: 1562598
ugaugaaugcagggugcua

SEQ ID NO: 1758948 - RNA, 19 nt, Artificial Sequence
  Description of Artificial Sequence: Synthetic oligonucleotide
  Antisense strand to SEQ ID NO: 1758947
uagcacccugcauucauca

SEQ ID NO: 1758949 - RNA, 19 nt, Artificial Sequence
  Description of Artificial Sequence: Synthetic oligonucleotide
  Sense strand starting at position 3062 of SEQ ID NO: 1562598
uguauugcugcauaacaua

SEQ ID NO: 1758950 - RNA, 19 nt, Artificial Sequence
  Description of Artificial Sequence: Synthetic oligonucleotide
  Antisense strand to SEQ ID NO: 1758949
uauguuaugcagcaauaca

SEQ ID NO: 1758951 - RNA, 19 nt, Artificial Sequence
  Description of Artificial Sequence: Synthetic oligonucleotide
  Sense strand starting at position 3225 of SEQ ID NO: 1562598
gagguuacaguggguucaa

SEQ ID NO: 1758952 - RNA, 19 nt, Artificial Sequence
  Description of Artificial Sequence: Synthetic oligonucleotide
  Antisense strand to SEQ ID NO: 1758951
uugaacccacuguaaccuc

SEQ ID NO: 1758953 - RNA, 19 nt, Artificial Sequence
  Description of Artificial Sequence: Synthetic oligonucleotide
  Sense strand starting at position 3473 of SEQ ID NO: 1562598
gggccaggaaucugaggau

SEQ ID NO: 1758954 - RNA, 19 nt, Artificial Sequence
  Description of Artificial Sequence: Synthetic oligonucleotide
  Antisense strand to SEQ ID NO: 1758953
auccucagauuccuggccc

SEQ ID NO: 1758955 - RNA, 19 nt, Artificial Sequence
  Description of Artificial Sequence: Synthetic oligonucleotide
  Sense strand starting at position 3479 of SEQ ID NO: 1562598
ggaaucugaggauggcaua

SEQ ID NO: 1758956 - RNA, 19 nt, Artificial Sequence
  Description of Artificial Sequence: Synthetic oligonucleotide
  Antisense strand to SEQ ID NO: 1758955
uaugccauccucagauucc

SEQ ID NO: 1758957 - RNA, 19 nt, Artificial Sequence
  Description of Artificial Sequence: Synthetic oligonucleotide
  Sense strand starting at position 3599 of SEQ ID NO: 1562598
caugucuaguggcuaaauu

SEQ ID NO: 1758958 - RNA, 19 nt, Artificial Sequence
  Description of Artificial Sequence: Synthetic oligonucleotide
  Antisense strand to SEQ ID NO: 1758957
aauuuagccacuagacaug

SEQ ID NO: 1758959 - RNA, 19 nt, Artificial Sequence
  Description of Artificial Sequence: Synthetic oligonucleotide
  Sense strand starting at position 3621 of SEQ ID NO: 1562598
uuccuuaaugguuguugga

SEQ ID NO: 1758960 - RNA, 19 nt, Artificial Sequence
  Description of Artificial Sequence: Synthetic oligonucleotide
  Antisense strand to SEQ ID NO: 1758959
uccaacaaccauuaaggaa

SEQ ID NO: 1758961 - RNA, 19 nt, Artificial Sequence
  Description of Artificial Sequence: Synthetic oligonucleotide
  Sense strand starting at position 3623 of SEQ ID NO: 1562598
ccuuaaugguuguuggacu

SEQ ID NO: 1758962 - RNA, 19 nt, Artificial Sequence
  Description of Artificial Sequence: Synthetic oligonucleotide
  Antisense strand to SEQ ID NO: 1758961
aguccaacaaccauuaagg

SEQ ID NO: 1758963 - RNA, 19 nt, Artificial Sequence
  Description of Artificial Sequence: Synthetic oligonucleotide
  Sense strand starting at position 3648 of SEQ ID NO: 1562598
cucaguuccuagcuggauu

SEQ ID NO: 1758964 - RNA, 19 nt, Artificial Sequence
  Description of Artificial Sequence: Synthetic oligonucleotide
  Antisense strand to SEQ ID NO: 1758963
aauccagcuaggaacugag

SEQ ID NO: 1758965 - RNA, 19 nt, Artificial Sequence
  Description of Artificial Sequence: Synthetic oligonucleotide
  Sense strand starting at position 3827 of SEQ ID NO: 1562598
ucaaauugagccugagcaa

SEQ ID NO: 1758966 - RNA, 19 nt, Artificial Sequence
  Description of Artificial Sequence: Synthetic oligonucleotide
  Antisense strand to SEQ ID NO: 1758965
uugcucaggcucaauuuga

SEQ ID NO: 1758967 - RNA, 19 nt, Artificial Sequence
  Description of Artificial Sequence: Synthetic oligonucleotide
  Sense strand starting at position 3980 of SEQ ID NO: 1562598
gaagucugaggccaucuua

SEQ ID NO: 1758968 - RNA, 19 nt, Artificial Sequence
  Description of Artificial Sequence: Synthetic oligonucleotide
  Antisense strand to SEQ ID NO: 1758967
uaagauggccucagacuuc

SEQ ID NO: 1758969 - RNA, 19 nt, Artificial Sequence
  Description of Artificial Sequence: Synthetic oligonucleotide
  Sense strand starting at position 19 of SEQ ID NO: 1562599
agcuguuacucuuuaggaa

SEQ ID NO: 1758970 - RNA, 19 nt, Artificial Sequence
  Description of Artificial Sequence: Synthetic oligonucleotide
  Antisense strand to SEQ ID NO: 1758969
uuccuaaagaguaacagcu

SEQ ID NO: 1758971 - RNA, 19 nt, Artificial Sequence
  Description of Artificial Sequence: Synthetic oligonucleotide
  Sense strand starting at position 94 of SEQ ID NO: 1562599
accucagaguuccugaaau

SEQ ID NO: 1758972 - RNA, 19 nt, Artificial Sequence
  Description of Artificial Sequence: Synthetic oligonucleotide
  Antisense strand to SEQ ID NO: 1758971
auuucaggaacucugaggu

SEQ ID NO: 1758973 - RNA, 19 nt, Artificial Sequence
  Description of Artificial Sequence: Synthetic oligonucleotide
  Sense strand starting at position 96 of SEQ ID NO: 1562599
cucagaguuccugaaauuc

SEQ ID NO: 1758974 - RNA, 19 nt, Artificial Sequence
  Description of Artificial Sequence: Synthetic oligonucleotide
  Antisense strand to SEQ ID NO: 1758973
gaauuucaggaacucugag

SEQ ID NO: 1758975 - RNA, 19 nt, Artificial Sequence
  Description of Artificial Sequence: Synthetic oligonucleotide
  Sense strand starting at position 118 of SEQ ID NO: 1562599
gugaaacaaucaucuaugu

SEQ ID NO: 1758976 - RNA, 19 nt, Artificial Sequence
  Description of Artificial Sequence: Synthetic oligonucleotide
  Antisense strand to SEQ ID NO: 1758975
acauagaugauuguuucac

SEQ ID NO: 1758977 - RNA, 19 nt, Artificial Sequence
  Description of Artificial Sequence: Synthetic oligonucleotide
  Sense strand starting at position 205 of SEQ ID NO: 1562599
cugagucugucaggaggaa

SEQ ID NO: 1758978 - RNA, 19 nt, Artificial Sequence
  Description of Artificial Sequence: Synthetic oligonucleotide
  Antisense strand to SEQ ID NO: 1758977
uuccuccugacagacucag

SEQ ID NO: 1758979 - RNA, 19 nt, Artificial Sequence
  Description of Artificial Sequence: Synthetic oligonucleotide
  Sense strand starting at position 233 of SEQ ID NO: 1562599
ucuuaaauguucuaagagu

SEQ ID NO: 1758980 - RNA, 19 nt, Artificial Sequence
  Description of Artificial Sequence: Synthetic oligonucleotide
  Antisense strand to SEQ ID NO: 1758979
acucuuagaacauuuaaga

SEQ ID NO: 1758981 - RNA, 19 nt, Artificial Sequence
  Description of Artificial Sequence: Synthetic oligonucleotide
  Sense strand starting at position 244 of SEQ ID NO: 1562599
cuaagagugagacggugau

SEQ ID NO: 1758982 - RNA, 19 nt, Artificial Sequence
  Description of Artificial Sequence: Synthetic oligonucleotide
  Antisense strand to SEQ ID NO: 1758981
aucaccgucucacucuuag

SEQ ID NO: 1758983 - RNA, 19 nt, Artificial Sequence
  Description of Artificial Sequence: Synthetic oligonucleotide
  Sense strand starting at position 248 of SEQ ID NO: 1562599
gagugagacggugauaauu

SEQ ID NO: 1758984 - RNA, 19 nt, Artificial Sequence
  Description of Artificial Sequence: Synthetic oligonucleotide
  Antisense strand to SEQ ID NO: 1758983
aauuaucaccgucucacuc

SEQ ID NO: 1758985 - RNA, 19 nt, Artificial Sequence
  Description of Artificial Sequence: Synthetic oligonucleotide
  Sense strand starting at position 250 of SEQ ID NO: 1562599
gugagacggugauaauuua

SEQ ID NO: 1758986 - RNA, 19 nt, Artificial Sequence
  Description of Artificial Sequence: Synthetic oligonucleotide
  Antisense strand to SEQ ID NO: 1758985
uaaauuaucaccgucucac

SEQ ID NO: 1758987 - RNA, 19 nt, Artificial Sequence
  Description of Artificial Sequence: Synthetic oligonucleotide
  Sense strand starting at position 258 of SEQ ID NO: 1562599
gugauaauuuaacaagcac

SEQ ID NO: 1758988 - RNA, 19 nt, Artificial Sequence
  Description of Artificial Sequence: Synthetic oligonucleotide
  Antisense strand to SEQ ID NO: 1758987
gugcuuguuaaauuaucac

SEQ ID NO: 1758989 - RNA, 19 nt, Artificial Sequence
  Description of Artificial Sequence: Synthetic oligonucleotide
  Sense strand starting at position 273 of SEQ ID NO: 1562599
gcaccuguaaaguguuagu

SEQ ID NO: 1758990 - RNA, 19 nt, Artificial Sequence
  Description of Artificial Sequence: Synthetic oligonucleotide
  Antisense strand to SEQ ID NO: 1758989
acuaacacuuuacaggugc

SEQ ID NO: 1758991 - RNA, 19 nt, Artificial Sequence
  Description of Artificial Sequence: Synthetic oligonucleotide
  Sense strand starting at position 301 of SEQ ID NO: 1562599
cccugcugaucacuuaagu

SEQ ID NO: 1758992 - RNA, 19 nt, Artificial Sequence
  Description of Artificial Sequence: Synthetic oligonucleotide
  Antisense strand to SEQ ID NO: 1758991
acuuaagugaucagcaggg

SEQ ID NO: 1758993 - RNA, 19 nt, Artificial Sequence
  Description of Artificial Sequence: Synthetic oligonucleotide
  Sense strand starting at position 386 of SEQ ID NO: 1562599
ccuguacucuucucaggaa

SEQ ID NO: 1758994 - RNA, 19 nt, Artificial Sequence
  Description of Artificial Sequence: Synthetic oligonucleotide
  Antisense strand to SEQ ID NO: 1758993
uuccugagaagaguacagg

SEQ ID NO: 1758995 - RNA, 19 nt, Artificial Sequence
  Description of Artificial Sequence: Synthetic oligonucleotide
  Sense strand starting at position 387 of SEQ ID NO: 1562599
cuguacucuucucaggaaa

SEQ ID NO: 1758996 - RNA, 19 nt, Artificial Sequence
  Description of Artificial Sequence: Synthetic oligonucleotide
  Antisense strand to SEQ ID NO: 1758995
uuuccugagaagaguacag

SEQ ID NO: 1758997 - RNA, 19 nt, Artificial Sequence
  Description of Artificial Sequence: Synthetic oligonucleotide
  Sense strand starting at position 400 of SEQ ID NO: 1562599
aggaaagccuccuucugua

SEQ ID NO: 1758998 - RNA, 19 nt, Artificial Sequence
  Description of Artificial Sequence: Synthetic oligonucleotide
  Antisense strand to SEQ ID NO: 1758997
uacagaaggaggcuuuccu

SEQ ID NO: 1758999 - RNA, 19 nt, Artificial Sequence
  Description of Artificial Sequence: Synthetic oligonucleotide
  Sense strand starting at position 443 of SEQ ID NO: 1562599
aaggcugagcuguaagcaa

SEQ ID NO: 1759000 - RNA, 19 nt, Artificial Sequence
  Description of Artificial Sequence: Synthetic oligonucleotide
  Antisense strand to SEQ ID NO: 1758999
uugcuuacagcucagccuu

SEQ ID NO: 1759001 - RNA, 19 nt, Artificial Sequence
  Description of Artificial Sequence: Synthetic oligonucleotide
  Sense strand starting at position 496 of SEQ ID NO: 1562599
cccuccucccgagaucaua

SEQ ID NO: 1759002 - RNA, 19 nt, Artificial Sequence
  Description of Artificial Sequence: Synthetic oligonucleotide
  Antisense strand to SEQ ID NO: 1759001
uaugaucucgggaggaggg

SEQ ID NO: 1759003 - RNA, 19 nt, Artificial Sequence
  Description of Artificial Sequence: Synthetic oligonucleotide
  Sense strand starting at position 620 of SEQ ID NO: 1562599
gcugaacuaugacaauaaa

SEQ ID NO: 1759004 - RNA, 19 nt, Artificial Sequence
  Description of Artificial Sequence: Synthetic oligonucleotide
  Antisense strand to SEQ ID NO: 1759003
uuuauugucauaguucagc

SEQ ID NO: 1759005 - RNA, 19 nt, Artificial Sequence
  Description of Artificial Sequence: Synthetic oligonucleotide
  Sense strand starting at position 815 of SEQ ID NO: 1562599
cauugucaucuguguuauu

SEQ ID NO: 1759006 - RNA, 19 nt, Artificial Sequence
  Description of Artificial Sequence: Synthetic oligonucleotide
  Antisense strand to SEQ ID NO: 1759005
aauaacacagaugacaaug

SEQ ID NO: 1759007 - RNA, 19 nt, Artificial Sequence
  Description of Artificial Sequence: Synthetic oligonucleotide
  Sense strand starting at position 816 of SEQ ID NO: 1562599
auugucaucuguguuauuu

SEQ ID NO: 1759008 - RNA, 19 nt, Artificial Sequence
  Description of Artificial Sequence: Synthetic oligonucleotide
  Antisense strand to SEQ ID NO: 1759007
aaauaacacagaugacaau

SEQ ID NO: 1759009 - RNA, 19 nt, Artificial Sequence
  Description of Artificial Sequence: Synthetic oligonucleotide
  Sense strand starting at position 827 of SEQ ID NO: 1562599
uguuauuucuguccucauc

SEQ ID NO: 1759010 - RNA, 19 nt, Artificial Sequence
  Description of Artificial Sequence: Synthetic oligonucleotide
  Antisense strand to SEQ ID NO: 1759009
gaugaggacagaaauaaca

SEQ ID NO: 1759011 - RNA, 19 nt, Artificial Sequence
  Description of Artificial Sequence: Synthetic oligonucleotide
  Sense strand starting at position 1354 of SEQ ID NO: 1562599
aggugaguguugcccggaa

SEQ ID NO: 1759012 - RNA, 19 nt, Artificial Sequence
  Description of Artificial Sequence: Synthetic oligonucleotide
  Antisense strand to SEQ ID NO: 1759011
uuccgggcaacacucaccu

SEQ ID NO: 1759013 - RNA, 19 nt, Artificial Sequence
  Description of Artificial Sequence: Synthetic oligonucleotide
  Sense strand starting at position 1355 of SEQ ID NO: 1562599
ggugaguguugcccggaaa

SEQ ID NO: 1759014 - RNA, 19 nt, Artificial Sequence
  Description of Artificial Sequence: Synthetic oligonucleotide
  Antisense strand to SEQ ID NO: 1759013
uuuccgggcaacacucacc

SEQ ID NO: 1759015 - RNA, 19 nt, Artificial Sequence
  Description of Artificial Sequence: Synthetic oligonucleotide
  Sense strand starting at position 1377 of SEQ ID NO: 1562599
ggacgaucagcucaagauu

SEQ ID NO: 1759016 - RNA, 19 nt, Artificial Sequence
  Description of Artificial Sequence: Synthetic oligonucleotide
  Antisense strand to SEQ ID NO: 1759015
aaucuugagcugaucgucc

SEQ ID NO: 1759017 - RNA, 19 nt, Artificial Sequence
  Description of Artificial Sequence: Synthetic oligonucleotide
  Sense strand starting at position 1386 of SEQ ID NO: 1562599
gcucaagauuguggaagga

SEQ ID NO: 1759018 - RNA, 19 nt, Artificial Sequence
  Description of Artificial Sequence: Synthetic oligonucleotide
  Antisense strand to SEQ ID NO: 1759017
uccuuccacaaucuugagc

SEQ ID NO: 1759019 - RNA, 19 nt, Artificial Sequence
  Description of Artificial Sequence: Synthetic oligonucleotide
  Sense strand starting at position 1417 of SEQ ID NO: 1562599
cucauaauucgugggacag

SEQ ID NO: 1759020 - RNA, 19 nt, Artificial Sequence
  Description of Artificial Sequence: Synthetic oligonucleotide
  Antisense strand to SEQ ID NO: 1759019
cugucccacgaauuaugag

SEQ ID NO: 1759021 - RNA, 19 nt, Artificial Sequence
  Description of Artificial Sequence: Synthetic oligonucleotide
  Sense strand starting at position 1418 of SEQ ID NO: 1562599
ucauaauucgugggacagg

SEQ ID NO: 1759022 - RNA, 19 nt, Artificial Sequence
  Description of Artificial Sequence: Synthetic oligonucleotide
  Antisense strand to SEQ ID NO: 1759021
ccugucccacgaauuauga

SEQ ID NO: 1759023 - RNA, 19 nt, Artificial Sequence
  Description of Artificial Sequence: Synthetic oligonucleotide
  Sense strand starting at position 1442 of SEQ ID NO: 1562599
agggucaccacgugaaaua

SEQ ID NO: 1759024 - RNA, 19 nt, Artificial Sequence
  Description of Artificial Sequence: Synthetic oligonucleotide
  Antisense strand to SEQ ID NO: 1759023
uauuucacguggugacccu

SEQ ID NO: 1759025 - RNA, 19 nt, Artificial Sequence
  Description of Artificial Sequence: Synthetic oligonucleotide
  Sense strand starting at position 1443 of SEQ ID NO: 1562599
gggucaccacgugaaauau

SEQ ID NO: 1759026 - RNA, 19 nt, Artificial Sequence
  Description of Artificial Sequence: Synthetic oligonucleotide
  Antisense strand to SEQ ID NO: 1759025
auauuucacguggugaccc

SEQ ID NO: 1759027 - RNA, 19 nt, Artificial Sequence
  Description of Artificial Sequence: Synthetic oligonucleotide
  Sense strand starting at position 2459 of SEQ ID NO: 1562599
uccuuuauugauggacuca

SEQ ID NO: 1759028 - RNA, 19 nt, Artificial Sequence
  Description of Artificial Sequence: Synthetic oligonucleotide
  Antisense strand to SEQ ID NO: 1759027
ugaguccaucaauaaagga

SEQ ID NO: 1759029 - RNA, 19 nt, Artificial Sequence
  Description of Artificial Sequence: Synthetic oligonucleotide
  Sense strand starting at position 2527 of SEQ ID NO: 1562599
accagauucuuagucucau

SEQ ID NO: 1759030 - RNA, 19 nt, Artificial Sequence
  Description of Artificial Sequence: Synthetic oligonucleotide
  Antisense strand to SEQ ID NO: 1759029
augagacuaagaaucuggu

SEQ ID NO: 1759031 - RNA, 19 nt, Artificial Sequence
  Description of Artificial Sequence: Synthetic oligonucleotide
  Sense strand starting at position 2528 of SEQ ID NO: 1562599
ccagauucuuagucucaug

SEQ ID NO: 1759032 - RNA, 19 nt, Artificial Sequence
  Description of Artificial Sequence: Synthetic oligonucleotide
  Antisense strand to SEQ ID NO: 1759031
caugagacuaagaaucugg

SEQ ID NO: 1759033 - RNA, 19 nt, Artificial Sequence
  Description of Artificial Sequence: Synthetic oligonucleotide
  Sense strand starting at position 2531 of SEQ ID NO: 1562599
gauucuuagucucauggaa

SEQ ID NO: 1759034 - RNA, 19 nt, Artificial Sequence
  Description of Artificial Sequence: Synthetic oligonucleotide
  Antisense strand to SEQ ID NO: 1759033
uuccaugagacuaagaauc

SEQ ID NO: 1759035 - RNA, 19 nt, Artificial Sequence
  Description of Artificial Sequence: Synthetic oligonucleotide
  Sense strand starting at position 2558 of SEQ ID NO: 1562599
cgcucaguacaguaaugau

SEQ ID NO: 1759036 - RNA, 19 nt, Artificial Sequence
  Description of Artificial Sequence: Synthetic oligonucleotide
  Antisense strand to SEQ ID NO: 1759035
aucauuacuguacugagcg

SEQ ID NO: 1759037 - RNA, 19 nt, Artificial Sequence
  Description of Artificial Sequence: Synthetic oligonucleotide
  Sense strand starting at position 2782 of SEQ ID NO: 1562599
ggaggugacguuugagcua

SEQ ID NO: 1759038 - RNA, 19 nt, Artificial Sequence
  Description of Artificial Sequence: Synthetic oligonucleotide
  Antisense strand to SEQ ID NO: 1759037
uagcucaaacgucaccucc

SEQ ID NO: 1759039 - RNA, 19 nt, Artificial Sequence
  Description of Artificial Sequence: Synthetic oligonucleotide
  Sense strand starting at position 2785 of SEQ ID NO: 1562599
ggugacguuugagcuaaga

SEQ ID NO: 1759040 - RNA, 19 nt, Artificial Sequence
  Description of Artificial Sequence: Synthetic oligonucleotide
  Antisense strand to SEQ ID NO: 1759039
ucuuagcucaaacgucacc

SEQ ID NO: 1759041 - RNA, 19 nt, Artificial Sequence
  Description of Artificial Sequence: Synthetic oligonucleotide
  Sense strand starting at position 2821 of SEQ ID NO: 1562599
guggcuacgggauguguua

SEQ ID NO: 1759042 - RNA, 19 nt, Artificial Sequence
  Description of Artificial Sequence: Synthetic oligonucleotide
  Antisense strand to SEQ ID NO: 1759041
uaacacaucccguagccac

SEQ ID NO: 1759043 - RNA, 19 nt, Artificial Sequence
  Description of Artificial Sequence: Synthetic oligonucleotide
  Sense strand starting at position 2928 of SEQ ID NO: 1562599
ccucucuugugucccagaa

SEQ ID NO: 1759044 - RNA, 19 nt, Artificial Sequence
  Description of Artificial Sequence: Synthetic oligonucleotide
  Antisense strand to SEQ ID NO: 1759043
uucugggacacaagagagg

SEQ ID NO: 1759045 - RNA, 19 nt, Artificial Sequence
  Description of Artificial Sequence: Synthetic oligonucleotide
  Sense strand starting at position 2978 of SEQ ID NO: 1562599
augucugucccagaaucca

SEQ ID NO: 1759046 - RNA, 19 nt, Artificial Sequence
  Description of Artificial Sequence: Synthetic oligonucleotide
  Antisense strand to SEQ ID NO: 1759045
uggauucugggacagacau

SEQ ID NO: 1759047 - RNA, 19 nt, Artificial Sequence
  Description of Artificial Sequence: Synthetic oligonucleotide
  Sense strand starting at position 3026 of SEQ ID NO: 1562599
cacccuguuccagaacgua

SEQ ID NO: 1759048 - RNA, 19 nt, Artificial Sequence
  Description of Artificial Sequence: Synthetic oligonucleotide
  Antisense strand to SEQ ID NO: 1759047
uacguucuggaacagggug

SEQ ID NO: 1759049 - RNA, 19 nt, Artificial Sequence
  Description of Artificial Sequence: Synthetic oligonucleotide
  Sense strand starting at position 812 of SEQ ID NO: 1562600
ccaagugagucagauacaa

SEQ ID NO: 1759050 - RNA, 19 nt, Artificial Sequence
  Description of Artificial Sequence: Synthetic oligonucleotide
  Antisense strand to SEQ ID NO: 1759049
uuguaucugacucacuugg

SEQ ID NO: 1759051 - RNA, 19 nt, Artificial Sequence
  Description of Artificial Sequence: Synthetic oligonucleotide
  Sense strand starting at position 2146 of SEQ ID NO: 1562600
gggcguagcugugacgaga

SEQ ID NO: 1759052 - RNA, 19 nt, Artificial Sequence
  Description of Artificial Sequence: Synthetic oligonucleotide
  Antisense strand to SEQ ID NO: 1759051
ucucgucacagcuacgccc

SEQ ID NO: 1759053 - RNA, 19 nt, Artificial Sequence
  Description of Artificial Sequence: Synthetic oligonucleotide
  Sense strand starting at position 2148 of SEQ ID NO: 1562600
gcguagcugugacgagaaa

SEQ ID NO: 1759054 - RNA, 19 nt, Artificial Sequence
  Description of Artificial Sequence: Synthetic oligonucleotide
  Antisense strand to SEQ ID NO: 1759053
uuucucgucacagcuacgc

SEQ ID NO: 1759055 - RNA, 19 nt, Artificial Sequence
  Description of Artificial Sequence: Synthetic oligonucleotide
  Sense strand starting at position 2165 of SEQ ID NO: 1562600
aaaggaguuuguucuuaug

SEQ ID NO: 1759056 - RNA, 19 nt, Artificial Sequence
  Description of Artificial Sequence: Synthetic oligonucleotide
  Antisense strand to SEQ ID NO: 1759055
cauaagaacaaacuccuuu

SEQ ID NO: 1759057 - RNA, 19 nt, Artificial Sequence
  Description of Artificial Sequence: Synthetic oligonucleotide
  Sense strand starting at position 2176 of SEQ ID NO: 1562600
uucuuauggccucacgaaa

SEQ ID NO: 1759058 - RNA, 19 nt, Artificial Sequence
  Description of Artificial Sequence: Synthetic oligonucleotide
  Antisense strand to SEQ ID NO: 1759057
uuucgugaggccauaagaa

SEQ ID NO: 1759059 - RNA, 19 nt, Artificial Sequence
  Description of Artificial Sequence: Synthetic oligonucleotide
  Sense strand starting at position 2213 of SEQ ID NO: 1562600
uuacuaggcuucuaugauc

SEQ ID NO: 1759060 - RNA, 19 nt, Artificial Sequence
  Description of Artificial Sequence: Synthetic oligonucleotide
  Antisense strand to SEQ ID NO: 1759059
gaucauagaagccuaguaa

SEQ ID NO: 1759061 - RNA, 19 nt, Artificial Sequence
  Description of Artificial Sequence: Synthetic oligonucleotide
  Sense strand starting at position 2216 of SEQ ID NO: 1562600
cuaggcuucuaugaucaga

SEQ ID NO: 1759062 - RNA, 19 nt, Artificial Sequence
  Description of Artificial Sequence: Synthetic oligonucleotide
  Antisense strand to SEQ ID NO: 1759061
ucugaucauagaagccuag

SEQ ID NO: 1759063 - RNA, 19 nt, Artificial Sequence
  Description of Artificial Sequence: Synthetic oligonucleotide
  Sense strand starting at position 2218 of SEQ ID NO: 1562600
aggcuucuaugaucagagu

SEQ ID NO: 1759064 - RNA, 19 nt, Artificial Sequence
  Description of Artificial Sequence: Synthetic oligonucleotide
  Antisense strand to SEQ ID NO: 1759063
acucugaucauagaagccu

SEQ ID NO: 1759065 - RNA, 19 nt, Artificial Sequence
  Description of Artificial Sequence: Synthetic oligonucleotide
  Sense strand starting at position 2227 of SEQ ID NO: 1562600
ugaucagaguccguucuuu

SEQ ID NO: 1759066 - RNA, 19 nt, Artificial Sequence
  Description of Artificial Sequence: Synthetic oligonucleotide
  Antisense strand to SEQ ID NO: 1759065
aaagaacggacucugauca

SEQ ID NO: 1759067 - RNA, 19 nt, Artificial Sequence
  Description of Artificial Sequence: Synthetic oligonucleotide
  Sense strand starting at position 2727 of SEQ ID NO: 1562600
ugauuuguggccugcggaa

SEQ ID NO: 1759068 - RNA, 19 nt, Artificial Sequence
  Description of Artificial Sequence: Synthetic oligonucleotide
  Antisense strand to SEQ ID NO: 1759067
uuccgcaggccacaaauca

SEQ ID NO: 1759069 - RNA, 19 nt, Artificial Sequence
  Description of Artificial Sequence: Synthetic oligonucleotide
  Sense strand starting at position 2887 of SEQ ID NO: 1562600
cugcauggcuccuccuaaa

SEQ ID NO: 1759070 - RNA, 19 nt, Artificial Sequence
  Description of Artificial Sequence: Synthetic oligonucleotide
  Antisense strand to SEQ ID NO: 1759069
uuuaggaggagccaugcag

SEQ ID NO: 1759071 - RNA, 19 nt, Artificial Sequence
  Description of Artificial Sequence: Synthetic oligonucleotide
  Sense strand starting at position 2989 of SEQ ID NO: 1562600
gccacagaauagcaucaua

SEQ ID NO: 1759072 - RNA, 19 nt, Artificial Sequence
  Description of Artificial Sequence: Synthetic oligonucleotide
  Antisense strand to SEQ ID NO: 1759071
uaugaugcuauucuguggc

SEQ ID NO: 1759073 - RNA, 19 nt, Artificial Sequence
  Description of Artificial Sequence: Synthetic oligonucleotide
  Sense strand starting at position 2994 of SEQ ID NO: 1562600
agaauagcaucauagagga

SEQ ID NO: 1759074 - RNA, 19 nt, Artificial Sequence
  Description of Artificial Sequence: Synthetic oligonucleotide
  Antisense strand to SEQ ID NO: 1759073
uccucuaugaugcuauucu

SEQ ID NO: 1759075 - RNA, 19 nt, Artificial Sequence
  Description of Artificial Sequence: Synthetic oligonucleotide
  Sense strand starting at position 3012 of SEQ ID NO: 1562600
aacuucugguguccgaaga

SEQ ID NO: 1759076 - RNA, 19 nt, Artificial Sequence
  Description of Artificial Sequence: Synthetic oligonucleotide
  Antisense strand to SEQ ID NO: 1759075
ucuucggacaccagaaguu

SEQ ID NO: 1759077 - RNA, 19 nt, Artificial Sequence
  Description of Artificial Sequence: Synthetic oligonucleotide
  Sense strand starting at position 3013 of SEQ ID NO: 1562600
acuucugguguccgaagau

SEQ ID NO: 1759078 - RNA, 19 nt, Artificial Sequence
  Description of Artificial Sequence: Synthetic oligonucleotide
  Antisense strand to SEQ ID NO: 1759077
aucuucggacaccagaagu

SEQ ID NO: 1759079 - RNA, 19 nt, Artificial Sequence
  Description of Artificial Sequence: Synthetic oligonucleotide
  Sense strand starting at position 3027 of SEQ ID NO: 1562600
aagauugcguucuccuaag

SEQ ID NO: 1759080 - RNA, 19 nt, Artificial Sequence
  Description of Artificial Sequence: Synthetic oligonucleotide
  Antisense strand to SEQ ID NO: 1759079
cuuaggagaacgcaaucuu

SEQ ID NO: 1759081 - RNA, 19 nt, Artificial Sequence
  Description of Artificial Sequence: Synthetic oligonucleotide
  Sense strand starting at position 3033 of SEQ ID NO: 1562600
gcguucuccuaagaacaag

SEQ ID NO: 1759082 - RNA, 19 nt, Artificial Sequence
  Description of Artificial Sequence: Synthetic oligonucleotide
  Antisense strand to SEQ ID NO: 1759081
cuuguucuuaggagaacgc

SEQ ID NO: 1759083 - RNA, 19 nt, Artificial Sequence
  Description of Artificial Sequence: Synthetic oligonucleotide
  Sense strand starting at position 3278 of SEQ ID NO: 1562600
gguggaaacuuugaguuuc

SEQ ID NO: 1759084 - RNA, 19 nt, Artificial Sequence
  Description of Artificial Sequence: Synthetic oligonucleotide
  Antisense strand to SEQ ID NO: 1759083
gaaacucaaaguuuccacc

SEQ ID NO: 1759085 - RNA, 19 nt, Artificial Sequence
  Description of Artificial Sequence: Synthetic oligonucleotide
  Sense strand starting at position 3321 of SEQ ID NO: 1562600
aaguaugagcgcugugaua

SEQ ID NO: 1759086 - RNA, 19 nt, Artificial Sequence
  Description of Artificial Sequence: Synthetic oligonucleotide
  Antisense strand to SEQ ID NO: 1759085
uaucacagcgcucauacuu

SEQ ID NO: 1759087 - RNA, 19 nt, Artificial Sequence
  Description of Artificial Sequence: Synthetic oligonucleotide
  Sense strand starting at position 3323 of SEQ ID NO: 1562600
guaugagcgcugugauauc

SEQ ID NO: 1759088 - RNA, 19 nt, Artificial Sequence
  Description of Artificial Sequence: Synthetic oligonucleotide
  Antisense strand to SEQ ID NO: 1759087
gauaucacagcgcucauac

SEQ ID NO: 1759089 - RNA, 19 nt, Artificial Sequence
  Description of Artificial Sequence: Synthetic oligonucleotide
  Sense strand starting at position 3443 of SEQ ID NO: 1562600
ggaugaagcuucuugcuca

SEQ ID NO: 1759090 - RNA, 19 nt, Artificial Sequence
  Description of Artificial Sequence: Synthetic oligonucleotide
  Antisense strand to SEQ ID NO: 1759089
ugagcaagaagcuucaucc

SEQ ID NO: 1759091 - RNA, 19 nt, Artificial Sequence
  Description of Artificial Sequence: Synthetic oligonucleotide
  Sense strand starting at position 3446 of SEQ ID NO: 1562600
ugaagcuucuugcucaaag

SEQ ID NO: 1759092 - RNA, 19 nt, Artificial Sequence
  Description of Artificial Sequence: Synthetic oligonucleotide
  Antisense strand to SEQ ID NO: 1759091
cuuugagcaagaagcuuca

SEQ ID NO: 1759093 - RNA, 19 nt, Artificial Sequence
  Description of Artificial Sequence: Synthetic oligonucleotide
  Sense strand starting at position 3447 of SEQ ID NO: 1562600
gaagcuucuugcucaaagu

SEQ ID NO: 1759094 - RNA, 19 nt, Artificial Sequence
  Description of Artificial Sequence: Synthetic oligonucleotide
  Antisense strand to SEQ ID NO: 1759093
acuuugagcaagaagcuuc

SEQ ID NO: 1759095 - RNA, 19 nt, Artificial Sequence
  Description of Artificial Sequence: Synthetic oligonucleotide
  Sense strand starting at position 3533 of SEQ ID NO: 1562600
aagaauccuggcugggaca

SEQ ID NO: 1759096 - RNA, 19 nt, Artificial Sequence
  Description of Artificial Sequence: Synthetic oligonucleotide
  Antisense strand to SEQ ID NO: 1759095
ugucccagccaggauucuu

SEQ ID NO: 1759097 - RNA, 19 nt, Artificial Sequence
  Description of Artificial Sequence: Synthetic oligonucleotide
  Sense strand starting at position 3535 of SEQ ID NO: 1562600
gaauccuggcugggacauu

SEQ ID NO: 1759098 - RNA, 19 nt, Artificial Sequence
  Description of Artificial Sequence: Synthetic oligonucleotide
  Antisense strand to SEQ ID NO: 1759097
aaugucccagccaggauuc

SEQ ID NO: 1759099 - RNA, 19 nt, Artificial Sequence
  Description of Artificial Sequence: Synthetic oligonucleotide
  Sense strand starting at position 3604 of SEQ ID NO: 1562600
ugagacuacugaugaguau

SEQ ID NO: 1759100 - RNA, 19 nt, Artificial Sequence
  Description of Artificial Sequence: Synthetic oligonucleotide
  Antisense strand to SEQ ID NO: 1759099
auacucaucaguagucuca

SEQ ID NO: 1759101 - RNA, 19 nt, Artificial Sequence
  Description of Artificial Sequence: Synthetic oligonucleotide
  Sense strand starting at position 3616 of SEQ ID NO: 1562600
ugaguauccuugccucaug

SEQ ID NO: 1759102 - RNA, 19 nt, Artificial Sequence
  Description of Artificial Sequence: Synthetic oligonucleotide
  Antisense strand to SEQ ID NO: 1759101
caugaggcaaggauacuca

SEQ ID NO: 1759103 - RNA, 19 nt, Artificial Sequence
  Description of Artificial Sequence: Synthetic oligonucleotide
  Sense strand starting at position 3617 of SEQ ID NO: 1562600
gaguauccuugccucauga

SEQ ID NO: 1759104 - RNA, 19 nt, Artificial Sequence
  Description of Artificial Sequence: Synthetic oligonucleotide
  Antisense strand to SEQ ID NO: 1759103
ucaugaggcaaggauacuc

SEQ ID NO: 1759105 - RNA, 19 nt, Artificial Sequence
  Description of Artificial Sequence: Synthetic oligonucleotide
  Sense strand starting at position 3619 of SEQ ID NO: 1562600
guauccuugccucaugaag

SEQ ID NO: 1759106 - RNA, 19 nt, Artificial Sequence
  Description of Artificial Sequence: Synthetic oligonucleotide
  Antisense strand to SEQ ID NO: 1759105
cuucaugaggcaaggauac

SEQ ID NO: 1759107 - RNA, 19 nt, Artificial Sequence
  Description of Artificial Sequence: Synthetic oligonucleotide
  Sense strand starting at position 3850 of SEQ ID NO: 1562600
cauacuggaugcuggaaua

SEQ ID NO: 1759108 - RNA, 19 nt, Artificial Sequence
  Description of Artificial Sequence: Synthetic oligonucleotide
  Antisense strand to SEQ ID NO: 1759107
uauuccagcauccaguaug

SEQ ID NO: 1759109 - RNA, 19 nt, Artificial Sequence
  Description of Artificial Sequence: Synthetic oligonucleotide
  Sense strand starting at position 3894 of SEQ ID NO: 1562600
gggaaucgugaguguugag

SEQ ID NO: 1759110 - RNA, 19 nt, Artificial Sequence
  Description of Artificial Sequence: Synthetic oligonucleotide
  Antisense strand to SEQ ID NO: 1759109
cucaacacucacgauuccc

SEQ ID NO: 1759111 - RNA, 19 nt, Artificial Sequence
  Description of Artificial Sequence: Synthetic oligonucleotide
  Sense strand starting at position 3897 of SEQ ID NO: 1562600
aaucgugaguguugagaua

SEQ ID NO: 1759112 - RNA, 19 nt, Artificial Sequence
  Description of Artificial Sequence: Synthetic oligonucleotide
  Antisense strand to SEQ ID NO: 1759111
uaucucaacacucacgauu

SEQ ID NO: 1759113 - RNA, 19 nt, Artificial Sequence
  Description of Artificial Sequence: Synthetic oligonucleotide
  Sense strand starting at position 817 of SEQ ID NO: 1562601
ccaagugagucagauacaa

SEQ ID NO: 1759114 - RNA, 19 nt, Artificial Sequence
  Description of Artificial Sequence: Synthetic oligonucleotide
  Antisense strand to SEQ ID NO: 1759113
uuguaucugacucacuugg

SEQ ID NO: 1759115 - RNA, 19 nt, Artificial Sequence
  Description of Artificial Sequence: Synthetic oligonucleotide
  Sense strand starting at position 2151 of SEQ ID NO: 1562601
gggcguagcugugacgaga

SEQ ID NO: 1759116 - RNA, 19 nt, Artificial Sequence
  Description of Artificial Sequence: Synthetic oligonucleotide
  Antisense strand to SEQ ID NO: 1759115
ucucgucacagcuacgccc

SEQ ID NO: 1759117 - RNA, 19 nt, Artificial Sequence
  Description of Artificial Sequence: Synthetic oligonucleotide
  Sense strand starting at position 2153 of SEQ ID NO: 1562601
gcguagcugugacgagaaa

SEQ ID NO: 1759118 - RNA, 19 nt, Artificial Sequence
  Description of Artificial Sequence: Synthetic oligonucleotide
  Antisense strand to SEQ ID NO: 1759117
uuucucgucacagcuacgc

SEQ ID NO: 1759119 - RNA, 19 nt, Artificial Sequence
  Description of Artificial Sequence: Synthetic oligonucleotide
  Sense strand starting at position 2170 of SEQ ID NO: 1562601
aaaggaguuuguucuuaug

SEQ ID NO: 1759120 - RNA, 19 nt, Artificial Sequence
  Description of Artificial Sequence: Synthetic oligonucleotide
  Antisense strand to SEQ ID NO: 1759119
cauaagaacaaacuccuuu

SEQ ID NO: 1759121 - RNA, 19 nt, Artificial Sequence
  Description of Artificial Sequence: Synthetic oligonucleotide
  Sense strand starting at position 2181 of SEQ ID NO: 1562601
uucuuauggccucacgaaa

SEQ ID NO: 1759122 - RNA, 19 nt, Artificial Sequence
  Description of Artificial Sequence: Synthetic oligonucleotide
  Antisense strand to SEQ ID NO: 1759121
uuucgugaggccauaagaa

SEQ ID NO: 1759123 - RNA, 19 nt, Artificial Sequence
  Description of Artificial Sequence: Synthetic oligonucleotide
  Sense strand starting at position 2218 of SEQ ID NO: 1562601
uuacuaggcuucuaugauc

SEQ ID NO: 1759124 - RNA, 19 nt, Artificial Sequence
  Description of Artificial Sequence: Synthetic oligonucleotide
  Antisense strand to SEQ ID NO: 1759123
gaucauagaagccuaguaa

SEQ ID NO: 1759125 - RNA, 19 nt, Artificial Sequence
  Description of Artificial Sequence: Synthetic oligonucleotide
  Sense strand starting at position 2221 of SEQ ID NO: 1562601
cuaggcuucuaugaucaga

SEQ ID NO: 1759126 - RNA, 19 nt, Artificial Sequence
  Description of Artificial Sequence: Synthetic oligonucleotide
  Antisense strand to SEQ ID NO: 1759125
ucugaucauagaagccuag

SEQ ID NO: 1759127 - RNA, 19 nt, Artificial Sequence
  Description of Artificial Sequence: Synthetic oligonucleotide
  Sense strand starting at position 2223 of SEQ ID NO: 1562601
aggcuucuaugaucagagu

SEQ ID NO: 1759128 - RNA, 19 nt, Artificial Sequence
  Description of Artificial Sequence: Synthetic oligonucleotide
  Antisense strand to SEQ ID NO: 1759127
acucugaucauagaagccu

SEQ ID NO: 1759129 - RNA, 19 nt, Artificial Sequence
  Description of Artificial Sequence: Synthetic oligonucleotide
  Sense strand starting at position 2232 of SEQ ID NO: 1562601
ugaucagaguccguucuuu

SEQ ID NO: 1759130 - RNA, 19 nt, Artificial Sequence
  Description of Artificial Sequence: Synthetic oligonucleotide
  Antisense strand to SEQ ID NO: 1759129
aaagaacggacucugauca

SEQ ID NO: 1759131 - RNA, 19 nt, Artificial Sequence
  Description of Artificial Sequence: Synthetic oligonucleotide
  Sense strand starting at position 2732 of SEQ ID NO: 1562601
ugauuuguggccugcggaa

SEQ ID NO: 1759132 - RNA, 19 nt, Artificial Sequence
  Description of Artificial Sequence: Synthetic oligonucleotide
  Antisense strand to SEQ ID NO: 1759131
uuccgcaggccacaaauca

SEQ ID NO: 1759133 - RNA, 19 nt, Artificial Sequence
  Description of Artificial Sequence: Synthetic oligonucleotide
  Sense strand starting at position 2892 of SEQ ID NO: 1562601
cugcauggcuccuccuaaa

SEQ ID NO: 1759134 - RNA, 19 nt, Artificial Sequence
  Description of Artificial Sequence: Synthetic oligonucleotide
  Antisense strand to SEQ ID NO: 1759133
uuuaggaggagccaugcag

SEQ ID NO: 1759135 - RNA, 19 nt, Artificial Sequence
  Description of Artificial Sequence: Synthetic oligonucleotide
  Sense strand starting at position 2994 of SEQ ID NO: 1562601
gccacagaauagcaucaua

SEQ ID NO: 1759136 - RNA, 19 nt, Artificial Sequence
  Description of Artificial Sequence: Synthetic oligonucleotide
  Antisense strand to SEQ ID NO: 1759135
uaugaugcuauucuguggc

SEQ ID NO: 1759137 - RNA, 19 nt, Artificial Sequence
  Description of Artificial Sequence: Synthetic oligonucleotide
  Sense strand starting at position 2999 of SEQ ID NO: 1562601
agaauagcaucauagagga

SEQ ID NO: 1759138 - RNA, 19 nt, Artificial Sequence
  Description of Artificial Sequence: Synthetic oligonucleotide
  Antisense strand to SEQ ID NO: 1759137
uccucuaugaugcuauucu

SEQ ID NO: 1759139 - RNA, 19 nt, Artificial Sequence
  Description of Artificial Sequence: Synthetic oligonucleotide
  Sense strand starting at position 3017 of SEQ ID NO: 1562601
aacuucugguguccgaaga

SEQ ID NO: 1759140 - RNA, 19 nt, Artificial Sequence
  Description of Artificial Sequence: Synthetic oligonucleotide
  Antisense strand to SEQ ID NO: 1759139
ucuucggacaccagaaguu

SEQ ID NO: 1759141 - RNA, 19 nt, Artificial Sequence
  Description of Artificial Sequence: Synthetic oligonucleotide
  Sense strand starting at position 3018 of SEQ ID NO: 1562601
acuucugguguccgaagau

SEQ ID NO: 1759142 - RNA, 19 nt, Artificial Sequence
  Description of Artificial Sequence: Synthetic oligonucleotide
  Antisense strand to SEQ ID NO: 1759141
aucuucggacaccagaagu

SEQ ID NO: 1759143 - RNA, 19 nt, Artificial Sequence
  Description of Artificial Sequence: Synthetic oligonucleotide
  Sense strand starting at position 3032 of SEQ ID NO: 1562601
aagauugcguucuccuaag

SEQ ID NO: 1759144 - RNA, 19 nt, Artificial Sequence
  Description of Artificial Sequence: Synthetic oligonucleotide
  Antisense strand to SEQ ID NO: 1759143
cuuaggagaacgcaaucuu

SEQ ID NO: 1759145 - RNA, 19 nt, Artificial Sequence
  Description of Artificial Sequence: Synthetic oligonucleotide
  Sense strand starting at position 3038 of SEQ ID NO: 1562601
gcguucuccuaagaacaag

SEQ ID NO: 1759146 - RNA, 19 nt, Artificial Sequence
  Description of Artificial Sequence: Synthetic oligonucleotide
  Antisense strand to SEQ ID NO: 1759145
cuuguucuuaggagaacgc

SEQ ID NO: 1759147 - RNA, 19 nt, Artificial Sequence
  Description of Artificial Sequence: Synthetic oligonucleotide
  Sense strand starting at position 3283 of SEQ ID NO: 1562601
gguggaaacuuugaguuuc

SEQ ID NO: 1759148 - RNA, 19 nt, Artificial Sequence
  Description of Artificial Sequence: Synthetic oligonucleotide
  Antisense strand to SEQ ID NO: 1759147
gaaacucaaaguuuccacc

SEQ ID NO: 1759149 - RNA, 19 nt, Artificial Sequence
  Description of Artificial Sequence: Synthetic oligonucleotide
  Sense strand starting at position 3326 of SEQ ID NO: 1562601
aaguaugagcgcugugaua

SEQ ID NO: 1759150 - RNA, 19 nt, Artificial Sequence
  Description of Artificial Sequence: Synthetic oligonucleotide
  Antisense strand to SEQ ID NO: 1759149
uaucacagcgcucauacuu

SEQ ID NO: 1759151 - RNA, 19 nt, Artificial Sequence
  Description of Artificial Sequence: Synthetic oligonucleotide
  Sense strand starting at position 3328 of SEQ ID NO: 1562601
guaugagcgcugugauauc

SEQ ID NO: 1759152 - RNA, 19 nt, Artificial Sequence
  Description of Artificial Sequence: Synthetic oligonucleotide
  Antisense strand to SEQ ID NO: 1759151
gauaucacagcgcucauac

SEQ ID NO: 1759153 - RNA, 19 nt, Artificial Sequence
  Description of Artificial Sequence: Synthetic oligonucleotide
  Sense strand starting at position 3448 of SEQ ID NO: 1562601
ggaugaagcuucuugcuca

SEQ ID NO: 1759154 - RNA, 19 nt, Artificial Sequence
  Description of Artificial Sequence: Synthetic oligonucleotide
  Antisense strand to SEQ ID NO: 1759153
ugagcaagaagcuucaucc

SEQ ID NO: 1759155 - RNA, 19 nt, Artificial Sequence
  Description of Artificial Sequence: Synthetic oligonucleotide
  Sense strand starting at position 3451 of SEQ ID NO: 1562601
ugaagcuucuugcucaaag

SEQ ID NO: 1759156 - RNA, 19 nt, Artificial Sequence
  Description of Artificial Sequence: Synthetic oligonucleotide
  Antisense strand to SEQ ID NO: 1759155
cuuugagcaagaagcuuca

SEQ ID NO: 1759157 - RNA, 19 nt, Artificial Sequence
  Description of Artificial Sequence: Synthetic oligonucleotide
  Sense strand starting at position 3452 of SEQ ID NO: 1562601
gaagcuucuugcucaaagu

SEQ ID NO: 1759158 - RNA, 19 nt, Artificial Sequence
  Description of Artificial Sequence: Synthetic oligonucleotide
  Antisense strand to SEQ ID NO: 1759157
acuuugagcaagaagcuuc

SEQ ID NO: 1759159 - RNA, 19 nt, Artificial Sequence
  Description of Artificial Sequence: Synthetic oligonucleotide
  Sense strand starting at position 3538 of SEQ ID NO: 1562601
aagaauccuggcugggaca

SEQ ID NO: 1759160 - RNA, 19 nt, Artificial Sequence
  Description of Artificial Sequence: Synthetic oligonucleotide
  Antisense strand to SEQ ID NO: 1759159
ugucccagccaggauucuu

SEQ ID NO: 1759161 - RNA, 19 nt, Artificial Sequence
  Description of Artificial Sequence: Synthetic oligonucleotide
  Sense strand starting at position 3540 of SEQ ID NO: 1562601
gaauccuggcugggacauu

SEQ ID NO: 1759162 - RNA, 19 nt, Artificial Sequence
  Description of Artificial Sequence: Synthetic oligonucleotide
  Antisense strand to SEQ ID NO: 1759161
aaugucccagccaggauuc

SEQ ID NO: 1759163 - RNA, 19 nt, Artificial Sequence
  Description of Artificial Sequence: Synthetic oligonucleotide
  Sense strand starting at position 3609 of SEQ ID NO: 1562601
ugagacuacugaugaguau

SEQ ID NO: 1759164 - RNA, 19 nt, Artificial Sequence
  Description of Artificial Sequence: Synthetic oligonucleotide
  Antisense strand to SEQ ID NO: 1759163
auacucaucaguagucuca

SEQ ID NO: 1759165 - RNA, 19 nt, Artificial Sequence
  Description of Artificial Sequence: Synthetic oligonucleotide
  Sense strand starting at position 3621 of SEQ ID NO: 1562601
ugaguauccuugccucaug

SEQ ID NO: 1759166 - RNA, 19 nt, Artificial Sequence
  Description of Artificial Sequence: Synthetic oligonucleotide
  Antisense strand to SEQ ID NO: 1759165
caugaggcaaggauacuca

SEQ ID NO: 1759167 - RNA, 19 nt, Artificial Sequence
  Description of Artificial Sequence: Synthetic oligonucleotide
  Sense strand starting at position 3622 of SEQ ID NO: 1562601
gaguauccuugccucauga

SEQ ID NO: 1759168 - RNA, 19 nt, Artificial Sequence
  Description of Artificial Sequence: Synthetic oligonucleotide
  Antisense strand to SEQ ID NO: 1759167
ucaugaggcaaggauacuc

SEQ ID NO: 1759169 - RNA, 19 nt, Artificial Sequence
  Description of Artificial Sequence: Synthetic oligonucleotide
  Sense strand starting at position 3624 of SEQ ID NO: 1562601
guauccuugccucaugaag

SEQ ID NO: 1759170 - RNA, 19 nt, Artificial Sequence
  Description of Artificial Sequence: Synthetic oligonucleotide
  Antisense strand to SEQ ID NO: 1759169
cuucaugaggcaaggauac

SEQ ID NO: 1759171 - RNA, 19 nt, Artificial Sequence
  Description of Artificial Sequence: Synthetic oligonucleotide
  Sense strand starting at position 3855 of SEQ ID NO: 1562601
cauacuggaugcuggaaua

SEQ ID NO: 1759172 - RNA, 19 nt, Artificial Sequence
  Description of Artificial Sequence: Synthetic oligonucleotide
  Antisense strand to SEQ ID NO: 1759171
uauuccagcauccaguaug

SEQ ID NO: 1759173 - RNA, 19 nt, Artificial Sequence
  Description of Artificial Sequence: Synthetic oligonucleotide
  Sense strand starting at position 3899 of SEQ ID NO: 1562601
gggaaucgugaguguugag

SEQ ID NO: 1759174 - RNA, 19 nt, Artificial Sequence
  Description of Artificial Sequence: Synthetic oligonucleotide
  Antisense strand to SEQ ID NO: 1759173
cucaacacucacgauuccc

SEQ ID NO: 1759175 - RNA, 19 nt, Artificial Sequence
  Description of Artificial Sequence: Synthetic oligonucleotide
  Sense strand starting at position 3902 of SEQ ID NO: 1562601
aaucgugaguguugagaua

SEQ ID NO: 1759176 - RNA, 19 nt, Artificial Sequence
  Description of Artificial Sequence: Synthetic oligonucleotide
  Antisense strand to SEQ ID NO: 1759175
uaucucaacacucacgauu

SEQ ID NO: 1759177 - RNA, 19 nt, Artificial Sequence
  Description of Artificial Sequence: Synthetic oligonucleotide
  Sense strand starting at position 47 of SEQ ID NO: 1562602
gaagguugccuguggagga

SEQ ID NO: 1759178 - RNA, 19 nt, Artificial Sequence
  Description of Artificial Sequence: Synthetic oligonucleotide
  Antisense strand to SEQ ID NO: 1759177
uccuccacaggcaaccuuc

SEQ ID NO: 1759179 - RNA, 19 nt, Artificial Sequence
  Description of Artificial Sequence: Synthetic oligonucleotide
  Sense strand starting at position 1041 of SEQ ID NO: 1562602
uugaauaaggcuuguggau

SEQ ID NO: 1759180 - RNA, 19 nt, Artificial Sequence
  Description of Artificial Sequence: Synthetic oligonucleotide
  Antisense strand to SEQ ID NO: 1759179
auccacaagccuuauucaa

SEQ ID NO: 1759181 - RNA, 19 nt, Artificial Sequence
  Description of Artificial Sequence: Synthetic oligonucleotide
  Sense strand starting at position 1043 of SEQ ID NO: 1562602
gaauaaggcuuguggauua

SEQ ID NO: 1759182 - RNA, 19 nt, Artificial Sequence
  Description of Artificial Sequence: Synthetic oligonucleotide
  Antisense strand to SEQ ID NO: 1759181
uaauccacaagccuuauuc

SEQ ID NO: 1759183 - RNA, 19 nt, Artificial Sequence
  Description of Artificial Sequence: Synthetic oligonucleotide
  Sense strand starting at position 1050 of SEQ ID NO: 1562602
gcuuguggauuagauaaua

SEQ ID NO: 1759184 - RNA, 19 nt, Artificial Sequence
  Description of Artificial Sequence: Synthetic oligonucleotide
  Antisense strand to SEQ ID NO: 1759183
uauuaucuaauccacaagc

SEQ ID NO: 1759185 - RNA, 19 nt, Artificial Sequence
  Description of Artificial Sequence: Synthetic oligonucleotide
  Sense strand starting at position 1061 of SEQ ID NO: 1562602
agauaauaguguuguacca

SEQ ID NO: 1759186 - RNA, 19 nt, Artificial Sequence
  Description of Artificial Sequence: Synthetic oligonucleotide
  Antisense strand to SEQ ID NO: 1759185
ugguacaacacuauuaucu

SEQ ID NO: 1759187 - RNA, 19 nt, Artificial Sequence
  Description of Artificial Sequence: Synthetic oligonucleotide
  Sense strand starting at position 1063 of SEQ ID NO: 1562602
auaauaguguuguaccaau

SEQ ID NO: 1759188 - RNA, 19 nt, Artificial Sequence
  Description of Artificial Sequence: Synthetic oligonucleotide
  Antisense strand to SEQ ID NO: 1759187
auugguacaacacuauuau

SEQ ID NO: 1759189 - RNA, 19 nt, Artificial Sequence
  Description of Artificial Sequence: Synthetic oligonucleotide
  Sense strand starting at position 1080 of SEQ ID NO: 1562602
auguuacuuuccuguaauu

SEQ ID NO: 1759190 - RNA, 19 nt, Artificial Sequence
  Description of Artificial Sequence: Synthetic oligonucleotide
  Antisense strand to SEQ ID NO: 1759189
aauuacaggaaaguaacau

SEQ ID NO: 1759191 - RNA, 19 nt, Artificial Sequence
  Description of Artificial Sequence: Synthetic oligonucleotide
  Sense strand starting at position 1082 of SEQ ID NO: 1562602
guuacuuuccuguaauuau

SEQ ID NO: 1759192 - RNA, 19 nt, Artificial Sequence
  Description of Artificial Sequence: Synthetic oligonucleotide
  Antisense strand to SEQ ID NO: 1759191
auaauuacaggaaaguaac

SEQ ID NO: 1759193 - RNA, 19 nt, Artificial Sequence
  Description of Artificial Sequence: Synthetic oligonucleotide
  Sense strand starting at position 1091 of SEQ ID NO: 1562602
cuguaauuauucugugguu

SEQ ID NO: 1759194 - RNA, 19 nt, Artificial Sequence
  Description of Artificial Sequence: Synthetic oligonucleotide
  Antisense strand to SEQ ID NO: 1759193
aaccacagaauaauuacag

SEQ ID NO: 1759195 - RNA, 19 nt, Artificial Sequence
  Description of Artificial Sequence: Synthetic oligonucleotide
  Sense strand starting at position 1092 of SEQ ID NO: 1562602
uguaauuauucugugguua

SEQ ID NO: 1759196 - RNA, 19 nt, Artificial Sequence
  Description of Artificial Sequence: Synthetic oligonucleotide
  Antisense strand to SEQ ID NO: 1759195
uaaccacagaauaauuaca

SEQ ID NO: 1759197 - RNA, 19 nt, Artificial Sequence
  Description of Artificial Sequence: Synthetic oligonucleotide
  Sense strand starting at position 1093 of SEQ ID NO: 1562602
guaauuauucugugguuac

SEQ ID NO: 1759198 - RNA, 19 nt, Artificial Sequence
  Description of Artificial Sequence: Synthetic oligonucleotide
  Antisense strand to SEQ ID NO: 1759197
guaaccacagaauaauuac

SEQ ID NO: 1759199 - RNA, 19 nt, Artificial Sequence
  Description of Artificial Sequence: Synthetic oligonucleotide
  Sense strand starting at position 1096 of SEQ ID NO: 1562602
auuauucugugguuacgca

SEQ ID NO: 1759200 - RNA, 19 nt, Artificial Sequence
  Description of Artificial Sequence: Synthetic oligonucleotide
  Antisense strand to SEQ ID NO: 1759199
ugcguaaccacagaauaau

SEQ ID NO: 1759201 - RNA, 19 nt, Artificial Sequence
  Description of Artificial Sequence: Synthetic oligonucleotide
  Sense strand starting at position 1097 of SEQ ID NO: 1562602
uuauucugugguuacgcaa

SEQ ID NO: 1759202 - RNA, 19 nt, Artificial Sequence
  Description of Artificial Sequence: Synthetic oligonucleotide
  Antisense strand to SEQ ID NO: 1759201
uugcguaaccacagaauaa

SEQ ID NO: 1759203 - RNA, 19 nt, Artificial Sequence
  Description of Artificial Sequence: Synthetic oligonucleotide
  Sense strand starting at position 1114 of SEQ ID NO: 1562602
aaaggaauguccuuguucu

SEQ ID NO: 1759204 - RNA, 19 nt, Artificial Sequence
  Description of Artificial Sequence: Synthetic oligonucleotide
  Antisense strand to SEQ ID NO: 1759203
agaacaaggacauuccuuu

SEQ ID NO: 1759205 - RNA, 19 nt, Artificial Sequence
  Description of Artificial Sequence: Synthetic oligonucleotide
  Sense strand starting at position 1115 of SEQ ID NO: 1562602
aaggaauguccuuguucuu

SEQ ID NO: 1759206 - RNA, 19 nt, Artificial Sequence
  Description of Artificial Sequence: Synthetic oligonucleotide
  Antisense strand to SEQ ID NO: 1759205
aagaacaaggacauuccuu

SEQ ID NO: 1759207 - RNA, 19 nt, Artificial Sequence
  Description of Artificial Sequence: Synthetic oligonucleotide
  Sense strand starting at position 1254 of SEQ ID NO: 1562602
uuuggaauuucugacaaau

SEQ ID NO: 1759208 - RNA, 19 nt, Artificial Sequence
  Description of Artificial Sequence: Synthetic oligonucleotide
  Antisense strand to SEQ ID NO: 1759207
auuugucagaaauuccaaa

SEQ ID NO: 1759209 - RNA, 19 nt, Artificial Sequence
  Description of Artificial Sequence: Synthetic oligonucleotide
  Sense strand starting at position 1256 of SEQ ID NO: 1562602
uggaauuucugacaaaucu

SEQ ID NO: 1759210 - RNA, 19 nt, Artificial Sequence
  Description of Artificial Sequence: Synthetic oligonucleotide
  Antisense strand to SEQ ID NO: 1759209
agauuugucagaaauucca

SEQ ID NO: 1759211 - RNA, 19 nt, Artificial Sequence
  Description of Artificial Sequence: Synthetic oligonucleotide
  Sense strand starting at position 1338 of SEQ ID NO: 1562602
auaaucagauguuaagacu

SEQ ID NO: 1759212 - RNA, 19 nt, Artificial Sequence
  Description of Artificial Sequence: Synthetic oligonucleotide
  Antisense strand to SEQ ID NO: 1759211
agucuuaacaucugauuau

SEQ ID NO: 1759213 - RNA, 19 nt, Artificial Sequence
  Description of Artificial Sequence: Synthetic oligonucleotide
  Sense strand starting at position 1344 of SEQ ID NO: 1562602
agauguuaagacuggucuu

SEQ ID NO: 1759214 - RNA, 19 nt, Artificial Sequence
  Description of Artificial Sequence: Synthetic oligonucleotide
  Antisense strand to SEQ ID NO: 1759213
aagaccagucuuaacaucu

SEQ ID NO: 1759215 - RNA, 19 nt, Artificial Sequence
  Description of Artificial Sequence: Synthetic oligonucleotide
  Sense strand starting at position 1394 of SEQ ID NO: 1562602
cugugaucucucugacaua

SEQ ID NO: 1759216 - RNA, 19 nt, Artificial Sequence
  Description of Artificial Sequence: Synthetic oligonucleotide
  Antisense strand to SEQ ID NO: 1759215
uaugucagagagaucacag

SEQ ID NO: 1759217 - RNA, 19 nt, Artificial Sequence
  Description of Artificial Sequence: Synthetic oligonucleotide
  Sense strand starting at position 1395 of SEQ ID NO: 1562602
ugugaucucucugacauaa

SEQ ID NO: 1759218 - RNA, 19 nt, Artificial Sequence
  Description of Artificial Sequence: Synthetic oligonucleotide
  Antisense strand to SEQ ID NO: 1759217
uuaugucagagagaucaca

SEQ ID NO: 1759219 - RNA, 19 nt, Artificial Sequence
  Description of Artificial Sequence: Synthetic oligonucleotide
  Sense strand starting at position 1637 of SEQ ID NO: 1562602
gggucuucuccacaagguu

SEQ ID NO: 1759220 - RNA, 19 nt, Artificial Sequence
  Description of Artificial Sequence: Synthetic oligonucleotide
  Antisense strand to SEQ ID NO: 1759219
aaccuuguggagaagaccc

SEQ ID NO: 1759221 - RNA, 19 nt, Artificial Sequence
  Description of Artificial Sequence: Synthetic oligonucleotide
  Sense strand starting at position 1667 of SEQ ID NO: 1562602
gagccaugguucugggaug

SEQ ID NO: 1759222 - RNA, 19 nt, Artificial Sequence
  Description of Artificial Sequence: Synthetic oligonucleotide
  Antisense strand to SEQ ID NO: 1759221
caucccagaaccauggcuc

SEQ ID NO: 1759223 - RNA, 19 nt, Artificial Sequence
  Description of Artificial Sequence: Synthetic oligonucleotide
  Sense strand starting at position 2161 of SEQ ID NO: 1562602
gccuucucaacgugagaac

SEQ ID NO: 1759224 - RNA, 19 nt, Artificial Sequence
  Description of Artificial Sequence: Synthetic oligonucleotide
  Antisense strand to SEQ ID NO: 1759223
guucucacguugagaaggc

SEQ ID NO: 1759225 - RNA, 19 nt, Artificial Sequence
  Description of Artificial Sequence: Synthetic oligonucleotide
  Sense strand starting at position 2162 of SEQ ID NO: 1562602
ccuucucaacgugagaaca

SEQ ID NO: 1759226 - RNA, 19 nt, Artificial Sequence
  Description of Artificial Sequence: Synthetic oligonucleotide
  Antisense strand to SEQ ID NO: 1759225
uguucucacguugagaagg

SEQ ID NO: 1759227 - RNA, 19 nt, Artificial Sequence
  Description of Artificial Sequence: Synthetic oligonucleotide
  Sense strand starting at position 2630 of SEQ ID NO: 1562602
caaauauguuauugguaag

SEQ ID NO: 1759228 - RNA, 19 nt, Artificial Sequence
  Description of Artificial Sequence: Synthetic oligonucleotide
  Antisense strand to SEQ ID NO: 1759227
cuuaccaauaacauauuug

SEQ ID NO: 1759229 - RNA, 19 nt, Artificial Sequence
  Description of Artificial Sequence: Synthetic oligonucleotide
  Sense strand starting at position 2649 of SEQ ID NO: 1562602
gcuucuagucaauaguaua

SEQ ID NO: 1759230 - RNA, 19 nt, Artificial Sequence
  Description of Artificial Sequence: Synthetic oligonucleotide
  Antisense strand to SEQ ID NO: 1759229
uauacuauugacuagaagc

SEQ ID NO: 1759231 - RNA, 19 nt, Artificial Sequence
  Description of Artificial Sequence: Synthetic oligonucleotide
  Sense strand starting at position 2662 of SEQ ID NO: 1562602
aguauauuaguaggaaagu

SEQ ID NO: 1759232 - RNA, 19 nt, Artificial Sequence
  Description of Artificial Sequence: Synthetic oligonucleotide
  Antisense strand to SEQ ID NO: 1759231
acuuuccuacuaauauacu

SEQ ID NO: 1759233 - RNA, 19 nt, Artificial Sequence
  Description of Artificial Sequence: Synthetic oligonucleotide
  Sense strand starting at position 2663 of SEQ ID NO: 1562602
guauauuaguaggaaaguu

SEQ ID NO: 1759234 - RNA, 19 nt, Artificial Sequence
  Description of Artificial Sequence: Synthetic oligonucleotide
  Antisense strand to SEQ ID NO: 1759233
aacuuuccuacuaauauac

SEQ ID NO: 1759235 - RNA, 19 nt, Artificial Sequence
  Description of Artificial Sequence: Synthetic oligonucleotide
  Sense strand starting at position 3057 of SEQ ID NO: 1562602
guaucauuaguagagacga

SEQ ID NO: 1759236 - RNA, 19 nt, Artificial Sequence
  Description of Artificial Sequence: Synthetic oligonucleotide
  Antisense strand to SEQ ID NO: 1759235
ucgucucuacuaaugauac

SEQ ID NO: 1759237 - RNA, 19 nt, Artificial Sequence
  Description of Artificial Sequence: Synthetic oligonucleotide
  Sense strand starting at position 3227 of SEQ ID NO: 1562602
ccaggcuggucucaucgaa

SEQ ID NO: 1759238 - RNA, 19 nt, Artificial Sequence
  Description of Artificial Sequence: Synthetic oligonucleotide
  Antisense strand to SEQ ID NO: 1759237
uucgaugagaccagccugg

SEQ ID NO: 1759239 - RNA, 19 nt, Artificial Sequence
  Description of Artificial Sequence: Synthetic oligonucleotide
  Sense strand starting at position 3376 of SEQ ID NO: 1562602
ggguccacuguauggauau

SEQ ID NO: 1759240 - RNA, 19 nt, Artificial Sequence
  Description of Artificial Sequence: Synthetic oligonucleotide
  Antisense strand to SEQ ID NO: 1759239
auauccauacaguggaccc

SEQ ID NO: 1759241 - RNA, 19 nt, Artificial Sequence
  Description of Artificial Sequence: Synthetic oligonucleotide
  Sense strand starting at position 3395 of SEQ ID NO: 1562602
gcacacauguaguaucuaa

SEQ ID NO: 1759242 - RNA, 19 nt, Artificial Sequence
  Description of Artificial Sequence: Synthetic oligonucleotide
  Antisense strand to SEQ ID NO: 1759241
uuagauacuacaugugugc

SEQ ID NO: 1759243 - RNA, 19 nt, Artificial Sequence
  Description of Artificial Sequence: Synthetic oligonucleotide
  Sense strand starting at position 3481 of SEQ ID NO: 1562602
uuagguacaucugggugaa

SEQ ID NO: 1759244 - RNA, 19 nt, Artificial Sequence
  Description of Artificial Sequence: Synthetic oligonucleotide
  Antisense strand to SEQ ID NO: 1759243
uucacccagauguaccuaa

SEQ ID NO: 1759245 - RNA, 19 nt, Artificial Sequence
  Description of Artificial Sequence: Synthetic oligonucleotide
  Sense strand starting at position 3483 of SEQ ID NO: 1562602
agguacaucugggugaaga

SEQ ID NO: 1759246 - RNA, 19 nt, Artificial Sequence
  Description of Artificial Sequence: Synthetic oligonucleotide
  Antisense strand to SEQ ID NO: 1759245
ucuucacccagauguaccu

SEQ ID NO: 1759247 - RNA, 19 nt, Artificial Sequence
  Description of Artificial Sequence: Synthetic oligonucleotide
  Sense strand starting at position 3484 of SEQ ID NO: 1562602
gguacaucugggugaagag

SEQ ID NO: 1759248 - RNA, 19 nt, Artificial Sequence
  Description of Artificial Sequence: Synthetic oligonucleotide
  Antisense strand to SEQ ID NO: 1759247
cucuucacccagauguacc

SEQ ID NO: 1759249 - RNA, 19 nt, Artificial Sequence
  Description of Artificial Sequence: Synthetic oligonucleotide
  Sense strand starting at position 3485 of SEQ ID NO: 1562602
guacaucugggugaagagu

SEQ ID NO: 1759250 - RNA, 19 nt, Artificial Sequence
  Description of Artificial Sequence: Synthetic oligonucleotide
  Antisense strand to SEQ ID NO: 1759249
acucuucacccagauguac

SEQ ID NO: 1759251 - RNA, 19 nt, Artificial Sequence
  Description of Artificial Sequence: Synthetic oligonucleotide
  Sense strand starting at position 3661 of SEQ ID NO: 1562602
ccaccaggccuugguaauu

SEQ ID NO: 1759252 - RNA, 19 nt, Artificial Sequence
  Description of Artificial Sequence: Synthetic oligonucleotide
  Antisense strand to SEQ ID NO: 1759251
aauuaccaaggccuggugg

SEQ ID NO: 1759253 - RNA, 19 nt, Artificial Sequence
  Description of Artificial Sequence: Synthetic oligonucleotide
  Sense strand starting at position 3775 of SEQ ID NO: 1562602
guucuaggauugcagguau

SEQ ID NO: 1759254 - RNA, 19 nt, Artificial Sequence
  Description of Artificial Sequence: Synthetic oligonucleotide
  Antisense strand to SEQ ID NO: 1759253
auaccugcaauccuagaac

SEQ ID NO: 1759255 - RNA, 19 nt, Artificial Sequence
  Description of Artificial Sequence: Synthetic oligonucleotide
  Sense strand starting at position 3800 of SEQ ID NO: 1562602
cugcguccagcccauaaau

SEQ ID NO: 1759256 - RNA, 19 nt, Artificial Sequence
  Description of Artificial Sequence: Synthetic oligonucleotide
  Antisense strand to SEQ ID NO: 1759255
auuuaugggcuggacgcag

SEQ ID NO: 1759257 - RNA, 19 nt, Artificial Sequence
  Description of Artificial Sequence: Synthetic oligonucleotide
  Sense strand starting at position 3 of SEQ ID NO: 1562603
cagacagccuggcuuauuu

SEQ ID NO: 1759258 - RNA, 19 nt, Artificial Sequence
  Description of Artificial Sequence: Synthetic oligonucleotide
  Antisense strand to SEQ ID NO: 1759257
aaauaagccaggcugucug

SEQ ID NO: 1759259 - RNA, 19 nt, Artificial Sequence
  Description of Artificial Sequence: Synthetic oligonucleotide
  Sense strand starting at position 149 of SEQ ID NO: 1562603
uggcguguauuuguguuua

SEQ ID NO: 1759260 - RNA, 19 nt, Artificial Sequence
  Description of Artificial Sequence: Synthetic oligonucleotide
  Antisense strand to SEQ ID NO: 1759259
uaaacacaaauacacgcca

SEQ ID NO: 1759261 - RNA, 19 nt, Artificial Sequence
  Description of Artificial Sequence: Synthetic oligonucleotide
  Sense strand starting at position 151 of SEQ ID NO: 1562603
gcguguauuuguguuuauu

SEQ ID NO: 1759262 - RNA, 19 nt, Artificial Sequence
  Description of Artificial Sequence: Synthetic oligonucleotide
  Antisense strand to SEQ ID NO: 1759261
aauaaacacaaauacacgc

SEQ ID NO: 1759263 - RNA, 19 nt, Artificial Sequence
  Description of Artificial Sequence: Synthetic oligonucleotide
  Sense strand starting at position 1039 of SEQ ID NO: 1562603
agugaacgaccuugucaaa

SEQ ID NO: 1759264 - RNA, 19 nt, Artificial Sequence
  Description of Artificial Sequence: Synthetic oligonucleotide
  Antisense strand to SEQ ID NO: 1759263
uuugacaaggucguucacu

SEQ ID NO: 1759265 - RNA, 19 nt, Artificial Sequence
  Description of Artificial Sequence: Synthetic oligonucleotide
  Sense strand starting at position 1086 of SEQ ID NO: 1562603
ccgcacuguuuccuaucau

SEQ ID NO: 1759266 - RNA, 19 nt, Artificial Sequence
  Description of Artificial Sequence: Synthetic oligonucleotide
  Antisense strand to SEQ ID NO: 1759265
augauaggaaacagugcgg

SEQ ID NO: 1759267 - RNA, 19 nt, Artificial Sequence
  Description of Artificial Sequence: Synthetic oligonucleotide
  Sense strand starting at position 1087 of SEQ ID NO: 1562603
cgcacuguuuccuaucaua

SEQ ID NO: 1759268 - RNA, 19 nt, Artificial Sequence
  Description of Artificial Sequence: Synthetic oligonucleotide
  Antisense strand to SEQ ID NO: 1759267
uaugauaggaaacagugcg

SEQ ID NO: 1759269 - RNA, 19 nt, Artificial Sequence
  Description of Artificial Sequence: Synthetic oligonucleotide
  Sense strand starting at position 1090 of SEQ ID NO: 1562603
acuguuuccuaucauauag

SEQ ID NO: 1759270 - RNA, 19 nt, Artificial Sequence
  Description of Artificial Sequence: Synthetic oligonucleotide
  Antisense strand to SEQ ID NO: 1759269
cuauaugauaggaaacagu

SEQ ID NO: 1759271 - RNA, 19 nt, Artificial Sequence
  Description of Artificial Sequence: Synthetic oligonucleotide
  Sense strand starting at position 1115 of SEQ ID NO: 1562603
gcauuucccucaggguuaa

SEQ ID NO: 1759272 - RNA, 19 nt, Artificial Sequence
  Description of Artificial Sequence: Synthetic oligonucleotide
  Antisense strand to SEQ ID NO: 1759271
uuaacccugagggaaaugc

SEQ ID NO: 1759273 - RNA, 19 nt, Artificial Sequence
  Description of Artificial Sequence: Synthetic oligonucleotide
  Sense strand starting at position 1146 of SEQ ID NO: 1562603
ugacaaggcugguuuguuu

SEQ ID NO: 1759274 - RNA, 19 nt, Artificial Sequence
  Description of Artificial Sequence: Synthetic oligonucleotide
  Antisense strand to SEQ ID NO: 1759273
aaacaaaccagccuuguca

SEQ ID NO: 1759275 - RNA, 19 nt, Artificial Sequence
  Description of Artificial Sequence: Synthetic oligonucleotide
  Sense strand starting at position 1255 of SEQ ID NO: 1562603
ggguucagcuucccgagua

SEQ ID NO: 1759276 - RNA, 19 nt, Artificial Sequence
  Description of Artificial Sequence: Synthetic oligonucleotide
  Antisense strand to SEQ ID NO: 1759275
uacucgggaagcugaaccc

SEQ ID NO: 1759277 - RNA, 19 nt, Artificial Sequence
  Description of Artificial Sequence: Synthetic oligonucleotide
  Sense strand starting at position 1464 of SEQ ID NO: 1562603
ugcacagaucucuguccga

SEQ ID NO: 1759278 - RNA, 19 nt, Artificial Sequence
  Description of Artificial Sequence: Synthetic oligonucleotide
  Antisense strand to SEQ ID NO: 1759277
ucggacagagaucugugca

SEQ ID NO: 1759279 - RNA, 19 nt, Artificial Sequence
  Description of Artificial Sequence: Synthetic oligonucleotide
  Sense strand starting at position 1467 of SEQ ID NO: 1562603
acagaucucuguccgacua

SEQ ID NO: 1759280 - RNA, 19 nt, Artificial Sequence
  Description of Artificial Sequence: Synthetic oligonucleotide
  Antisense strand to SEQ ID NO: 1759279
uagucggacagagaucugu

SEQ ID NO: 1759281 - RNA, 19 nt, Artificial Sequence
  Description of Artificial Sequence: Synthetic oligonucleotide
  Sense strand starting at position 1614 of SEQ ID NO: 1562603
gggcaaaucuccguccuca

SEQ ID NO: 1759282 - RNA, 19 nt, Artificial Sequence
  Description of Artificial Sequence: Synthetic oligonucleotide
  Antisense strand to SEQ ID NO: 1759281
ugaggacggagauuugccc

SEQ ID NO: 1759283 - RNA, 19 nt, Artificial Sequence
  Description of Artificial Sequence: Synthetic oligonucleotide
  Sense strand starting at position 1807 of SEQ ID NO: 1562603
gagccauggcgagagcaau

SEQ ID NO: 1759284 - RNA, 19 nt, Artificial Sequence
  Description of Artificial Sequence: Synthetic oligonucleotide
  Antisense strand to SEQ ID NO: 1759283
auugcucucgccauggcuc

SEQ ID NO: 1759285 - RNA, 19 nt, Artificial Sequence
  Description of Artificial Sequence: Synthetic oligonucleotide
  Sense strand starting at position 1838 of SEQ ID NO: 1562603
aacaguaggcucgaguuua

SEQ ID NO: 1759286 - RNA, 19 nt, Artificial Sequence
  Description of Artificial Sequence: Synthetic oligonucleotide
  Antisense strand to SEQ ID NO: 1759285
uaaacucgagccuacuguu

SEQ ID NO: 1759287 - RNA, 19 nt, Artificial Sequence
  Description of Artificial Sequence: Synthetic oligonucleotide
  Sense strand starting at position 1849 of SEQ ID NO: 1562603
cgaguuuagguuugaaagg

SEQ ID NO: 1759288 - RNA, 19 nt, Artificial Sequence
  Description of Artificial Sequence: Synthetic oligonucleotide
  Antisense strand to SEQ ID NO: 1759287
ccuuucaaaccuaaacucg

SEQ ID NO: 1759289 - RNA, 19 nt, Artificial Sequence
  Description of Artificial Sequence: Synthetic oligonucleotide
  Sense strand starting at position 1850 of SEQ ID NO: 1562603
gaguuuagguuugaaaggu

SEQ ID NO: 1759290 - RNA, 19 nt, Artificial Sequence
  Description of Artificial Sequence: Synthetic oligonucleotide
  Antisense strand to SEQ ID NO: 1759289
accuuucaaaccuaaacuc

SEQ ID NO: 1759291 - RNA, 19 nt, Artificial Sequence
  Description of Artificial Sequence: Synthetic oligonucleotide
  Sense strand starting at position 1910 of SEQ ID NO: 1562603
cggguuccuuuacuuuaua

SEQ ID NO: 1759292 - RNA, 19 nt, Artificial Sequence
  Description of Artificial Sequence: Synthetic oligonucleotide
  Antisense strand to SEQ ID NO: 1759291
uauaaaguaaaggaacccg

SEQ ID NO: 1759293 - RNA, 19 nt, Artificial Sequence
  Description of Artificial Sequence: Synthetic oligonucleotide
  Sense strand starting at position 1911 of SEQ ID NO: 1562603
ggguuccuuuacuuuauaa

SEQ ID NO: 1759294 - RNA, 19 nt, Artificial Sequence
  Description of Artificial Sequence: Synthetic oligonucleotide
  Antisense strand to SEQ ID NO: 1759293
uuauaaaguaaaggaaccc

SEQ ID NO: 1759295 - RNA, 19 nt, Artificial Sequence
  Description of Artificial Sequence: Synthetic oligonucleotide
  Sense strand starting at position 2071 of SEQ ID NO: 1562603
ucgugaccugaccgguauu

SEQ ID NO: 1759296 - RNA, 19 nt, Artificial Sequence
  Description of Artificial Sequence: Synthetic oligonucleotide
  Antisense strand to SEQ ID NO: 1759295
aauaccggucaggucacga

SEQ ID NO: 1759297 - RNA, 19 nt, Artificial Sequence
  Description of Artificial Sequence: Synthetic oligonucleotide
  Sense strand starting at position 2146 of SEQ ID NO: 1562603
cugaaauuagucgggcugu

SEQ ID NO: 1759298 - RNA, 19 nt, Artificial Sequence
  Description of Artificial Sequence: Synthetic oligonucleotide
  Antisense strand to SEQ ID NO: 1759297
acagcccgacuaauuucag

SEQ ID NO: 1759299 - RNA, 19 nt, Artificial Sequence
  Description of Artificial Sequence: Synthetic oligonucleotide
  Sense strand starting at position 2147 of SEQ ID NO: 1562603
ugaaauuagucgggcuguu

SEQ ID NO: 1759300 - RNA, 19 nt, Artificial Sequence
  Description of Artificial Sequence: Synthetic oligonucleotide
  Antisense strand to SEQ ID NO: 1759299
aacagcccgacuaauuuca

SEQ ID NO: 1759301 - RNA, 19 nt, Artificial Sequence
  Description of Artificial Sequence: Synthetic oligonucleotide
  Sense strand starting at position 2175 of SEQ ID NO: 1562603
acugguuagguauauugga

SEQ ID NO: 1759302 - RNA, 19 nt, Artificial Sequence
  Description of Artificial Sequence: Synthetic oligonucleotide
  Antisense strand to SEQ ID NO: 1759301
uccaauauaccuaaccagu

SEQ ID NO: 1759303 - RNA, 19 nt, Artificial Sequence
  Description of Artificial Sequence: Synthetic oligonucleotide
  Sense strand starting at position 2180 of SEQ ID NO: 1562603
uuagguauauuggagaaug

SEQ ID NO: 1759304 - RNA, 19 nt, Artificial Sequence
  Description of Artificial Sequence: Synthetic oligonucleotide
  Antisense strand to SEQ ID NO: 1759303
cauucuccaauauaccuaa

SEQ ID NO: 1759305 - RNA, 19 nt, Artificial Sequence
  Description of Artificial Sequence: Synthetic oligonucleotide
  Sense strand starting at position 2218 of SEQ ID NO: 1562603
cgcauaauuacacaggguu

SEQ ID NO: 1759306 - RNA, 19 nt, Artificial Sequence
  Description of Artificial Sequence: Synthetic oligonucleotide
  Antisense strand to SEQ ID NO: 1759305
aacccuguguaauuaugcg

SEQ ID NO: 1759307 - RNA, 19 nt, Artificial Sequence
  Description of Artificial Sequence: Synthetic oligonucleotide
  Sense strand starting at position 2282 of SEQ ID NO: 1562603
gccugcaauccggagacuu

SEQ ID NO: 1759308 - RNA, 19 nt, Artificial Sequence
  Description of Artificial Sequence: Synthetic oligonucleotide
  Antisense strand to SEQ ID NO: 1759307
aagucuccggauugcaggc

SEQ ID NO: 1759309 - RNA, 19 nt, Artificial Sequence
  Description of Artificial Sequence: Synthetic oligonucleotide
  Sense strand starting at position 2315 of SEQ ID NO: 1562603
ggguguaucgcuugaccuc

SEQ ID NO: 1759310 - RNA, 19 nt, Artificial Sequence
  Description of Artificial Sequence: Synthetic oligonucleotide
  Antisense strand to SEQ ID NO: 1759309
gaggucaagcgauacaccc

SEQ ID NO: 1759311 - RNA, 19 nt, Artificial Sequence
  Description of Artificial Sequence: Synthetic oligonucleotide
  Sense strand starting at position 2316 of SEQ ID NO: 1562603
gguguaucgcuugaccuca

SEQ ID NO: 1759312 - RNA, 19 nt, Artificial Sequence
  Description of Artificial Sequence: Synthetic oligonucleotide
  Antisense strand to SEQ ID NO: 1759311
ugaggucaagcgauacacc

SEQ ID NO: 1759313 - RNA, 19 nt, Artificial Sequence
  Description of Artificial Sequence: Synthetic oligonucleotide
  Sense strand starting at position 2662 of SEQ ID NO: 1562603
agaggaauauuaggacaga

SEQ ID NO: 1759314 - RNA, 19 nt, Artificial Sequence
  Description of Artificial Sequence: Synthetic oligonucleotide
  Antisense strand to SEQ ID NO: 1759313
ucuguccuaauauuccucu

SEQ ID NO: 1759315 - RNA, 19 nt, Artificial Sequence
  Description of Artificial Sequence: Synthetic oligonucleotide
  Sense strand starting at position 2663 of SEQ ID NO: 1562603
gaggaauauuaggacagaa

SEQ ID NO: 1759316 - RNA, 19 nt, Artificial Sequence
  Description of Artificial Sequence: Synthetic oligonucleotide
  Antisense strand to SEQ ID NO: 1759315
uucuguccuaauauuccuc

SEQ ID NO: 1759317 - RNA, 19 nt, Artificial Sequence
  Description of Artificial Sequence: Synthetic oligonucleotide
  Sense strand starting at position 2770 of SEQ ID NO: 1562603
ccuuuaucuuuaggauaga

SEQ ID NO: 1759318 - RNA, 19 nt, Artificial Sequence
  Description of Artificial Sequence: Synthetic oligonucleotide
  Antisense strand to SEQ ID NO: 1759317
ucuauccuaaagauaaagg

SEQ ID NO: 1759319 - RNA, 19 nt, Artificial Sequence
  Description of Artificial Sequence: Synthetic oligonucleotide
  Sense strand starting at position 2788 of SEQ ID NO: 1562603
acugacuccuaauaguaga

SEQ ID NO: 1759320 - RNA, 19 nt, Artificial Sequence
  Description of Artificial Sequence: Synthetic oligonucleotide
  Antisense strand to SEQ ID NO: 1759319
ucuacuauuaggagucagu

SEQ ID NO: 1759321 - RNA, 19 nt, Artificial Sequence
  Description of Artificial Sequence: Synthetic oligonucleotide
  Sense strand starting at position 2897 of SEQ ID NO: 1562603
gagauauaguaacuuguaa

SEQ ID NO: 1759322 - RNA, 19 nt, Artificial Sequence
  Description of Artificial Sequence: Synthetic oligonucleotide
  Antisense strand to SEQ ID NO: 1759321
uuacaaguuacuauaucuc

SEQ ID NO: 1759323 - RNA, 19 nt, Artificial Sequence
  Description of Artificial Sequence: Synthetic oligonucleotide
  Sense strand starting at position 2904 of SEQ ID NO: 1562603
aguaacuuguaagaauacu

SEQ ID NO: 1759324 - RNA, 19 nt, Artificial Sequence
  Description of Artificial Sequence: Synthetic oligonucleotide
  Antisense strand to SEQ ID NO: 1759323
aguauucuuacaaguuacu

SEQ ID NO: 1759325 - RNA, 19 nt, Artificial Sequence
  Description of Artificial Sequence: Synthetic oligonucleotide
  Sense strand starting at position 2912 of SEQ ID NO: 1562603
guaagaauacugcauugac

SEQ ID NO: 1759326 - RNA, 19 nt, Artificial Sequence
  Description of Artificial Sequence: Synthetic oligonucleotide
  Antisense strand to SEQ ID NO: 1759325
gucaaugcaguauucuuac

SEQ ID NO: 1759327 - RNA, 19 nt, Artificial Sequence
  Description of Artificial Sequence: Synthetic oligonucleotide
  Sense strand starting at position 3034 of SEQ ID NO: 1562603
uuuagugugucauaagaac

SEQ ID NO: 1759328 - RNA, 19 nt, Artificial Sequence
  Description of Artificial Sequence: Synthetic oligonucleotide
  Antisense strand to SEQ ID NO: 1759327
guucuuaugacacacuaaa

SEQ ID NO: 1759329 - RNA, 19 nt, Artificial Sequence
  Description of Artificial Sequence: Synthetic oligonucleotide
  Sense strand starting at position 3040 of SEQ ID NO: 1562603
gugucauaagaacgaggau

SEQ ID NO: 1759330 - RNA, 19 nt, Artificial Sequence
  Description of Artificial Sequence: Synthetic oligonucleotide
  Antisense strand to SEQ ID NO: 1759329
auccucguucuuaugacac

SEQ ID NO: 1759331 - RNA, 19 nt, Artificial Sequence
  Description of Artificial Sequence: Synthetic oligonucleotide
  Sense strand starting at position 3076 of SEQ ID NO: 1562603
uuuaguuuacuaggcugaa

SEQ ID NO: 1759332 - RNA, 19 nt, Artificial Sequence
  Description of Artificial Sequence: Synthetic oligonucleotide
  Antisense strand to SEQ ID NO: 1759331
uucagccuaguaaacuaaa

SEQ ID NO: 1759333 - RNA, 19 nt, Artificial Sequence
  Description of Artificial Sequence: Synthetic oligonucleotide
  Sense strand starting at position 3079 of SEQ ID NO: 1562603
aguuuacuaggcugaacau

SEQ ID NO: 1759334 - RNA, 19 nt, Artificial Sequence
  Description of Artificial Sequence: Synthetic oligonucleotide
  Antisense strand to SEQ ID NO: 1759333
auguucagccuaguaaacu

SEQ ID NO: 1759335 - RNA, 19 nt, Artificial Sequence
  Description of Artificial Sequence: Synthetic oligonucleotide
  Sense strand starting at position 3080 of SEQ ID NO: 1562603
guuuacuaggcugaacauu

SEQ ID NO: 1759336 - RNA, 19 nt, Artificial Sequence
  Description of Artificial Sequence: Synthetic oligonucleotide
  Antisense strand to SEQ ID NO: 1759335
aauguucagccuaguaaac

SEQ ID NO: 1759337 - RNA, 19 nt, Artificial Sequence
  Description of Artificial Sequence: Synthetic oligonucleotide
  Sense strand starting at position 99 of SEQ ID NO: 1562604
uguauagauuuccauuaca

SEQ ID NO: 1759338 - RNA, 19 nt, Artificial Sequence
  Description of Artificial Sequence: Synthetic oligonucleotide
  Antisense strand to SEQ ID NO: 1759337
uguaauggaaaucuauaca

SEQ ID NO: 1759339 - RNA, 19 nt, Artificial Sequence
  Description of Artificial Sequence: Synthetic oligonucleotide
  Sense strand starting at position 110 of SEQ ID NO: 1562604
ccauuacaauguguuuauu

SEQ ID NO: 1759340 - RNA, 19 nt, Artificial Sequence
  Description of Artificial Sequence: Synthetic oligonucleotide
  Antisense strand to SEQ ID NO: 1759339
aauaaacacauuguaaugg

SEQ ID NO: 1759341 - RNA, 19 nt, Artificial Sequence
  Description of Artificial Sequence: Synthetic oligonucleotide
  Sense strand starting at position 227 of SEQ ID NO: 1562604
ucaauaaaugguugaugac

SEQ ID NO: 1759342 - RNA, 19 nt, Artificial Sequence
  Description of Artificial Sequence: Synthetic oligonucleotide
  Antisense strand to SEQ ID NO: 1759341
gucaucaaccauuuauuga

SEQ ID NO: 1759343 - RNA, 19 nt, Artificial Sequence
  Description of Artificial Sequence: Synthetic oligonucleotide
  Sense strand starting at position 234 of SEQ ID NO: 1562604
augguugaugacuggguua

SEQ ID NO: 1759344 - RNA, 19 nt, Artificial Sequence
  Description of Artificial Sequence: Synthetic oligonucleotide
  Antisense strand to SEQ ID NO: 1759343
uaacccagucaucaaccau

SEQ ID NO: 1759345 - RNA, 19 nt, Artificial Sequence
  Description of Artificial Sequence: Synthetic oligonucleotide
  Sense strand starting at position 236 of SEQ ID NO: 1562604
gguugaugacuggguuauu

SEQ ID NO: 1759346 - RNA, 19 nt, Artificial Sequence
  Description of Artificial Sequence: Synthetic oligonucleotide
  Antisense strand to SEQ ID NO: 1759345
aauaacccagucaucaacc

SEQ ID NO: 1759347 - RNA, 19 nt, Artificial Sequence
  Description of Artificial Sequence: Synthetic oligonucleotide
  Sense strand starting at position 237 of SEQ ID NO: 1562604
guugaugacuggguuauua

SEQ ID NO: 1759348 - RNA, 19 nt, Artificial Sequence
  Description of Artificial Sequence: Synthetic oligonucleotide
  Antisense strand to SEQ ID NO: 1759347
uaauaacccagucaucaac

SEQ ID NO: 1759349 - RNA, 19 nt, Artificial Sequence
  Description of Artificial Sequence: Synthetic oligonucleotide
  Sense strand starting at position 241 of SEQ ID NO: 1562604
augacuggguuauuaacua

SEQ ID NO: 1759350 - RNA, 19 nt, Artificial Sequence
  Description of Artificial Sequence: Synthetic oligonucleotide
  Antisense strand to SEQ ID NO: 1759349
uaguuaauaacccagucau

SEQ ID NO: 1759351 - RNA, 19 nt, Artificial Sequence
  Description of Artificial Sequence: Synthetic oligonucleotide
  Sense strand starting at position 282 of SEQ ID NO: 1562604
agaaaugccuaagcauuaa

SEQ ID NO: 1759352 - RNA, 19 nt, Artificial Sequence
  Description of Artificial Sequence: Synthetic oligonucleotide
  Antisense strand to SEQ ID NO: 1759351
uuaaugcuuaggcauuucu

SEQ ID NO: 1759353 - RNA, 19 nt, Artificial Sequence
  Description of Artificial Sequence: Synthetic oligonucleotide
  Sense strand starting at position 385 of SEQ ID NO: 1562604
cccaaagugaugugaggua

SEQ ID NO: 1759354 - RNA, 19 nt, Artificial Sequence
  Description of Artificial Sequence: Synthetic oligonucleotide
  Antisense strand to SEQ ID NO: 1759353
uaccucacaucacuuuggg

SEQ ID NO: 1759355 - RNA, 19 nt, Artificial Sequence
  Description of Artificial Sequence: Synthetic oligonucleotide
  Sense strand starting at position 416 of SEQ ID NO: 1562604
agaccaggugucuaguuua

SEQ ID NO: 1759356 - RNA, 19 nt, Artificial Sequence
  Description of Artificial Sequence: Synthetic oligonucleotide
  Antisense strand to SEQ ID NO: 1759355
uaaacuagacaccuggucu

SEQ ID NO: 1759357 - RNA, 19 nt, Artificial Sequence
  Description of Artificial Sequence: Synthetic oligonucleotide
  Sense strand starting at position 419 of SEQ ID NO: 1562604
ccaggugucuaguuuaaag

SEQ ID NO: 1759358 - RNA, 19 nt, Artificial Sequence
  Description of Artificial Sequence: Synthetic oligonucleotide
  Antisense strand to SEQ ID NO: 1759357
cuuuaaacuagacaccugg

SEQ ID NO: 1759359 - RNA, 19 nt, Artificial Sequence
  Description of Artificial Sequence: Synthetic oligonucleotide
  Sense strand starting at position 421 of SEQ ID NO: 1562604
aggugucuaguuuaaagag

SEQ ID NO: 1759360 - RNA, 19 nt, Artificial Sequence
  Description of Artificial Sequence: Synthetic oligonucleotide
  Antisense strand to SEQ ID NO: 1759359
cucuuuaaacuagacaccu

SEQ ID NO: 1759361 - RNA, 19 nt, Artificial Sequence
  Description of Artificial Sequence: Synthetic oligonucleotide
  Sense strand starting at position 439 of SEQ ID NO: 1562604
gaggaaguccucuagugau

SEQ ID NO: 1759362 - RNA, 19 nt, Artificial Sequence
  Description of Artificial Sequence: Synthetic oligonucleotide
  Antisense strand to SEQ ID NO: 1759361
aucacuagaggacuuccuc

SEQ ID NO: 1759363 - RNA, 19 nt, Artificial Sequence
  Description of Artificial Sequence: Synthetic oligonucleotide
  Sense strand starting at position 445 of SEQ ID NO: 1562604
guccucuagugaucaccua

SEQ ID NO: 1759364 - RNA, 19 nt, Artificial Sequence
  Description of Artificial Sequence: Synthetic oligonucleotide
  Antisense strand to SEQ ID NO: 1759363
uaggugaucacuagaggac

SEQ ID NO: 1759365 - RNA, 19 nt, Artificial Sequence
  Description of Artificial Sequence: Synthetic oligonucleotide
  Sense strand starting at position 535 of SEQ ID NO: 1562604
uguuaucuuguacauacua

SEQ ID NO: 1759366 - RNA, 19 nt, Artificial Sequence
  Description of Artificial Sequence: Synthetic oligonucleotide
  Antisense strand to SEQ ID NO: 1759365
uaguauguacaagauaaca

SEQ ID NO: 1759367 - RNA, 19 nt, Artificial Sequence
  Description of Artificial Sequence: Synthetic oligonucleotide
  Sense strand starting at position 599 of SEQ ID NO: 1562604
agcacaauagcugauacau

SEQ ID NO: 1759368 - RNA, 19 nt, Artificial Sequence
  Description of Artificial Sequence: Synthetic oligonucleotide
  Antisense strand to SEQ ID NO: 1759367
auguaucagcuauugugcu

SEQ ID NO: 1759369 - RNA, 19 nt, Artificial Sequence
  Description of Artificial Sequence: Synthetic oligonucleotide
  Sense strand starting at position 605 of SEQ ID NO: 1562604
auagcugauacauggguaa

SEQ ID NO: 1759370 - RNA, 19 nt, Artificial Sequence
  Description of Artificial Sequence: Synthetic oligonucleotide
  Antisense strand to SEQ ID NO: 1759369
uuacccauguaucagcuau

SEQ ID NO: 1759371 - RNA, 19 nt, Artificial Sequence
  Description of Artificial Sequence: Synthetic oligonucleotide
  Sense strand starting at position 607 of SEQ ID NO: 1562604
agcugauacauggguaacu

SEQ ID NO: 1759372 - RNA, 19 nt, Artificial Sequence
  Description of Artificial Sequence: Synthetic oligonucleotide
  Antisense strand to SEQ ID NO: 1759371
aguuacccauguaucagcu

SEQ ID NO: 1759373 - RNA, 19 nt, Artificial Sequence
  Description of Artificial Sequence: Synthetic oligonucleotide
  Sense strand starting at position 608 of SEQ ID NO: 1562604
gcugauacauggguaacua

SEQ ID NO: 1759374 - RNA, 19 nt, Artificial Sequence
  Description of Artificial Sequence: Synthetic oligonucleotide
  Antisense strand to SEQ ID NO: 1759373
uaguuacccauguaucagc

SEQ ID NO: 1759375 - RNA, 19 nt, Artificial Sequence
  Description of Artificial Sequence: Synthetic oligonucleotide
  Sense strand starting at position 623 of SEQ ID NO: 1562604
acuaccaaucaauguguua

SEQ ID NO: 1759376 - RNA, 19 nt, Artificial Sequence
  Description of Artificial Sequence: Synthetic oligonucleotide
  Antisense strand to SEQ ID NO: 1759375
uaacacauugauugguagu

SEQ ID NO: 1759377 - RNA, 19 nt, Artificial Sequence
  Description of Artificial Sequence: Synthetic oligonucleotide
  Sense strand starting at position 626 of SEQ ID NO: 1562604
accaaucaauguguuaagu

SEQ ID NO: 1759378 - RNA, 19 nt, Artificial Sequence
  Description of Artificial Sequence: Synthetic oligonucleotide
  Antisense strand to SEQ ID NO: 1759377
acuuaacacauugauuggu

SEQ ID NO: 1759379 - RNA, 19 nt, Artificial Sequence
  Description of Artificial Sequence: Synthetic oligonucleotide
  Sense strand starting at position 643 of SEQ ID NO: 1562604
gugauaauaucagcuacau

SEQ ID NO: 1759380 - RNA, 19 nt, Artificial Sequence
  Description of Artificial Sequence: Synthetic oligonucleotide
  Antisense strand to SEQ ID NO: 1759379
auguagcugauauuaucac

SEQ ID NO: 1759381 - RNA, 19 nt, Artificial Sequence
  Description of Artificial Sequence: Synthetic oligonucleotide
  Sense strand starting at position 659 of SEQ ID NO: 1562604
cauuuagugcuauguacag

SEQ ID NO: 1759382 - RNA, 19 nt, Artificial Sequence
  Description of Artificial Sequence: Synthetic oligonucleotide
  Antisense strand to SEQ ID NO: 1759381
cuguacauagcacuaaaug

SEQ ID NO: 1759383 - RNA, 19 nt, Artificial Sequence
  Description of Artificial Sequence: Synthetic oligonucleotide
  Sense strand starting at position 925 of SEQ ID NO: 1562604
aauucuaaggccuggagaa

SEQ ID NO: 1759384 - RNA, 19 nt, Artificial Sequence
  Description of Artificial Sequence: Synthetic oligonucleotide
  Antisense strand to SEQ ID NO: 1759383
uucuccaggccuuagaauu

SEQ ID NO: 1759385 - RNA, 19 nt, Artificial Sequence
  Description of Artificial Sequence: Synthetic oligonucleotide
  Sense strand starting at position 926 of SEQ ID NO: 1562604
auucuaaggccuggagaaa

SEQ ID NO: 1759386 - RNA, 19 nt, Artificial Sequence
  Description of Artificial Sequence: Synthetic oligonucleotide
  Antisense strand to SEQ ID NO: 1759385
uuucuccaggccuuagaau

SEQ ID NO: 1759387 - RNA, 19 nt, Artificial Sequence
  Description of Artificial Sequence: Synthetic oligonucleotide
  Sense strand starting at position 2020 of SEQ ID NO: 1562604
ggaaguucugggugagagc

SEQ ID NO: 1759388 - RNA, 19 nt, Artificial Sequence
  Description of Artificial Sequence: Synthetic oligonucleotide
  Antisense strand to SEQ ID NO: 1759387
gcucucacccagaacuucc

SEQ ID NO: 1759389 - RNA, 19 nt, Artificial Sequence
  Description of Artificial Sequence: Synthetic oligonucleotide
  Sense strand starting at position 2618 of SEQ ID NO: 1562604
cuuacugaucauugcugau

SEQ ID NO: 1759390 - RNA, 19 nt, Artificial Sequence
  Description of Artificial Sequence: Synthetic oligonucleotide
  Antisense strand to SEQ ID NO: 1759389
aucagcaaugaucaguaag

SEQ ID NO: 1759391 - RNA, 19 nt, Artificial Sequence
  Description of Artificial Sequence: Synthetic oligonucleotide
  Sense strand starting at position 2622 of SEQ ID NO: 1562604
cugaucauugcugaucaau

SEQ ID NO: 1759392 - RNA, 19 nt, Artificial Sequence
  Description of Artificial Sequence: Synthetic oligonucleotide
  Antisense strand to SEQ ID NO: 1759391
auugaucagcaaugaucag

SEQ ID NO: 1759393 - RNA, 19 nt, Artificial Sequence
  Description of Artificial Sequence: Synthetic oligonucleotide
  Sense strand starting at position 2665 of SEQ ID NO: 1562604
gccucuagugaguauacau

SEQ ID NO: 1759394 - RNA, 19 nt, Artificial Sequence
  Description of Artificial Sequence: Synthetic oligonucleotide
  Antisense strand to SEQ ID NO: 1759393
auguauacucacuagaggc

SEQ ID NO: 1759395 - RNA, 19 nt, Artificial Sequence
  Description of Artificial Sequence: Synthetic oligonucleotide
  Sense strand starting at position 2714 of SEQ ID NO: 1562604
guucgaagucaagaagcua

SEQ ID NO: 1759396 - RNA, 19 nt, Artificial Sequence
  Description of Artificial Sequence: Synthetic oligonucleotide
  Antisense strand to SEQ ID NO: 1759395
uagcuucuugacuucgaac

SEQ ID NO: 1759397 - RNA, 19 nt, Artificial Sequence
  Description of Artificial Sequence: Synthetic oligonucleotide
  Sense strand starting at position 2818 of SEQ ID NO: 1562604
ugguguugauaacucacau

SEQ ID NO: 1759398 - RNA, 19 nt, Artificial Sequence
  Description of Artificial Sequence: Synthetic oligonucleotide
  Antisense strand to SEQ ID NO: 1759397
augugaguuaucaacacca

SEQ ID NO: 1759399 - RNA, 19 nt, Artificial Sequence
  Description of Artificial Sequence: Synthetic oligonucleotide
  Sense strand starting at position 2853 of SEQ ID NO: 1562604
ccuuuauuacaguguauau

SEQ ID NO: 1759400 - RNA, 19 nt, Artificial Sequence
  Description of Artificial Sequence: Synthetic oligonucleotide
  Antisense strand to SEQ ID NO: 1759399
auauacacuguaauaaagg

SEQ ID NO: 1759401 - RNA, 19 nt, Artificial Sequence
  Description of Artificial Sequence: Synthetic oligonucleotide
  Sense strand starting at position 2904 of SEQ ID NO: 1562604
cuaggugcuggagauguaa

SEQ ID NO: 1759402 - RNA, 19 nt, Artificial Sequence
  Description of Artificial Sequence: Synthetic oligonucleotide
  Antisense strand to SEQ ID NO: 1759401
uuacaucuccagcaccuag

SEQ ID NO: 1759403 - RNA, 19 nt, Artificial Sequence
  Description of Artificial Sequence: Synthetic oligonucleotide
  Sense strand starting at position 2992 of SEQ ID NO: 1562604
aacugaguauaguugugaa

SEQ ID NO: 1759404 - RNA, 19 nt, Artificial Sequence
  Description of Artificial Sequence: Synthetic oligonucleotide
  Antisense strand to SEQ ID NO: 1759403
uucacaacuauacucaguu

SEQ ID NO: 1759405 - RNA, 19 nt, Artificial Sequence
  Description of Artificial Sequence: Synthetic oligonucleotide
  Sense strand starting at position 3005 of SEQ ID NO: 1562604
ugugaacugcuauaacugu

SEQ ID NO: 1759406 - RNA, 19 nt, Artificial Sequence
  Description of Artificial Sequence: Synthetic oligonucleotide
  Antisense strand to SEQ ID NO: 1759405
acaguuauagcaguucaca

SEQ ID NO: 1759407 - RNA, 19 nt, Artificial Sequence
  Description of Artificial Sequence: Synthetic oligonucleotide
  Sense strand starting at position 3013 of SEQ ID NO: 1562604
gcuauaacuguacaaauug

SEQ ID NO: 1759408 - RNA, 19 nt, Artificial Sequence
  Description of Artificial Sequence: Synthetic oligonucleotide
  Antisense strand to SEQ ID NO: 1759407
caauuuguacaguuauagc

SEQ ID NO: 1759409 - RNA, 19 nt, Artificial Sequence
  Description of Artificial Sequence: Synthetic oligonucleotide
  Sense strand starting at position 3314 of SEQ ID NO: 1562604
gcagaaugauacccuguau

SEQ ID NO: 1759410 - RNA, 19 nt, Artificial Sequence
  Description of Artificial Sequence: Synthetic oligonucleotide
  Antisense strand to SEQ ID NO: 1759409
auacaggguaucauucugc

SEQ ID NO: 1759411 - RNA, 19 nt, Artificial Sequence
  Description of Artificial Sequence: Synthetic oligonucleotide
  Sense strand starting at position 3387 of SEQ ID NO: 1562604
acaagcaaguuacuugaua

SEQ ID NO: 1759412 - RNA, 19 nt, Artificial Sequence
  Description of Artificial Sequence: Synthetic oligonucleotide
  Antisense strand to SEQ ID NO: 1759411
uaucaaguaacuugcuugu

SEQ ID NO: 1759413 - RNA, 19 nt, Artificial Sequence
  Description of Artificial Sequence: Synthetic oligonucleotide
  Sense strand starting at position 3480 of SEQ ID NO: 1562604
gguauuagaucacuuauua

SEQ ID NO: 1759414 - RNA, 19 nt, Artificial Sequence
  Description of Artificial Sequence: Synthetic oligonucleotide
  Antisense strand to SEQ ID NO: 1759413
uaauaagugaucuaauacc

SEQ ID NO: 1759415 - RNA, 19 nt, Artificial Sequence
  Description of Artificial Sequence: Synthetic oligonucleotide
  Sense strand starting at position 3498 of SEQ ID NO: 1562604
aguagcagugcucaagaca

SEQ ID NO: 1759416 - RNA, 19 nt, Artificial Sequence
  Description of Artificial Sequence: Synthetic oligonucleotide
  Antisense strand to SEQ ID NO: 1759415
ugucuugagcacugcuacu

SEQ ID NO: 1759417 - RNA, 19 nt, Artificial Sequence
  Description of Artificial Sequence: Synthetic oligonucleotide
  Sense strand starting at position 131 of SEQ ID NO: 1562605
ccaggugacgccuagaaau

SEQ ID NO: 1759418 - RNA, 19 nt, Artificial Sequence
  Description of Artificial Sequence: Synthetic oligonucleotide
  Antisense strand to SEQ ID NO: 1759417
auuucuaggcgucaccugg

SEQ ID NO: 1759419 - RNA, 19 nt, Artificial Sequence
  Description of Artificial Sequence: Synthetic oligonucleotide
  Sense strand starting at position 133 of SEQ ID NO: 1562605
aggugacgccuagaaaugu

SEQ ID NO: 1759420 - RNA, 19 nt, Artificial Sequence
  Description of Artificial Sequence: Synthetic oligonucleotide
  Antisense strand to SEQ ID NO: 1759419
acauuucuaggcgucaccu

SEQ ID NO: 1759421 - RNA, 19 nt, Artificial Sequence
  Description of Artificial Sequence: Synthetic oligonucleotide
  Sense strand starting at position 479 of SEQ ID NO: 1562605
gguaguuguugcccaggua

SEQ ID NO: 1759422 - RNA, 19 nt, Artificial Sequence
  Description of Artificial Sequence: Synthetic oligonucleotide
  Antisense strand to SEQ ID NO: 1759421
uaccugggcaacaacuacc

SEQ ID NO: 1759423 - RNA, 19 nt, Artificial Sequence
  Description of Artificial Sequence: Synthetic oligonucleotide
  Sense strand starting at position 517 of SEQ ID NO: 1562605
ggguuaaacugcuccauga

SEQ ID NO: 1759424 - RNA, 19 nt, Artificial Sequence
  Description of Artificial Sequence: Synthetic oligonucleotide
  Antisense strand to SEQ ID NO: 1759423
ucauggagcaguuuaaccc

SEQ ID NO: 1759425 - RNA, 19 nt, Artificial Sequence
  Description of Artificial Sequence: Synthetic oligonucleotide
  Sense strand starting at position 519 of SEQ ID NO: 1562605
guuaaacugcuccaugaug

SEQ ID NO: 1759426 - RNA, 19 nt, Artificial Sequence
  Description of Artificial Sequence: Synthetic oligonucleotide
  Antisense strand to SEQ ID NO: 1759425
caucauggagcaguuuaac

SEQ ID NO: 1759427 - RNA, 19 nt, Artificial Sequence
  Description of Artificial Sequence: Synthetic oligonucleotide
  Sense strand starting at position 1163 of SEQ ID NO: 1562605
gaaugagcuguuuaaccuc

SEQ ID NO: 1759428 - RNA, 19 nt, Artificial Sequence
  Description of Artificial Sequence: Synthetic oligonucleotide
  Antisense strand to SEQ ID NO: 1759427
gagguuaaacagcucauuc

SEQ ID NO: 1759429 - RNA, 19 nt, Artificial Sequence
  Description of Artificial Sequence: Synthetic oligonucleotide
  Sense strand starting at position 1498 of SEQ ID NO: 1562605
gagggagggucuuucuuua

SEQ ID NO: 1759430 - RNA, 19 nt, Artificial Sequence
  Description of Artificial Sequence: Synthetic oligonucleotide
  Antisense strand to SEQ ID NO: 1759429
uaaagaaagacccucccuc

SEQ ID NO: 1759431 - RNA, 19 nt, Artificial Sequence
  Description of Artificial Sequence: Synthetic oligonucleotide
  Sense strand starting at position 1745 of SEQ ID NO: 1562605
gccugauuucugugcccug

SEQ ID NO: 1759432 - RNA, 19 nt, Artificial Sequence
  Description of Artificial Sequence: Synthetic oligonucleotide
  Antisense strand to SEQ ID NO: 1759431
cagggcacagaaaucaggc

SEQ ID NO: 1759433 - RNA, 19 nt, Artificial Sequence
  Description of Artificial Sequence: Synthetic oligonucleotide
  Sense strand starting at position 1796 of SEQ ID NO: 1562605
augugcucaccuuguagau

SEQ ID NO: 1759434 - RNA, 19 nt, Artificial Sequence
  Description of Artificial Sequence: Synthetic oligonucleotide
  Antisense strand to SEQ ID NO: 1759433
aucuacaaggugagcacau

SEQ ID NO: 1759435 - RNA, 19 nt, Artificial Sequence
  Description of Artificial Sequence: Synthetic oligonucleotide
  Sense strand starting at position 2137 of SEQ ID NO: 1562605
ggagcugugggcugauaca

SEQ ID NO: 1759436 - RNA, 19 nt, Artificial Sequence
  Description of Artificial Sequence: Synthetic oligonucleotide
  Antisense strand to SEQ ID NO: 1759435
uguaucagcccacagcucc

SEQ ID NO: 1759437 - RNA, 19 nt, Artificial Sequence
  Description of Artificial Sequence: Synthetic oligonucleotide
  Sense strand starting at position 2532 of SEQ ID NO: 1562605
cggccucucugggugacaa

SEQ ID NO: 1759438 - RNA, 19 nt, Artificial Sequence
  Description of Artificial Sequence: Synthetic oligonucleotide
  Antisense strand to SEQ ID NO: 1759437
uugucacccagagaggccg

SEQ ID NO: 1759439 - RNA, 19 nt, Artificial Sequence
  Description of Artificial Sequence: Synthetic oligonucleotide
  Sense strand starting at position 2533 of SEQ ID NO: 1562605
ggccucucugggugacaaa

SEQ ID NO: 1759440 - RNA, 19 nt, Artificial Sequence
  Description of Artificial Sequence: Synthetic oligonucleotide
  Antisense strand to SEQ ID NO: 1759439
uuugucacccagagaggcc

SEQ ID NO: 1759441 - RNA, 19 nt, Artificial Sequence
  Description of Artificial Sequence: Synthetic oligonucleotide
  Sense strand starting at position 2534 of SEQ ID NO: 1562605
gccucucugggugacaaau

SEQ ID NO: 1759442 - RNA, 19 nt, Artificial Sequence
  Description of Artificial Sequence: Synthetic oligonucleotide
  Antisense strand to SEQ ID NO: 1759441
auuugucacccagagaggc

SEQ ID NO: 1759443 - RNA, 19 nt, Artificial Sequence
  Description of Artificial Sequence: Synthetic oligonucleotide
  Sense strand starting at position 2868 of SEQ ID NO: 1562605
gccacuuccauugggaaga

SEQ ID NO: 1759444 - RNA, 19 nt, Artificial Sequence
  Description of Artificial Sequence: Synthetic oligonucleotide
  Antisense strand to SEQ ID NO: 1759443
ucuucccaauggaaguggc

SEQ ID NO: 1759445 - RNA, 19 nt, Artificial Sequence
  Description of Artificial Sequence: Synthetic oligonucleotide
  Sense strand starting at position 2869 of SEQ ID NO: 1562605
ccacuuccauugggaagaa

SEQ ID NO: 1759446 - RNA, 19 nt, Artificial Sequence
  Description of Artificial Sequence: Synthetic oligonucleotide
  Antisense strand to SEQ ID NO: 1759445
uucuucccaauggaagugg

SEQ ID NO: 1759447 - RNA, 19 nt, Artificial Sequence
  Description of Artificial Sequence: Synthetic oligonucleotide
  Sense strand starting at position 3197 of SEQ ID NO: 1562605
cccuuaauguuugagcuga

SEQ ID NO: 1759448 - RNA, 19 nt, Artificial Sequence
  Description of Artificial Sequence: Synthetic oligonucleotide
  Antisense strand to SEQ ID NO: 1759447
ucagcucaaacauuaaggg

SEQ ID NO: 1759449 - RNA, 19 nt, Artificial Sequence
  Description of Artificial Sequence: Synthetic oligonucleotide
  Sense strand starting at position 3219 of SEQ ID NO: 1562605
gggagucaguuguccuuga

SEQ ID NO: 1759450 - RNA, 19 nt, Artificial Sequence
  Description of Artificial Sequence: Synthetic oligonucleotide
  Antisense strand to SEQ ID NO: 1759449
ucaaggacaacugacuccc

SEQ ID NO: 1759451 - RNA, 19 nt, Artificial Sequence
  Description of Artificial Sequence: Synthetic oligonucleotide
  Sense strand starting at position 3223 of SEQ ID NO: 1562605
gucaguuguccuugacagu

SEQ ID NO: 1759452 - RNA, 19 nt, Artificial Sequence
  Description of Artificial Sequence: Synthetic oligonucleotide
  Antisense strand to SEQ ID NO: 1759451
acugucaaggacaacugac

SEQ ID NO: 1759453 - RNA, 19 nt, Artificial Sequence
  Description of Artificial Sequence: Synthetic oligonucleotide
  Sense strand starting at position 3230 of SEQ ID NO: 1562605
guccuugacagucagggaa

SEQ ID NO: 1759454 - RNA, 19 nt, Artificial Sequence
  Description of Artificial Sequence: Synthetic oligonucleotide
  Antisense strand to SEQ ID NO: 1759453
uucccugacugucaaggac

SEQ ID NO: 1759455 - RNA, 19 nt, Artificial Sequence
  Description of Artificial Sequence: Synthetic oligonucleotide
  Sense strand starting at position 3374 of SEQ ID NO: 1562605
ggucuauggacucagaggu

SEQ ID NO: 1759456 - RNA, 19 nt, Artificial Sequence
  Description of Artificial Sequence: Synthetic oligonucleotide
  Antisense strand to SEQ ID NO: 1759455
accucugaguccauagacc

SEQ ID NO: 1759457 - RNA, 19 nt, Artificial Sequence
  Description of Artificial Sequence: Synthetic oligonucleotide
  Sense strand starting at position 3530 of SEQ ID NO: 1562605
ccucgcggugcucauagau

SEQ ID NO: 1759458 - RNA, 19 nt, Artificial Sequence
  Description of Artificial Sequence: Synthetic oligonucleotide
  Antisense strand to SEQ ID NO: 1759457
aucuaugagcaccgcgagg

SEQ ID NO: 1759459 - RNA, 19 nt, Artificial Sequence
  Description of Artificial Sequence: Synthetic oligonucleotide
  Sense strand starting at position 3533 of SEQ ID NO: 1562605
cgcggugcucauagaugua

SEQ ID NO: 1759460 - RNA, 19 nt, Artificial Sequence
  Description of Artificial Sequence: Synthetic oligonucleotide
  Antisense strand to SEQ ID NO: 1759459
uacaucuaugagcaccgcg

SEQ ID NO: 1759461 - RNA, 19 nt, Artificial Sequence
  Description of Artificial Sequence: Synthetic oligonucleotide
  Sense strand starting at position 90 of SEQ ID NO: 1562606
auuagauuaugugcuagua

SEQ ID NO: 1759462 - RNA, 19 nt, Artificial Sequence
  Description of Artificial Sequence: Synthetic oligonucleotide
  Antisense strand to SEQ ID NO: 1759461
uacuagcacauaaucuaau

SEQ ID NO: 1759463 - RNA, 19 nt, Artificial Sequence
  Description of Artificial Sequence: Synthetic oligonucleotide
  Sense strand starting at position 126 of SEQ ID NO: 1562606
uuacaagacugguuagaua

SEQ ID NO: 1759464 - RNA, 19 nt, Artificial Sequence
  Description of Artificial Sequence: Synthetic oligonucleotide
  Antisense strand to SEQ ID NO: 1759463
uaucuaaccagucuuguaa

SEQ ID NO: 1759465 - RNA, 19 nt, Artificial Sequence
  Description of Artificial Sequence: Synthetic oligonucleotide
  Sense strand starting at position 179 of SEQ ID NO: 1562606
ugguccuugcuguaggaga

SEQ ID NO: 1759466 - RNA, 19 nt, Artificial Sequence
  Description of Artificial Sequence: Synthetic oligonucleotide
  Antisense strand to SEQ ID NO: 1759465
ucuccuacagcaaggacca

SEQ ID NO: 1759467 - RNA, 19 nt, Artificial Sequence
  Description of Artificial Sequence: Synthetic oligonucleotide
  Sense strand starting at position 976 of SEQ ID NO: 1562606
guggcuaagagcuaaccaa

SEQ ID NO: 1759468 - RNA, 19 nt, Artificial Sequence
  Description of Artificial Sequence: Synthetic oligonucleotide
  Antisense strand to SEQ ID NO: 1759467
uugguuagcucuuagccac

SEQ ID NO: 1759469 - RNA, 19 nt, Artificial Sequence
  Description of Artificial Sequence: Synthetic oligonucleotide
  Sense strand starting at position 1066 of SEQ ID NO: 1562606
cucagaaagucgguuauga

SEQ ID NO: 1759470 - RNA, 19 nt, Artificial Sequence
  Description of Artificial Sequence: Synthetic oligonucleotide
  Antisense strand to SEQ ID NO: 1759469
ucauaaccgacuuucugag

SEQ ID NO: 1759471 - RNA, 19 nt, Artificial Sequence
  Description of Artificial Sequence: Synthetic oligonucleotide
  Sense strand starting at position 1068 of SEQ ID NO: 1562606
cagaaagucgguuaugaag

SEQ ID NO: 1759472 - RNA, 19 nt, Artificial Sequence
  Description of Artificial Sequence: Synthetic oligonucleotide
  Antisense strand to SEQ ID NO: 1759471
cuucauaaccgacuuucug

SEQ ID NO: 1759473 - RNA, 19 nt, Artificial Sequence
  Description of Artificial Sequence: Synthetic oligonucleotide
  Sense strand starting at position 1074 of SEQ ID NO: 1562606
gucgguuaugaaggcaaga

SEQ ID NO: 1759474 - RNA, 19 nt, Artificial Sequence
  Description of Artificial Sequence: Synthetic oligonucleotide
  Antisense strand to SEQ ID NO: 1759473
ucuugccuucauaaccgac

SEQ ID NO: 1759475 - RNA, 19 nt, Artificial Sequence
  Description of Artificial Sequence: Synthetic oligonucleotide
  Sense strand starting at position 1205 of SEQ ID NO: 1562606
ucagaacagcagugaauua

SEQ ID NO: 1759476 - RNA, 19 nt, Artificial Sequence
  Description of Artificial Sequence: Synthetic oligonucleotide
  Antisense strand to SEQ ID NO: 1759475
uaauucacugcuguucuga

SEQ ID NO: 1759477 - RNA, 19 nt, Artificial Sequence
  Description of Artificial Sequence: Synthetic oligonucleotide
  Sense strand starting at position 1210 of SEQ ID NO: 1562606
acagcagugaauuaagguu

SEQ ID NO: 1759478 - RNA, 19 nt, Artificial Sequence
  Description of Artificial Sequence: Synthetic oligonucleotide
  Antisense strand to SEQ ID NO: 1759477
aaccuuaauucacugcugu

SEQ ID NO: 1759479 - RNA, 19 nt, Artificial Sequence
  Description of Artificial Sequence: Synthetic oligonucleotide
  Sense strand starting at position 1243 of SEQ ID NO: 1562606
cuaacaaucucugagaaga

SEQ ID NO: 1759480 - RNA, 19 nt, Artificial Sequence
  Description of Artificial Sequence: Synthetic oligonucleotide
  Antisense strand to SEQ ID NO: 1759479
ucuucucagagauuguuag

SEQ ID NO: 1759481 - RNA, 19 nt, Artificial Sequence
  Description of Artificial Sequence: Synthetic oligonucleotide
  Sense strand starting at position 1282 of SEQ ID NO: 1562606
cuaaucuuccaguguucua

SEQ ID NO: 1759482 - RNA, 19 nt, Artificial Sequence
  Description of Artificial Sequence: Synthetic oligonucleotide
  Antisense strand to SEQ ID NO: 1759481
uagaacacuggaagauuag

SEQ ID NO: 1759483 - RNA, 19 nt, Artificial Sequence
  Description of Artificial Sequence: Synthetic oligonucleotide
  Sense strand starting at position 1632 of SEQ ID NO: 1562606
cuuuccuacccaggugaaa

SEQ ID NO: 1759484 - RNA, 19 nt, Artificial Sequence
  Description of Artificial Sequence: Synthetic oligonucleotide
  Antisense strand to SEQ ID NO: 1759483
uuucaccuggguaggaaag

SEQ ID NO: 1759485 - RNA, 19 nt, Artificial Sequence
  Description of Artificial Sequence: Synthetic oligonucleotide
  Sense strand starting at position 2089 of SEQ ID NO: 1562606
aggcgauuccagggaaaga

SEQ ID NO: 1759486 - RNA, 19 nt, Artificial Sequence
  Description of Artificial Sequence: Synthetic oligonucleotide
  Antisense strand to SEQ ID NO: 1759485
ucuuucccuggaaucgccu

SEQ ID NO: 1759487 - RNA, 19 nt, Artificial Sequence
  Description of Artificial Sequence: Synthetic oligonucleotide
  Sense strand starting at position 2155 of SEQ ID NO: 1562606
gcguuucaaguguuugcca

SEQ ID NO: 1759488 - RNA, 19 nt, Artificial Sequence
  Description of Artificial Sequence: Synthetic oligonucleotide
  Antisense strand to SEQ ID NO: 1759487
uggcaaacacuugaaacgc

SEQ ID NO: 1759489 - RNA, 19 nt, Artificial Sequence
  Description of Artificial Sequence: Synthetic oligonucleotide
  Sense strand starting at position 2237 of SEQ ID NO: 1562606
gcagaugguccuugaaggu

SEQ ID NO: 1759490 - RNA, 19 nt, Artificial Sequence
  Description of Artificial Sequence: Synthetic oligonucleotide
  Antisense strand to SEQ ID NO: 1759489
accuucaaggaccaucugc

SEQ ID NO: 1759491 - RNA, 19 nt, Artificial Sequence
  Description of Artificial Sequence: Synthetic oligonucleotide
  Sense strand starting at position 2422 of SEQ ID NO: 1562606
uguauuaauggauguuugu

SEQ ID NO: 1759492 - RNA, 19 nt, Artificial Sequence
  Description of Artificial Sequence: Synthetic oligonucleotide
  Antisense strand to SEQ ID NO: 1759491
acaaacauccauuaauaca

SEQ ID NO: 1759493 - RNA, 19 nt, Artificial Sequence
  Description of Artificial Sequence: Synthetic oligonucleotide
  Sense strand starting at position 2428 of SEQ ID NO: 1562606
aauggauguuuguuuacuu

SEQ ID NO: 1759494 - RNA, 19 nt, Artificial Sequence
  Description of Artificial Sequence: Synthetic oligonucleotide
  Antisense strand to SEQ ID NO: 1759493
aaguaaacaaacauccauu

SEQ ID NO: 1759495 - RNA, 19 nt, Artificial Sequence
  Description of Artificial Sequence: Synthetic oligonucleotide
  Sense strand starting at position 2432 of SEQ ID NO: 1562606
gauguuuguuuacuugaau

SEQ ID NO: 1759496 - RNA, 19 nt, Artificial Sequence
  Description of Artificial Sequence: Synthetic oligonucleotide
  Antisense strand to SEQ ID NO: 1759495
auucaaguaaacaaacauc

SEQ ID NO: 1759497 - RNA, 19 nt, Artificial Sequence
  Description of Artificial Sequence: Synthetic oligonucleotide
  Sense strand starting at position 2433 of SEQ ID NO: 1562606
auguuuguuuacuugaauc

SEQ ID NO: 1759498 - RNA, 19 nt, Artificial Sequence
  Description of Artificial Sequence: Synthetic oligonucleotide
  Antisense strand to SEQ ID NO: 1759497
gauucaaguaaacaaacau

SEQ ID NO: 1759499 - RNA, 19 nt, Artificial Sequence
  Description of Artificial Sequence: Synthetic oligonucleotide
  Sense strand starting at position 2440 of SEQ ID NO: 1562606
uuuacuugaauccgagagu

SEQ ID NO: 1759500 - RNA, 19 nt, Artificial Sequence
  Description of Artificial Sequence: Synthetic oligonucleotide
  Antisense strand to SEQ ID NO: 1759499
acucucggauucaaguaaa

SEQ ID NO: 1759501 - RNA, 19 nt, Artificial Sequence
  Description of Artificial Sequence: Synthetic oligonucleotide
  Sense strand starting at position 2443 of SEQ ID NO: 1562606
acuugaauccgagaguucu

SEQ ID NO: 1759502 - RNA, 19 nt, Artificial Sequence
  Description of Artificial Sequence: Synthetic oligonucleotide
  Antisense strand to SEQ ID NO: 1759501
agaacucucggauucaagu

SEQ ID NO: 1759503 - RNA, 19 nt, Artificial Sequence
  Description of Artificial Sequence: Synthetic oligonucleotide
  Sense strand starting at position 2449 of SEQ ID NO: 1562606
auccgagaguucuuuggag

SEQ ID NO: 1759504 - RNA, 19 nt, Artificial Sequence
  Description of Artificial Sequence: Synthetic oligonucleotide
  Antisense strand to SEQ ID NO: 1759503
cuccaaagaacucucggau

SEQ ID NO: 1759505 - RNA, 19 nt, Artificial Sequence
  Description of Artificial Sequence: Synthetic oligonucleotide
  Sense strand starting at position 2451 of SEQ ID NO: 1562606
ccgagaguucuuuggagga

SEQ ID NO: 1759506 - RNA, 19 nt, Artificial Sequence
  Description of Artificial Sequence: Synthetic oligonucleotide
  Antisense strand to SEQ ID NO: 1759505
uccuccaaagaacucucgg

SEQ ID NO: 1759507 - RNA, 19 nt, Artificial Sequence
  Description of Artificial Sequence: Synthetic oligonucleotide
  Sense strand starting at position 2455 of SEQ ID NO: 1562606
gaguucuuuggaggaguau

SEQ ID NO: 1759508 - RNA, 19 nt, Artificial Sequence
  Description of Artificial Sequence: Synthetic oligonucleotide
  Antisense strand to SEQ ID NO: 1759507
auacuccuccaaagaacuc

SEQ ID NO: 1759509 - RNA, 19 nt, Artificial Sequence
  Description of Artificial Sequence: Synthetic oligonucleotide
  Sense strand starting at position 2456 of SEQ ID NO: 1562606
aguucuuuggaggaguauc

SEQ ID NO: 1759510 - RNA, 19 nt, Artificial Sequence
  Description of Artificial Sequence: Synthetic oligonucleotide
  Antisense strand to SEQ ID NO: 1759509
gauacuccuccaaagaacu

SEQ ID NO: 1759511 - RNA, 19 nt, Artificial Sequence
  Description of Artificial Sequence: Synthetic oligonucleotide
  Sense strand starting at position 2467 of SEQ ID NO: 1562606
ggaguaucggaagguaucu

SEQ ID NO: 1759512 - RNA, 19 nt, Artificial Sequence
  Description of Artificial Sequence: Synthetic oligonucleotide
  Antisense strand to SEQ ID NO: 1759511
agauaccuuccgauacucc

SEQ ID NO: 1759513 - RNA, 19 nt, Artificial Sequence
  Description of Artificial Sequence: Synthetic oligonucleotide
  Sense strand starting at position 2476 of SEQ ID NO: 1562606
gaagguaucuaggagagag

SEQ ID NO: 1759514 - RNA, 19 nt, Artificial Sequence
  Description of Artificial Sequence: Synthetic oligonucleotide
  Antisense strand to SEQ ID NO: 1759513
cucucuccuagauaccuuc

SEQ ID NO: 1759515 - RNA, 19 nt, Artificial Sequence
  Description of Artificial Sequence: Synthetic oligonucleotide
  Sense strand starting at position 2534 of SEQ ID NO: 1562606
uguguacugaauuggaaca

SEQ ID NO: 1759516 - RNA, 19 nt, Artificial Sequence
  Description of Artificial Sequence: Synthetic oligonucleotide
  Antisense strand to SEQ ID NO: 1759515
uguuccaauucaguacaca

SEQ ID NO: 1759517 - RNA, 19 nt, Artificial Sequence
  Description of Artificial Sequence: Synthetic oligonucleotide
  Sense strand starting at position 2535 of SEQ ID NO: 1562606
guguacugaauuggaacaa

SEQ ID NO: 1759518 - RNA, 19 nt, Artificial Sequence
  Description of Artificial Sequence: Synthetic oligonucleotide
  Antisense strand to SEQ ID NO: 1759517
uuguuccaauucaguacac

SEQ ID NO: 1759519 - RNA, 19 nt, Artificial Sequence
  Description of Artificial Sequence: Synthetic oligonucleotide
  Sense strand starting at position 2662 of SEQ ID NO: 1562606
uggcacgacucuuugaaau

SEQ ID NO: 1759520 - RNA, 19 nt, Artificial Sequence
  Description of Artificial Sequence: Synthetic oligonucleotide
  Antisense strand to SEQ ID NO: 1759519
auuucaaagagucgugcca

SEQ ID NO: 1759521 - RNA, 19 nt, Artificial Sequence
  Description of Artificial Sequence: Synthetic oligonucleotide
  Sense strand starting at position 2693 of SEQ ID NO: 1562606
ugaauuguacacuauaggu

SEQ ID NO: 1759522 - RNA, 19 nt, Artificial Sequence
  Description of Artificial Sequence: Synthetic oligonucleotide
  Antisense strand to SEQ ID NO: 1759521
accuauaguguacaauuca

SEQ ID NO: 1759523 - RNA, 19 nt, Artificial Sequence
  Description of Artificial Sequence: Synthetic oligonucleotide
  Sense strand starting at position 2698 of SEQ ID NO: 1562606
uguacacuauaggugaauu

SEQ ID NO: 1759524 - RNA, 19 nt, Artificial Sequence
  Description of Artificial Sequence: Synthetic oligonucleotide
  Antisense strand to SEQ ID NO: 1759523
aauucaccuauaguguaca

SEQ ID NO: 1759525 - RNA, 19 nt, Artificial Sequence
  Description of Artificial Sequence: Synthetic oligonucleotide
  Sense strand starting at position 2708 of SEQ ID NO: 1562606
aggugaauucuauguuaug

SEQ ID NO: 1759526 - RNA, 19 nt, Artificial Sequence
  Description of Artificial Sequence: Synthetic oligonucleotide
  Antisense strand to SEQ ID NO: 1759525
cauaacauagaauucaccu

SEQ ID NO: 1759527 - RNA, 19 nt, Artificial Sequence
  Description of Artificial Sequence: Synthetic oligonucleotide
  Sense strand starting at position 2709 of SEQ ID NO: 1562606
ggugaauucuauguuauga

SEQ ID NO: 1759528 - RNA, 19 nt, Artificial Sequence
  Description of Artificial Sequence: Synthetic oligonucleotide
  Antisense strand to SEQ ID NO: 1759527
ucauaacauagaauucacc

SEQ ID NO: 1759529 - RNA, 19 nt, Artificial Sequence
  Description of Artificial Sequence: Synthetic oligonucleotide
  Sense strand starting at position 2816 of SEQ ID NO: 1562606
gcccgagugacugaggaaa

SEQ ID NO: 1759530 - RNA, 19 nt, Artificial Sequence
  Description of Artificial Sequence: Synthetic oligonucleotide
  Antisense strand to SEQ ID NO: 1759529
uuuccucagucacucgggc

SEQ ID NO: 1759531 - RNA, 19 nt, Artificial Sequence
  Description of Artificial Sequence: Synthetic oligonucleotide
  Sense strand starting at position 2840 of SEQ ID NO: 1562606
gugccauuaauagggacau

SEQ ID NO: 1759532 - RNA, 19 nt, Artificial Sequence
  Description of Artificial Sequence: Synthetic oligonucleotide
  Antisense strand to SEQ ID NO: 1759531
augucccuauuaauggcac

SEQ ID NO: 1759533 - RNA, 19 nt, Artificial Sequence
  Description of Artificial Sequence: Synthetic oligonucleotide
  Sense strand starting at position 3129 of SEQ ID NO: 1562606
guugcagugaaauggguaa

SEQ ID NO: 1759534 - RNA, 19 nt, Artificial Sequence
  Description of Artificial Sequence: Synthetic oligonucleotide
  Antisense strand to SEQ ID NO: 1759533
uuacccauuucacugcaac

SEQ ID NO: 1759535 - RNA, 19 nt, Artificial Sequence
  Description of Artificial Sequence: Synthetic oligonucleotide
  Sense strand starting at position 3628 of SEQ ID NO: 1562606
guauguacacuuuaccuaa

SEQ ID NO: 1759536 - RNA, 19 nt, Artificial Sequence
  Description of Artificial Sequence: Synthetic oligonucleotide
  Antisense strand to SEQ ID NO: 1759535
uuagguaaaguguacauac

SEQ ID NO: 1759537 - RNA, 19 nt, Artificial Sequence
  Description of Artificial Sequence: Synthetic oligonucleotide
  Sense strand starting at position 3683 of SEQ ID NO: 1562606
uugggagguacuuauguua

SEQ ID NO: 1759538 - RNA, 19 nt, Artificial Sequence
  Description of Artificial Sequence: Synthetic oligonucleotide
  Antisense strand to SEQ ID NO: 1759537
uaacauaaguaccucccaa

SEQ ID NO: 1759539 - RNA, 19 nt, Artificial Sequence
  Description of Artificial Sequence: Synthetic oligonucleotide
  Sense strand starting at position 3686 of SEQ ID NO: 1562606
ggagguacuuauguuacca

SEQ ID NO: 1759540 - RNA, 19 nt, Artificial Sequence
  Description of Artificial Sequence: Synthetic oligonucleotide
  Antisense strand to SEQ ID NO: 1759539
ugguaacauaaguaccucc

SEQ ID NO: 1759541 - RNA, 19 nt, Artificial Sequence
  Description of Artificial Sequence: Synthetic oligonucleotide
  Sense strand starting at position 38 of SEQ ID NO: 1562607
agccaaaggguuugaguaa

SEQ ID NO: 1759542 - RNA, 19 nt, Artificial Sequence
  Description of Artificial Sequence: Synthetic oligonucleotide
  Antisense strand to SEQ ID NO: 1759541
uuacucaaacccuuuggcu

SEQ ID NO: 1759543 - RNA, 19 nt, Artificial Sequence
  Description of Artificial Sequence: Synthetic oligonucleotide
  Sense strand starting at position 71 of SEQ ID NO: 1562607
cuuagcuugcuaugacaaa

SEQ ID NO: 1759544 - RNA, 19 nt, Artificial Sequence
  Description of Artificial Sequence: Synthetic oligonucleotide
  Antisense strand to SEQ ID NO: 1759543
uuugucauagcaagcuaag

SEQ ID NO: 1759545 - RNA, 19 nt, Artificial Sequence
  Description of Artificial Sequence: Synthetic oligonucleotide
  Sense strand starting at position 338 of SEQ ID NO: 1562607
gaugaagucccugauugcu

SEQ ID NO: 1759546 - RNA, 19 nt, Artificial Sequence
  Description of Artificial Sequence: Synthetic oligonucleotide
  Antisense strand to SEQ ID NO: 1759545
agcaaucagggacuucauc

SEQ ID NO: 1759547 - RNA, 19 nt, Artificial Sequence
  Description of Artificial Sequence: Synthetic oligonucleotide
  Sense strand starting at position 340 of SEQ ID NO: 1562607
ugaagucccugauugcuuu

SEQ ID NO: 1759548 - RNA, 19 nt, Artificial Sequence
  Description of Artificial Sequence: Synthetic oligonucleotide
  Antisense strand to SEQ ID NO: 1759547
aaagcaaucagggacuuca

SEQ ID NO: 1759549 - RNA, 19 nt, Artificial Sequence
  Description of Artificial Sequence: Synthetic oligonucleotide
  Sense strand starting at position 391 of SEQ ID NO: 1562607
uugaguuaauggccagaag

SEQ ID NO: 1759550 - RNA, 19 nt, Artificial Sequence
  Description of Artificial Sequence: Synthetic oligonucleotide
  Antisense strand to SEQ ID NO: 1759549
cuucuggccauuaacucaa

SEQ ID NO: 1759551 - RNA, 19 nt, Artificial Sequence
  Description of Artificial Sequence: Synthetic oligonucleotide
  Sense strand starting at position 392 of SEQ ID NO: 1562607
ugaguuaauggccagaagu

SEQ ID NO: 1759552 - RNA, 19 nt, Artificial Sequence
  Description of Artificial Sequence: Synthetic oligonucleotide
  Antisense strand to SEQ ID NO: 1759551
acuucuggccauuaacuca

SEQ ID NO: 1759553 - RNA, 19 nt, Artificial Sequence
  Description of Artificial Sequence: Synthetic oligonucleotide
  Sense strand starting at position 394 of SEQ ID NO: 1562607
aguuaauggccagaaguau

SEQ ID NO: 1759554 - RNA, 19 nt, Artificial Sequence
  Description of Artificial Sequence: Synthetic oligonucleotide
  Antisense strand to SEQ ID NO: 1759553
auacuucuggccauuaacu

SEQ ID NO: 1759555 - RNA, 19 nt, Artificial Sequence
  Description of Artificial Sequence: Synthetic oligonucleotide
  Sense strand starting at position 424 of SEQ ID NO: 1562607
acauguuauacuugguguu

SEQ ID NO: 1759556 - RNA, 19 nt, Artificial Sequence
  Description of Artificial Sequence: Synthetic oligonucleotide
  Antisense strand to SEQ ID NO: 1759555
aacaccaaguauaacaugu

SEQ ID NO: 1759557 - RNA, 19 nt, Artificial Sequence
  Description of Artificial Sequence: Synthetic oligonucleotide
  Sense strand starting at position 682 of SEQ ID NO: 1562607
guugacaauugcucagaga

SEQ ID NO: 1759558 - RNA, 19 nt, Artificial Sequence
  Description of Artificial Sequence: Synthetic oligonucleotide
  Antisense strand to SEQ ID NO: 1759557
ucucugagcaauugucaac

SEQ ID NO: 1759559 - RNA, 19 nt, Artificial Sequence
  Description of Artificial Sequence: Synthetic oligonucleotide
  Sense strand starting at position 720 of SEQ ID NO: 1562607
gcaucaugaugucuauauu

SEQ ID NO: 1759560 - RNA, 19 nt, Artificial Sequence
  Description of Artificial Sequence: Synthetic oligonucleotide
  Antisense strand to SEQ ID NO: 1759559
aauauagacaucaugaugc

SEQ ID NO: 1759561 - RNA, 19 nt, Artificial Sequence
  Description of Artificial Sequence: Synthetic oligonucleotide
  Sense strand starting at position 723 of SEQ ID NO: 1562607
ucaugaugucuauauugau

SEQ ID NO: 1759562 - RNA, 19 nt, Artificial Sequence
  Description of Artificial Sequence: Synthetic oligonucleotide
  Antisense strand to SEQ ID NO: 1759561
aucaauauagacaucauga

SEQ ID NO: 1759563 - RNA, 19 nt, Artificial Sequence
  Description of Artificial Sequence: Synthetic oligonucleotide
  Sense strand starting at position 910 of SEQ ID NO: 1562607
gcccaucuacguugguaaa

SEQ ID NO: 1759564 - RNA, 19 nt, Artificial Sequence
  Description of Artificial Sequence: Synthetic oligonucleotide
  Antisense strand to SEQ ID NO: 1759563
uuuaccaacguagaugggc

SEQ ID NO: 1759565 - RNA, 19 nt, Artificial Sequence
  Description of Artificial Sequence: Synthetic oligonucleotide
  Sense strand starting at position 911 of SEQ ID NO: 1562607
cccaucuacguugguaaau

SEQ ID NO: 1759566 - RNA, 19 nt, Artificial Sequence
  Description of Artificial Sequence: Synthetic oligonucleotide
  Antisense strand to SEQ ID NO: 1759565
auuuaccaacguagauggg

SEQ ID NO: 1759567 - RNA, 19 nt, Artificial Sequence
  Description of Artificial Sequence: Synthetic oligonucleotide
  Sense strand starting at position 912 of SEQ ID NO: 1562607
ccaucuacguugguaaauu

SEQ ID NO: 1759568 - RNA, 19 nt, Artificial Sequence
  Description of Artificial Sequence: Synthetic oligonucleotide
  Antisense strand to SEQ ID NO: 1759567
aauuuaccaacguagaugg

SEQ ID NO: 1759569 - RNA, 19 nt, Artificial Sequence
  Description of Artificial Sequence: Synthetic oligonucleotide
  Sense strand starting at position 1025 of SEQ ID NO: 1562607
uuuggauaauacguuaguu

SEQ ID NO: 1759570 - RNA, 19 nt, Artificial Sequence
  Description of Artificial Sequence: Synthetic oligonucleotide
  Antisense strand to SEQ ID NO: 1759569
aacuaacguauuauccaaa

SEQ ID NO: 1759571 - RNA, 19 nt, Artificial Sequence
  Description of Artificial Sequence: Synthetic oligonucleotide
  Sense strand starting at position 1027 of SEQ ID NO: 1562607
uggauaauacguuaguuac

SEQ ID NO: 1759572 - RNA, 19 nt, Artificial Sequence
  Description of Artificial Sequence: Synthetic oligonucleotide
  Antisense strand to SEQ ID NO: 1759571
guaacuaacguauuaucca

SEQ ID NO: 1759573 - RNA, 19 nt, Artificial Sequence
  Description of Artificial Sequence: Synthetic oligonucleotide
  Sense strand starting at position 1029 of SEQ ID NO: 1562607
gauaauacguuaguuacaa

SEQ ID NO: 1759574 - RNA, 19 nt, Artificial Sequence
  Description of Artificial Sequence: Synthetic oligonucleotide
  Antisense strand to SEQ ID NO: 1759573
uuguaacuaacguauuauc

SEQ ID NO: 1759575 - RNA, 19 nt, Artificial Sequence
  Description of Artificial Sequence: Synthetic oligonucleotide
  Sense strand starting at position 1030 of SEQ ID NO: 1562607
auaauacguuaguuacaac

SEQ ID NO: 1759576 - RNA, 19 nt, Artificial Sequence
  Description of Artificial Sequence: Synthetic oligonucleotide
  Antisense strand to SEQ ID NO: 1759575
guuguaacuaacguauuau

SEQ ID NO: 1759577 - RNA, 19 nt, Artificial Sequence
  Description of Artificial Sequence: Synthetic oligonucleotide
  Sense strand starting at position 1072 of SEQ ID NO: 1562607
guagucuuagaacgauucu

SEQ ID NO: 1759578 - RNA, 19 nt, Artificial Sequence
  Description of Artificial Sequence: Synthetic oligonucleotide
  Antisense strand to SEQ ID NO: 1759577
agaaucguucuaagacuac

SEQ ID NO: 1759579 - RNA, 19 nt, Artificial Sequence
  Description of Artificial Sequence: Synthetic oligonucleotide
  Sense strand starting at position 1125 of SEQ ID NO: 1562607
uauuguugggaguauccau

SEQ ID NO: 1759580 - RNA, 19 nt, Artificial Sequence
  Description of Artificial Sequence: Synthetic oligonucleotide
  Antisense strand to SEQ ID NO: 1759579
auggauacucccaacaaua

SEQ ID NO: 1759581 - RNA, 19 nt, Artificial Sequence
  Description of Artificial Sequence: Synthetic oligonucleotide
  Sense strand starting at position 1276 of SEQ ID NO: 1562607
ggaaacagaucacugcuuu

SEQ ID NO: 1759582 - RNA, 19 nt, Artificial Sequence
  Description of Artificial Sequence: Synthetic oligonucleotide
  Antisense strand to SEQ ID NO: 1759581
aaagcagugaucuguuucc

SEQ ID NO: 1759583 - RNA, 19 nt, Artificial Sequence
  Description of Artificial Sequence: Synthetic oligonucleotide
  Sense strand starting at position 1314 of SEQ ID NO: 1562607
cgccucucagaucauuauu

SEQ ID NO: 1759584 - RNA, 19 nt, Artificial Sequence
  Description of Artificial Sequence: Synthetic oligonucleotide
  Antisense strand to SEQ ID NO: 1759583
aauaaugaucugagaggcg

SEQ ID NO: 1759585 - RNA, 19 nt, Artificial Sequence
  Description of Artificial Sequence: Synthetic oligonucleotide
  Sense strand starting at position 1390 of SEQ ID NO: 1562607
ccaacuugaugaggaagau

SEQ ID NO: 1759586 - RNA, 19 nt, Artificial Sequence
  Description of Artificial Sequence: Synthetic oligonucleotide
  Antisense strand to SEQ ID NO: 1759585
aucuuccucaucaaguugg

SEQ ID NO: 1759587 - RNA, 19 nt, Artificial Sequence
  Description of Artificial Sequence: Synthetic oligonucleotide
  Sense strand starting at position 1536 of SEQ ID NO: 1562607
ucagaucaucccugugugu

SEQ ID NO: 1759588 - RNA, 19 nt, Artificial Sequence
  Description of Artificial Sequence: Synthetic oligonucleotide
  Antisense strand to SEQ ID NO: 1759587
acacacagggaugaucuga

SEQ ID NO: 1759589 - RNA, 19 nt, Artificial Sequence
  Description of Artificial Sequence: Synthetic oligonucleotide
  Sense strand starting at position 1538 of SEQ ID NO: 1562607
agaucaucccuguguguca

SEQ ID NO: 1759590 - RNA, 19 nt, Artificial Sequence
  Description of Artificial Sequence: Synthetic oligonucleotide
  Antisense strand to SEQ ID NO: 1759589
ugacacacagggaugaucu

SEQ ID NO: 1759591 - RNA, 19 nt, Artificial Sequence
  Description of Artificial Sequence: Synthetic oligonucleotide
  Sense strand starting at position 1732 of SEQ ID NO: 1562607
agaugacauucccuccagu

SEQ ID NO: 1759592 - RNA, 19 nt, Artificial Sequence
  Description of Artificial Sequence: Synthetic oligonucleotide
  Antisense strand to SEQ ID NO: 1759591
acuggagggaaugucaucu

SEQ ID NO: 1759593 - RNA, 19 nt, Artificial Sequence
  Description of Artificial Sequence: Synthetic oligonucleotide
  Sense strand starting at position 1786 of SEQ ID NO: 1562607
agaaguauuuaucauguga

SEQ ID NO: 1759594 - RNA, 19 nt, Artificial Sequence
  Description of Artificial Sequence: Synthetic oligonucleotide
  Antisense strand to SEQ ID NO: 1759593
ucacaugauaaauacuucu

SEQ ID NO: 1759595 - RNA, 19 nt, Artificial Sequence
  Description of Artificial Sequence: Synthetic oligonucleotide
  Sense strand starting at position 1797 of SEQ ID NO: 1562607
ucaugugacgacggagaaa

SEQ ID NO: 1759596 - RNA, 19 nt, Artificial Sequence
  Description of Artificial Sequence: Synthetic oligonucleotide
  Antisense strand to SEQ ID NO: 1759595
uuucuccgucgucacauga

SEQ ID NO: 1759597 - RNA, 19 nt, Artificial Sequence
  Description of Artificial Sequence: Synthetic oligonucleotide
  Sense strand starting at position 2065 of SEQ ID NO: 1562607
uucagagacgcaugugaaa

SEQ ID NO: 1759598 - RNA, 19 nt, Artificial Sequence
  Description of Artificial Sequence: Synthetic oligonucleotide
  Antisense strand to SEQ ID NO: 1759597
uuucacaugcgucucugaa

SEQ ID NO: 1759599 - RNA, 19 nt, Artificial Sequence
  Description of Artificial Sequence: Synthetic oligonucleotide
  Sense strand starting at position 2170 of SEQ ID NO: 1562607
uguaguugaaacugagguu

SEQ ID NO: 1759600 - RNA, 19 nt, Artificial Sequence
  Description of Artificial Sequence: Synthetic oligonucleotide
  Antisense strand to SEQ ID NO: 1759599
aaccucaguuucaacuaca

SEQ ID NO: 1759601 - RNA, 19 nt, Artificial Sequence
  Description of Artificial Sequence: Synthetic oligonucleotide
  Sense strand starting at position 2285 of SEQ ID NO: 1562607
ucaucauucgccggguaaa

SEQ ID NO: 1759602 - RNA, 19 nt, Artificial Sequence
  Description of Artificial Sequence: Synthetic oligonucleotide
  Antisense strand to SEQ ID NO: 1759601
uuuacccggcgaaugauga

SEQ ID NO: 1759603 - RNA, 19 nt, Artificial Sequence
  Description of Artificial Sequence: Synthetic oligonucleotide
  Sense strand starting at position 2553 of SEQ ID NO: 1562607
ggaaguugaggcugcaaau

SEQ ID NO: 1759604 - RNA, 19 nt, Artificial Sequence
  Description of Artificial Sequence: Synthetic oligonucleotide
  Antisense strand to SEQ ID NO: 1759603
auuugcagccucaacuucc

SEQ ID NO: 1759605 - RNA, 19 nt, Artificial Sequence
  Description of Artificial Sequence: Synthetic oligonucleotide
  Sense strand starting at position 2566 of SEQ ID NO: 1562607
gcaaaugagccaugaucau

SEQ ID NO: 1759606 - RNA, 19 nt, Artificial Sequence
  Description of Artificial Sequence: Synthetic oligonucleotide
  Antisense strand to SEQ ID NO: 1759605
augaucauggcucauuugc

SEQ ID NO: 1759607 - RNA, 19 nt, Artificial Sequence
  Description of Artificial Sequence: Synthetic oligonucleotide
  Sense strand starting at position 2706 of SEQ ID NO: 1562607
gccuguuccuaacugacua

SEQ ID NO: 1759608 - RNA, 19 nt, Artificial Sequence
  Description of Artificial Sequence: Synthetic oligonucleotide
  Antisense strand to SEQ ID NO: 1759607
uagucaguuaggaacaggc

SEQ ID NO: 1759609 - RNA, 19 nt, Artificial Sequence
  Description of Artificial Sequence: Synthetic oligonucleotide
  Sense strand starting at position 2835 of SEQ ID NO: 1562607
ugauguuguguucaaguga

SEQ ID NO: 1759610 - RNA, 19 nt, Artificial Sequence
  Description of Artificial Sequence: Synthetic oligonucleotide
  Antisense strand to SEQ ID NO: 1759609
ucacuugaacacaacauca

SEQ ID NO: 1759611 - RNA, 19 nt, Artificial Sequence
  Description of Artificial Sequence: Synthetic oligonucleotide
  Sense strand starting at position 2910 of SEQ ID NO: 1562607
ugcgauaucauguggucaa

SEQ ID NO: 1759612 - RNA, 19 nt, Artificial Sequence
  Description of Artificial Sequence: Synthetic oligonucleotide
  Antisense strand to SEQ ID NO: 1759611
uugaccacaugauaucgca

SEQ ID NO: 1759613 - RNA, 19 nt, Artificial Sequence
  Description of Artificial Sequence: Synthetic oligonucleotide
  Sense strand starting at position 2924 of SEQ ID NO: 1562607
gucaaaugauucucuucug

SEQ ID NO: 1759614 - RNA, 19 nt, Artificial Sequence
  Description of Artificial Sequence: Synthetic oligonucleotide
  Antisense strand to SEQ ID NO: 1759613
cagaagagaaucauuugac

SEQ ID NO: 1759615 - RNA, 19 nt, Artificial Sequence
  Description of Artificial Sequence: Synthetic oligonucleotide
  Sense strand starting at position 2931 of SEQ ID NO: 1562607
gauucucuucuggaagggu

SEQ ID NO: 1759616 - RNA, 19 nt, Artificial Sequence
  Description of Artificial Sequence: Synthetic oligonucleotide
  Antisense strand to SEQ ID NO: 1759615
acccuuccagaagagaauc

SEQ ID NO: 1759617 - RNA, 19 nt, Artificial Sequence
  Description of Artificial Sequence: Synthetic oligonucleotide
  Sense strand starting at position 2953 of SEQ ID NO: 1562607
aagagcugucaauguaaug

SEQ ID NO: 1759618 - RNA, 19 nt, Artificial Sequence
  Description of Artificial Sequence: Synthetic oligonucleotide
  Antisense strand to SEQ ID NO: 1759617
cauuacauugacagcucuu

SEQ ID NO: 1759619 - RNA, 19 nt, Artificial Sequence
  Description of Artificial Sequence: Synthetic oligonucleotide
  Sense strand starting at position 3378 of SEQ ID NO: 1562607
guuuguuugauacagaguu

SEQ ID NO: 1759620 - RNA, 19 nt, Artificial Sequence
  Description of Artificial Sequence: Synthetic oligonucleotide
  Antisense strand to SEQ ID NO: 1759619
aacucuguaucaaacaaac

SEQ ID NO: 1759621 - RNA, 19 nt, Artificial Sequence
  Description of Artificial Sequence: Synthetic oligonucleotide
  Sense strand starting at position 2039 of SEQ ID NO: 1562608
agcgaauuggacugugcaa

SEQ ID NO: 1759622 - RNA, 19 nt, Artificial Sequence
  Description of Artificial Sequence: Synthetic oligonucleotide
  Antisense strand to SEQ ID NO: 1759621
uugcacaguccaauucgcu

SEQ ID NO: 1759623 - RNA, 19 nt, Artificial Sequence
  Description of Artificial Sequence: Synthetic oligonucleotide
  Sense strand starting at position 2041 of SEQ ID NO: 1562608
cgaauuggacugugcaacu

SEQ ID NO: 1759624 - RNA, 19 nt, Artificial Sequence
  Description of Artificial Sequence: Synthetic oligonucleotide
  Antisense strand to SEQ ID NO: 1759623
aguugcacaguccaauucg

SEQ ID NO: 1759625 - RNA, 19 nt, Artificial Sequence
  Description of Artificial Sequence: Synthetic oligonucleotide
  Sense strand starting at position 2092 of SEQ ID NO: 1562608
cggacucccugguccauaa

SEQ ID NO: 1759626 - RNA, 19 nt, Artificial Sequence
  Description of Artificial Sequence: Synthetic oligonucleotide
  Antisense strand to SEQ ID NO: 1759625
uuauggaccagggaguccg

SEQ ID NO: 1759627 - RNA, 19 nt, Artificial Sequence
  Description of Artificial Sequence: Synthetic oligonucleotide
  Sense strand starting at position 2185 of SEQ ID NO: 1562608
gaggacuucuccggccagu

SEQ ID NO: 1759628 - RNA, 19 nt, Artificial Sequence
  Description of Artificial Sequence: Synthetic oligonucleotide
  Antisense strand to SEQ ID NO: 1759627
acuggccggagaaguccuc

SEQ ID NO: 1759629 - RNA, 19 nt, Artificial Sequence
  Description of Artificial Sequence: Synthetic oligonucleotide
  Sense strand starting at position 2234 of SEQ ID NO: 1562608
accucauguuccgggacaa

SEQ ID NO: 1759630 - RNA, 19 nt, Artificial Sequence
  Description of Artificial Sequence: Synthetic oligonucleotide
  Antisense strand to SEQ ID NO: 1759629
uugucccggaacaugaggu

SEQ ID NO: 1759631 - RNA, 19 nt, Artificial Sequence
  Description of Artificial Sequence: Synthetic oligonucleotide
  Sense strand starting at position 2235 of SEQ ID NO: 1562608
ccucauguuccgggacaag

SEQ ID NO: 1759632 - RNA, 19 nt, Artificial Sequence
  Description of Artificial Sequence: Synthetic oligonucleotide
  Antisense strand to SEQ ID NO: 1759631
cuugucccggaacaugagg

SEQ ID NO: 1759633 - RNA, 19 nt, Artificial Sequence
  Description of Artificial Sequence: Synthetic oligonucleotide
  Sense strand starting at position 2353 of SEQ ID NO: 1562608
gcccagucgucgugucaga

SEQ ID NO: 1759634 - RNA, 19 nt, Artificial Sequence
  Description of Artificial Sequence: Synthetic oligonucleotide
  Antisense strand to SEQ ID NO: 1759633
ucugacacgacgacugggc

SEQ ID NO: 1759635 - RNA, 19 nt, Artificial Sequence
  Description of Artificial Sequence: Synthetic oligonucleotide
  Sense strand starting at position 2402 of SEQ ID NO: 1562608
gcagaucuggcccaacgau

SEQ ID NO: 1759636 - RNA, 19 nt, Artificial Sequence
  Description of Artificial Sequence: Synthetic oligonucleotide
  Antisense strand to SEQ ID NO: 1759635
aucguugggccagaucugc

SEQ ID NO: 1759637 - RNA, 19 nt, Artificial Sequence
  Description of Artificial Sequence: Synthetic oligonucleotide
  Sense strand starting at position 2449 of SEQ ID NO: 1562608
guaaguuccucacaccuca

SEQ ID NO: 1759638 - RNA, 19 nt, Artificial Sequence
  Description of Artificial Sequence: Synthetic oligonucleotide
  Antisense strand to SEQ ID NO: 1759637
ugaggugugaggaacuuac

SEQ ID NO: 1759639 - RNA, 19 nt, Artificial Sequence
  Description of Artificial Sequence: Synthetic oligonucleotide
  Sense strand starting at position 2742 of SEQ ID NO: 1562608
ugugcugagccauguguuu

SEQ ID NO: 1759640 - RNA, 19 nt, Artificial Sequence
  Description of Artificial Sequence: Synthetic oligonucleotide
  Antisense strand to SEQ ID NO: 1759639
aaacacauggcucagcaca

SEQ ID NO: 1759641 - RNA, 19 nt, Artificial Sequence
  Description of Artificial Sequence: Synthetic oligonucleotide
  Sense strand starting at position 2744 of SEQ ID NO: 1562608
ugcugagccauguguuugu

SEQ ID NO: 1759642 - RNA, 19 nt, Artificial Sequence
  Description of Artificial Sequence: Synthetic oligonucleotide
  Antisense strand to SEQ ID NO: 1759641
acaaacacauggcucagca

SEQ ID NO: 1759643 - RNA, 19 nt, Artificial Sequence
  Description of Artificial Sequence: Synthetic oligonucleotide
  Sense strand starting at position 2782 of SEQ ID NO: 1562608
uccagaggucaauguaguu

SEQ ID NO: 1759644 - RNA, 19 nt, Artificial Sequence
  Description of Artificial Sequence: Synthetic oligonucleotide
  Antisense strand to SEQ ID NO: 1759643
aacuacauugaccucugga

SEQ ID NO: 1759645 - RNA, 19 nt, Artificial Sequence
  Description of Artificial Sequence: Synthetic oligonucleotide
  Sense strand starting at position 2819 of SEQ ID NO: 1562608
ucagaacuucccugauuag

SEQ ID NO: 1759646 - RNA, 19 nt, Artificial Sequence
  Description of Artificial Sequence: Synthetic oligonucleotide
  Antisense strand to SEQ ID NO: 1759645
cuaaucagggaaguucuga

SEQ ID NO: 1759647 - RNA, 19 nt, Artificial Sequence
  Description of Artificial Sequence: Synthetic oligonucleotide
  Sense strand starting at position 3038 of SEQ ID NO: 1562608
gaaacaggauuuggcaaau

SEQ ID NO: 1759648 - RNA, 19 nt, Artificial Sequence
  Description of Artificial Sequence: Synthetic oligonucleotide
  Antisense strand to SEQ ID NO: 1759647
auuugccaaauccuguuuc

SEQ ID NO: 1759649 - RNA, 19 nt, Artificial Sequence
  Description of Artificial Sequence: Synthetic oligonucleotide
  Sense strand starting at position 3054 of SEQ ID NO: 1562608
aaugaauuacugggcuuga

SEQ ID NO: 1759650 - RNA, 19 nt, Artificial Sequence
  Description of Artificial Sequence: Synthetic oligonucleotide
  Antisense strand to SEQ ID NO: 1759649
ucaagcccaguaauucauu

SEQ ID NO: 1759651 - RNA, 19 nt, Artificial Sequence
  Description of Artificial Sequence: Synthetic oligonucleotide
  Sense strand starting at position 3065 of SEQ ID NO: 1562608
gggcuugaguccugaccac

SEQ ID NO: 1759652 - RNA, 19 nt, Artificial Sequence
  Description of Artificial Sequence: Synthetic oligonucleotide
  Antisense strand to SEQ ID NO: 1759651
guggucaggacucaagccc

SEQ ID NO: 1759653 - RNA, 19 nt, Artificial Sequence
  Description of Artificial Sequence: Synthetic oligonucleotide
  Sense strand starting at position 3096 of SEQ ID NO: 1562608
gccucaguuuccuugaagu

SEQ ID NO: 1759654 - RNA, 19 nt, Artificial Sequence
  Description of Artificial Sequence: Synthetic oligonucleotide
  Antisense strand to SEQ ID NO: 1759653
acuucaaggaaacugaggc

SEQ ID NO: 1759655 - RNA, 19 nt, Artificial Sequence
  Description of Artificial Sequence: Synthetic oligonucleotide
  Sense strand starting at position 3098 of SEQ ID NO: 1562608
cucaguuuccuugaaguga

SEQ ID NO: 1759656 - RNA, 19 nt, Artificial Sequence
  Description of Artificial Sequence: Synthetic oligonucleotide
  Antisense strand to SEQ ID NO: 1759655
ucacuucaaggaaacugag

SEQ ID NO: 1759657 - RNA, 19 nt, Artificial Sequence
  Description of Artificial Sequence: Synthetic oligonucleotide
  Sense strand starting at position 3102 of SEQ ID NO: 1562608
guuuccuugaagugagaag

SEQ ID NO: 1759658 - RNA, 19 nt, Artificial Sequence
  Description of Artificial Sequence: Synthetic oligonucleotide
  Antisense strand to SEQ ID NO: 1759657
cuucucacuucaaggaaac

SEQ ID NO: 1759659 - RNA, 19 nt, Artificial Sequence
  Description of Artificial Sequence: Synthetic oligonucleotide
  Sense strand starting at position 3138 of SEQ ID NO: 1562608
gcuguugucccugugugga

SEQ ID NO: 1759660 - RNA, 19 nt, Artificial Sequence
  Description of Artificial Sequence: Synthetic oligonucleotide
  Antisense strand to SEQ ID NO: 1759659
uccacacagggacaacagc

SEQ ID NO: 1759661 - RNA, 19 nt, Artificial Sequence
  Description of Artificial Sequence: Synthetic oligonucleotide
  Sense strand starting at position 3151 of SEQ ID NO: 1562608
uguggauguuagggauuau

SEQ ID NO: 1759662 - RNA, 19 nt, Artificial Sequence
  Description of Artificial Sequence: Synthetic oligonucleotide
  Antisense strand to SEQ ID NO: 1759661
auaaucccuaacauccaca

SEQ ID NO: 1759663 - RNA, 19 nt, Artificial Sequence
  Description of Artificial Sequence: Synthetic oligonucleotide
  Sense strand starting at position 3152 of SEQ ID NO: 1562608
guggauguuagggauuauc

SEQ ID NO: 1759664 - RNA, 19 nt, Artificial Sequence
  Description of Artificial Sequence: Synthetic oligonucleotide
  Antisense strand to SEQ ID NO: 1759663
gauaaucccuaacauccac

SEQ ID NO: 1759665 - RNA, 19 nt, Artificial Sequence
  Description of Artificial Sequence: Synthetic oligonucleotide
  Sense strand starting at position 3189 of SEQ ID NO: 1562608
cagcgucaucuggagcaga

SEQ ID NO: 1759666 - RNA, 19 nt, Artificial Sequence
  Description of Artificial Sequence: Synthetic oligonucleotide
  Antisense strand to SEQ ID NO: 1759665
ucugcuccagaugacgcug

SEQ ID NO: 1759667 - RNA, 19 nt, Artificial Sequence
  Description of Artificial Sequence: Synthetic oligonucleotide
  Sense strand starting at position 3450 of SEQ ID NO: 1562608
gucucagauuuccaggcuu

SEQ ID NO: 1759668 - RNA, 19 nt, Artificial Sequence
  Description of Artificial Sequence: Synthetic oligonucleotide
  Antisense strand to SEQ ID NO: 1759667
aagccuggaaaucugagac

SEQ ID NO: 1759669 - RNA, 19 nt, Artificial Sequence
  Description of Artificial Sequence: Synthetic oligonucleotide
  Sense strand starting at position 3607 of SEQ ID NO: 1562608
ccugauaaaugguguguag

SEQ ID NO: 1759670 - RNA, 19 nt, Artificial Sequence
  Description of Artificial Sequence: Synthetic oligonucleotide
  Antisense strand to SEQ ID NO: 1759669
cuacacaccauuuaucagg

SEQ ID NO: 1759671 - RNA, 19 nt, Artificial Sequence
  Description of Artificial Sequence: Synthetic oligonucleotide
  Sense strand starting at position 3633 of SEQ ID NO: 1562608
uuucgugauugccuguuaa

SEQ ID NO: 1759672 - RNA, 19 nt, Artificial Sequence
  Description of Artificial Sequence: Synthetic oligonucleotide
  Antisense strand to SEQ ID NO: 1759671
uuaacaggcaaucacgaaa

SEQ ID NO: 1759673 - RNA, 19 nt, Artificial Sequence
  Description of Artificial Sequence: Synthetic oligonucleotide
  Sense strand starting at position 3637 of SEQ ID NO: 1562608
gugauugccuguuaauauu

SEQ ID NO: 1759674 - RNA, 19 nt, Artificial Sequence
  Description of Artificial Sequence: Synthetic oligonucleotide
  Antisense strand to SEQ ID NO: 1759673
aauauuaacaggcaaucac

SEQ ID NO: 1759675 - RNA, 19 nt, Artificial Sequence
  Description of Artificial Sequence: Synthetic oligonucleotide
  Sense strand starting at position 575 of SEQ ID NO: 1562609
cugggagaucccugccuuu

SEQ ID NO: 1759676 - RNA, 19 nt, Artificial Sequence
  Description of Artificial Sequence: Synthetic oligonucleotide
  Antisense strand to SEQ ID NO: 1759675
aaaggcagggaucucccag

SEQ ID NO: 1759677 - RNA, 19 nt, Artificial Sequence
  Description of Artificial Sequence: Synthetic oligonucleotide
  Sense strand starting at position 804 of SEQ ID NO: 1562609
ggaaucuggucucggucau

SEQ ID NO: 1759678 - RNA, 19 nt, Artificial Sequence
  Description of Artificial Sequence: Synthetic oligonucleotide
  Antisense strand to SEQ ID NO: 1759677
augaccgagaccagauucc

SEQ ID NO: 1759679 - RNA, 19 nt, Artificial Sequence
  Description of Artificial Sequence: Synthetic oligonucleotide
  Sense strand starting at position 961 of SEQ ID NO: 1562609
ggacugaggguguggauaa

SEQ ID NO: 1759680 - RNA, 19 nt, Artificial Sequence
  Description of Artificial Sequence: Synthetic oligonucleotide
  Antisense strand to SEQ ID NO: 1759679
uuauccacacccucagucc

SEQ ID NO: 1759681 - RNA, 19 nt, Artificial Sequence
  Description of Artificial Sequence: Synthetic oligonucleotide
  Sense strand starting at position 1186 of SEQ ID NO: 1562609
gcugcacauucguauuugu

SEQ ID NO: 1759682 - RNA, 19 nt, Artificial Sequence
  Description of Artificial Sequence: Synthetic oligonucleotide
  Antisense strand to SEQ ID NO: 1759681
acaaauacgaaugugcagc

SEQ ID NO: 1759683 - RNA, 19 nt, Artificial Sequence
  Description of Artificial Sequence: Synthetic oligonucleotide
  Sense strand starting at position 1189 of SEQ ID NO: 1562609
gcacauucguauuuguuga

SEQ ID NO: 1759684 - RNA, 19 nt, Artificial Sequence
  Description of Artificial Sequence: Synthetic oligonucleotide
  Antisense strand to SEQ ID NO: 1759683
ucaacaaauacgaaugugc

SEQ ID NO: 1759685 - RNA, 19 nt, Artificial Sequence
  Description of Artificial Sequence: Synthetic oligonucleotide
  Sense strand starting at position 1191 of SEQ ID NO: 1562609
acauucguauuuguugaau

SEQ ID NO: 1759686 - RNA, 19 nt, Artificial Sequence
  Description of Artificial Sequence: Synthetic oligonucleotide
  Antisense strand to SEQ ID NO: 1759685
auucaacaaauacgaaugu

SEQ ID NO: 1759687 - RNA, 19 nt, Artificial Sequence
  Description of Artificial Sequence: Synthetic oligonucleotide
  Sense strand starting at position 1319 of SEQ ID NO: 1562609
cgaggauccgcacaucauu

SEQ ID NO: 1759688 - RNA, 19 nt, Artificial Sequence
  Description of Artificial Sequence: Synthetic oligonucleotide
  Antisense strand to SEQ ID NO: 1759687
aaugaugugcggauccucg

SEQ ID NO: 1759689 - RNA, 19 nt, Artificial Sequence
  Description of Artificial Sequence: Synthetic oligonucleotide
  Sense strand starting at position 2162 of SEQ ID NO: 1562609
cagacagugucguccaacu

SEQ ID NO: 1759690 - RNA, 19 nt, Artificial Sequence
  Description of Artificial Sequence: Synthetic oligonucleotide
  Antisense strand to SEQ ID NO: 1759689
aguuggacgacacugucug

SEQ ID NO: 1759691 - RNA, 19 nt, Artificial Sequence
  Description of Artificial Sequence: Synthetic oligonucleotide
  Sense strand starting at position 2164 of SEQ ID NO: 1562609
gacagugucguccaacuuu

SEQ ID NO: 1759692 - RNA, 19 nt, Artificial Sequence
  Description of Artificial Sequence: Synthetic oligonucleotide
  Antisense strand to SEQ ID NO: 1759691
aaaguuggacgacacuguc

SEQ ID NO: 1759693 - RNA, 19 nt, Artificial Sequence
  Description of Artificial Sequence: Synthetic oligonucleotide
  Sense strand starting at position 2178 of SEQ ID NO: 1562609
acuuuaaguuggccacuua

SEQ ID NO: 1759694 - RNA, 19 nt, Artificial Sequence
  Description of Artificial Sequence: Synthetic oligonucleotide
  Antisense strand to SEQ ID NO: 1759693
uaaguggccaacuuaaagu

SEQ ID NO: 1759695 - RNA, 19 nt, Artificial Sequence
  Description of Artificial Sequence: Synthetic oligonucleotide
  Sense strand starting at position 2209 of SEQ ID NO: 1562609
ugggauaauuccuaaugau

SEQ ID NO: 1759696 - RNA, 19 nt, Artificial Sequence
  Description of Artificial Sequence: Synthetic oligonucleotide
  Antisense strand to SEQ ID NO: 1759695
aucauuaggaauuauccca

SEQ ID NO: 1759697 - RNA, 19 nt, Artificial Sequence
  Description of Artificial Sequence: Synthetic oligonucleotide
  Sense strand starting at position 2223 of SEQ ID NO: 1562609
augauucucugggaaacau

SEQ ID NO: 1759698 - RNA, 19 nt, Artificial Sequence
  Description of Artificial Sequence: Synthetic oligonucleotide
  Antisense strand to SEQ ID NO: 1759697
auguuucccagagaaucau

SEQ ID NO: 1759699 - RNA, 19 nt, Artificial Sequence
  Description of Artificial Sequence: Synthetic oligonucleotide
  Sense strand starting at position 2283 of SEQ ID NO: 1562609
auucuagguccucacggaa

SEQ ID NO: 1759700 - RNA, 19 nt, Artificial Sequence
  Description of Artificial Sequence: Synthetic oligonucleotide
  Antisense strand to SEQ ID NO: 1759699
uuccgugaggaccuagaau

SEQ ID NO: 1759701 - RNA, 19 nt, Artificial Sequence
  Description of Artificial Sequence: Synthetic oligonucleotide
  Sense strand starting at position 2368 of SEQ ID NO: 1562609
cccugugcuuguuguuuau

SEQ ID NO: 1759702 - RNA, 19 nt, Artificial Sequence
  Description of Artificial Sequence: Synthetic oligonucleotide
  Antisense strand to SEQ ID NO: 1759701
auaaacaacaagcacaggg

SEQ ID NO: 1759703 - RNA, 19 nt, Artificial Sequence
  Description of Artificial Sequence: Synthetic oligonucleotide
  Sense strand starting at position 2374 of SEQ ID NO: 1562609
gcuuguuguuuauucuuua

SEQ ID NO: 1759704 - RNA, 19 nt, Artificial Sequence
  Description of Artificial Sequence: Synthetic oligonucleotide
  Antisense strand to SEQ ID NO: 1759703
uaaagaauaaacaacaagc

SEQ ID NO: 1759705 - RNA, 19 nt, Artificial Sequence
  Description of Artificial Sequence: Synthetic oligonucleotide
  Sense strand starting at position 2436 of SEQ ID NO: 1562609
auagauaaugcugggacua

SEQ ID NO: 1759706 - RNA, 19 nt, Artificial Sequence
  Description of Artificial Sequence: Synthetic oligonucleotide
  Antisense strand to SEQ ID NO: 1759705
uagucccagcauuaucuau

SEQ ID NO: 1759707 - RNA, 19 nt, Artificial Sequence
  Description of Artificial Sequence: Synthetic oligonucleotide
  Sense strand starting at position 2533 of SEQ ID NO: 1562609
gucucaggcuggucucgaa

SEQ ID NO: 1759708 - RNA, 19 nt, Artificial Sequence
  Description of Artificial Sequence: Synthetic oligonucleotide
  Antisense strand to SEQ ID NO: 1759707
uucgagaccagccugagac

SEQ ID NO: 1759709 - RNA, 19 nt, Artificial Sequence
  Description of Artificial Sequence: Synthetic oligonucleotide
  Sense strand starting at position 2677 of SEQ ID NO: 1562609
cacuucucuugagugugau

SEQ ID NO: 1759710 - RNA, 19 nt, Artificial Sequence
  Description of Artificial Sequence: Synthetic oligonucleotide
  Antisense strand to SEQ ID NO: 1759709
aucacacucaagagaagug

SEQ ID NO: 1759711 - RNA, 19 nt, Artificial Sequence
  Description of Artificial Sequence: Synthetic oligonucleotide
  Sense strand starting at position 2678 of SEQ ID NO: 1562609
acuucucuugagugugaua

SEQ ID NO: 1759712 - RNA, 19 nt, Artificial Sequence
  Description of Artificial Sequence: Synthetic oligonucleotide
  Antisense strand to SEQ ID NO: 1759711
uaucacacucaagagaagu

SEQ ID NO: 1759713 - RNA, 19 nt, Artificial Sequence
  Description of Artificial Sequence: Synthetic oligonucleotide
  Sense strand starting at position 2687 of SEQ ID NO: 1562609
gagugugauaccuaggagu

SEQ ID NO: 1759714 - RNA, 19 nt, Artificial Sequence
  Description of Artificial Sequence: Synthetic oligonucleotide
  Antisense strand to SEQ ID NO: 1759713
acuccuagguaucacacuc

SEQ ID NO: 1759715 - RNA, 19 nt, Artificial Sequence
  Description of Artificial Sequence: Synthetic oligonucleotide
  Sense strand starting at position 2690 of SEQ ID NO: 1562609
ugugauaccuaggagugga

SEQ ID NO: 1759716 - RNA, 19 nt, Artificial Sequence
  Description of Artificial Sequence: Synthetic oligonucleotide
  Antisense strand to SEQ ID NO: 1759715
uccacuccuagguaucaca

SEQ ID NO: 1759717 - RNA, 19 nt, Artificial Sequence
  Description of Artificial Sequence: Synthetic oligonucleotide
  Sense strand starting at position 2727 of SEQ ID NO: 1562609
ggacgagcuucaugguauu

SEQ ID NO: 1759718 - RNA, 19 nt, Artificial Sequence
  Description of Artificial Sequence: Synthetic oligonucleotide
  Antisense strand to SEQ ID NO: 1759717
aauaccaugaagcucgucc

SEQ ID NO: 1759719 - RNA, 19 nt, Artificial Sequence
  Description of Artificial Sequence: Synthetic oligonucleotide
  Sense strand starting at position 2754 of SEQ ID NO: 1562609
ccugcuuuccaaggugaug

SEQ ID NO: 1759720 - RNA, 19 nt, Artificial Sequence
  Description of Artificial Sequence: Synthetic oligonucleotide
  Antisense strand to SEQ ID NO: 1759719
caucaccuuggaaagcagg

SEQ ID NO: 1759721 - RNA, 19 nt, Artificial Sequence
  Description of Artificial Sequence: Synthetic oligonucleotide
  Sense strand starting at position 2926 of SEQ ID NO: 1562609
ggaugucacucacgcuuua

SEQ ID NO: 1759722 - RNA, 19 nt, Artificial Sequence
  Description of Artificial Sequence: Synthetic oligonucleotide
  Antisense strand to SEQ ID NO: 1759721
uaaagcgugagugacaucc

SEQ ID NO: 1759723 - RNA, 19 nt, Artificial Sequence
  Description of Artificial Sequence: Synthetic oligonucleotide
  Sense strand starting at position 3121 of SEQ ID NO: 1562609
cacggagucguuugugugu

SEQ ID NO: 1759724 - RNA, 19 nt, Artificial Sequence
  Description of Artificial Sequence: Synthetic oligonucleotide
  Antisense strand to SEQ ID NO: 1759723
acacacaaacgacuccgug

SEQ ID NO: 1759725 - RNA, 19 nt, Artificial Sequence
  Description of Artificial Sequence: Synthetic oligonucleotide
  Sense strand starting at position 3652 of SEQ ID NO: 1562609
gcuucuuacagucagggua

SEQ ID NO: 1759726 - RNA, 19 nt, Artificial Sequence
  Description of Artificial Sequence: Synthetic oligonucleotide
  Antisense strand to SEQ ID NO: 1759725
uacccugacuguaagaagc

SEQ ID NO: 1759727 - RNA, 19 nt, Artificial Sequence
  Description of Artificial Sequence: Synthetic oligonucleotide
  Sense strand starting at position 3765 of SEQ ID NO: 1562609
gggugauguuuccugcaaa

SEQ ID NO: 1759728 - RNA, 19 nt, Artificial Sequence
  Description of Artificial Sequence: Synthetic oligonucleotide
  Antisense strand to SEQ ID NO: 1759727
uuugcaggaaacaucaccc

SEQ ID NO: 1759729 - RNA, 19 nt, Artificial Sequence
  Description of Artificial Sequence: Synthetic oligonucleotide
  Sense strand starting at position 3884 of SEQ ID NO: 1562609
augggauucuucuauacag

SEQ ID NO: 1759730 - RNA, 19 nt, Artificial Sequence
  Description of Artificial Sequence: Synthetic oligonucleotide
  Antisense strand to SEQ ID NO: 1759729
cuguauagaagaaucccau

SEQ ID NO: 1759731 - RNA, 19 nt, Artificial Sequence
  Description of Artificial Sequence: Synthetic oligonucleotide
  Sense strand starting at position 3891 of SEQ ID NO: 1562609
ucuucuauacagggauugu

SEQ ID NO: 1759732 - RNA, 19 nt, Artificial Sequence
  Description of Artificial Sequence: Synthetic oligonucleotide
  Antisense strand to SEQ ID NO: 1759731
acaaucccuguauagaaga

SEQ ID NO: 1759733 - RNA, 19 nt, Artificial Sequence
  Description of Artificial Sequence: Synthetic oligonucleotide
  Sense strand starting at position 3936 of SEQ ID NO: 1562609
uugugagaacucugcacga

SEQ ID NO: 1759734 - RNA, 19 nt, Artificial Sequence
  Description of Artificial Sequence: Synthetic oligonucleotide
  Antisense strand to SEQ ID NO: 1759733
ucgugcagaguucucacaa

SEQ ID NO: 1759735 - RNA, 19 nt, Artificial Sequence
  Description of Artificial Sequence: Synthetic oligonucleotide
  Sense strand starting at position 3938 of SEQ ID NO: 1562609
gugagaacucugcacgaag

SEQ ID NO: 1759736 - RNA, 19 nt, Artificial Sequence
  Description of Artificial Sequence: Synthetic oligonucleotide
  Antisense strand to SEQ ID NO: 1759735
cuucgugcagaguucucac

SEQ ID NO: 1759737 - RNA, 19 nt, Artificial Sequence
  Description of Artificial Sequence: Synthetic oligonucleotide
  Sense strand starting at position 3940 of SEQ ID NO: 1562609
gagaacucugcacgaagaa

SEQ ID NO: 1759738 - RNA, 19 nt, Artificial Sequence
  Description of Artificial Sequence: Synthetic oligonucleotide
  Antisense strand to SEQ ID NO: 1759737
uucuucgugcagaguucuc

SEQ ID NO: 1759739 - RNA, 19 nt, Artificial Sequence
  Description of Artificial Sequence: Synthetic oligonucleotide
  Sense strand starting at position 3950 of SEQ ID NO: 1562609
cacgaagaauggugaguuu

SEQ ID NO: 1759740 - RNA, 19 nt, Artificial Sequence
  Description of Artificial Sequence: Synthetic oligonucleotide
  Antisense strand to SEQ ID NO: 1759739
aaacucaccauucuucgug

SEQ ID NO: 1759741 - RNA, 19 nt, Artificial Sequence
  Description of Artificial Sequence: Synthetic oligonucleotide
  Sense strand starting at position 405 of SEQ ID NO: 1562610
cugggagaucccugccuuu

SEQ ID NO: 1759742 - RNA, 19 nt, Artificial Sequence
  Description of Artificial Sequence: Synthetic oligonucleotide
  Antisense strand to SEQ ID NO: 1759741
aaaggcagggaucucccag

SEQ ID NO: 1759743 - RNA, 19 nt, Artificial Sequence
  Description of Artificial Sequence: Synthetic oligonucleotide
  Sense strand starting at position 634 of SEQ ID NO: 1562610
ggaaucuggucucggucau

SEQ ID NO: 1759744 - RNA, 19 nt, Artificial Sequence
  Description of Artificial Sequence: Synthetic oligonucleotide
  Antisense strand to SEQ ID NO: 1759743
augaccgagaccagauucc

SEQ ID NO: 1759745 - RNA, 19 nt, Artificial Sequence
  Description of Artificial Sequence: Synthetic oligonucleotide
  Sense strand starting at position 791 of SEQ ID NO: 1562610
ggacugaggguguggauaa

SEQ ID NO: 1759746 - RNA, 19 nt, Artificial Sequence
  Description of Artificial Sequence: Synthetic oligonucleotide
  Antisense strand to SEQ ID NO: 1759745
uuauccacacccucagucc

SEQ ID NO: 1759747 - RNA, 19 nt, Artificial Sequence
  Description of Artificial Sequence: Synthetic oligonucleotide
  Sense strand starting at position 1016 of SEQ ID NO: 1562610
gcugcacauucguauuugu

SEQ ID NO: 1759748 - RNA, 19 nt, Artificial Sequence
  Description of Artificial Sequence: Synthetic oligonucleotide
  Antisense strand to SEQ ID NO: 1759747
acaaauacgaaugugcagc

SEQ ID NO: 1759749 - RNA, 19 nt, Artificial Sequence
  Description of Artificial Sequence: Synthetic oligonucleotide
  Sense strand starting at position 1019 of SEQ ID NO: 1562610
gcacauucguauuuguuga

SEQ ID NO: 1759750 - RNA, 19 nt, Artificial Sequence
  Description of Artificial Sequence: Synthetic oligonucleotide
  Antisense strand to SEQ ID NO: 1759749
ucaacaaauacgaaugugc

SEQ ID NO: 1759751 - RNA, 19 nt, Artificial Sequence
  Description of Artificial Sequence: Synthetic oligonucleotide
  Sense strand starting at position 1021 of SEQ ID NO: 1562610
acauucguauuuguugaau

SEQ ID NO: 1759752 - RNA, 19 nt, Artificial Sequence
  Description of Artificial Sequence: Synthetic oligonucleotide
  Antisense strand to SEQ ID NO: 1759751
auucaacaaauacgaaugu

SEQ ID NO: 1759753 - RNA, 19 nt, Artificial Sequence
  Description of Artificial Sequence: Synthetic oligonucleotide
  Sense strand starting at position 1149 of SEQ ID NO: 1562610
cgaggauccgcacaucauu

SEQ ID NO: 1759754 - RNA, 19 nt, Artificial Sequence
  Description of Artificial Sequence: Synthetic oligonucleotide
  Antisense strand to SEQ ID NO: 1759753
aaugaugugcggauccucg

SEQ ID NO: 1759755 - RNA, 19 nt, Artificial Sequence
  Description of Artificial Sequence: Synthetic oligonucleotide
  Sense strand starting at position 1992 of SEQ ID NO: 1562610
cagacagugucguccaacu

SEQ ID NO: 1759756 - RNA, 19 nt, Artificial Sequence
  Description of Artificial Sequence: Synthetic oligonucleotide
  Antisense strand to SEQ ID NO: 1759755
aguuggacgacacugucug

SEQ ID NO: 1759757 - RNA, 19 nt, Artificial Sequence
  Description of Artificial Sequence: Synthetic oligonucleotide
  Sense strand starting at position 1994 of SEQ ID NO: 1562610
gacagugucguccaacuuu

SEQ ID NO: 1759758 - RNA, 19 nt, Artificial Sequence
  Description of Artificial Sequence: Synthetic oligonucleotide
  Antisense strand to SEQ ID NO: 1759757
aaaguuggacgacacuguc

SEQ ID NO: 1759759 - RNA, 19 nt, Artificial Sequence
  Description of Artificial Sequence: Synthetic oligonucleotide
  Sense strand starting at position 2008 of SEQ ID NO: 1562610
acuuuaaguuggccacuua

SEQ ID NO: 1759760 - RNA, 19 nt, Artificial Sequence
  Description of Artificial Sequence: Synthetic oligonucleotide
  Antisense strand to SEQ ID NO: 1759759
uaaguggccaacuuaaagu

SEQ ID NO: 1759761 - RNA, 19 nt, Artificial Sequence
  Description of Artificial Sequence: Synthetic oligonucleotide
  Sense strand starting at position 2039 of SEQ ID NO: 1562610
ugggauaauuccuaaugau

SEQ ID NO: 1759762 - RNA, 19 nt, Artificial Sequence
  Description of Artificial Sequence: Synthetic oligonucleotide
  Antisense strand to SEQ ID NO: 1759761
aucauuaggaauuauccca

SEQ ID NO: 1759763 - RNA, 19 nt, Artificial Sequence
  Description of Artificial Sequence: Synthetic oligonucleotide
  Sense strand starting at position 2053 of SEQ ID NO: 1562610
augauucucugggaaacau

SEQ ID NO: 1759764 - RNA, 19 nt, Artificial Sequence
  Description of Artificial Sequence: Synthetic oligonucleotide
  Antisense strand to SEQ ID NO: 1759763
auguuucccagagaaucau

SEQ ID NO: 1759765 - RNA, 19 nt, Artificial Sequence
  Description of Artificial Sequence: Synthetic oligonucleotide
  Sense strand starting at position 2113 of SEQ ID NO: 1562610
auucuagguccucacggaa

SEQ ID NO: 1759766 - RNA, 19 nt, Artificial Sequence
  Description of Artificial Sequence: Synthetic oligonucleotide
  Antisense strand to SEQ ID NO: 1759765
uuccgugaggaccuagaau

SEQ ID NO: 1759767 - RNA, 19 nt, Artificial Sequence
  Description of Artificial Sequence: Synthetic oligonucleotide
  Sense strand starting at position 2198 of SEQ ID NO: 1562610
cccugugcuuguuguuuau

SEQ ID NO: 1759768 - RNA, 19 nt, Artificial Sequence
  Description of Artificial Sequence: Synthetic oligonucleotide
  Antisense strand to SEQ ID NO: 1759767
auaaacaacaagcacaggg

SEQ ID NO: 1759769 - RNA, 19 nt, Artificial Sequence
  Description of Artificial Sequence: Synthetic oligonucleotide
  Sense strand starting at position 2204 of SEQ ID NO: 1562610
gcuuguuguuuauucuuua

SEQ ID NO: 1759770 - RNA, 19 nt, Artificial Sequence
  Description of Artificial Sequence: Synthetic oligonucleotide
  Antisense strand to SEQ ID NO: 1759769
uaaagaauaaacaacaagc

SEQ ID NO: 1759771 - RNA, 19 nt, Artificial Sequence
  Description of Artificial Sequence: Synthetic oligonucleotide
  Sense strand starting at position 2266 of SEQ ID NO: 1562610
auagauaaugcugggacua

SEQ ID NO: 1759772 - RNA, 19 nt, Artificial Sequence
  Description of Artificial Sequence: Synthetic oligonucleotide
  Antisense strand to SEQ ID NO: 1759771
uagucccagcauuaucuau

SEQ ID NO: 1759773 - RNA, 19 nt, Artificial Sequence
  Description of Artificial Sequence: Synthetic oligonucleotide
  Sense strand starting at position 2363 of SEQ ID NO: 1562610
gucucaggcuggucucgaa

SEQ ID NO: 1759774 - RNA, 19 nt, Artificial Sequence
  Description of Artificial Sequence: Synthetic oligonucleotide
  Antisense strand to SEQ ID NO: 1759773
uucgagaccagccugagac

SEQ ID NO: 1759775 - RNA, 19 nt, Artificial Sequence
  Description of Artificial Sequence: Synthetic oligonucleotide
  Sense strand starting at position 2507 of SEQ ID NO: 1562610
cacuucucuugagugugau

SEQ ID NO: 1759776 - RNA, 19 nt, Artificial Sequence
  Description of Artificial Sequence: Synthetic oligonucleotide
  Antisense strand to SEQ ID NO: 1759775
aucacacucaagagaagug

SEQ ID NO: 1759777 - RNA, 19 nt, Artificial Sequence
  Description of Artificial Sequence: Synthetic oligonucleotide
  Sense strand starting at position 2508 of SEQ ID NO: 1562610
acuucucuugagugugaua

SEQ ID NO: 1759778 - RNA, 19 nt, Artificial Sequence
  Description of Artificial Sequence: Synthetic oligonucleotide
  Antisense strand to SEQ ID NO: 1759777
uaucacacucaagagaagu

SEQ ID NO: 1759779 - RNA, 19 nt, Artificial Sequence
  Description of Artificial Sequence: Synthetic oligonucleotide
  Sense strand starting at position 2517 of SEQ ID NO: 1562610
gagugugauaccuaggagu

SEQ ID NO: 1759780 - RNA, 19 nt, Artificial Sequence
  Description of Artificial Sequence: Synthetic oligonucleotide
  Antisense strand to SEQ ID NO: 1759779
acuccuagguaucacacuc

SEQ ID NO: 1759781 - RNA, 19 nt, Artificial Sequence
  Description of Artificial Sequence: Synthetic oligonucleotide
  Sense strand starting at position 2520 of SEQ ID NO: 1562610
ugugauaccuaggagugga

SEQ ID NO: 1759782 - RNA, 19 nt, Artificial Sequence
  Description of Artificial Sequence: Synthetic oligonucleotide
  Antisense strand to SEQ ID NO: 1759781
uccacuccuagguaucaca

SEQ ID NO: 1759783 - RNA, 19 nt, Artificial Sequence
  Description of Artificial Sequence: Synthetic oligonucleotide
  Sense strand starting at position 2557 of SEQ ID NO: 1562610
ggacgagcuucaugguauu

SEQ ID NO: 1759784 - RNA, 19 nt, Artificial Sequence
  Description of Artificial Sequence: Synthetic oligonucleotide
  Antisense strand to SEQ ID NO: 1759783
aauaccaugaagcucgucc

SEQ ID NO: 1759785 - RNA, 19 nt, Artificial Sequence
  Description of Artificial Sequence: Synthetic oligonucleotide
  Sense strand starting at position 2584 of SEQ ID NO: 1562610
ccugcuuuccaaggugaug

SEQ ID NO: 1759786 - RNA, 19 nt, Artificial Sequence
  Description of Artificial Sequence: Synthetic oligonucleotide
  Antisense strand to SEQ ID NO: 1759785
caucaccuuggaaagcagg

SEQ ID NO: 1759787 - RNA, 19 nt, Artificial Sequence
  Description of Artificial Sequence: Synthetic oligonucleotide
  Sense strand starting at position 2756 of SEQ ID NO: 1562610
ggaugucacucacgcuuua

SEQ ID NO: 1759788 - RNA, 19 nt, Artificial Sequence
  Description of Artificial Sequence: Synthetic oligonucleotide
  Antisense strand to SEQ ID NO: 1759787
uaaagcgugagugacaucc

SEQ ID NO: 1759789 - RNA, 19 nt, Artificial Sequence
  Description of Artificial Sequence: Synthetic oligonucleotide
  Sense strand starting at position 2951 of SEQ ID NO: 1562610
cacggagucguuugugugu

SEQ ID NO: 1759790 - RNA, 19 nt, Artificial Sequence
  Description of Artificial Sequence: Synthetic oligonucleotide
  Antisense strand to SEQ ID NO: 1759789
acacacaaacgacuccgug

SEQ ID NO: 1759791 - RNA, 19 nt, Artificial Sequence
  Description of Artificial Sequence: Synthetic oligonucleotide
  Sense strand starting at position 3482 of SEQ ID NO: 1562610
gcuucuuacagucagggua

SEQ ID NO: 1759792 - RNA, 19 nt, Artificial Sequence
  Description of Artificial Sequence: Synthetic oligonucleotide
  Antisense strand to SEQ ID NO: 1759791
uacccugacuguaagaagc

SEQ ID NO: 1759793 - RNA, 19 nt, Artificial Sequence
  Description of Artificial Sequence: Synthetic oligonucleotide
  Sense strand starting at position 3595 of SEQ ID NO: 1562610
gggugauguuuccugcaaa

SEQ ID NO: 1759794 - RNA, 19 nt, Artificial Sequence
  Description of Artificial Sequence: Synthetic oligonucleotide
  Antisense strand to SEQ ID NO: 1759793
uuugcaggaaacaucaccc

SEQ ID NO: 1759795 - RNA, 19 nt, Artificial Sequence
  Description of Artificial Sequence: Synthetic oligonucleotide
  Sense strand starting at position 3714 of SEQ ID NO: 1562610
augggauucuucuauacag

SEQ ID NO: 1759796 - RNA, 19 nt, Artificial Sequence
  Description of Artificial Sequence: Synthetic oligonucleotide
  Antisense strand to SEQ ID NO: 1759795
cuguauagaagaaucccau

SEQ ID NO: 1759797 - RNA, 19 nt, Artificial Sequence
  Description of Artificial Sequence: Synthetic oligonucleotide
  Sense strand starting at position 3721 of SEQ ID NO: 1562610
ucuucuauacagggauugu

SEQ ID NO: 1759798 - RNA, 19 nt, Artificial Sequence
  Description of Artificial Sequence: Synthetic oligonucleotide
  Antisense strand to SEQ ID NO: 1759797
acaaucccuguauagaaga

SEQ ID NO: 1759799 - RNA, 19 nt, Artificial Sequence
  Description of Artificial Sequence: Synthetic oligonucleotide
  Sense strand starting at position 3766 of SEQ ID NO: 1562610
uugugagaacucugcacga

SEQ ID NO: 1759800 - RNA, 19 nt, Artificial Sequence
  Description of Artificial Sequence: Synthetic oligonucleotide
  Antisense strand to SEQ ID NO: 1759799
ucgugcagaguucucacaa

SEQ ID NO: 1759801 - RNA, 19 nt, Artificial Sequence
  Description of Artificial Sequence: Synthetic oligonucleotide
  Sense strand starting at position 3768 of SEQ ID NO: 1562610
gugagaacucugcacgaag

SEQ ID NO: 1759802 - RNA, 19 nt, Artificial Sequence
  Description of Artificial Sequence: Synthetic oligonucleotide
  Antisense strand to SEQ ID NO: 1759801
cuucgugcagaguucucac

SEQ ID NO: 1759803 - RNA, 19 nt, Artificial Sequence
  Description of Artificial Sequence: Synthetic oligonucleotide
  Sense strand starting at position 3770 of SEQ ID NO: 1562610
gagaacucugcacgaagaa

SEQ ID NO: 1759804 - RNA, 19 nt, Artificial Sequence
  Description of Artificial Sequence: Synthetic oligonucleotide
  Antisense strand to SEQ ID NO: 1759803
uucuucgugcagaguucuc

SEQ ID NO: 1759805 - RNA, 19 nt, Artificial Sequence
  Description of Artificial Sequence: Synthetic oligonucleotide
  Sense strand starting at position 3780 of SEQ ID NO: 1562610
cacgaagaauggugaguuu

SEQ ID NO: 1759806 - RNA, 19 nt, Artificial Sequence
  Description of Artificial Sequence: Synthetic oligonucleotide
  Antisense strand to SEQ ID NO: 1759805
aaacucaccauucuucgug

SEQ ID NO: 1759807 - RNA, 19 nt, Artificial Sequence
  Description of Artificial Sequence: Synthetic oligonucleotide
  Sense strand starting at position 3851 of SEQ ID NO: 1562610
augagagaaugaugacuuu

SEQ ID NO: 1759808 - RNA, 19 nt, Artificial Sequence
  Description of Artificial Sequence: Synthetic oligonucleotide
  Antisense strand to SEQ ID NO: 1759807
aaagucaucauucucucau

SEQ ID NO: 1759809 - RNA, 19 nt, Artificial Sequence
  Description of Artificial Sequence: Synthetic oligonucleotide
  Sense strand starting at position 37 of SEQ ID NO: 1562611
guuacaccaucuggagaau

SEQ ID NO: 1759810 - RNA, 19 nt, Artificial Sequence
  Description of Artificial Sequence: Synthetic oligonucleotide
  Antisense strand to SEQ ID NO: 1759809
auucuccagaugguguaac

SEQ ID NO: 1759811 - RNA, 19 nt, Artificial Sequence
  Description of Artificial Sequence: Synthetic oligonucleotide
  Sense strand starting at position 106 of SEQ ID NO: 1562611
ucaagugcuccgugagcgu

SEQ ID NO: 1759812 - RNA, 19 nt, Artificial Sequence
  Description of Artificial Sequence: Synthetic oligonucleotide
  Antisense strand to SEQ ID NO: 1759811
acgcucacggagcacuuga

SEQ ID NO: 1759813 - RNA, 19 nt, Artificial Sequence
  Description of Artificial Sequence: Synthetic oligonucleotide
  Sense strand starting at position 205 of SEQ ID NO: 1562611
ggauauauguggccgcuga

SEQ ID NO: 1759814 - RNA, 19 nt, Artificial Sequence
  Description of Artificial Sequence: Synthetic oligonucleotide
  Antisense strand to SEQ ID NO: 1759813
ucagcggccacauauaucc

SEQ ID NO: 1759815 - RNA, 19 nt, Artificial Sequence
  Description of Artificial Sequence: Synthetic oligonucleotide
  Sense strand starting at position 258 of SEQ ID NO: 1562611
cuaauuaggcccugugagu

SEQ ID NO: 1759816 - RNA, 19 nt, Artificial Sequence
  Description of Artificial Sequence: Synthetic oligonucleotide
  Antisense strand to SEQ ID NO: 1759815
acucacagggccuaauuag

SEQ ID NO: 1759817 - RNA, 19 nt, Artificial Sequence
  Description of Artificial Sequence: Synthetic oligonucleotide
  Sense strand starting at position 1028 of SEQ ID NO: 1562611
cugggagaucccugccuuu

SEQ ID NO: 1759818 - RNA, 19 nt, Artificial Sequence
  Description of Artificial Sequence: Synthetic oligonucleotide
  Antisense strand to SEQ ID NO: 1759817
aaaggcagggaucucccag

SEQ ID NO: 1759819 - RNA, 19 nt, Artificial Sequence
  Description of Artificial Sequence: Synthetic oligonucleotide
  Sense strand starting at position 1257 of SEQ ID NO: 1562611
ggaaucuggucucggucau

SEQ ID NO: 1759820 - RNA, 19 nt, Artificial Sequence
  Description of Artificial Sequence: Synthetic oligonucleotide
  Antisense strand to SEQ ID NO: 1759819
augaccgagaccagauucc

SEQ ID NO: 1759821 - RNA, 19 nt, Artificial Sequence
  Description of Artificial Sequence: Synthetic oligonucleotide
  Sense strand starting at position 1414 of SEQ ID NO: 1562611
ggacugaggguguggauaa

SEQ ID NO: 1759822 - RNA, 19 nt, Artificial Sequence
  Description of Artificial Sequence: Synthetic oligonucleotide
  Antisense strand to SEQ ID NO: 1759821
uuauccacacccucagucc

SEQ ID NO: 1759823 - RNA, 19 nt, Artificial Sequence
  Description of Artificial Sequence: Synthetic oligonucleotide
  Sense strand starting at position 1639 of SEQ ID NO: 1562611
gcugcacauucguauuugu

SEQ ID NO: 1759824 - RNA, 19 nt, Artificial Sequence
  Description of Artificial Sequence: Synthetic oligonucleotide
  Antisense strand to SEQ ID NO: 1759823
acaaauacgaaugugcagc

SEQ ID NO: 1759825 - RNA, 19 nt, Artificial Sequence
  Description of Artificial Sequence: Synthetic oligonucleotide
  Sense strand starting at position 1642 of SEQ ID NO: 1562611
gcacauucguauuuguuga

SEQ ID NO: 1759826 - RNA, 19 nt, Artificial Sequence
  Description of Artificial Sequence: Synthetic oligonucleotide
  Antisense strand to SEQ ID NO: 1759825
ucaacaaauacgaaugugc

SEQ ID NO: 1759827 - RNA, 19 nt, Artificial Sequence
  Description of Artificial Sequence: Synthetic oligonucleotide
  Sense strand starting at position 1644 of SEQ ID NO: 1562611
acauucguauuuguugaau

SEQ ID NO: 1759828 - RNA, 19 nt, Artificial Sequence
  Description of Artificial Sequence: Synthetic oligonucleotide
  Antisense strand to SEQ ID NO: 1759827
auucaacaaauacgaaugu

SEQ ID NO: 1759829 - RNA, 19 nt, Artificial Sequence
  Description of Artificial Sequence: Synthetic oligonucleotide
  Sense strand starting at position 1772 of SEQ ID NO: 1562611
cgaggauccgcacaucauu

SEQ ID NO: 1759830 - RNA, 19 nt, Artificial Sequence
  Description of Artificial Sequence: Synthetic oligonucleotide
  Antisense strand to SEQ ID NO: 1759829
aaugaugugcggauccucg

SEQ ID NO: 1759831 - RNA, 19 nt, Artificial Sequence
  Description of Artificial Sequence: Synthetic oligonucleotide
  Sense strand starting at position 2615 of SEQ ID NO: 1562611
cagacagugucguccaacu

SEQ ID NO: 1759832 - RNA, 19 nt, Artificial Sequence
  Description of Artificial Sequence: Synthetic oligonucleotide
  Antisense strand to SEQ ID NO: 1759831
aguuggacgacacugucug

SEQ ID NO: 1759833 - RNA, 19 nt, Artificial Sequence
  Description of Artificial Sequence: Synthetic oligonucleotide
  Sense strand starting at position 2617 of SEQ ID NO: 1562611
gacagugucguccaacuuu

SEQ ID NO: 1759834 - RNA, 19 nt, Artificial Sequence
  Description of Artificial Sequence: Synthetic oligonucleotide
  Antisense strand to SEQ ID NO: 1759833
aaaguuggacgacacuguc

SEQ ID NO: 1759835 - RNA, 19 nt, Artificial Sequence
  Description of Artificial Sequence: Synthetic oligonucleotide
  Sense strand starting at position 2631 of SEQ ID NO: 1562611
acuuuaaguuggccacuua

SEQ ID NO: 1759836 - RNA, 19 nt, Artificial Sequence
  Description of Artificial Sequence: Synthetic oligonucleotide
  Antisense strand to SEQ ID NO: 1759835
uaaguggccaacuuaaagu

SEQ ID NO: 1759837 - RNA, 19 nt, Artificial Sequence
  Description of Artificial Sequence: Synthetic oligonucleotide
  Sense strand starting at position 2662 of SEQ ID NO: 1562611
ugggauaauuccuaaugau

SEQ ID NO: 1759838 - RNA, 19 nt, Artificial Sequence
  Description of Artificial Sequence: Synthetic oligonucleotide
  Antisense strand to SEQ ID NO: 1759837
aucauuaggaauuauccca

SEQ ID NO: 1759839 - RNA, 19 nt, Artificial Sequence
  Description of Artificial Sequence: Synthetic oligonucleotide
  Sense strand starting at position 2676 of SEQ ID NO: 1562611
augauucucugggaaacau

SEQ ID NO: 1759840 - RNA, 19 nt, Artificial Sequence
  Description of Artificial Sequence: Synthetic oligonucleotide
  Antisense strand to SEQ ID NO: 1759839
auguuucccagagaaucau

SEQ ID NO: 1759841 - RNA, 19 nt, Artificial Sequence
  Description of Artificial Sequence: Synthetic oligonucleotide
  Sense strand starting at position 2736 of SEQ ID NO: 1562611
auucuagguccucacggaa

SEQ ID NO: 1759842 - RNA, 19 nt, Artificial Sequence
  Description of Artificial Sequence: Synthetic oligonucleotide
  Antisense strand to SEQ ID NO: 1759841
uuccgugaggaccuagaau

SEQ ID NO: 1759843 - RNA, 19 nt, Artificial Sequence
  Description of Artificial Sequence: Synthetic oligonucleotide
  Sense strand starting at position 2821 of SEQ ID NO: 1562611
cccugugcuuguuguuuau

SEQ ID NO: 1759844 - RNA, 19 nt, Artificial Sequence
  Description of Artificial Sequence: Synthetic oligonucleotide
  Antisense strand to SEQ ID NO: 1759843
auaaacaacaagcacaggg

SEQ ID NO: 1759845 - RNA, 19 nt, Artificial Sequence
  Description of Artificial Sequence: Synthetic oligonucleotide
  Sense strand starting at position 2827 of SEQ ID NO: 1562611
gcuuguuguuuauucuuua

SEQ ID NO: 1759846 - RNA, 19 nt, Artificial Sequence
  Description of Artificial Sequence: Synthetic oligonucleotide
  Antisense strand to SEQ ID NO: 1759845
uaaagaauaaacaacaagc

SEQ ID NO: 1759847 - RNA, 19 nt, Artificial Sequence
  Description of Artificial Sequence: Synthetic oligonucleotide
  Sense strand starting at position 2889 of SEQ ID NO: 1562611
auagauaaugcugggacua

SEQ ID NO: 1759848 - RNA, 19 nt, Artificial Sequence
  Description of Artificial Sequence: Synthetic oligonucleotide
  Antisense strand to SEQ ID NO: 1759847
uagucccagcauuaucuau

SEQ ID NO: 1759849 - RNA, 19 nt, Artificial Sequence
  Description of Artificial Sequence: Synthetic oligonucleotide
  Sense strand starting at position 2986 of SEQ ID NO: 1562611
gucucaggcuggucucgaa

SEQ ID NO: 1759850 - RNA, 19 nt, Artificial Sequence
  Description of Artificial Sequence: Synthetic oligonucleotide
  Antisense strand to SEQ ID NO: 1759849
uucgagaccagccugagac

SEQ ID NO: 1759851 - RNA, 19 nt, Artificial Sequence
  Description of Artificial Sequence: Synthetic oligonucleotide
  Sense strand starting at position 3130 of SEQ ID NO: 1562611
cacuucucuugagugugau

SEQ ID NO: 1759852 - RNA, 19 nt, Artificial Sequence
  Description of Artificial Sequence: Synthetic oligonucleotide
  Antisense strand to SEQ ID NO: 1759851
aucacacucaagagaagug

SEQ ID NO: 1759853 - RNA, 19 nt, Artificial Sequence
  Description of Artificial Sequence: Synthetic oligonucleotide
  Sense strand starting at position 3131 of SEQ ID NO: 1562611
acuucucuugagugugaua

SEQ ID NO: 1759854 - RNA, 19 nt, Artificial Sequence
  Description of Artificial Sequence: Synthetic oligonucleotide
  Antisense strand to SEQ ID NO: 1759853
uaucacacucaagagaagu

SEQ ID NO: 1759855 - RNA, 19 nt, Artificial Sequence
  Description of Artificial Sequence: Synthetic oligonucleotide
  Sense strand starting at position 3140 of SEQ ID NO: 1562611
gagugugauaccuaggagu

SEQ ID NO: 1759856 - RNA, 19 nt, Artificial Sequence
  Description of Artificial Sequence: Synthetic oligonucleotide
  Antisense strand to SEQ ID NO: 1759855
acuccuagguaucacacuc

SEQ ID NO: 1759857 - RNA, 19 nt, Artificial Sequence
  Description of Artificial Sequence: Synthetic oligonucleotide
  Sense strand starting at position 3143 of SEQ ID NO: 1562611
ugugauaccuaggagugga

SEQ ID NO: 1759858 - RNA, 19 nt, Artificial Sequence
  Description of Artificial Sequence: Synthetic oligonucleotide
  Antisense strand to SEQ ID NO: 1759857
uccacuccuagguaucaca

SEQ ID NO: 1759859 - RNA, 19 nt, Artificial Sequence
  Description of Artificial Sequence: Synthetic oligonucleotide
  Sense strand starting at position 3180 of SEQ ID NO: 1562611
ggacgagcuucaugguauu

SEQ ID NO: 1759860 - RNA, 19 nt, Artificial Sequence
  Description of Artificial Sequence: Synthetic oligonucleotide
  Antisense strand to SEQ ID NO: 1759859
aauaccaugaagcucgucc

SEQ ID NO: 1759861 - RNA, 19 nt, Artificial Sequence
  Description of Artificial Sequence: Synthetic oligonucleotide
  Sense strand starting at position 3207 of SEQ ID NO: 1562611
ccugcuuuccaaggugaug

SEQ ID NO: 1759862 - RNA, 19 nt, Artificial Sequence
  Description of Artificial Sequence: Synthetic oligonucleotide
  Antisense strand to SEQ ID NO: 1759861
caucaccuuggaaagcagg

SEQ ID NO: 1759863 - RNA, 19 nt, Artificial Sequence
  Description of Artificial Sequence: Synthetic oligonucleotide
  Sense strand starting at position 3379 of SEQ ID NO: 1562611
ggaugucacucacgcuuua

SEQ ID NO: 1759864 - RNA, 19 nt, Artificial Sequence
  Description of Artificial Sequence: Synthetic oligonucleotide
  Antisense strand to SEQ ID NO: 1759863
uaaagcgugagugacaucc

SEQ ID NO: 1759865 - RNA, 19 nt, Artificial Sequence
  Description of Artificial Sequence: Synthetic oligonucleotide
  Sense strand starting at position 3574 of SEQ ID NO: 1562611
cacggagucguuugugugu

SEQ ID NO: 1759866 - RNA, 19 nt, Artificial Sequence
  Description of Artificial Sequence: Synthetic oligonucleotide
  Antisense strand to SEQ ID NO: 1759865
acacacaaacgacuccgug

SEQ ID NO: 1759867 - RNA, 19 nt, Artificial Sequence
  Description of Artificial Sequence: Synthetic oligonucleotide
  Sense strand starting at position 115 of SEQ ID NO: 1562612
gcacgagucaaauguguga

SEQ ID NO: 1759868 - RNA, 19 nt, Artificial Sequence
  Description of Artificial Sequence: Synthetic oligonucleotide
  Antisense strand to SEQ ID NO: 1759867
ucacacauuugacucgugc

SEQ ID NO: 1759869 - RNA, 19 nt, Artificial Sequence
  Description of Artificial Sequence: Synthetic oligonucleotide
  Sense strand starting at position 117 of SEQ ID NO: 1562612
acgagucaaaugugugaga

SEQ ID NO: 1759870 - RNA, 19 nt, Artificial Sequence
  Description of Artificial Sequence: Synthetic oligonucleotide
  Antisense strand to SEQ ID NO: 1759869
ucucacacauuugacucgu

SEQ ID NO: 1759871 - RNA, 19 nt, Artificial Sequence
  Description of Artificial Sequence: Synthetic oligonucleotide
  Sense strand starting at position 118 of SEQ ID NO: 1562612
cgagucaaaugugugagaa

SEQ ID NO: 1759872 - RNA, 19 nt, Artificial Sequence
  Description of Artificial Sequence: Synthetic oligonucleotide
  Antisense strand to SEQ ID NO: 1759871
uucucacacauuugacucg

SEQ ID NO: 1759873 - RNA, 19 nt, Artificial Sequence
  Description of Artificial Sequence: Synthetic oligonucleotide
  Sense strand starting at position 119 of SEQ ID NO: 1562612
gagucaaaugugugagaau

SEQ ID NO: 1759874 - RNA, 19 nt, Artificial Sequence
  Description of Artificial Sequence: Synthetic oligonucleotide
  Antisense strand to SEQ ID NO: 1759873
auucucacacauuugacuc

SEQ ID NO: 1759875 - RNA, 19 nt, Artificial Sequence
  Description of Artificial Sequence: Synthetic oligonucleotide
  Sense strand starting at position 122 of SEQ ID NO: 1562612
ucaaaugugugagaaucuu

SEQ ID NO: 1759876 - RNA, 19 nt, Artificial Sequence
  Description of Artificial Sequence: Synthetic oligonucleotide
  Antisense strand to SEQ ID NO: 1759875
aagauucucacacauuuga

SEQ ID NO: 1759877 - RNA, 19 nt, Artificial Sequence
  Description of Artificial Sequence: Synthetic oligonucleotide
  Sense strand starting at position 130 of SEQ ID NO: 1562612
gugagaaucuuagucuuaa

SEQ ID NO: 1759878 - RNA, 19 nt, Artificial Sequence
  Description of Artificial Sequence: Synthetic oligonucleotide
  Antisense strand to SEQ ID NO: 1759877
uuaagacuaagauucucac

SEQ ID NO: 1759879 - RNA, 19 nt, Artificial Sequence
  Description of Artificial Sequence: Synthetic oligonucleotide
  Sense strand starting at position 131 of SEQ ID NO: 1562612
ugagaaucuuagucuuaac

SEQ ID NO: 1759880 - RNA, 19 nt, Artificial Sequence
  Description of Artificial Sequence: Synthetic oligonucleotide
  Antisense strand to SEQ ID NO: 1759879
guuaagacuaagauucuca

SEQ ID NO: 1759881 - RNA, 19 nt, Artificial Sequence
  Description of Artificial Sequence: Synthetic oligonucleotide
  Sense strand starting at position 569 of SEQ ID NO: 1562612
ugugccauuccugagaacu

SEQ ID NO: 1759882 - RNA, 19 nt, Artificial Sequence
  Description of Artificial Sequence: Synthetic oligonucleotide
  Antisense strand to SEQ ID NO: 1759881
aguucucaggaauggcaca

SEQ ID NO: 1759883 - RNA, 19 nt, Artificial Sequence
  Description of Artificial Sequence: Synthetic oligonucleotide
  Sense strand starting at position 601 of SEQ ID NO: 1562612
ugcccaaauuaaguagaaa

SEQ ID NO: 1759884 - RNA, 19 nt, Artificial Sequence
  Description of Artificial Sequence: Synthetic oligonucleotide
  Antisense strand to SEQ ID NO: 1759883
uuucuacuuaauuugggca

SEQ ID NO: 1759885 - RNA, 19 nt, Artificial Sequence
  Description of Artificial Sequence: Synthetic oligonucleotide
  Sense strand starting at position 642 of SEQ ID NO: 1562612
ggaggcuacuaacuugaga

SEQ ID NO: 1759886 - RNA, 19 nt, Artificial Sequence
  Description of Artificial Sequence: Synthetic oligonucleotide
  Antisense strand to SEQ ID NO: 1759885
ucucaaguuaguagccucc

SEQ ID NO: 1759887 - RNA, 19 nt, Artificial Sequence
  Description of Artificial Sequence: Synthetic oligonucleotide
  Sense strand starting at position 676 of SEQ ID NO: 1562612
ccagaaaccucagggauac

SEQ ID NO: 1759888 - RNA, 19 nt, Artificial Sequence
  Description of Artificial Sequence: Synthetic oligonucleotide
  Antisense strand to SEQ ID NO: 1759887
guaucccugagguuucugg

SEQ ID NO: 1759889 - RNA, 19 nt, Artificial Sequence
  Description of Artificial Sequence: Synthetic oligonucleotide
  Sense strand starting at position 806 of SEQ ID NO: 1562612
cuuggcuucuagcuagaca

SEQ ID NO: 1759890 - RNA, 19 nt, Artificial Sequence
  Description of Artificial Sequence: Synthetic oligonucleotide
  Antisense strand to SEQ ID NO: 1759889
ugucuagcuagaagccaag

SEQ ID NO: 1759891 - RNA, 19 nt, Artificial Sequence
  Description of Artificial Sequence: Synthetic oligonucleotide
  Sense strand starting at position 817 of SEQ ID NO: 1562612
gcuagacaacccuggcauu

SEQ ID NO: 1759892 - RNA, 19 nt, Artificial Sequence
  Description of Artificial Sequence: Synthetic oligonucleotide
  Antisense strand to SEQ ID NO: 1759891
aaugccaggguugucuagc

SEQ ID NO: 1759893 - RNA, 19 nt, Artificial Sequence
  Description of Artificial Sequence: Synthetic oligonucleotide
  Sense strand starting at position 905 of SEQ ID NO: 1562612
gacagauguuaagaacuuc

SEQ ID NO: 1759894 - RNA, 19 nt, Artificial Sequence
  Description of Artificial Sequence: Synthetic oligonucleotide
  Antisense strand to SEQ ID NO: 1759893
gaaguucuuaacaucuguc

SEQ ID NO: 1759895 - RNA, 19 nt, Artificial Sequence
  Description of Artificial Sequence: Synthetic oligonucleotide
  Sense strand starting at position 1014 of SEQ ID NO: 1562612
cacaguaaacacugcguua

SEQ ID NO: 1759896 - RNA, 19 nt, Artificial Sequence
  Description of Artificial Sequence: Synthetic oligonucleotide
  Antisense strand to SEQ ID NO: 1759895
uaacgcaguguuuacugug

SEQ ID NO: 1759897 - RNA, 19 nt, Artificial Sequence
  Description of Artificial Sequence: Synthetic oligonucleotide
  Sense strand starting at position 1016 of SEQ ID NO: 1562612
caguaaacacugcguuaaa

SEQ ID NO: 1759898 - RNA, 19 nt, Artificial Sequence
  Description of Artificial Sequence: Synthetic oligonucleotide
  Antisense strand to SEQ ID NO: 1759897
uuuaacgcaguguuuacug

SEQ ID NO: 1759899 - RNA, 19 nt, Artificial Sequence
  Description of Artificial Sequence: Synthetic oligonucleotide
  Sense strand starting at position 1098 of SEQ ID NO: 1562612
ccacgaguggcucauucua

SEQ ID NO: 1759900 - RNA, 19 nt, Artificial Sequence
  Description of Artificial Sequence: Synthetic oligonucleotide
  Antisense strand to SEQ ID NO: 1759899
uagaaugagccacucgugg

SEQ ID NO: 1759901 - RNA, 19 nt, Artificial Sequence
  Description of Artificial Sequence: Synthetic oligonucleotide
  Sense strand starting at position 1136 of SEQ ID NO: 1562612
gcuugaaagcgaucgcauu

SEQ ID NO: 1759902 - RNA, 19 nt, Artificial Sequence
  Description of Artificial Sequence: Synthetic oligonucleotide
  Antisense strand to SEQ ID NO: 1759901
aaugcgaucgcuuucaagc

SEQ ID NO: 1759903 - RNA, 19 nt, Artificial Sequence
  Description of Artificial Sequence: Synthetic oligonucleotide
  Sense strand starting at position 1137 of SEQ ID NO: 1562612
cuugaaagcgaucgcauuu

SEQ ID NO: 1759904 - RNA, 19 nt, Artificial Sequence
  Description of Artificial Sequence: Synthetic oligonucleotide
  Antisense strand to SEQ ID NO: 1759903
aaaugcgaucgcuuucaag

SEQ ID NO: 1759905 - RNA, 19 nt, Artificial Sequence
  Description of Artificial Sequence: Synthetic oligonucleotide
  Sense strand starting at position 2160 of SEQ ID NO: 1562612
gcccguuggcuuguuuaca

SEQ ID NO: 1759906 - RNA, 19 nt, Artificial Sequence
  Description of Artificial Sequence: Synthetic oligonucleotide
  Antisense strand to SEQ ID NO: 1759905
uguaaacaagccaacgggc

SEQ ID NO: 1759907 - RNA, 19 nt, Artificial Sequence
  Description of Artificial Sequence: Synthetic oligonucleotide
  Sense strand starting at position 2325 of SEQ ID NO: 1562612
gccuccguucgagcucaaa

SEQ ID NO: 1759908 - RNA, 19 nt, Artificial Sequence
  Description of Artificial Sequence: Synthetic oligonucleotide
  Antisense strand to SEQ ID NO: 1759907
uuugagcucgaacggaggc

SEQ ID NO: 1759909 - RNA, 19 nt, Artificial Sequence
  Description of Artificial Sequence: Synthetic oligonucleotide
  Sense strand starting at position 2327 of SEQ ID NO: 1562612
cuccguucgagcucaaagu

SEQ ID NO: 1759910 - RNA, 19 nt, Artificial Sequence
  Description of Artificial Sequence: Synthetic oligonucleotide
  Antisense strand to SEQ ID NO: 1759909
acuuugagcucgaacggag

SEQ ID NO: 1759911 - RNA, 19 nt, Artificial Sequence
  Description of Artificial Sequence: Synthetic oligonucleotide
  Sense strand starting at position 2328 of SEQ ID NO: 1562612
uccguucgagcucaaagua

SEQ ID NO: 1759912 - RNA, 19 nt, Artificial Sequence
  Description of Artificial Sequence: Synthetic oligonucleotide
  Antisense strand to SEQ ID NO: 1759911
uacuuugagcucgaacgga

SEQ ID NO: 1759913 - RNA, 19 nt, Artificial Sequence
  Description of Artificial Sequence: Synthetic oligonucleotide
  Sense strand starting at position 2415 of SEQ ID NO: 1562612
cuuaaaugacagcgugaag

SEQ ID NO: 1759914 - RNA, 19 nt, Artificial Sequence
  Description of Artificial Sequence: Synthetic oligonucleotide
  Antisense strand to SEQ ID NO: 1759913
cuucacgcugucauuuaag

SEQ ID NO: 1759915 - RNA, 19 nt, Artificial Sequence
  Description of Artificial Sequence: Synthetic oligonucleotide
  Sense strand starting at position 2463 of SEQ ID NO: 1562612
cuggcagcuuugggauuua

SEQ ID NO: 1759916 - RNA, 19 nt, Artificial Sequence
  Description of Artificial Sequence: Synthetic oligonucleotide
  Antisense strand to SEQ ID NO: 1759915
uaaaucccaaagcugccag

SEQ ID NO: 1759917 - RNA, 19 nt, Artificial Sequence
  Description of Artificial Sequence: Synthetic oligonucleotide
  Sense strand starting at position 2544 of SEQ ID NO: 1562612
uccagugauccauacccga

SEQ ID NO: 1759918 - RNA, 19 nt, Artificial Sequence
  Description of Artificial Sequence: Synthetic oligonucleotide
  Antisense strand to SEQ ID NO: 1759917
ucggguauggaucacugga

SEQ ID NO: 1759919 - RNA, 19 nt, Artificial Sequence
  Description of Artificial Sequence: Synthetic oligonucleotide
  Sense strand starting at position 2857 of SEQ ID NO: 1562612
cagagcgcuccuggaauaa

SEQ ID NO: 1759920 - RNA, 19 nt, Artificial Sequence
  Description of Artificial Sequence: Synthetic oligonucleotide
  Antisense strand to SEQ ID NO: 1759919
uuauuccaggagcgcucug

SEQ ID NO: 1759921 - RNA, 19 nt, Artificial Sequence
  Description of Artificial Sequence: Synthetic oligonucleotide
  Sense strand starting at position 2861 of SEQ ID NO: 1562612
gcgcuccuggaauaacaaa

SEQ ID NO: 1759922 - RNA, 19 nt, Artificial Sequence
  Description of Artificial Sequence: Synthetic oligonucleotide
  Antisense strand to SEQ ID NO: 1759921
uuuguuauuccaggagcgc

SEQ ID NO: 1759923 - RNA, 19 nt, Artificial Sequence
  Description of Artificial Sequence: Synthetic oligonucleotide
  Sense strand starting at position 2899 of SEQ ID NO: 1562612
cggcaaagcuuguuuacuu

SEQ ID NO: 1759924 - RNA, 19 nt, Artificial Sequence
  Description of Artificial Sequence: Synthetic oligonucleotide
  Antisense strand to SEQ ID NO: 1759923
aaguaaacaagcuuugccg

SEQ ID NO: 1759925 - RNA, 19 nt, Artificial Sequence
  Description of Artificial Sequence: Synthetic oligonucleotide
  Sense strand starting at position 2910 of SEQ ID NO: 1562612
guuuacuucugucuugauc

SEQ ID NO: 1759926 - RNA, 19 nt, Artificial Sequence
  Description of Artificial Sequence: Synthetic oligonucleotide
  Antisense strand to SEQ ID NO: 1759925
gaucaagacagaaguaaac

SEQ ID NO: 1759927 - RNA, 19 nt, Artificial Sequence
  Description of Artificial Sequence: Synthetic oligonucleotide
  Sense strand starting at position 3049 of SEQ ID NO: 1562612
auguucucaucugugaaau

SEQ ID NO: 1759928 - RNA, 19 nt, Artificial Sequence
  Description of Artificial Sequence: Synthetic oligonucleotide
  Antisense strand to SEQ ID NO: 1759927
auuucacagaugagaacau

SEQ ID NO: 1759929 - RNA, 19 nt, Artificial Sequence
  Description of Artificial Sequence: Synthetic oligonucleotide
  Sense strand starting at position 3112 of SEQ ID NO: 1562612
ggagguaaagugugauaaa

SEQ ID NO: 1759930 - RNA, 19 nt, Artificial Sequence
  Description of Artificial Sequence: Synthetic oligonucleotide
  Antisense strand to SEQ ID NO: 1759929
uuuaucacacuuuaccucc

SEQ ID NO: 1759931 - RNA, 19 nt, Artificial Sequence
  Description of Artificial Sequence: Synthetic oligonucleotide
  Sense strand starting at position 3113 of SEQ ID NO: 1562612
gagguaaagugugauaaag

SEQ ID NO: 1759932 - RNA, 19 nt, Artificial Sequence
  Description of Artificial Sequence: Synthetic oligonucleotide
  Antisense strand to SEQ ID NO: 1759931
cuuuaucacacuuuaccuc

SEQ ID NO: 1759933 - RNA, 19 nt, Artificial Sequence
  Description of Artificial Sequence: Synthetic oligonucleotide
  Sense strand starting at position 3687 of SEQ ID NO: 1562612
gucucauggguccgaaaga

SEQ ID NO: 1759934 - RNA, 19 nt, Artificial Sequence
  Description of Artificial Sequence: Synthetic oligonucleotide
  Antisense strand to SEQ ID NO: 1759933
ucuuucggacccaugagac

SEQ ID NO: 1759935 - RNA, 19 nt, Artificial Sequence
  Description of Artificial Sequence: Synthetic oligonucleotide
  Sense strand starting at position 3696 of SEQ ID NO: 1562612
guccgaaagaccugauaua

SEQ ID NO: 1759936 - RNA, 19 nt, Artificial Sequence
  Description of Artificial Sequence: Synthetic oligonucleotide
  Antisense strand to SEQ ID NO: 1759935
uauaucaggucuuucggac

SEQ ID NO: 1759937 - RNA, 19 nt, Artificial Sequence
  Description of Artificial Sequence: Synthetic oligonucleotide
  Sense strand starting at position 3705 of SEQ ID NO: 1562612
accugauauaugugagaug

SEQ ID NO: 1759938 - RNA, 19 nt, Artificial Sequence
  Description of Artificial Sequence: Synthetic oligonucleotide
  Antisense strand to SEQ ID NO: 1759937
caucucacauauaucaggu

SEQ ID NO: 1759939 - RNA, 19 nt, Artificial Sequence
  Description of Artificial Sequence: Synthetic oligonucleotide
  Sense strand starting at position 3714 of SEQ ID NO: 1562612
augugagaugcuugcagag

SEQ ID NO: 1759940 - RNA, 19 nt, Artificial Sequence
  Description of Artificial Sequence: Synthetic oligonucleotide
  Antisense strand to SEQ ID NO: 1759939
cucugcaagcaucucacau

SEQ ID NO: 1759941 - RNA, 19 nt, Artificial Sequence
  Description of Artificial Sequence: Synthetic oligonucleotide
  Sense strand starting at position 3766 of SEQ ID NO: 1562612
guaggagauguucaguaaa

SEQ ID NO: 1759942 - RNA, 19 nt, Artificial Sequence
  Description of Artificial Sequence: Synthetic oligonucleotide
  Antisense strand to SEQ ID NO: 1759941
uuuacugaacaucuccuac

SEQ ID NO: 1759943 - RNA, 19 nt, Artificial Sequence
  Description of Artificial Sequence: Synthetic oligonucleotide
  Sense strand starting at position 3851 of SEQ ID NO: 1562612
gugcaaauacaguacuuau

SEQ ID NO: 1759944 - RNA, 19 nt, Artificial Sequence
  Description of Artificial Sequence: Synthetic oligonucleotide
  Antisense strand to SEQ ID NO: 1759943
auaaguacuguauuugcac

SEQ ID NO: 1759945 - RNA, 19 nt, Artificial Sequence
  Description of Artificial Sequence: Synthetic oligonucleotide
  Sense strand starting at position 3911 of SEQ ID NO: 1562612
ggaagagauggcugggcau

SEQ ID NO: 1759946 - RNA, 19 nt, Artificial Sequence
  Description of Artificial Sequence: Synthetic oligonucleotide
  Antisense strand to SEQ ID NO: 1759945
augcccagccaucucuucc

SEQ ID NO: 1759947 - RNA, 19 nt, Artificial Sequence
  Description of Artificial Sequence: Synthetic oligonucleotide
  Sense strand starting at position 238 of SEQ ID NO: 1562613
cagcauuauccagagcuug

SEQ ID NO: 1759948 - RNA, 19 nt, Artificial Sequence
  Description of Artificial Sequence: Synthetic oligonucleotide
  Antisense strand to SEQ ID NO: 1759947
caagcucuggauaaugcug

SEQ ID NO: 1759949 - RNA, 19 nt, Artificial Sequence
  Description of Artificial Sequence: Synthetic oligonucleotide
  Sense strand starting at position 340 of SEQ ID NO: 1562613
ugcugugagacuugggaaa

SEQ ID NO: 1759950 - RNA, 19 nt, Artificial Sequence
  Description of Artificial Sequence: Synthetic oligonucleotide
  Antisense strand to SEQ ID NO: 1759949
uuucccaagucucacagca

SEQ ID NO: 1759951 - RNA, 19 nt, Artificial Sequence
  Description of Artificial Sequence: Synthetic oligonucleotide
  Sense strand starting at position 540 of SEQ ID NO: 1562613
gauuauagcccauggauga

SEQ ID NO: 1759952 - RNA, 19 nt, Artificial Sequence
  Description of Artificial Sequence: Synthetic oligonucleotide
  Antisense strand to SEQ ID NO: 1759951
ucauccaugggcuauaauc

SEQ ID NO: 1759953 - RNA, 19 nt, Artificial Sequence
  Description of Artificial Sequence: Synthetic oligonucleotide
  Sense strand starting at position 541 of SEQ ID NO: 1562613
auuauagcccauggaugau

SEQ ID NO: 1759954 - RNA, 19 nt, Artificial Sequence
  Description of Artificial Sequence: Synthetic oligonucleotide
  Antisense strand to SEQ ID NO: 1759953
aucauccaugggcuauaau

SEQ ID NO: 1759955 - RNA, 19 nt, Artificial Sequence
  Description of Artificial Sequence: Synthetic oligonucleotide
  Sense strand starting at position 687 of SEQ ID NO: 1562613
cagccauguggauagacuu

SEQ ID NO: 1759956 - RNA, 19 nt, Artificial Sequence
  Description of Artificial Sequence: Synthetic oligonucleotide
  Antisense strand to SEQ ID NO: 1759955
aagucuauccacauggcug

SEQ ID NO: 1759957 - RNA, 19 nt, Artificial Sequence
  Description of Artificial Sequence: Synthetic oligonucleotide
  Sense strand starting at position 777 of SEQ ID NO: 1562613
agauaucuguuucugauau

SEQ ID NO: 1759958 - RNA, 19 nt, Artificial Sequence
  Description of Artificial Sequence: Synthetic oligonucleotide
  Antisense strand to SEQ ID NO: 1759957
auaucagaaacagauaucu

SEQ ID NO: 1759959 - RNA, 19 nt, Artificial Sequence
  Description of Artificial Sequence: Synthetic oligonucleotide
  Sense strand starting at position 790 of SEQ ID NO: 1562613
ugauauguauuucuuugca

SEQ ID NO: 1759960 - RNA, 19 nt, Artificial Sequence
  Description of Artificial Sequence: Synthetic oligonucleotide
  Antisense strand to SEQ ID NO: 1759959
ugcaaagaaauacauauca

SEQ ID NO: 1759961 - RNA, 19 nt, Artificial Sequence
  Description of Artificial Sequence: Synthetic oligonucleotide
  Sense strand starting at position 811 of SEQ ID NO: 1562613
ucagcacaucaguauagua

SEQ ID NO: 1759962 - RNA, 19 nt, Artificial Sequence
  Description of Artificial Sequence: Synthetic oligonucleotide
  Antisense strand to SEQ ID NO: 1759961
uacuauacugaugugcuga

SEQ ID NO: 1759963 - RNA, 19 nt, Artificial Sequence
  Description of Artificial Sequence: Synthetic oligonucleotide
  Sense strand starting at position 868 of SEQ ID NO: 1562613
ccugguacguauuucuaca

SEQ ID NO: 1759964 - RNA, 19 nt, Artificial Sequence
  Description of Artificial Sequence: Synthetic oligonucleotide
  Antisense strand to SEQ ID NO: 1759963
uguagaaauacguaccagg

SEQ ID NO: 1759965 - RNA, 19 nt, Artificial Sequence
  Description of Artificial Sequence: Synthetic oligonucleotide
  Sense strand starting at position 929 of SEQ ID NO: 1562613
uuagaucuccugcacuaga

SEQ ID NO: 1759966 - RNA, 19 nt, Artificial Sequence
  Description of Artificial Sequence: Synthetic oligonucleotide
  Antisense strand to SEQ ID NO: 1759965
ucuagugcaggagaucuaa

SEQ ID NO: 1759967 - RNA, 19 nt, Artificial Sequence
  Description of Artificial Sequence: Synthetic oligonucleotide
  Sense strand starting at position 969 of SEQ ID NO: 1562613
aggaguugucucuaaaucc

SEQ ID NO: 1759968 - RNA, 19 nt, Artificial Sequence
  Description of Artificial Sequence: Synthetic oligonucleotide
  Antisense strand to SEQ ID NO: 1759967
ggauuuagagacaacuccu

SEQ ID NO: 1759969 - RNA, 19 nt, Artificial Sequence
  Description of Artificial Sequence: Synthetic oligonucleotide
  Sense strand starting at position 1181 of SEQ ID NO: 1562613
gcuuuaguuaaagaggacu

SEQ ID NO: 1759970 - RNA, 19 nt, Artificial Sequence
  Description of Artificial Sequence: Synthetic oligonucleotide
  Antisense strand to SEQ ID NO: 1759969
aguccucuuuaacuaaagc

SEQ ID NO: 1759971 - RNA, 19 nt, Artificial Sequence
  Description of Artificial Sequence: Synthetic oligonucleotide
  Sense strand starting at position 1198 of SEQ ID NO: 1562613
cugagaaagcuccaucauc

SEQ ID NO: 1759972 - RNA, 19 nt, Artificial Sequence
  Description of Artificial Sequence: Synthetic oligonucleotide
  Antisense strand to SEQ ID NO: 1759971
gaugauggagcuuucucag

SEQ ID NO: 1759973 - RNA, 19 nt, Artificial Sequence
  Description of Artificial Sequence: Synthetic oligonucleotide
  Sense strand starting at position 1262 of SEQ ID NO: 1562613
agguccauauacuuugauu

SEQ ID NO: 1759974 - RNA, 19 nt, Artificial Sequence
  Description of Artificial Sequence: Synthetic oligonucleotide
  Antisense strand to SEQ ID NO: 1759973
aaucaaaguauauggaccu

SEQ ID NO: 1759975 - RNA, 19 nt, Artificial Sequence
  Description of Artificial Sequence: Synthetic oligonucleotide
  Sense strand starting at position 1317 of SEQ ID NO: 1562613
cucaucuuagcccaaggaa

SEQ ID NO: 1759976 - RNA, 19 nt, Artificial Sequence
  Description of Artificial Sequence: Synthetic oligonucleotide
  Antisense strand to SEQ ID NO: 1759975
uuccuugggcuaagaugag

SEQ ID NO: 1759977 - RNA, 19 nt, Artificial Sequence
  Description of Artificial Sequence: Synthetic oligonucleotide
  Sense strand starting at position 1358 of SEQ ID NO: 1562613
cucccuaguguuuauaaau

SEQ ID NO: 1759978 - RNA, 19 nt, Artificial Sequence
  Description of Artificial Sequence: Synthetic oligonucleotide
  Antisense strand to SEQ ID NO: 1759977
auuuauaaacacuagggag

SEQ ID NO: 1759979 - RNA, 19 nt, Artificial Sequence
  Description of Artificial Sequence: Synthetic oligonucleotide
  Sense strand starting at position 1444 of SEQ ID NO: 1562613
aggagccucuccucagaaa

SEQ ID NO: 1759980 - RNA, 19 nt, Artificial Sequence
  Description of Artificial Sequence: Synthetic oligonucleotide
  Antisense strand to SEQ ID NO: 1759979
uuucugaggagaggcuccu

SEQ ID NO: 1759981 - RNA, 19 nt, Artificial Sequence
  Description of Artificial Sequence: Synthetic oligonucleotide
  Sense strand starting at position 1465 of SEQ ID NO: 1562613
ugcagucacccauauuaca

SEQ ID NO: 1759982 - RNA, 19 nt, Artificial Sequence
  Description of Artificial Sequence: Synthetic oligonucleotide
  Antisense strand to SEQ ID NO: 1759981
uguaauaugggugacugca

SEQ ID NO: 1759983 - RNA, 19 nt, Artificial Sequence
  Description of Artificial Sequence: Synthetic oligonucleotide
  Sense strand starting at position 1575 of SEQ ID NO: 1562613
uccuguauccuacaaaugu

SEQ ID NO: 1759984 - RNA, 19 nt, Artificial Sequence
  Description of Artificial Sequence: Synthetic oligonucleotide
  Antisense strand to SEQ ID NO: 1759983
acauuuguaggauacagga

SEQ ID NO: 1759985 - RNA, 19 nt, Artificial Sequence
  Description of Artificial Sequence: Synthetic oligonucleotide
  Sense strand starting at position 1787 of SEQ ID NO: 1562613
ggagacagcccauguuaug

SEQ ID NO: 1759986 - RNA, 19 nt, Artificial Sequence
  Description of Artificial Sequence: Synthetic oligonucleotide
  Antisense strand to SEQ ID NO: 1759985
cauaacaugggcugucucc

SEQ ID NO: 1759987 - RNA, 19 nt, Artificial Sequence
  Description of Artificial Sequence: Synthetic oligonucleotide
  Sense strand starting at position 1907 of SEQ ID NO: 1562613
ccuugauuccaggguaaau

SEQ ID NO: 1759988 - RNA, 19 nt, Artificial Sequence
  Description of Artificial Sequence: Synthetic oligonucleotide
  Antisense strand to SEQ ID NO: 1759987
auuuacccuggaaucaagg

SEQ ID NO: 1759989 - RNA, 19 nt, Artificial Sequence
  Description of Artificial Sequence: Synthetic oligonucleotide
  Sense strand starting at position 1918 of SEQ ID NO: 1562613
ggguaaauggucugagagg

SEQ ID NO: 1759990 - RNA, 19 nt, Artificial Sequence
  Description of Artificial Sequence: Synthetic oligonucleotide
  Antisense strand to SEQ ID NO: 1759989
ccucucagaccauuuaccc

SEQ ID NO: 1759991 - RNA, 19 nt, Artificial Sequence
  Description of Artificial Sequence: Synthetic oligonucleotide
  Sense strand starting at position 1974 of SEQ ID NO: 1562613
gaggacugggauugucuuu

SEQ ID NO: 1759992 - RNA, 19 nt, Artificial Sequence
  Description of Artificial Sequence: Synthetic oligonucleotide
  Antisense strand to SEQ ID NO: 1759991
aaagacaaucccaguccuc

SEQ ID NO: 1759993 - RNA, 19 nt, Artificial Sequence
  Description of Artificial Sequence: Synthetic oligonucleotide
  Sense strand starting at position 1981 of SEQ ID NO: 1562613
gggauugucuuuguacaca

SEQ ID NO: 1759994 - RNA, 19 nt, Artificial Sequence
  Description of Artificial Sequence: Synthetic oligonucleotide
  Antisense strand to SEQ ID NO: 1759993
uguguacaaagacaauccc

SEQ ID NO: 1759995 - RNA, 19 nt, Artificial Sequence
  Description of Artificial Sequence: Synthetic oligonucleotide
  Sense strand starting at position 2337 of SEQ ID NO: 1562613
acuaguagugaauaugcau

SEQ ID NO: 1759996 - RNA, 19 nt, Artificial Sequence
  Description of Artificial Sequence: Synthetic oligonucleotide
  Antisense strand to SEQ ID NO: 1759995
augcauauucacuacuagu

SEQ ID NO: 1759997 - RNA, 19 nt, Artificial Sequence
  Description of Artificial Sequence: Synthetic oligonucleotide
  Sense strand starting at position 2461 of SEQ ID NO: 1562613
agugcauaugcguccauua

SEQ ID NO: 1759998 - RNA, 19 nt, Artificial Sequence
  Description of Artificial Sequence: Synthetic oligonucleotide
  Antisense strand to SEQ ID NO: 1759997
uaauggacgcauaugcacu

SEQ ID NO: 1759999 - RNA, 19 nt, Artificial Sequence
  Description of Artificial Sequence: Synthetic oligonucleotide
  Sense strand starting at position 2466 of SEQ ID NO: 1562613
auaugcguccauuagaaca

SEQ ID NO: 1760000 - RNA, 19 nt, Artificial Sequence
  Description of Artificial Sequence: Synthetic oligonucleotide
  Antisense strand to SEQ ID NO: 1759999
uguucuaauggacgcauau

SEQ ID NO: 1760001 - RNA, 19 nt, Artificial Sequence
  Description of Artificial Sequence: Synthetic oligonucleotide
  Sense strand starting at position 2494 of SEQ ID NO: 1562613
cgauguugucuguuugcag

SEQ ID NO: 1760002 - RNA, 19 nt, Artificial Sequence
  Description of Artificial Sequence: Synthetic oligonucleotide
  Antisense strand to SEQ ID NO: 1760001
cugcaaacagacaacaucg

SEQ ID NO: 1760003 - RNA, 19 nt, Artificial Sequence
  Description of Artificial Sequence: Synthetic oligonucleotide
  Sense strand starting at position 2763 of SEQ ID NO: 1562613
ggccuuguagcugauggaa

SEQ ID NO: 1760004 - RNA, 19 nt, Artificial Sequence
  Description of Artificial Sequence: Synthetic oligonucleotide
  Antisense strand to SEQ ID NO: 1760003
uuccaucagcuacaaggcc

SEQ ID NO: 1760005 - RNA, 19 nt, Artificial Sequence
  Description of Artificial Sequence: Synthetic oligonucleotide
  Sense strand starting at position 2897 of SEQ ID NO: 1562613
acaccaggaucuuuguauu

SEQ ID NO: 1760006 - RNA, 19 nt, Artificial Sequence
  Description of Artificial Sequence: Synthetic oligonucleotide
  Antisense strand to SEQ ID NO: 1760005
aauacaaagauccuggugu

SEQ ID NO: 1760007 - RNA, 19 nt, Artificial Sequence
  Description of Artificial Sequence: Synthetic oligonucleotide
  Sense strand starting at position 3106 of SEQ ID NO: 1562613
guaguauccaguuacugau

SEQ ID NO: 1760008 - RNA, 19 nt, Artificial Sequence
  Description of Artificial Sequence: Synthetic oligonucleotide
  Antisense strand to SEQ ID NO: 1760007
aucaguaacuggauacuac

SEQ ID NO: 1760009 - RNA, 19 nt, Artificial Sequence
  Description of Artificial Sequence: Synthetic oligonucleotide
  Sense strand starting at position 3195 of SEQ ID NO: 1562613
uugaauagugacuggcaca

SEQ ID NO: 1760010 - RNA, 19 nt, Artificial Sequence
  Description of Artificial Sequence: Synthetic oligonucleotide
  Antisense strand to SEQ ID NO: 1760009
ugugccagucacuauucaa

SEQ ID NO: 1760011 - RNA, 19 nt, Artificial Sequence
  Description of Artificial Sequence: Synthetic oligonucleotide
  Sense strand starting at position 3412 of SEQ ID NO: 1562613
cuucuauaacucuggaguc

SEQ ID NO: 1760012 - RNA, 19 nt, Artificial Sequence
  Description of Artificial Sequence: Synthetic oligonucleotide
  Antisense strand to SEQ ID NO: 1760011
gacuccagaguuauagaag

SEQ ID NO: 1760013 - RNA, 19 nt, Artificial Sequence
  Description of Artificial Sequence: Synthetic oligonucleotide
  Sense strand starting at position 3414 of SEQ ID NO: 1562613
ucuauaacucuggagucca

SEQ ID NO: 1760014 - RNA, 19 nt, Artificial Sequence
  Description of Artificial Sequence: Synthetic oligonucleotide
  Antisense strand to SEQ ID NO: 1760013
uggacuccagaguuauaga

SEQ ID NO: 1760015 - RNA, 19 nt, Artificial Sequence
  Description of Artificial Sequence: Synthetic oligonucleotide
  Sense strand starting at position 3422 of SEQ ID NO: 1562613
ucuggaguccaguacaaua

SEQ ID NO: 1760016 - RNA, 19 nt, Artificial Sequence
  Description of Artificial Sequence: Synthetic oligonucleotide
  Antisense strand to SEQ ID NO: 1760015
uauuguacuggacuccaga

SEQ ID NO: 1760017 - RNA, 19 nt, Artificial Sequence
  Description of Artificial Sequence: Synthetic oligonucleotide
  Sense strand starting at position 3531 of SEQ ID NO: 1562613
ccauacuuggcauacauga

SEQ ID NO: 1760018 - RNA, 19 nt, Artificial Sequence
  Description of Artificial Sequence: Synthetic oligonucleotide
  Antisense strand to SEQ ID NO: 1760017
ucauguaugccaaguaugg

SEQ ID NO: 1760019 - RNA, 19 nt, Artificial Sequence
  Description of Artificial Sequence: Synthetic oligonucleotide
  Sense strand starting at position 3539 of SEQ ID NO: 1562613
ggcauacaugaaugauuaa

SEQ ID NO: 1760020 - RNA, 19 nt, Artificial Sequence
  Description of Artificial Sequence: Synthetic oligonucleotide
  Antisense strand to SEQ ID NO: 1760019
uuaaucauucauguaugcc

SEQ ID NO: 1760021 - RNA, 19 nt, Artificial Sequence
  Description of Artificial Sequence: Synthetic oligonucleotide
  Sense strand starting at position 3636 of SEQ ID NO: 1562613
gcagcaguaauuuggguuu

SEQ ID NO: 1760022 - RNA, 19 nt, Artificial Sequence
  Description of Artificial Sequence: Synthetic oligonucleotide
  Antisense strand to SEQ ID NO: 1760021
aaacccaaauuacugcugc

SEQ ID NO: 1760023 - RNA, 19 nt, Artificial Sequence
  Description of Artificial Sequence: Synthetic oligonucleotide
  Sense strand starting at position 3639 of SEQ ID NO: 1562613
gcaguaauuuggguuucuu

SEQ ID NO: 1760024 - RNA, 19 nt, Artificial Sequence
  Description of Artificial Sequence: Synthetic oligonucleotide
  Antisense strand to SEQ ID NO: 1760023
aagaaacccaaauuacugc

SEQ ID NO: 1760025 - RNA, 19 nt, Artificial Sequence
  Description of Artificial Sequence: Synthetic oligonucleotide
  Sense strand starting at position 3713 of SEQ ID NO: 1562613
uacaaucugggugagcuau

SEQ ID NO: 1760026 - RNA, 19 nt, Artificial Sequence
  Description of Artificial Sequence: Synthetic oligonucleotide
  Antisense strand to SEQ ID NO: 1760025
auagcucacccagauugua

SEQ ID NO: 1760027 - RNA, 19 nt, Artificial Sequence
  Description of Artificial Sequence: Synthetic oligonucleotide
  Sense strand starting at position 121 of SEQ ID NO: 1562614
uggacucaaugcuuggaca

SEQ ID NO: 1760028 - RNA, 19 nt, Artificial Sequence
  Description of Artificial Sequence: Synthetic oligonucleotide
  Antisense strand to SEQ ID NO: 1760027
uguccaagcauugagucca

SEQ ID NO: 1760029 - RNA, 19 nt, Artificial Sequence
  Description of Artificial Sequence: Synthetic oligonucleotide
  Sense strand starting at position 201 of SEQ ID NO: 1562614
gccagagcuuucuuagccu

SEQ ID NO: 1760030 - RNA, 19 nt, Artificial Sequence
  Description of Artificial Sequence: Synthetic oligonucleotide
  Antisense strand to SEQ ID NO: 1760029
aggcuaagaaagcucuggc

SEQ ID NO: 1760031 - RNA, 19 nt, Artificial Sequence
  Description of Artificial Sequence: Synthetic oligonucleotide
  Sense strand starting at position 346 of SEQ ID NO: 1562614
gcguguggacaucacagua

SEQ ID NO: 1760032 - RNA, 19 nt, Artificial Sequence
  Description of Artificial Sequence: Synthetic oligonucleotide
  Antisense strand to SEQ ID NO: 1760031
uacugugauguccacacgc

SEQ ID NO: 1760033 - RNA, 19 nt, Artificial Sequence
  Description of Artificial Sequence: Synthetic oligonucleotide
  Sense strand starting at position 368 of SEQ ID NO: 1562614
ggucuuucugacggagaag

SEQ ID NO: 1760034 - RNA, 19 nt, Artificial Sequence
  Description of Artificial Sequence: Synthetic oligonucleotide
  Antisense strand to SEQ ID NO: 1760033
cuucuccgucagaaagacc

SEQ ID NO: 1760035 - RNA, 19 nt, Artificial Sequence
  Description of Artificial Sequence: Synthetic oligonucleotide
  Sense strand starting at position 460 of SEQ ID NO: 1562614
cauggaaugcuguguagca

SEQ ID NO: 1760036 - RNA, 19 nt, Artificial Sequence
  Description of Artificial Sequence: Synthetic oligonucleotide
  Antisense strand to SEQ ID NO: 1760035
ugcuacacagcauuccaug

SEQ ID NO: 1760037 - RNA, 19 nt, Artificial Sequence
  Description of Artificial Sequence: Synthetic oligonucleotide
  Sense strand starting at position 510 of SEQ ID NO: 1562614
acgcccuucugcuuacaga

SEQ ID NO: 1760038 - RNA, 19 nt, Artificial Sequence
  Description of Artificial Sequence: Synthetic oligonucleotide
  Antisense strand to SEQ ID NO: 1760037
ucuguaagcagaagggcgu

SEQ ID NO: 1760039 - RNA, 19 nt, Artificial Sequence
  Description of Artificial Sequence: Synthetic oligonucleotide
  Sense strand starting at position 574 of SEQ ID NO: 1562614
caucgaugggcucgaugaa

SEQ ID NO: 1760040 - RNA, 19 nt, Artificial Sequence
  Description of Artificial Sequence: Synthetic oligonucleotide
  Antisense strand to SEQ ID NO: 1760039
uucaucgagcccaucgaug

SEQ ID NO: 1760041 - RNA, 19 nt, Artificial Sequence
  Description of Artificial Sequence: Synthetic oligonucleotide
  Sense strand starting at position 823 of SEQ ID NO: 1562614
ucacguugcuguucugaca

SEQ ID NO: 1760042 - RNA, 19 nt, Artificial Sequence
  Description of Artificial Sequence: Synthetic oligonucleotide
  Antisense strand to SEQ ID NO: 1760041
ugucagaacagcaacguga

SEQ ID NO: 1760043 - RNA, 19 nt, Artificial Sequence
  Description of Artificial Sequence: Synthetic oligonucleotide
  Sense strand starting at position 954 of SEQ ID NO: 1562614
ucaaacaugcucugcgaca

SEQ ID NO: 1760044 - RNA, 19 nt, Artificial Sequence
  Description of Artificial Sequence: Synthetic oligonucleotide
  Antisense strand to SEQ ID NO: 1760043
ugucgcagagcauguuuga

SEQ ID NO: 1760045 - RNA, 19 nt, Artificial Sequence
  Description of Artificial Sequence: Synthetic oligonucleotide
  Sense strand starting at position 1030 of SEQ ID NO: 1562614
ccuccucguccaugucaua

SEQ ID NO: 1760046 - RNA, 19 nt, Artificial Sequence
  Description of Artificial Sequence: Synthetic oligonucleotide
  Antisense strand to SEQ ID NO: 1760045
uaugacauggacgaggagg

SEQ ID NO: 1760047 - RNA, 19 nt, Artificial Sequence
  Description of Artificial Sequence: Synthetic oligonucleotide
  Sense strand starting at position 1073 of SEQ ID NO: 1562614
ggccgacuucucgaugaac

SEQ ID NO: 1760048 - RNA, 19 nt, Artificial Sequence
  Description of Artificial Sequence: Synthetic oligonucleotide
  Antisense strand to SEQ ID NO: 1760047
guucaucgagaagucggcc

SEQ ID NO: 1760049 - RNA, 19 nt, Artificial Sequence
  Description of Artificial Sequence: Synthetic oligonucleotide
  Sense strand starting at position 1075 of SEQ ID NO: 1562614
ccgacuucucgaugaacuu

SEQ ID NO: 1760050 - RNA, 19 nt, Artificial Sequence
  Description of Artificial Sequence: Synthetic oligonucleotide
  Antisense strand to SEQ ID NO: 1760049
aaguucaucgagaagucgg

SEQ ID NO: 1760051 - RNA, 19 nt, Artificial Sequence
  Description of Artificial Sequence: Synthetic oligonucleotide
  Sense strand starting at position 1076 of SEQ ID NO: 1562614
cgacuucucgaugaacuug

SEQ ID NO: 1760052 - RNA, 19 nt, Artificial Sequence
  Description of Artificial Sequence: Synthetic oligonucleotide
  Antisense strand to SEQ ID NO: 1760051
caaguucaucgagaagucg

SEQ ID NO: 1760053 - RNA, 19 nt, Artificial Sequence
  Description of Artificial Sequence: Synthetic oligonucleotide
  Sense strand starting at position 1081 of SEQ ID NO: 1562614
ucucgaugaacuuguagua

SEQ ID NO: 1760054 - RNA, 19 nt, Artificial Sequence
  Description of Artificial Sequence: Synthetic oligonucleotide
  Antisense strand to SEQ ID NO: 1760053
uacuacaaguucaucgaga

SEQ ID NO: 1760055 - RNA, 19 nt, Artificial Sequence
  Description of Artificial Sequence: Synthetic oligonucleotide
  Sense strand starting at position 1237 of SEQ ID NO: 1562614
ugugacgcuuaguucuuaa

SEQ ID NO: 1760056 - RNA, 19 nt, Artificial Sequence
  Description of Artificial Sequence: Synthetic oligonucleotide
  Antisense strand to SEQ ID NO: 1760055
uuaagaacuaagcgucaca

SEQ ID NO: 1760057 - RNA, 19 nt, Artificial Sequence
  Description of Artificial Sequence: Synthetic oligonucleotide
  Sense strand starting at position 1240 of SEQ ID NO: 1562614
gacgcuuaguucuuaagca

SEQ ID NO: 1760058 - RNA, 19 nt, Artificial Sequence
  Description of Artificial Sequence: Synthetic oligonucleotide
  Antisense strand to SEQ ID NO: 1760057
ugcuuaagaacuaagcguc

SEQ ID NO: 1760059 - RNA, 19 nt, Artificial Sequence
  Description of Artificial Sequence: Synthetic oligonucleotide
  Sense strand starting at position 1244 of SEQ ID NO: 1562614
cuuaguucuuaagcagaca

SEQ ID NO: 1760060 - RNA, 19 nt, Artificial Sequence
  Description of Artificial Sequence: Synthetic oligonucleotide
  Antisense strand to SEQ ID NO: 1760059
ugucugcuuaagaacuaag

SEQ ID NO: 1760061 - RNA, 19 nt, Artificial Sequence
  Description of Artificial Sequence: Synthetic oligonucleotide
  Sense strand starting at position 1506 of SEQ ID NO: 1562614
cuccucauuugguaaugau

SEQ ID NO: 1760062 - RNA, 19 nt, Artificial Sequence
  Description of Artificial Sequence: Synthetic oligonucleotide
  Antisense strand to SEQ ID NO: 1760061
aucauuaccaaaugaggag

SEQ ID NO: 1760063 - RNA, 19 nt, Artificial Sequence
  Description of Artificial Sequence: Synthetic oligonucleotide
  Sense strand starting at position 1549 of SEQ ID NO: 1562614
agguaauucuacgcagggu

SEQ ID NO: 1760064 - RNA, 19 nt, Artificial Sequence
  Description of Artificial Sequence: Synthetic oligonucleotide
  Antisense strand to SEQ ID NO: 1760063
acccugcguagaauuaccu

SEQ ID NO: 1760065 - RNA, 19 nt, Artificial Sequence
  Description of Artificial Sequence: Synthetic oligonucleotide
  Sense strand starting at position 2546 of SEQ ID NO: 1562614
gccugaagacuuggccaca

SEQ ID NO: 1760066 - RNA, 19 nt, Artificial Sequence
  Description of Artificial Sequence: Synthetic oligonucleotide
  Antisense strand to SEQ ID NO: 1760065
uguggccaagucuucaggc

SEQ ID NO: 1760067 - RNA, 19 nt, Artificial Sequence
  Description of Artificial Sequence: Synthetic oligonucleotide
  Sense strand starting at position 2916 of SEQ ID NO: 1562614
gcagccuuacccugaucua

SEQ ID NO: 1760068 - RNA, 19 nt, Artificial Sequence
  Description of Artificial Sequence: Synthetic oligonucleotide
  Antisense strand to SEQ ID NO: 1760067
uagaucaggguaaggcugc

SEQ ID NO: 1760069 - RNA, 19 nt, Artificial Sequence
  Description of Artificial Sequence: Synthetic oligonucleotide
  Sense strand starting at position 2919 of SEQ ID NO: 1562614
gccuuacccugaucuauug

SEQ ID NO: 1760070 - RNA, 19 nt, Artificial Sequence
  Description of Artificial Sequence: Synthetic oligonucleotide
  Antisense strand to SEQ ID NO: 1760069
caauagaucaggguaaggc

SEQ ID NO: 1760071 - RNA, 19 nt, Artificial Sequence
  Description of Artificial Sequence: Synthetic oligonucleotide
  Sense strand starting at position 2930 of SEQ ID NO: 1562614
aucuauugggccugagaaa

SEQ ID NO: 1760072 - RNA, 19 nt, Artificial Sequence
  Description of Artificial Sequence: Synthetic oligonucleotide
  Antisense strand to SEQ ID NO: 1760071
uuucucaggcccaauagau

SEQ ID NO: 1760073 - RNA, 19 nt, Artificial Sequence
  Description of Artificial Sequence: Synthetic oligonucleotide
  Sense strand starting at position 2963 of SEQ ID NO: 1562614
caggcuucccucugugagu

SEQ ID NO: 1760074 - RNA, 19 nt, Artificial Sequence
  Description of Artificial Sequence: Synthetic oligonucleotide
  Antisense strand to SEQ ID NO: 1760073
acucacagagggaagccug

SEQ ID NO: 1760075 - RNA, 19 nt, Artificial Sequence
  Description of Artificial Sequence: Synthetic oligonucleotide
  Sense strand starting at position 3040 of SEQ ID NO: 1562614
cuggguaucuuucucugua

SEQ ID NO: 1760076 - RNA, 19 nt, Artificial Sequence
  Description of Artificial Sequence: Synthetic oligonucleotide
  Antisense strand to SEQ ID NO: 1760075
uacagagaaagauacccag

SEQ ID NO: 1760077 - RNA, 19 nt, Artificial Sequence
  Description of Artificial Sequence: Synthetic oligonucleotide
  Sense strand starting at position 3041 of SEQ ID NO: 1562614
uggguaucuuucucuguau

SEQ ID NO: 1760078 - RNA, 19 nt, Artificial Sequence
  Description of Artificial Sequence: Synthetic oligonucleotide
  Antisense strand to SEQ ID NO: 1760077
auacagagaaagauaccca

SEQ ID NO: 1760079 - RNA, 19 nt, Artificial Sequence
  Description of Artificial Sequence: Synthetic oligonucleotide
  Sense strand starting at position 3042 of SEQ ID NO: 1562614
ggguaucuuucucuguauc

SEQ ID NO: 1760080 - RNA, 19 nt, Artificial Sequence
  Description of Artificial Sequence: Synthetic oligonucleotide
  Antisense strand to SEQ ID NO: 1760079
gauacagagaaagauaccc

SEQ ID NO: 1760081 - RNA, 19 nt, Artificial Sequence
  Description of Artificial Sequence: Synthetic oligonucleotide
  Sense strand starting at position 3043 of SEQ ID NO: 1562614
gguaucuuucucuguauca

SEQ ID NO: 1760082 - RNA, 19 nt, Artificial Sequence
  Description of Artificial Sequence: Synthetic oligonucleotide
  Antisense strand to SEQ ID NO: 1760081
ugauacagagaaagauacc

SEQ ID NO: 1760083 - RNA, 19 nt, Artificial Sequence
  Description of Artificial Sequence: Synthetic oligonucleotide
  Sense strand starting at position 3044 of SEQ ID NO: 1562614
guaucuuucucuguaucag

SEQ ID NO: 1760084 - RNA, 19 nt, Artificial Sequence
  Description of Artificial Sequence: Synthetic oligonucleotide
  Antisense strand to SEQ ID NO: 1760083
cugauacagagaaagauac

SEQ ID NO: 1760085 - RNA, 19 nt, Artificial Sequence
  Description of Artificial Sequence: Synthetic oligonucleotide
  Sense strand starting at position 3050 of SEQ ID NO: 1562614
uucucuguaucagacagaa

SEQ ID NO: 1760086 - RNA, 19 nt, Artificial Sequence
  Description of Artificial Sequence: Synthetic oligonucleotide
  Antisense strand to SEQ ID NO: 1760085
uucugucugauacagagaa

SEQ ID NO: 1760087 - RNA, 19 nt, Artificial Sequence
  Description of Artificial Sequence: Synthetic oligonucleotide
  Sense strand starting at position 3065 of SEQ ID NO: 1562614
agaaauccucauuguaugu

SEQ ID NO: 1760088 - RNA, 19 nt, Artificial Sequence
  Description of Artificial Sequence: Synthetic oligonucleotide
  Antisense strand to SEQ ID NO: 1760087
acauacaaugaggauuucu

SEQ ID NO: 1760089 - RNA, 19 nt, Artificial Sequence
  Description of Artificial Sequence: Synthetic oligonucleotide
  Sense strand starting at position 3070 of SEQ ID NO: 1562614
uccucauuguauguugaaa

SEQ ID NO: 1760090 - RNA, 19 nt, Artificial Sequence
  Description of Artificial Sequence: Synthetic oligonucleotide
  Antisense strand to SEQ ID NO: 1760089
uuucaacauacaaugagga

SEQ ID NO: 1760091 - RNA, 19 nt, Artificial Sequence
  Description of Artificial Sequence: Synthetic oligonucleotide
  Sense strand starting at position 3083 of SEQ ID NO: 1562614
uugaaacuagauugcaauu

SEQ ID NO: 1760092 - RNA, 19 nt, Artificial Sequence
  Description of Artificial Sequence: Synthetic oligonucleotide
  Antisense strand to SEQ ID NO: 1760091
aauugcaaucuaguuucaa

SEQ ID NO: 1760093 - RNA, 19 nt, Artificial Sequence
  Description of Artificial Sequence: Synthetic oligonucleotide
  Sense strand starting at position 3334 of SEQ ID NO: 1562614
guugguuacucaccagauc

SEQ ID NO: 1760094 - RNA, 19 nt, Artificial Sequence
  Description of Artificial Sequence: Synthetic oligonucleotide
  Antisense strand to SEQ ID NO: 1760093
gaucuggugaguaaccaac

SEQ ID NO: 1760095 - RNA, 19 nt, Artificial Sequence
  Description of Artificial Sequence: Synthetic oligonucleotide
  Sense strand starting at position 3335 of SEQ ID NO: 1562614
uugguuacucaccagauca

SEQ ID NO: 1760096 - RNA, 19 nt, Artificial Sequence
  Description of Artificial Sequence: Synthetic oligonucleotide
  Antisense strand to SEQ ID NO: 1760095
ugaucuggugaguaaccaa

SEQ ID NO: 1760097 - RNA, 19 nt, Artificial Sequence
  Description of Artificial Sequence: Synthetic oligonucleotide
  Sense strand starting at position 3678 of SEQ ID NO: 1562614
acacguagcuucucaagga

SEQ ID NO: 1760098 - RNA, 19 nt, Artificial Sequence
  Description of Artificial Sequence: Synthetic oligonucleotide
  Antisense strand to SEQ ID NO: 1760097
uccuugagaagcuacgugu

SEQ ID NO: 1760099 - RNA, 19 nt, Artificial Sequence
  Description of Artificial Sequence: Synthetic oligonucleotide
  Sense strand starting at position 3682 of SEQ ID NO: 1562614
guagcuucucaaggaauaa

SEQ ID NO: 1760100 - RNA, 19 nt, Artificial Sequence
  Description of Artificial Sequence: Synthetic oligonucleotide
  Antisense strand to SEQ ID NO: 1760099
uuauuccuugagaagcuac

SEQ ID NO: 1760101 - RNA, 19 nt, Artificial Sequence
  Description of Artificial Sequence: Synthetic oligonucleotide
  Sense strand starting at position 3693 of SEQ ID NO: 1562614
aggaauaauucccuuaagu

SEQ ID NO: 1760102 - RNA, 19 nt, Artificial Sequence
  Description of Artificial Sequence: Synthetic oligonucleotide
  Antisense strand to SEQ ID NO: 1760101
acuuaagggaauuauuccu

SEQ ID NO: 1760103 - RNA, 19 nt, Artificial Sequence
  Description of Artificial Sequence: Synthetic oligonucleotide
  Sense strand starting at position 3857 of SEQ ID NO: 1562614
cgaaguugugugcagcaca

SEQ ID NO: 1760104 - RNA, 19 nt, Artificial Sequence
  Description of Artificial Sequence: Synthetic oligonucleotide
  Antisense strand to SEQ ID NO: 1760103
ugugcugcacacaacuucg

SEQ ID NO: 1760105 - RNA, 19 nt, Artificial Sequence
  Description of Artificial Sequence: Synthetic oligonucleotide
  Sense strand starting at position 3917 of SEQ ID NO: 1562614
cgccgauuccacuaacuac

SEQ ID NO: 1760106 - RNA, 19 nt, Artificial Sequence
  Description of Artificial Sequence: Synthetic oligonucleotide
  Antisense strand to SEQ ID NO: 1760105
guaguuaguggaaucggcg

SEQ ID NO: 1760107 - RNA, 19 nt, Artificial Sequence
  Description of Artificial Sequence: Synthetic oligonucleotide
  Sense strand starting at position 102 of SEQ ID NO: 1562615
agggaggguucuguagaga

SEQ ID NO: 1760108 - RNA, 19 nt, Artificial Sequence
  Description of Artificial Sequence: Synthetic oligonucleotide
  Antisense strand to SEQ ID NO: 1760107
ucucuacagaacccucccu

SEQ ID NO: 1760109 - RNA, 19 nt, Artificial Sequence
  Description of Artificial Sequence: Synthetic oligonucleotide
  Sense strand starting at position 120 of SEQ ID NO: 1562615
agaguuaguucauuggaag

SEQ ID NO: 1760110 - RNA, 19 nt, Artificial Sequence
  Description of Artificial Sequence: Synthetic oligonucleotide
  Antisense strand to SEQ ID NO: 1760109
cuuccaaugaacuaacucu

SEQ ID NO: 1760111 - RNA, 19 nt, Artificial Sequence
  Description of Artificial Sequence: Synthetic oligonucleotide
  Sense strand starting at position 126 of SEQ ID NO: 1562615
aguucauuggaagaugguu

SEQ ID NO: 1760112 - RNA, 19 nt, Artificial Sequence
  Description of Artificial Sequence: Synthetic oligonucleotide
  Antisense strand to SEQ ID NO: 1760111
aaccaucuuccaaugaacu

SEQ ID NO: 1760113 - RNA, 19 nt, Artificial Sequence
  Description of Artificial Sequence: Synthetic oligonucleotide
  Sense strand starting at position 132 of SEQ ID NO: 1562615
uuggaagaugguuguguca

SEQ ID NO: 1760114 - RNA, 19 nt, Artificial Sequence
  Description of Artificial Sequence: Synthetic oligonucleotide
  Antisense strand to SEQ ID NO: 1760113
ugacacaaccaucuuccaa

SEQ ID NO: 1760115 - RNA, 19 nt, Artificial Sequence
  Description of Artificial Sequence: Synthetic oligonucleotide
  Sense strand starting at position 135 of SEQ ID NO: 1562615
gaagaugguugugucaauc

SEQ ID NO: 1760116 - RNA, 19 nt, Artificial Sequence
  Description of Artificial Sequence: Synthetic oligonucleotide
  Antisense strand to SEQ ID NO: 1760115
gauugacacaaccaucuuc

SEQ ID NO: 1760117 - RNA, 19 nt, Artificial Sequence
  Description of Artificial Sequence: Synthetic oligonucleotide
  Sense strand starting at position 203 of SEQ ID NO: 1562615
guaggacuaggagguauaa

SEQ ID NO: 1760118 - RNA, 19 nt, Artificial Sequence
  Description of Artificial Sequence: Synthetic oligonucleotide
  Antisense strand to SEQ ID NO: 1760117
uuauaccuccuaguccuac

SEQ ID NO: 1760119 - RNA, 19 nt, Artificial Sequence
  Description of Artificial Sequence: Synthetic oligonucleotide
  Sense strand starting at position 246 of SEQ ID NO: 1562615
guaaguguuggugaggauc

SEQ ID NO: 1760120 - RNA, 19 nt, Artificial Sequence
  Description of Artificial Sequence: Synthetic oligonucleotide
  Antisense strand to SEQ ID NO: 1760119
gauccucaccaacacuuac

SEQ ID NO: 1760121 - RNA, 19 nt, Artificial Sequence
  Description of Artificial Sequence: Synthetic oligonucleotide
  Sense strand starting at position 417 of SEQ ID NO: 1562615
cgaguuaucacaggaucag

SEQ ID NO: 1760122 - RNA, 19 nt, Artificial Sequence
  Description of Artificial Sequence: Synthetic oligonucleotide
  Antisense strand to SEQ ID NO: 1760121
cugauccugugauaacucg

SEQ ID NO: 1760123 - RNA, 19 nt, Artificial Sequence
  Description of Artificial Sequence: Synthetic oligonucleotide
  Sense strand starting at position 543 of SEQ ID NO: 1562615
gugguuaauacauguagac

SEQ ID NO: 1760124 - RNA, 19 nt, Artificial Sequence
  Description of Artificial Sequence: Synthetic oligonucleotide
  Antisense strand to SEQ ID NO: 1760123
gucuacauguauuaaccac

SEQ ID NO: 1760125 - RNA, 19 nt, Artificial Sequence
  Description of Artificial Sequence: Synthetic oligonucleotide
  Sense strand starting at position 695 of SEQ ID NO: 1562615
gagagaggaucacucgagu

SEQ ID NO: 1760126 - RNA, 19 nt, Artificial Sequence
  Description of Artificial Sequence: Synthetic oligonucleotide
  Antisense strand to SEQ ID NO: 1760125
acucgagugauccucucuc

SEQ ID NO: 1760127 - RNA, 19 nt, Artificial Sequence
  Description of Artificial Sequence: Synthetic oligonucleotide
  Sense strand starting at position 935 of SEQ ID NO: 1562615
ccugguucugcucaauaag

SEQ ID NO: 1760128 - RNA, 19 nt, Artificial Sequence
  Description of Artificial Sequence: Synthetic oligonucleotide
  Antisense strand to SEQ ID NO: 1760127
cuuauugagcagaaccagg

SEQ ID NO: 1760129 - RNA, 19 nt, Artificial Sequence
  Description of Artificial Sequence: Synthetic oligonucleotide
  Sense strand starting at position 944 of SEQ ID NO: 1562615
gcucaauaaggaggucaaa

SEQ ID NO: 1760130 - RNA, 19 nt, Artificial Sequence
  Description of Artificial Sequence: Synthetic oligonucleotide
  Antisense strand to SEQ ID NO: 1760129
uuugaccuccuuauugagc

SEQ ID NO: 1760131 - RNA, 19 nt, Artificial Sequence
  Description of Artificial Sequence: Synthetic oligonucleotide
  Sense strand starting at position 989 of SEQ ID NO: 1562615
cugagacugucauccucaa

SEQ ID NO: 1760132 - RNA, 19 nt, Artificial Sequence
  Description of Artificial Sequence: Synthetic oligonucleotide
  Antisense strand to SEQ ID NO: 1760131
uugaggaugacagucucag

SEQ ID NO: 1760133 - RNA, 19 nt, Artificial Sequence
  Description of Artificial Sequence: Synthetic oligonucleotide
  Sense strand starting at position 1123 of SEQ ID NO: 1562615
gacccagaauaguuugcaa

SEQ ID NO: 1760134 - RNA, 19 nt, Artificial Sequence
  Description of Artificial Sequence: Synthetic oligonucleotide
  Antisense strand to SEQ ID NO: 1760133
uugcaaacuauucuggguc

SEQ ID NO: 1760135 - RNA, 19 nt, Artificial Sequence
  Description of Artificial Sequence: Synthetic oligonucleotide
  Sense strand starting at position 1186 of SEQ ID NO: 1562615
gcuccuugauacuuacaag

SEQ ID NO: 1760136 - RNA, 19 nt, Artificial Sequence
  Description of Artificial Sequence: Synthetic oligonucleotide
  Antisense strand to SEQ ID NO: 1760135
cuuguaaguaucaaggagc

SEQ ID NO: 1760137 - RNA, 19 nt, Artificial Sequence
  Description of Artificial Sequence: Synthetic oligonucleotide
  Sense strand starting at position 1228 of SEQ ID NO: 1562615
ccagguaauuuggaaggau

SEQ ID NO: 1760138 - RNA, 19 nt, Artificial Sequence
  Description of Artificial Sequence: Synthetic oligonucleotide
  Antisense strand to SEQ ID NO: 1760137
auccuuccaaauuaccugg

SEQ ID NO: 1760139 - RNA, 19 nt, Artificial Sequence
  Description of Artificial Sequence: Synthetic oligonucleotide
  Sense strand starting at position 1409 of SEQ ID NO: 1562615
ggagucaaaggcugugaga

SEQ ID NO: 1760140 - RNA, 19 nt, Artificial Sequence
  Description of Artificial Sequence: Synthetic oligonucleotide
  Antisense strand to SEQ ID NO: 1760139
ucucacagccuuugacucc

SEQ ID NO: 1760141 - RNA, 19 nt, Artificial Sequence
  Description of Artificial Sequence: Synthetic oligonucleotide
  Sense strand starting at position 1411 of SEQ ID NO: 1562615
agucaaaggcugugagaca

SEQ ID NO: 1760142 - RNA, 19 nt, Artificial Sequence
  Description of Artificial Sequence: Synthetic oligonucleotide
  Antisense strand to SEQ ID NO: 1760141
ugucucacagccuuugacu

SEQ ID NO: 1760143 - RNA, 19 nt, Artificial Sequence
  Description of Artificial Sequence: Synthetic oligonucleotide
  Sense strand starting at position 1459 of SEQ ID NO: 1562615
gaagccguuaacgaggaau

SEQ ID NO: 1760144 - RNA, 19 nt, Artificial Sequence
  Description of Artificial Sequence: Synthetic oligonucleotide
  Antisense strand to SEQ ID NO: 1760143
auuccucguuaacggcuuc

SEQ ID NO: 1760145 - RNA, 19 nt, Artificial Sequence
  Description of Artificial Sequence: Synthetic oligonucleotide
  Sense strand starting at position 1462 of SEQ ID NO: 1562615
gccguuaacgaggaaucau

SEQ ID NO: 1760146 - RNA, 19 nt, Artificial Sequence
  Description of Artificial Sequence: Synthetic oligonucleotide
  Antisense strand to SEQ ID NO: 1760145
augauuccucguuaacggc

SEQ ID NO: 1760147 - RNA, 19 nt, Artificial Sequence
  Description of Artificial Sequence: Synthetic oligonucleotide
  Sense strand starting at position 1787 of SEQ ID NO: 1562615
agaugcuuccaggaagcaa

SEQ ID NO: 1760148 - RNA, 19 nt, Artificial Sequence
  Description of Artificial Sequence: Synthetic oligonucleotide
  Antisense strand to SEQ ID NO: 1760147
uugcuuccuggaagcaucu

SEQ ID NO: 1760149 - RNA, 19 nt, Artificial Sequence
  Description of Artificial Sequence: Synthetic oligonucleotide
  Sense strand starting at position 2101 of SEQ ID NO: 1562615
cuggguucugcggagauaa

SEQ ID NO: 1760150 - RNA, 19 nt, Artificial Sequence
  Description of Artificial Sequence: Synthetic oligonucleotide
  Antisense strand to SEQ ID NO: 1760149
uuaucuccgcagaacccag

SEQ ID NO: 1760151 - RNA, 19 nt, Artificial Sequence
  Description of Artificial Sequence: Synthetic oligonucleotide
  Sense strand starting at position 2103 of SEQ ID NO: 1562615
ggguucugcggagauaaag

SEQ ID NO: 1760152 - RNA, 19 nt, Artificial Sequence
  Description of Artificial Sequence: Synthetic oligonucleotide
  Antisense strand to SEQ ID NO: 1760151
cuuuaucuccgcagaaccc

SEQ ID NO: 1760153 - RNA, 19 nt, Artificial Sequence
  Description of Artificial Sequence: Synthetic oligonucleotide
  Sense strand starting at position 2431 of SEQ ID NO: 1562615
gagccuagguguuccagaa

SEQ ID NO: 1760154 - RNA, 19 nt, Artificial Sequence
  Description of Artificial Sequence: Synthetic oligonucleotide
  Antisense strand to SEQ ID NO: 1760153
uucuggaacaccuaggcuc

SEQ ID NO: 1760155 - RNA, 19 nt, Artificial Sequence
  Description of Artificial Sequence: Synthetic oligonucleotide
  Sense strand starting at position 2521 of SEQ ID NO: 1562615
ggcugaccuccucagguau

SEQ ID NO: 1760156 - RNA, 19 nt, Artificial Sequence
  Description of Artificial Sequence: Synthetic oligonucleotide
  Antisense strand to SEQ ID NO: 1760155
auaccugaggaggucagcc

SEQ ID NO: 1760157 - RNA, 19 nt, Artificial Sequence
  Description of Artificial Sequence: Synthetic oligonucleotide
  Sense strand starting at position 2541 of SEQ ID NO: 1562615
augcaaguguuaccagaga

SEQ ID NO: 1760158 - RNA, 19 nt, Artificial Sequence
  Description of Artificial Sequence: Synthetic oligonucleotide
  Antisense strand to SEQ ID NO: 1760157
ucucugguaacacuugcau

SEQ ID NO: 1760159 - RNA, 19 nt, Artificial Sequence
  Description of Artificial Sequence: Synthetic oligonucleotide
  Sense strand starting at position 3026 of SEQ ID NO: 1562615
gggucuugaugaccuguau

SEQ ID NO: 1760160 - RNA, 19 nt, Artificial Sequence
  Description of Artificial Sequence: Synthetic oligonucleotide
  Antisense strand to SEQ ID NO: 1760159
auacaggucaucaagaccc

SEQ ID NO: 1760161 - RNA, 19 nt, Artificial Sequence
  Description of Artificial Sequence: Synthetic oligonucleotide
  Sense strand starting at position 3214 of SEQ ID NO: 1562615
gggaacguuuaaucuuaag

SEQ ID NO: 1760162 - RNA, 19 nt, Artificial Sequence
  Description of Artificial Sequence: Synthetic oligonucleotide
  Antisense strand to SEQ ID NO: 1760161
cuuaagauuaaacguuccc

SEQ ID NO: 1760163 - RNA, 19 nt, Artificial Sequence
  Description of Artificial Sequence: Synthetic oligonucleotide
  Sense strand starting at position 3234 of SEQ ID NO: 1562615
guuguagaggcaugaagau

SEQ ID NO: 1760164 - RNA, 19 nt, Artificial Sequence
  Description of Artificial Sequence: Synthetic oligonucleotide
  Antisense strand to SEQ ID NO: 1760163
aucuucaugccucuacaac

SEQ ID NO: 1760165 - RNA, 19 nt, Artificial Sequence
  Description of Artificial Sequence: Synthetic oligonucleotide
  Sense strand starting at position 3275 of SEQ ID NO: 1562615
gcugaauagaggcgaugau

SEQ ID NO: 1760166 - RNA, 19 nt, Artificial Sequence
  Description of Artificial Sequence: Synthetic oligonucleotide
  Antisense strand to SEQ ID NO: 1760165
aucaucgccucuauucagc

SEQ ID NO: 1760167 - RNA, 19 nt, Artificial Sequence
  Description of Artificial Sequence: Synthetic oligonucleotide
  Sense strand starting at position 3306 of SEQ ID NO: 1562615
cuauuagagucucuugggu

SEQ ID NO: 1760168 - RNA, 19 nt, Artificial Sequence
  Description of Artificial Sequence: Synthetic oligonucleotide
  Antisense strand to SEQ ID NO: 1760167
acccaagagacucuaauag

SEQ ID NO: 1760169 - RNA, 19 nt, Artificial Sequence
  Description of Artificial Sequence: Synthetic oligonucleotide
  Sense strand starting at position 3321 of SEQ ID NO: 1562615
ggguuuggugcagagagga

SEQ ID NO: 1760170 - RNA, 19 nt, Artificial Sequence
  Description of Artificial Sequence: Synthetic oligonucleotide
  Antisense strand to SEQ ID NO: 1760169
uccucucugcaccaaaccc

SEQ ID NO: 1760171 - RNA, 19 nt, Artificial Sequence
  Description of Artificial Sequence: Synthetic oligonucleotide
  Sense strand starting at position 3375 of SEQ ID NO: 1562615
uuguaacucugaguccuaa

SEQ ID NO: 1760172 - RNA, 19 nt, Artificial Sequence
  Description of Artificial Sequence: Synthetic oligonucleotide
  Antisense strand to SEQ ID NO: 1760171
uuaggacucagaguuacaa

SEQ ID NO: 1760173 - RNA, 19 nt, Artificial Sequence
  Description of Artificial Sequence: Synthetic oligonucleotide
  Sense strand starting at position 3433 of SEQ ID NO: 1562615
ggaagcacugaguaagcuu

SEQ ID NO: 1760174 - RNA, 19 nt, Artificial Sequence
  Description of Artificial Sequence: Synthetic oligonucleotide
  Antisense strand to SEQ ID NO: 1760173
aagcuuacucagugcuucc

SEQ ID NO: 1760175 - RNA, 19 nt, Artificial Sequence
  Description of Artificial Sequence: Synthetic oligonucleotide
  Sense strand starting at position 3563 of SEQ ID NO: 1562615
caagaaugccugugacuua

SEQ ID NO: 1760176 - RNA, 19 nt, Artificial Sequence
  Description of Artificial Sequence: Synthetic oligonucleotide
  Antisense strand to SEQ ID NO: 1760175
uaagucacaggcauucuug

SEQ ID NO: 1760177 - RNA, 19 nt, Artificial Sequence
  Description of Artificial Sequence: Synthetic oligonucleotide
  Sense strand starting at position 3572 of SEQ ID NO: 1562615
cugugacuuaucggguaaa

SEQ ID NO: 1760178 - RNA, 19 nt, Artificial Sequence
  Description of Artificial Sequence: Synthetic oligonucleotide
  Antisense strand to SEQ ID NO: 1760177
uuuacccgauaagucacag

SEQ ID NO: 1760179 - RNA, 19 nt, Artificial Sequence
  Description of Artificial Sequence: Synthetic oligonucleotide
  Sense strand starting at position 3650 of SEQ ID NO: 1562615
auugcuagaugagcugaua

SEQ ID NO: 1760180 - RNA, 19 nt, Artificial Sequence
  Description of Artificial Sequence: Synthetic oligonucleotide
  Antisense strand to SEQ ID NO: 1760179
uaucagcucaucuagcaau

SEQ ID NO: 1760181 - RNA, 19 nt, Artificial Sequence
  Description of Artificial Sequence: Synthetic oligonucleotide
  Sense strand starting at position 3758 of SEQ ID NO: 1562615
gcagucaagagaugacugu

SEQ ID NO: 1760182 - RNA, 19 nt, Artificial Sequence
  Description of Artificial Sequence: Synthetic oligonucleotide
  Antisense strand to SEQ ID NO: 1760181
acagucaucucuugacugc

SEQ ID NO: 1760183 - RNA, 19 nt, Artificial Sequence
  Description of Artificial Sequence: Synthetic oligonucleotide
  Sense strand starting at position 3791 of SEQ ID NO: 1562615
gaagcaaggucagucuaaa

SEQ ID NO: 1760184 - RNA, 19 nt, Artificial Sequence
  Description of Artificial Sequence: Synthetic oligonucleotide
  Antisense strand to SEQ ID NO: 1760183
uuuagacugaccuugcuuc

SEQ ID NO: 1760185 - RNA, 19 nt, Artificial Sequence
  Description of Artificial Sequence: Synthetic oligonucleotide
  Sense strand starting at position 3851 of SEQ ID NO: 1562615
cuaugacagguguaccaua

SEQ ID NO: 1760186 - RNA, 19 nt, Artificial Sequence
  Description of Artificial Sequence: Synthetic oligonucleotide
  Antisense strand to SEQ ID NO: 1760185
uaugguacaccugucauag

SEQ ID NO: 1760187 - RNA, 19 nt, Artificial Sequence
  Description of Artificial Sequence: Synthetic oligonucleotide
  Sense strand starting at position 5 of SEQ ID NO: 1562616
augugucuguccugcagga

SEQ ID NO: 1760188 - RNA, 19 nt, Artificial Sequence
  Description of Artificial Sequence: Synthetic oligonucleotide
  Antisense strand to SEQ ID NO: 1760187
uccugcaggacagacacau

SEQ ID NO: 1760189 - RNA, 19 nt, Artificial Sequence
  Description of Artificial Sequence: Synthetic oligonucleotide
  Sense strand starting at position 54 of SEQ ID NO: 1562616
guccaaaucugcucuguac

SEQ ID NO: 1760190 - RNA, 19 nt, Artificial Sequence
  Description of Artificial Sequence: Synthetic oligonucleotide
  Antisense strand to SEQ ID NO: 1760189
guacagagcagauuuggac

SEQ ID NO: 1760191 - RNA, 19 nt, Artificial Sequence
  Description of Artificial Sequence: Synthetic oligonucleotide
  Sense strand starting at position 217 of SEQ ID NO: 1562616
cugcgcaguuccucuggaa

SEQ ID NO: 1760192 - RNA, 19 nt, Artificial Sequence
  Description of Artificial Sequence: Synthetic oligonucleotide
  Antisense strand to SEQ ID NO: 1760191
uuccagaggaacugcgcag

SEQ ID NO: 1760193 - RNA, 19 nt, Artificial Sequence
  Description of Artificial Sequence: Synthetic oligonucleotide
  Sense strand starting at position 373 of SEQ ID NO: 1562616
guccucucccucugugaca

SEQ ID NO: 1760194 - RNA, 19 nt, Artificial Sequence
  Description of Artificial Sequence: Synthetic oligonucleotide
  Antisense strand to SEQ ID NO: 1760193
ugucacagagggagaggac

SEQ ID NO: 1760195 - RNA, 19 nt, Artificial Sequence
  Description of Artificial Sequence: Synthetic oligonucleotide
  Sense strand starting at position 422 of SEQ ID NO: 1562616
gccuaauggucccuacucu

SEQ ID NO: 1760196 - RNA, 19 nt, Artificial Sequence
  Description of Artificial Sequence: Synthetic oligonucleotide
  Antisense strand to SEQ ID NO: 1760195
agaguagggaccauuaggc

SEQ ID NO: 1760197 - RNA, 19 nt, Artificial Sequence
  Description of Artificial Sequence: Synthetic oligonucleotide
  Sense strand starting at position 450 of SEQ ID NO: 1562616
ucuggaacuguuugcuagu

SEQ ID NO: 1760198 - RNA, 19 nt, Artificial Sequence
  Description of Artificial Sequence: Synthetic oligonucleotide
  Antisense strand to SEQ ID NO: 1760197
acuagcaaacaguuccaga

SEQ ID NO: 1760199 - RNA, 19 nt, Artificial Sequence
  Description of Artificial Sequence: Synthetic oligonucleotide
  Sense strand starting at position 453 of SEQ ID NO: 1562616
ggaacuguuugcuagucca

SEQ ID NO: 1760200 - RNA, 19 nt, Artificial Sequence
  Description of Artificial Sequence: Synthetic oligonucleotide
  Antisense strand to SEQ ID NO: 1760199
uggacuagcaaacaguucc

SEQ ID NO: 1760201 - RNA, 19 nt, Artificial Sequence
  Description of Artificial Sequence: Synthetic oligonucleotide
  Sense strand starting at position 549 of SEQ ID NO: 1562616
gguggucuauggucugcua

SEQ ID NO: 1760202 - RNA, 19 nt, Artificial Sequence
  Description of Artificial Sequence: Synthetic oligonucleotide
  Antisense strand to SEQ ID NO: 1760201
uagcagaccauagaccacc

SEQ ID NO: 1760203 - RNA, 19 nt, Artificial Sequence
  Description of Artificial Sequence: Synthetic oligonucleotide
  Sense strand starting at position 613 of SEQ ID NO: 1562616
gggccaccuuacugaugau

SEQ ID NO: 1760204 - RNA, 19 nt, Artificial Sequence
  Description of Artificial Sequence: Synthetic oligonucleotide
  Antisense strand to SEQ ID NO: 1760203
aucaucaguaagguggccc

SEQ ID NO: 1760205 - RNA, 19 nt, Artificial Sequence
  Description of Artificial Sequence: Synthetic oligonucleotide
  Sense strand starting at position 1039 of SEQ ID NO: 1562616
gggccuaugggcuaagacu

SEQ ID NO: 1760206 - RNA, 19 nt, Artificial Sequence
  Description of Artificial Sequence: Synthetic oligonucleotide
  Antisense strand to SEQ ID NO: 1760205
agucuuagcccauaggccc

SEQ ID NO: 1760207 - RNA, 19 nt, Artificial Sequence
  Description of Artificial Sequence: Synthetic oligonucleotide
  Sense strand starting at position 1091 of SEQ ID NO: 1562616
cuuaaacugccuuggagaa

SEQ ID NO: 1760208 - RNA, 19 nt, Artificial Sequence
  Description of Artificial Sequence: Synthetic oligonucleotide
  Antisense strand to SEQ ID NO: 1760207
uucuccaaggcaguuuaag

SEQ ID NO: 1760209 - RNA, 19 nt, Artificial Sequence
  Description of Artificial Sequence: Synthetic oligonucleotide
  Sense strand starting at position 1123 of SEQ ID NO: 1562616
ucccauguguggugacuuu

SEQ ID NO: 1760210 - RNA, 19 nt, Artificial Sequence
  Description of Artificial Sequence: Synthetic oligonucleotide
  Antisense strand to SEQ ID NO: 1760209
aaagucaccacacauggga

SEQ ID NO: 1760211 - RNA, 19 nt, Artificial Sequence
  Description of Artificial Sequence: Synthetic oligonucleotide
  Sense strand starting at position 1164 of SEQ ID NO: 1562616
aaguguuggucucuugagu

SEQ ID NO: 1760212 - RNA, 19 nt, Artificial Sequence
  Description of Artificial Sequence: Synthetic oligonucleotide
  Antisense strand to SEQ ID NO: 1760211
acucaagagaccaacacuu

SEQ ID NO: 1760213 - RNA, 19 nt, Artificial Sequence
  Description of Artificial Sequence: Synthetic oligonucleotide
  Sense strand starting at position 1173 of SEQ ID NO: 1562616
ucucuugaguccugcaaag

SEQ ID NO: 1760214 - RNA, 19 nt, Artificial Sequence
  Description of Artificial Sequence: Synthetic oligonucleotide
  Antisense strand to SEQ ID NO: 1760213
cuuugcaggacucaagaga

SEQ ID NO: 1760215 - RNA, 19 nt, Artificial Sequence
  Description of Artificial Sequence: Synthetic oligonucleotide
  Sense strand starting at position 1175 of SEQ ID NO: 1562616
ucuugaguccugcaaagca

SEQ ID NO: 1760216 - RNA, 19 nt, Artificial Sequence
  Description of Artificial Sequence: Synthetic oligonucleotide
  Antisense strand to SEQ ID NO: 1760215
ugcuuugcaggacucaaga

SEQ ID NO: 1760217 - RNA, 19 nt, Artificial Sequence
  Description of Artificial Sequence: Synthetic oligonucleotide
  Sense strand starting at position 1348 of SEQ ID NO: 1562616
gcuagaguuucaggugucu

SEQ ID NO: 1760218 - RNA, 19 nt, Artificial Sequence
  Description of Artificial Sequence: Synthetic oligonucleotide
  Antisense strand to SEQ ID NO: 1760217
agacaccugaaacucuagc

SEQ ID NO: 1760219 - RNA, 19 nt, Artificial Sequence
  Description of Artificial Sequence: Synthetic oligonucleotide
  Sense strand starting at position 1354 of SEQ ID NO: 1562616
guuucaggugucugaugca

SEQ ID NO: 1760220 - RNA, 19 nt, Artificial Sequence
  Description of Artificial Sequence: Synthetic oligonucleotide
  Antisense strand to SEQ ID NO: 1760219
ugcaucagacaccugaaac

SEQ ID NO: 1760221 - RNA, 19 nt, Artificial Sequence
  Description of Artificial Sequence: Synthetic oligonucleotide
  Sense strand starting at position 1361 of SEQ ID NO: 1562616
gugucugaugcacgcugaa

SEQ ID NO: 1760222 - RNA, 19 nt, Artificial Sequence
  Description of Artificial Sequence: Synthetic oligonucleotide
  Antisense strand to SEQ ID NO: 1760221
uucagcgugcaucagacac

SEQ ID NO: 1760223 - RNA, 19 nt, Artificial Sequence
  Description of Artificial Sequence: Synthetic oligonucleotide
  Sense strand starting at position 1404 of SEQ ID NO: 1562616
cgaagagauugugcggcuu

SEQ ID NO: 1760224 - RNA, 19 nt, Artificial Sequence
  Description of Artificial Sequence: Synthetic oligonucleotide
  Antisense strand to SEQ ID NO: 1760223
aagccgcacaaucucuucg

SEQ ID NO: 1760225 - RNA, 19 nt, Artificial Sequence
  Description of Artificial Sequence: Synthetic oligonucleotide
  Sense strand starting at position 1406 of SEQ ID NO: 1562616
aagagauugugcggcuuaa

SEQ ID NO: 1760226 - RNA, 19 nt, Artificial Sequence
  Description of Artificial Sequence: Synthetic oligonucleotide
  Antisense strand to SEQ ID NO: 1760225
uuaagccgcacaaucucuu

SEQ ID NO: 1760227 - RNA, 19 nt, Artificial Sequence
  Description of Artificial Sequence: Synthetic oligonucleotide
  Sense strand starting at position 1425 of SEQ ID NO: 1562616
aaaccugcuccaggguaau

SEQ ID NO: 1760228 - RNA, 19 nt, Artificial Sequence
  Description of Artificial Sequence: Synthetic oligonucleotide
  Antisense strand to SEQ ID NO: 1760227
auuacccuggagcagguuu

SEQ ID NO: 1760229 - RNA, 19 nt, Artificial Sequence
  Description of Artificial Sequence: Synthetic oligonucleotide
  Sense strand starting at position 1462 of SEQ ID NO: 1562616
gaggaacccuugugaauga

SEQ ID NO: 1760230 - RNA, 19 nt, Artificial Sequence
  Description of Artificial Sequence: Synthetic oligonucleotide
  Antisense strand to SEQ ID NO: 1760229
ucauucacaaggguuccuc

SEQ ID NO: 1760231 - RNA, 19 nt, Artificial Sequence
  Description of Artificial Sequence: Synthetic oligonucleotide
  Sense strand starting at position 2127 of SEQ ID NO: 1562616
augccaucauugggauuga

SEQ ID NO: 1760232 - RNA, 19 nt, Artificial Sequence
  Description of Artificial Sequence: Synthetic oligonucleotide
  Antisense strand to SEQ ID NO: 1760231
ucaaucccaaugauggcau

SEQ ID NO: 1760233 - RNA, 19 nt, Artificial Sequence
  Description of Artificial Sequence: Synthetic oligonucleotide
  Sense strand starting at position 2128 of SEQ ID NO: 1562616
ugccaucauugggauugau

SEQ ID NO: 1760234 - RNA, 19 nt, Artificial Sequence
  Description of Artificial Sequence: Synthetic oligonucleotide
  Antisense strand to SEQ ID NO: 1760233
aucaaucccaaugauggca

SEQ ID NO: 1760235 - RNA, 19 nt, Artificial Sequence
  Description of Artificial Sequence: Synthetic oligonucleotide
  Sense strand starting at position 2247 of SEQ ID NO: 1562616
gugaaccacuuguacagua

SEQ ID NO: 1760236 - RNA, 19 nt, Artificial Sequence
  Description of Artificial Sequence: Synthetic oligonucleotide
  Antisense strand to SEQ ID NO: 1760235
uacuguacaagugguucac

SEQ ID NO: 1760237 - RNA, 19 nt, Artificial Sequence
  Description of Artificial Sequence: Synthetic oligonucleotide
  Sense strand starting at position 2252 of SEQ ID NO: 1562616
ccacuuguacaguaaaguu

SEQ ID NO: 1760238 - RNA, 19 nt, Artificial Sequence
  Description of Artificial Sequence: Synthetic oligonucleotide
  Antisense strand to SEQ ID NO: 1760237
aacuuuacuguacaagugg

SEQ ID NO: 1760239 - RNA, 19 nt, Artificial Sequence
  Description of Artificial Sequence: Synthetic oligonucleotide
  Sense strand starting at position 2455 of SEQ ID NO: 1562616
accgguucucaccgucauu

SEQ ID NO: 1760240 - RNA, 19 nt, Artificial Sequence
  Description of Artificial Sequence: Synthetic oligonucleotide
  Antisense strand to SEQ ID NO: 1760239
aaugacggugagaaccggu

SEQ ID NO: 1760241 - RNA, 19 nt, Artificial Sequence
  Description of Artificial Sequence: Synthetic oligonucleotide
  Sense strand starting at position 2465 of SEQ ID NO: 1562616
accgucauuuccugucuuu

SEQ ID NO: 1760242 - RNA, 19 nt, Artificial Sequence
  Description of Artificial Sequence: Synthetic oligonucleotide
  Antisense strand to SEQ ID NO: 1760241
aaagacaggaaaugacggu

SEQ ID NO: 1760243 - RNA, 19 nt, Artificial Sequence
  Description of Artificial Sequence: Synthetic oligonucleotide
  Sense strand starting at position 3426 of SEQ ID NO: 1562616
ucggccauuucgugucuuu

SEQ ID NO: 1760244 - RNA, 19 nt, Artificial Sequence
  Description of Artificial Sequence: Synthetic oligonucleotide
  Antisense strand to SEQ ID NO: 1760243
aaagacacgaaauggccga

SEQ ID NO: 1760245 - RNA, 19 nt, Artificial Sequence
  Description of Artificial Sequence: Synthetic oligonucleotide
  Sense strand starting at position 50 of SEQ ID NO: 1562617
cuauauuagcuguaugaua

SEQ ID NO: 1760246 - RNA, 19 nt, Artificial Sequence
  Description of Artificial Sequence: Synthetic oligonucleotide
  Antisense strand to SEQ ID NO: 1760245
uaucauacagcuaauauag

SEQ ID NO: 1760247 - RNA, 19 nt, Artificial Sequence
  Description of Artificial Sequence: Synthetic oligonucleotide
  Sense strand starting at position 52 of SEQ ID NO: 1562617
auauuagcuguaugauaag

SEQ ID NO: 1760248 - RNA, 19 nt, Artificial Sequence
  Description of Artificial Sequence: Synthetic oligonucleotide
  Antisense strand to SEQ ID NO: 1760247
cuuaucauacagcuaauau

SEQ ID NO: 1760249 - RNA, 19 nt, Artificial Sequence
  Description of Artificial Sequence: Synthetic oligonucleotide
  Sense strand starting at position 585 of SEQ ID NO: 1562617
cuacaauugugggccgaaa

SEQ ID NO: 1760250 - RNA, 19 nt, Artificial Sequence
  Description of Artificial Sequence: Synthetic oligonucleotide
  Antisense strand to SEQ ID NO: 1760249
uuucggcccacaauuguag

SEQ ID NO: 1760251 - RNA, 19 nt, Artificial Sequence
  Description of Artificial Sequence: Synthetic oligonucleotide
  Sense strand starting at position 587 of SEQ ID NO: 1562617
acaauugugggccgaaaca

SEQ ID NO: 1760252 - RNA, 19 nt, Artificial Sequence
  Description of Artificial Sequence: Synthetic oligonucleotide
  Antisense strand to SEQ ID NO: 1760251
uguuucggcccacaauugu

SEQ ID NO: 1760253 - RNA, 19 nt, Artificial Sequence
  Description of Artificial Sequence: Synthetic oligonucleotide
  Sense strand starting at position 610 of SEQ ID NO: 1562617
cgguuccugccugaugaaa

SEQ ID NO: 1760254 - RNA, 19 nt, Artificial Sequence
  Description of Artificial Sequence: Synthetic oligonucleotide
  Antisense strand to SEQ ID NO: 1760253
uuucaucaggcaggaaccg

SEQ ID NO: 1760255 - RNA, 19 nt, Artificial Sequence
  Description of Artificial Sequence: Synthetic oligonucleotide
  Sense strand starting at position 745 of SEQ ID NO: 1562617
gcagaagucuuccucggga

SEQ ID NO: 1760256 - RNA, 19 nt, Artificial Sequence
  Description of Artificial Sequence: Synthetic oligonucleotide
  Antisense strand to SEQ ID NO: 1760255
ucccgaggaagacuucugc

SEQ ID NO: 1760257 - RNA, 19 nt, Artificial Sequence
  Description of Artificial Sequence: Synthetic oligonucleotide
  Sense strand starting at position 747 of SEQ ID NO: 1562617
agaagucuuccucgggaaa

SEQ ID NO: 1760258 - RNA, 19 nt, Artificial Sequence
  Description of Artificial Sequence: Synthetic oligonucleotide
  Antisense strand to SEQ ID NO: 1760257
uuucccgaggaagacuucu

SEQ ID NO: 1760259 - RNA, 19 nt, Artificial Sequence
  Description of Artificial Sequence: Synthetic oligonucleotide
  Sense strand starting at position 748 of SEQ ID NO: 1562617
gaagucuuccucgggaaag

SEQ ID NO: 1760260 - RNA, 19 nt, Artificial Sequence
  Description of Artificial Sequence: Synthetic oligonucleotide
  Antisense strand to SEQ ID NO: 1760259
cuuucccgaggaagacuuc

SEQ ID NO: 1760261 - RNA, 19 nt, Artificial Sequence
  Description of Artificial Sequence: Synthetic oligonucleotide
  Sense strand starting at position 750 of SEQ ID NO: 1562617
agucuuccucgggaaaguu

SEQ ID NO: 1760262 - RNA, 19 nt, Artificial Sequence
  Description of Artificial Sequence: Synthetic oligonucleotide
  Antisense strand to SEQ ID NO: 1760261
aacuuucccgaggaagacu

SEQ ID NO: 1760263 - RNA, 19 nt, Artificial Sequence
  Description of Artificial Sequence: Synthetic oligonucleotide
  Sense strand starting at position 762 of SEQ ID NO: 1562617
gaaaguugaaagugugauc

SEQ ID NO: 1760264 - RNA, 19 nt, Artificial Sequence
  Description of Artificial Sequence: Synthetic oligonucleotide
  Antisense strand to SEQ ID NO: 1760263
gaucacacuuucaacuuuc

SEQ ID NO: 1760265 - RNA, 19 nt, Artificial Sequence
  Description of Artificial Sequence: Synthetic oligonucleotide
  Sense strand starting at position 767 of SEQ ID NO: 1562617
uugaaagugugaucuaaag

SEQ ID NO: 1760266 - RNA, 19 nt, Artificial Sequence
  Description of Artificial Sequence: Synthetic oligonucleotide
  Antisense strand to SEQ ID NO: 1760265
cuuuagaucacacuuucaa

SEQ ID NO: 1760267 - RNA, 19 nt, Artificial Sequence
  Description of Artificial Sequence: Synthetic oligonucleotide
  Sense strand starting at position 773 of SEQ ID NO: 1562617
gugugaucuaaaggaugca

SEQ ID NO: 1760268 - RNA, 19 nt, Artificial Sequence
  Description of Artificial Sequence: Synthetic oligonucleotide
  Antisense strand to SEQ ID NO: 1760267
ugcauccuuuagaucacac

SEQ ID NO: 1760269 - RNA, 19 nt, Artificial Sequence
  Description of Artificial Sequence: Synthetic oligonucleotide
  Sense strand starting at position 774 of SEQ ID NO: 1562617
ugugaucuaaaggaugcau

SEQ ID NO: 1760270 - RNA, 19 nt, Artificial Sequence
  Description of Artificial Sequence: Synthetic oligonucleotide
  Antisense strand to SEQ ID NO: 1760269
augcauccuuuagaucaca

SEQ ID NO: 1760271 - RNA, 19 nt, Artificial Sequence
  Description of Artificial Sequence: Synthetic oligonucleotide
  Sense strand starting at position 891 of SEQ ID NO: 1562617
aggcauaugcaguagaauu

SEQ ID NO: 1760272 - RNA, 19 nt, Artificial Sequence
  Description of Artificial Sequence: Synthetic oligonucleotide
  Antisense strand to SEQ ID NO: 1760271
aauucuacugcauaugccu

SEQ ID NO: 1760273 - RNA, 19 nt, Artificial Sequence
  Description of Artificial Sequence: Synthetic oligonucleotide
  Sense strand starting at position 927 of SEQ ID NO: 1562617
ccaggcuccuuaucuguaa

SEQ ID NO: 1760274 - RNA, 19 nt, Artificial Sequence
  Description of Artificial Sequence: Synthetic oligonucleotide
  Antisense strand to SEQ ID NO: 1760273
uuacagauaaggagccugg

SEQ ID NO: 1760275 - RNA, 19 nt, Artificial Sequence
  Description of Artificial Sequence: Synthetic oligonucleotide
  Sense strand starting at position 931 of SEQ ID NO: 1562617
gcuccuuaucuguaaagga

SEQ ID NO: 1760276 - RNA, 19 nt, Artificial Sequence
  Description of Artificial Sequence: Synthetic oligonucleotide
  Antisense strand to SEQ ID NO: 1760275
uccuuuacagauaaggagc

SEQ ID NO: 1760277 - RNA, 19 nt, Artificial Sequence
  Description of Artificial Sequence: Synthetic oligonucleotide
  Sense strand starting at position 1595 of SEQ ID NO: 1562617
gaaugaugccgccaguuaa

SEQ ID NO: 1760278 - RNA, 19 nt, Artificial Sequence
  Description of Artificial Sequence: Synthetic oligonucleotide
  Antisense strand to SEQ ID NO: 1760277
uuaacuggcggcaucauuc

SEQ ID NO: 1760279 - RNA, 19 nt, Artificial Sequence
  Description of Artificial Sequence: Synthetic oligonucleotide
  Sense strand starting at position 1738 of SEQ ID NO: 1562617
aacaguacccacugaguga

SEQ ID NO: 1760280 - RNA, 19 nt, Artificial Sequence
  Description of Artificial Sequence: Synthetic oligonucleotide
  Antisense strand to SEQ ID NO: 1760279
ucacucaguggguacuguu

SEQ ID NO: 1760281 - RNA, 19 nt, Artificial Sequence
  Description of Artificial Sequence: Synthetic oligonucleotide
  Sense strand starting at position 1863 of SEQ ID NO: 1562617
accggugccacgcagaaau

SEQ ID NO: 1760282 - RNA, 19 nt, Artificial Sequence
  Description of Artificial Sequence: Synthetic oligonucleotide
  Antisense strand to SEQ ID NO: 1760281
auuucugcguggcaccggu

SEQ ID NO: 1760283 - RNA, 19 nt, Artificial Sequence
  Description of Artificial Sequence: Synthetic oligonucleotide
  Sense strand starting at position 1873 of SEQ ID NO: 1562617
cgcagaaauacugcgcgau

SEQ ID NO: 1760284 - RNA, 19 nt, Artificial Sequence
  Description of Artificial Sequence: Synthetic oligonucleotide
  Antisense strand to SEQ ID NO: 1760283
aucgcgcaguauuucugcg

SEQ ID NO: 1760285 - RNA, 19 nt, Artificial Sequence
  Description of Artificial Sequence: Synthetic oligonucleotide
  Sense strand starting at position 2403 of SEQ ID NO: 1562617
uguaucaugcagugggaau

SEQ ID NO: 1760286 - RNA, 19 nt, Artificial Sequence
  Description of Artificial Sequence: Synthetic oligonucleotide
  Antisense strand to SEQ ID NO: 1760285
auucccacugcaugauaca

SEQ ID NO: 1760287 - RNA, 19 nt, Artificial Sequence
  Description of Artificial Sequence: Synthetic oligonucleotide
  Sense strand starting at position 2404 of SEQ ID NO: 1562617
guaucaugcagugggaaua

SEQ ID NO: 1760288 - RNA, 19 nt, Artificial Sequence
  Description of Artificial Sequence: Synthetic oligonucleotide
  Antisense strand to SEQ ID NO: 1760287
uauucccacugcaugauac

SEQ ID NO: 1760289 - RNA, 19 nt, Artificial Sequence
  Description of Artificial Sequence: Synthetic oligonucleotide
  Sense strand starting at position 2405 of SEQ ID NO: 1562617
uaucaugcagugggaauau

SEQ ID NO: 1760290 - RNA, 19 nt, Artificial Sequence
  Description of Artificial Sequence: Synthetic oligonucleotide
  Antisense strand to SEQ ID NO: 1760289
auauucccacugcaugaua

SEQ ID NO: 1760291 - RNA, 19 nt, Artificial Sequence
  Description of Artificial Sequence: Synthetic oligonucleotide
  Sense strand starting at position 2414 of SEQ ID NO: 1562617
gugggaauauugaggugaa

SEQ ID NO: 1760292 - RNA, 19 nt, Artificial Sequence
  Description of Artificial Sequence: Synthetic oligonucleotide
  Antisense strand to SEQ ID NO: 1760291
uucaccucaauauucccac

SEQ ID NO: 1760293 - RNA, 19 nt, Artificial Sequence
  Description of Artificial Sequence: Synthetic oligonucleotide
  Sense strand starting at position 2480 of SEQ ID NO: 1562617
gucacaggcccauaaguaa

SEQ ID NO: 1760294 - RNA, 19 nt, Artificial Sequence
  Description of Artificial Sequence: Synthetic oligonucleotide
  Antisense strand to SEQ ID NO: 1760293
uuacuuaugggccugugac

SEQ ID NO: 1760295 - RNA, 19 nt, Artificial Sequence
  Description of Artificial Sequence: Synthetic oligonucleotide
  Sense strand starting at position 2540 of SEQ ID NO: 1562617
ucuagacguauguaguaua

SEQ ID NO: 1760296 - RNA, 19 nt, Artificial Sequence
  Description of Artificial Sequence: Synthetic oligonucleotide
  Antisense strand to SEQ ID NO: 1760295
uauacuacauacgucuaga

SEQ ID NO: 1760297 - RNA, 19 nt, Artificial Sequence
  Description of Artificial Sequence: Synthetic oligonucleotide
  Sense strand starting at position 2551 of SEQ ID NO: 1562617
guaguauaggaguacucca

SEQ ID NO: 1760298 - RNA, 19 nt, Artificial Sequence
  Description of Artificial Sequence: Synthetic oligonucleotide
  Antisense strand to SEQ ID NO: 1760297
uggaguacuccuauacuac

SEQ ID NO: 1760299 - RNA, 19 nt, Artificial Sequence
  Description of Artificial Sequence: Synthetic oligonucleotide
  Sense strand starting at position 2795 of SEQ ID NO: 1562617
ugcuaauugcuuguaguuu

SEQ ID NO: 1760300 - RNA, 19 nt, Artificial Sequence
  Description of Artificial Sequence: Synthetic oligonucleotide
  Antisense strand to SEQ ID NO: 1760299
aaacuacaagcaauuagca

SEQ ID NO: 1760301 - RNA, 19 nt, Artificial Sequence
  Description of Artificial Sequence: Synthetic oligonucleotide
  Sense strand starting at position 2956 of SEQ ID NO: 1562617
aagucaguagcuuauagua

SEQ ID NO: 1760302 - RNA, 19 nt, Artificial Sequence
  Description of Artificial Sequence: Synthetic oligonucleotide
  Antisense strand to SEQ ID NO: 1760301
uacuauaagcuacugacuu

SEQ ID NO: 1760303 - RNA, 19 nt, Artificial Sequence
  Description of Artificial Sequence: Synthetic oligonucleotide
  Sense strand starting at position 3049 of SEQ ID NO: 1562617
aaauuaccugugggauaug

SEQ ID NO: 1760304 - RNA, 19 nt, Artificial Sequence
  Description of Artificial Sequence: Synthetic oligonucleotide
  Antisense strand to SEQ ID NO: 1760303
cauaucccacagguaauuu

SEQ ID NO: 1760305 - RNA, 19 nt, Artificial Sequence
  Description of Artificial Sequence: Synthetic oligonucleotide
  Sense strand starting at position 3058 of SEQ ID NO: 1562617
gugggauaugugggugcaa

SEQ ID NO: 1760306 - RNA, 19 nt, Artificial Sequence
  Description of Artificial Sequence: Synthetic oligonucleotide
  Antisense strand to SEQ ID NO: 1760305
uugcacccacauaucccac

SEQ ID NO: 1760307 - RNA, 19 nt, Artificial Sequence
  Description of Artificial Sequence: Synthetic oligonucleotide
  Sense strand starting at position 3059 of SEQ ID NO: 1562617
ugggauaugugggugcaaa

SEQ ID NO: 1760308 - RNA, 19 nt, Artificial Sequence
  Description of Artificial Sequence: Synthetic oligonucleotide
  Antisense strand to SEQ ID NO: 1760307
uuugcacccacauauccca

SEQ ID NO: 1760309 - RNA, 19 nt, Artificial Sequence
  Description of Artificial Sequence: Synthetic oligonucleotide
  Sense strand starting at position 3060 of SEQ ID NO: 1562617
gggauaugugggugcaaag

SEQ ID NO: 1760310 - RNA, 19 nt, Artificial Sequence
  Description of Artificial Sequence: Synthetic oligonucleotide
  Antisense strand to SEQ ID NO: 1760309
cuuugcacccacauauccc

SEQ ID NO: 1760311 - RNA, 19 nt, Artificial Sequence
  Description of Artificial Sequence: Synthetic oligonucleotide
  Sense strand starting at position 3100 of SEQ ID NO: 1562617
auaagaaacgugugggauu

SEQ ID NO: 1760312 - RNA, 19 nt, Artificial Sequence
  Description of Artificial Sequence: Synthetic oligonucleotide
  Antisense strand to SEQ ID NO: 1760311
aaucccacacguuucuuau

SEQ ID NO: 1760313 - RNA, 19 nt, Artificial Sequence
  Description of Artificial Sequence: Synthetic oligonucleotide
  Sense strand starting at position 3132 of SEQ ID NO: 1562617
cagugagugucaguagaga

SEQ ID NO: 1760314 - RNA, 19 nt, Artificial Sequence
  Description of Artificial Sequence: Synthetic oligonucleotide
  Antisense strand to SEQ ID NO: 1760313
ucucuacugacacucacug

SEQ ID NO: 1760315 - RNA, 19 nt, Artificial Sequence
  Description of Artificial Sequence: Synthetic oligonucleotide
  Sense strand starting at position 3154 of SEQ ID NO: 1562617
ggagaugacccguggcuga

SEQ ID NO: 1760316 - RNA, 19 nt, Artificial Sequence
  Description of Artificial Sequence: Synthetic oligonucleotide
  Antisense strand to SEQ ID NO: 1760315
ucagccacgggucaucucc

SEQ ID NO: 1760317 - RNA, 19 nt, Artificial Sequence
  Description of Artificial Sequence: Synthetic oligonucleotide
  Sense strand starting at position 3245 of SEQ ID NO: 1562617
ugagguguccuuggaguca

SEQ ID NO: 1760318 - RNA, 19 nt, Artificial Sequence
  Description of Artificial Sequence: Synthetic oligonucleotide
  Antisense strand to SEQ ID NO: 1760317
ugacuccaaggacaccuca

SEQ ID NO: 1760319 - RNA, 19 nt, Artificial Sequence
  Description of Artificial Sequence: Synthetic oligonucleotide
  Sense strand starting at position 3351 of SEQ ID NO: 1562617
gaucauuaaugagcuugga

SEQ ID NO: 1760320 - RNA, 19 nt, Artificial Sequence
  Description of Artificial Sequence: Synthetic oligonucleotide
  Antisense strand to SEQ ID NO: 1760319
uccaagcucauuaaugauc

SEQ ID NO: 1760321 - RNA, 19 nt, Artificial Sequence
  Description of Artificial Sequence: Synthetic oligonucleotide
  Sense strand starting at position 3354 of SEQ ID NO: 1562617
cauuaaugagcuuggaaag

SEQ ID NO: 1760322 - RNA, 19 nt, Artificial Sequence
  Description of Artificial Sequence: Synthetic oligonucleotide
  Antisense strand to SEQ ID NO: 1760321
cuuuccaagcucauuaaug

SEQ ID NO: 1760323 - RNA, 19 nt, Artificial Sequence
  Description of Artificial Sequence: Synthetic oligonucleotide
  Sense strand starting at position 3355 of SEQ ID NO: 1562617
auuaaugagcuuggaaagu

SEQ ID NO: 1760324 - RNA, 19 nt, Artificial Sequence
  Description of Artificial Sequence: Synthetic oligonucleotide
  Antisense strand to SEQ ID NO: 1760323
acuuuccaagcucauuaau

SEQ ID NO: 1760325 - RNA, 19 nt, Artificial Sequence
  Description of Artificial Sequence: Synthetic oligonucleotide
  Sense strand starting at position 72 of SEQ ID NO: 1562618
cuauauuagcuguaugaua

SEQ ID NO: 1760326 - RNA, 19 nt, Artificial Sequence
  Description of Artificial Sequence: Synthetic oligonucleotide
  Antisense strand to SEQ ID NO: 1760325
uaucauacagcuaauauag

SEQ ID NO: 1760327 - RNA, 19 nt, Artificial Sequence
  Description of Artificial Sequence: Synthetic oligonucleotide
  Sense strand starting at position 74 of SEQ ID NO: 1562618
auauuagcuguaugauaag

SEQ ID NO: 1760328 - RNA, 19 nt, Artificial Sequence
  Description of Artificial Sequence: Synthetic oligonucleotide
  Antisense strand to SEQ ID NO: 1760327
cuuaucauacagcuaauau

SEQ ID NO: 1760329 - RNA, 19 nt, Artificial Sequence
  Description of Artificial Sequence: Synthetic oligonucleotide
  Sense strand starting at position 607 of SEQ ID NO: 1562618
cuacaauugugggccgaaa

SEQ ID NO: 1760330 - RNA, 19 nt, Artificial Sequence
  Description of Artificial Sequence: Synthetic oligonucleotide
  Antisense strand to SEQ ID NO: 1760329
uuucggcccacaauuguag

SEQ ID NO: 1760331 - RNA, 19 nt, Artificial Sequence
  Description of Artificial Sequence: Synthetic oligonucleotide
  Sense strand starting at position 609 of SEQ ID NO: 1562618
acaauugugggccgaaaca

SEQ ID NO: 1760332 - RNA, 19 nt, Artificial Sequence
  Description of Artificial Sequence: Synthetic oligonucleotide
  Antisense strand to SEQ ID NO: 1760331
uguuucggcccacaauugu

SEQ ID NO: 1760333 - RNA, 19 nt, Artificial Sequence
  Description of Artificial Sequence: Synthetic oligonucleotide
  Sense strand starting at position 632 of SEQ ID NO: 1562618
cgguuccugccugaugaaa

SEQ ID NO: 1760334 - RNA, 19 nt, Artificial Sequence
  Description of Artificial Sequence: Synthetic oligonucleotide
  Antisense strand to SEQ ID NO: 1760333
uuucaucaggcaggaaccg

SEQ ID NO: 1760335 - RNA, 19 nt, Artificial Sequence
  Description of Artificial Sequence: Synthetic oligonucleotide
  Sense strand starting at position 767 of SEQ ID NO: 1562618
gcagaagucuuccucggga

SEQ ID NO: 1760336 - RNA, 19 nt, Artificial Sequence
  Description of Artificial Sequence: Synthetic oligonucleotide
  Antisense strand to SEQ ID NO: 1760335
ucccgaggaagacuucugc

SEQ ID NO: 1760337 - RNA, 19 nt, Artificial Sequence
  Description of Artificial Sequence: Synthetic oligonucleotide
  Sense strand starting at position 769 of SEQ ID NO: 1562618
agaagucuuccucgggaaa

SEQ ID NO: 1760338 - RNA, 19 nt, Artificial Sequence
  Description of Artificial Sequence: Synthetic oligonucleotide
  Antisense strand to SEQ ID NO: 1760337
uuucccgaggaagacuucu

SEQ ID NO: 1760339 - RNA, 19 nt, Artificial Sequence
  Description of Artificial Sequence: Synthetic oligonucleotide
  Sense strand starting at position 770 of SEQ ID NO: 1562618
gaagucuuccucgggaaag

SEQ ID NO: 1760340 - RNA, 19 nt, Artificial Sequence
  Description of Artificial Sequence: Synthetic oligonucleotide
  Antisense strand to SEQ ID NO: 1760339
cuuucccgaggaagacuuc

SEQ ID NO: 1760341 - RNA, 19 nt, Artificial Sequence
  Description of Artificial Sequence: Synthetic oligonucleotide
  Sense strand starting at position 772 of SEQ ID NO: 1562618
agucuuccucgggaaaguu

SEQ ID NO: 1760342 - RNA, 19 nt, Artificial Sequence
  Description of Artificial Sequence: Synthetic oligonucleotide
  Antisense strand to SEQ ID NO: 1760341
aacuuucccgaggaagacu

SEQ ID NO: 1760343 - RNA, 19 nt, Artificial Sequence
  Description of Artificial Sequence: Synthetic oligonucleotide
  Sense strand starting at position 784 of SEQ ID NO: 1562618
gaaaguugaaagugugauc

SEQ ID NO: 1760344 - RNA, 19 nt, Artificial Sequence
  Description of Artificial Sequence: Synthetic oligonucleotide
  Antisense strand to SEQ ID NO: 1760343
gaucacacuuucaacuuuc

SEQ ID NO: 1760345 - RNA, 19 nt, Artificial Sequence
  Description of Artificial Sequence: Synthetic oligonucleotide
  Sense strand starting at position 789 of SEQ ID NO: 1562618
uugaaagugugaucuaaag

SEQ ID NO: 1760346 - RNA, 19 nt, Artificial Sequence
  Description of Artificial Sequence: Synthetic oligonucleotide
  Antisense strand to SEQ ID NO: 1760345
cuuuagaucacacuuucaa

SEQ ID NO: 1760347 - RNA, 19 nt, Artificial Sequence
  Description of Artificial Sequence: Synthetic oligonucleotide
  Sense strand starting at position 795 of SEQ ID NO: 1562618
gugugaucuaaaggaugca

SEQ ID NO: 1760348 - RNA, 19 nt, Artificial Sequence
  Description of Artificial Sequence: Synthetic oligonucleotide
  Antisense strand to SEQ ID NO: 1760347
ugcauccuuuagaucacac

SEQ ID NO: 1760349 - RNA, 19 nt, Artificial Sequence
  Description of Artificial Sequence: Synthetic oligonucleotide
  Sense strand starting at position 796 of SEQ ID NO: 1562618
ugugaucuaaaggaugcau

SEQ ID NO: 1760350 - RNA, 19 nt, Artificial Sequence
  Description of Artificial Sequence: Synthetic oligonucleotide
  Antisense strand to SEQ ID NO: 1760349
augcauccuuuagaucaca

SEQ ID NO: 1760351 - RNA, 19 nt, Artificial Sequence
  Description of Artificial Sequence: Synthetic oligonucleotide
  Sense strand starting at position 913 of SEQ ID NO: 1562618
aggcauaugcaguagaauu

SEQ ID NO: 1760352 - RNA, 19 nt, Artificial Sequence
  Description of Artificial Sequence: Synthetic oligonucleotide
  Antisense strand to SEQ ID NO: 1760351
aauucuacugcauaugccu

SEQ ID NO: 1760353 - RNA, 19 nt, Artificial Sequence
  Description of Artificial Sequence: Synthetic oligonucleotide
  Sense strand starting at position 949 of SEQ ID NO: 1562618
ccaggcuccuuaucuguaa

SEQ ID NO: 1760354 - RNA, 19 nt, Artificial Sequence
  Description of Artificial Sequence: Synthetic oligonucleotide
  Antisense strand to SEQ ID NO: 1760353
uuacagauaaggagccugg

SEQ ID NO: 1760355 - RNA, 19 nt, Artificial Sequence
  Description of Artificial Sequence: Synthetic oligonucleotide
  Sense strand starting at position 953 of SEQ ID NO: 1562618
gcuccuuaucuguaaagga

SEQ ID NO: 1760356 - RNA, 19 nt, Artificial Sequence
  Description of Artificial Sequence: Synthetic oligonucleotide
  Antisense strand to SEQ ID NO: 1760355
uccuuuacagauaaggagc

SEQ ID NO: 1760357 - RNA, 19 nt, Artificial Sequence
  Description of Artificial Sequence: Synthetic oligonucleotide
  Sense strand starting at position 1617 of SEQ ID NO: 1562618
gaaugaugccgccaguuaa

SEQ ID NO: 1760358 - RNA, 19 nt, Artificial Sequence
  Description of Artificial Sequence: Synthetic oligonucleotide
  Antisense strand to SEQ ID NO: 1760357
uuaacuggcggcaucauuc

SEQ ID NO: 1760359 - RNA, 19 nt, Artificial Sequence
  Description of Artificial Sequence: Synthetic oligonucleotide
  Sense strand starting at position 1760 of SEQ ID NO: 1562618
aacaguacccacugaguga

SEQ ID NO: 1760360 - RNA, 19 nt, Artificial Sequence
  Description of Artificial Sequence: Synthetic oligonucleotide
  Antisense strand to SEQ ID NO: 1760359
ucacucaguggguacuguu

SEQ ID NO: 1760361 - RNA, 19 nt, Artificial Sequence
  Description of Artificial Sequence: Synthetic oligonucleotide
  Sense strand starting at position 1885 of SEQ ID NO: 1562618
accggugccacgcagaaau

SEQ ID NO: 1760362 - RNA, 19 nt, Artificial Sequence
  Description of Artificial Sequence: Synthetic oligonucleotide
  Antisense strand to SEQ ID NO: 1760361
auuucugcguggcaccggu

SEQ ID NO: 1760363 - RNA, 19 nt, Artificial Sequence
  Description of Artificial Sequence: Synthetic oligonucleotide
  Sense strand starting at position 1895 of SEQ ID NO: 1562618
cgcagaaauacugcgcgau

SEQ ID NO: 1760364 - RNA, 19 nt, Artificial Sequence
  Description of Artificial Sequence: Synthetic oligonucleotide
  Antisense strand to SEQ ID NO: 1760363
aucgcgcaguauuucugcg

SEQ ID NO: 1760365 - RNA, 19 nt, Artificial Sequence
  Description of Artificial Sequence: Synthetic oligonucleotide
  Sense strand starting at position 2425 of SEQ ID NO: 1562618
uguaucaugcagugggaau

SEQ ID NO: 1760366 - RNA, 19 nt, Artificial Sequence
  Description of Artificial Sequence: Synthetic oligonucleotide
  Antisense strand to SEQ ID NO: 1760365
auucccacugcaugauaca

SEQ ID NO: 1760367 - RNA, 19 nt, Artificial Sequence
  Description of Artificial Sequence: Synthetic oligonucleotide
  Sense strand starting at position 2426 of SEQ ID NO: 1562618
guaucaugcagugggaaua

SEQ ID NO: 1760368 - RNA, 19 nt, Artificial Sequence
  Description of Artificial Sequence: Synthetic oligonucleotide
  Antisense strand to SEQ ID NO: 1760367
uauucccacugcaugauac

SEQ ID NO: 1760369 - RNA, 19 nt, Artificial Sequence
  Description of Artificial Sequence: Synthetic oligonucleotide
  Sense strand starting at position 2427 of SEQ ID NO: 1562618
uaucaugcagugggaauau

SEQ ID NO: 1760370 - RNA, 19 nt, Artificial Sequence
  Description of Artificial Sequence: Synthetic oligonucleotide
  Antisense strand to SEQ ID NO: 1760369
auauucccacugcaugaua

SEQ ID NO: 1760371 - RNA, 19 nt, Artificial Sequence
  Description of Artificial Sequence: Synthetic oligonucleotide
  Sense strand starting at position 2436 of SEQ ID NO: 1562618
gugggaauauugaggugaa

SEQ ID NO: 1760372 - RNA, 19 nt, Artificial Sequence
  Description of Artificial Sequence: Synthetic oligonucleotide
  Antisense strand to SEQ ID NO: 1760371
uucaccucaauauucccac

SEQ ID NO: 1760373 - RNA, 19 nt, Artificial Sequence
  Description of Artificial Sequence: Synthetic oligonucleotide
  Sense strand starting at position 2502 of SEQ ID NO: 1562618
gucacaggcccauaaguaa

SEQ ID NO: 1760374 - RNA, 19 nt, Artificial Sequence
  Description of Artificial Sequence: Synthetic oligonucleotide
  Antisense strand to SEQ ID NO: 1760373
uuacuuaugggccugugac

SEQ ID NO: 1760375 - RNA, 19 nt, Artificial Sequence
  Description of Artificial Sequence: Synthetic oligonucleotide
  Sense strand starting at position 2562 of SEQ ID NO: 1562618
ucuagacguauguaguaua

SEQ ID NO: 1760376 - RNA, 19 nt, Artificial Sequence
  Description of Artificial Sequence: Synthetic oligonucleotide
  Antisense strand to SEQ ID NO: 1760375
uauacuacauacgucuaga

SEQ ID NO: 1760377 - RNA, 19 nt, Artificial Sequence
  Description of Artificial Sequence: Synthetic oligonucleotide
  Sense strand starting at position 2573 of SEQ ID NO: 1562618
guaguauaggaguacucca

SEQ ID NO: 1760378 - RNA, 19 nt, Artificial Sequence
  Description of Artificial Sequence: Synthetic oligonucleotide
  Antisense strand to SEQ ID NO: 1760377
uggaguacuccuauacuac

SEQ ID NO: 1760379 - RNA, 19 nt, Artificial Sequence
  Description of Artificial Sequence: Synthetic oligonucleotide
  Sense strand starting at position 2817 of SEQ ID NO: 1562618
ugcuaauugcuuguaguuu

SEQ ID NO: 1760380 - RNA, 19 nt, Artificial Sequence
  Description of Artificial Sequence: Synthetic oligonucleotide
  Antisense strand to SEQ ID NO: 1760379
aaacuacaagcaauuagca

SEQ ID NO: 1760381 - RNA, 19 nt, Artificial Sequence
  Description of Artificial Sequence: Synthetic oligonucleotide
  Sense strand starting at position 2978 of SEQ ID NO: 1562618
aagucaguagcuuauagua

SEQ ID NO: 1760382 - RNA, 19 nt, Artificial Sequence
  Description of Artificial Sequence: Synthetic oligonucleotide
  Antisense strand to SEQ ID NO: 1760381
uacuauaagcuacugacuu

SEQ ID NO: 1760383 - RNA, 19 nt, Artificial Sequence
  Description of Artificial Sequence: Synthetic oligonucleotide
  Sense strand starting at position 3071 of SEQ ID NO: 1562618
aaauuaccugugggauaug

SEQ ID NO: 1760384 - RNA, 19 nt, Artificial Sequence
  Description of Artificial Sequence: Synthetic oligonucleotide
  Antisense strand to SEQ ID NO: 1760383
cauaucccacagguaauuu

SEQ ID NO: 1760385 - RNA, 19 nt, Artificial Sequence
  Description of Artificial Sequence: Synthetic oligonucleotide
  Sense strand starting at position 3080 of SEQ ID NO: 1562618
gugggauaugugggugcaa

SEQ ID NO: 1760386 - RNA, 19 nt, Artificial Sequence
  Description of Artificial Sequence: Synthetic oligonucleotide
  Antisense strand to SEQ ID NO: 1760385
uugcacccacauaucccac

SEQ ID NO: 1760387 - RNA, 19 nt, Artificial Sequence
  Description of Artificial Sequence: Synthetic oligonucleotide
  Sense strand starting at position 3081 of SEQ ID NO: 1562618
ugggauaugugggugcaaa

SEQ ID NO: 1760388 - RNA, 19 nt, Artificial Sequence
  Description of Artificial Sequence: Synthetic oligonucleotide
  Antisense strand to SEQ ID NO: 1760387
uuugcacccacauauccca

SEQ ID NO: 1760389 - RNA, 19 nt, Artificial Sequence
  Description of Artificial Sequence: Synthetic oligonucleotide
  Sense strand starting at position 3082 of SEQ ID NO: 1562618
gggauaugugggugcaaag

SEQ ID NO: 1760390 - RNA, 19 nt, Artificial Sequence
  Description of Artificial Sequence: Synthetic oligonucleotide
  Antisense strand to SEQ ID NO: 1760389
cuuugcacccacauauccc

SEQ ID NO: 1760391 - RNA, 19 nt, Artificial Sequence
  Description of Artificial Sequence: Synthetic oligonucleotide
  Sense strand starting at position 3122 of SEQ ID NO: 1562618
auaagaaacgugugggauu

SEQ ID NO: 1760392 - RNA, 19 nt, Artificial Sequence
  Description of Artificial Sequence: Synthetic oligonucleotide
  Antisense strand to SEQ ID NO: 1760391
aaucccacacguuucuuau

SEQ ID NO: 1760393 - RNA, 19 nt, Artificial Sequence
  Description of Artificial Sequence: Synthetic oligonucleotide
  Sense strand starting at position 3154 of SEQ ID NO: 1562618
cagugagugucaguagaga

SEQ ID NO: 1760394 - RNA, 19 nt, Artificial Sequence
  Description of Artificial Sequence: Synthetic oligonucleotide
  Antisense strand to SEQ ID NO: 1760393
ucucuacugacacucacug

SEQ ID NO: 1760395 - RNA, 19 nt, Artificial Sequence
  Description of Artificial Sequence: Synthetic oligonucleotide
  Sense strand starting at position 3176 of SEQ ID NO: 1562618
ggagaugacccguggcuga

SEQ ID NO: 1760396 - RNA, 19 nt, Artificial Sequence
  Description of Artificial Sequence: Synthetic oligonucleotide
  Antisense strand to SEQ ID NO: 1760395
ucagccacgggucaucucc

SEQ ID NO: 1760397 - RNA, 19 nt, Artificial Sequence
  Description of Artificial Sequence: Synthetic oligonucleotide
  Sense strand starting at position 3267 of SEQ ID NO: 1562618
ugagguguccuuggaguca

SEQ ID NO: 1760398 - RNA, 19 nt, Artificial Sequence
  Description of Artificial Sequence: Synthetic oligonucleotide
  Antisense strand to SEQ ID NO: 1760397
ugacuccaaggacaccuca

SEQ ID NO: 1760399 - RNA, 19 nt, Artificial Sequence
  Description of Artificial Sequence: Synthetic oligonucleotide
  Sense strand starting at position 3373 of SEQ ID NO: 1562618
gaucauuaaugagcuugga

SEQ ID NO: 1760400 - RNA, 19 nt, Artificial Sequence
  Description of Artificial Sequence: Synthetic oligonucleotide
  Antisense strand to SEQ ID NO: 1760399
uccaagcucauuaaugauc

SEQ ID NO: 1760401 - RNA, 19 nt, Artificial Sequence
  Description of Artificial Sequence: Synthetic oligonucleotide
  Sense strand starting at position 3376 of SEQ ID NO: 1562618
cauuaaugagcuuggaaag

SEQ ID NO: 1760402 - RNA, 19 nt, Artificial Sequence
  Description of Artificial Sequence: Synthetic oligonucleotide
  Antisense strand to SEQ ID NO: 1760401
cuuuccaagcucauuaaug

SEQ ID NO: 1760403 - RNA, 19 nt, Artificial Sequence
  Description of Artificial Sequence: Synthetic oligonucleotide
  Sense strand starting at position 3377 of SEQ ID NO: 1562618
auuaaugagcuuggaaagu

SEQ ID NO: 1760404 - RNA, 19 nt, Artificial Sequence
  Description of Artificial Sequence: Synthetic oligonucleotide
  Antisense strand to SEQ ID NO: 1760403
acuuuccaagcucauuaau

SEQ ID NO: 1760405 - RNA, 19 nt, Artificial Sequence
  Description of Artificial Sequence: Synthetic oligonucleotide
  Sense strand starting at position 199 of SEQ ID NO: 1562619
accaaagaucuuggccauu

SEQ ID NO: 1760406 - RNA, 19 nt, Artificial Sequence
  Description of Artificial Sequence: Synthetic oligonucleotide
  Antisense strand to SEQ ID NO: 1760405
aauggccaagaucuuuggu

SEQ ID NO: 1760407 - RNA, 19 nt, Artificial Sequence
  Description of Artificial Sequence: Synthetic oligonucleotide
  Sense strand starting at position 371 of SEQ ID NO: 1562619
gugcuuacagucuauuaca

SEQ ID NO: 1760408 - RNA, 19 nt, Artificial Sequence
  Description of Artificial Sequence: Synthetic oligonucleotide
  Antisense strand to SEQ ID NO: 1760407
uguaauagacuguaagcac

SEQ ID NO: 1760409 - RNA, 19 nt, Artificial Sequence
  Description of Artificial Sequence: Synthetic oligonucleotide
  Sense strand starting at position 392 of SEQ ID NO: 1562619
ggaaauggcugcuuccuaa

SEQ ID NO: 1760410 - RNA, 19 nt, Artificial Sequence
  Description of Artificial Sequence: Synthetic oligonucleotide
  Antisense strand to SEQ ID NO: 1760409
uuaggaagcagccauuucc

SEQ ID NO: 1760411 - RNA, 19 nt, Artificial Sequence
  Description of Artificial Sequence: Synthetic oligonucleotide
  Sense strand starting at position 443 of SEQ ID NO: 1562619
gagugugaaccuuauaguc

SEQ ID NO: 1760412 - RNA, 19 nt, Artificial Sequence
  Description of Artificial Sequence: Synthetic oligonucleotide
  Antisense strand to SEQ ID NO: 1760411
gacuauaagguucacacuc

SEQ ID NO: 1760413 - RNA, 19 nt, Artificial Sequence
  Description of Artificial Sequence: Synthetic oligonucleotide
  Sense strand starting at position 504 of SEQ ID NO: 1562619
gcaugacuuuggguaagag

SEQ ID NO: 1760414 - RNA, 19 nt, Artificial Sequence
  Description of Artificial Sequence: Synthetic oligonucleotide
  Antisense strand to SEQ ID NO: 1760413
cucuuacccaaagucaugc

SEQ ID NO: 1760415 - RNA, 19 nt, Artificial Sequence
  Description of Artificial Sequence: Synthetic oligonucleotide
  Sense strand starting at position 522 of SEQ ID NO: 1562619
ggaugccuuccugagcuuu

SEQ ID NO: 1760416 - RNA, 19 nt, Artificial Sequence
  Description of Artificial Sequence: Synthetic oligonucleotide
  Antisense strand to SEQ ID NO: 1760415
aaagcucaggaaggcaucc

SEQ ID NO: 1760417 - RNA, 19 nt, Artificial Sequence
  Description of Artificial Sequence: Synthetic oligonucleotide
  Sense strand starting at position 550 of SEQ ID NO: 1562619
aucuguuuaauggguguaa

SEQ ID NO: 1760418 - RNA, 19 nt, Artificial Sequence
  Description of Artificial Sequence: Synthetic oligonucleotide
  Antisense strand to SEQ ID NO: 1760417
uuacacccauuaaacagau

SEQ ID NO: 1760419 - RNA, 19 nt, Artificial Sequence
  Description of Artificial Sequence: Synthetic oligonucleotide
  Sense strand starting at position 552 of SEQ ID NO: 1562619
cuguuuaauggguguaaga

SEQ ID NO: 1760420 - RNA, 19 nt, Artificial Sequence
  Description of Artificial Sequence: Synthetic oligonucleotide
  Antisense strand to SEQ ID NO: 1760419
ucuuacacccauuaaacag

SEQ ID NO: 1760421 - RNA, 19 nt, Artificial Sequence
  Description of Artificial Sequence: Synthetic oligonucleotide
  Sense strand starting at position 554 of SEQ ID NO: 1562619
guuuaauggguguaagaag

SEQ ID NO: 1760422 - RNA, 19 nt, Artificial Sequence
  Description of Artificial Sequence: Synthetic oligonucleotide
  Antisense strand to SEQ ID NO: 1760421
cuucuuacacccauuaaac

SEQ ID NO: 1760423 - RNA, 19 nt, Artificial Sequence
  Description of Artificial Sequence: Synthetic oligonucleotide
  Sense strand starting at position 723 of SEQ ID NO: 1562619
gaguacuucuuguuggaga

SEQ ID NO: 1760424 - RNA, 19 nt, Artificial Sequence
  Description of Artificial Sequence: Synthetic oligonucleotide
  Antisense strand to SEQ ID NO: 1760423
ucuccaacaagaaguacuc

SEQ ID NO: 1760425 - RNA, 19 nt, Artificial Sequence
  Description of Artificial Sequence: Synthetic oligonucleotide
  Sense strand starting at position 725 of SEQ ID NO: 1562619
guacuucuuguuggagaaa

SEQ ID NO: 1760426 - RNA, 19 nt, Artificial Sequence
  Description of Artificial Sequence: Synthetic oligonucleotide
  Antisense strand to SEQ ID NO: 1760425
uuucuccaacaagaaguac

SEQ ID NO: 1760427 - RNA, 19 nt, Artificial Sequence
  Description of Artificial Sequence: Synthetic oligonucleotide
  Sense strand starting at position 765 of SEQ ID NO: 1562619
gguaagauuucggcugggu

SEQ ID NO: 1760428 - RNA, 19 nt, Artificial Sequence
  Description of Artificial Sequence: Synthetic oligonucleotide
  Antisense strand to SEQ ID NO: 1760427
acccagccgaaaucuuacc

SEQ ID NO: 1760429 - RNA, 19 nt, Artificial Sequence
  Description of Artificial Sequence: Synthetic oligonucleotide
  Sense strand starting at position 767 of SEQ ID NO: 1562619
uaagauuucggcuggguau

SEQ ID NO: 1760430 - RNA, 19 nt, Artificial Sequence
  Description of Artificial Sequence: Synthetic oligonucleotide
  Antisense strand to SEQ ID NO: 1760429
auacccagccgaaaucuua

SEQ ID NO: 1760431 - RNA, 19 nt, Artificial Sequence
  Description of Artificial Sequence: Synthetic oligonucleotide
  Sense strand starting at position 768 of SEQ ID NO: 1562619
aagauuucggcuggguauu

SEQ ID NO: 1760432 - RNA, 19 nt, Artificial Sequence
  Description of Artificial Sequence: Synthetic oligonucleotide
  Antisense strand to SEQ ID NO: 1760431
aauacccagccgaaaucuu

SEQ ID NO: 1760433 - RNA, 19 nt, Artificial Sequence
  Description of Artificial Sequence: Synthetic oligonucleotide
  Sense strand starting at position 769 of SEQ ID NO: 1562619
agauuucggcuggguauua

SEQ ID NO: 1760434 - RNA, 19 nt, Artificial Sequence
  Description of Artificial Sequence: Synthetic oligonucleotide
  Antisense strand to SEQ ID NO: 1760433
uaauacccagccgaaaucu

SEQ ID NO: 1760435 - RNA, 19 nt, Artificial Sequence
  Description of Artificial Sequence: Synthetic oligonucleotide
  Sense strand starting at position 778 of SEQ ID NO: 1562619
cuggguauuaaaggaaugu

SEQ ID NO: 1760436 - RNA, 19 nt, Artificial Sequence
  Description of Artificial Sequence: Synthetic oligonucleotide
  Antisense strand to SEQ ID NO: 1760435
acauuccuuuaauacccag

SEQ ID NO: 1760437 - RNA, 19 nt, Artificial Sequence
  Description of Artificial Sequence: Synthetic oligonucleotide
  Sense strand starting at position 948 of SEQ ID NO: 1562619
gaaguuauaucuuuaacga

SEQ ID NO: 1760438 - RNA, 19 nt, Artificial Sequence
  Description of Artificial Sequence: Synthetic oligonucleotide
  Antisense strand to SEQ ID NO: 1760437
ucguuaaagauauaacuuc

SEQ ID NO: 1760439 - RNA, 19 nt, Artificial Sequence
  Description of Artificial Sequence: Synthetic oligonucleotide
  Sense strand starting at position 949 of SEQ ID NO: 1562619
aaguuauaucuuuaacgag

SEQ ID NO: 1760440 - RNA, 19 nt, Artificial Sequence
  Description of Artificial Sequence: Synthetic oligonucleotide
  Antisense strand to SEQ ID NO: 1760439
cucguuaaagauauaacuu

SEQ ID NO: 1760441 - RNA, 19 nt, Artificial Sequence
  Description of Artificial Sequence: Synthetic oligonucleotide
  Sense strand starting at position 955 of SEQ ID NO: 1562619
uaucuuuaacgagggaaug

SEQ ID NO: 1760442 - RNA, 19 nt, Artificial Sequence
  Description of Artificial Sequence: Synthetic oligonucleotide
  Antisense strand to SEQ ID NO: 1760441
cauucccucguuaaagaua

SEQ ID NO: 1760443 - RNA, 19 nt, Artificial Sequence
  Description of Artificial Sequence: Synthetic oligonucleotide
  Sense strand starting at position 1075 of SEQ ID NO: 1562619
aucccuuuaucuccugagu

SEQ ID NO: 1760444 - RNA, 19 nt, Artificial Sequence
  Description of Artificial Sequence: Synthetic oligonucleotide
  Antisense strand to SEQ ID NO: 1760443
acucaggagauaaagggau

SEQ ID NO: 1760445 - RNA, 19 nt, Artificial Sequence
  Description of Artificial Sequence: Synthetic oligonucleotide
  Sense strand starting at position 1203 of SEQ ID NO: 1562619
ggcagagaaccauggugaa

SEQ ID NO: 1760446 - RNA, 19 nt, Artificial Sequence
  Description of Artificial Sequence: Synthetic oligonucleotide
  Antisense strand to SEQ ID NO: 1760445
uucaccaugguucucugcc

SEQ ID NO: 1760447 - RNA, 19 nt, Artificial Sequence
  Description of Artificial Sequence: Synthetic oligonucleotide
  Sense strand starting at position 1273 of SEQ ID NO: 1562619
gaugacaguuaugcucaua

SEQ ID NO: 1760448 - RNA, 19 nt, Artificial Sequence
  Description of Artificial Sequence: Synthetic oligonucleotide
  Antisense strand to SEQ ID NO: 1760447
uaugagcauaacugucauc

SEQ ID NO: 1760449 - RNA, 19 nt, Artificial Sequence
  Description of Artificial Sequence: Synthetic oligonucleotide
  Sense strand starting at position 1276 of SEQ ID NO: 1562619
gacaguuaugcucauagcu

SEQ ID NO: 1760450 - RNA, 19 nt, Artificial Sequence
  Description of Artificial Sequence: Synthetic oligonucleotide
  Antisense strand to SEQ ID NO: 1760449
agcuaugagcauaacuguc

SEQ ID NO: 1760451 - RNA, 19 nt, Artificial Sequence
  Description of Artificial Sequence: Synthetic oligonucleotide
  Sense strand starting at position 1292 of SEQ ID NO: 1562619
gcucaacagcuacaagaau

SEQ ID NO: 1760452 - RNA, 19 nt, Artificial Sequence
  Description of Artificial Sequence: Synthetic oligonucleotide
  Antisense strand to SEQ ID NO: 1760451
auucuuguagcuguugagc

SEQ ID NO: 1760453 - RNA, 19 nt, Artificial Sequence
  Description of Artificial Sequence: Synthetic oligonucleotide
  Sense strand starting at position 1301 of SEQ ID NO: 1562619
cuacaagaauguucucaga

SEQ ID NO: 1760454 - RNA, 19 nt, Artificial Sequence
  Description of Artificial Sequence: Synthetic oligonucleotide
  Antisense strand to SEQ ID NO: 1760453
ucugagaacauucuuguag

SEQ ID NO: 1760455 - RNA, 19 nt, Artificial Sequence
  Description of Artificial Sequence: Synthetic oligonucleotide
  Sense strand starting at position 1303 of SEQ ID NO: 1562619
acaagaauguucucagacu

SEQ ID NO: 1760456 - RNA, 19 nt, Artificial Sequence
  Description of Artificial Sequence: Synthetic oligonucleotide
  Antisense strand to SEQ ID NO: 1760455
agucugagaacauucuugu

SEQ ID NO: 1760457 - RNA, 19 nt, Artificial Sequence
  Description of Artificial Sequence: Synthetic oligonucleotide
  Sense strand starting at position 1547 of SEQ ID NO: 1562619
aggucuugacaugguccaa

SEQ ID NO: 1760458 - RNA, 19 nt, Artificial Sequence
  Description of Artificial Sequence: Synthetic oligonucleotide
  Antisense strand to SEQ ID NO: 1760457
uuggaccaugucaagaccu

SEQ ID NO: 1760459 - RNA, 19 nt, Artificial Sequence
  Description of Artificial Sequence: Synthetic oligonucleotide
  Sense strand starting at position 1601 of SEQ ID NO: 1562619
uugaguugucaugacauug

SEQ ID NO: 1760460 - RNA, 19 nt, Artificial Sequence
  Description of Artificial Sequence: Synthetic oligonucleotide
  Antisense strand to SEQ ID NO: 1760459
caaugucaugacaacucaa

SEQ ID NO: 1760461 - RNA, 19 nt, Artificial Sequence
  Description of Artificial Sequence: Synthetic oligonucleotide
  Sense strand starting at position 2159 of SEQ ID NO: 1562619
ggcucuagaugauccugaa

SEQ ID NO: 1760462 - RNA, 19 nt, Artificial Sequence
  Description of Artificial Sequence: Synthetic oligonucleotide
  Antisense strand to SEQ ID NO: 1760461
uucaggaucaucuagagcc

SEQ ID NO: 1760463 - RNA, 19 nt, Artificial Sequence
  Description of Artificial Sequence: Synthetic oligonucleotide
  Sense strand starting at position 2299 of SEQ ID NO: 1562619
gcaagaaucugacucuucu

SEQ ID NO: 1760464 - RNA, 19 nt, Artificial Sequence
  Description of Artificial Sequence: Synthetic oligonucleotide
  Antisense strand to SEQ ID NO: 1760463
agaagagucagauucuugc

SEQ ID NO: 1760465 - RNA, 19 nt, Artificial Sequence
  Description of Artificial Sequence: Synthetic oligonucleotide
  Sense strand starting at position 2380 of SEQ ID NO: 1562619
gagauaauaugagaguaaa

SEQ ID NO: 1760466 - RNA, 19 nt, Artificial Sequence
  Description of Artificial Sequence: Synthetic oligonucleotide
  Antisense strand to SEQ ID NO: 1760465
uuuacucucauauuaucuc

SEQ ID NO: 1760467 - RNA, 19 nt, Artificial Sequence
  Description of Artificial Sequence: Synthetic oligonucleotide
  Sense strand starting at position 2417 of SEQ ID NO: 1562619
ggcagaggguaagugauua

SEQ ID NO: 1760468 - RNA, 19 nt, Artificial Sequence
  Description of Artificial Sequence: Synthetic oligonucleotide
  Antisense strand to SEQ ID NO: 1760467
uaaucacuuacccucugcc

SEQ ID NO: 1760469 - RNA, 19 nt, Artificial Sequence
  Description of Artificial Sequence: Synthetic oligonucleotide
  Sense strand starting at position 2858 of SEQ ID NO: 1562619
aaauccuaucugggugaca

SEQ ID NO: 1760470 - RNA, 19 nt, Artificial Sequence
  Description of Artificial Sequence: Synthetic oligonucleotide
  Antisense strand to SEQ ID NO: 1760469
ugucacccagauaggauuu

SEQ ID NO: 1760471 - RNA, 19 nt, Artificial Sequence
  Description of Artificial Sequence: Synthetic oligonucleotide
  Sense strand starting at position 2859 of SEQ ID NO: 1562619
aauccuaucugggugacau

SEQ ID NO: 1760472 - RNA, 19 nt, Artificial Sequence
  Description of Artificial Sequence: Synthetic oligonucleotide
  Antisense strand to SEQ ID NO: 1760471
augucacccagauaggauu

SEQ ID NO: 1760473 - RNA, 19 nt, Artificial Sequence
  Description of Artificial Sequence: Synthetic oligonucleotide
  Sense strand starting at position 2860 of SEQ ID NO: 1562619
auccuaucugggugacauu

SEQ ID NO: 1760474 - RNA, 19 nt, Artificial Sequence
  Description of Artificial Sequence: Synthetic oligonucleotide
  Antisense strand to SEQ ID NO: 1760473
aaugucacccagauaggau

SEQ ID NO: 1760475 - RNA, 19 nt, Artificial Sequence
  Description of Artificial Sequence: Synthetic oligonucleotide
  Sense strand starting at position 2861 of SEQ ID NO: 1562619
uccuaucugggugacauua

SEQ ID NO: 1760476 - RNA, 19 nt, Artificial Sequence
  Description of Artificial Sequence: Synthetic oligonucleotide
  Antisense strand to SEQ ID NO: 1760475
uaaugucacccagauagga

SEQ ID NO: 1760477 - RNA, 19 nt, Artificial Sequence
  Description of Artificial Sequence: Synthetic oligonucleotide
  Sense strand starting at position 3013 of SEQ ID NO: 1562619
cagaguaagugucucagag

SEQ ID NO: 1760478 - RNA, 19 nt, Artificial Sequence
  Description of Artificial Sequence: Synthetic oligonucleotide
  Antisense strand to SEQ ID NO: 1760477
cucugagacacuuacucug

SEQ ID NO: 1760479 - RNA, 19 nt, Artificial Sequence
  Description of Artificial Sequence: Synthetic oligonucleotide
  Sense strand starting at position 3020 of SEQ ID NO: 1562619
agugucucagaguauccau

SEQ ID NO: 1760480 - RNA, 19 nt, Artificial Sequence
  Description of Artificial Sequence: Synthetic oligonucleotide
  Antisense strand to SEQ ID NO: 1760479
auggauacucugagacacu

SEQ ID NO: 1760481 - RNA, 19 nt, Artificial Sequence
  Description of Artificial Sequence: Synthetic oligonucleotide
  Sense strand starting at position 3029 of SEQ ID NO: 1562619
gaguauccaugaguggaaa

SEQ ID NO: 1760482 - RNA, 19 nt, Artificial Sequence
  Description of Artificial Sequence: Synthetic oligonucleotide
  Antisense strand to SEQ ID NO: 1760481
uuuccacucauggauacuc

SEQ ID NO: 1760483 - RNA, 19 nt, Artificial Sequence
  Description of Artificial Sequence: Synthetic oligonucleotide
  Sense strand starting at position 3125 of SEQ ID NO: 1562619
cuggcaaugcuuuagaaau

SEQ ID NO: 1760484 - RNA, 19 nt, Artificial Sequence
  Description of Artificial Sequence: Synthetic oligonucleotide
  Antisense strand to SEQ ID NO: 1760483
auuucuaaagcauugccag

SEQ ID NO: 1760485 - RNA, 19 nt, Artificial Sequence
  Description of Artificial Sequence: Synthetic oligonucleotide
  Sense strand starting at position 97 of SEQ ID NO: 1562620
ugcccuuggcguguugaaa

SEQ ID NO: 1760486 - RNA, 19 nt, Artificial Sequence
  Description of Artificial Sequence: Synthetic oligonucleotide
  Antisense strand to SEQ ID NO: 1760485
uuucaacacgccaagggca

SEQ ID NO: 1760487 - RNA, 19 nt, Artificial Sequence
  Description of Artificial Sequence: Synthetic oligonucleotide
  Sense strand starting at position 98 of SEQ ID NO: 1562620
gcccuuggcguguugaaau

SEQ ID NO: 1760488 - RNA, 19 nt, Artificial Sequence
  Description of Artificial Sequence: Synthetic oligonucleotide
  Antisense strand to SEQ ID NO: 1760487
auuucaacacgccaagggc

SEQ ID NO: 1760489 - RNA, 19 nt, Artificial Sequence
  Description of Artificial Sequence: Synthetic oligonucleotide
  Sense strand starting at position 470 of SEQ ID NO: 1562620
auguguccugaauauuacu

SEQ ID NO: 1760490 - RNA, 19 nt, Artificial Sequence
  Description of Artificial Sequence: Synthetic oligonucleotide
  Antisense strand to SEQ ID NO: 1760489
aguaauauucaggacacau

SEQ ID NO: 1760491 - RNA, 19 nt, Artificial Sequence
  Description of Artificial Sequence: Synthetic oligonucleotide
  Sense strand starting at position 732 of SEQ ID NO: 1562620
ccggcuucuccgccaguau

SEQ ID NO: 1760492 - RNA, 19 nt, Artificial Sequence
  Description of Artificial Sequence: Synthetic oligonucleotide
  Antisense strand to SEQ ID NO: 1760491
auacuggcggagaagccgg

SEQ ID NO: 1760493 - RNA, 19 nt, Artificial Sequence
  Description of Artificial Sequence: Synthetic oligonucleotide
  Sense strand starting at position 982 of SEQ ID NO: 1562620
ggcgguggcuauuuauagu

SEQ ID NO: 1760494 - RNA, 19 nt, Artificial Sequence
  Description of Artificial Sequence: Synthetic oligonucleotide
  Antisense strand to SEQ ID NO: 1760493
acuauaaauagccaccgcc

SEQ ID NO: 1760495 - RNA, 19 nt, Artificial Sequence
  Description of Artificial Sequence: Synthetic oligonucleotide
  Sense strand starting at position 1004 of SEQ ID NO: 1562620
ugacgucaccuugaaauag

SEQ ID NO: 1760496 - RNA, 19 nt, Artificial Sequence
  Description of Artificial Sequence: Synthetic oligonucleotide
  Antisense strand to SEQ ID NO: 1760495
cuauuucaaggugacguca

SEQ ID NO: 1760497 - RNA, 19 nt, Artificial Sequence
  Description of Artificial Sequence: Synthetic oligonucleotide
  Sense strand starting at position 1788 of SEQ ID NO: 1562620
gcauuucuccuagagcguu

SEQ ID NO: 1760498 - RNA, 19 nt, Artificial Sequence
  Description of Artificial Sequence: Synthetic oligonucleotide
  Antisense strand to SEQ ID NO: 1760497
aacgcucuaggagaaaugc

SEQ ID NO: 1760499 - RNA, 19 nt, Artificial Sequence
  Description of Artificial Sequence: Synthetic oligonucleotide
  Sense strand starting at position 1941 of SEQ ID NO: 1562620
ugcucugcucguucgaauu

SEQ ID NO: 1760500 - RNA, 19 nt, Artificial Sequence
  Description of Artificial Sequence: Synthetic oligonucleotide
  Antisense strand to SEQ ID NO: 1760499
aauucgaacgagcagagca

SEQ ID NO: 1760501 - RNA, 19 nt, Artificial Sequence
  Description of Artificial Sequence: Synthetic oligonucleotide
  Sense strand starting at position 2125 of SEQ ID NO: 1562620
acgugacuucuaggugaga

SEQ ID NO: 1760502 - RNA, 19 nt, Artificial Sequence
  Description of Artificial Sequence: Synthetic oligonucleotide
  Antisense strand to SEQ ID NO: 1760501
ucucaccuagaagucacgu

SEQ ID NO: 1760503 - RNA, 19 nt, Artificial Sequence
  Description of Artificial Sequence: Synthetic oligonucleotide
  Sense strand starting at position 2452 of SEQ ID NO: 1562620
agaaauucgggcggugaga

SEQ ID NO: 1760504 - RNA, 19 nt, Artificial Sequence
  Description of Artificial Sequence: Synthetic oligonucleotide
  Antisense strand to SEQ ID NO: 1760503
ucucaccgcccgaauuucu

SEQ ID NO: 1760505 - RNA, 19 nt, Artificial Sequence
  Description of Artificial Sequence: Synthetic oligonucleotide
  Sense strand starting at position 2471 of SEQ ID NO: 1562620
cucagacaucugcauugua

SEQ ID NO: 1760506 - RNA, 19 nt, Artificial Sequence
  Description of Artificial Sequence: Synthetic oligonucleotide
  Antisense strand to SEQ ID NO: 1760505
uacaaugcagaugucugag

SEQ ID NO: 1760507 - RNA, 19 nt, Artificial Sequence
  Description of Artificial Sequence: Synthetic oligonucleotide
  Sense strand starting at position 2529 of SEQ ID NO: 1562620
agaauuacugcccaugauu

SEQ ID NO: 1760508 - RNA, 19 nt, Artificial Sequence
  Description of Artificial Sequence: Synthetic oligonucleotide
  Antisense strand to SEQ ID NO: 1760507
aaucaugggcaguaauucu

SEQ ID NO: 1760509 - RNA, 19 nt, Artificial Sequence
  Description of Artificial Sequence: Synthetic oligonucleotide
  Sense strand starting at position 2714 of SEQ ID NO: 1562620
uaagaaaggugcuugaaga

SEQ ID NO: 1760510 - RNA, 19 nt, Artificial Sequence
  Description of Artificial Sequence: Synthetic oligonucleotide
  Antisense strand to SEQ ID NO: 1760509
ucuucaagcaccuuucuua

SEQ ID NO: 1760511 - RNA, 19 nt, Artificial Sequence
  Description of Artificial Sequence: Synthetic oligonucleotide
  Sense strand starting at position 2771 of SEQ ID NO: 1562620
ggguguguuuggaaaccag

SEQ ID NO: 1760512 - RNA, 19 nt, Artificial Sequence
  Description of Artificial Sequence: Synthetic oligonucleotide
  Antisense strand to SEQ ID NO: 1760511
cugguuuccaaacacaccc

SEQ ID NO: 1760513 - RNA, 19 nt, Artificial Sequence
  Description of Artificial Sequence: Synthetic oligonucleotide
  Sense strand starting at position 2805 of SEQ ID NO: 1562620
uauguugauuuguugguga

SEQ ID NO: 1760514 - RNA, 19 nt, Artificial Sequence
  Description of Artificial Sequence: Synthetic oligonucleotide
  Antisense strand to SEQ ID NO: 1760513
ucaccaacaaaucaacaua

SEQ ID NO: 1760515 - RNA, 19 nt, Artificial Sequence
  Description of Artificial Sequence: Synthetic oligonucleotide
  Sense strand starting at position 2807 of SEQ ID NO: 1562620
uguugauuuguuggugauc

SEQ ID NO: 1760516 - RNA, 19 nt, Artificial Sequence
  Description of Artificial Sequence: Synthetic oligonucleotide
  Antisense strand to SEQ ID NO: 1760515
gaucaccaacaaaucaaca

SEQ ID NO: 1760517 - RNA, 19 nt, Artificial Sequence
  Description of Artificial Sequence: Synthetic oligonucleotide
  Sense strand starting at position 2808 of SEQ ID NO: 1562620
guugauuuguuggugaucu

SEQ ID NO: 1760518 - RNA, 19 nt, Artificial Sequence
  Description of Artificial Sequence: Synthetic oligonucleotide
  Antisense strand to SEQ ID NO: 1760517
agaucaccaacaaaucaac

SEQ ID NO: 1760519 - RNA, 19 nt, Artificial Sequence
  Description of Artificial Sequence: Synthetic oligonucleotide
  Sense strand starting at position 2816 of SEQ ID NO: 1562620
guuggugaucuugacuuga

SEQ ID NO: 1760520 - RNA, 19 nt, Artificial Sequence
  Description of Artificial Sequence: Synthetic oligonucleotide
  Antisense strand to SEQ ID NO: 1760519
ucaagucaagaucaccaac

SEQ ID NO: 1760521 - RNA, 19 nt, Artificial Sequence
  Description of Artificial Sequence: Synthetic oligonucleotide
  Sense strand starting at position 2824 of SEQ ID NO: 1562620
ucuugacuugagcacuauu

SEQ ID NO: 1760522 - RNA, 19 nt, Artificial Sequence
  Description of Artificial Sequence: Synthetic oligonucleotide
  Antisense strand to SEQ ID NO: 1760521
aauagugcucaagucaaga

SEQ ID NO: 1760523 - RNA, 19 nt, Artificial Sequence
  Description of Artificial Sequence: Synthetic oligonucleotide
  Sense strand starting at position 2900 of SEQ ID NO: 1562620
gaggcugaacuuuauguaa

SEQ ID NO: 1760524 - RNA, 19 nt, Artificial Sequence
  Description of Artificial Sequence: Synthetic oligonucleotide
  Antisense strand to SEQ ID NO: 1760523
uuacauaaaguucagccuc

SEQ ID NO: 1760525 - RNA, 19 nt, Artificial Sequence
  Description of Artificial Sequence: Synthetic oligonucleotide
  Sense strand starting at position 2988 of SEQ ID NO: 1562620
ugcauuuccuuggaaggga

SEQ ID NO: 1760526 - RNA, 19 nt, Artificial Sequence
  Description of Artificial Sequence: Synthetic oligonucleotide
  Antisense strand to SEQ ID NO: 1760525
ucccuuccaaggaaaugca

SEQ ID NO: 1760527 - RNA, 19 nt, Artificial Sequence
  Description of Artificial Sequence: Synthetic oligonucleotide
  Sense strand starting at position 3151 of SEQ ID NO: 1562620
cucuaagugagacguaaag

SEQ ID NO: 1760528 - RNA, 19 nt, Artificial Sequence
  Description of Artificial Sequence: Synthetic oligonucleotide
  Antisense strand to SEQ ID NO: 1760527
cuuuacgucucacuuagag

SEQ ID NO: 1760529 - RNA, 19 nt, Artificial Sequence
  Description of Artificial Sequence: Synthetic oligonucleotide
  Sense strand starting at position 3179 of SEQ ID NO: 1562620
uucggagcccuuugggaaa

SEQ ID NO: 1760530 - RNA, 19 nt, Artificial Sequence
  Description of Artificial Sequence: Synthetic oligonucleotide
  Antisense strand to SEQ ID NO: 1760529
uuucccaaagggcuccgaa

SEQ ID NO: 1760531 - RNA, 19 nt, Artificial Sequence
  Description of Artificial Sequence: Synthetic oligonucleotide
  Sense strand starting at position 3271 of SEQ ID NO: 1562620
agguguguucuggaacaau

SEQ ID NO: 1760532 - RNA, 19 nt, Artificial Sequence
  Description of Artificial Sequence: Synthetic oligonucleotide
  Antisense strand to SEQ ID NO: 1760531
auuguuccagaacacaccu

SEQ ID NO: 1760533 - RNA, 19 nt, Artificial Sequence
  Description of Artificial Sequence: Synthetic oligonucleotide
  Sense strand starting at position 3349 of SEQ ID NO: 1562620
aacgaaaucuaguuugagc

SEQ ID NO: 1760534 - RNA, 19 nt, Artificial Sequence
  Description of Artificial Sequence: Synthetic oligonucleotide
  Antisense strand to SEQ ID NO: 1760533
gcucaaacuagauuucguu

SEQ ID NO: 1760535 - RNA, 19 nt, Artificial Sequence
  Description of Artificial Sequence: Synthetic oligonucleotide
  Sense strand starting at position 3354 of SEQ ID NO: 1562620
aaucuaguuugagcagaga

SEQ ID NO: 1760536 - RNA, 19 nt, Artificial Sequence
  Description of Artificial Sequence: Synthetic oligonucleotide
  Antisense strand to SEQ ID NO: 1760535
ucucugcucaaacuagauu

SEQ ID NO: 1760537 - RNA, 19 nt, Artificial Sequence
  Description of Artificial Sequence: Synthetic oligonucleotide
  Sense strand starting at position 3420 of SEQ ID NO: 1562620
gcuacuuguguccauagau

SEQ ID NO: 1760538 - RNA, 19 nt, Artificial Sequence
  Description of Artificial Sequence: Synthetic oligonucleotide
  Antisense strand to SEQ ID NO: 1760537
aucuauggacacaaguagc

SEQ ID NO: 1760539 - RNA, 19 nt, Artificial Sequence
  Description of Artificial Sequence: Synthetic oligonucleotide
  Sense strand starting at position 3435 of SEQ ID NO: 1562620
agaucuucucuggaggguu

SEQ ID NO: 1760540 - RNA, 19 nt, Artificial Sequence
  Description of Artificial Sequence: Synthetic oligonucleotide
  Antisense strand to SEQ ID NO: 1760539
aacccuccagagaagaucu

SEQ ID NO: 1760541 - RNA, 19 nt, Artificial Sequence
  Description of Artificial Sequence: Synthetic oligonucleotide
  Sense strand starting at position 3437 of SEQ ID NO: 1562620
aucuucucuggaggguuaa

SEQ ID NO: 1760542 - RNA, 19 nt, Artificial Sequence
  Description of Artificial Sequence: Synthetic oligonucleotide
  Antisense strand to SEQ ID NO: 1760541
uuaacccuccagagaagau

SEQ ID NO: 1760543 - RNA, 19 nt, Artificial Sequence
  Description of Artificial Sequence: Synthetic oligonucleotide
  Sense strand starting at position 3561 of SEQ ID NO: 1562620
gccaucucagaauggugau

SEQ ID NO: 1760544 - RNA, 19 nt, Artificial Sequence
  Description of Artificial Sequence: Synthetic oligonucleotide
  Antisense strand to SEQ ID NO: 1760543
aucaccauucugagauggc

SEQ ID NO: 1760545 - RNA, 19 nt, Artificial Sequence
  Description of Artificial Sequence: Synthetic oligonucleotide
  Sense strand starting at position 3607 of SEQ ID NO: 1562620
ggaauauauugugcuuaua

SEQ ID NO: 1760546 - RNA, 19 nt, Artificial Sequence
  Description of Artificial Sequence: Synthetic oligonucleotide
  Antisense strand to SEQ ID NO: 1760545
uauaagcacaauauauucc

SEQ ID NO: 1760547 - RNA, 19 nt, Artificial Sequence
  Description of Artificial Sequence: Synthetic oligonucleotide
  Sense strand starting at position 3610 of SEQ ID NO: 1562620
auauauugugcuuauaggu

SEQ ID NO: 1760548 - RNA, 19 nt, Artificial Sequence
  Description of Artificial Sequence: Synthetic oligonucleotide
  Antisense strand to SEQ ID NO: 1760547
accuauaagcacaauauau

SEQ ID NO: 1760549 - RNA, 19 nt, Artificial Sequence
  Description of Artificial Sequence: Synthetic oligonucleotide
  Sense strand starting at position 3714 of SEQ ID NO: 1562620
uucuuaauguuacugggau

SEQ ID NO: 1760550 - RNA, 19 nt, Artificial Sequence
  Description of Artificial Sequence: Synthetic oligonucleotide
  Antisense strand to SEQ ID NO: 1760549
aucccaguaacauuaagaa

SEQ ID NO: 1760551 - RNA, 19 nt, Artificial Sequence
  Description of Artificial Sequence: Synthetic oligonucleotide
  Sense strand starting at position 3716 of SEQ ID NO: 1562620
cuuaauguuacugggauga

SEQ ID NO: 1760552 - RNA, 19 nt, Artificial Sequence
  Description of Artificial Sequence: Synthetic oligonucleotide
  Antisense strand to SEQ ID NO: 1760551
ucaucccaguaacauuaag

SEQ ID NO: 1760553 - RNA, 19 nt, Artificial Sequence
  Description of Artificial Sequence: Synthetic oligonucleotide
  Sense strand starting at position 3720 of SEQ ID NO: 1562620
auguuacugggaugacuca

SEQ ID NO: 1760554 - RNA, 19 nt, Artificial Sequence
  Description of Artificial Sequence: Synthetic oligonucleotide
  Antisense strand to SEQ ID NO: 1760553
ugagucaucccaguaacau

SEQ ID NO: 1760555 - RNA, 19 nt, Artificial Sequence
  Description of Artificial Sequence: Synthetic oligonucleotide
  Sense strand starting at position 3732 of SEQ ID NO: 1562620
ugacucagucucuauguua

SEQ ID NO: 1760556 - RNA, 19 nt, Artificial Sequence
  Description of Artificial Sequence: Synthetic oligonucleotide
  Antisense strand to SEQ ID NO: 1760555
uaacauagagacugaguca

SEQ ID NO: 1760557 - RNA, 19 nt, Artificial Sequence
  Description of Artificial Sequence: Synthetic oligonucleotide
  Sense strand starting at position 3779 of SEQ ID NO: 1562620
uuggaaaggguguaaguuu

SEQ ID NO: 1760558 - RNA, 19 nt, Artificial Sequence
  Description of Artificial Sequence: Synthetic oligonucleotide
  Antisense strand to SEQ ID NO: 1760557
aaacuuacacccuuuccaa

SEQ ID NO: 1760559 - RNA, 19 nt, Artificial Sequence
  Description of Artificial Sequence: Synthetic oligonucleotide
  Sense strand starting at position 3877 of SEQ ID NO: 1562620
gcaggacacauguguuaag

SEQ ID NO: 1760560 - RNA, 19 nt, Artificial Sequence
  Description of Artificial Sequence: Synthetic oligonucleotide
  Antisense strand to SEQ ID NO: 1760559
cuuaacacauguguccugc

SEQ ID NO: 1760561 - RNA, 19 nt, Artificial Sequence
  Description of Artificial Sequence: Synthetic oligonucleotide
  Sense strand starting at position 3886 of SEQ ID NO: 1562620
auguguuaaggauauauuc

SEQ ID NO: 1760562 - RNA, 19 nt, Artificial Sequence
  Description of Artificial Sequence: Synthetic oligonucleotide
  Antisense strand to SEQ ID NO: 1760561
gaauauauccuuaacacau

SEQ ID NO: 1760563 - RNA, 19 nt, Artificial Sequence
  Description of Artificial Sequence: Synthetic oligonucleotide
  Sense strand starting at position 3912 of SEQ ID NO: 1562620
accagucuguaaccuugaa

SEQ ID NO: 1760564 - RNA, 19 nt, Artificial Sequence
  Description of Artificial Sequence: Synthetic oligonucleotide
  Antisense strand to SEQ ID NO: 1760563
uucaagguuacagacuggu

SEQ ID NO: 1760565 - RNA, 19 nt, Artificial Sequence
  Description of Artificial Sequence: Synthetic oligonucleotide
  Sense strand starting at position 75 of SEQ ID NO: 1562621
uauacagcacgcgauuaua

SEQ ID NO: 1760566 - RNA, 19 nt, Artificial Sequence
  Description of Artificial Sequence: Synthetic oligonucleotide
  Antisense strand to SEQ ID NO: 1760565
uauaaucgcgugcuguaua

SEQ ID NO: 1760567 - RNA, 19 nt, Artificial Sequence
  Description of Artificial Sequence: Synthetic oligonucleotide
  Sense strand starting at position 96 of SEQ ID NO: 1562621
cuacauuugucugcugagu

SEQ ID NO: 1760568 - RNA, 19 nt, Artificial Sequence
  Description of Artificial Sequence: Synthetic oligonucleotide
  Antisense strand to SEQ ID NO: 1760567
acucagcagacaaauguag

SEQ ID NO: 1760569 - RNA, 19 nt, Artificial Sequence
  Description of Artificial Sequence: Synthetic oligonucleotide
  Sense strand starting at position 98 of SEQ ID NO: 1562621
acauuugucugcugaguag

SEQ ID NO: 1760570 - RNA, 19 nt, Artificial Sequence
  Description of Artificial Sequence: Synthetic oligonucleotide
  Antisense strand to SEQ ID NO: 1760569
cuacucagcagacaaaugu

SEQ ID NO: 1760571 - RNA, 19 nt, Artificial Sequence
  Description of Artificial Sequence: Synthetic oligonucleotide
  Sense strand starting at position 534 of SEQ ID NO: 1562621
guucuauuccagugcaagg

SEQ ID NO: 1760572 - RNA, 19 nt, Artificial Sequence
  Description of Artificial Sequence: Synthetic oligonucleotide
  Antisense strand to SEQ ID NO: 1760571
ccuugcacuggaauagaac

SEQ ID NO: 1760573 - RNA, 19 nt, Artificial Sequence
  Description of Artificial Sequence: Synthetic oligonucleotide
  Sense strand starting at position 919 of SEQ ID NO: 1562621
accuuacugcaggauuaua

SEQ ID NO: 1760574 - RNA, 19 nt, Artificial Sequence
  Description of Artificial Sequence: Synthetic oligonucleotide
  Antisense strand to SEQ ID NO: 1760573
uauaauccugcaguaaggu

SEQ ID NO: 1760575 - RNA, 19 nt, Artificial Sequence
  Description of Artificial Sequence: Synthetic oligonucleotide
  Sense strand starting at position 1088 of SEQ ID NO: 1562621
gugugcuacccagaucucu

SEQ ID NO: 1760576 - RNA, 19 nt, Artificial Sequence
  Description of Artificial Sequence: Synthetic oligonucleotide
  Antisense strand to SEQ ID NO: 1760575
agagaucuggguagcacac

SEQ ID NO: 1760577 - RNA, 19 nt, Artificial Sequence
  Description of Artificial Sequence: Synthetic oligonucleotide
  Sense strand starting at position 1760 of SEQ ID NO: 1562621
gcgagaacggcccaaaugu

SEQ ID NO: 1760578 - RNA, 19 nt, Artificial Sequence
  Description of Artificial Sequence: Synthetic oligonucleotide
  Antisense strand to SEQ ID NO: 1760577
acauuugggccguucucgc

SEQ ID NO: 1760579 - RNA, 19 nt, Artificial Sequence
  Description of Artificial Sequence: Synthetic oligonucleotide
  Sense strand starting at position 2018 of SEQ ID NO: 1562621
cguccagagaccgauuaca

SEQ ID NO: 1760580 - RNA, 19 nt, Artificial Sequence
  Description of Artificial Sequence: Synthetic oligonucleotide
  Antisense strand to SEQ ID NO: 1760579
uguaaucggucucuggacg

SEQ ID NO: 1760581 - RNA, 19 nt, Artificial Sequence
  Description of Artificial Sequence: Synthetic oligonucleotide
  Sense strand starting at position 2336 of SEQ ID NO: 1562621
gucccucagauccgggaaa

SEQ ID NO: 1760582 - RNA, 19 nt, Artificial Sequence
  Description of Artificial Sequence: Synthetic oligonucleotide
  Antisense strand to SEQ ID NO: 1760581
uuucccggaucugagggac

SEQ ID NO: 1760583 - RNA, 19 nt, Artificial Sequence
  Description of Artificial Sequence: Synthetic oligonucleotide
  Sense strand starting at position 2337 of SEQ ID NO: 1562621
ucccucagauccgggaaau

SEQ ID NO: 1760584 - RNA, 19 nt, Artificial Sequence
  Description of Artificial Sequence: Synthetic oligonucleotide
  Antisense strand to SEQ ID NO: 1760583
auuucccggaucugaggga

SEQ ID NO: 1760585 - RNA, 19 nt, Artificial Sequence
  Description of Artificial Sequence: Synthetic oligonucleotide
  Sense strand starting at position 2338 of SEQ ID NO: 1562621
cccucagauccgggaaauc

SEQ ID NO: 1760586 - RNA, 19 nt, Artificial Sequence
  Description of Artificial Sequence: Synthetic oligonucleotide
  Antisense strand to SEQ ID NO: 1760585
gauuucccggaucugaggg

SEQ ID NO: 1760587 - RNA, 19 nt, Artificial Sequence
  Description of Artificial Sequence: Synthetic oligonucleotide
  Sense strand starting at position 2563 of SEQ ID NO: 1562621
cggagugccucucaucacu

SEQ ID NO: 1760588 - RNA, 19 nt, Artificial Sequence
  Description of Artificial Sequence: Synthetic oligonucleotide
  Antisense strand to SEQ ID NO: 1760587
agugaugagaggcacuccg

SEQ ID NO: 1760589 - RNA, 19 nt, Artificial Sequence
  Description of Artificial Sequence: Synthetic oligonucleotide
  Sense strand starting at position 2713 of SEQ ID NO: 1562621
gccuccuuguuguggauau

SEQ ID NO: 1760590 - RNA, 19 nt, Artificial Sequence
  Description of Artificial Sequence: Synthetic oligonucleotide
  Antisense strand to SEQ ID NO: 1760589
auauccacaacaaggaggc

SEQ ID NO: 1760591 - RNA, 19 nt, Artificial Sequence
  Description of Artificial Sequence: Synthetic oligonucleotide
  Sense strand starting at position 2714 of SEQ ID NO: 1562621
ccuccuuguuguggauaua

SEQ ID NO: 1760592 - RNA, 19 nt, Artificial Sequence
  Description of Artificial Sequence: Synthetic oligonucleotide
  Antisense strand to SEQ ID NO: 1760591
uauauccacaacaaggagg

SEQ ID NO: 1760593 - RNA, 19 nt, Artificial Sequence
  Description of Artificial Sequence: Synthetic oligonucleotide
  Sense strand starting at position 2715 of SEQ ID NO: 1562621
cuccuuguuguggauauaa

SEQ ID NO: 1760594 - RNA, 19 nt, Artificial Sequence
  Description of Artificial Sequence: Synthetic oligonucleotide
  Antisense strand to SEQ ID NO: 1760593
uuauauccacaacaaggag

SEQ ID NO: 1760595 - RNA, 19 nt, Artificial Sequence
  Description of Artificial Sequence: Synthetic oligonucleotide
  Sense strand starting at position 2717 of SEQ ID NO: 1562621
ccuuguuguggauauaauu

SEQ ID NO: 1760596 - RNA, 19 nt, Artificial Sequence
  Description of Artificial Sequence: Synthetic oligonucleotide
  Antisense strand to SEQ ID NO: 1760595
aauuauauccacaacaagg

SEQ ID NO: 1760597 - RNA, 19 nt, Artificial Sequence
  Description of Artificial Sequence: Synthetic oligonucleotide
  Sense strand starting at position 2725 of SEQ ID NO: 1562621
uggauauaauugugugcuu

SEQ ID NO: 1760598 - RNA, 19 nt, Artificial Sequence
  Description of Artificial Sequence: Synthetic oligonucleotide
  Antisense strand to SEQ ID NO: 1760597
aagcacacaauuauaucca

SEQ ID NO: 1760599 - RNA, 19 nt, Artificial Sequence
  Description of Artificial Sequence: Synthetic oligonucleotide
  Sense strand starting at position 2730 of SEQ ID NO: 1562621
auaauugugugcuucccga

SEQ ID NO: 1760600 - RNA, 19 nt, Artificial Sequence
  Description of Artificial Sequence: Synthetic oligonucleotide
  Antisense strand to SEQ ID NO: 1760599
ucgggaagcacacaauuau

SEQ ID NO: 1760601 - RNA, 19 nt, Artificial Sequence
  Description of Artificial Sequence: Synthetic oligonucleotide
  Sense strand starting at position 2734 of SEQ ID NO: 1562621
uugugugcuucccgacuca

SEQ ID NO: 1760602 - RNA, 19 nt, Artificial Sequence
  Description of Artificial Sequence: Synthetic oligonucleotide
  Antisense strand to SEQ ID NO: 1760601
ugagucgggaagcacacaa

SEQ ID NO: 1760603 - RNA, 19 nt, Artificial Sequence
  Description of Artificial Sequence: Synthetic oligonucleotide
  Sense strand starting at position 2843 of SEQ ID NO: 1562621
cccagauccugggacaaga

SEQ ID NO: 1760604 - RNA, 19 nt, Artificial Sequence
  Description of Artificial Sequence: Synthetic oligonucleotide
  Antisense strand to SEQ ID NO: 1760603
ucuugucccaggaucuggg

SEQ ID NO: 1760605 - RNA, 19 nt, Artificial Sequence
  Description of Artificial Sequence: Synthetic oligonucleotide
  Sense strand starting at position 2857 of SEQ ID NO: 1562621
caagauaggugaggaugaa

SEQ ID NO: 1760606 - RNA, 19 nt, Artificial Sequence
  Description of Artificial Sequence: Synthetic oligonucleotide
  Antisense strand to SEQ ID NO: 1760605
uucauccucaccuaucuug

SEQ ID NO: 1760607 - RNA, 19 nt, Artificial Sequence
  Description of Artificial Sequence: Synthetic oligonucleotide
  Sense strand starting at position 3144 of SEQ ID NO: 1562621
ucugaaauguuaucugcau

SEQ ID NO: 1760608 - RNA, 19 nt, Artificial Sequence
  Description of Artificial Sequence: Synthetic oligonucleotide
  Antisense strand to SEQ ID NO: 1760607
augcagauaacauuucaga

SEQ ID NO: 1760609 - RNA, 19 nt, Artificial Sequence
  Description of Artificial Sequence: Synthetic oligonucleotide
  Sense strand starting at position 3145 of SEQ ID NO: 1562621
cugaaauguuaucugcauu

SEQ ID NO: 1760610 - RNA, 19 nt, Artificial Sequence
  Description of Artificial Sequence: Synthetic oligonucleotide
  Antisense strand to SEQ ID NO: 1760609
aaugcagauaacauuucag

SEQ ID NO: 1760611 - RNA, 19 nt, Artificial Sequence
  Description of Artificial Sequence: Synthetic oligonucleotide
  Sense strand starting at position 3196 of SEQ ID NO: 1562621
acgcgaaucaaaggucaca

SEQ ID NO: 1760612 - RNA, 19 nt, Artificial Sequence
  Description of Artificial Sequence: Synthetic oligonucleotide
  Antisense strand to SEQ ID NO: 1760611
ugugaccuuugauucgcgu

SEQ ID NO: 1760613 - RNA, 19 nt, Artificial Sequence
  Description of Artificial Sequence: Synthetic oligonucleotide
  Sense strand starting at position 3285 of SEQ ID NO: 1562621
ggaaacgccuccuugaagu

SEQ ID NO: 1760614 - RNA, 19 nt, Artificial Sequence
  Description of Artificial Sequence: Synthetic oligonucleotide
  Antisense strand to SEQ ID NO: 1760613
acuucaaggaggcguuucc

SEQ ID NO: 1760615 - RNA, 19 nt, Artificial Sequence
  Description of Artificial Sequence: Synthetic oligonucleotide
  Sense strand starting at position 3291 of SEQ ID NO: 1562621
gccuccuugaagugggaau

SEQ ID NO: 1760616 - RNA, 19 nt, Artificial Sequence
  Description of Artificial Sequence: Synthetic oligonucleotide
  Antisense strand to SEQ ID NO: 1760615
auucccacuucaaggaggc

SEQ ID NO: 1760617 - RNA, 19 nt, Artificial Sequence
  Description of Artificial Sequence: Synthetic oligonucleotide
  Sense strand starting at position 3326 of SEQ ID NO: 1562621
ucgguuguaucuuuccuaa

SEQ ID NO: 1760618 - RNA, 19 nt, Artificial Sequence
  Description of Artificial Sequence: Synthetic oligonucleotide
  Antisense strand to SEQ ID NO: 1760617
uuaggaaagauacaaccga

SEQ ID NO: 1760619 - RNA, 19 nt, Artificial Sequence
  Description of Artificial Sequence: Synthetic oligonucleotide
  Sense strand starting at position 3328 of SEQ ID NO: 1562621
gguuguaucuuuccuaauu

SEQ ID NO: 1760620 - RNA, 19 nt, Artificial Sequence
  Description of Artificial Sequence: Synthetic oligonucleotide
  Antisense strand to SEQ ID NO: 1760619
aauuaggaaagauacaacc

SEQ ID NO: 1760621 - RNA, 19 nt, Artificial Sequence
  Description of Artificial Sequence: Synthetic oligonucleotide
  Sense strand starting at position 3329 of SEQ ID NO: 1562621
guuguaucuuuccuaauug

SEQ ID NO: 1760622 - RNA, 19 nt, Artificial Sequence
  Description of Artificial Sequence: Synthetic oligonucleotide
  Antisense strand to SEQ ID NO: 1760621
caauuaggaaagauacaac

SEQ ID NO: 1760623 - RNA, 19 nt, Artificial Sequence
  Description of Artificial Sequence: Synthetic oligonucleotide
  Sense strand starting at position 3464 of SEQ ID NO: 1562621
gugggccuguggaagaaau

SEQ ID NO: 1760624 - RNA, 19 nt, Artificial Sequence
  Description of Artificial Sequence: Synthetic oligonucleotide
  Antisense strand to SEQ ID NO: 1760623
auuucuuccacaggcccac

SEQ ID NO: 1760625 - RNA, 19 nt, Artificial Sequence
  Description of Artificial Sequence: Synthetic oligonucleotide
  Sense strand starting at position 3549 of SEQ ID NO: 1562621
guguauaacugucaugcac

SEQ ID NO: 1760626 - RNA, 19 nt, Artificial Sequence
  Description of Artificial Sequence: Synthetic oligonucleotide
  Antisense strand to SEQ ID NO: 1760625
gugcaugacaguuauacac

SEQ ID NO: 1760627 - RNA, 19 nt, Artificial Sequence
  Description of Artificial Sequence: Synthetic oligonucleotide
  Sense strand starting at position 3601 of SEQ ID NO: 1562621
auauguaacuggucaucca

SEQ ID NO: 1760628 - RNA, 19 nt, Artificial Sequence
  Description of Artificial Sequence: Synthetic oligonucleotide
  Antisense strand to SEQ ID NO: 1760627
uggaugaccaguuacauau

SEQ ID NO: 1760629 - RNA, 19 nt, Artificial Sequence
  Description of Artificial Sequence: Synthetic oligonucleotide
  Sense strand starting at position 3604 of SEQ ID NO: 1562621
uguaacuggucauccagua

SEQ ID NO: 1760630 - RNA, 19 nt, Artificial Sequence
  Description of Artificial Sequence: Synthetic oligonucleotide
  Antisense strand to SEQ ID NO: 1760629
uacuggaugaccaguuaca

SEQ ID NO: 1760631 - RNA, 19 nt, Artificial Sequence
  Description of Artificial Sequence: Synthetic oligonucleotide
  Sense strand starting at position 3616 of SEQ ID NO: 1562621
uccaguaagcuauaguuau

SEQ ID NO: 1760632 - RNA, 19 nt, Artificial Sequence
  Description of Artificial Sequence: Synthetic oligonucleotide
  Antisense strand to SEQ ID NO: 1760631
auaacuauagcuuacugga

SEQ ID NO: 1760633 - RNA, 19 nt, Artificial Sequence
  Description of Artificial Sequence: Synthetic oligonucleotide
  Sense strand starting at position 3964 of SEQ ID NO: 1562621
guuuaauauaaguguguug

SEQ ID NO: 1760634 - RNA, 19 nt, Artificial Sequence
  Description of Artificial Sequence: Synthetic oligonucleotide
  Antisense strand to SEQ ID NO: 1760633
caacacacuuauauuaaac

SEQ ID NO: 1760635 - RNA, 19 nt, Artificial Sequence
  Description of Artificial Sequence: Synthetic oligonucleotide
  Sense strand starting at position 3966 of SEQ ID NO: 1562621
uuaauauaaguguguugca

SEQ ID NO: 1760636 - RNA, 19 nt, Artificial Sequence
  Description of Artificial Sequence: Synthetic oligonucleotide
  Antisense strand to SEQ ID NO: 1760635
ugcaacacacuuauauuaa

SEQ ID NO: 1760637 - RNA, 19 nt, Artificial Sequence
  Description of Artificial Sequence: Synthetic oligonucleotide
  Sense strand starting at position 3971 of SEQ ID NO: 1562621
auaaguguguugcagccua

SEQ ID NO: 1760638 - RNA, 19 nt, Artificial Sequence
  Description of Artificial Sequence: Synthetic oligonucleotide
  Antisense strand to SEQ ID NO: 1760637
uaggcugcaacacacuuau

SEQ ID NO: 1760639 - RNA, 19 nt, Artificial Sequence
  Description of Artificial Sequence: Synthetic oligonucleotide
  Sense strand starting at position 600 of SEQ ID NO: 1562622
cguccuugugcuuuaaucu

SEQ ID NO: 1760640 - RNA, 19 nt, Artificial Sequence
  Description of Artificial Sequence: Synthetic oligonucleotide
  Antisense strand to SEQ ID NO: 1760639
agauuaaagcacaaggacg

SEQ ID NO: 1760641 - RNA, 19 nt, Artificial Sequence
  Description of Artificial Sequence: Synthetic oligonucleotide
  Sense strand starting at position 609 of SEQ ID NO: 1562622
gcuuuaaucucuucgagag

SEQ ID NO: 1760642 - RNA, 19 nt, Artificial Sequence
  Description of Artificial Sequence: Synthetic oligonucleotide
  Antisense strand to SEQ ID NO: 1760641
cucucgaagagauuaaagc

SEQ ID NO: 1760643 - RNA, 19 nt, Artificial Sequence
  Description of Artificial Sequence: Synthetic oligonucleotide
  Sense strand starting at position 610 of SEQ ID NO: 1562622
cuuuaaucucuucgagagu

SEQ ID NO: 1760644 - RNA, 19 nt, Artificial Sequence
  Description of Artificial Sequence: Synthetic oligonucleotide
  Antisense strand to SEQ ID NO: 1760643
acucucgaagagauuaaag

SEQ ID NO: 1760645 - RNA, 19 nt, Artificial Sequence
  Description of Artificial Sequence: Synthetic oligonucleotide
  Sense strand starting at position 671 of SEQ ID NO: 1562622
uucaguugccgccugagua

SEQ ID NO: 1760646 - RNA, 19 nt, Artificial Sequence
  Description of Artificial Sequence: Synthetic oligonucleotide
  Antisense strand to SEQ ID NO: 1760645
uacucaggcggcaacugaa

SEQ ID NO: 1760647 - RNA, 19 nt, Artificial Sequence
  Description of Artificial Sequence: Synthetic oligonucleotide
  Sense strand starting at position 719 of SEQ ID NO: 1562622
auuaauggguuccuuacaa

SEQ ID NO: 1760648 - RNA, 19 nt, Artificial Sequence
  Description of Artificial Sequence: Synthetic oligonucleotide
  Antisense strand to SEQ ID NO: 1760647
uuguaaggaacccauuaau

SEQ ID NO: 1760649 - RNA, 19 nt, Artificial Sequence
  Description of Artificial Sequence: Synthetic oligonucleotide
  Sense strand starting at position 802 of SEQ ID NO: 1562622
cauccagauguuggugaga

SEQ ID NO: 1760650 - RNA, 19 nt, Artificial Sequence
  Description of Artificial Sequence: Synthetic oligonucleotide
  Antisense strand to SEQ ID NO: 1760649
ucucaccaacaucuggaug

SEQ ID NO: 1760651 - RNA, 19 nt, Artificial Sequence
  Description of Artificial Sequence: Synthetic oligonucleotide
  Sense strand starting at position 850 of SEQ ID NO: 1562622
ccugguauuuaauaagaug

SEQ ID NO: 1760652 - RNA, 19 nt, Artificial Sequence
  Description of Artificial Sequence: Synthetic oligonucleotide
  Antisense strand to SEQ ID NO: 1760651
caucuuauuaaauaccagg

SEQ ID NO: 1760653 - RNA, 19 nt, Artificial Sequence
  Description of Artificial Sequence: Synthetic oligonucleotide
  Sense strand starting at position 1103 of SEQ ID NO: 1562622
aggagauagucacuccaca

SEQ ID NO: 1760654 - RNA, 19 nt, Artificial Sequence
  Description of Artificial Sequence: Synthetic oligonucleotide
  Antisense strand to SEQ ID NO: 1760653
uguggagugacuaucuccu

SEQ ID NO: 1760655 - RNA, 19 nt, Artificial Sequence
  Description of Artificial Sequence: Synthetic oligonucleotide
  Sense strand starting at position 1108 of SEQ ID NO: 1562622
auagucacuccacaagguu

SEQ ID NO: 1760656 - RNA, 19 nt, Artificial Sequence
  Description of Artificial Sequence: Synthetic oligonucleotide
  Antisense strand to SEQ ID NO: 1760655
aaccuuguggagugacuau

SEQ ID NO: 1760657 - RNA, 19 nt, Artificial Sequence
  Description of Artificial Sequence: Synthetic oligonucleotide
  Sense strand starting at position 1250 of SEQ ID NO: 1562622
ucaagacuuccauaugagc

SEQ ID NO: 1760658 - RNA, 19 nt, Artificial Sequence
  Description of Artificial Sequence: Synthetic oligonucleotide
  Antisense strand to SEQ ID NO: 1760657
gcucauauggaagucuuga

SEQ ID NO: 1760659 - RNA, 19 nt, Artificial Sequence
  Description of Artificial Sequence: Synthetic oligonucleotide
  Sense strand starting at position 1327 of SEQ ID NO: 1562622
cugaauacgcuuuacacuu

SEQ ID NO: 1760660 - RNA, 19 nt, Artificial Sequence
  Description of Artificial Sequence: Synthetic oligonucleotide
  Antisense strand to SEQ ID NO: 1760659
aaguguaaagcguauucag

SEQ ID NO: 1760661 - RNA, 19 nt, Artificial Sequence
  Description of Artificial Sequence: Synthetic oligonucleotide
  Sense strand starting at position 1635 of SEQ ID NO: 1562622
ccauguucggcugaauaca

SEQ ID NO: 1760662 - RNA, 19 nt, Artificial Sequence
  Description of Artificial Sequence: Synthetic oligonucleotide
  Antisense strand to SEQ ID NO: 1760661
uguauucagccgaacaugg

SEQ ID NO: 1760663 - RNA, 19 nt, Artificial Sequence
  Description of Artificial Sequence: Synthetic oligonucleotide
  Sense strand starting at position 1783 of SEQ ID NO: 1562622
acagaacaauuuggauaga

SEQ ID NO: 1760664 - RNA, 19 nt, Artificial Sequence
  Description of Artificial Sequence: Synthetic oligonucleotide
  Antisense strand to SEQ ID NO: 1760663
ucuauccaaauuguucugu

SEQ ID NO: 1760665 - RNA, 19 nt, Artificial Sequence
  Description of Artificial Sequence: Synthetic oligonucleotide
  Sense strand starting at position 1822 of SEQ ID NO: 1562622
agaucuggcuuucuaagaa

SEQ ID NO: 1760666 - RNA, 19 nt, Artificial Sequence
  Description of Artificial Sequence: Synthetic oligonucleotide
  Antisense strand to SEQ ID NO: 1760665
uucuuagaaagccagaucu

SEQ ID NO: 1760667 - RNA, 19 nt, Artificial Sequence
  Description of Artificial Sequence: Synthetic oligonucleotide
  Sense strand starting at position 2010 of SEQ ID NO: 1562622
agucacauaugggcaaauu

SEQ ID NO: 1760668 - RNA, 19 nt, Artificial Sequence
  Description of Artificial Sequence: Synthetic oligonucleotide
  Antisense strand to SEQ ID NO: 1760667
aauuugcccauaugugacu

SEQ ID NO: 1760669 - RNA, 19 nt, Artificial Sequence
  Description of Artificial Sequence: Synthetic oligonucleotide
  Sense strand starting at position 2068 of SEQ ID NO: 1562622
agccauuaucucuaguauu

SEQ ID NO: 1760670 - RNA, 19 nt, Artificial Sequence
  Description of Artificial Sequence: Synthetic oligonucleotide
  Antisense strand to SEQ ID NO: 1760669
aauacuagagauaauggcu

SEQ ID NO: 1760671 - RNA, 19 nt, Artificial Sequence
  Description of Artificial Sequence: Synthetic oligonucleotide
  Sense strand starting at position 2124 of SEQ ID NO: 1562622
gguguuacaucaucagauu

SEQ ID NO: 1760672 - RNA, 19 nt, Artificial Sequence
  Description of Artificial Sequence: Synthetic oligonucleotide
  Antisense strand to SEQ ID NO: 1760671
aaucugaugauguaacacc

SEQ ID NO: 1760673 - RNA, 19 nt, Artificial Sequence
  Description of Artificial Sequence: Synthetic oligonucleotide
  Sense strand starting at position 2146 of SEQ ID NO: 1562622
uaguuaaauuaugugggaa

SEQ ID NO: 1760674 - RNA, 19 nt, Artificial Sequence
  Description of Artificial Sequence: Synthetic oligonucleotide
  Antisense strand to SEQ ID NO: 1760673
uucccacauaauuuaacua

SEQ ID NO: 1760675 - RNA, 19 nt, Artificial Sequence
  Description of Artificial Sequence: Synthetic oligonucleotide
  Sense strand starting at position 2147 of SEQ ID NO: 1562622
aguuaaauuaugugggaag

SEQ ID NO: 1760676 - RNA, 19 nt, Artificial Sequence
  Description of Artificial Sequence: Synthetic oligonucleotide
  Antisense strand to SEQ ID NO: 1760675
cuucccacauaauuuaacu

SEQ ID NO: 1760677 - RNA, 19 nt, Artificial Sequence
  Description of Artificial Sequence: Synthetic oligonucleotide
  Sense strand starting at position 2162 of SEQ ID NO: 1562622
gaagaaguucuauacgguu

SEQ ID NO: 1760678 - RNA, 19 nt, Artificial Sequence
  Description of Artificial Sequence: Synthetic oligonucleotide
  Antisense strand to SEQ ID NO: 1760677
aaccguauagaacuucuuc

SEQ ID NO: 1760679 - RNA, 19 nt, Artificial Sequence
  Description of Artificial Sequence: Synthetic oligonucleotide
  Sense strand starting at position 2324 of SEQ ID NO: 1562622
ugagaugcaucccuacaug

SEQ ID NO: 1760680 - RNA, 19 nt, Artificial Sequence
  Description of Artificial Sequence: Synthetic oligonucleotide
  Antisense strand to SEQ ID NO: 1760679
cauguagggaugcaucuca

SEQ ID NO: 1760681 - RNA, 19 nt, Artificial Sequence
  Description of Artificial Sequence: Synthetic oligonucleotide
  Sense strand starting at position 2379 of SEQ ID NO: 1562622
acuguuaaguucucagaac

SEQ ID NO: 1760682 - RNA, 19 nt, Artificial Sequence
  Description of Artificial Sequence: Synthetic oligonucleotide
  Antisense strand to SEQ ID NO: 1760681
guucugagaacuuaacagu

SEQ ID NO: 1760683 - RNA, 19 nt, Artificial Sequence
  Description of Artificial Sequence: Synthetic oligonucleotide
  Sense strand starting at position 2463 of SEQ ID NO: 1562622
caugucucucccgggaaga

SEQ ID NO: 1760684 - RNA, 19 nt, Artificial Sequence
  Description of Artificial Sequence: Synthetic oligonucleotide
  Antisense strand to SEQ ID NO: 1760683
ucuucccgggagagacaug

SEQ ID NO: 1760685 - RNA, 19 nt, Artificial Sequence
  Description of Artificial Sequence: Synthetic oligonucleotide
  Sense strand starting at position 2465 of SEQ ID NO: 1562622
ugucucucccgggaagacu

SEQ ID NO: 1760686 - RNA, 19 nt, Artificial Sequence
  Description of Artificial Sequence: Synthetic oligonucleotide
  Antisense strand to SEQ ID NO: 1760685
agucuucccgggagagaca

SEQ ID NO: 1760687 - RNA, 19 nt, Artificial Sequence
  Description of Artificial Sequence: Synthetic oligonucleotide
  Sense strand starting at position 2481 of SEQ ID NO: 1562622
acuacaugguuucuggaau

SEQ ID NO: 1760688 - RNA, 19 nt, Artificial Sequence
  Description of Artificial Sequence: Synthetic oligonucleotide
  Antisense strand to SEQ ID NO: 1760687
auuccagaaaccauguagu

SEQ ID NO: 1760689 - RNA, 19 nt, Artificial Sequence
  Description of Artificial Sequence: Synthetic oligonucleotide
  Sense strand starting at position 2521 of SEQ ID NO: 1562622
uggcaaaugcaguaauuag

SEQ ID NO: 1760690 - RNA, 19 nt, Artificial Sequence
  Description of Artificial Sequence: Synthetic oligonucleotide
  Antisense strand to SEQ ID NO: 1760689
cuaauuacugcauuugcca

SEQ ID NO: 1760691 - RNA, 19 nt, Artificial Sequence
  Description of Artificial Sequence: Synthetic oligonucleotide
  Sense strand starting at position 2589 of SEQ ID NO: 1562622
cugggaacucuugggcaau

SEQ ID NO: 1760692 - RNA, 19 nt, Artificial Sequence
  Description of Artificial Sequence: Synthetic oligonucleotide
  Antisense strand to SEQ ID NO: 1760691
auugcccaagaguucccag

SEQ ID NO: 1760693 - RNA, 19 nt, Artificial Sequence
  Description of Artificial Sequence: Synthetic oligonucleotide
  Sense strand starting at position 2954 of SEQ ID NO: 1562622
uuggaaaggguuugucuuu

SEQ ID NO: 1760694 - RNA, 19 nt, Artificial Sequence
  Description of Artificial Sequence: Synthetic oligonucleotide
  Antisense strand to SEQ ID NO: 1760693
aaagacaaacccuuuccaa

SEQ ID NO: 1760695 - RNA, 19 nt, Artificial Sequence
  Description of Artificial Sequence: Synthetic oligonucleotide
  Sense strand starting at position 2959 of SEQ ID NO: 1562622
aaggguuugucuuugggaa

SEQ ID NO: 1760696 - RNA, 19 nt, Artificial Sequence
  Description of Artificial Sequence: Synthetic oligonucleotide
  Antisense strand to SEQ ID NO: 1760695
uucccaaagacaaacccuu

SEQ ID NO: 1760697 - RNA, 19 nt, Artificial Sequence
  Description of Artificial Sequence: Synthetic oligonucleotide
  Sense strand starting at position 2960 of SEQ ID NO: 1562622
aggguuugucuuugggaag

SEQ ID NO: 1760698 - RNA, 19 nt, Artificial Sequence
  Description of Artificial Sequence: Synthetic oligonucleotide
  Antisense strand to SEQ ID NO: 1760697
cuucccaaagacaaacccu

SEQ ID NO: 1760699 - RNA, 19 nt, Artificial Sequence
  Description of Artificial Sequence: Synthetic oligonucleotide
  Sense strand starting at position 2971 of SEQ ID NO: 1562622
uugggaagaguuugcgaau

SEQ ID NO: 1760700 - RNA, 19 nt, Artificial Sequence
  Description of Artificial Sequence: Synthetic oligonucleotide
  Antisense strand to SEQ ID NO: 1760699
auucgcaaacucuucccaa

SEQ ID NO: 1760701 - RNA, 19 nt, Artificial Sequence
  Description of Artificial Sequence: Synthetic oligonucleotide
  Sense strand starting at position 2972 of SEQ ID NO: 1562622
ugggaagaguuugcgaaug

SEQ ID NO: 1760702 - RNA, 19 nt, Artificial Sequence
  Description of Artificial Sequence: Synthetic oligonucleotide
  Antisense strand to SEQ ID NO: 1760701
cauucgcaaacucuuccca

SEQ ID NO: 1760703 - RNA, 19 nt, Artificial Sequence
  Description of Artificial Sequence: Synthetic oligonucleotide
  Sense strand starting at position 3082 of SEQ ID NO: 1562622
gucuuuacucugcaaagca

SEQ ID NO: 1760704 - RNA, 19 nt, Artificial Sequence
  Description of Artificial Sequence: Synthetic oligonucleotide
  Antisense strand to SEQ ID NO: 1760703
ugcuuugcagaguaaagac

SEQ ID NO: 1760705 - RNA, 19 nt, Artificial Sequence
  Description of Artificial Sequence: Synthetic oligonucleotide
  Sense strand starting at position 3132 of SEQ ID NO: 1562622
gcauaauaggaguagguca

SEQ ID NO: 1760706 - RNA, 19 nt, Artificial Sequence
  Description of Artificial Sequence: Synthetic oligonucleotide
  Antisense strand to SEQ ID NO: 1760705
ugaccuacuccuauuaugc

SEQ ID NO: 1760707 - RNA, 19 nt, Artificial Sequence
  Description of Artificial Sequence: Synthetic oligonucleotide
  Sense strand starting at position 3139 of SEQ ID NO: 1562622
aggaguaggucaucuguuu

SEQ ID NO: 1760708 - RNA, 19 nt, Artificial Sequence
  Description of Artificial Sequence: Synthetic oligonucleotide
  Antisense strand to SEQ ID NO: 1760707
aaacagaugaccuacuccu

SEQ ID NO: 1760709 - RNA, 19 nt, Artificial Sequence
  Description of Artificial Sequence: Synthetic oligonucleotide
  Sense strand starting at position 3210 of SEQ ID NO: 1562622
acacacucauccguuagau

SEQ ID NO: 1760710 - RNA, 19 nt, Artificial Sequence
  Description of Artificial Sequence: Synthetic oligonucleotide
  Antisense strand to SEQ ID NO: 1760709
aucuaacggaugagugugu

SEQ ID NO: 1760711 - RNA, 19 nt, Artificial Sequence
  Description of Artificial Sequence: Synthetic oligonucleotide
  Sense strand starting at position 3531 of SEQ ID NO: 1562622
gccugugcucagccucaau

SEQ ID NO: 1760712 - RNA, 19 nt, Artificial Sequence
  Description of Artificial Sequence: Synthetic oligonucleotide
  Antisense strand to SEQ ID NO: 1760711
auugaggcugagcacaggc

SEQ ID NO: 1760713 - RNA, 19 nt, Artificial Sequence
  Description of Artificial Sequence: Synthetic oligonucleotide
  Sense strand starting at position 3692 of SEQ ID NO: 1562622
gaacuaacccaggguacuu

SEQ ID NO: 1760714 - RNA, 19 nt, Artificial Sequence
  Description of Artificial Sequence: Synthetic oligonucleotide
  Antisense strand to SEQ ID NO: 1760713
aaguacccuggguuaguuc

SEQ ID NO: 1760715 - RNA, 19 nt, Artificial Sequence
  Description of Artificial Sequence: Synthetic oligonucleotide
  Sense strand starting at position 3790 of SEQ ID NO: 1562622
cuuuauuagcaucauguca

SEQ ID NO: 1760716 - RNA, 19 nt, Artificial Sequence
  Description of Artificial Sequence: Synthetic oligonucleotide
  Antisense strand to SEQ ID NO: 1760715
ugacaugaugcuaauaaag

SEQ ID NO: 1760717 - RNA, 19 nt, Artificial Sequence
  Description of Artificial Sequence: Synthetic oligonucleotide
  Sense strand starting at position 3889 of SEQ ID NO: 1562622
aguaucaugccucaaguaa

SEQ ID NO: 1760718 - RNA, 19 nt, Artificial Sequence
  Description of Artificial Sequence: Synthetic oligonucleotide
  Antisense strand to SEQ ID NO: 1760717
uuacuugaggcaugauacu

SEQ ID NO: 1760719 - RNA, 19 nt, Artificial Sequence
  Description of Artificial Sequence: Synthetic oligonucleotide
  Sense strand starting at position 94 of SEQ ID NO: 1562623
ugcgguuaaccugaaugaa

SEQ ID NO: 1760720 - RNA, 19 nt, Artificial Sequence
  Description of Artificial Sequence: Synthetic oligonucleotide
  Antisense strand to SEQ ID NO: 1760719
uucauucagguuaaccgca

SEQ ID NO: 1760721 - RNA, 19 nt, Artificial Sequence
  Description of Artificial Sequence: Synthetic oligonucleotide
  Sense strand starting at position 318 of SEQ ID NO: 1562623
ugcggugcuccuuucuuua

SEQ ID NO: 1760722 - RNA, 19 nt, Artificial Sequence
  Description of Artificial Sequence: Synthetic oligonucleotide
  Antisense strand to SEQ ID NO: 1760721
uaaagaaaggagcaccgca

SEQ ID NO: 1760723 - RNA, 19 nt, Artificial Sequence
  Description of Artificial Sequence: Synthetic oligonucleotide
  Sense strand starting at position 320 of SEQ ID NO: 1562623
cggugcuccuuucuuuaaa

SEQ ID NO: 1760724 - RNA, 19 nt, Artificial Sequence
  Description of Artificial Sequence: Synthetic oligonucleotide
  Antisense strand to SEQ ID NO: 1760723
uuuaaagaaaggagcaccg

SEQ ID NO: 1760725 - RNA, 19 nt, Artificial Sequence
  Description of Artificial Sequence: Synthetic oligonucleotide
  Sense strand starting at position 361 of SEQ ID NO: 1562623
caaauauggcaucggguuu

SEQ ID NO: 1760726 - RNA, 19 nt, Artificial Sequence
  Description of Artificial Sequence: Synthetic oligonucleotide
  Antisense strand to SEQ ID NO: 1760725
aaacccgaugccauauuug

SEQ ID NO: 1760727 - RNA, 19 nt, Artificial Sequence
  Description of Artificial Sequence: Synthetic oligonucleotide
  Sense strand starting at position 373 of SEQ ID NO: 1562623
cggguuucccuccacucau

SEQ ID NO: 1760728 - RNA, 19 nt, Artificial Sequence
  Description of Artificial Sequence: Synthetic oligonucleotide
  Antisense strand to SEQ ID NO: 1760727
augaguggagggaaacccg

SEQ ID NO: 1760729 - RNA, 19 nt, Artificial Sequence
  Description of Artificial Sequence: Synthetic oligonucleotide
  Sense strand starting at position 391 of SEQ ID NO: 1562623
uuuauacuccucugggauu

SEQ ID NO: 1760730 - RNA, 19 nt, Artificial Sequence
  Description of Artificial Sequence: Synthetic oligonucleotide
  Antisense strand to SEQ ID NO: 1760729
aaucccagaggaguauaaa

SEQ ID NO: 1760731 - RNA, 19 nt, Artificial Sequence
  Description of Artificial Sequence: Synthetic oligonucleotide
  Sense strand starting at position 392 of SEQ ID NO: 1562623
uuauacuccucugggauuu

SEQ ID NO: 1760732 - RNA, 19 nt, Artificial Sequence
  Description of Artificial Sequence: Synthetic oligonucleotide
  Antisense strand to SEQ ID NO: 1760731
aaaucccagaggaguauaa

SEQ ID NO: 1760733 - RNA, 19 nt, Artificial Sequence
  Description of Artificial Sequence: Synthetic oligonucleotide
  Sense strand starting at position 394 of SEQ ID NO: 1562623
auacuccucugggauuuaa

SEQ ID NO: 1760734 - RNA, 19 nt, Artificial Sequence
  Description of Artificial Sequence: Synthetic oligonucleotide
  Antisense strand to SEQ ID NO: 1760733
uuaaaucccagaggaguau

SEQ ID NO: 1760735 - RNA, 19 nt, Artificial Sequence
  Description of Artificial Sequence: Synthetic oligonucleotide
  Sense strand starting at position 448 of SEQ ID NO: 1562623
gggauucccuaggauuuga

SEQ ID NO: 1760736 - RNA, 19 nt, Artificial Sequence
  Description of Artificial Sequence: Synthetic oligonucleotide
  Antisense strand to SEQ ID NO: 1760735
ucaaauccuagggaauccc

SEQ ID NO: 1760737 - RNA, 19 nt, Artificial Sequence
  Description of Artificial Sequence: Synthetic oligonucleotide
  Sense strand starting at position 489 of SEQ ID NO: 1562623
gucagaagcuccguagaga

SEQ ID NO: 1760738 - RNA, 19 nt, Artificial Sequence
  Description of Artificial Sequence: Synthetic oligonucleotide
  Antisense strand to SEQ ID NO: 1760737
ucucuacggagcuucugac

SEQ ID NO: 1760739 - RNA, 19 nt, Artificial Sequence
  Description of Artificial Sequence: Synthetic oligonucleotide
  Sense strand starting at position 625 of SEQ ID NO: 1562623
ccgccugaugugcaaagau

SEQ ID NO: 1760740 - RNA, 19 nt, Artificial Sequence
  Description of Artificial Sequence: Synthetic oligonucleotide
  Antisense strand to SEQ ID NO: 1760739
aucuuugcacaucaggcgg

SEQ ID NO: 1760741 - RNA, 19 nt, Artificial Sequence
  Description of Artificial Sequence: Synthetic oligonucleotide
  Sense strand starting at position 634 of SEQ ID NO: 1562623
gugcaaagauguuuauaag

SEQ ID NO: 1760742 - RNA, 19 nt, Artificial Sequence
  Description of Artificial Sequence: Synthetic oligonucleotide
  Antisense strand to SEQ ID NO: 1760741
cuuauaaacaucuuugcac

SEQ ID NO: 1760743 - RNA, 19 nt, Artificial Sequence
  Description of Artificial Sequence: Synthetic oligonucleotide
  Sense strand starting at position 1127 of SEQ ID NO: 1562623
cgcccaugucaggguucaa

SEQ ID NO: 1760744 - RNA, 19 nt, Artificial Sequence
  Description of Artificial Sequence: Synthetic oligonucleotide
  Antisense strand to SEQ ID NO: 1760743
uugaacccugacaugggcg

SEQ ID NO: 1760745 - RNA, 19 nt, Artificial Sequence
  Description of Artificial Sequence: Synthetic oligonucleotide
  Sense strand starting at position 1308 of SEQ ID NO: 1562623
aagauaaaccgccauugua

SEQ ID NO: 1760746 - RNA, 19 nt, Artificial Sequence
  Description of Artificial Sequence: Synthetic oligonucleotide
  Antisense strand to SEQ ID NO: 1760745
uacaauggcgguuuaucuu

SEQ ID NO: 1760747 - RNA, 19 nt, Artificial Sequence
  Description of Artificial Sequence: Synthetic oligonucleotide
  Sense strand starting at position 1342 of SEQ ID NO: 1562623
ucagaaucgucccuaagga

SEQ ID NO: 1760748 - RNA, 19 nt, Artificial Sequence
  Description of Artificial Sequence: Synthetic oligonucleotide
  Antisense strand to SEQ ID NO: 1760747
uccuuagggacgauucuga

SEQ ID NO: 1760749 - RNA, 19 nt, Artificial Sequence
  Description of Artificial Sequence: Synthetic oligonucleotide
  Sense strand starting at position 1456 of SEQ ID NO: 1562623
acgagcuguucugcaagau

SEQ ID NO: 1760750 - RNA, 19 nt, Artificial Sequence
  Description of Artificial Sequence: Synthetic oligonucleotide
  Antisense strand to SEQ ID NO: 1760749
aucuugcagaacagcucgu

SEQ ID NO: 1760751 - RNA, 19 nt, Artificial Sequence
  Description of Artificial Sequence: Synthetic oligonucleotide
  Sense strand starting at position 1457 of SEQ ID NO: 1562623
cgagcuguucugcaagaug

SEQ ID NO: 1760752 - RNA, 19 nt, Artificial Sequence
  Description of Artificial Sequence: Synthetic oligonucleotide
  Antisense strand to SEQ ID NO: 1760751
caucuugcagaacagcucg

SEQ ID NO: 1760753 - RNA, 19 nt, Artificial Sequence
  Description of Artificial Sequence: Synthetic oligonucleotide
  Sense strand starting at position 1500 of SEQ ID NO: 1562623
cgagcuguucugcccgaaa

SEQ ID NO: 1760754 - RNA, 19 nt, Artificial Sequence
  Description of Artificial Sequence: Synthetic oligonucleotide
  Antisense strand to SEQ ID NO: 1760753
uuucgggcagaacagcucg

SEQ ID NO: 1760755 - RNA, 19 nt, Artificial Sequence
  Description of Artificial Sequence: Synthetic oligonucleotide
  Sense strand starting at position 1742 of SEQ ID NO: 1562623
gcucgucccucuccuuaaa

SEQ ID NO: 1760756 - RNA, 19 nt, Artificial Sequence
  Description of Artificial Sequence: Synthetic oligonucleotide
  Antisense strand to SEQ ID NO: 1760755
uuuaaggagagggacgagc

SEQ ID NO: 1760757 - RNA, 19 nt, Artificial Sequence
  Description of Artificial Sequence: Synthetic oligonucleotide
  Sense strand starting at position 1782 of SEQ ID NO: 1562623
cuacguguccguucucaca

SEQ ID NO: 1760758 - RNA, 19 nt, Artificial Sequence
  Description of Artificial Sequence: Synthetic oligonucleotide
  Antisense strand to SEQ ID NO: 1760757
ugugagaacggacacguag

SEQ ID NO: 1760759 - RNA, 19 nt, Artificial Sequence
  Description of Artificial Sequence: Synthetic oligonucleotide
  Sense strand starting at position 1841 of SEQ ID NO: 1562623
aaaggaaguuugguugacu

SEQ ID NO: 1760760 - RNA, 19 nt, Artificial Sequence
  Description of Artificial Sequence: Synthetic oligonucleotide
  Antisense strand to SEQ ID NO: 1760759
agucaaccaaacuuccuuu

SEQ ID NO: 1760761 - RNA, 19 nt, Artificial Sequence
  Description of Artificial Sequence: Synthetic oligonucleotide
  Sense strand starting at position 2424 of SEQ ID NO: 1562623
cagugugagccugagaaac

SEQ ID NO: 1760762 - RNA, 19 nt, Artificial Sequence
  Description of Artificial Sequence: Synthetic oligonucleotide
  Antisense strand to SEQ ID NO: 1760761
guuucucaggcucacacug

SEQ ID NO: 1760763 - RNA, 19 nt, Artificial Sequence
  Description of Artificial Sequence: Synthetic oligonucleotide
  Sense strand starting at position 2834 of SEQ ID NO: 1562623
cuguguucccgccacagau

SEQ ID NO: 1760764 - RNA, 19 nt, Artificial Sequence
  Description of Artificial Sequence: Synthetic oligonucleotide
  Antisense strand to SEQ ID NO: 1760763
aucuguggcgggaacacag

SEQ ID NO: 1760765 - RNA, 19 nt, Artificial Sequence
  Description of Artificial Sequence: Synthetic oligonucleotide
  Sense strand starting at position 3182 of SEQ ID NO: 1562623
accgguuaauuacaggauu

SEQ ID NO: 1760766 - RNA, 19 nt, Artificial Sequence
  Description of Artificial Sequence: Synthetic oligonucleotide
  Antisense strand to SEQ ID NO: 1760765
aauccuguaauuaaccggu

SEQ ID NO: 1760767 - RNA, 19 nt, Artificial Sequence
  Description of Artificial Sequence: Synthetic oligonucleotide
  Sense strand starting at position 3408 of SEQ ID NO: 1562623
ggcgcuuaucaaggaagaa

SEQ ID NO: 1760768 - RNA, 19 nt, Artificial Sequence
  Description of Artificial Sequence: Synthetic oligonucleotide
  Antisense strand to SEQ ID NO: 1760767
uucuuccuugauaagcgcc

SEQ ID NO: 1760769 - RNA, 19 nt, Artificial Sequence
  Description of Artificial Sequence: Synthetic oligonucleotide
  Sense strand starting at position 3409 of SEQ ID NO: 1562623
gcgcuuaucaaggaagaaa

SEQ ID NO: 1760770 - RNA, 19 nt, Artificial Sequence
  Description of Artificial Sequence: Synthetic oligonucleotide
  Antisense strand to SEQ ID NO: 1760769
uuucuuccuugauaagcgc

SEQ ID NO: 1760771 - RNA, 19 nt, Artificial Sequence
  Description of Artificial Sequence: Synthetic oligonucleotide
  Sense strand starting at position 3522 of SEQ ID NO: 1562623
gcccgagggagaugaauaa

SEQ ID NO: 1760772 - RNA, 19 nt, Artificial Sequence
  Description of Artificial Sequence: Synthetic oligonucleotide
  Antisense strand to SEQ ID NO: 1760771
uuauucaucucccucgggc

SEQ ID NO: 1760773 - RNA, 19 nt, Artificial Sequence
  Description of Artificial Sequence: Synthetic oligonucleotide
  Sense strand starting at position 3548 of SEQ ID NO: 1562623
cugcgauuccaucaagcuu

SEQ ID NO: 1760774 - RNA, 19 nt, Artificial Sequence
  Description of Artificial Sequence: Synthetic oligonucleotide
  Antisense strand to SEQ ID NO: 1760773
aagcuugauggaaucgcag

SEQ ID NO: 1760775 - RNA, 19 nt, Artificial Sequence
  Description of Artificial Sequence: Synthetic oligonucleotide
  Sense strand starting at position 3625 of SEQ ID NO: 1562623
gcuggaguugaauaucucu

SEQ ID NO: 1760776 - RNA, 19 nt, Artificial Sequence
  Description of Artificial Sequence: Synthetic oligonucleotide
  Antisense strand to SEQ ID NO: 1760775
agagauauucaacuccagc

SEQ ID NO: 1760777 - RNA, 19 nt, Artificial Sequence
  Description of Artificial Sequence: Synthetic oligonucleotide
  Sense strand starting at position 3628 of SEQ ID NO: 1562623
ggaguugaauaucucugca

SEQ ID NO: 1760778 - RNA, 19 nt, Artificial Sequence
  Description of Artificial Sequence: Synthetic oligonucleotide
  Antisense strand to SEQ ID NO: 1760777
ugcagagauauucaacucc

SEQ ID NO: 1760779 - RNA, 19 nt, Artificial Sequence
  Description of Artificial Sequence: Synthetic oligonucleotide
  Sense strand starting at position 3630 of SEQ ID NO: 1562623
aguugaauaucucugcauu

SEQ ID NO: 1760780 - RNA, 19 nt, Artificial Sequence
  Description of Artificial Sequence: Synthetic oligonucleotide
  Antisense strand to SEQ ID NO: 1760779
aaugcagagauauucaacu

SEQ ID NO: 1760781 - RNA, 19 nt, Artificial Sequence
  Description of Artificial Sequence: Synthetic oligonucleotide
  Sense strand starting at position 3631 of SEQ ID NO: 1562623
guugaauaucucugcauuc

SEQ ID NO: 1760782 - RNA, 19 nt, Artificial Sequence
  Description of Artificial Sequence: Synthetic oligonucleotide
  Antisense strand to SEQ ID NO: 1760781
gaaugcagagauauucaac

SEQ ID NO: 1760783 - RNA, 19 nt, Artificial Sequence
  Description of Artificial Sequence: Synthetic oligonucleotide
  Sense strand starting at position 3654 of SEQ ID NO: 1562623
gcgggcuuuaccuaggagu

SEQ ID NO: 1760784 - RNA, 19 nt, Artificial Sequence
  Description of Artificial Sequence: Synthetic oligonucleotide
  Antisense strand to SEQ ID NO: 1760783
acuccuagguaaagcccgc

SEQ ID NO: 1760785 - RNA, 19 nt, Artificial Sequence
  Description of Artificial Sequence: Synthetic oligonucleotide
  Sense strand starting at position 3656 of SEQ ID NO: 1562623
gggcuuuaccuaggaguaa

SEQ ID NO: 1760786 - RNA, 19 nt, Artificial Sequence
  Description of Artificial Sequence: Synthetic oligonucleotide
  Antisense strand to SEQ ID NO: 1760785
uuacuccuagguaaagccc

SEQ ID NO: 1760787 - RNA, 19 nt, Artificial Sequence
  Description of Artificial Sequence: Synthetic oligonucleotide
  Sense strand starting at position 3657 of SEQ ID NO: 1562623
ggcuuuaccuaggaguaag

SEQ ID NO: 1760788 - RNA, 19 nt, Artificial Sequence
  Description of Artificial Sequence: Synthetic oligonucleotide
  Antisense strand to SEQ ID NO: 1760787
cuuacuccuagguaaagcc

SEQ ID NO: 1760789 - RNA, 19 nt, Artificial Sequence
  Description of Artificial Sequence: Synthetic oligonucleotide
  Sense strand starting at position 3672 of SEQ ID NO: 1562623
uaagaaagccuguguaauu

SEQ ID NO: 1760790 - RNA, 19 nt, Artificial Sequence
  Description of Artificial Sequence: Synthetic oligonucleotide
  Antisense strand to SEQ ID NO: 1760789
aauuacacaggcuuucuua

SEQ ID NO: 1760791 - RNA, 19 nt, Artificial Sequence
  Description of Artificial Sequence: Synthetic oligonucleotide
  Sense strand starting at position 3673 of SEQ ID NO: 1562623
aagaaagccuguguaauua

SEQ ID NO: 1760792 - RNA, 19 nt, Artificial Sequence
  Description of Artificial Sequence: Synthetic oligonucleotide
  Antisense strand to SEQ ID NO: 1760791
uaauuacacaggcuuucuu

SEQ ID NO: 1760793 - RNA, 19 nt, Artificial Sequence
  Description of Artificial Sequence: Synthetic oligonucleotide
  Sense strand starting at position 3823 of SEQ ID NO: 1562623
agcagaaggucuucaggga

SEQ ID NO: 1760794 - RNA, 19 nt, Artificial Sequence
  Description of Artificial Sequence: Synthetic oligonucleotide
  Antisense strand to SEQ ID NO: 1760793
ucccugaagaccuucugcu

SEQ ID NO: 1760795 - RNA, 19 nt, Artificial Sequence
  Description of Artificial Sequence: Synthetic oligonucleotide
  Sense strand starting at position 3824 of SEQ ID NO: 1562623
gcagaaggucuucagggau

SEQ ID NO: 1760796 - RNA, 19 nt, Artificial Sequence
  Description of Artificial Sequence: Synthetic oligonucleotide
  Antisense strand to SEQ ID NO: 1760795
aucccugaagaccuucugc

SEQ ID NO: 1760797 - RNA, 19 nt, Artificial Sequence
  Description of Artificial Sequence: Synthetic oligonucleotide
  Sense strand starting at position 3836 of SEQ ID NO: 1562623
cagggaucucagcacaugu

SEQ ID NO: 1760798 - RNA, 19 nt, Artificial Sequence
  Description of Artificial Sequence: Synthetic oligonucleotide
  Antisense strand to SEQ ID NO: 1760797
acaugugcugagaucccug

SEQ ID NO: 1760799 - RNA, 19 nt, Artificial Sequence
  Description of Artificial Sequence: Synthetic oligonucleotide
  Sense strand starting at position 164 of SEQ ID NO: 1562624
uguugaaguguugaucagu

SEQ ID NO: 1760800 - RNA, 19 nt, Artificial Sequence
  Description of Artificial Sequence: Synthetic oligonucleotide
  Antisense strand to SEQ ID NO: 1760799
acugaucaacacuucaaca

SEQ ID NO: 1760801 - RNA, 19 nt, Artificial Sequence
  Description of Artificial Sequence: Synthetic oligonucleotide
  Sense strand starting at position 169 of SEQ ID NO: 1562624
aaguguugaucagucccau

SEQ ID NO: 1760802 - RNA, 19 nt, Artificial Sequence
  Description of Artificial Sequence: Synthetic oligonucleotide
  Antisense strand to SEQ ID NO: 1760801
augggacugaucaacacuu

SEQ ID NO: 1760803 - RNA, 19 nt, Artificial Sequence
  Description of Artificial Sequence: Synthetic oligonucleotide
  Sense strand starting at position 269 of SEQ ID NO: 1562624
accguagcacuguauucua

SEQ ID NO: 1760804 - RNA, 19 nt, Artificial Sequence
  Description of Artificial Sequence: Synthetic oligonucleotide
  Antisense strand to SEQ ID NO: 1760803
uagaauacagugcuacggu

SEQ ID NO: 1760805 - RNA, 19 nt, Artificial Sequence
  Description of Artificial Sequence: Synthetic oligonucleotide
  Sense strand starting at position 311 of SEQ ID NO: 1562624
ggcagagacucuucuuauc

SEQ ID NO: 1760806 - RNA, 19 nt, Artificial Sequence
  Description of Artificial Sequence: Synthetic oligonucleotide
  Antisense strand to SEQ ID NO: 1760805
gauaagaagagucucugcc

SEQ ID NO: 1760807 - RNA, 19 nt, Artificial Sequence
  Description of Artificial Sequence: Synthetic oligonucleotide
  Sense strand starting at position 631 of SEQ ID NO: 1562624
uugcuaacagacugaucuu

SEQ ID NO: 1760808 - RNA, 19 nt, Artificial Sequence
  Description of Artificial Sequence: Synthetic oligonucleotide
  Antisense strand to SEQ ID NO: 1760807
aagaucagucuguuagcaa

SEQ ID NO: 1760809 - RNA, 19 nt, Artificial Sequence
  Description of Artificial Sequence: Synthetic oligonucleotide
  Sense strand starting at position 978 of SEQ ID NO: 1562624
uccuguugauaugcuaauu

SEQ ID NO: 1760810 - RNA, 19 nt, Artificial Sequence
  Description of Artificial Sequence: Synthetic oligonucleotide
  Antisense strand to SEQ ID NO: 1760809
aauuagcauaucaacagga

SEQ ID NO: 1760811 - RNA, 19 nt, Artificial Sequence
  Description of Artificial Sequence: Synthetic oligonucleotide
  Sense strand starting at position 1236 of SEQ ID NO: 1562624
guaguagugguguaggaag

SEQ ID NO: 1760812 - RNA, 19 nt, Artificial Sequence
  Description of Artificial Sequence: Synthetic oligonucleotide
  Antisense strand to SEQ ID NO: 1760811
cuuccuacaccacuacuac

SEQ ID NO: 1760813 - RNA, 19 nt, Artificial Sequence
  Description of Artificial Sequence: Synthetic oligonucleotide
  Sense strand starting at position 1527 of SEQ ID NO: 1562624
ucgugaucgacugacagaa

SEQ ID NO: 1760814 - RNA, 19 nt, Artificial Sequence
  Description of Artificial Sequence: Synthetic oligonucleotide
  Antisense strand to SEQ ID NO: 1760813
uucugucagucgaucacga

SEQ ID NO: 1760815 - RNA, 19 nt, Artificial Sequence
  Description of Artificial Sequence: Synthetic oligonucleotide
  Sense strand starting at position 1965 of SEQ ID NO: 1562624
ucgcaaaguaacugagauu

SEQ ID NO: 1760816 - RNA, 19 nt, Artificial Sequence
  Description of Artificial Sequence: Synthetic oligonucleotide
  Antisense strand to SEQ ID NO: 1760815
aaucucaguuacuuugcga

SEQ ID NO: 1760817 - RNA, 19 nt, Artificial Sequence
  Description of Artificial Sequence: Synthetic oligonucleotide
  Sense strand starting at position 1981 of SEQ ID NO: 1562624
auugguugggcaugacaua

SEQ ID NO: 1760818 - RNA, 19 nt, Artificial Sequence
  Description of Artificial Sequence: Synthetic oligonucleotide
  Antisense strand to SEQ ID NO: 1760817
uaugucaugcccaaccaau

SEQ ID NO: 1760819 - RNA, 19 nt, Artificial Sequence
  Description of Artificial Sequence: Synthetic oligonucleotide
  Sense strand starting at position 1982 of SEQ ID NO: 1562624
uugguugggcaugacauau

SEQ ID NO: 1760820 - RNA, 19 nt, Artificial Sequence
  Description of Artificial Sequence: Synthetic oligonucleotide
  Antisense strand to SEQ ID NO: 1760819
auaugucaugcccaaccaa

SEQ ID NO: 1760821 - RNA, 19 nt, Artificial Sequence
  Description of Artificial Sequence: Synthetic oligonucleotide
  Sense strand starting at position 1992 of SEQ ID NO: 1562624
augacauaugguggaucua

SEQ ID NO: 1760822 - RNA, 19 nt, Artificial Sequence
  Description of Artificial Sequence: Synthetic oligonucleotide
  Antisense strand to SEQ ID NO: 1760821
uagauccaccauaugucau

SEQ ID NO: 1760823 - RNA, 19 nt, Artificial Sequence
  Description of Artificial Sequence: Synthetic oligonucleotide
  Sense strand starting at position 2003 of SEQ ID NO: 1562624
uggaucuaggguugaauga

SEQ ID NO: 1760824 - RNA, 19 nt, Artificial Sequence
  Description of Artificial Sequence: Synthetic oligonucleotide
  Antisense strand to SEQ ID NO: 1760823
ucauucaacccuagaucca

SEQ ID NO: 1760825 - RNA, 19 nt, Artificial Sequence
  Description of Artificial Sequence: Synthetic oligonucleotide
  Sense strand starting at position 2043 of SEQ ID NO: 1562624
ugaaguggaggcugagaau

SEQ ID NO: 1760826 - RNA, 19 nt, Artificial Sequence
  Description of Artificial Sequence: Synthetic oligonucleotide
  Antisense strand to SEQ ID NO: 1760825
auucucagccuccacuuca

SEQ ID NO: 1760827 - RNA, 19 nt, Artificial Sequence
  Description of Artificial Sequence: Synthetic oligonucleotide
  Sense strand starting at position 2074 of SEQ ID NO: 1562624
cagccauaggccggucaaa

SEQ ID NO: 1760828 - RNA, 19 nt, Artificial Sequence
  Description of Artificial Sequence: Synthetic oligonucleotide
  Antisense strand to SEQ ID NO: 1760827
uuugaccggccuauggcug

SEQ ID NO: 1760829 - RNA, 19 nt, Artificial Sequence
  Description of Artificial Sequence: Synthetic oligonucleotide
  Sense strand starting at position 2137 of SEQ ID NO: 1562624
cuuggaugucuguaguucu

SEQ ID NO: 1760830 - RNA, 19 nt, Artificial Sequence
  Description of Artificial Sequence: Synthetic oligonucleotide
  Antisense strand to SEQ ID NO: 1760829
agaacuacagacauccaag

SEQ ID NO: 1760831 - RNA, 19 nt, Artificial Sequence
  Description of Artificial Sequence: Synthetic oligonucleotide
  Sense strand starting at position 2140 of SEQ ID NO: 1562624
ggaugucuguaguucuauu

SEQ ID NO: 1760832 - RNA, 19 nt, Artificial Sequence
  Description of Artificial Sequence: Synthetic oligonucleotide
  Antisense strand to SEQ ID NO: 1760831
aauagaacuacagacaucc

SEQ ID NO: 1760833 - RNA, 19 nt, Artificial Sequence
  Description of Artificial Sequence: Synthetic oligonucleotide
  Sense strand starting at position 2167 of SEQ ID NO: 1562624
gcgggagacauguaacauu

SEQ ID NO: 1760834 - RNA, 19 nt, Artificial Sequence
  Description of Artificial Sequence: Synthetic oligonucleotide
  Antisense strand to SEQ ID NO: 1760833
aauguuacaugucucccgc

SEQ ID NO: 1760835 - RNA, 19 nt, Artificial Sequence
  Description of Artificial Sequence: Synthetic oligonucleotide
  Sense strand starting at position 2387 of SEQ ID NO: 1562624
cuaguuuggccucaagcga

SEQ ID NO: 1760836 - RNA, 19 nt, Artificial Sequence
  Description of Artificial Sequence: Synthetic oligonucleotide
  Antisense strand to SEQ ID NO: 1760835
ucgcuugaggccaaacuag

SEQ ID NO: 1760837 - RNA, 19 nt, Artificial Sequence
  Description of Artificial Sequence: Synthetic oligonucleotide
  Sense strand starting at position 2591 of SEQ ID NO: 1562624
cucaguauccacugauaca

SEQ ID NO: 1760838 - RNA, 19 nt, Artificial Sequence
  Description of Artificial Sequence: Synthetic oligonucleotide
  Antisense strand to SEQ ID NO: 1760837
uguaucaguggauacugag

SEQ ID NO: 1760839 - RNA, 19 nt, Artificial Sequence
  Description of Artificial Sequence: Synthetic oligonucleotide
  Sense strand starting at position 2625 of SEQ ID NO: 1562624
gggccagucccaggaauga

SEQ ID NO: 1760840 - RNA, 19 nt, Artificial Sequence
  Description of Artificial Sequence: Synthetic oligonucleotide
  Antisense strand to SEQ ID NO: 1760839
ucauuccugggacuggccc

SEQ ID NO: 1760841 - RNA, 19 nt, Artificial Sequence
  Description of Artificial Sequence: Synthetic oligonucleotide
  Sense strand starting at position 2668 of SEQ ID NO: 1562624
ggaucagaaagcugcaguu

SEQ ID NO: 1760842 - RNA, 19 nt, Artificial Sequence
  Description of Artificial Sequence: Synthetic oligonucleotide
  Antisense strand to SEQ ID NO: 1760841
aacugcagcuuucugaucc

SEQ ID NO: 1760843 - RNA, 19 nt, Artificial Sequence
  Description of Artificial Sequence: Synthetic oligonucleotide
  Sense strand starting at position 2784 of SEQ ID NO: 1562624
caggaucagugcuccaacu

SEQ ID NO: 1760844 - RNA, 19 nt, Artificial Sequence
  Description of Artificial Sequence: Synthetic oligonucleotide
  Antisense strand to SEQ ID NO: 1760843
aguuggagcacugauccug

SEQ ID NO: 1760845 - RNA, 19 nt, Artificial Sequence
  Description of Artificial Sequence: Synthetic oligonucleotide
  Sense strand starting at position 2904 of SEQ ID NO: 1562624
gcagguguugcuuagugaa

SEQ ID NO: 1760846 - RNA, 19 nt, Artificial Sequence
  Description of Artificial Sequence: Synthetic oligonucleotide
  Antisense strand to SEQ ID NO: 1760845
uucacuaagcaacaccugc

SEQ ID NO: 1760847 - RNA, 19 nt, Artificial Sequence
  Description of Artificial Sequence: Synthetic oligonucleotide
  Sense strand starting at position 2906 of SEQ ID NO: 1562624
agguguugcuuagugaaga

SEQ ID NO: 1760848 - RNA, 19 nt, Artificial Sequence
  Description of Artificial Sequence: Synthetic oligonucleotide
  Antisense strand to SEQ ID NO: 1760847
ucuucacuaagcaacaccu

SEQ ID NO: 1760849 - RNA, 19 nt, Artificial Sequence
  Description of Artificial Sequence: Synthetic oligonucleotide
  Sense strand starting at position 3184 of SEQ ID NO: 1562624
cacugaagacguggauaga

SEQ ID NO: 1760850 - RNA, 19 nt, Artificial Sequence
  Description of Artificial Sequence: Synthetic oligonucleotide
  Antisense strand to SEQ ID NO: 1760849
ucuauccacgucuucagug

SEQ ID NO: 1760851 - RNA, 19 nt, Artificial Sequence
  Description of Artificial Sequence: Synthetic oligonucleotide
  Sense strand starting at position 3279 of SEQ ID NO: 1562624
aggguuagcccuggcucau

SEQ ID NO: 1760852 - RNA, 19 nt, Artificial Sequence
  Description of Artificial Sequence: Synthetic oligonucleotide
  Antisense strand to SEQ ID NO: 1760851
augagccagggcuaacccu

SEQ ID NO: 1760853 - RNA, 19 nt, Artificial Sequence
  Description of Artificial Sequence: Synthetic oligonucleotide
  Sense strand starting at position 3318 of SEQ ID NO: 1562624
gccauugccaccuagggau

SEQ ID NO: 1760854 - RNA, 19 nt, Artificial Sequence
  Description of Artificial Sequence: Synthetic oligonucleotide
  Antisense strand to SEQ ID NO: 1760853
aucccuagguggcaauggc

SEQ ID NO: 1760855 - RNA, 19 nt, Artificial Sequence
  Description of Artificial Sequence: Synthetic oligonucleotide
  Sense strand starting at position 3464 of SEQ ID NO: 1562624
cuguguuaguaccuaauca

SEQ ID NO: 1760856 - RNA, 19 nt, Artificial Sequence
  Description of Artificial Sequence: Synthetic oligonucleotide
  Antisense strand to SEQ ID NO: 1760855
ugauuagguacuaacacag

SEQ ID NO: 1760857 - RNA, 19 nt, Artificial Sequence
  Description of Artificial Sequence: Synthetic oligonucleotide
  Sense strand starting at position 3468 of SEQ ID NO: 1562624
guuaguaccuaaucaaaca

SEQ ID NO: 1760858 - RNA, 19 nt, Artificial Sequence
  Description of Artificial Sequence: Synthetic oligonucleotide
  Antisense strand to SEQ ID NO: 1760857
uguuugauuagguacuaac

SEQ ID NO: 1760859 - RNA, 19 nt, Artificial Sequence
  Description of Artificial Sequence: Synthetic oligonucleotide
  Sense strand starting at position 3521 of SEQ ID NO: 1562624
cuugaaauucuuggcuuag

SEQ ID NO: 1760860 - RNA, 19 nt, Artificial Sequence
  Description of Artificial Sequence: Synthetic oligonucleotide
  Antisense strand to SEQ ID NO: 1760859
cuaagccaagaauuucaag

SEQ ID NO: 1760861 - RNA, 19 nt, Artificial Sequence
  Description of Artificial Sequence: Synthetic oligonucleotide
  Sense strand starting at position 3522 of SEQ ID NO: 1562624
uugaaauucuuggcuuaga

SEQ ID NO: 1760862 - RNA, 19 nt, Artificial Sequence
  Description of Artificial Sequence: Synthetic oligonucleotide
  Antisense strand to SEQ ID NO: 1760861
ucuaagccaagaauuucaa

SEQ ID NO: 1760863 - RNA, 19 nt, Artificial Sequence
  Description of Artificial Sequence: Synthetic oligonucleotide
  Sense strand starting at position 3523 of SEQ ID NO: 1562624
ugaaauucuuggcuuagaa

SEQ ID NO: 1760864 - RNA, 19 nt, Artificial Sequence
  Description of Artificial Sequence: Synthetic oligonucleotide
  Antisense strand to SEQ ID NO: 1760863
uucuaagccaagaauuuca

SEQ ID NO: 1760865 - RNA, 19 nt, Artificial Sequence
  Description of Artificial Sequence: Synthetic oligonucleotide
  Sense strand starting at position 3533 of SEQ ID NO: 1562624
ggcuuagaauuauucccaa

SEQ ID NO: 1760866 - RNA, 19 nt, Artificial Sequence
  Description of Artificial Sequence: Synthetic oligonucleotide
  Antisense strand to SEQ ID NO: 1760865
uugggaauaauucuaagcc

SEQ ID NO: 1760867 - RNA, 19 nt, Artificial Sequence
  Description of Artificial Sequence: Synthetic oligonucleotide
  Sense strand starting at position 3593 of SEQ ID NO: 1562624
aucagauuagcaugucaaa

SEQ ID NO: 1760868 - RNA, 19 nt, Artificial Sequence
  Description of Artificial Sequence: Synthetic oligonucleotide
  Antisense strand to SEQ ID NO: 1760867
uuugacaugcuaaucugau

SEQ ID NO: 1760869 - RNA, 19 nt, Artificial Sequence
  Description of Artificial Sequence: Synthetic oligonucleotide
  Sense strand starting at position 3620 of SEQ ID NO: 1562624
cguuauagaaagugaagau

SEQ ID NO: 1760870 - RNA, 19 nt, Artificial Sequence
  Description of Artificial Sequence: Synthetic oligonucleotide
  Antisense strand to SEQ ID NO: 1760869
aucuucacuuucuauaacg

SEQ ID NO: 1760871 - RNA, 19 nt, Artificial Sequence
  Description of Artificial Sequence: Synthetic oligonucleotide
  Sense strand starting at position 3778 of SEQ ID NO: 1562624
uuugcuucuccauggaguu

SEQ ID NO: 1760872 - RNA, 19 nt, Artificial Sequence
  Description of Artificial Sequence: Synthetic oligonucleotide
  Antisense strand to SEQ ID NO: 1760871
aacuccauggagaagcaaa

SEQ ID NO: 1760873 - RNA, 19 nt, Artificial Sequence
  Description of Artificial Sequence: Synthetic oligonucleotide
  Sense strand starting at position 3822 of SEQ ID NO: 1562624
ggagccaguuauguccaua

SEQ ID NO: 1760874 - RNA, 19 nt, Artificial Sequence
  Description of Artificial Sequence: Synthetic oligonucleotide
  Antisense strand to SEQ ID NO: 1760873
uauggacauaacuggcucc

SEQ ID NO: 1760875 - RNA, 19 nt, Artificial Sequence
  Description of Artificial Sequence: Synthetic oligonucleotide
  Sense strand starting at position 3825 of SEQ ID NO: 1562624
gccaguuauguccauauga

SEQ ID NO: 1760876 - RNA, 19 nt, Artificial Sequence
  Description of Artificial Sequence: Synthetic oligonucleotide
  Antisense strand to SEQ ID NO: 1760875
ucauauggacauaacuggc

SEQ ID NO: 1760877 - RNA, 19 nt, Artificial Sequence
  Description of Artificial Sequence: Synthetic oligonucleotide
  Sense strand starting at position 3871 of SEQ ID NO: 1562624
agaucagguucuucugagu

SEQ ID NO: 1760878 - RNA, 19 nt, Artificial Sequence
  Description of Artificial Sequence: Synthetic oligonucleotide
  Antisense strand to SEQ ID NO: 1760877
acucagaagaaccugaucu

SEQ ID NO: 1760879 - RNA, 19 nt, Artificial Sequence
  Description of Artificial Sequence: Synthetic oligonucleotide
  Sense strand starting at position 51 of SEQ ID NO: 1562625
agucuucuucuuggaggau

SEQ ID NO: 1760880 - RNA, 19 nt, Artificial Sequence
  Description of Artificial Sequence: Synthetic oligonucleotide
  Antisense strand to SEQ ID NO: 1760879
auccuccaagaagaagacu

SEQ ID NO: 1760881 - RNA, 19 nt, Artificial Sequence
  Description of Artificial Sequence: Synthetic oligonucleotide
  Sense strand starting at position 54 of SEQ ID NO: 1562625
cuucuucuuggaggauuaa

SEQ ID NO: 1760882 - RNA, 19 nt, Artificial Sequence
  Description of Artificial Sequence: Synthetic oligonucleotide
  Antisense strand to SEQ ID NO: 1760881
uuaauccuccaagaagaag

SEQ ID NO: 1760883 - RNA, 19 nt, Artificial Sequence
  Description of Artificial Sequence: Synthetic oligonucleotide
  Sense strand starting at position 121 of SEQ ID NO: 1562625
aguccauauucuuugucaa

SEQ ID NO: 1760884 - RNA, 19 nt, Artificial Sequence
  Description of Artificial Sequence: Synthetic oligonucleotide
  Antisense strand to SEQ ID NO: 1760883
uugacaaagaauauggacu

SEQ ID NO: 1760885 - RNA, 19 nt, Artificial Sequence
  Description of Artificial Sequence: Synthetic oligonucleotide
  Sense strand starting at position 343 of SEQ ID NO: 1562625
augggaucucuaugucuau

SEQ ID NO: 1760886 - RNA, 19 nt, Artificial Sequence
  Description of Artificial Sequence: Synthetic oligonucleotide
  Antisense strand to SEQ ID NO: 1760885
auagacauagagaucccau

SEQ ID NO: 1760887 - RNA, 19 nt, Artificial Sequence
  Description of Artificial Sequence: Synthetic oligonucleotide
  Sense strand starting at position 346 of SEQ ID NO: 1562625
ggaucucuaugucuaugaa

SEQ ID NO: 1760888 - RNA, 19 nt, Artificial Sequence
  Description of Artificial Sequence: Synthetic oligonucleotide
  Antisense strand to SEQ ID NO: 1760887
uucauagacauagagaucc

SEQ ID NO: 1760889 - RNA, 19 nt, Artificial Sequence
  Description of Artificial Sequence: Synthetic oligonucleotide
  Sense strand starting at position 349 of SEQ ID NO: 1562625
ucucuaugucuaugaaggu

SEQ ID NO: 1760890 - RNA, 19 nt, Artificial Sequence
  Description of Artificial Sequence: Synthetic oligonucleotide
  Antisense strand to SEQ ID NO: 1760889
accuucauagacauagaga

SEQ ID NO: 1760891 - RNA, 19 nt, Artificial Sequence
  Description of Artificial Sequence: Synthetic oligonucleotide
  Sense strand starting at position 1034 of SEQ ID NO: 1562625
uguaguagggcugaagaga

SEQ ID NO: 1760892 - RNA, 19 nt, Artificial Sequence
  Description of Artificial Sequence: Synthetic oligonucleotide
  Antisense strand to SEQ ID NO: 1760891
ucucuucagcccuacuaca

SEQ ID NO: 1760893 - RNA, 19 nt, Artificial Sequence
  Description of Artificial Sequence: Synthetic oligonucleotide
  Sense strand starting at position 1083 of SEQ ID NO: 1562625
aucagagcuccaugacuaa

SEQ ID NO: 1760894 - RNA, 19 nt, Artificial Sequence
  Description of Artificial Sequence: Synthetic oligonucleotide
  Antisense strand to SEQ ID NO: 1760893
uuagucauggagcucugau

SEQ ID NO: 1760895 - RNA, 19 nt, Artificial Sequence
  Description of Artificial Sequence: Synthetic oligonucleotide
  Sense strand starting at position 1095 of SEQ ID NO: 1562625
ugacuaaacucuuugggua

SEQ ID NO: 1760896 - RNA, 19 nt, Artificial Sequence
  Description of Artificial Sequence: Synthetic oligonucleotide
  Antisense strand to SEQ ID NO: 1760895
uacccaaagaguuuaguca

SEQ ID NO: 1760897 - RNA, 19 nt, Artificial Sequence
  Description of Artificial Sequence: Synthetic oligonucleotide
  Sense strand starting at position 1096 of SEQ ID NO: 1562625
gacuaaacucuuuggguaa

SEQ ID NO: 1760898 - RNA, 19 nt, Artificial Sequence
  Description of Artificial Sequence: Synthetic oligonucleotide
  Antisense strand to SEQ ID NO: 1760897
uuacccaaagaguuuaguc

SEQ ID NO: 1760899 - RNA, 19 nt, Artificial Sequence
  Description of Artificial Sequence: Synthetic oligonucleotide
  Sense strand starting at position 1633 of SEQ ID NO: 1562625
ugaggaugucucugagggu

SEQ ID NO: 1760900 - RNA, 19 nt, Artificial Sequence
  Description of Artificial Sequence: Synthetic oligonucleotide
  Antisense strand to SEQ ID NO: 1760899
acccucagagacauccuca

SEQ ID NO: 1760901 - RNA, 19 nt, Artificial Sequence
  Description of Artificial Sequence: Synthetic oligonucleotide
  Sense strand starting at position 1675 of SEQ ID NO: 1562625
cggugguggccagagagau

SEQ ID NO: 1760902 - RNA, 19 nt, Artificial Sequence
  Description of Artificial Sequence: Synthetic oligonucleotide
  Antisense strand to SEQ ID NO: 1760901
aucucucuggccaccaccg

SEQ ID NO: 1760903 - RNA, 19 nt, Artificial Sequence
  Description of Artificial Sequence: Synthetic oligonucleotide
  Sense strand starting at position 2100 of SEQ ID NO: 1562625
ccugguugccaggaaacaa

SEQ ID NO: 1760904 - RNA, 19 nt, Artificial Sequence
  Description of Artificial Sequence: Synthetic oligonucleotide
  Antisense strand to SEQ ID NO: 1760903
uuguuuccuggcaaccagg

SEQ ID NO: 1760905 - RNA, 19 nt, Artificial Sequence
  Description of Artificial Sequence: Synthetic oligonucleotide
  Sense strand starting at position 2301 of SEQ ID NO: 1562625
ggaagucacccugggcaau

SEQ ID NO: 1760906 - RNA, 19 nt, Artificial Sequence
  Description of Artificial Sequence: Synthetic oligonucleotide
  Antisense strand to SEQ ID NO: 1760905
auugcccagggugacuucc

SEQ ID NO: 1760907 - RNA, 19 nt, Artificial Sequence
  Description of Artificial Sequence: Synthetic oligonucleotide
  Sense strand starting at position 2341 of SEQ ID NO: 1562625
uuacuaaagucaguuccau

SEQ ID NO: 1760908 - RNA, 19 nt, Artificial Sequence
  Description of Artificial Sequence: Synthetic oligonucleotide
  Antisense strand to SEQ ID NO: 1760907
auggaacugacuuuaguaa

SEQ ID NO: 1760909 - RNA, 19 nt, Artificial Sequence
  Description of Artificial Sequence: Synthetic oligonucleotide
  Sense strand starting at position 2384 of SEQ ID NO: 1562625
ggcagcuuucguuugcuca

SEQ ID NO: 1760910 - RNA, 19 nt, Artificial Sequence
  Description of Artificial Sequence: Synthetic oligonucleotide
  Antisense strand to SEQ ID NO: 1760909
ugagcaaacgaaagcugcc

SEQ ID NO: 1760911 - RNA, 19 nt, Artificial Sequence
  Description of Artificial Sequence: Synthetic oligonucleotide
  Sense strand starting at position 2525 of SEQ ID NO: 1562625
ucgauaaagcgugaugacu

SEQ ID NO: 1760912 - RNA, 19 nt, Artificial Sequence
  Description of Artificial Sequence: Synthetic oligonucleotide
  Antisense strand to SEQ ID NO: 1760911
agucaucacgcuuuaucga

SEQ ID NO: 1760913 - RNA, 19 nt, Artificial Sequence
  Description of Artificial Sequence: Synthetic oligonucleotide
  Sense strand starting at position 2538 of SEQ ID NO: 1562625
augacugcgacuugaauga

SEQ ID NO: 1760914 - RNA, 19 nt, Artificial Sequence
  Description of Artificial Sequence: Synthetic oligonucleotide
  Antisense strand to SEQ ID NO: 1760913
ucauucaagucgcagucau

SEQ ID NO: 1760915 - RNA, 19 nt, Artificial Sequence
  Description of Artificial Sequence: Synthetic oligonucleotide
  Sense strand starting at position 2625 of SEQ ID NO: 1562625
ucugaaaugcuaggaccua

SEQ ID NO: 1760916 - RNA, 19 nt, Artificial Sequence
  Description of Artificial Sequence: Synthetic oligonucleotide
  Antisense strand to SEQ ID NO: 1760915
uagguccuagcauuucaga

SEQ ID NO: 1760917 - RNA, 19 nt, Artificial Sequence
  Description of Artificial Sequence: Synthetic oligonucleotide
  Sense strand starting at position 2673 of SEQ ID NO: 1562625
cuuccauggcagggauauu

SEQ ID NO: 1760918 - RNA, 19 nt, Artificial Sequence
  Description of Artificial Sequence: Synthetic oligonucleotide
  Antisense strand to SEQ ID NO: 1760917
aauaucccugccauggaag

SEQ ID NO: 1760919 - RNA, 19 nt, Artificial Sequence
  Description of Artificial Sequence: Synthetic oligonucleotide
  Sense strand starting at position 2760 of SEQ ID NO: 1562625
ggauaccacuguccucauu

SEQ ID NO: 1760920 - RNA, 19 nt, Artificial Sequence
  Description of Artificial Sequence: Synthetic oligonucleotide
  Antisense strand to SEQ ID NO: 1760919
aaugaggacagugguaucc

SEQ ID NO: 1760921 - RNA, 19 nt, Artificial Sequence
  Description of Artificial Sequence: Synthetic oligonucleotide
  Sense strand starting at position 2809 of SEQ ID NO: 1562625
gccugacaguauuccaaca

SEQ ID NO: 1760922 - RNA, 19 nt, Artificial Sequence
  Description of Artificial Sequence: Synthetic oligonucleotide
  Antisense strand to SEQ ID NO: 1760921
uguuggaauacugucaggc

SEQ ID NO: 1760923 - RNA, 19 nt, Artificial Sequence
  Description of Artificial Sequence: Synthetic oligonucleotide
  Sense strand starting at position 2814 of SEQ ID NO: 1562625
acaguauuccaacaguggu

SEQ ID NO: 1760924 - RNA, 19 nt, Artificial Sequence
  Description of Artificial Sequence: Synthetic oligonucleotide
  Antisense strand to SEQ ID NO: 1760923
accacuguuggaauacugu

SEQ ID NO: 1760925 - RNA, 19 nt, Artificial Sequence
  Description of Artificial Sequence: Synthetic oligonucleotide
  Sense strand starting at position 2817 of SEQ ID NO: 1562625
guauuccaacagugguaua

SEQ ID NO: 1760926 - RNA, 19 nt, Artificial Sequence
  Description of Artificial Sequence: Synthetic oligonucleotide
  Antisense strand to SEQ ID NO: 1760925
uauaccacuguuggaauac

SEQ ID NO: 1760927 - RNA, 19 nt, Artificial Sequence
  Description of Artificial Sequence: Synthetic oligonucleotide
  Sense strand starting at position 2822 of SEQ ID NO: 1562625
ccaacagugguauacuaau

SEQ ID NO: 1760928 - RNA, 19 nt, Artificial Sequence
  Description of Artificial Sequence: Synthetic oligonucleotide
  Antisense strand to SEQ ID NO: 1760927
auuaguauaccacuguugg

SEQ ID NO: 1760929 - RNA, 19 nt, Artificial Sequence
  Description of Artificial Sequence: Synthetic oligonucleotide
  Sense strand starting at position 2944 of SEQ ID NO: 1562625
agaauuuaauccugaguaa

SEQ ID NO: 1760930 - RNA, 19 nt, Artificial Sequence
  Description of Artificial Sequence: Synthetic oligonucleotide
  Antisense strand to SEQ ID NO: 1760929
uuacucaggauuaaauucu

SEQ ID NO: 1760931 - RNA, 19 nt, Artificial Sequence
  Description of Artificial Sequence: Synthetic oligonucleotide
  Sense strand starting at position 2972 of SEQ ID NO: 1562625
ccacaagccgaucaugauu

SEQ ID NO: 1760932 - RNA, 19 nt, Artificial Sequence
  Description of Artificial Sequence: Synthetic oligonucleotide
  Antisense strand to SEQ ID NO: 1760931
aaucaugaucggcuugugg

SEQ ID NO: 1760933 - RNA, 19 nt, Artificial Sequence
  Description of Artificial Sequence: Synthetic oligonucleotide
  Sense strand starting at position 2978 of SEQ ID NO: 1562625
gccgaucaugauuaucaga

SEQ ID NO: 1760934 - RNA, 19 nt, Artificial Sequence
  Description of Artificial Sequence: Synthetic oligonucleotide
  Antisense strand to SEQ ID NO: 1760933
ucugauaaucaugaucggc

SEQ ID NO: 1760935 - RNA, 19 nt, Artificial Sequence
  Description of Artificial Sequence: Synthetic oligonucleotide
  Sense strand starting at position 3031 of SEQ ID NO: 1562625
gaccuuguagauuaguauu

SEQ ID NO: 1760936 - RNA, 19 nt, Artificial Sequence
  Description of Artificial Sequence: Synthetic oligonucleotide
  Antisense strand to SEQ ID NO: 1760935
aauacuaaucuacaagguc

SEQ ID NO: 1760937 - RNA, 19 nt, Artificial Sequence
  Description of Artificial Sequence: Synthetic oligonucleotide
  Sense strand starting at position 3409 of SEQ ID NO: 1562625
ugauuaagauacucuaugu

SEQ ID NO: 1760938 - RNA, 19 nt, Artificial Sequence
  Description of Artificial Sequence: Synthetic oligonucleotide
  Antisense strand to SEQ ID NO: 1760937
acauagaguaucuuaauca

SEQ ID NO: 1760939 - RNA, 19 nt, Artificial Sequence
  Description of Artificial Sequence: Synthetic oligonucleotide
  Sense strand starting at position 3490 of SEQ ID NO: 1562625
ugugaucauuugggagaua

SEQ ID NO: 1760940 - RNA, 19 nt, Artificial Sequence
  Description of Artificial Sequence: Synthetic oligonucleotide
  Antisense strand to SEQ ID NO: 1760939
uaucucccaaaugaucaca

SEQ ID NO: 1760941 - RNA, 19 nt, Artificial Sequence
  Description of Artificial Sequence: Synthetic oligonucleotide
  Sense strand starting at position 3491 of SEQ ID NO: 1562625
gugaucauuugggagauag

SEQ ID NO: 1760942 - RNA, 19 nt, Artificial Sequence
  Description of Artificial Sequence: Synthetic oligonucleotide
  Antisense strand to SEQ ID NO: 1760941
cuaucucccaaaugaucac

SEQ ID NO: 1760943 - RNA, 19 nt, Artificial Sequence
  Description of Artificial Sequence: Synthetic oligonucleotide
  Sense strand starting at position 3511 of SEQ ID NO: 1562625
acaggaagugcuuggugau

SEQ ID NO: 1760944 - RNA, 19 nt, Artificial Sequence
  Description of Artificial Sequence: Synthetic oligonucleotide
  Antisense strand to SEQ ID NO: 1760943
aucaccaagcacuuccugu

SEQ ID NO: 1760945 - RNA, 19 nt, Artificial Sequence
  Description of Artificial Sequence: Synthetic oligonucleotide
  Sense strand starting at position 3512 of SEQ ID NO: 1562625
caggaagugcuuggugauu

SEQ ID NO: 1760946 - RNA, 19 nt, Artificial Sequence
  Description of Artificial Sequence: Synthetic oligonucleotide
  Antisense strand to SEQ ID NO: 1760945
aaucaccaagcacuuccug

SEQ ID NO: 1760947 - RNA, 19 nt, Artificial Sequence
  Description of Artificial Sequence: Synthetic oligonucleotide
  Sense strand starting at position 3524 of SEQ ID NO: 1562625
ggugauuagacguggaaga

SEQ ID NO: 1760948 - RNA, 19 nt, Artificial Sequence
  Description of Artificial Sequence: Synthetic oligonucleotide
  Antisense strand to SEQ ID NO: 1760947
ucuuccacgucuaaucacc

SEQ ID NO: 1760949 - RNA, 19 nt, Artificial Sequence
  Description of Artificial Sequence: Synthetic oligonucleotide
  Sense strand starting at position 3525 of SEQ ID NO: 1562625
gugauuagacguggaagaa

SEQ ID NO: 1760950 - RNA, 19 nt, Artificial Sequence
  Description of Artificial Sequence: Synthetic oligonucleotide
  Antisense strand to SEQ ID NO: 1760949
uucuuccacgucuaaucac

SEQ ID NO: 1760951 - RNA, 19 nt, Artificial Sequence
  Description of Artificial Sequence: Synthetic oligonucleotide
  Sense strand starting at position 3578 of SEQ ID NO: 1562625
uuugauggacuguguaaau

SEQ ID NO: 1760952 - RNA, 19 nt, Artificial Sequence
  Description of Artificial Sequence: Synthetic oligonucleotide
  Antisense strand to SEQ ID NO: 1760951
auuuacacaguccaucaaa

SEQ ID NO: 1760953 - RNA, 19 nt, Artificial Sequence
  Description of Artificial Sequence: Synthetic oligonucleotide
  Sense strand starting at position 3686 of SEQ ID NO: 1562625
aauggaaccgucugguuga

SEQ ID NO: 1760954 - RNA, 19 nt, Artificial Sequence
  Description of Artificial Sequence: Synthetic oligonucleotide
  Antisense strand to SEQ ID NO: 1760953
ucaaccagacgguuccauu

SEQ ID NO: 1760955 - RNA, 19 nt, Artificial Sequence
  Description of Artificial Sequence: Synthetic oligonucleotide
  Sense strand starting at position 3713 of SEQ ID NO: 1562625
uguaaaccucuguaggcua

SEQ ID NO: 1760956 - RNA, 19 nt, Artificial Sequence
  Description of Artificial Sequence: Synthetic oligonucleotide
  Antisense strand to SEQ ID NO: 1760955
uagccuacagagguuuaca

SEQ ID NO: 1760957 - RNA, 19 nt, Artificial Sequence
  Description of Artificial Sequence: Synthetic oligonucleotide
  Sense strand starting at position 3845 of SEQ ID NO: 1562625
gugauuacuuucuuaggga

SEQ ID NO: 1760958 - RNA, 19 nt, Artificial Sequence
  Description of Artificial Sequence: Synthetic oligonucleotide
  Antisense strand to SEQ ID NO: 1760957
ucccuaagaaaguaaucac

SEQ ID NO: 1760959 - RNA, 19 nt, Artificial Sequence
  Description of Artificial Sequence: Synthetic oligonucleotide
  Sense strand starting at position 482 of SEQ ID NO: 1562626
ugcagaguuggcuaggagu

SEQ ID NO: 1760960 - RNA, 19 nt, Artificial Sequence
  Description of Artificial Sequence: Synthetic oligonucleotide
  Antisense strand to SEQ ID NO: 1760959
acuccuagccaacucugca

SEQ ID NO: 1760961 - RNA, 19 nt, Artificial Sequence
  Description of Artificial Sequence: Synthetic oligonucleotide
  Sense strand starting at position 578 of SEQ ID NO: 1562626
gcaugacuaacacggagaa

SEQ ID NO: 1760962 - RNA, 19 nt, Artificial Sequence
  Description of Artificial Sequence: Synthetic oligonucleotide
  Antisense strand to SEQ ID NO: 1760961
uucuccguguuagucaugc

SEQ ID NO: 1760963 - RNA, 19 nt, Artificial Sequence
  Description of Artificial Sequence: Synthetic oligonucleotide
  Sense strand starting at position 710 of SEQ ID NO: 1562626
gagguaagccgagaucaca

SEQ ID NO: 1760964 - RNA, 19 nt, Artificial Sequence
  Description of Artificial Sequence: Synthetic oligonucleotide
  Antisense strand to SEQ ID NO: 1760963
ugugaucucggcuuaccuc

SEQ ID NO: 1760965 - RNA, 19 nt, Artificial Sequence
  Description of Artificial Sequence: Synthetic oligonucleotide
  Sense strand starting at position 793 of SEQ ID NO: 1562626
aaaggaaauccgcagaguu

SEQ ID NO: 1760966 - RNA, 19 nt, Artificial Sequence
  Description of Artificial Sequence: Synthetic oligonucleotide
  Antisense strand to SEQ ID NO: 1760965
aacucugcggauuuccuuu

SEQ ID NO: 1760967 - RNA, 19 nt, Artificial Sequence
  Description of Artificial Sequence: Synthetic oligonucleotide
  Sense strand starting at position 795 of SEQ ID NO: 1562626
aggaaauccgcagaguugu

SEQ ID NO: 1760968 - RNA, 19 nt, Artificial Sequence
  Description of Artificial Sequence: Synthetic oligonucleotide
  Antisense strand to SEQ ID NO: 1760967
acaacucugcggauuuccu

SEQ ID NO: 1760969 - RNA, 19 nt, Artificial Sequence
  Description of Artificial Sequence: Synthetic oligonucleotide
  Sense strand starting at position 834 of SEQ ID NO: 1562626
ugguaaucauuuguuucuu

SEQ ID NO: 1760970 - RNA, 19 nt, Artificial Sequence
  Description of Artificial Sequence: Synthetic oligonucleotide
  Antisense strand to SEQ ID NO: 1760969
aagaaacaaaugauuacca

SEQ ID NO: 1760971 - RNA, 19 nt, Artificial Sequence
  Description of Artificial Sequence: Synthetic oligonucleotide
  Sense strand starting at position 862 of SEQ ID NO: 1562626
gcuacaaacugauguauuc

SEQ ID NO: 1760972 - RNA, 19 nt, Artificial Sequence
  Description of Artificial Sequence: Synthetic oligonucleotide
  Antisense strand to SEQ ID NO: 1760971
gaauacaucaguuuguagc

SEQ ID NO: 1760973 - RNA, 19 nt, Artificial Sequence
  Description of Artificial Sequence: Synthetic oligonucleotide
  Sense strand starting at position 923 of SEQ ID NO: 1562626
guguauuauccuuggacca

SEQ ID NO: 1760974 - RNA, 19 nt, Artificial Sequence
  Description of Artificial Sequence: Synthetic oligonucleotide
  Antisense strand to SEQ ID NO: 1760973
ugguccaaggauaauacac

SEQ ID NO: 1760975 - RNA, 19 nt, Artificial Sequence
  Description of Artificial Sequence: Synthetic oligonucleotide
  Sense strand starting at position 924 of SEQ ID NO: 1562626
uguauuauccuuggaccaa

SEQ ID NO: 1760976 - RNA, 19 nt, Artificial Sequence
  Description of Artificial Sequence: Synthetic oligonucleotide
  Antisense strand to SEQ ID NO: 1760975
uugguccaaggauaauaca

SEQ ID NO: 1760977 - RNA, 19 nt, Artificial Sequence
  Description of Artificial Sequence: Synthetic oligonucleotide
  Sense strand starting at position 925 of SEQ ID NO: 1562626
guauuauccuuggaccaau

SEQ ID NO: 1760978 - RNA, 19 nt, Artificial Sequence
  Description of Artificial Sequence: Synthetic oligonucleotide
  Antisense strand to SEQ ID NO: 1760977
auugguccaaggauaauac

SEQ ID NO: 1760979 - RNA, 19 nt, Artificial Sequence
  Description of Artificial Sequence: Synthetic oligonucleotide
  Sense strand starting at position 1308 of SEQ ID NO: 1562626
ggccauucuggugacugua

SEQ ID NO: 1760980 - RNA, 19 nt, Artificial Sequence
  Description of Artificial Sequence: Synthetic oligonucleotide
  Antisense strand to SEQ ID NO: 1760979
uacagucaccagaauggcc

SEQ ID NO: 1760981 - RNA, 19 nt, Artificial Sequence
  Description of Artificial Sequence: Synthetic oligonucleotide
  Sense strand starting at position 1333 of SEQ ID NO: 1562626
auaggcugugguuggauaa

SEQ ID NO: 1760982 - RNA, 19 nt, Artificial Sequence
  Description of Artificial Sequence: Synthetic oligonucleotide
  Antisense strand to SEQ ID NO: 1760981
uuauccaaccacagccuau

SEQ ID NO: 1760983 - RNA, 19 nt, Artificial Sequence
  Description of Artificial Sequence: Synthetic oligonucleotide
  Sense strand starting at position 1381 of SEQ ID NO: 1562626
guugcuaugguccaguuga

SEQ ID NO: 1760984 - RNA, 19 nt, Artificial Sequence
  Description of Artificial Sequence: Synthetic oligonucleotide
  Antisense strand to SEQ ID NO: 1760983
ucaacuggaccauagcaac

SEQ ID NO: 1760985 - RNA, 19 nt, Artificial Sequence
  Description of Artificial Sequence: Synthetic oligonucleotide
  Sense strand starting at position 1392 of SEQ ID NO: 1562626
ccaguugagacaugauggu

SEQ ID NO: 1760986 - RNA, 19 nt, Artificial Sequence
  Description of Artificial Sequence: Synthetic oligonucleotide
  Antisense strand to SEQ ID NO: 1760985
accaucaugucucaacugg

SEQ ID NO: 1760987 - RNA, 19 nt, Artificial Sequence
  Description of Artificial Sequence: Synthetic oligonucleotide
  Sense strand starting at position 1426 of SEQ ID NO: 1562626
gguguggugugguuagaag

SEQ ID NO: 1760988 - RNA, 19 nt, Artificial Sequence
  Description of Artificial Sequence: Synthetic oligonucleotide
  Antisense strand to SEQ ID NO: 1760987
cuucuaaccacaccacacc

SEQ ID NO: 1760989 - RNA, 19 nt, Artificial Sequence
  Description of Artificial Sequence: Synthetic oligonucleotide
  Sense strand starting at position 1427 of SEQ ID NO: 1562626
guguggugugguuagaagu

SEQ ID NO: 1760990 - RNA, 19 nt, Artificial Sequence
  Description of Artificial Sequence: Synthetic oligonucleotide
  Antisense strand to SEQ ID NO: 1760989
acuucuaaccacaccacac

SEQ ID NO: 1760991 - RNA, 19 nt, Artificial Sequence
  Description of Artificial Sequence: Synthetic oligonucleotide
  Sense strand starting at position 1429 of SEQ ID NO: 1562626
guggugugguuagaaguga

SEQ ID NO: 1760992 - RNA, 19 nt, Artificial Sequence
  Description of Artificial Sequence: Synthetic oligonucleotide
  Antisense strand to SEQ ID NO: 1760991
ucacuucuaaccacaccac

SEQ ID NO: 1760993 - RNA, 19 nt, Artificial Sequence
  Description of Artificial Sequence: Synthetic oligonucleotide
  Sense strand starting at position 1433 of SEQ ID NO: 1562626
ugugguuagaagugaucag

SEQ ID NO: 1760994 - RNA, 19 nt, Artificial Sequence
  Description of Artificial Sequence: Synthetic oligonucleotide
  Antisense strand to SEQ ID NO: 1760993
cugaucacuucuaaccaca

SEQ ID NO: 1760995 - RNA, 19 nt, Artificial Sequence
  Description of Artificial Sequence: Synthetic oligonucleotide
  Sense strand starting at position 1434 of SEQ ID NO: 1562626
gugguuagaagugaucaga

SEQ ID NO: 1760996 - RNA, 19 nt, Artificial Sequence
  Description of Artificial Sequence: Synthetic oligonucleotide
  Antisense strand to SEQ ID NO: 1760995
ucugaucacuucuaaccac

SEQ ID NO: 1760997 - RNA, 19 nt, Artificial Sequence
  Description of Artificial Sequence: Synthetic oligonucleotide
  Sense strand starting at position 1457 of SEQ ID NO: 1562626
agauacaauuugcaaguau

SEQ ID NO: 1760998 - RNA, 19 nt, Artificial Sequence
  Description of Artificial Sequence: Synthetic oligonucleotide
  Antisense strand to SEQ ID NO: 1760997
auacuugcaaauuguaucu

SEQ ID NO: 1760999 - RNA, 19 nt, Artificial Sequence
  Description of Artificial Sequence: Synthetic oligonucleotide
  Sense strand starting at position 1497 of SEQ ID NO: 1562626
gauugaauguguggaguga

SEQ ID NO: 1761000 - RNA, 19 nt, Artificial Sequence
  Description of Artificial Sequence: Synthetic oligonucleotide
  Antisense strand to SEQ ID NO: 1760999
ucacuccacacauucaauc

SEQ ID NO: 1761001 - RNA, 19 nt, Artificial Sequence
  Description of Artificial Sequence: Synthetic oligonucleotide
  Sense strand starting at position 1532 of SEQ ID NO: 1562626
cagggugacuccuggguuu

SEQ ID NO: 1761002 - RNA, 19 nt, Artificial Sequence
  Description of Artificial Sequence: Synthetic oligonucleotide
  Antisense strand to SEQ ID NO: 1761001
aaacccaggagucacccug

SEQ ID NO: 1761003 - RNA, 19 nt, Artificial Sequence
  Description of Artificial Sequence: Synthetic oligonucleotide
  Sense strand starting at position 1579 of SEQ ID NO: 1562626
gccugaguuucccucugau

SEQ ID NO: 1761004 - RNA, 19 nt, Artificial Sequence
  Description of Artificial Sequence: Synthetic oligonucleotide
  Antisense strand to SEQ ID NO: 1761003
aucagagggaaacucaggc

SEQ ID NO: 1761005 - RNA, 19 nt, Artificial Sequence
  Description of Artificial Sequence: Synthetic oligonucleotide
  Sense strand starting at position 1651 of SEQ ID NO: 1562626
caaucauggugcugaggga

SEQ ID NO: 1761006 - RNA, 19 nt, Artificial Sequence
  Description of Artificial Sequence: Synthetic oligonucleotide
  Antisense strand to SEQ ID NO: 1761005
ucccucagcaccaugauug

SEQ ID NO: 1761007 - RNA, 19 nt, Artificial Sequence
  Description of Artificial Sequence: Synthetic oligonucleotide
  Sense strand starting at position 2191 of SEQ ID NO: 1562626
agauuaaguucccugaaug

SEQ ID NO: 1761008 - RNA, 19 nt, Artificial Sequence
  Description of Artificial Sequence: Synthetic oligonucleotide
  Antisense strand to SEQ ID NO: 1761007
cauucagggaacuuaaucu

SEQ ID NO: 1761009 - RNA, 19 nt, Artificial Sequence
  Description of Artificial Sequence: Synthetic oligonucleotide
  Sense strand starting at position 2321 of SEQ ID NO: 1562626
auguauucuuguuuaacca

SEQ ID NO: 1761010 - RNA, 19 nt, Artificial Sequence
  Description of Artificial Sequence: Synthetic oligonucleotide
  Antisense strand to SEQ ID NO: 1761009
ugguuaaacaagaauacau

SEQ ID NO: 1761011 - RNA, 19 nt, Artificial Sequence
  Description of Artificial Sequence: Synthetic oligonucleotide
  Sense strand starting at position 2361 of SEQ ID NO: 1562626
cuugcaguauccugauuuc

SEQ ID NO: 1761012 - RNA, 19 nt, Artificial Sequence
  Description of Artificial Sequence: Synthetic oligonucleotide
  Antisense strand to SEQ ID NO: 1761011
gaaaucaggauacugcaag

SEQ ID NO: 1761013 - RNA, 19 nt, Artificial Sequence
  Description of Artificial Sequence: Synthetic oligonucleotide
  Sense strand starting at position 2364 of SEQ ID NO: 1562626
gcaguauccugauuuccug

SEQ ID NO: 1761014 - RNA, 19 nt, Artificial Sequence
  Description of Artificial Sequence: Synthetic oligonucleotide
  Antisense strand to SEQ ID NO: 1761013
caggaaaucaggauacugc

SEQ ID NO: 1761015 - RNA, 19 nt, Artificial Sequence
  Description of Artificial Sequence: Synthetic oligonucleotide
  Sense strand starting at position 2400 of SEQ ID NO: 1562626
ccaucuuaggaucaguguu

SEQ ID NO: 1761016 - RNA, 19 nt, Artificial Sequence
  Description of Artificial Sequence: Synthetic oligonucleotide
  Antisense strand to SEQ ID NO: 1761015
aacacugauccuaagaugg

SEQ ID NO: 1761017 - RNA, 19 nt, Artificial Sequence
  Description of Artificial Sequence: Synthetic oligonucleotide
  Sense strand starting at position 2408 of SEQ ID NO: 1562626
ggaucaguguuggugggaa

SEQ ID NO: 1761018 - RNA, 19 nt, Artificial Sequence
  Description of Artificial Sequence: Synthetic oligonucleotide
  Antisense strand to SEQ ID NO: 1761017
uucccaccaacacugaucc

SEQ ID NO: 1761019 - RNA, 19 nt, Artificial Sequence
  Description of Artificial Sequence: Synthetic oligonucleotide
  Sense strand starting at position 2477 of SEQ ID NO: 1562626
uuaaauaucugagcaggca

SEQ ID NO: 1761020 - RNA, 19 nt, Artificial Sequence
  Description of Artificial Sequence: Synthetic oligonucleotide
  Antisense strand to SEQ ID NO: 1761019
ugccugcucagauauuuaa

SEQ ID NO: 1761021 - RNA, 19 nt, Artificial Sequence
  Description of Artificial Sequence: Synthetic oligonucleotide
  Sense strand starting at position 2495 of SEQ ID NO: 1562626
agggacgucagccaauuau

SEQ ID NO: 1761022 - RNA, 19 nt, Artificial Sequence
  Description of Artificial Sequence: Synthetic oligonucleotide
  Antisense strand to SEQ ID NO: 1761021
auaauuggcugacgucccu

SEQ ID NO: 1761023 - RNA, 19 nt, Artificial Sequence
  Description of Artificial Sequence: Synthetic oligonucleotide
  Sense strand starting at position 2530 of SEQ ID NO: 1562626
acuguuuaguggcuggaau

SEQ ID NO: 1761024 - RNA, 19 nt, Artificial Sequence
  Description of Artificial Sequence: Synthetic oligonucleotide
  Antisense strand to SEQ ID NO: 1761023
auuccagccacuaaacagu

SEQ ID NO: 1761025 - RNA, 19 nt, Artificial Sequence
  Description of Artificial Sequence: Synthetic oligonucleotide
  Sense strand starting at position 2531 of SEQ ID NO: 1562626
cuguuuaguggcuggaauu

SEQ ID NO: 1761026 - RNA, 19 nt, Artificial Sequence
  Description of Artificial Sequence: Synthetic oligonucleotide
  Antisense strand to SEQ ID NO: 1761025
aauuccagccacuaaacag

SEQ ID NO: 1761027 - RNA, 19 nt, Artificial Sequence
  Description of Artificial Sequence: Synthetic oligonucleotide
  Sense strand starting at position 2532 of SEQ ID NO: 1562626
uguuuaguggcuggaauuu

SEQ ID NO: 1761028 - RNA, 19 nt, Artificial Sequence
  Description of Artificial Sequence: Synthetic oligonucleotide
  Antisense strand to SEQ ID NO: 1761027
aaauuccagccacuaaaca

SEQ ID NO: 1761029 - RNA, 19 nt, Artificial Sequence
  Description of Artificial Sequence: Synthetic oligonucleotide
  Sense strand starting at position 3525 of SEQ ID NO: 1562626
ucauaagaacgccaaagua

SEQ ID NO: 1761030 - RNA, 19 nt, Artificial Sequence
  Description of Artificial Sequence: Synthetic oligonucleotide
  Antisense strand to SEQ ID NO: 1761029
uacuuuggcguucuuauga

SEQ ID NO: 1761031 - RNA, 19 nt, Artificial Sequence
  Description of Artificial Sequence: Synthetic oligonucleotide
  Sense strand starting at position 3541 of SEQ ID NO: 1562626
guacguuccuucuucgaca

SEQ ID NO: 1761032 - RNA, 19 nt, Artificial Sequence
  Description of Artificial Sequence: Synthetic oligonucleotide
  Antisense strand to SEQ ID NO: 1761031
ugucgaagaaggaacguac

SEQ ID NO: 1761033 - RNA, 19 nt, Artificial Sequence
  Description of Artificial Sequence: Synthetic oligonucleotide
  Sense strand starting at position 3654 of SEQ ID NO: 1562626
gcugcugcuucugugaguu

SEQ ID NO: 1761034 - RNA, 19 nt, Artificial Sequence
  Description of Artificial Sequence: Synthetic oligonucleotide
  Antisense strand to SEQ ID NO: 1761033
aacucacagaagcagcagc

SEQ ID NO: 1761035 - RNA, 19 nt, Artificial Sequence
  Description of Artificial Sequence: Synthetic oligonucleotide
  Sense strand starting at position 3681 of SEQ ID NO: 1562626
gcacgcgagugcuucugaa

SEQ ID NO: 1761036 - RNA, 19 nt, Artificial Sequence
  Description of Artificial Sequence: Synthetic oligonucleotide
  Antisense strand to SEQ ID NO: 1761035
uucagaagcacucgcgugc

SEQ ID NO: 1761037 - RNA, 19 nt, Artificial Sequence
  Description of Artificial Sequence: Synthetic oligonucleotide
  Sense strand starting at position 3981 of SEQ ID NO: 1562626
cggucuguuugcuuggcaa

SEQ ID NO: 1761038 - RNA, 19 nt, Artificial Sequence
  Description of Artificial Sequence: Synthetic oligonucleotide
  Antisense strand to SEQ ID NO: 1761037
uugccaagcaaacagaccg

SEQ ID NO: 1761039 - RNA, 19 nt, Artificial Sequence
  Description of Artificial Sequence: Synthetic oligonucleotide
  Sense strand starting at position 214 of SEQ ID NO: 1562627
cuguaagcaaugugaggau

SEQ ID NO: 1761040 - RNA, 19 nt, Artificial Sequence
  Description of Artificial Sequence: Synthetic oligonucleotide
  Antisense strand to SEQ ID NO: 1761039
auccucacauugcuuacag

SEQ ID NO: 1761041 - RNA, 19 nt, Artificial Sequence
  Description of Artificial Sequence: Synthetic oligonucleotide
  Sense strand starting at position 218 of SEQ ID NO: 1562627
aagcaaugugaggauggua

SEQ ID NO: 1761042 - RNA, 19 nt, Artificial Sequence
  Description of Artificial Sequence: Synthetic oligonucleotide
  Antisense strand to SEQ ID NO: 1761041
uaccauccucacauugcuu

SEQ ID NO: 1761043 - RNA, 19 nt, Artificial Sequence
  Description of Artificial Sequence: Synthetic oligonucleotide
  Sense strand starting at position 701 of SEQ ID NO: 1562627
ggcuuauuagucuaagcua

SEQ ID NO: 1761044 - RNA, 19 nt, Artificial Sequence
  Description of Artificial Sequence: Synthetic oligonucleotide
  Antisense strand to SEQ ID NO: 1761043
uagcuuagacuaauaagcc

SEQ ID NO: 1761045 - RNA, 19 nt, Artificial Sequence
  Description of Artificial Sequence: Synthetic oligonucleotide
  Sense strand starting at position 748 of SEQ ID NO: 1562627
uuuccauggccucagaaca

SEQ ID NO: 1761046 - RNA, 19 nt, Artificial Sequence
  Description of Artificial Sequence: Synthetic oligonucleotide
  Antisense strand to SEQ ID NO: 1761045
uguucugaggccauggaaa

SEQ ID NO: 1761047 - RNA, 19 nt, Artificial Sequence
  Description of Artificial Sequence: Synthetic oligonucleotide
  Sense strand starting at position 801 of SEQ ID NO: 1562627
ccugauccagagugauaac

SEQ ID NO: 1761048 - RNA, 19 nt, Artificial Sequence
  Description of Artificial Sequence: Synthetic oligonucleotide
  Antisense strand to SEQ ID NO: 1761047
guuaucacucuggaucagg

SEQ ID NO: 1761049 - RNA, 19 nt, Artificial Sequence
  Description of Artificial Sequence: Synthetic oligonucleotide
  Sense strand starting at position 824 of SEQ ID NO: 1562627
gauguuuccuggccuggaa

SEQ ID NO: 1761050 - RNA, 19 nt, Artificial Sequence
  Description of Artificial Sequence: Synthetic oligonucleotide
  Antisense strand to SEQ ID NO: 1761049
uuccaggccaggaaacauc

SEQ ID NO: 1761051 - RNA, 19 nt, Artificial Sequence
  Description of Artificial Sequence: Synthetic oligonucleotide
  Sense strand starting at position 845 of SEQ ID NO: 1562627
ugggaagccuaugucuuaa

SEQ ID NO: 1761052 - RNA, 19 nt, Artificial Sequence
  Description of Artificial Sequence: Synthetic oligonucleotide
  Antisense strand to SEQ ID NO: 1761051
uuaagacauaggcuuccca

SEQ ID NO: 1761053 - RNA, 19 nt, Artificial Sequence
  Description of Artificial Sequence: Synthetic oligonucleotide
  Sense strand starting at position 885 of SEQ ID NO: 1562627
ggcugugugacugacuuga

SEQ ID NO: 1761054 - RNA, 19 nt, Artificial Sequence
  Description of Artificial Sequence: Synthetic oligonucleotide
  Antisense strand to SEQ ID NO: 1761053
ucaagucagucacacagcc

SEQ ID NO: 1761055 - RNA, 19 nt, Artificial Sequence
  Description of Artificial Sequence: Synthetic oligonucleotide
  Sense strand starting at position 887 of SEQ ID NO: 1562627
cugugugacugacuugaca

SEQ ID NO: 1761056 - RNA, 19 nt, Artificial Sequence
  Description of Artificial Sequence: Synthetic oligonucleotide
  Antisense strand to SEQ ID NO: 1761055
ugucaagucagucacacag

SEQ ID NO: 1761057 - RNA, 19 nt, Artificial Sequence
  Description of Artificial Sequence: Synthetic oligonucleotide
  Sense strand starting at position 889 of SEQ ID NO: 1562627
gugugacugacuugacaua

SEQ ID NO: 1761058 - RNA, 19 nt, Artificial Sequence
  Description of Artificial Sequence: Synthetic oligonucleotide
  Antisense strand to SEQ ID NO: 1761057
uaugucaagucagucacac

SEQ ID NO: 1761059 - RNA, 19 nt, Artificial Sequence
  Description of Artificial Sequence: Synthetic oligonucleotide
  Sense strand starting at position 1123 of SEQ ID NO: 1562627
gacgcagcuagucuguuau

SEQ ID NO: 1761060 - RNA, 19 nt, Artificial Sequence
  Description of Artificial Sequence: Synthetic oligonucleotide
  Antisense strand to SEQ ID NO: 1761059
auaacagacuagcugcguc

SEQ ID NO: 1761061 - RNA, 19 nt, Artificial Sequence
  Description of Artificial Sequence: Synthetic oligonucleotide
  Sense strand starting at position 1126 of SEQ ID NO: 1562627
gcagcuagucuguuaugua

SEQ ID NO: 1761062 - RNA, 19 nt, Artificial Sequence
  Description of Artificial Sequence: Synthetic oligonucleotide
  Antisense strand to SEQ ID NO: 1761061
uacauaacagacuagcugc

SEQ ID NO: 1761063 - RNA, 19 nt, Artificial Sequence
  Description of Artificial Sequence: Synthetic oligonucleotide
  Sense strand starting at position 1163 of SEQ ID NO: 1562627
acacuacaucgcuacaguu

SEQ ID NO: 1761064 - RNA, 19 nt, Artificial Sequence
  Description of Artificial Sequence: Synthetic oligonucleotide
  Antisense strand to SEQ ID NO: 1761063
aacuguagcgauguagugu

SEQ ID NO: 1761065 - RNA, 19 nt, Artificial Sequence
  Description of Artificial Sequence: Synthetic oligonucleotide
  Sense strand starting at position 1165 of SEQ ID NO: 1562627
acuacaucgcuacaguuaa

SEQ ID NO: 1761066 - RNA, 19 nt, Artificial Sequence
  Description of Artificial Sequence: Synthetic oligonucleotide
  Antisense strand to SEQ ID NO: 1761065
uuaacuguagcgauguagu

SEQ ID NO: 1761067 - RNA, 19 nt, Artificial Sequence
  Description of Artificial Sequence: Synthetic oligonucleotide
  Sense strand starting at position 1304 of SEQ ID NO: 1562627
gaacgagacuguucuaagc

SEQ ID NO: 1761068 - RNA, 19 nt, Artificial Sequence
  Description of Artificial Sequence: Synthetic oligonucleotide
  Antisense strand to SEQ ID NO: 1761067
gcuuagaacagucucguuc

SEQ ID NO: 1761069 - RNA, 19 nt, Artificial Sequence
  Description of Artificial Sequence: Synthetic oligonucleotide
  Sense strand starting at position 1421 of SEQ ID NO: 1562627
agaguuaagugacucccaa

SEQ ID NO: 1761070 - RNA, 19 nt, Artificial Sequence
  Description of Artificial Sequence: Synthetic oligonucleotide
  Antisense strand to SEQ ID NO: 1761069
uugggagucacuuaacucu

SEQ ID NO: 1761071 - RNA, 19 nt, Artificial Sequence
  Description of Artificial Sequence: Synthetic oligonucleotide
  Sense strand starting at position 1449 of SEQ ID NO: 1562627
ugcagauaccuugggaaug

SEQ ID NO: 1761072 - RNA, 19 nt, Artificial Sequence
  Description of Artificial Sequence: Synthetic oligonucleotide
  Antisense strand to SEQ ID NO: 1761071
cauucccaagguaucugca

SEQ ID NO: 1761073 - RNA, 19 nt, Artificial Sequence
  Description of Artificial Sequence: Synthetic oligonucleotide
  Sense strand starting at position 1459 of SEQ ID NO: 1562627
uugggaaugccaggugagu

SEQ ID NO: 1761074 - RNA, 19 nt, Artificial Sequence
  Description of Artificial Sequence: Synthetic oligonucleotide
  Antisense strand to SEQ ID NO: 1761073
acucaccuggcauucccaa

SEQ ID NO: 1761075 - RNA, 19 nt, Artificial Sequence
  Description of Artificial Sequence: Synthetic oligonucleotide
  Sense strand starting at position 2401 of SEQ ID NO: 1562627
cugagcagucacuaaauga

SEQ ID NO: 1761076 - RNA, 19 nt, Artificial Sequence
  Description of Artificial Sequence: Synthetic oligonucleotide
  Antisense strand to SEQ ID NO: 1761075
ucauuuagugacugcucag

SEQ ID NO: 1761077 - RNA, 19 nt, Artificial Sequence
  Description of Artificial Sequence: Synthetic oligonucleotide
  Sense strand starting at position 2427 of SEQ ID NO: 1562627
uguguuauuaccugggaca

SEQ ID NO: 1761078 - RNA, 19 nt, Artificial Sequence
  Description of Artificial Sequence: Synthetic oligonucleotide
  Antisense strand to SEQ ID NO: 1761077
ugucccagguaauaacaca

SEQ ID NO: 1761079 - RNA, 19 nt, Artificial Sequence
  Description of Artificial Sequence: Synthetic oligonucleotide
  Sense strand starting at position 2428 of SEQ ID NO: 1562627
guguuauuaccugggacau

SEQ ID NO: 1761080 - RNA, 19 nt, Artificial Sequence
  Description of Artificial Sequence: Synthetic oligonucleotide
  Antisense strand to SEQ ID NO: 1761079
augucccagguaauaacac

SEQ ID NO: 1761081 - RNA, 19 nt, Artificial Sequence
  Description of Artificial Sequence: Synthetic oligonucleotide
  Sense strand starting at position 2429 of SEQ ID NO: 1562627
uguuauuaccugggacaug

SEQ ID NO: 1761082 - RNA, 19 nt, Artificial Sequence
  Description of Artificial Sequence: Synthetic oligonucleotide
  Antisense strand to SEQ ID NO: 1761081
caugucccagguaauaaca

SEQ ID NO: 1761083 - RNA, 19 nt, Artificial Sequence
  Description of Artificial Sequence: Synthetic oligonucleotide
  Sense strand starting at position 2439 of SEQ ID NO: 1562627
ugggacaugugcucugaaa

SEQ ID NO: 1761084 - RNA, 19 nt, Artificial Sequence
  Description of Artificial Sequence: Synthetic oligonucleotide
  Antisense strand to SEQ ID NO: 1761083
uuucagagcacauguccca

SEQ ID NO: 1761085 - RNA, 19 nt, Artificial Sequence
  Description of Artificial Sequence: Synthetic oligonucleotide
  Sense strand starting at position 2567 of SEQ ID NO: 1562627
gauagcugauaaguuaaua

SEQ ID NO: 1761086 - RNA, 19 nt, Artificial Sequence
  Description of Artificial Sequence: Synthetic oligonucleotide
  Antisense strand to SEQ ID NO: 1761085
uauuaacuuaucagcuauc

SEQ ID NO: 1761087 - RNA, 19 nt, Artificial Sequence
  Description of Artificial Sequence: Synthetic oligonucleotide
  Sense strand starting at position 2690 of SEQ ID NO: 1562627
guuggagaaacuugacuua

SEQ ID NO: 1761088 - RNA, 19 nt, Artificial Sequence
  Description of Artificial Sequence: Synthetic oligonucleotide
  Antisense strand to SEQ ID NO: 1761087
uaagucaaguuucuccaac

SEQ ID NO: 1761089 - RNA, 19 nt, Artificial Sequence
  Description of Artificial Sequence: Synthetic oligonucleotide
  Sense strand starting at position 2697 of SEQ ID NO: 1562627
aaacuugacuuagagggaa

SEQ ID NO: 1761090 - RNA, 19 nt, Artificial Sequence
  Description of Artificial Sequence: Synthetic oligonucleotide
  Antisense strand to SEQ ID NO: 1761089
uucccucuaagucaaguuu

SEQ ID NO: 1761091 - RNA, 19 nt, Artificial Sequence
  Description of Artificial Sequence: Synthetic oligonucleotide
  Sense strand starting at position 2925 of SEQ ID NO: 1562627
agggucuugggcugaaaga

SEQ ID NO: 1761092 - RNA, 19 nt, Artificial Sequence
  Description of Artificial Sequence: Synthetic oligonucleotide
  Antisense strand to SEQ ID NO: 1761091
ucuuucagcccaagacccu

SEQ ID NO: 1761093 - RNA, 19 nt, Artificial Sequence
  Description of Artificial Sequence: Synthetic oligonucleotide
  Sense strand starting at position 2938 of SEQ ID NO: 1562627
gaaagaugguacucucuug

SEQ ID NO: 1761094 - RNA, 19 nt, Artificial Sequence
  Description of Artificial Sequence: Synthetic oligonucleotide
  Antisense strand to SEQ ID NO: 1761093
caagagaguaccaucuuuc

SEQ ID NO: 1761095 - RNA, 19 nt, Artificial Sequence
  Description of Artificial Sequence: Synthetic oligonucleotide
  Sense strand starting at position 2973 of SEQ ID NO: 1562627
uaaagcauuguagggaaga

SEQ ID NO: 1761096 - RNA, 19 nt, Artificial Sequence
  Description of Artificial Sequence: Synthetic oligonucleotide
  Antisense strand to SEQ ID NO: 1761095
ucuucccuacaaugcuuua

SEQ ID NO: 1761097 - RNA, 19 nt, Artificial Sequence
  Description of Artificial Sequence: Synthetic oligonucleotide
  Sense strand starting at position 2994 of SEQ ID NO: 1562627
uuuacacugugguugaauu

SEQ ID NO: 1761098 - RNA, 19 nt, Artificial Sequence
  Description of Artificial Sequence: Synthetic oligonucleotide
  Antisense strand to SEQ ID NO: 1761097
aauucaaccacaguguaaa

SEQ ID NO: 1761099 - RNA, 19 nt, Artificial Sequence
  Description of Artificial Sequence: Synthetic oligonucleotide
  Sense strand starting at position 3017 of SEQ ID NO: 1562627
gcugcuugagucuugcaca

SEQ ID NO: 1761100 - RNA, 19 nt, Artificial Sequence
  Description of Artificial Sequence: Synthetic oligonucleotide
  Antisense strand to SEQ ID NO: 1761099
ugugcaagacucaagcagc

SEQ ID NO: 1761101 - RNA, 19 nt, Artificial Sequence
  Description of Artificial Sequence: Synthetic oligonucleotide
  Sense strand starting at position 3022 of SEQ ID NO: 1562627
uugagucuugcacagauga

SEQ ID NO: 1761102 - RNA, 19 nt, Artificial Sequence
  Description of Artificial Sequence: Synthetic oligonucleotide
  Antisense strand to SEQ ID NO: 1761101
ucaucugugcaagacucaa

SEQ ID NO: 1761103 - RNA, 19 nt, Artificial Sequence
  Description of Artificial Sequence: Synthetic oligonucleotide
  Sense strand starting at position 3124 of SEQ ID NO: 1562627
cuauacugauaagcuagaa

SEQ ID NO: 1761104 - RNA, 19 nt, Artificial Sequence
  Description of Artificial Sequence: Synthetic oligonucleotide
  Antisense strand to SEQ ID NO: 1761103
uucuagcuuaucaguauag

SEQ ID NO: 1761105 - RNA, 19 nt, Artificial Sequence
  Description of Artificial Sequence: Synthetic oligonucleotide
  Sense strand starting at position 3290 of SEQ ID NO: 1562627
gaaagaugcgcuggagaga

SEQ ID NO: 1761106 - RNA, 19 nt, Artificial Sequence
  Description of Artificial Sequence: Synthetic oligonucleotide
  Antisense strand to SEQ ID NO: 1761105
ucucuccagcgcaucuuuc

SEQ ID NO: 1761107 - RNA, 19 nt, Artificial Sequence
  Description of Artificial Sequence: Synthetic oligonucleotide
  Sense strand starting at position 3373 of SEQ ID NO: 1562627
aggugagaaacaugcagau

SEQ ID NO: 1761108 - RNA, 19 nt, Artificial Sequence
  Description of Artificial Sequence: Synthetic oligonucleotide
  Antisense strand to SEQ ID NO: 1761107
aucugcauguuucucaccu

SEQ ID NO: 1761109 - RNA, 19 nt, Artificial Sequence
  Description of Artificial Sequence: Synthetic oligonucleotide
  Sense strand starting at position 3397 of SEQ ID NO: 1562627
uggagugucaugcagcaca

SEQ ID NO: 1761110 - RNA, 19 nt, Artificial Sequence
  Description of Artificial Sequence: Synthetic oligonucleotide
  Antisense strand to SEQ ID NO: 1761109
ugugcugcaugacacucca

SEQ ID NO: 1761111 - RNA, 19 nt, Artificial Sequence
  Description of Artificial Sequence: Synthetic oligonucleotide
  Sense strand starting at position 3454 of SEQ ID NO: 1562627
gagagcacucuggagaguu

SEQ ID NO: 1761112 - RNA, 19 nt, Artificial Sequence
  Description of Artificial Sequence: Synthetic oligonucleotide
  Antisense strand to SEQ ID NO: 1761111
aacucuccagagugcucuc

SEQ ID NO: 1761113 - RNA, 19 nt, Artificial Sequence
  Description of Artificial Sequence: Synthetic oligonucleotide
  Sense strand starting at position 3570 of SEQ ID NO: 1562627
agaauucuuugucucacga

SEQ ID NO: 1761114 - RNA, 19 nt, Artificial Sequence
  Description of Artificial Sequence: Synthetic oligonucleotide
  Antisense strand to SEQ ID NO: 1761113
ucgugagacaaagaauucu

SEQ ID NO: 1761115 - RNA, 19 nt, Artificial Sequence
  Description of Artificial Sequence: Synthetic oligonucleotide
  Sense strand starting at position 3695 of SEQ ID NO: 1562627
ccauuaugaggcuggguca

SEQ ID NO: 1761116 - RNA, 19 nt, Artificial Sequence
  Description of Artificial Sequence: Synthetic oligonucleotide
  Antisense strand to SEQ ID NO: 1761115
ugacccagccucauaaugg

SEQ ID NO: 1761117 - RNA, 19 nt, Artificial Sequence
  Description of Artificial Sequence: Synthetic oligonucleotide
  Sense strand starting at position 3744 of SEQ ID NO: 1562627
uguacugacuggucuugga

SEQ ID NO: 1761118 - RNA, 19 nt, Artificial Sequence
  Description of Artificial Sequence: Synthetic oligonucleotide
  Antisense strand to SEQ ID NO: 1761117
uccaagaccagucaguaca

SEQ ID NO: 1761119 - RNA, 19 nt, Artificial Sequence
  Description of Artificial Sequence: Synthetic oligonucleotide
  Sense strand starting at position 159 of SEQ ID NO: 1562628
cuguaagcaaugugaggau

SEQ ID NO: 1761120 - RNA, 19 nt, Artificial Sequence
  Description of Artificial Sequence: Synthetic oligonucleotide
  Antisense strand to SEQ ID NO: 1761119
auccucacauugcuuacag

SEQ ID NO: 1761121 - RNA, 19 nt, Artificial Sequence
  Description of Artificial Sequence: Synthetic oligonucleotide
  Sense strand starting at position 163 of SEQ ID NO: 1562628
aagcaaugugaggauggua

SEQ ID NO: 1761122 - RNA, 19 nt, Artificial Sequence
  Description of Artificial Sequence: Synthetic oligonucleotide
  Antisense strand to SEQ ID NO: 1761121
uaccauccucacauugcuu

SEQ ID NO: 1761123 - RNA, 19 nt, Artificial Sequence
  Description of Artificial Sequence: Synthetic oligonucleotide
  Sense strand starting at position 646 of SEQ ID NO: 1562628
ggcuuauuagucuaagcua

SEQ ID NO: 1761124 - RNA, 19 nt, Artificial Sequence
  Description of Artificial Sequence: Synthetic oligonucleotide
  Antisense strand to SEQ ID NO: 1761123
uagcuuagacuaauaagcc

SEQ ID NO: 1761125 - RNA, 19 nt, Artificial Sequence
  Description of Artificial Sequence: Synthetic oligonucleotide
  Sense strand starting at position 693 of SEQ ID NO: 1562628
uuuccauggccucagaaca

SEQ ID NO: 1761126 - RNA, 19 nt, Artificial Sequence
  Description of Artificial Sequence: Synthetic oligonucleotide
  Antisense strand to SEQ ID NO: 1761125
uguucugaggccauggaaa

SEQ ID NO: 1761127 - RNA, 19 nt, Artificial Sequence
  Description of Artificial Sequence: Synthetic oligonucleotide
  Sense strand starting at position 746 of SEQ ID NO: 1562628
ccugauccagagugauaac

SEQ ID NO: 1761128 - RNA, 19 nt, Artificial Sequence
  Description of Artificial Sequence: Synthetic oligonucleotide
  Antisense strand to SEQ ID NO: 1761127
guuaucacucuggaucagg

SEQ ID NO: 1761129 - RNA, 19 nt, Artificial Sequence
  Description of Artificial Sequence: Synthetic oligonucleotide
  Sense strand starting at position 769 of SEQ ID NO: 1562628
gauguuuccuggccuggaa

SEQ ID NO: 1761130 - RNA, 19 nt, Artificial Sequence
  Description of Artificial Sequence: Synthetic oligonucleotide
  Antisense strand to SEQ ID NO: 1761129
uuccaggccaggaaacauc

SEQ ID NO: 1761131 - RNA, 19 nt, Artificial Sequence
  Description of Artificial Sequence: Synthetic oligonucleotide
  Sense strand starting at position 790 of SEQ ID NO: 1562628
ugggaagccuaugucuuaa

SEQ ID NO: 1761132 - RNA, 19 nt, Artificial Sequence
  Description of Artificial Sequence: Synthetic oligonucleotide
  Antisense strand to SEQ ID NO: 1761131
uuaagacauaggcuuccca

SEQ ID NO: 1761133 - RNA, 19 nt, Artificial Sequence
  Description of Artificial Sequence: Synthetic oligonucleotide
  Sense strand starting at position 830 of SEQ ID NO: 1562628
ggcugugugacugacuuga

SEQ ID NO: 1761134 - RNA, 19 nt, Artificial Sequence
  Description of Artificial Sequence: Synthetic oligonucleotide
  Antisense strand to SEQ ID NO: 1761133
ucaagucagucacacagcc

SEQ ID NO: 1761135 - RNA, 19 nt, Artificial Sequence
  Description of Artificial Sequence: Synthetic oligonucleotide
  Sense strand starting at position 832 of SEQ ID NO: 1562628
cugugugacugacuugaca

SEQ ID NO: 1761136 - RNA, 19 nt, Artificial Sequence
  Description of Artificial Sequence: Synthetic oligonucleotide
  Antisense strand to SEQ ID NO: 1761135
ugucaagucagucacacag

SEQ ID NO: 1761137 - RNA, 19 nt, Artificial Sequence
  Description of Artificial Sequence: Synthetic oligonucleotide
  Sense strand starting at position 834 of SEQ ID NO: 1562628
gugugacugacuugacaua

SEQ ID NO: 1761138 - RNA, 19 nt, Artificial Sequence
  Description of Artificial Sequence: Synthetic oligonucleotide
  Antisense strand to SEQ ID NO: 1761137
uaugucaagucagucacac

SEQ ID NO: 1761139 - RNA, 19 nt, Artificial Sequence
  Description of Artificial Sequence: Synthetic oligonucleotide
  Sense strand starting at position 1068 of SEQ ID NO: 1562628
gacgcagcuagucuguuau

SEQ ID NO: 1761140 - RNA, 19 nt, Artificial Sequence
  Description of Artificial Sequence: Synthetic oligonucleotide
  Antisense strand to SEQ ID NO: 1761139
auaacagacuagcugcguc

SEQ ID NO: 1761141 - RNA, 19 nt, Artificial Sequence
  Description of Artificial Sequence: Synthetic oligonucleotide
  Sense strand starting at position 1071 of SEQ ID NO: 1562628
gcagcuagucuguuaugua

SEQ ID NO: 1761142 - RNA, 19 nt, Artificial Sequence
  Description of Artificial Sequence: Synthetic oligonucleotide
  Antisense strand to SEQ ID NO: 1761141
uacauaacagacuagcugc

SEQ ID NO: 1761143 - RNA, 19 nt, Artificial Sequence
  Description of Artificial Sequence: Synthetic oligonucleotide
  Sense strand starting at position 1108 of SEQ ID NO: 1562628
acacuacaucgcuacaguu

SEQ ID NO: 1761144 - RNA, 19 nt, Artificial Sequence
  Description of Artificial Sequence: Synthetic oligonucleotide
  Antisense strand to SEQ ID NO: 1761143
aacuguagcgauguagugu

SEQ ID NO: 1761145 - RNA, 19 nt, Artificial Sequence
  Description of Artificial Sequence: Synthetic oligonucleotide
  Sense strand starting at position 1110 of SEQ ID NO: 1562628
acuacaucgcuacaguuaa

SEQ ID NO: 1761146 - RNA, 19 nt, Artificial Sequence
  Description of Artificial Sequence: Synthetic oligonucleotide
  Antisense strand to SEQ ID NO: 1761145
uuaacuguagcgauguagu

SEQ ID NO: 1761147 - RNA, 19 nt, Artificial Sequence
  Description of Artificial Sequence: Synthetic oligonucleotide
  Sense strand starting at position 1249 of SEQ ID NO: 1562628
gaacgagacuguucuaagc

SEQ ID NO: 1761148 - RNA, 19 nt, Artificial Sequence
  Description of Artificial Sequence: Synthetic oligonucleotide
  Antisense strand to SEQ ID NO: 1761147
gcuuagaacagucucguuc

SEQ ID NO: 1761149 - RNA, 19 nt, Artificial Sequence
  Description of Artificial Sequence: Synthetic oligonucleotide
  Sense strand starting at position 1366 of SEQ ID NO: 1562628
agaguuaagugacucccaa

SEQ ID NO: 1761150 - RNA, 19 nt, Artificial Sequence
  Description of Artificial Sequence: Synthetic oligonucleotide
  Antisense strand to SEQ ID NO: 1761149
uugggagucacuuaacucu

SEQ ID NO: 1761151 - RNA, 19 nt, Artificial Sequence
  Description of Artificial Sequence: Synthetic oligonucleotide
  Sense strand starting at position 1394 of SEQ ID NO: 1562628
ugcagauaccuugggaaug

SEQ ID NO: 1761152 - RNA, 19 nt, Artificial Sequence
  Description of Artificial Sequence: Synthetic oligonucleotide
  Antisense strand to SEQ ID NO: 1761151
cauucccaagguaucugca

SEQ ID NO: 1761153 - RNA, 19 nt, Artificial Sequence
  Description of Artificial Sequence: Synthetic oligonucleotide
  Sense strand starting at position 1404 of SEQ ID NO: 1562628
uugggaaugccaggugagu

SEQ ID NO: 1761154 - RNA, 19 nt, Artificial Sequence
  Description of Artificial Sequence: Synthetic oligonucleotide
  Antisense strand to SEQ ID NO: 1761153
acucaccuggcauucccaa

SEQ ID NO: 1761155 - RNA, 19 nt, Artificial Sequence
  Description of Artificial Sequence: Synthetic oligonucleotide
  Sense strand starting at position 2346 of SEQ ID NO: 1562628
cugagcagucacuaaauga

SEQ ID NO: 1761156 - RNA, 19 nt, Artificial Sequence
  Description of Artificial Sequence: Synthetic oligonucleotide
  Antisense strand to SEQ ID NO: 1761155
ucauuuagugacugcucag

SEQ ID NO: 1761157 - RNA, 19 nt, Artificial Sequence
  Description of Artificial Sequence: Synthetic oligonucleotide
  Sense strand starting at position 2372 of SEQ ID NO: 1562628
uguguuauuaccugggaca

SEQ ID NO: 1761158 - RNA, 19 nt, Artificial Sequence
  Description of Artificial Sequence: Synthetic oligonucleotide
  Antisense strand to SEQ ID NO: 1761157
ugucccagguaauaacaca

SEQ ID NO: 1761159 - RNA, 19 nt, Artificial Sequence
  Description of Artificial Sequence: Synthetic oligonucleotide
  Sense strand starting at position 2373 of SEQ ID NO: 1562628
guguuauuaccugggacau

SEQ ID NO: 1761160 - RNA, 19 nt, Artificial Sequence
  Description of Artificial Sequence: Synthetic oligonucleotide
  Antisense strand to SEQ ID NO: 1761159
augucccagguaauaacac

SEQ ID NO: 1761161 - RNA, 19 nt, Artificial Sequence
  Description of Artificial Sequence: Synthetic oligonucleotide
  Sense strand starting at position 2374 of SEQ ID NO: 1562628
uguuauuaccugggacaug

SEQ ID NO: 1761162 - RNA, 19 nt, Artificial Sequence
  Description of Artificial Sequence: Synthetic oligonucleotide
  Antisense strand to SEQ ID NO: 1761161
caugucccagguaauaaca

SEQ ID NO: 1761163 - RNA, 19 nt, Artificial Sequence
  Description of Artificial Sequence: Synthetic oligonucleotide
  Sense strand starting at position 2384 of SEQ ID NO: 1562628
ugggacaugugcucugaaa

SEQ ID NO: 1761164 - RNA, 19 nt, Artificial Sequence
  Description of Artificial Sequence: Synthetic oligonucleotide
  Antisense strand to SEQ ID NO: 1761163
uuucagagcacauguccca

SEQ ID NO: 1761165 - RNA, 19 nt, Artificial Sequence
  Description of Artificial Sequence: Synthetic oligonucleotide
  Sense strand starting at position 2512 of SEQ ID NO: 1562628
gauagcugauaaguuaaua

SEQ ID NO: 1761166 - RNA, 19 nt, Artificial Sequence
  Description of Artificial Sequence: Synthetic oligonucleotide
  Antisense strand to SEQ ID NO: 1761165
uauuaacuuaucagcuauc

SEQ ID NO: 1761167 - RNA, 19 nt, Artificial Sequence
  Description of Artificial Sequence: Synthetic oligonucleotide
  Sense strand starting at position 2635 of SEQ ID NO: 1562628
guuggagaaacuugacuua

SEQ ID NO: 1761168 - RNA, 19 nt, Artificial Sequence
  Description of Artificial Sequence: Synthetic oligonucleotide
  Antisense strand to SEQ ID NO: 1761167
uaagucaaguuucuccaac

SEQ ID NO: 1761169 - RNA, 19 nt, Artificial Sequence
  Description of Artificial Sequence: Synthetic oligonucleotide
  Sense strand starting at position 2642 of SEQ ID NO: 1562628
aaacuugacuuagagggaa

SEQ ID NO: 1761170 - RNA, 19 nt, Artificial Sequence
  Description of Artificial Sequence: Synthetic oligonucleotide
  Antisense strand to SEQ ID NO: 1761169
uucccucuaagucaaguuu

SEQ ID NO: 1761171 - RNA, 19 nt, Artificial Sequence
  Description of Artificial Sequence: Synthetic oligonucleotide
  Sense strand starting at position 2870 of SEQ ID NO: 1562628
agggucuugggcugaaaga

SEQ ID NO: 1761172 - RNA, 19 nt, Artificial Sequence
  Description of Artificial Sequence: Synthetic oligonucleotide
  Antisense strand to SEQ ID NO: 1761171
ucuuucagcccaagacccu

SEQ ID NO: 1761173 - RNA, 19 nt, Artificial Sequence
  Description of Artificial Sequence: Synthetic oligonucleotide
  Sense strand starting at position 2883 of SEQ ID NO: 1562628
gaaagaugguacucucuug

SEQ ID NO: 1761174 - RNA, 19 nt, Artificial Sequence
  Description of Artificial Sequence: Synthetic oligonucleotide
  Antisense strand to SEQ ID NO: 1761173
caagagaguaccaucuuuc

SEQ ID NO: 1761175 - RNA, 19 nt, Artificial Sequence
  Description of Artificial Sequence: Synthetic oligonucleotide
  Sense strand starting at position 2918 of SEQ ID NO: 1562628
uaaagcauuguagggaaga

SEQ ID NO: 1761176 - RNA, 19 nt, Artificial Sequence
  Description of Artificial Sequence: Synthetic oligonucleotide
  Antisense strand to SEQ ID NO: 1761175
ucuucccuacaaugcuuua

SEQ ID NO: 1761177 - RNA, 19 nt, Artificial Sequence
  Description of Artificial Sequence: Synthetic oligonucleotide
  Sense strand starting at position 2939 of SEQ ID NO: 1562628
uuuacacugugguugaauu

SEQ ID NO: 1761178 - RNA, 19 nt, Artificial Sequence
  Description of Artificial Sequence: Synthetic oligonucleotide
  Antisense strand to SEQ ID NO: 1761177
aauucaaccacaguguaaa

SEQ ID NO: 1761179 - RNA, 19 nt, Artificial Sequence
  Description of Artificial Sequence: Synthetic oligonucleotide
  Sense strand starting at position 2962 of SEQ ID NO: 1562628
gcugcuugagucuugcaca

SEQ ID NO: 1761180 - RNA, 19 nt, Artificial Sequence
  Description of Artificial Sequence: Synthetic oligonucleotide
  Antisense strand to SEQ ID NO: 1761179
ugugcaagacucaagcagc

SEQ ID NO: 1761181 - RNA, 19 nt, Artificial Sequence
  Description of Artificial Sequence: Synthetic oligonucleotide
  Sense strand starting at position 2967 of SEQ ID NO: 1562628
uugagucuugcacagauga

SEQ ID NO: 1761182 - RNA, 19 nt, Artificial Sequence
  Description of Artificial Sequence: Synthetic oligonucleotide
  Antisense strand to SEQ ID NO: 1761181
ucaucugugcaagacucaa

SEQ ID NO: 1761183 - RNA, 19 nt, Artificial Sequence
  Description of Artificial Sequence: Synthetic oligonucleotide
  Sense strand starting at position 3069 of SEQ ID NO: 1562628
cuauacugauaagcuagaa

SEQ ID NO: 1761184 - RNA, 19 nt, Artificial Sequence
  Description of Artificial Sequence: Synthetic oligonucleotide
  Antisense strand to SEQ ID NO: 1761183
uucuagcuuaucaguauag

SEQ ID NO: 1761185 - RNA, 19 nt, Artificial Sequence
  Description of Artificial Sequence: Synthetic oligonucleotide
  Sense strand starting at position 3235 of SEQ ID NO: 1562628
gaaagaugcgcuggagaga

SEQ ID NO: 1761186 - RNA, 19 nt, Artificial Sequence
  Description of Artificial Sequence: Synthetic oligonucleotide
  Antisense strand to SEQ ID NO: 1761185
ucucuccagcgcaucuuuc

SEQ ID NO: 1761187 - RNA, 19 nt, Artificial Sequence
  Description of Artificial Sequence: Synthetic oligonucleotide
  Sense strand starting at position 3318 of SEQ ID NO: 1562628
aggugagaaacaugcagau

SEQ ID NO: 1761188 - RNA, 19 nt, Artificial Sequence
  Description of Artificial Sequence: Synthetic oligonucleotide
  Antisense strand to SEQ ID NO: 1761187
aucugcauguuucucaccu

SEQ ID NO: 1761189 - RNA, 19 nt, Artificial Sequence
  Description of Artificial Sequence: Synthetic oligonucleotide
  Sense strand starting at position 3399 of SEQ ID NO: 1562628
gagagcacucuggagaguu

SEQ ID NO: 1761190 - RNA, 19 nt, Artificial Sequence
  Description of Artificial Sequence: Synthetic oligonucleotide
  Antisense strand to SEQ ID NO: 1761189
aacucuccagagugcucuc

SEQ ID NO: 1761191 - RNA, 19 nt, Artificial Sequence
  Description of Artificial Sequence: Synthetic oligonucleotide
  Sense strand starting at position 3515 of SEQ ID NO: 1562628
agaauucuuugucucacga

SEQ ID NO: 1761192 - RNA, 19 nt, Artificial Sequence
  Description of Artificial Sequence: Synthetic oligonucleotide
  Antisense strand to SEQ ID NO: 1761191
ucgugagacaaagaauucu

SEQ ID NO: 1761193 - RNA, 19 nt, Artificial Sequence
  Description of Artificial Sequence: Synthetic oligonucleotide
  Sense strand starting at position 3640 of SEQ ID NO: 1562628
ccauuaugaggcuggguca

SEQ ID NO: 1761194 - RNA, 19 nt, Artificial Sequence
  Description of Artificial Sequence: Synthetic oligonucleotide
  Antisense strand to SEQ ID NO: 1761193
ugacccagccucauaaugg

SEQ ID NO: 1761195 - RNA, 19 nt, Artificial Sequence
  Description of Artificial Sequence: Synthetic oligonucleotide
  Sense strand starting at position 3689 of SEQ ID NO: 1562628
uguacugacuggucuugga

SEQ ID NO: 1761196 - RNA, 19 nt, Artificial Sequence
  Description of Artificial Sequence: Synthetic oligonucleotide
  Antisense strand to SEQ ID NO: 1761195
uccaagaccagucaguaca

SEQ ID NO: 1761197 - RNA, 19 nt, Artificial Sequence
  Description of Artificial Sequence: Synthetic oligonucleotide
  Sense strand starting at position 3966 of SEQ ID NO: 1562628
augccuuaggcacaaagau

SEQ ID NO: 1761198 - RNA, 19 nt, Artificial Sequence
  Description of Artificial Sequence: Synthetic oligonucleotide
  Antisense strand to SEQ ID NO: 1761197
aucuuugugccuaaggcau

SEQ ID NO: 1761199 - RNA, 19 nt, Artificial Sequence
  Description of Artificial Sequence: Synthetic oligonucleotide
  Sense strand starting at position 456 of SEQ ID NO: 1562629
ggugaauggugaggucaug

SEQ ID NO: 1761200 - RNA, 19 nt, Artificial Sequence
  Description of Artificial Sequence: Synthetic oligonucleotide
  Antisense strand to SEQ ID NO: 1761199
caugaccucaccauucacc

SEQ ID NO: 1761201 - RNA, 19 nt, Artificial Sequence
  Description of Artificial Sequence: Synthetic oligonucleotide
  Sense strand starting at position 497 of SEQ ID NO: 1562629
cuguccuguccgcaucaga

SEQ ID NO: 1761202 - RNA, 19 nt, Artificial Sequence
  Description of Artificial Sequence: Synthetic oligonucleotide
  Antisense strand to SEQ ID NO: 1761201
ucugaugcggacaggacag

SEQ ID NO: 1761203 - RNA, 19 nt, Artificial Sequence
  Description of Artificial Sequence: Synthetic oligonucleotide
  Sense strand starting at position 1366 of SEQ ID NO: 1562629
gcccgagcagauugaauuu

SEQ ID NO: 1761204 - RNA, 19 nt, Artificial Sequence
  Description of Artificial Sequence: Synthetic oligonucleotide
  Antisense strand to SEQ ID NO: 1761203
aaauucaaucugcucgggc

SEQ ID NO: 1761205 - RNA, 19 nt, Artificial Sequence
  Description of Artificial Sequence: Synthetic oligonucleotide
  Sense strand starting at position 1393 of SEQ ID NO: 1562629
acacgagcggaaugucaau

SEQ ID NO: 1761206 - RNA, 19 nt, Artificial Sequence
  Description of Artificial Sequence: Synthetic oligonucleotide
  Antisense strand to SEQ ID NO: 1761205
auugacauuccgcucgugu

SEQ ID NO: 1761207 - RNA, 19 nt, Artificial Sequence
  Description of Artificial Sequence: Synthetic oligonucleotide
  Sense strand starting at position 1402 of SEQ ID NO: 1562629
gaaugucaaugcgagcaga

SEQ ID NO: 1761208 - RNA, 19 nt, Artificial Sequence
  Description of Artificial Sequence: Synthetic oligonucleotide
  Antisense strand to SEQ ID NO: 1761207
ucugcucgcauugacauuc

SEQ ID NO: 1761209 - RNA, 19 nt, Artificial Sequence
  Description of Artificial Sequence: Synthetic oligonucleotide
  Sense strand starting at position 2697 of SEQ ID NO: 1562629
gcaccuggguccucaagaa

SEQ ID NO: 1761210 - RNA, 19 nt, Artificial Sequence
  Description of Artificial Sequence: Synthetic oligonucleotide
  Antisense strand to SEQ ID NO: 1761209
uucuugaggacccaggugc

SEQ ID NO: 1761211 - RNA, 19 nt, Artificial Sequence
  Description of Artificial Sequence: Synthetic oligonucleotide
  Sense strand starting at position 2701 of SEQ ID NO: 1562629
cuggguccucaagaagagu

SEQ ID NO: 1761212 - RNA, 19 nt, Artificial Sequence
  Description of Artificial Sequence: Synthetic oligonucleotide
  Antisense strand to SEQ ID NO: 1761211
acucuucuugaggacccag

SEQ ID NO: 1761213 - RNA, 19 nt, Artificial Sequence
  Description of Artificial Sequence: Synthetic oligonucleotide
  Sense strand starting at position 3142 of SEQ ID NO: 1562629
gugugcauaugucugcuau

SEQ ID NO: 1761214 - RNA, 19 nt, Artificial Sequence
  Description of Artificial Sequence: Synthetic oligonucleotide
  Antisense strand to SEQ ID NO: 1761213
auagcagacauaugcacac

SEQ ID NO: 1761215 - RNA, 19 nt, Artificial Sequence
  Description of Artificial Sequence: Synthetic oligonucleotide
  Sense strand starting at position 3146 of SEQ ID NO: 1562629
gcauaugucugcuauccau

SEQ ID NO: 1761216 - RNA, 19 nt, Artificial Sequence
  Description of Artificial Sequence: Synthetic oligonucleotide
  Antisense strand to SEQ ID NO: 1761215
auggauagcagacauaugc

SEQ ID NO: 1761217 - RNA, 19 nt, Artificial Sequence
  Description of Artificial Sequence: Synthetic oligonucleotide
  Sense strand starting at position 3152 of SEQ ID NO: 1562629
gucugcuauccaugagggu

SEQ ID NO: 1761218 - RNA, 19 nt, Artificial Sequence
  Description of Artificial Sequence: Synthetic oligonucleotide
  Antisense strand to SEQ ID NO: 1761217
acccucauggauagcagac

SEQ ID NO: 1761219 - RNA, 19 nt, Artificial Sequence
  Description of Artificial Sequence: Synthetic oligonucleotide
  Sense strand starting at position 3158 of SEQ ID NO: 1562629
uauccaugaggguguguau

SEQ ID NO: 1761220 - RNA, 19 nt, Artificial Sequence
  Description of Artificial Sequence: Synthetic oligonucleotide
  Antisense strand to SEQ ID NO: 1761219
auacacacccucauggaua

SEQ ID NO: 1761221 - RNA, 19 nt, Artificial Sequence
  Description of Artificial Sequence: Synthetic oligonucleotide
  Sense strand starting at position 3197 of SEQ ID NO: 1562629
aggugucugugacuccaua

SEQ ID NO: 1761222 - RNA, 19 nt, Artificial Sequence
  Description of Artificial Sequence: Synthetic oligonucleotide
  Antisense strand to SEQ ID NO: 1761221
uauggagucacagacaccu

SEQ ID NO: 1761223 - RNA, 19 nt, Artificial Sequence
  Description of Artificial Sequence: Synthetic oligonucleotide
  Sense strand starting at position 3223 of SEQ ID NO: 1562629
ggacaaaugucgggagugu

SEQ ID NO: 1761224 - RNA, 19 nt, Artificial Sequence
  Description of Artificial Sequence: Synthetic oligonucleotide
  Antisense strand to SEQ ID NO: 1761223
acacucccgacauuugucc

SEQ ID NO: 1761225 - RNA, 19 nt, Artificial Sequence
  Description of Artificial Sequence: Synthetic oligonucleotide
  Sense strand starting at position 3225 of SEQ ID NO: 1562629
acaaaugucgggagugugu

SEQ ID NO: 1761226 - RNA, 19 nt, Artificial Sequence
  Description of Artificial Sequence: Synthetic oligonucleotide
  Antisense strand to SEQ ID NO: 1761225
acacacucccgacauuugu

SEQ ID NO: 1761227 - RNA, 19 nt, Artificial Sequence
  Description of Artificial Sequence: Synthetic oligonucleotide
  Sense strand starting at position 3308 of SEQ ID NO: 1562629
gggaguggugugggcauau

SEQ ID NO: 1761228 - RNA, 19 nt, Artificial Sequence
  Description of Artificial Sequence: Synthetic oligonucleotide
  Antisense strand to SEQ ID NO: 1761227
auaugcccacaccacuccc

SEQ ID NO: 1761229 - RNA, 19 nt, Artificial Sequence
  Description of Artificial Sequence: Synthetic oligonucleotide
  Sense strand starting at position 3319 of SEQ ID NO: 1562629
gggcauauggugcacagau

SEQ ID NO: 1761230 - RNA, 19 nt, Artificial Sequence
  Description of Artificial Sequence: Synthetic oligonucleotide
  Antisense strand to SEQ ID NO: 1761229
aucugugcaccauaugccc

SEQ ID NO: 1761231 - RNA, 19 nt, Artificial Sequence
  Description of Artificial Sequence: Synthetic oligonucleotide
  Sense strand starting at position 3433 of SEQ ID NO: 1562629
ggcccaaucagcuaaaggu

SEQ ID NO: 1761232 - RNA, 19 nt, Artificial Sequence
  Description of Artificial Sequence: Synthetic oligonucleotide
  Antisense strand to SEQ ID NO: 1761231
accuuuagcugauugggcc

SEQ ID NO: 1761233 - RNA, 19 nt, Artificial Sequence
  Description of Artificial Sequence: Synthetic oligonucleotide
  Sense strand starting at position 3543 of SEQ ID NO: 1562629
acugauuaaucgcagccuu

SEQ ID NO: 1761234 - RNA, 19 nt, Artificial Sequence
  Description of Artificial Sequence: Synthetic oligonucleotide
  Antisense strand to SEQ ID NO: 1761233
aaggcugcgauuaaucagu

SEQ ID NO: 1761235 - RNA, 19 nt, Artificial Sequence
  Description of Artificial Sequence: Synthetic oligonucleotide
  Sense strand starting at position 3584 of SEQ ID NO: 1562629
ggcucagugagagaugcua

SEQ ID NO: 1761236 - RNA, 19 nt, Artificial Sequence
  Description of Artificial Sequence: Synthetic oligonucleotide
  Antisense strand to SEQ ID NO: 1761235
uagcaucucucacugagcc

SEQ ID NO: 1761237 - RNA, 19 nt, Artificial Sequence
  Description of Artificial Sequence: Synthetic oligonucleotide
  Sense strand starting at position 3864 of SEQ ID NO: 1562629
agcugaaugccuugagcuu

SEQ ID NO: 1761238 - RNA, 19 nt, Artificial Sequence
  Description of Artificial Sequence: Synthetic oligonucleotide
  Antisense strand to SEQ ID NO: 1761237
aagcucaaggcauucagcu

SEQ ID NO: 1761239 - RNA, 19 nt, Artificial Sequence
  Description of Artificial Sequence: Synthetic oligonucleotide
  Sense strand starting at position 55 of SEQ ID NO: 1562630
gccucuuuguccucagugu

SEQ ID NO: 1761240 - RNA, 19 nt, Artificial Sequence
  Description of Artificial Sequence: Synthetic oligonucleotide
  Antisense strand to SEQ ID NO: 1761239
acacugaggacaaagaggc

SEQ ID NO: 1761241 - RNA, 19 nt, Artificial Sequence
  Description of Artificial Sequence: Synthetic oligonucleotide
  Sense strand starting at position 80 of SEQ ID NO: 1562630
gcagaugucagugagugcu

SEQ ID NO: 1761242 - RNA, 19 nt, Artificial Sequence
  Description of Artificial Sequence: Synthetic oligonucleotide
  Antisense strand to SEQ ID NO: 1761241
agcacucacugacaucugc

SEQ ID NO: 1761243 - RNA, 19 nt, Artificial Sequence
  Description of Artificial Sequence: Synthetic oligonucleotide
  Sense strand starting at position 90 of SEQ ID NO: 1562630
gugagugcugggugaacua

SEQ ID NO: 1761244 - RNA, 19 nt, Artificial Sequence
  Description of Artificial Sequence: Synthetic oligonucleotide
  Antisense strand to SEQ ID NO: 1761243
uaguucacccagcacucac

SEQ ID NO: 1761245 - RNA, 19 nt, Artificial Sequence
  Description of Artificial Sequence: Synthetic oligonucleotide
  Sense strand starting at position 792 of SEQ ID NO: 1562630
cgcucuuccuuauugagga

SEQ ID NO: 1761246 - RNA, 19 nt, Artificial Sequence
  Description of Artificial Sequence: Synthetic oligonucleotide
  Antisense strand to SEQ ID NO: 1761245
uccucaauaaggaagagcg

SEQ ID NO: 1761247 - RNA, 19 nt, Artificial Sequence
  Description of Artificial Sequence: Synthetic oligonucleotide
  Sense strand starting at position 796 of SEQ ID NO: 1562630
cuuccuuauugaggaguca

SEQ ID NO: 1761248 - RNA, 19 nt, Artificial Sequence
  Description of Artificial Sequence: Synthetic oligonucleotide
  Antisense strand to SEQ ID NO: 1761247
ugacuccucaauaaggaag

SEQ ID NO: 1761249 - RNA, 19 nt, Artificial Sequence
  Description of Artificial Sequence: Synthetic oligonucleotide
  Sense strand starting at position 807 of SEQ ID NO: 1562630
aggagucagcucuggcauu

SEQ ID NO: 1761250 - RNA, 19 nt, Artificial Sequence
  Description of Artificial Sequence: Synthetic oligonucleotide
  Antisense strand to SEQ ID NO: 1761249
aaugccagagcugacuccu

SEQ ID NO: 1761251 - RNA, 19 nt, Artificial Sequence
  Description of Artificial Sequence: Synthetic oligonucleotide
  Sense strand starting at position 954 of SEQ ID NO: 1562630
acaguuagaugugacaguu

SEQ ID NO: 1761252 - RNA, 19 nt, Artificial Sequence
  Description of Artificial Sequence: Synthetic oligonucleotide
  Antisense strand to SEQ ID NO: 1761251
aacugucacaucuaacugu

SEQ ID NO: 1761253 - RNA, 19 nt, Artificial Sequence
  Description of Artificial Sequence: Synthetic oligonucleotide
  Sense strand starting at position 962 of SEQ ID NO: 1562630
augugacaguuagauauga

SEQ ID NO: 1761254 - RNA, 19 nt, Artificial Sequence
  Description of Artificial Sequence: Synthetic oligonucleotide
  Antisense strand to SEQ ID NO: 1761253
ucauaucuaacugucacau

SEQ ID NO: 1761255 - RNA, 19 nt, Artificial Sequence
  Description of Artificial Sequence: Synthetic oligonucleotide
  Sense strand starting at position 1018 of SEQ ID NO: 1562630
ugaugcuuaagcugggauu

SEQ ID NO: 1761256 - RNA, 19 nt, Artificial Sequence
  Description of Artificial Sequence: Synthetic oligonucleotide
  Antisense strand to SEQ ID NO: 1761255
aaucccagcuuaagcauca

SEQ ID NO: 1761257 - RNA, 19 nt, Artificial Sequence
  Description of Artificial Sequence: Synthetic oligonucleotide
  Sense strand starting at position 1438 of SEQ ID NO: 1562630
gcuccagagucugacugau

SEQ ID NO: 1761258 - RNA, 19 nt, Artificial Sequence
  Description of Artificial Sequence: Synthetic oligonucleotide
  Antisense strand to SEQ ID NO: 1761257
aucagucagacucuggagc

SEQ ID NO: 1761259 - RNA, 19 nt, Artificial Sequence
  Description of Artificial Sequence: Synthetic oligonucleotide
  Sense strand starting at position 1440 of SEQ ID NO: 1562630
uccagagucugacugaucu

SEQ ID NO: 1761260 - RNA, 19 nt, Artificial Sequence
  Description of Artificial Sequence: Synthetic oligonucleotide
  Antisense strand to SEQ ID NO: 1761259
agaucagucagacucugga

SEQ ID NO: 1761261 - RNA, 19 nt, Artificial Sequence
  Description of Artificial Sequence: Synthetic oligonucleotide
  Sense strand starting at position 1444 of SEQ ID NO: 1562630
gagucugacugaucugcau

SEQ ID NO: 1761262 - RNA, 19 nt, Artificial Sequence
  Description of Artificial Sequence: Synthetic oligonucleotide
  Antisense strand to SEQ ID NO: 1761261
augcagaucagucagacuc

SEQ ID NO: 1761263 - RNA, 19 nt, Artificial Sequence
  Description of Artificial Sequence: Synthetic oligonucleotide
  Sense strand starting at position 2152 of SEQ ID NO: 1562630
cucacucuugcaugaggau

SEQ ID NO: 1761264 - RNA, 19 nt, Artificial Sequence
  Description of Artificial Sequence: Synthetic oligonucleotide
  Antisense strand to SEQ ID NO: 1761263
auccucaugcaagagugag

SEQ ID NO: 1761265 - RNA, 19 nt, Artificial Sequence
  Description of Artificial Sequence: Synthetic oligonucleotide
  Sense strand starting at position 2153 of SEQ ID NO: 1562630
ucacucuugcaugaggauu

SEQ ID NO: 1761266 - RNA, 19 nt, Artificial Sequence
  Description of Artificial Sequence: Synthetic oligonucleotide
  Antisense strand to SEQ ID NO: 1761265
aauccucaugcaagaguga

SEQ ID NO: 1761267 - RNA, 19 nt, Artificial Sequence
  Description of Artificial Sequence: Synthetic oligonucleotide
  Sense strand starting at position 2161 of SEQ ID NO: 1562630
gcaugaggauuacgaaaca

SEQ ID NO: 1761268 - RNA, 19 nt, Artificial Sequence
  Description of Artificial Sequence: Synthetic oligonucleotide
  Antisense strand to SEQ ID NO: 1761267
uguuucguaauccucaugc

SEQ ID NO: 1761269 - RNA, 19 nt, Artificial Sequence
  Description of Artificial Sequence: Synthetic oligonucleotide
  Sense strand starting at position 2535 of SEQ ID NO: 1562630
cuauguauuuauugcacca

SEQ ID NO: 1761270 - RNA, 19 nt, Artificial Sequence
  Description of Artificial Sequence: Synthetic oligonucleotide
  Antisense strand to SEQ ID NO: 1761269
uggugcaauaaauacauag

SEQ ID NO: 1761271 - RNA, 19 nt, Artificial Sequence
  Description of Artificial Sequence: Synthetic oligonucleotide
  Sense strand starting at position 2601 of SEQ ID NO: 1562630
agacauuauugccaggaca

SEQ ID NO: 1761272 - RNA, 19 nt, Artificial Sequence
  Description of Artificial Sequence: Synthetic oligonucleotide
  Antisense strand to SEQ ID NO: 1761271
uguccuggcaauaaugucu

SEQ ID NO: 1761273 - RNA, 19 nt, Artificial Sequence
  Description of Artificial Sequence: Synthetic oligonucleotide
  Sense strand starting at position 2603 of SEQ ID NO: 1562630
acauuauugccaggacaau

SEQ ID NO: 1761274 - RNA, 19 nt, Artificial Sequence
  Description of Artificial Sequence: Synthetic oligonucleotide
  Antisense strand to SEQ ID NO: 1761273
auuguccuggcaauaaugu

SEQ ID NO: 1761275 - RNA, 19 nt, Artificial Sequence
  Description of Artificial Sequence: Synthetic oligonucleotide
  Sense strand starting at position 2794 of SEQ ID NO: 1562630
ccaggaaucuuagagucua

SEQ ID NO: 1761276 - RNA, 19 nt, Artificial Sequence
  Description of Artificial Sequence: Synthetic oligonucleotide
  Antisense strand to SEQ ID NO: 1761275
uagacucuaagauuccugg

SEQ ID NO: 1761277 - RNA, 19 nt, Artificial Sequence
  Description of Artificial Sequence: Synthetic oligonucleotide
  Sense strand starting at position 2815 of SEQ ID NO: 1562630
cuccuugccuuacagauga

SEQ ID NO: 1761278 - RNA, 19 nt, Artificial Sequence
  Description of Artificial Sequence: Synthetic oligonucleotide
  Antisense strand to SEQ ID NO: 1761277
ucaucuguaaggcaaggag

SEQ ID NO: 1761279 - RNA, 19 nt, Artificial Sequence
  Description of Artificial Sequence: Synthetic oligonucleotide
  Sense strand starting at position 2862 of SEQ ID NO: 1562630
acagacauguagcagagua

SEQ ID NO: 1761280 - RNA, 19 nt, Artificial Sequence
  Description of Artificial Sequence: Synthetic oligonucleotide
  Antisense strand to SEQ ID NO: 1761279
uacucugcuacaugucugu

SEQ ID NO: 1761281 - RNA, 19 nt, Artificial Sequence
  Description of Artificial Sequence: Synthetic oligonucleotide
  Sense strand starting at position 3277 of SEQ ID NO: 1562630
cccugaacuugcuuuagaa

SEQ ID NO: 1761282 - RNA, 19 nt, Artificial Sequence
  Description of Artificial Sequence: Synthetic oligonucleotide
  Antisense strand to SEQ ID NO: 1761281
uucuaaagcaaguucaggg

SEQ ID NO: 1761283 - RNA, 19 nt, Artificial Sequence
  Description of Artificial Sequence: Synthetic oligonucleotide
  Sense strand starting at position 3279 of SEQ ID NO: 1562630
cugaacuugcuuuagaauu

SEQ ID NO: 1761284 - RNA, 19 nt, Artificial Sequence
  Description of Artificial Sequence: Synthetic oligonucleotide
  Antisense strand to SEQ ID NO: 1761283
aauucuaaagcaaguucag

SEQ ID NO: 1761285 - RNA, 19 nt, Artificial Sequence
  Description of Artificial Sequence: Synthetic oligonucleotide
  Sense strand starting at position 3320 of SEQ ID NO: 1562630
cuuaauugcuuaucaagag

SEQ ID NO: 1761286 - RNA, 19 nt, Artificial Sequence
  Description of Artificial Sequence: Synthetic oligonucleotide
  Antisense strand to SEQ ID NO: 1761285
cucuugauaagcaauuaag

SEQ ID NO: 1761287 - RNA, 19 nt, Artificial Sequence
  Description of Artificial Sequence: Synthetic oligonucleotide
  Sense strand starting at position 3354 of SEQ ID NO: 1562630
uuuguucuaggugaugcaa

SEQ ID NO: 1761288 - RNA, 19 nt, Artificial Sequence
  Description of Artificial Sequence: Synthetic oligonucleotide
  Antisense strand to SEQ ID NO: 1761287
uugcaucaccuagaacaaa

SEQ ID NO: 1761289 - RNA, 19 nt, Artificial Sequence
  Description of Artificial Sequence: Synthetic oligonucleotide
  Sense strand starting at position 3356 of SEQ ID NO: 1562630
uguucuaggugaugcaaau

SEQ ID NO: 1761290 - RNA, 19 nt, Artificial Sequence
  Description of Artificial Sequence: Synthetic oligonucleotide
  Antisense strand to SEQ ID NO: 1761289
auuugcaucaccuagaaca

SEQ ID NO: 1761291 - RNA, 19 nt, Artificial Sequence
  Description of Artificial Sequence: Synthetic oligonucleotide
  Sense strand starting at position 3423 of SEQ ID NO: 1562630
uugucugaugcucacaaca

SEQ ID NO: 1761292 - RNA, 19 nt, Artificial Sequence
  Description of Artificial Sequence: Synthetic oligonucleotide
  Antisense strand to SEQ ID NO: 1761291
uguugugagcaucagacaa

SEQ ID NO: 1761293 - RNA, 19 nt, Artificial Sequence
  Description of Artificial Sequence: Synthetic oligonucleotide
  Sense strand starting at position 3425 of SEQ ID NO: 1562630
gucugaugcucacaacaac

SEQ ID NO: 1761294 - RNA, 19 nt, Artificial Sequence
  Description of Artificial Sequence: Synthetic oligonucleotide
  Antisense strand to SEQ ID NO: 1761293
guuguugugagcaucagac

SEQ ID NO: 1761295 - RNA, 19 nt, Artificial Sequence
  Description of Artificial Sequence: Synthetic oligonucleotide
  Sense strand starting at position 3448 of SEQ ID NO: 1562630
ggaggacuauuaugcccau

SEQ ID NO: 1761296 - RNA, 19 nt, Artificial Sequence
  Description of Artificial Sequence: Synthetic oligonucleotide
  Antisense strand to SEQ ID NO: 1761295
augggcauaauaguccucc

SEQ ID NO: 1761297 - RNA, 19 nt, Artificial Sequence
  Description of Artificial Sequence: Synthetic oligonucleotide
  Sense strand starting at position 3449 of SEQ ID NO: 1562630
gaggacuauuaugcccauu

SEQ ID NO: 1761298 - RNA, 19 nt, Artificial Sequence
  Description of Artificial Sequence: Synthetic oligonucleotide
  Antisense strand to SEQ ID NO: 1761297
aaugggcauaauaguccuc

SEQ ID NO: 1761299 - RNA, 19 nt, Artificial Sequence
  Description of Artificial Sequence: Synthetic oligonucleotide
  Sense strand starting at position 3763 of SEQ ID NO: 1562630
cagucugagccgugggauu

SEQ ID NO: 1761300 - RNA, 19 nt, Artificial Sequence
  Description of Artificial Sequence: Synthetic oligonucleotide
  Antisense strand to SEQ ID NO: 1761299
aaucccacggcucagacug

SEQ ID NO: 1761301 - RNA, 19 nt, Artificial Sequence
  Description of Artificial Sequence: Synthetic oligonucleotide
  Sense strand starting at position 3765 of SEQ ID NO: 1562630
gucugagccgugggauuga

SEQ ID NO: 1761302 - RNA, 19 nt, Artificial Sequence
  Description of Artificial Sequence: Synthetic oligonucleotide
  Antisense strand to SEQ ID NO: 1761301
ucaaucccacggcucagac

SEQ ID NO: 1761303 - RNA, 19 nt, Artificial Sequence
  Description of Artificial Sequence: Synthetic oligonucleotide
  Sense strand starting at position 3770 of SEQ ID NO: 1562630
agccgugggauugagagau

SEQ ID NO: 1761304 - RNA, 19 nt, Artificial Sequence
  Description of Artificial Sequence: Synthetic oligonucleotide
  Antisense strand to SEQ ID NO: 1761303
aucucucaaucccacggcu

SEQ ID NO: 1761305 - RNA, 19 nt, Artificial Sequence
  Description of Artificial Sequence: Synthetic oligonucleotide
  Sense strand starting at position 3849 of SEQ ID NO: 1562630
gcugaugcauuuggacauu

SEQ ID NO: 1761306 - RNA, 19 nt, Artificial Sequence
  Description of Artificial Sequence: Synthetic oligonucleotide
  Antisense strand to SEQ ID NO: 1761305
aauguccaaaugcaucagc

SEQ ID NO: 1761307 - RNA, 19 nt, Artificial Sequence
  Description of Artificial Sequence: Synthetic oligonucleotide
  Sense strand starting at position 3959 of SEQ ID NO: 1562630
ggcuuugcucuugauucca

SEQ ID NO: 1761308 - RNA, 19 nt, Artificial Sequence
  Description of Artificial Sequence: Synthetic oligonucleotide
  Antisense strand to SEQ ID NO: 1761307
uggaaucaagagcaaagcc

SEQ ID NO: 1761309 - RNA, 19 nt, Artificial Sequence
  Description of Artificial Sequence: Synthetic oligonucleotide
  Sense strand starting at position 3961 of SEQ ID NO: 1562630
cuuugcucuugauuccaga

SEQ ID NO: 1761310 - RNA, 19 nt, Artificial Sequence
  Description of Artificial Sequence: Synthetic oligonucleotide
  Antisense strand to SEQ ID NO: 1761309
ucuggaaucaagagcaaag

SEQ ID NO: 1761311 - RNA, 19 nt, Artificial Sequence
  Description of Artificial Sequence: Synthetic oligonucleotide
  Sense strand starting at position 138 of SEQ ID NO: 1562631
agagcuccucugcagaaua

SEQ ID NO: 1761312 - RNA, 19 nt, Artificial Sequence
  Description of Artificial Sequence: Synthetic oligonucleotide
  Antisense strand to SEQ ID NO: 1761311
uauucugcagaggagcucu

SEQ ID NO: 1761313 - RNA, 19 nt, Artificial Sequence
  Description of Artificial Sequence: Synthetic oligonucleotide
  Sense strand starting at position 167 of SEQ ID NO: 1562631
agcgguuuggauugagaaa

SEQ ID NO: 1761314 - RNA, 19 nt, Artificial Sequence
  Description of Artificial Sequence: Synthetic oligonucleotide
  Antisense strand to SEQ ID NO: 1761313
uuucucaauccaaaccgcu

SEQ ID NO: 1761315 - RNA, 19 nt, Artificial Sequence
  Description of Artificial Sequence: Synthetic oligonucleotide
  Sense strand starting at position 168 of SEQ ID NO: 1562631
gcgguuuggauugagaaag

SEQ ID NO: 1761316 - RNA, 19 nt, Artificial Sequence
  Description of Artificial Sequence: Synthetic oligonucleotide
  Antisense strand to SEQ ID NO: 1761315
cuuucucaauccaaaccgc

SEQ ID NO: 1761317 - RNA, 19 nt, Artificial Sequence
  Description of Artificial Sequence: Synthetic oligonucleotide
  Sense strand starting at position 311 of SEQ ID NO: 1562631
ugcucuuucccagauguaa

SEQ ID NO: 1761318 - RNA, 19 nt, Artificial Sequence
  Description of Artificial Sequence: Synthetic oligonucleotide
  Antisense strand to SEQ ID NO: 1761317
uuacaucugggaaagagca

SEQ ID NO: 1761319 - RNA, 19 nt, Artificial Sequence
  Description of Artificial Sequence: Synthetic oligonucleotide
  Sense strand starting at position 457 of SEQ ID NO: 1562631
ccaugucgagcuuaacaaa

SEQ ID NO: 1761320 - RNA, 19 nt, Artificial Sequence
  Description of Artificial Sequence: Synthetic oligonucleotide
  Antisense strand to SEQ ID NO: 1761319
uuuguuaagcucgacaugg

SEQ ID NO: 1761321 - RNA, 19 nt, Artificial Sequence
  Description of Artificial Sequence: Synthetic oligonucleotide
  Sense strand starting at position 695 of SEQ ID NO: 1562631
ggaugacccacaggaguuu

SEQ ID NO: 1761322 - RNA, 19 nt, Artificial Sequence
  Description of Artificial Sequence: Synthetic oligonucleotide
  Antisense strand to SEQ ID NO: 1761321
aaacuccugugggucaucc

SEQ ID NO: 1761323 - RNA, 19 nt, Artificial Sequence
  Description of Artificial Sequence: Synthetic oligonucleotide
  Sense strand starting at position 726 of SEQ ID NO: 1562631
uuauuaaugugucccagaa

SEQ ID NO: 1761324 - RNA, 19 nt, Artificial Sequence
  Description of Artificial Sequence: Synthetic oligonucleotide
  Antisense strand to SEQ ID NO: 1761323
uucugggacacauuaauaa

SEQ ID NO: 1761325 - RNA, 19 nt, Artificial Sequence
  Description of Artificial Sequence: Synthetic oligonucleotide
  Sense strand starting at position 730 of SEQ ID NO: 1562631
uaaugugucccagaaguac

SEQ ID NO: 1761326 - RNA, 19 nt, Artificial Sequence
  Description of Artificial Sequence: Synthetic oligonucleotide
  Antisense strand to SEQ ID NO: 1761325
guacuucugggacacauua

SEQ ID NO: 1761327 - RNA, 19 nt, Artificial Sequence
  Description of Artificial Sequence: Synthetic oligonucleotide
  Sense strand starting at position 824 of SEQ ID NO: 1562631
ccucaacacuccgcaagau

SEQ ID NO: 1761328 - RNA, 19 nt, Artificial Sequence
  Description of Artificial Sequence: Synthetic oligonucleotide
  Antisense strand to SEQ ID NO: 1761327
aucuugcggaguguugagg

SEQ ID NO: 1761329 - RNA, 19 nt, Artificial Sequence
  Description of Artificial Sequence: Synthetic oligonucleotide
  Sense strand starting at position 969 of SEQ ID NO: 1562631
ggcugacagacaugucacu

SEQ ID NO: 1761330 - RNA, 19 nt, Artificial Sequence
  Description of Artificial Sequence: Synthetic oligonucleotide
  Antisense strand to SEQ ID NO: 1761329
agugacaugucugucagcc

SEQ ID NO: 1761331 - RNA, 19 nt, Artificial Sequence
  Description of Artificial Sequence: Synthetic oligonucleotide
  Sense strand starting at position 1010 of SEQ ID NO: 1562631
ugaauugcuguuuauuaga

SEQ ID NO: 1761332 - RNA, 19 nt, Artificial Sequence
  Description of Artificial Sequence: Synthetic oligonucleotide
  Antisense strand to SEQ ID NO: 1761331
ucuaauaaacagcaauuca

SEQ ID NO: 1761333 - RNA, 19 nt, Artificial Sequence
  Description of Artificial Sequence: Synthetic oligonucleotide
  Sense strand starting at position 1040 of SEQ ID NO: 1562631
uuuccugugagagacguau

SEQ ID NO: 1761334 - RNA, 19 nt, Artificial Sequence
  Description of Artificial Sequence: Synthetic oligonucleotide
  Antisense strand to SEQ ID NO: 1761333
auacgucucucacaggaaa

SEQ ID NO: 1761335 - RNA, 19 nt, Artificial Sequence
  Description of Artificial Sequence: Synthetic oligonucleotide
  Sense strand starting at position 1044 of SEQ ID NO: 1562631
cugugagagacguauguau

SEQ ID NO: 1761336 - RNA, 19 nt, Artificial Sequence
  Description of Artificial Sequence: Synthetic oligonucleotide
  Antisense strand to SEQ ID NO: 1761335
auacauacgucucucacag

SEQ ID NO: 1761337 - RNA, 19 nt, Artificial Sequence
  Description of Artificial Sequence: Synthetic oligonucleotide
  Sense strand starting at position 1046 of SEQ ID NO: 1562631
gugagagacguauguauuu

SEQ ID NO: 1761338 - RNA, 19 nt, Artificial Sequence
  Description of Artificial Sequence: Synthetic oligonucleotide
  Antisense strand to SEQ ID NO: 1761337
aaauacauacgucucucac

SEQ ID NO: 1761339 - RNA, 19 nt, Artificial Sequence
  Description of Artificial Sequence: Synthetic oligonucleotide
  Sense strand starting at position 1133 of SEQ ID NO: 1562631
gcucauagacauuacgaaa

SEQ ID NO: 1761340 - RNA, 19 nt, Artificial Sequence
  Description of Artificial Sequence: Synthetic oligonucleotide
  Antisense strand to SEQ ID NO: 1761339
uuucguaaugucuaugagc

SEQ ID NO: 1761341 - RNA, 19 nt, Artificial Sequence
  Description of Artificial Sequence: Synthetic oligonucleotide
  Sense strand starting at position 1147 of SEQ ID NO: 1562631
cgaaaugcucuugaacuca

SEQ ID NO: 1761342 - RNA, 19 nt, Artificial Sequence
  Description of Artificial Sequence: Synthetic oligonucleotide
  Antisense strand to SEQ ID NO: 1761341
ugaguucaagagcauuucg

SEQ ID NO: 1761343 - RNA, 19 nt, Artificial Sequence
  Description of Artificial Sequence: Synthetic oligonucleotide
  Sense strand starting at position 1157 of SEQ ID NO: 1562631
uugaacucagcuugagauc

SEQ ID NO: 1761344 - RNA, 19 nt, Artificial Sequence
  Description of Artificial Sequence: Synthetic oligonucleotide
  Antisense strand to SEQ ID NO: 1761343
gaucucaagcugaguucaa

SEQ ID NO: 1761345 - RNA, 19 nt, Artificial Sequence
  Description of Artificial Sequence: Synthetic oligonucleotide
  Sense strand starting at position 1166 of SEQ ID NO: 1562631
gcuugagauccuggaauaa

SEQ ID NO: 1761346 - RNA, 19 nt, Artificial Sequence
  Description of Artificial Sequence: Synthetic oligonucleotide
  Antisense strand to SEQ ID NO: 1761345
uuauuccaggaucucaagc

SEQ ID NO: 1761347 - RNA, 19 nt, Artificial Sequence
  Description of Artificial Sequence: Synthetic oligonucleotide
  Sense strand starting at position 1176 of SEQ ID NO: 1562631
cuggaauaauuaggauuua

SEQ ID NO: 1761348 - RNA, 19 nt, Artificial Sequence
  Description of Artificial Sequence: Synthetic oligonucleotide
  Antisense strand to SEQ ID NO: 1761347
uaaauccuaauuauuccag

SEQ ID NO: 1761349 - RNA, 19 nt, Artificial Sequence
  Description of Artificial Sequence: Synthetic oligonucleotide
  Sense strand starting at position 1384 of SEQ ID NO: 1562631
ugcuaaaucggaugguaaa

SEQ ID NO: 1761350 - RNA, 19 nt, Artificial Sequence
  Description of Artificial Sequence: Synthetic oligonucleotide
  Antisense strand to SEQ ID NO: 1761349
uuuaccauccgauuuagca

SEQ ID NO: 1761351 - RNA, 19 nt, Artificial Sequence
  Description of Artificial Sequence: Synthetic oligonucleotide
  Sense strand starting at position 1385 of SEQ ID NO: 1562631
gcuaaaucggaugguaaau

SEQ ID NO: 1761352 - RNA, 19 nt, Artificial Sequence
  Description of Artificial Sequence: Synthetic oligonucleotide
  Antisense strand to SEQ ID NO: 1761351
auuuaccauccgauuuagc

SEQ ID NO: 1761353 - RNA, 19 nt, Artificial Sequence
  Description of Artificial Sequence: Synthetic oligonucleotide
  Sense strand starting at position 1423 of SEQ ID NO: 1562631
gcagaacaccuuugacuuu

SEQ ID NO: 1761354 - RNA, 19 nt, Artificial Sequence
  Description of Artificial Sequence: Synthetic oligonucleotide
  Antisense strand to SEQ ID NO: 1761353
aaagucaaagguguucugc

SEQ ID NO: 1761355 - RNA, 19 nt, Artificial Sequence
  Description of Artificial Sequence: Synthetic oligonucleotide
  Sense strand starting at position 1471 of SEQ ID NO: 1562631
gucauagauuauuccaaug

SEQ ID NO: 1761356 - RNA, 19 nt, Artificial Sequence
  Description of Artificial Sequence: Synthetic oligonucleotide
  Antisense strand to SEQ ID NO: 1761355
cauuggaauaaucuaugac

SEQ ID NO: 1761357 - RNA, 19 nt, Artificial Sequence
  Description of Artificial Sequence: Synthetic oligonucleotide
  Sense strand starting at position 1482 of SEQ ID NO: 1562631
uuccaaugaggauguuuga

SEQ ID NO: 1761358 - RNA, 19 nt, Artificial Sequence
  Description of Artificial Sequence: Synthetic oligonucleotide
  Antisense strand to SEQ ID NO: 1761357
ucaaacauccucauuggaa

SEQ ID NO: 1761359 - RNA, 19 nt, Artificial Sequence
  Description of Artificial Sequence: Synthetic oligonucleotide
  Sense strand starting at position 1526 of SEQ ID NO: 1562631
gggaguagaguauggguuu

SEQ ID NO: 1761360 - RNA, 19 nt, Artificial Sequence
  Description of Artificial Sequence: Synthetic oligonucleotide
  Antisense strand to SEQ ID NO: 1761359
aaacccauacucuacuccc

SEQ ID NO: 1761361 - RNA, 19 nt, Artificial Sequence
  Description of Artificial Sequence: Synthetic oligonucleotide
  Sense strand starting at position 1746 of SEQ ID NO: 1562631
uccggaaugggucauaacu

SEQ ID NO: 1761362 - RNA, 19 nt, Artificial Sequence
  Description of Artificial Sequence: Synthetic oligonucleotide
  Antisense strand to SEQ ID NO: 1761361
aguuaugacccauuccgga

SEQ ID NO: 1761363 - RNA, 19 nt, Artificial Sequence
  Description of Artificial Sequence: Synthetic oligonucleotide
  Sense strand starting at position 2166 of SEQ ID NO: 1562631
aucagaaacuguuccaguu

SEQ ID NO: 1761364 - RNA, 19 nt, Artificial Sequence
  Description of Artificial Sequence: Synthetic oligonucleotide
  Antisense strand to SEQ ID NO: 1761363
aacuggaacaguuucugau

SEQ ID NO: 1761365 - RNA, 19 nt, Artificial Sequence
  Description of Artificial Sequence: Synthetic oligonucleotide
  Sense strand starting at position 2302 of SEQ ID NO: 1562631
gauaguuaauuuggagaug

SEQ ID NO: 1761366 - RNA, 19 nt, Artificial Sequence
  Description of Artificial Sequence: Synthetic oligonucleotide
  Antisense strand to SEQ ID NO: 1761365
caucuccaaauuaacuauc

SEQ ID NO: 1761367 - RNA, 19 nt, Artificial Sequence
  Description of Artificial Sequence: Synthetic oligonucleotide
  Sense strand starting at position 2384 of SEQ ID NO: 1562631
acaguuagagacugugaga

SEQ ID NO: 1761368 - RNA, 19 nt, Artificial Sequence
  Description of Artificial Sequence: Synthetic oligonucleotide
  Antisense strand to SEQ ID NO: 1761367
ucucacagucucuaacugu

SEQ ID NO: 1761369 - RNA, 19 nt, Artificial Sequence
  Description of Artificial Sequence: Synthetic oligonucleotide
  Sense strand starting at position 2509 of SEQ ID NO: 1562631
agaccagacuucccaguau

SEQ ID NO: 1761370 - RNA, 19 nt, Artificial Sequence
  Description of Artificial Sequence: Synthetic oligonucleotide
  Antisense strand to SEQ ID NO: 1761369
auacugggaagucuggucu

SEQ ID NO: 1761371 - RNA, 19 nt, Artificial Sequence
  Description of Artificial Sequence: Synthetic oligonucleotide
  Sense strand starting at position 2722 of SEQ ID NO: 1562631
ggguuucuccuggagaauc

SEQ ID NO: 1761372 - RNA, 19 nt, Artificial Sequence
  Description of Artificial Sequence: Synthetic oligonucleotide
  Antisense strand to SEQ ID NO: 1761371
gauucuccaggagaaaccc

SEQ ID NO: 1761373 - RNA, 19 nt, Artificial Sequence
  Description of Artificial Sequence: Synthetic oligonucleotide
  Sense strand starting at position 2724 of SEQ ID NO: 1562631
guuucuccuggagaaucga

SEQ ID NO: 1761374 - RNA, 19 nt, Artificial Sequence
  Description of Artificial Sequence: Synthetic oligonucleotide
  Antisense strand to SEQ ID NO: 1761373
ucgauucuccaggagaaac

SEQ ID NO: 1761375 - RNA, 19 nt, Artificial Sequence
  Description of Artificial Sequence: Synthetic oligonucleotide
  Sense strand starting at position 3305 of SEQ ID NO: 1562631
gccguuucucugccuggaa

SEQ ID NO: 1761376 - RNA, 19 nt, Artificial Sequence
  Description of Artificial Sequence: Synthetic oligonucleotide
  Antisense strand to SEQ ID NO: 1761375
uuccaggcagagaaacggc

SEQ ID NO: 1761377 - RNA, 19 nt, Artificial Sequence
  Description of Artificial Sequence: Synthetic oligonucleotide
  Sense strand starting at position 3335 of SEQ ID NO: 1562631
guaaccuggacggguaauu

SEQ ID NO: 1761378 - RNA, 19 nt, Artificial Sequence
  Description of Artificial Sequence: Synthetic oligonucleotide
  Antisense strand to SEQ ID NO: 1761377
aauuacccguccagguuac

SEQ ID NO: 1761379 - RNA, 19 nt, Artificial Sequence
  Description of Artificial Sequence: Synthetic oligonucleotide
  Sense strand starting at position 3567 of SEQ ID NO: 1562631
ugggaagauuauucgugga

SEQ ID NO: 1761380 - RNA, 19 nt, Artificial Sequence
  Description of Artificial Sequence: Synthetic oligonucleotide
  Antisense strand to SEQ ID NO: 1761379
uccacgaauaaucuuccca

SEQ ID NO: 1761381 - RNA, 19 nt, Artificial Sequence
  Description of Artificial Sequence: Synthetic oligonucleotide
  Sense strand starting at position 3569 of SEQ ID NO: 1562631
ggaagauuauucguggaaa

SEQ ID NO: 1761382 - RNA, 19 nt, Artificial Sequence
  Description of Artificial Sequence: Synthetic oligonucleotide
  Antisense strand to SEQ ID NO: 1761381
uuuccacgaauaaucuucc

SEQ ID NO: 1761383 - RNA, 19 nt, Artificial Sequence
  Description of Artificial Sequence: Synthetic oligonucleotide
  Sense strand starting at position 3661 of SEQ ID NO: 1562631
ggaagugggugaaauguga

SEQ ID NO: 1761384 - RNA, 19 nt, Artificial Sequence
  Description of Artificial Sequence: Synthetic oligonucleotide
  Antisense strand to SEQ ID NO: 1761383
ucacauuucacccacuucc

SEQ ID NO: 1761385 - RNA, 19 nt, Artificial Sequence
  Description of Artificial Sequence: Synthetic oligonucleotide
  Sense strand starting at position 3778 of SEQ ID NO: 1562631
ucagaagaaucauuguuug

SEQ ID NO: 1761386 - RNA, 19 nt, Artificial Sequence
  Description of Artificial Sequence: Synthetic oligonucleotide
  Antisense strand to SEQ ID NO: 1761385
caaacaaugauucuucuga

SEQ ID NO: 1761387 - RNA, 19 nt, Artificial Sequence
  Description of Artificial Sequence: Synthetic oligonucleotide
  Sense strand starting at position 3940 of SEQ ID NO: 1562631
gcacaugaggcaugagaug

SEQ ID NO: 1761388 - RNA, 19 nt, Artificial Sequence
  Description of Artificial Sequence: Synthetic oligonucleotide
  Antisense strand to SEQ ID NO: 1761387
caucucaugccucaugugc

SEQ ID NO: 1761389 - RNA, 19 nt, Artificial Sequence
  Description of Artificial Sequence: Synthetic oligonucleotide
  Sense strand starting at position 3951 of SEQ ID NO: 1562631
augagauggguucauguuu

SEQ ID NO: 1761390 - RNA, 19 nt, Artificial Sequence
  Description of Artificial Sequence: Synthetic oligonucleotide
  Antisense strand to SEQ ID NO: 1761389
aaacaugaacccaucucau

SEQ ID NO: 1761391 - RNA, 19 nt, Artificial Sequence
  Description of Artificial Sequence: Synthetic oligonucleotide
  Sense strand starting at position 37 of SEQ ID NO: 1562632
guauguaacagaggugaaa

SEQ ID NO: 1761392 - RNA, 19 nt, Artificial Sequence
  Description of Artificial Sequence: Synthetic oligonucleotide
  Antisense strand to SEQ ID NO: 1761391
uuucaccucuguuacauac

SEQ ID NO: 1761393 - RNA, 19 nt, Artificial Sequence
  Description of Artificial Sequence: Synthetic oligonucleotide
  Sense strand starting at position 496 of SEQ ID NO: 1562632
uacaucuguguaugucaga

SEQ ID NO: 1761394 - RNA, 19 nt, Artificial Sequence
  Description of Artificial Sequence: Synthetic oligonucleotide
  Antisense strand to SEQ ID NO: 1761393
ucugacauacacagaugua

SEQ ID NO: 1761395 - RNA, 19 nt, Artificial Sequence
  Description of Artificial Sequence: Synthetic oligonucleotide
  Sense strand starting at position 499 of SEQ ID NO: 1562632
aucuguguaugucagacau

SEQ ID NO: 1761396 - RNA, 19 nt, Artificial Sequence
  Description of Artificial Sequence: Synthetic oligonucleotide
  Antisense strand to SEQ ID NO: 1761395
augucugacauacacagau

SEQ ID NO: 1761397 - RNA, 19 nt, Artificial Sequence
  Description of Artificial Sequence: Synthetic oligonucleotide
  Sense strand starting at position 501 of SEQ ID NO: 1562632
cuguguaugucagacauau

SEQ ID NO: 1761398 - RNA, 19 nt, Artificial Sequence
  Description of Artificial Sequence: Synthetic oligonucleotide
  Antisense strand to SEQ ID NO: 1761397
auaugucugacauacacag

SEQ ID NO: 1761399 - RNA, 19 nt, Artificial Sequence
  Description of Artificial Sequence: Synthetic oligonucleotide
  Sense strand starting at position 503 of SEQ ID NO: 1562632
guguaugucagacauaugu

SEQ ID NO: 1761400 - RNA, 19 nt, Artificial Sequence
  Description of Artificial Sequence: Synthetic oligonucleotide
  Antisense strand to SEQ ID NO: 1761399
acauaugucugacauacac

SEQ ID NO: 1761401 - RNA, 19 nt, Artificial Sequence
  Description of Artificial Sequence: Synthetic oligonucleotide
  Sense strand starting at position 505 of SEQ ID NO: 1562632
guaugucagacauaugucu

SEQ ID NO: 1761402 - RNA, 19 nt, Artificial Sequence
  Description of Artificial Sequence: Synthetic oligonucleotide
  Antisense strand to SEQ ID NO: 1761401
agacauaugucugacauac

SEQ ID NO: 1761403 - RNA, 19 nt, Artificial Sequence
  Description of Artificial Sequence: Synthetic oligonucleotide
  Sense strand starting at position 563 of SEQ ID NO: 1562632
ggcucugaacuuggaauaa

SEQ ID NO: 1761404 - RNA, 19 nt, Artificial Sequence
  Description of Artificial Sequence: Synthetic oligonucleotide
  Antisense strand to SEQ ID NO: 1761403
uuauuccaaguucagagcc

SEQ ID NO: 1761405 - RNA, 19 nt, Artificial Sequence
  Description of Artificial Sequence: Synthetic oligonucleotide
  Sense strand starting at position 653 of SEQ ID NO: 1562632
cucaguuucccuuacuguu

SEQ ID NO: 1761406 - RNA, 19 nt, Artificial Sequence
  Description of Artificial Sequence: Synthetic oligonucleotide
  Antisense strand to SEQ ID NO: 1761405
aacaguaagggaaacugag

SEQ ID NO: 1761407 - RNA, 19 nt, Artificial Sequence
  Description of Artificial Sequence: Synthetic oligonucleotide
  Sense strand starting at position 1231 of SEQ ID NO: 1562632
auuggccaugccugaaauu

SEQ ID NO: 1761408 - RNA, 19 nt, Artificial Sequence
  Description of Artificial Sequence: Synthetic oligonucleotide
  Antisense strand to SEQ ID NO: 1761407
aauuucaggcauggccaau

SEQ ID NO: 1761409 - RNA, 19 nt, Artificial Sequence
  Description of Artificial Sequence: Synthetic oligonucleotide
  Sense strand starting at position 1336 of SEQ ID NO: 1562632
gacggaucuugacacuuga

SEQ ID NO: 1761410 - RNA, 19 nt, Artificial Sequence
  Description of Artificial Sequence: Synthetic oligonucleotide
  Antisense strand to SEQ ID NO: 1761409
ucaagugucaagauccguc

SEQ ID NO: 1761411 - RNA, 19 nt, Artificial Sequence
  Description of Artificial Sequence: Synthetic oligonucleotide
  Sense strand starting at position 2807 of SEQ ID NO: 1562632
aggguauuccuccaggugu

SEQ ID NO: 1761412 - RNA, 19 nt, Artificial Sequence
  Description of Artificial Sequence: Synthetic oligonucleotide
  Antisense strand to SEQ ID NO: 1761411
acaccuggaggaauacccu

SEQ ID NO: 1761413 - RNA, 19 nt, Artificial Sequence
  Description of Artificial Sequence: Synthetic oligonucleotide
  Sense strand starting at position 2890 of SEQ ID NO: 1562632
gccgguggugucuuaccau

SEQ ID NO: 1761414 - RNA, 19 nt, Artificial Sequence
  Description of Artificial Sequence: Synthetic oligonucleotide
  Antisense strand to SEQ ID NO: 1761413
augguaagacaccaccggc

SEQ ID NO: 1761415 - RNA, 19 nt, Artificial Sequence
  Description of Artificial Sequence: Synthetic oligonucleotide
  Sense strand starting at position 2893 of SEQ ID NO: 1562632
gguggugucuuaccaugau

SEQ ID NO: 1761416 - RNA, 19 nt, Artificial Sequence
  Description of Artificial Sequence: Synthetic oligonucleotide
  Antisense strand to SEQ ID NO: 1761415
aucaugguaagacaccacc

SEQ ID NO: 1761417 - RNA, 19 nt, Artificial Sequence
  Description of Artificial Sequence: Synthetic oligonucleotide
  Sense strand starting at position 2896 of SEQ ID NO: 1562632
ggugucuuaccaugauacu

SEQ ID NO: 1761418 - RNA, 19 nt, Artificial Sequence
  Description of Artificial Sequence: Synthetic oligonucleotide
  Antisense strand to SEQ ID NO: 1761417
aguaucaugguaagacacc

SEQ ID NO: 1761419 - RNA, 19 nt, Artificial Sequence
  Description of Artificial Sequence: Synthetic oligonucleotide
  Sense strand starting at position 2897 of SEQ ID NO: 1562632
gugucuuaccaugauacug

SEQ ID NO: 1761420 - RNA, 19 nt, Artificial Sequence
  Description of Artificial Sequence: Synthetic oligonucleotide
  Antisense strand to SEQ ID NO: 1761419
caguaucaugguaagacac

SEQ ID NO: 1761421 - RNA, 19 nt, Artificial Sequence
  Description of Artificial Sequence: Synthetic oligonucleotide
  Sense strand starting at position 2915 of SEQ ID NO: 1562632
ggccgagucuacacgguau

SEQ ID NO: 1761422 - RNA, 19 nt, Artificial Sequence
  Description of Artificial Sequence: Synthetic oligonucleotide
  Antisense strand to SEQ ID NO: 1761421
auaccguguagacucggcc

SEQ ID NO: 1761423 - RNA, 19 nt, Artificial Sequence
  Description of Artificial Sequence: Synthetic oligonucleotide
  Sense strand starting at position 2927 of SEQ ID NO: 1562632
acgguaucugcuggugcau

SEQ ID NO: 1761424 - RNA, 19 nt, Artificial Sequence
  Description of Artificial Sequence: Synthetic oligonucleotide
  Antisense strand to SEQ ID NO: 1761423
augcaccagcagauaccgu

SEQ ID NO: 1761425 - RNA, 19 nt, Artificial Sequence
  Description of Artificial Sequence: Synthetic oligonucleotide
  Sense strand starting at position 2944 of SEQ ID NO: 1562632
augcgauacagucucgcua

SEQ ID NO: 1761426 - RNA, 19 nt, Artificial Sequence
  Description of Artificial Sequence: Synthetic oligonucleotide
  Antisense strand to SEQ ID NO: 1761425
uagcgagacuguaucgcau

SEQ ID NO: 1761427 - RNA, 19 nt, Artificial Sequence
  Description of Artificial Sequence: Synthetic oligonucleotide
  Sense strand starting at position 2948 of SEQ ID NO: 1562632
gauacagucucgcuaugca

SEQ ID NO: 1761428 - RNA, 19 nt, Artificial Sequence
  Description of Artificial Sequence: Synthetic oligonucleotide
  Antisense strand to SEQ ID NO: 1761427
ugcauagcgagacuguauc

SEQ ID NO: 1761429 - RNA, 19 nt, Artificial Sequence
  Description of Artificial Sequence: Synthetic oligonucleotide
  Sense strand starting at position 2951 of SEQ ID NO: 1562632
acagucucgcuaugcauua

SEQ ID NO: 1761430 - RNA, 19 nt, Artificial Sequence
  Description of Artificial Sequence: Synthetic oligonucleotide
  Antisense strand to SEQ ID NO: 1761429
uaaugcauagcgagacugu

SEQ ID NO: 1761431 - RNA, 19 nt, Artificial Sequence
  Description of Artificial Sequence: Synthetic oligonucleotide
  Sense strand starting at position 3067 of SEQ ID NO: 1562632
auuagaugccguggacaua

SEQ ID NO: 1761432 - RNA, 19 nt, Artificial Sequence
  Description of Artificial Sequence: Synthetic oligonucleotide
  Antisense strand to SEQ ID NO: 1761431
uauguccacggcaucuaau

SEQ ID NO: 1761433 - RNA, 19 nt, Artificial Sequence
  Description of Artificial Sequence: Synthetic oligonucleotide
  Sense strand starting at position 3068 of SEQ ID NO: 1562632
uuagaugccguggacauau

SEQ ID NO: 1761434 - RNA, 19 nt, Artificial Sequence
  Description of Artificial Sequence: Synthetic oligonucleotide
  Antisense strand to SEQ ID NO: 1761433
auauguccacggcaucuaa

SEQ ID NO: 1761435 - RNA, 19 nt, Artificial Sequence
  Description of Artificial Sequence: Synthetic oligonucleotide
  Sense strand starting at position 3076 of SEQ ID NO: 1562632
cguggacauauguauuacu

SEQ ID NO: 1761436 - RNA, 19 nt, Artificial Sequence
  Description of Artificial Sequence: Synthetic oligonucleotide
  Antisense strand to SEQ ID NO: 1761435
aguaauacauauguccacg

SEQ ID NO: 1761437 - RNA, 19 nt, Artificial Sequence
  Description of Artificial Sequence: Synthetic oligonucleotide
  Sense strand starting at position 3079 of SEQ ID NO: 1562632
ggacauauguauuacuuau

SEQ ID NO: 1761438 - RNA, 19 nt, Artificial Sequence
  Description of Artificial Sequence: Synthetic oligonucleotide
  Antisense strand to SEQ ID NO: 1761437
auaaguaauacauaugucc

SEQ ID NO: 1761439 - RNA, 19 nt, Artificial Sequence
  Description of Artificial Sequence: Synthetic oligonucleotide
  Sense strand starting at position 3377 of SEQ ID NO: 1562632
gugauaucgugccacugca

SEQ ID NO: 1761440 - RNA, 19 nt, Artificial Sequence
  Description of Artificial Sequence: Synthetic oligonucleotide
  Antisense strand to SEQ ID NO: 1761439
ugcaguggcacgauaucac

SEQ ID NO: 1761441 - RNA, 19 nt, Artificial Sequence
  Description of Artificial Sequence: Synthetic oligonucleotide
  Sense strand starting at position 3536 of SEQ ID NO: 1562632
uugguuugcauuuguugua

SEQ ID NO: 1761442 - RNA, 19 nt, Artificial Sequence
  Description of Artificial Sequence: Synthetic oligonucleotide
  Antisense strand to SEQ ID NO: 1761441
uacaacaaaugcaaaccaa

SEQ ID NO: 1761443 - RNA, 19 nt, Artificial Sequence
  Description of Artificial Sequence: Synthetic oligonucleotide
  Sense strand starting at position 3539 of SEQ ID NO: 1562632
guuugcauuuguuguacau

SEQ ID NO: 1761444 - RNA, 19 nt, Artificial Sequence
  Description of Artificial Sequence: Synthetic oligonucleotide
  Antisense strand to SEQ ID NO: 1761443
auguacaacaaaugcaaac

SEQ ID NO: 1761445 - RNA, 19 nt, Artificial Sequence
  Description of Artificial Sequence: Synthetic oligonucleotide
  Sense strand starting at position 3612 of SEQ ID NO: 1562632
acugaauucuagugcaaau

SEQ ID NO: 1761446 - RNA, 19 nt, Artificial Sequence
  Description of Artificial Sequence: Synthetic oligonucleotide
  Antisense strand to SEQ ID NO: 1761445
auuugcacuagaauucagu

SEQ ID NO: 1761447 - RNA, 19 nt, Artificial Sequence
  Description of Artificial Sequence: Synthetic oligonucleotide
  Sense strand starting at position 3614 of SEQ ID NO: 1562632
ugaauucuagugcaaauuc

SEQ ID NO: 1761448 - RNA, 19 nt, Artificial Sequence
  Description of Artificial Sequence: Synthetic oligonucleotide
  Antisense strand to SEQ ID NO: 1761447
gaauuugcacuagaauuca

SEQ ID NO: 1761449 - RNA, 19 nt, Artificial Sequence
  Description of Artificial Sequence: Synthetic oligonucleotide
  Sense strand starting at position 3854 of SEQ ID NO: 1562632
agcccuacuccucgugaau

SEQ ID NO: 1761450 - RNA, 19 nt, Artificial Sequence
  Description of Artificial Sequence: Synthetic oligonucleotide
  Antisense strand to SEQ ID NO: 1761449
auucacgaggaguagggcu

SEQ ID NO: 1761451 - RNA, 19 nt, Artificial Sequence
  Description of Artificial Sequence: Synthetic oligonucleotide
  Sense strand starting at position 3856 of SEQ ID NO: 1562632
cccuacuccucgugaauau

SEQ ID NO: 1761452 - RNA, 19 nt, Artificial Sequence
  Description of Artificial Sequence: Synthetic oligonucleotide
  Antisense strand to SEQ ID NO: 1761451
auauucacgaggaguaggg

SEQ ID NO: 1761453 - RNA, 19 nt, Artificial Sequence
  Description of Artificial Sequence: Synthetic oligonucleotide
  Sense strand starting at position 3857 of SEQ ID NO: 1562632
ccuacuccucgugaauauu

SEQ ID NO: 1761454 - RNA, 19 nt, Artificial Sequence
  Description of Artificial Sequence: Synthetic oligonucleotide
  Antisense strand to SEQ ID NO: 1761453
aauauucacgaggaguagg

SEQ ID NO: 1761455 - RNA, 19 nt, Artificial Sequence
  Description of Artificial Sequence: Synthetic oligonucleotide
  Sense strand starting at position 3916 of SEQ ID NO: 1562632
ugaggcuaugguuaauuau

SEQ ID NO: 1761456 - RNA, 19 nt, Artificial Sequence
  Description of Artificial Sequence: Synthetic oligonucleotide
  Antisense strand to SEQ ID NO: 1761455
auaauuaaccauagccuca

SEQ ID NO: 1761457 - RNA, 19 nt, Artificial Sequence
  Description of Artificial Sequence: Synthetic oligonucleotide
  Sense strand starting at position 3981 of SEQ ID NO: 1562632
ccaagaggucucugcagau

SEQ ID NO: 1761458 - RNA, 19 nt, Artificial Sequence
  Description of Artificial Sequence: Synthetic oligonucleotide
  Antisense strand to SEQ ID NO: 1761457
aucugcagagaccucuugg

SEQ ID NO: 1761459 - RNA, 19 nt, Artificial Sequence
  Description of Artificial Sequence: Synthetic oligonucleotide
  Sense strand starting at position 103 of SEQ ID NO: 1562633
aaaggcguucuguguauca

SEQ ID NO: 1761460 - RNA, 19 nt, Artificial Sequence
  Description of Artificial Sequence: Synthetic oligonucleotide
  Antisense strand to SEQ ID NO: 1761459
ugauacacagaacgccuuu

SEQ ID NO: 1761461 - RNA, 19 nt, Artificial Sequence
  Description of Artificial Sequence: Synthetic oligonucleotide
  Sense strand starting at position 105 of SEQ ID NO: 1562633
aggcguucuguguaucaau

SEQ ID NO: 1761462 - RNA, 19 nt, Artificial Sequence
  Description of Artificial Sequence: Synthetic oligonucleotide
  Antisense strand to SEQ ID NO: 1761461
auugauacacagaacgccu

SEQ ID NO: 1761463 - RNA, 19 nt, Artificial Sequence
  Description of Artificial Sequence: Synthetic oligonucleotide
  Sense strand starting at position 118 of SEQ ID NO: 1562633
aucaaugcucauggucaua

SEQ ID NO: 1761464 - RNA, 19 nt, Artificial Sequence
  Description of Artificial Sequence: Synthetic oligonucleotide
  Antisense strand to SEQ ID NO: 1761463
uaugaccaugagcauugau

SEQ ID NO: 1761465 - RNA, 19 nt, Artificial Sequence
  Description of Artificial Sequence: Synthetic oligonucleotide
  Sense strand starting at position 336 of SEQ ID NO: 1562633
cugcuucucuucuccgaaa

SEQ ID NO: 1761466 - RNA, 19 nt, Artificial Sequence
  Description of Artificial Sequence: Synthetic oligonucleotide
  Antisense strand to SEQ ID NO: 1761465
uuucggagaagagaagcag

SEQ ID NO: 1761467 - RNA, 19 nt, Artificial Sequence
  Description of Artificial Sequence: Synthetic oligonucleotide
  Sense strand starting at position 545 of SEQ ID NO: 1562633
gauggcuuccucuggaagu

SEQ ID NO: 1761468 - RNA, 19 nt, Artificial Sequence
  Description of Artificial Sequence: Synthetic oligonucleotide
  Antisense strand to SEQ ID NO: 1761467
acuuccagaggaagccauc

SEQ ID NO: 1761469 - RNA, 19 nt, Artificial Sequence
  Description of Artificial Sequence: Synthetic oligonucleotide
  Sense strand starting at position 558 of SEQ ID NO: 1562633
ggaaguucuucccucccua

SEQ ID NO: 1761470 - RNA, 19 nt, Artificial Sequence
  Description of Artificial Sequence: Synthetic oligonucleotide
  Antisense strand to SEQ ID NO: 1761469
uagggagggaagaacuucc

SEQ ID NO: 1761471 - RNA, 19 nt, Artificial Sequence
  Description of Artificial Sequence: Synthetic oligonucleotide
  Sense strand starting at position 676 of SEQ ID NO: 1562633
cccagccugggugauaaau

SEQ ID NO: 1761472 - RNA, 19 nt, Artificial Sequence
  Description of Artificial Sequence: Synthetic oligonucleotide
  Antisense strand to SEQ ID NO: 1761471
auuuaucacccaggcuggg

SEQ ID NO: 1761473 - RNA, 19 nt, Artificial Sequence
  Description of Artificial Sequence: Synthetic oligonucleotide
  Sense strand starting at position 1871 of SEQ ID NO: 1562633
uucggauccgccguuugau

SEQ ID NO: 1761474 - RNA, 19 nt, Artificial Sequence
  Description of Artificial Sequence: Synthetic oligonucleotide
  Antisense strand to SEQ ID NO: 1761473
aucaaacggcggauccgaa

SEQ ID NO: 1761475 - RNA, 19 nt, Artificial Sequence
  Description of Artificial Sequence: Synthetic oligonucleotide
  Sense strand starting at position 1874 of SEQ ID NO: 1562633
ggauccgccguuugaugau

SEQ ID NO: 1761476 - RNA, 19 nt, Artificial Sequence
  Description of Artificial Sequence: Synthetic oligonucleotide
  Antisense strand to SEQ ID NO: 1761475
aucaucaaacggcggaucc

SEQ ID NO: 1761477 - RNA, 19 nt, Artificial Sequence
  Description of Artificial Sequence: Synthetic oligonucleotide
  Sense strand starting at position 1890 of SEQ ID NO: 1562633
gauggauucggccgcgaag

SEQ ID NO: 1761478 - RNA, 19 nt, Artificial Sequence
  Description of Artificial Sequence: Synthetic oligonucleotide
  Antisense strand to SEQ ID NO: 1761477
cuucgcggccgaauccauc

SEQ ID NO: 1761479 - RNA, 19 nt, Artificial Sequence
  Description of Artificial Sequence: Synthetic oligonucleotide
  Sense strand starting at position 2507 of SEQ ID NO: 1562633
uauuuauguauucguggga

SEQ ID NO: 1761480 - RNA, 19 nt, Artificial Sequence
  Description of Artificial Sequence: Synthetic oligonucleotide
  Antisense strand to SEQ ID NO: 1761479
ucccacgaauacauaaaua

SEQ ID NO: 1761481 - RNA, 19 nt, Artificial Sequence
  Description of Artificial Sequence: Synthetic oligonucleotide
  Sense strand starting at position 2511 of SEQ ID NO: 1562633
uauguauucgugggagggu

SEQ ID NO: 1761482 - RNA, 19 nt, Artificial Sequence
  Description of Artificial Sequence: Synthetic oligonucleotide
  Antisense strand to SEQ ID NO: 1761481
acccucccacgaauacaua

SEQ ID NO: 1761483 - RNA, 19 nt, Artificial Sequence
  Description of Artificial Sequence: Synthetic oligonucleotide
  Sense strand starting at position 2771 of SEQ ID NO: 1562633
cgggucaucaucuggucau

SEQ ID NO: 1761484 - RNA, 19 nt, Artificial Sequence
  Description of Artificial Sequence: Synthetic oligonucleotide
  Antisense strand to SEQ ID NO: 1761483
augaccagaugaugacccg

SEQ ID NO: 1761485 - RNA, 19 nt, Artificial Sequence
  Description of Artificial Sequence: Synthetic oligonucleotide
  Sense strand starting at position 2781 of SEQ ID NO: 1562633
ucuggucauucggcagaaa

SEQ ID NO: 1761486 - RNA, 19 nt, Artificial Sequence
  Description of Artificial Sequence: Synthetic oligonucleotide
  Antisense strand to SEQ ID NO: 1761485
uuucugccgaaugaccaga

SEQ ID NO: 1761487 - RNA, 19 nt, Artificial Sequence
  Description of Artificial Sequence: Synthetic oligonucleotide
  Sense strand starting at position 2782 of SEQ ID NO: 1562633
cuggucauucggcagaaac

SEQ ID NO: 1761488 - RNA, 19 nt, Artificial Sequence
  Description of Artificial Sequence: Synthetic oligonucleotide
  Antisense strand to SEQ ID NO: 1761487
guuucugccgaaugaccag

SEQ ID NO: 1761489 - RNA, 19 nt, Artificial Sequence
  Description of Artificial Sequence: Synthetic oligonucleotide
  Sense strand starting at position 2799 of SEQ ID NO: 1562633
accgccuucgcggucauau

SEQ ID NO: 1761490 - RNA, 19 nt, Artificial Sequence
  Description of Artificial Sequence: Synthetic oligonucleotide
  Antisense strand to SEQ ID NO: 1761489
auaugaccgcgaaggcggu

SEQ ID NO: 1761491 - RNA, 19 nt, Artificial Sequence
  Description of Artificial Sequence: Synthetic oligonucleotide
  Sense strand starting at position 2800 of SEQ ID NO: 1562633
ccgccuucgcggucauauc

SEQ ID NO: 1761492 - RNA, 19 nt, Artificial Sequence
  Description of Artificial Sequence: Synthetic oligonucleotide
  Antisense strand to SEQ ID NO: 1761491
gauaugaccgcgaaggcgg

SEQ ID NO: 1761493 - RNA, 19 nt, Artificial Sequence
  Description of Artificial Sequence: Synthetic oligonucleotide
  Sense strand starting at position 3028 of SEQ ID NO: 1562633
uguugaaauuacuugaacu

SEQ ID NO: 1761494 - RNA, 19 nt, Artificial Sequence
  Description of Artificial Sequence: Synthetic oligonucleotide
  Antisense strand to SEQ ID NO: 1761493
aguucaaguaauuucaaca

SEQ ID NO: 1761495 - RNA, 19 nt, Artificial Sequence
  Description of Artificial Sequence: Synthetic oligonucleotide
  Sense strand starting at position 3057 of SEQ ID NO: 1562633
uuauguuaguagucuuguu

SEQ ID NO: 1761496 - RNA, 19 nt, Artificial Sequence
  Description of Artificial Sequence: Synthetic oligonucleotide
  Antisense strand to SEQ ID NO: 1761495
aacaagacuacuaacauaa

SEQ ID NO: 1761497 - RNA, 19 nt, Artificial Sequence
  Description of Artificial Sequence: Synthetic oligonucleotide
  Sense strand starting at position 3065 of SEQ ID NO: 1562633
guagucuuguucuuuguaa

SEQ ID NO: 1761498 - RNA, 19 nt, Artificial Sequence
  Description of Artificial Sequence: Synthetic oligonucleotide
  Antisense strand to SEQ ID NO: 1761497
uuacaaagaacaagacuac

SEQ ID NO: 1761499 - RNA, 19 nt, Artificial Sequence
  Description of Artificial Sequence: Synthetic oligonucleotide
  Sense strand starting at position 3166 of SEQ ID NO: 1562633
cugcucuaugcguacauaa

SEQ ID NO: 1761500 - RNA, 19 nt, Artificial Sequence
  Description of Artificial Sequence: Synthetic oligonucleotide
  Antisense strand to SEQ ID NO: 1761499
uuauguacgcauagagcag

SEQ ID NO: 1761501 - RNA, 19 nt, Artificial Sequence
  Description of Artificial Sequence: Synthetic oligonucleotide
  Sense strand starting at position 3168 of SEQ ID NO: 1562633
gcucuaugcguacauaaac

SEQ ID NO: 1761502 - RNA, 19 nt, Artificial Sequence
  Description of Artificial Sequence: Synthetic oligonucleotide
  Antisense strand to SEQ ID NO: 1761501
guuuauguacgcauagagc

SEQ ID NO: 1761503 - RNA, 19 nt, Artificial Sequence
  Description of Artificial Sequence: Synthetic oligonucleotide
  Sense strand starting at position 3223 of SEQ ID NO: 1562633
auacacauugucuguagau

SEQ ID NO: 1761504 - RNA, 19 nt, Artificial Sequence
  Description of Artificial Sequence: Synthetic oligonucleotide
  Antisense strand to SEQ ID NO: 1761503
aucuacagacaauguguau

SEQ ID NO: 1761505 - RNA, 19 nt, Artificial Sequence
  Description of Artificial Sequence: Synthetic oligonucleotide
  Sense strand starting at position 3300 of SEQ ID NO: 1562633
cccuuaaugcuauaaagug

SEQ ID NO: 1761506 - RNA, 19 nt, Artificial Sequence
  Description of Artificial Sequence: Synthetic oligonucleotide
  Antisense strand to SEQ ID NO: 1761505
cacuuuauagcauuaaggg

SEQ ID NO: 1761507 - RNA, 19 nt, Artificial Sequence
  Description of Artificial Sequence: Synthetic oligonucleotide
  Sense strand starting at position 3423 of SEQ ID NO: 1562633
gugucuugcgaacaucaau

SEQ ID NO: 1761508 - RNA, 19 nt, Artificial Sequence
  Description of Artificial Sequence: Synthetic oligonucleotide
  Antisense strand to SEQ ID NO: 1761507
auugauguucgcaagacac

SEQ ID NO: 1761509 - RNA, 19 nt, Artificial Sequence
  Description of Artificial Sequence: Synthetic oligonucleotide
  Sense strand starting at position 3436 of SEQ ID NO: 1562633
aucaauggcucauuaggaa

SEQ ID NO: 1761510 - RNA, 19 nt, Artificial Sequence
  Description of Artificial Sequence: Synthetic oligonucleotide
  Antisense strand to SEQ ID NO: 1761509
uuccuaaugagccauugau

SEQ ID NO: 1761511 - RNA, 19 nt, Artificial Sequence
  Description of Artificial Sequence: Synthetic oligonucleotide
  Sense strand starting at position 3439 of SEQ ID NO: 1562633
aauggcucauuaggaaaga

SEQ ID NO: 1761512 - RNA, 19 nt, Artificial Sequence
  Description of Artificial Sequence: Synthetic oligonucleotide
  Antisense strand to SEQ ID NO: 1761511
ucuuuccuaaugagccauu

SEQ ID NO: 1761513 - RNA, 19 nt, Artificial Sequence
  Description of Artificial Sequence: Synthetic oligonucleotide
  Sense strand starting at position 3440 of SEQ ID NO: 1562633
auggcucauuaggaaagau

SEQ ID NO: 1761514 - RNA, 19 nt, Artificial Sequence
  Description of Artificial Sequence: Synthetic oligonucleotide
  Antisense strand to SEQ ID NO: 1761513
aucuuuccuaaugagccau

SEQ ID NO: 1761515 - RNA, 19 nt, Artificial Sequence
  Description of Artificial Sequence: Synthetic oligonucleotide
  Sense strand starting at position 3462 of SEQ ID NO: 1562633
ugcguuucugugcuacaau

SEQ ID NO: 1761516 - RNA, 19 nt, Artificial Sequence
  Description of Artificial Sequence: Synthetic oligonucleotide
  Antisense strand to SEQ ID NO: 1761515
auuguagcacagaaacgca

SEQ ID NO: 1761517 - RNA, 19 nt, Artificial Sequence
  Description of Artificial Sequence: Synthetic oligonucleotide
  Sense strand starting at position 3549 of SEQ ID NO: 1562633
uuauuaccuugagagaaau

SEQ ID NO: 1761518 - RNA, 19 nt, Artificial Sequence
  Description of Artificial Sequence: Synthetic oligonucleotide
  Antisense strand to SEQ ID NO: 1761517
auuucucucaagguaauaa

SEQ ID NO: 1761519 - RNA, 19 nt, Artificial Sequence
  Description of Artificial Sequence: Synthetic oligonucleotide
  Sense strand starting at position 3587 of SEQ ID NO: 1562633
caguauguuccagggaaac

SEQ ID NO: 1761520 - RNA, 19 nt, Artificial Sequence
  Description of Artificial Sequence: Synthetic oligonucleotide
  Antisense strand to SEQ ID NO: 1761519
guuucccuggaacauacug

SEQ ID NO: 1761521 - RNA, 19 nt, Artificial Sequence
  Description of Artificial Sequence: Synthetic oligonucleotide
  Sense strand starting at position 3652 of SEQ ID NO: 1562633
aaauguccuccugggagau

SEQ ID NO: 1761522 - RNA, 19 nt, Artificial Sequence
  Description of Artificial Sequence: Synthetic oligonucleotide
  Antisense strand to SEQ ID NO: 1761521
aucucccaggaggacauuu

SEQ ID NO: 1761523 - RNA, 19 nt, Artificial Sequence
  Description of Artificial Sequence: Synthetic oligonucleotide
  Sense strand starting at position 3720 of SEQ ID NO: 1562633
guguguucaggcugacgga

SEQ ID NO: 1761524 - RNA, 19 nt, Artificial Sequence
  Description of Artificial Sequence: Synthetic oligonucleotide
  Antisense strand to SEQ ID NO: 1761523
uccgucagccugaacacac

SEQ ID NO: 1761525 - RNA, 19 nt, Artificial Sequence
  Description of Artificial Sequence: Synthetic oligonucleotide
  Sense strand starting at position 3809 of SEQ ID NO: 1562633
gcaccaggcuuugugugaa

SEQ ID NO: 1761526 - RNA, 19 nt, Artificial Sequence
  Description of Artificial Sequence: Synthetic oligonucleotide
  Antisense strand to SEQ ID NO: 1761525
uucacacaaagccuggugc

SEQ ID NO: 1761527 - RNA, 19 nt, Artificial Sequence
  Description of Artificial Sequence: Synthetic oligonucleotide
  Sense strand starting at position 3823 of SEQ ID NO: 1562633
gugaaaccaucaggaaaca

SEQ ID NO: 1761528 - RNA, 19 nt, Artificial Sequence
  Description of Artificial Sequence: Synthetic oligonucleotide
  Antisense strand to SEQ ID NO: 1761527
uguuuccugaugguuucac

SEQ ID NO: 1761529 - RNA, 19 nt, Artificial Sequence
  Description of Artificial Sequence: Synthetic oligonucleotide
  Sense strand starting at position 3859 of SEQ ID NO: 1562633
ggagcugucaguggaguga

SEQ ID NO: 1761530 - RNA, 19 nt, Artificial Sequence
  Description of Artificial Sequence: Synthetic oligonucleotide
  Antisense strand to SEQ ID NO: 1761529
ucacuccacugacagcucc

SEQ ID NO: 1761531 - RNA, 19 nt, Artificial Sequence
  Description of Artificial Sequence: Synthetic oligonucleotide
  Sense strand starting at position 3861 of SEQ ID NO: 1562633
agcugucaguggagugaga

SEQ ID NO: 1761532 - RNA, 19 nt, Artificial Sequence
  Description of Artificial Sequence: Synthetic oligonucleotide
  Antisense strand to SEQ ID NO: 1761531
ucucacuccacugacagcu

SEQ ID NO: 1761533 - RNA, 19 nt, Artificial Sequence
  Description of Artificial Sequence: Synthetic oligonucleotide
  Sense strand starting at position 3919 of SEQ ID NO: 1562633
gguguaggaguuucguguu

SEQ ID NO: 1761534 - RNA, 19 nt, Artificial Sequence
  Description of Artificial Sequence: Synthetic oligonucleotide
  Antisense strand to SEQ ID NO: 1761533
aacacgaaacuccuacacc

SEQ ID NO: 1761535 - RNA, 19 nt, Artificial Sequence
  Description of Artificial Sequence: Synthetic oligonucleotide
  Sense strand starting at position 3932 of SEQ ID NO: 1562633
cguguugcugcucucacaa

SEQ ID NO: 1761536 - RNA, 19 nt, Artificial Sequence
  Description of Artificial Sequence: Synthetic oligonucleotide
  Antisense strand to SEQ ID NO: 1761535
uugugagagcagcaacacg

SEQ ID NO: 1761537 - RNA, 19 nt, Artificial Sequence
  Description of Artificial Sequence: Synthetic oligonucleotide
  Sense strand starting at position 3979 of SEQ ID NO: 1562633
acucacauuuguuaucuga

SEQ ID NO: 1761538 - RNA, 19 nt, Artificial Sequence
  Description of Artificial Sequence: Synthetic oligonucleotide
  Antisense strand to SEQ ID NO: 1761537
ucagauaacaaaugugagu

SEQ ID NO: 1761539 - RNA, 19 nt, Artificial Sequence
  Description of Artificial Sequence: Synthetic oligonucleotide
  Sense strand starting at position 220 of SEQ ID NO: 1562634
gagugagaucuuggugcca

SEQ ID NO: 1761540 - RNA, 19 nt, Artificial Sequence
  Description of Artificial Sequence: Synthetic oligonucleotide
  Antisense strand to SEQ ID NO: 1761539
uggcaccaagaucucacuc

SEQ ID NO: 1761541 - RNA, 19 nt, Artificial Sequence
  Description of Artificial Sequence: Synthetic oligonucleotide
  Sense strand starting at position 225 of SEQ ID NO: 1562634
agaucuuggugccaagaaa

SEQ ID NO: 1761542 - RNA, 19 nt, Artificial Sequence
  Description of Artificial Sequence: Synthetic oligonucleotide
  Antisense strand to SEQ ID NO: 1761541
uuucuuggcaccaagaucu

SEQ ID NO: 1761543 - RNA, 19 nt, Artificial Sequence
  Description of Artificial Sequence: Synthetic oligonucleotide
  Sense strand starting at position 376 of SEQ ID NO: 1562634
gcaguucuauuucugcaga

SEQ ID NO: 1761544 - RNA, 19 nt, Artificial Sequence
  Description of Artificial Sequence: Synthetic oligonucleotide
  Antisense strand to SEQ ID NO: 1761543
ucugcagaaauagaacugc

SEQ ID NO: 1761545 - RNA, 19 nt, Artificial Sequence
  Description of Artificial Sequence: Synthetic oligonucleotide
  Sense strand starting at position 412 of SEQ ID NO: 1562634
aaggcaucugucuguaucu

SEQ ID NO: 1761546 - RNA, 19 nt, Artificial Sequence
  Description of Artificial Sequence: Synthetic oligonucleotide
  Antisense strand to SEQ ID NO: 1761545
agauacagacagaugccuu

SEQ ID NO: 1761547 - RNA, 19 nt, Artificial Sequence
  Description of Artificial Sequence: Synthetic oligonucleotide
  Sense strand starting at position 648 of SEQ ID NO: 1562634
agcacugagcuuuguggaa

SEQ ID NO: 1761548 - RNA, 19 nt, Artificial Sequence
  Description of Artificial Sequence: Synthetic oligonucleotide
  Antisense strand to SEQ ID NO: 1761547
uuccacaaagcucagugcu

SEQ ID NO: 1761549 - RNA, 19 nt, Artificial Sequence
  Description of Artificial Sequence: Synthetic oligonucleotide
  Sense strand starting at position 652 of SEQ ID NO: 1562634
cugagcuuuguggaauaaa

SEQ ID NO: 1761550 - RNA, 19 nt, Artificial Sequence
  Description of Artificial Sequence: Synthetic oligonucleotide
  Antisense strand to SEQ ID NO: 1761549
uuuauuccacaaagcucag

SEQ ID NO: 1761551 - RNA, 19 nt, Artificial Sequence
  Description of Artificial Sequence: Synthetic oligonucleotide
  Sense strand starting at position 655 of SEQ ID NO: 1562634
agcuuuguggaauaaauca

SEQ ID NO: 1761552 - RNA, 19 nt, Artificial Sequence
  Description of Artificial Sequence: Synthetic oligonucleotide
  Antisense strand to SEQ ID NO: 1761551
ugauuuauuccacaaagcu

SEQ ID NO: 1761553 - RNA, 19 nt, Artificial Sequence
  Description of Artificial Sequence: Synthetic oligonucleotide
  Sense strand starting at position 893 of SEQ ID NO: 1562634
uaucuaacuugcucgguga

SEQ ID NO: 1761554 - RNA, 19 nt, Artificial Sequence
  Description of Artificial Sequence: Synthetic oligonucleotide
  Antisense strand to SEQ ID NO: 1761553
ucaccgagcaaguuagaua

SEQ ID NO: 1761555 - RNA, 19 nt, Artificial Sequence
  Description of Artificial Sequence: Synthetic oligonucleotide
  Sense strand starting at position 897 of SEQ ID NO: 1562634
uaacuugcucggugaccuu

SEQ ID NO: 1761556 - RNA, 19 nt, Artificial Sequence
  Description of Artificial Sequence: Synthetic oligonucleotide
  Antisense strand to SEQ ID NO: 1761555
aaggucaccgagcaaguua

SEQ ID NO: 1761557 - RNA, 19 nt, Artificial Sequence
  Description of Artificial Sequence: Synthetic oligonucleotide
  Sense strand starting at position 1204 of SEQ ID NO: 1562634
ccuuaaauugcagggugua

SEQ ID NO: 1761558 - RNA, 19 nt, Artificial Sequence
  Description of Artificial Sequence: Synthetic oligonucleotide
  Antisense strand to SEQ ID NO: 1761557
uacacccugcaauuuaagg

SEQ ID NO: 1761559 - RNA, 19 nt, Artificial Sequence
  Description of Artificial Sequence: Synthetic oligonucleotide
  Sense strand starting at position 1205 of SEQ ID NO: 1562634
cuuaaauugcaggguguau

SEQ ID NO: 1761560 - RNA, 19 nt, Artificial Sequence
  Description of Artificial Sequence: Synthetic oligonucleotide
  Antisense strand to SEQ ID NO: 1761559
auacacccugcaauuuaag

SEQ ID NO: 1761561 - RNA, 19 nt, Artificial Sequence
  Description of Artificial Sequence: Synthetic oligonucleotide
  Sense strand starting at position 1569 of SEQ ID NO: 1562634
gugggauggcgcugaggau

SEQ ID NO: 1761562 - RNA, 19 nt, Artificial Sequence
  Description of Artificial Sequence: Synthetic oligonucleotide
  Antisense strand to SEQ ID NO: 1761561
auccucagcgccaucccac

SEQ ID NO: 1761563 - RNA, 19 nt, Artificial Sequence
  Description of Artificial Sequence: Synthetic oligonucleotide
  Sense strand starting at position 2378 of SEQ ID NO: 1562634
ggacgugauccuuaauacc

SEQ ID NO: 1761564 - RNA, 19 nt, Artificial Sequence
  Description of Artificial Sequence: Synthetic oligonucleotide
  Antisense strand to SEQ ID NO: 1761563
gguauuaaggaucacgucc

SEQ ID NO: 1761565 - RNA, 19 nt, Artificial Sequence
  Description of Artificial Sequence: Synthetic oligonucleotide
  Sense strand starting at position 2901 of SEQ ID NO: 1562634
aaccauuuguggcacgaga

SEQ ID NO: 1761566 - RNA, 19 nt, Artificial Sequence
  Description of Artificial Sequence: Synthetic oligonucleotide
  Antisense strand to SEQ ID NO: 1761565
ucucgugccacaaaugguu

SEQ ID NO: 1761567 - RNA, 19 nt, Artificial Sequence
  Description of Artificial Sequence: Synthetic oligonucleotide
  Sense strand starting at position 3160 of SEQ ID NO: 1562634
gugccagagugugcuucua

SEQ ID NO: 1761568 - RNA, 19 nt, Artificial Sequence
  Description of Artificial Sequence: Synthetic oligonucleotide
  Antisense strand to SEQ ID NO: 1761567
uagaagcacacucuggcac

SEQ ID NO: 1761569 - RNA, 19 nt, Artificial Sequence
  Description of Artificial Sequence: Synthetic oligonucleotide
  Sense strand starting at position 3162 of SEQ ID NO: 1562634
gccagagugugcuucuaaa

SEQ ID NO: 1761570 - RNA, 19 nt, Artificial Sequence
  Description of Artificial Sequence: Synthetic oligonucleotide
  Antisense strand to SEQ ID NO: 1761569
uuuagaagcacacucuggc

SEQ ID NO: 1761571 - RNA, 19 nt, Artificial Sequence
  Description of Artificial Sequence: Synthetic oligonucleotide
  Sense strand starting at position 3195 of SEQ ID NO: 1562634
gggucacccugugcuuaaa

SEQ ID NO: 1761572 - RNA, 19 nt, Artificial Sequence
  Description of Artificial Sequence: Synthetic oligonucleotide
  Antisense strand to SEQ ID NO: 1761571
uuuaagcacagggugaccc

SEQ ID NO: 1761573 - RNA, 19 nt, Artificial Sequence
  Description of Artificial Sequence: Synthetic oligonucleotide
  Sense strand starting at position 3253 of SEQ ID NO: 1562634
cucuuucuggcacauagaa

SEQ ID NO: 1761574 - RNA, 19 nt, Artificial Sequence
  Description of Artificial Sequence: Synthetic oligonucleotide
  Antisense strand to SEQ ID NO: 1761573
uucuaugugccagaaagag

SEQ ID NO: 1761575 - RNA, 19 nt, Artificial Sequence
  Description of Artificial Sequence: Synthetic oligonucleotide
  Sense strand starting at position 3376 of SEQ ID NO: 1562634
agaauuauguacccaguau

SEQ ID NO: 1761576 - RNA, 19 nt, Artificial Sequence
  Description of Artificial Sequence: Synthetic oligonucleotide
  Antisense strand to SEQ ID NO: 1761575
auacuggguacauaauucu

SEQ ID NO: 1761577 - RNA, 19 nt, Artificial Sequence
  Description of Artificial Sequence: Synthetic oligonucleotide
  Sense strand starting at position 3389 of SEQ ID NO: 1562634
caguaugaggcacauguau

SEQ ID NO: 1761578 - RNA, 19 nt, Artificial Sequence
  Description of Artificial Sequence: Synthetic oligonucleotide
  Antisense strand to SEQ ID NO: 1761577
auacaugugccucauacug

SEQ ID NO: 1761579 - RNA, 19 nt, Artificial Sequence
  Description of Artificial Sequence: Synthetic oligonucleotide
  Sense strand starting at position 3407 of SEQ ID NO: 1562634
uccagaacguaggugaaau

SEQ ID NO: 1761580 - RNA, 19 nt, Artificial Sequence
  Description of Artificial Sequence: Synthetic oligonucleotide
  Antisense strand to SEQ ID NO: 1761579
auuucaccuacguucugga

SEQ ID NO: 1761581 - RNA, 19 nt, Artificial Sequence
  Description of Artificial Sequence: Synthetic oligonucleotide
  Sense strand starting at position 3408 of SEQ ID NO: 1562634
ccagaacguaggugaaauc

SEQ ID NO: 1761582 - RNA, 19 nt, Artificial Sequence
  Description of Artificial Sequence: Synthetic oligonucleotide
  Antisense strand to SEQ ID NO: 1761581
gauuucaccuacguucugg

SEQ ID NO: 1761583 - RNA, 19 nt, Artificial Sequence
  Description of Artificial Sequence: Synthetic oligonucleotide
  Sense strand starting at position 3453 of SEQ ID NO: 1562634
agaguuugccacugguaga

SEQ ID NO: 1761584 - RNA, 19 nt, Artificial Sequence
  Description of Artificial Sequence: Synthetic oligonucleotide
  Antisense strand to SEQ ID NO: 1761583
ucuaccaguggcaaacucu

SEQ ID NO: 1761585 - RNA, 19 nt, Artificial Sequence
  Description of Artificial Sequence: Synthetic oligonucleotide
  Sense strand starting at position 3454 of SEQ ID NO: 1562634
gaguuugccacugguagac

SEQ ID NO: 1761586 - RNA, 19 nt, Artificial Sequence
  Description of Artificial Sequence: Synthetic oligonucleotide
  Antisense strand to SEQ ID NO: 1761585
gucuaccaguggcaaacuc

SEQ ID NO: 1761587 - RNA, 19 nt, Artificial Sequence
  Description of Artificial Sequence: Synthetic oligonucleotide
  Sense strand starting at position 3534 of SEQ ID NO: 1562634
gucugaugcaacugggaau

SEQ ID NO: 1761588 - RNA, 19 nt, Artificial Sequence
  Description of Artificial Sequence: Synthetic oligonucleotide
  Antisense strand to SEQ ID NO: 1761587
auucccaguugcaucagac

SEQ ID NO: 1761589 - RNA, 19 nt, Artificial Sequence
  Description of Artificial Sequence: Synthetic oligonucleotide
  Sense strand starting at position 3537 of SEQ ID NO: 1562634
ugaugcaacugggaauaaa

SEQ ID NO: 1761590 - RNA, 19 nt, Artificial Sequence
  Description of Artificial Sequence: Synthetic oligonucleotide
  Antisense strand to SEQ ID NO: 1761589
uuuauucccaguugcauca

SEQ ID NO: 1761591 - RNA, 19 nt, Artificial Sequence
  Description of Artificial Sequence: Synthetic oligonucleotide
  Sense strand starting at position 3636 of SEQ ID NO: 1562634
ggcauuuacuugggugaau

SEQ ID NO: 1761592 - RNA, 19 nt, Artificial Sequence
  Description of Artificial Sequence: Synthetic oligonucleotide
  Antisense strand to SEQ ID NO: 1761591
auucacccaaguaaaugcc

SEQ ID NO: 1761593 - RNA, 19 nt, Artificial Sequence
  Description of Artificial Sequence: Synthetic oligonucleotide
  Sense strand starting at position 3656 of SEQ ID NO: 1562634
gaguuaaaguguucuaaga

SEQ ID NO: 1761594 - RNA, 19 nt, Artificial Sequence
  Description of Artificial Sequence: Synthetic oligonucleotide
  Antisense strand to SEQ ID NO: 1761593
ucuuagaacacuuuaacuc

SEQ ID NO: 1761595 - RNA, 19 nt, Artificial Sequence
  Description of Artificial Sequence: Synthetic oligonucleotide
  Sense strand starting at position 3711 of SEQ ID NO: 1562634
ccaaauacacuuugacgaa

SEQ ID NO: 1761596 - RNA, 19 nt, Artificial Sequence
  Description of Artificial Sequence: Synthetic oligonucleotide
  Antisense strand to SEQ ID NO: 1761595
uucgucaaaguguauuugg

SEQ ID NO: 1761597 - RNA, 19 nt, Artificial Sequence
  Description of Artificial Sequence: Synthetic oligonucleotide
  Sense strand starting at position 3723 of SEQ ID NO: 1562634
ugacgaauuuaagaaucca

SEQ ID NO: 1761598 - RNA, 19 nt, Artificial Sequence
  Description of Artificial Sequence: Synthetic oligonucleotide
  Antisense strand to SEQ ID NO: 1761597
uggauucuuaaauucguca

SEQ ID NO: 1761599 - RNA, 19 nt, Artificial Sequence
  Description of Artificial Sequence: Synthetic oligonucleotide
  Sense strand starting at position 3744 of SEQ ID NO: 1562634
uugucauuacugggauaaa

SEQ ID NO: 1761600 - RNA, 19 nt, Artificial Sequence
  Description of Artificial Sequence: Synthetic oligonucleotide
  Antisense strand to SEQ ID NO: 1761599
uuuaucccaguaaugacaa

SEQ ID NO: 1761601 - RNA, 19 nt, Artificial Sequence
  Description of Artificial Sequence: Synthetic oligonucleotide
  Sense strand starting at position 3745 of SEQ ID NO: 1562634
ugucauuacugggauaaac

SEQ ID NO: 1761602 - RNA, 19 nt, Artificial Sequence
  Description of Artificial Sequence: Synthetic oligonucleotide
  Antisense strand to SEQ ID NO: 1761601
guuuaucccaguaaugaca

SEQ ID NO: 1761603 - RNA, 19 nt, Artificial Sequence
  Description of Artificial Sequence: Synthetic oligonucleotide
  Sense strand starting at position 3773 of SEQ ID NO: 1562634
cuggaaauacuguguauag

SEQ ID NO: 1761604 - RNA, 19 nt, Artificial Sequence
  Description of Artificial Sequence: Synthetic oligonucleotide
  Antisense strand to SEQ ID NO: 1761603
cuauacacaguauuuccag

SEQ ID NO: 1761605 - RNA, 19 nt, Artificial Sequence
  Description of Artificial Sequence: Synthetic oligonucleotide
  Sense strand starting at position 3774 of SEQ ID NO: 1562634
uggaaauacuguguauagu

SEQ ID NO: 1761606 - RNA, 19 nt, Artificial Sequence
  Description of Artificial Sequence: Synthetic oligonucleotide
  Antisense strand to SEQ ID NO: 1761605
acuauacacaguauuucca

SEQ ID NO: 1761607 - RNA, 19 nt, Artificial Sequence
  Description of Artificial Sequence: Synthetic oligonucleotide
  Sense strand starting at position 3775 of SEQ ID NO: 1562634
ggaaauacuguguauaguu

SEQ ID NO: 1761608 - RNA, 19 nt, Artificial Sequence
  Description of Artificial Sequence: Synthetic oligonucleotide
  Antisense strand to SEQ ID NO: 1761607
aacuauacacaguauuucc

SEQ ID NO: 1761609 - RNA, 19 nt, Artificial Sequence
  Description of Artificial Sequence: Synthetic oligonucleotide
  Sense strand starting at position 3780 of SEQ ID NO: 1562634
uacuguguauaguuaucca

SEQ ID NO: 1761610 - RNA, 19 nt, Artificial Sequence
  Description of Artificial Sequence: Synthetic oligonucleotide
  Antisense strand to SEQ ID NO: 1761609
uggauaacuauacacagua

SEQ ID NO: 1761611 - RNA, 19 nt, Artificial Sequence
  Description of Artificial Sequence: Synthetic oligonucleotide
  Sense strand starting at position 3783 of SEQ ID NO: 1562634
uguguauaguuauccaaau

SEQ ID NO: 1761612 - RNA, 19 nt, Artificial Sequence
  Description of Artificial Sequence: Synthetic oligonucleotide
  Antisense strand to SEQ ID NO: 1761611
auuuggauaacuauacaca

SEQ ID NO: 1761613 - RNA, 19 nt, Artificial Sequence
  Description of Artificial Sequence: Synthetic oligonucleotide
  Sense strand starting at position 3784 of SEQ ID NO: 1562634
guguauaguuauccaaauu

SEQ ID NO: 1761614 - RNA, 19 nt, Artificial Sequence
  Description of Artificial Sequence: Synthetic oligonucleotide
  Antisense strand to SEQ ID NO: 1761613
aauuuggauaacuauacac

SEQ ID NO: 1761615 - RNA, 19 nt, Artificial Sequence
  Description of Artificial Sequence: Synthetic oligonucleotide
  Sense strand starting at position 3843 of SEQ ID NO: 1562634
cuguaaagcaggcaagaau

SEQ ID NO: 1761616 - RNA, 19 nt, Artificial Sequence
  Description of Artificial Sequence: Synthetic oligonucleotide
  Antisense strand to SEQ ID NO: 1761615
auucuugccugcuuuacag

SEQ ID NO: 1761617 - RNA, 19 nt, Artificial Sequence
  Description of Artificial Sequence: Synthetic oligonucleotide
  Sense strand starting at position 3905 of SEQ ID NO: 1562634
agacgauagcuauaaauuc

SEQ ID NO: 1761618 - RNA, 19 nt, Artificial Sequence
  Description of Artificial Sequence: Synthetic oligonucleotide
  Antisense strand to SEQ ID NO: 1761617
gaauuuauagcuaucgucu

SEQ ID NO: 1761619 - RNA, 19 nt, Artificial Sequence
  Description of Artificial Sequence: Synthetic oligonucleotide
  Sense strand starting at position 382 of SEQ ID NO: 1562635
gcgccaguugucccagaua

SEQ ID NO: 1761620 - RNA, 19 nt, Artificial Sequence
  Description of Artificial Sequence: Synthetic oligonucleotide
  Antisense strand to SEQ ID NO: 1761619
uaucugggacaacuggcgc

SEQ ID NO: 1761621 - RNA, 19 nt, Artificial Sequence
  Description of Artificial Sequence: Synthetic oligonucleotide
  Sense strand starting at position 641 of SEQ ID NO: 1562635
aggucaaauugugacaauu

SEQ ID NO: 1761622 - RNA, 19 nt, Artificial Sequence
  Description of Artificial Sequence: Synthetic oligonucleotide
  Antisense strand to SEQ ID NO: 1761621
aauugucacaauuugaccu

SEQ ID NO: 1761623 - RNA, 19 nt, Artificial Sequence
  Description of Artificial Sequence: Synthetic oligonucleotide
  Sense strand starting at position 643 of SEQ ID NO: 1562635
gucaaauugugacaauuuc

SEQ ID NO: 1761624 - RNA, 19 nt, Artificial Sequence
  Description of Artificial Sequence: Synthetic oligonucleotide
  Antisense strand to SEQ ID NO: 1761623
gaaauugucacaauuugac

SEQ ID NO: 1761625 - RNA, 19 nt, Artificial Sequence
  Description of Artificial Sequence: Synthetic oligonucleotide
  Sense strand starting at position 1005 of SEQ ID NO: 1562635
ggagcugucauccauguau

SEQ ID NO: 1761626 - RNA, 19 nt, Artificial Sequence
  Description of Artificial Sequence: Synthetic oligonucleotide
  Antisense strand to SEQ ID NO: 1761625
auacauggaugacagcucc

SEQ ID NO: 1761627 - RNA, 19 nt, Artificial Sequence
  Description of Artificial Sequence: Synthetic oligonucleotide
  Sense strand starting at position 1007 of SEQ ID NO: 1562635
agcugucauccauguauua

SEQ ID NO: 1761628 - RNA, 19 nt, Artificial Sequence
  Description of Artificial Sequence: Synthetic oligonucleotide
  Antisense strand to SEQ ID NO: 1761627
uaauacauggaugacagcu

SEQ ID NO: 1761629 - RNA, 19 nt, Artificial Sequence
  Description of Artificial Sequence: Synthetic oligonucleotide
  Sense strand starting at position 1031 of SEQ ID NO: 1562635
gaggaagggucuggauuag

SEQ ID NO: 1761630 - RNA, 19 nt, Artificial Sequence
  Description of Artificial Sequence: Synthetic oligonucleotide
  Antisense strand to SEQ ID NO: 1761629
cuaauccagacccuuccuc

SEQ ID NO: 1761631 - RNA, 19 nt, Artificial Sequence
  Description of Artificial Sequence: Synthetic oligonucleotide
  Sense strand starting at position 1089 of SEQ ID NO: 1562635
agcugagauccugggauuc

SEQ ID NO: 1761632 - RNA, 19 nt, Artificial Sequence
  Description of Artificial Sequence: Synthetic oligonucleotide
  Antisense strand to SEQ ID NO: 1761631
gaaucccaggaucucagcu

SEQ ID NO: 1761633 - RNA, 19 nt, Artificial Sequence
  Description of Artificial Sequence: Synthetic oligonucleotide
  Sense strand starting at position 1156 of SEQ ID NO: 1562635
gcaaccuucuuucuaguga

SEQ ID NO: 1761634 - RNA, 19 nt, Artificial Sequence
  Description of Artificial Sequence: Synthetic oligonucleotide
  Antisense strand to SEQ ID NO: 1761633
ucacuagaaagaagguugc

SEQ ID NO: 1761635 - RNA, 19 nt, Artificial Sequence
  Description of Artificial Sequence: Synthetic oligonucleotide
  Sense strand starting at position 1293 of SEQ ID NO: 1562635
gcuucuuucuuugcacuga

SEQ ID NO: 1761636 - RNA, 19 nt, Artificial Sequence
  Description of Artificial Sequence: Synthetic oligonucleotide
  Antisense strand to SEQ ID NO: 1761635
ucagugcaaagaaagaagc

SEQ ID NO: 1761637 - RNA, 19 nt, Artificial Sequence
  Description of Artificial Sequence: Synthetic oligonucleotide
  Sense strand starting at position 1297 of SEQ ID NO: 1562635
cuuucuuugcacugaggaa

SEQ ID NO: 1761638 - RNA, 19 nt, Artificial Sequence
  Description of Artificial Sequence: Synthetic oligonucleotide
  Antisense strand to SEQ ID NO: 1761637
uuccucagugcaaagaaag

SEQ ID NO: 1761639 - RNA, 19 nt, Artificial Sequence
  Description of Artificial Sequence: Synthetic oligonucleotide
  Sense strand starting at position 1327 of SEQ ID NO: 1562635
ccuggcucacaagauguua

SEQ ID NO: 1761640 - RNA, 19 nt, Artificial Sequence
  Description of Artificial Sequence: Synthetic oligonucleotide
  Antisense strand to SEQ ID NO: 1761639
uaacaucuugugagccagg

SEQ ID NO: 1761641 - RNA, 19 nt, Artificial Sequence
  Description of Artificial Sequence: Synthetic oligonucleotide
  Sense strand starting at position 1399 of SEQ ID NO: 1562635
ggaagaggaucgaguaagu

SEQ ID NO: 1761642 - RNA, 19 nt, Artificial Sequence
  Description of Artificial Sequence: Synthetic oligonucleotide
  Antisense strand to SEQ ID NO: 1761641
acuuacucgauccucuucc

SEQ ID NO: 1761643 - RNA, 19 nt, Artificial Sequence
  Description of Artificial Sequence: Synthetic oligonucleotide
  Sense strand starting at position 1450 of SEQ ID NO: 1562635
aucacuaaucauuguguaa

SEQ ID NO: 1761644 - RNA, 19 nt, Artificial Sequence
  Description of Artificial Sequence: Synthetic oligonucleotide
  Antisense strand to SEQ ID NO: 1761643
uuacacaaugauuagugau

SEQ ID NO: 1761645 - RNA, 19 nt, Artificial Sequence
  Description of Artificial Sequence: Synthetic oligonucleotide
  Sense strand starting at position 1454 of SEQ ID NO: 1562635
cuaaucauuguguaaaggu

SEQ ID NO: 1761646 - RNA, 19 nt, Artificial Sequence
  Description of Artificial Sequence: Synthetic oligonucleotide
  Antisense strand to SEQ ID NO: 1761645
accuuuacacaaugauuag

SEQ ID NO: 1761647 - RNA, 19 nt, Artificial Sequence
  Description of Artificial Sequence: Synthetic oligonucleotide
  Sense strand starting at position 1625 of SEQ ID NO: 1562635
ggcugucggacucaaguaa

SEQ ID NO: 1761648 - RNA, 19 nt, Artificial Sequence
  Description of Artificial Sequence: Synthetic oligonucleotide
  Antisense strand to SEQ ID NO: 1761647
uuacuugaguccgacagcc

SEQ ID NO: 1761649 - RNA, 19 nt, Artificial Sequence
  Description of Artificial Sequence: Synthetic oligonucleotide
  Sense strand starting at position 2032 of SEQ ID NO: 1562635
gccucuaccaccgaggaaa

SEQ ID NO: 1761650 - RNA, 19 nt, Artificial Sequence
  Description of Artificial Sequence: Synthetic oligonucleotide
  Antisense strand to SEQ ID NO: 1761649
uuuccucggugguagaggc

SEQ ID NO: 1761651 - RNA, 19 nt, Artificial Sequence
  Description of Artificial Sequence: Synthetic oligonucleotide
  Sense strand starting at position 2095 of SEQ ID NO: 1562635
cccagaaacuccgugaauc

SEQ ID NO: 1761652 - RNA, 19 nt, Artificial Sequence
  Description of Artificial Sequence: Synthetic oligonucleotide
  Antisense strand to SEQ ID NO: 1761651
gauucacggaguuucuggg

SEQ ID NO: 1761653 - RNA, 19 nt, Artificial Sequence
  Description of Artificial Sequence: Synthetic oligonucleotide
  Sense strand starting at position 2096 of SEQ ID NO: 1562635
ccagaaacuccgugaauca

SEQ ID NO: 1761654 - RNA, 19 nt, Artificial Sequence
  Description of Artificial Sequence: Synthetic oligonucleotide
  Antisense strand to SEQ ID NO: 1761653
ugauucacggaguuucugg

SEQ ID NO: 1761655 - RNA, 19 nt, Artificial Sequence
  Description of Artificial Sequence: Synthetic oligonucleotide
  Sense strand starting at position 2106 of SEQ ID NO: 1562635
cgugaaucaccucgggaua

SEQ ID NO: 1761656 - RNA, 19 nt, Artificial Sequence
  Description of Artificial Sequence: Synthetic oligonucleotide
  Antisense strand to SEQ ID NO: 1761655
uaucccgaggugauucacg

SEQ ID NO: 1761657 - RNA, 19 nt, Artificial Sequence
  Description of Artificial Sequence: Synthetic oligonucleotide
  Sense strand starting at position 2107 of SEQ ID NO: 1562635
gugaaucaccucgggauag

SEQ ID NO: 1761658 - RNA, 19 nt, Artificial Sequence
  Description of Artificial Sequence: Synthetic oligonucleotide
  Antisense strand to SEQ ID NO: 1761657
cuaucccgaggugauucac

SEQ ID NO: 1761659 - RNA, 19 nt, Artificial Sequence
  Description of Artificial Sequence: Synthetic oligonucleotide
  Sense strand starting at position 2109 of SEQ ID NO: 1562635
gaaucaccucgggauagca

SEQ ID NO: 1761660 - RNA, 19 nt, Artificial Sequence
  Description of Artificial Sequence: Synthetic oligonucleotide
  Antisense strand to SEQ ID NO: 1761659
ugcuaucccgaggugauuc

SEQ ID NO: 1761661 - RNA, 19 nt, Artificial Sequence
  Description of Artificial Sequence: Synthetic oligonucleotide
  Sense strand starting at position 2118 of SEQ ID NO: 1562635
cgggauagcaaacggauua

SEQ ID NO: 1761662 - RNA, 19 nt, Artificial Sequence
  Description of Artificial Sequence: Synthetic oligonucleotide
  Antisense strand to SEQ ID NO: 1761661
uaauccguuugcuaucccg

SEQ ID NO: 1761663 - RNA, 19 nt, Artificial Sequence
  Description of Artificial Sequence: Synthetic oligonucleotide
  Sense strand starting at position 2119 of SEQ ID NO: 1562635
gggauagcaaacggauuau

SEQ ID NO: 1761664 - RNA, 19 nt, Artificial Sequence
  Description of Artificial Sequence: Synthetic oligonucleotide
  Antisense strand to SEQ ID NO: 1761663
auaauccguuugcuauccc

SEQ ID NO: 1761665 - RNA, 19 nt, Artificial Sequence
  Description of Artificial Sequence: Synthetic oligonucleotide
  Sense strand starting at position 2230 of SEQ ID NO: 1562635
cccggcugucaccauagaa

SEQ ID NO: 1761666 - RNA, 19 nt, Artificial Sequence
  Description of Artificial Sequence: Synthetic oligonucleotide
  Antisense strand to SEQ ID NO: 1761665
uucuauggugacagccggg

SEQ ID NO: 1761667 - RNA, 19 nt, Artificial Sequence
  Description of Artificial Sequence: Synthetic oligonucleotide
  Sense strand starting at position 2291 of SEQ ID NO: 1562635
uguuaugcuaaacgggaaa

SEQ ID NO: 1761668 - RNA, 19 nt, Artificial Sequence
  Description of Artificial Sequence: Synthetic oligonucleotide
  Antisense strand to SEQ ID NO: 1761667
uuucccguuuagcauaaca

SEQ ID NO: 1761669 - RNA, 19 nt, Artificial Sequence
  Description of Artificial Sequence: Synthetic oligonucleotide
  Sense strand starting at position 2321 of SEQ ID NO: 1562635
gccggcguugccuagagaa

SEQ ID NO: 1761670 - RNA, 19 nt, Artificial Sequence
  Description of Artificial Sequence: Synthetic oligonucleotide
  Antisense strand to SEQ ID NO: 1761669
uucucuaggcaacgccggc

SEQ ID NO: 1761671 - RNA, 19 nt, Artificial Sequence
  Description of Artificial Sequence: Synthetic oligonucleotide
  Sense strand starting at position 2593 of SEQ ID NO: 1562635
gccguuauggcggcuucua

SEQ ID NO: 1761672 - RNA, 19 nt, Artificial Sequence
  Description of Artificial Sequence: Synthetic oligonucleotide
  Antisense strand to SEQ ID NO: 1761671
uagaagccgccauaacggc

SEQ ID NO: 1761673 - RNA, 19 nt, Artificial Sequence
  Description of Artificial Sequence: Synthetic oligonucleotide
  Sense strand starting at position 2722 of SEQ ID NO: 1562635
guuauugguuccgucugau

SEQ ID NO: 1761674 - RNA, 19 nt, Artificial Sequence
  Description of Artificial Sequence: Synthetic oligonucleotide
  Antisense strand to SEQ ID NO: 1761673
aucagacggaaccaauaac

SEQ ID NO: 1761675 - RNA, 19 nt, Artificial Sequence
  Description of Artificial Sequence: Synthetic oligonucleotide
  Sense strand starting at position 2725 of SEQ ID NO: 1562635
auugguuccgucugauaag

SEQ ID NO: 1761676 - RNA, 19 nt, Artificial Sequence
  Description of Artificial Sequence: Synthetic oligonucleotide
  Antisense strand to SEQ ID NO: 1761675
cuuaucagacggaaccaau

SEQ ID NO: 1761677 - RNA, 19 nt, Artificial Sequence
  Description of Artificial Sequence: Synthetic oligonucleotide
  Sense strand starting at position 2732 of SEQ ID NO: 1562635
ccgucugauaagugcagaa

SEQ ID NO: 1761678 - RNA, 19 nt, Artificial Sequence
  Description of Artificial Sequence: Synthetic oligonucleotide
  Antisense strand to SEQ ID NO: 1761677
uucugcacuuaucagacgg

SEQ ID NO: 1761679 - RNA, 19 nt, Artificial Sequence
  Description of Artificial Sequence: Synthetic oligonucleotide
  Sense strand starting at position 2734 of SEQ ID NO: 1562635
gucugauaagugcagaaac

SEQ ID NO: 1761680 - RNA, 19 nt, Artificial Sequence
  Description of Artificial Sequence: Synthetic oligonucleotide
  Antisense strand to SEQ ID NO: 1761679
guuucugcacuuaucagac

SEQ ID NO: 1761681 - RNA, 19 nt, Artificial Sequence
  Description of Artificial Sequence: Synthetic oligonucleotide
  Sense strand starting at position 2736 of SEQ ID NO: 1562635
cugauaagugcagaaacuu

SEQ ID NO: 1761682 - RNA, 19 nt, Artificial Sequence
  Description of Artificial Sequence: Synthetic oligonucleotide
  Antisense strand to SEQ ID NO: 1761681
aaguuucugcacuuaucag

SEQ ID NO: 1761683 - RNA, 19 nt, Artificial Sequence
  Description of Artificial Sequence: Synthetic oligonucleotide
  Sense strand starting at position 2838 of SEQ ID NO: 1562635
aagcgcaguucucuuccaa

SEQ ID NO: 1761684 - RNA, 19 nt, Artificial Sequence
  Description of Artificial Sequence: Synthetic oligonucleotide
  Antisense strand to SEQ ID NO: 1761683
uuggaagagaacugcgcuu

SEQ ID NO: 1761685 - RNA, 19 nt, Artificial Sequence
  Description of Artificial Sequence: Synthetic oligonucleotide
  Sense strand starting at position 2881 of SEQ ID NO: 1562635
gggagacuuccauguccua

SEQ ID NO: 1761686 - RNA, 19 nt, Artificial Sequence
  Description of Artificial Sequence: Synthetic oligonucleotide
  Antisense strand to SEQ ID NO: 1761685
uaggacauggaagucuccc

SEQ ID NO: 1761687 - RNA, 19 nt, Artificial Sequence
  Description of Artificial Sequence: Synthetic oligonucleotide
  Sense strand starting at position 2884 of SEQ ID NO: 1562635
agacuuccauguccuagaa

SEQ ID NO: 1761688 - RNA, 19 nt, Artificial Sequence
  Description of Artificial Sequence: Synthetic oligonucleotide
  Antisense strand to SEQ ID NO: 1761687
uucuaggacauggaagucu

SEQ ID NO: 1761689 - RNA, 19 nt, Artificial Sequence
  Description of Artificial Sequence: Synthetic oligonucleotide
  Sense strand starting at position 2919 of SEQ ID NO: 1562635
cuggcuuagcauugugcaa

SEQ ID NO: 1761690 - RNA, 19 nt, Artificial Sequence
  Description of Artificial Sequence: Synthetic oligonucleotide
  Antisense strand to SEQ ID NO: 1761689
uugcacaaugcuaagccag

SEQ ID NO: 1761691 - RNA, 19 nt, Artificial Sequence
  Description of Artificial Sequence: Synthetic oligonucleotide
  Sense strand starting at position 2923 of SEQ ID NO: 1562635
cuuagcauugugcaauaga

SEQ ID NO: 1761692 - RNA, 19 nt, Artificial Sequence
  Description of Artificial Sequence: Synthetic oligonucleotide
  Antisense strand to SEQ ID NO: 1761691
ucuauugcacaaugcuaag

SEQ ID NO: 1761693 - RNA, 19 nt, Artificial Sequence
  Description of Artificial Sequence: Synthetic oligonucleotide
  Sense strand starting at position 2950 of SEQ ID NO: 1562635
gcaggccacauaugugauu

SEQ ID NO: 1761694 - RNA, 19 nt, Artificial Sequence
  Description of Artificial Sequence: Synthetic oligonucleotide
  Antisense strand to SEQ ID NO: 1761693
aaucacauauguggccugc

SEQ ID NO: 1761695 - RNA, 19 nt, Artificial Sequence
  Description of Artificial Sequence: Synthetic oligonucleotide
  Sense strand starting at position 3206 of SEQ ID NO: 1562635
agcgauucugcuguguuca

SEQ ID NO: 1761696 - RNA, 19 nt, Artificial Sequence
  Description of Artificial Sequence: Synthetic oligonucleotide
  Antisense strand to SEQ ID NO: 1761695
ugaacacagcagaaucgcu

SEQ ID NO: 1761697 - RNA, 19 nt, Artificial Sequence
  Description of Artificial Sequence: Synthetic oligonucleotide
  Sense strand starting at position 3445 of SEQ ID NO: 1562635
cuguucuaucuauggagua

SEQ ID NO: 1761698 - RNA, 19 nt, Artificial Sequence
  Description of Artificial Sequence: Synthetic oligonucleotide
  Antisense strand to SEQ ID NO: 1761697
uacuccauagauagaacag

SEQ ID NO: 1761699 - RNA, 19 nt, Artificial Sequence
  Description of Artificial Sequence: Synthetic oligonucleotide
  Sense strand starting at position 104 of SEQ ID NO: 1562636
ugaggccuuucugcagaaa

SEQ ID NO: 1761700 - RNA, 19 nt, Artificial Sequence
  Description of Artificial Sequence: Synthetic oligonucleotide
  Antisense strand to SEQ ID NO: 1761699
uuucugcagaaaggccuca

SEQ ID NO: 1761701 - RNA, 19 nt, Artificial Sequence
  Description of Artificial Sequence: Synthetic oligonucleotide
  Sense strand starting at position 105 of SEQ ID NO: 1562636
gaggccuuucugcagaaag

SEQ ID NO: 1761702 - RNA, 19 nt, Artificial Sequence
  Description of Artificial Sequence: Synthetic oligonucleotide
  Antisense strand to SEQ ID NO: 1761701
cuuucugcagaaaggccuc

SEQ ID NO: 1761703 - RNA, 19 nt, Artificial Sequence
  Description of Artificial Sequence: Synthetic oligonucleotide
  Sense strand starting at position 107 of SEQ ID NO: 1562636
ggccuuucugcagaaagag

SEQ ID NO: 1761704 - RNA, 19 nt, Artificial Sequence
  Description of Artificial Sequence: Synthetic oligonucleotide
  Antisense strand to SEQ ID NO: 1761703
cucuuucugcagaaaggcc

SEQ ID NO: 1761705 - RNA, 19 nt, Artificial Sequence
  Description of Artificial Sequence: Synthetic oligonucleotide
  Sense strand starting at position 123 of SEQ ID NO: 1562636
gagggugacucugugaagu

SEQ ID NO: 1761706 - RNA, 19 nt, Artificial Sequence
  Description of Artificial Sequence: Synthetic oligonucleotide
  Antisense strand to SEQ ID NO: 1761705
acuucacagagucacccuc

SEQ ID NO: 1761707 - RNA, 19 nt, Artificial Sequence
  Description of Artificial Sequence: Synthetic oligonucleotide
  Sense strand starting at position 931 of SEQ ID NO: 1562636
gccugaugccagugugcaa

SEQ ID NO: 1761708 - RNA, 19 nt, Artificial Sequence
  Description of Artificial Sequence: Synthetic oligonucleotide
  Antisense strand to SEQ ID NO: 1761707
uugcacacuggcaucaggc

SEQ ID NO: 1761709 - RNA, 19 nt, Artificial Sequence
  Description of Artificial Sequence: Synthetic oligonucleotide
  Sense strand starting at position 1070 of SEQ ID NO: 1562636
gccugcuucugcccugaca

SEQ ID NO: 1761710 - RNA, 19 nt, Artificial Sequence
  Description of Artificial Sequence: Synthetic oligonucleotide
  Antisense strand to SEQ ID NO: 1761709
ugucagggcagaagcaggc

SEQ ID NO: 1761711 - RNA, 19 nt, Artificial Sequence
  Description of Artificial Sequence: Synthetic oligonucleotide
  Sense strand starting at position 1107 of SEQ ID NO: 1562636
caugaaucucucggagucu

SEQ ID NO: 1761712 - RNA, 19 nt, Artificial Sequence
  Description of Artificial Sequence: Synthetic oligonucleotide
  Antisense strand to SEQ ID NO: 1761711
agacuccgagagauucaug

SEQ ID NO: 1761713 - RNA, 19 nt, Artificial Sequence
  Description of Artificial Sequence: Synthetic oligonucleotide
  Sense strand starting at position 1155 of SEQ ID NO: 1562636
aggccaucccuguauccau

SEQ ID NO: 1761714 - RNA, 19 nt, Artificial Sequence
  Description of Artificial Sequence: Synthetic oligonucleotide
  Antisense strand to SEQ ID NO: 1761713
auggauacagggauggccu

SEQ ID NO: 1761715 - RNA, 19 nt, Artificial Sequence
  Description of Artificial Sequence: Synthetic oligonucleotide
  Sense strand starting at position 1197 of SEQ ID NO: 1562636
aggucuugagugcagacaa

SEQ ID NO: 1761716 - RNA, 19 nt, Artificial Sequence
  Description of Artificial Sequence: Synthetic oligonucleotide
  Antisense strand to SEQ ID NO: 1761715
uugucugcacucaagaccu

SEQ ID NO: 1761717 - RNA, 19 nt, Artificial Sequence
  Description of Artificial Sequence: Synthetic oligonucleotide
  Sense strand starting at position 1223 of SEQ ID NO: 1562636
ggucuugagcccugugcua

SEQ ID NO: 1761718 - RNA, 19 nt, Artificial Sequence
  Description of Artificial Sequence: Synthetic oligonucleotide
  Antisense strand to SEQ ID NO: 1761717
uagcacagggcucaagacc

SEQ ID NO: 1761719 - RNA, 19 nt, Artificial Sequence
  Description of Artificial Sequence: Synthetic oligonucleotide
  Sense strand starting at position 1245 of SEQ ID NO: 1562636
gggccuguuucuccaacuu

SEQ ID NO: 1761720 - RNA, 19 nt, Artificial Sequence
  Description of Artificial Sequence: Synthetic oligonucleotide
  Antisense strand to SEQ ID NO: 1761719
aaguuggagaaacaggccc

SEQ ID NO: 1761721 - RNA, 19 nt, Artificial Sequence
  Description of Artificial Sequence: Synthetic oligonucleotide
  Sense strand starting at position 1359 of SEQ ID NO: 1562636
aaugaaauugagugugaca

SEQ ID NO: 1761722 - RNA, 19 nt, Artificial Sequence
  Description of Artificial Sequence: Synthetic oligonucleotide
  Antisense strand to SEQ ID NO: 1761721
ugucacacucaauuucauu

SEQ ID NO: 1761723 - RNA, 19 nt, Artificial Sequence
  Description of Artificial Sequence: Synthetic oligonucleotide
  Sense strand starting at position 1849 of SEQ ID NO: 1562636
gguggaaucgcugaggaca

SEQ ID NO: 1761724 - RNA, 19 nt, Artificial Sequence
  Description of Artificial Sequence: Synthetic oligonucleotide
  Antisense strand to SEQ ID NO: 1761723
uguccucagcgauuccacc

SEQ ID NO: 1761725 - RNA, 19 nt, Artificial Sequence
  Description of Artificial Sequence: Synthetic oligonucleotide
  Sense strand starting at position 1863 of SEQ ID NO: 1562636
ggacaauccugucuccgau

SEQ ID NO: 1761726 - RNA, 19 nt, Artificial Sequence
  Description of Artificial Sequence: Synthetic oligonucleotide
  Antisense strand to SEQ ID NO: 1761725
aucggagacaggauugucc

SEQ ID NO: 1761727 - RNA, 19 nt, Artificial Sequence
  Description of Artificial Sequence: Synthetic oligonucleotide
  Sense strand starting at position 1875 of SEQ ID NO: 1562636
cuccgaucaucuuuggauc

SEQ ID NO: 1761728 - RNA, 19 nt, Artificial Sequence
  Description of Artificial Sequence: Synthetic oligonucleotide
  Antisense strand to SEQ ID NO: 1761727
gauccaaagaugaucggag

SEQ ID NO: 1761729 - RNA, 19 nt, Artificial Sequence
  Description of Artificial Sequence: Synthetic oligonucleotide
  Sense strand starting at position 2085 of SEQ ID NO: 1562636
ccucauugguucuuaccga

SEQ ID NO: 1761730 - RNA, 19 nt, Artificial Sequence
  Description of Artificial Sequence: Synthetic oligonucleotide
  Antisense strand to SEQ ID NO: 1761729
ucgguaagaaccaaugagg

SEQ ID NO: 1761731 - RNA, 19 nt, Artificial Sequence
  Description of Artificial Sequence: Synthetic oligonucleotide
  Sense strand starting at position 2277 of SEQ ID NO: 1562636
gggcuaggcucuuugaucu

SEQ ID NO: 1761732 - RNA, 19 nt, Artificial Sequence
  Description of Artificial Sequence: Synthetic oligonucleotide
  Antisense strand to SEQ ID NO: 1761731
agaucaaagagccuagccc

SEQ ID NO: 1761733 - RNA, 19 nt, Artificial Sequence
  Description of Artificial Sequence: Synthetic oligonucleotide
  Sense strand starting at position 2568 of SEQ ID NO: 1562636
gcauuagucccacacugua

SEQ ID NO: 1761734 - RNA, 19 nt, Artificial Sequence
  Description of Artificial Sequence: Synthetic oligonucleotide
  Antisense strand to SEQ ID NO: 1761733
uacagugugggacuaaugc

SEQ ID NO: 1761735 - RNA, 19 nt, Artificial Sequence
  Description of Artificial Sequence: Synthetic oligonucleotide
  Sense strand starting at position 2583 of SEQ ID NO: 1562636
uguaaaugggcuugagugu

SEQ ID NO: 1761736 - RNA, 19 nt, Artificial Sequence
  Description of Artificial Sequence: Synthetic oligonucleotide
  Antisense strand to SEQ ID NO: 1761735
acacucaagcccauuuaca

SEQ ID NO: 1761737 - RNA, 19 nt, Artificial Sequence
  Description of Artificial Sequence: Synthetic oligonucleotide
  Sense strand starting at position 2584 of SEQ ID NO: 1562636
guaaaugggcuugaguguu

SEQ ID NO: 1761738 - RNA, 19 nt, Artificial Sequence
  Description of Artificial Sequence: Synthetic oligonucleotide
  Antisense strand to SEQ ID NO: 1761737
aacacucaagcccauuuac

SEQ ID NO: 1761739 - RNA, 19 nt, Artificial Sequence
  Description of Artificial Sequence: Synthetic oligonucleotide
  Sense strand starting at position 2590 of SEQ ID NO: 1562636
gggcuugaguguucuucca

SEQ ID NO: 1761740 - RNA, 19 nt, Artificial Sequence
  Description of Artificial Sequence: Synthetic oligonucleotide
  Antisense strand to SEQ ID NO: 1761739
uggaagaacacucaagccc

SEQ ID NO: 1761741 - RNA, 19 nt, Artificial Sequence
  Description of Artificial Sequence: Synthetic oligonucleotide
  Sense strand starting at position 2592 of SEQ ID NO: 1562636
gcuugaguguucuuccaau

SEQ ID NO: 1761742 - RNA, 19 nt, Artificial Sequence
  Description of Artificial Sequence: Synthetic oligonucleotide
  Antisense strand to SEQ ID NO: 1761741
auuggaagaacacucaagc

SEQ ID NO: 1761743 - RNA, 19 nt, Artificial Sequence
  Description of Artificial Sequence: Synthetic oligonucleotide
  Sense strand starting at position 2598 of SEQ ID NO: 1562636
guguucuuccaauauggga

SEQ ID NO: 1761744 - RNA, 19 nt, Artificial Sequence
  Description of Artificial Sequence: Synthetic oligonucleotide
  Antisense strand to SEQ ID NO: 1761743
ucccauauuggaagaacac

SEQ ID NO: 1761745 - RNA, 19 nt, Artificial Sequence
  Description of Artificial Sequence: Synthetic oligonucleotide
  Sense strand starting at position 2611 of SEQ ID NO: 1562636
augggaguaugggauucaa

SEQ ID NO: 1761746 - RNA, 19 nt, Artificial Sequence
  Description of Artificial Sequence: Synthetic oligonucleotide
  Antisense strand to SEQ ID NO: 1761745
uugaaucccauacucccau

SEQ ID NO: 1761747 - RNA, 19 nt, Artificial Sequence
  Description of Artificial Sequence: Synthetic oligonucleotide
  Sense strand starting at position 2666 of SEQ ID NO: 1562636
agccuuguguauucuuuaa

SEQ ID NO: 1761748 - RNA, 19 nt, Artificial Sequence
  Description of Artificial Sequence: Synthetic oligonucleotide
  Antisense strand to SEQ ID NO: 1761747
uuaaagaauacacaaggcu

SEQ ID NO: 1761749 - RNA, 19 nt, Artificial Sequence
  Description of Artificial Sequence: Synthetic oligonucleotide
  Sense strand starting at position 2668 of SEQ ID NO: 1562636
ccuuguguauucuuuaauu

SEQ ID NO: 1761750 - RNA, 19 nt, Artificial Sequence
  Description of Artificial Sequence: Synthetic oligonucleotide
  Antisense strand to SEQ ID NO: 1761749
aauuaaagaauacacaagg

SEQ ID NO: 1761751 - RNA, 19 nt, Artificial Sequence
  Description of Artificial Sequence: Synthetic oligonucleotide
  Sense strand starting at position 2906 of SEQ ID NO: 1562636
ucucgauucccugaucuug

SEQ ID NO: 1761752 - RNA, 19 nt, Artificial Sequence
  Description of Artificial Sequence: Synthetic oligonucleotide
  Antisense strand to SEQ ID NO: 1761751
caagaucagggaaucgaga

SEQ ID NO: 1761753 - RNA, 19 nt, Artificial Sequence
  Description of Artificial Sequence: Synthetic oligonucleotide
  Sense strand starting at position 3085 of SEQ ID NO: 1562636
ugaauucugccacgcccua

SEQ ID NO: 1761754 - RNA, 19 nt, Artificial Sequence
  Description of Artificial Sequence: Synthetic oligonucleotide
  Antisense strand to SEQ ID NO: 1761753
uagggcguggcagaauuca

SEQ ID NO: 1761755 - RNA, 19 nt, Artificial Sequence
  Description of Artificial Sequence: Synthetic oligonucleotide
  Sense strand starting at position 3311 of SEQ ID NO: 1562636
aucagcuuccaguggagaa

SEQ ID NO: 1761756 - RNA, 19 nt, Artificial Sequence
  Description of Artificial Sequence: Synthetic oligonucleotide
  Antisense strand to SEQ ID NO: 1761755
uucuccacuggaagcugau

SEQ ID NO: 1761757 - RNA, 19 nt, Artificial Sequence
  Description of Artificial Sequence: Synthetic oligonucleotide
  Sense strand starting at position 3336 of SEQ ID NO: 1562636
uugguugaggucugacaau

SEQ ID NO: 1761758 - RNA, 19 nt, Artificial Sequence
  Description of Artificial Sequence: Synthetic oligonucleotide
  Antisense strand to SEQ ID NO: 1761757
auugucagaccucaaccaa

SEQ ID NO: 1761759 - RNA, 19 nt, Artificial Sequence
  Description of Artificial Sequence: Synthetic oligonucleotide
  Sense strand starting at position 3402 of SEQ ID NO: 1562636
gaaggacucuaugaggcuu

SEQ ID NO: 1761760 - RNA, 19 nt, Artificial Sequence
  Description of Artificial Sequence: Synthetic oligonucleotide
  Antisense strand to SEQ ID NO: 1761759
aagccucauagaguccuuc

SEQ ID NO: 1761761 - RNA, 19 nt, Artificial Sequence
  Description of Artificial Sequence: Synthetic oligonucleotide
  Sense strand starting at position 3426 of SEQ ID NO: 1562636
ccucacaugccucacgaaa

SEQ ID NO: 1761762 - RNA, 19 nt, Artificial Sequence
  Description of Artificial Sequence: Synthetic oligonucleotide
  Antisense strand to SEQ ID NO: 1761761
uuucgugaggcaugugagg

SEQ ID NO: 1761763 - RNA, 19 nt, Artificial Sequence
  Description of Artificial Sequence: Synthetic oligonucleotide
  Sense strand starting at position 3540 of SEQ ID NO: 1562636
aggugugagguucagucuu

SEQ ID NO: 1761764 - RNA, 19 nt, Artificial Sequence
  Description of Artificial Sequence: Synthetic oligonucleotide
  Antisense strand to SEQ ID NO: 1761763
aagacugaaccucacaccu

SEQ ID NO: 1761765 - RNA, 19 nt, Artificial Sequence
  Description of Artificial Sequence: Synthetic oligonucleotide
  Sense strand starting at position 3542 of SEQ ID NO: 1562636
gugugagguucagucuuag

SEQ ID NO: 1761766 - RNA, 19 nt, Artificial Sequence
  Description of Artificial Sequence: Synthetic oligonucleotide
  Antisense strand to SEQ ID NO: 1761765
cuaagacugaaccucacac

SEQ ID NO: 1761767 - RNA, 19 nt, Artificial Sequence
  Description of Artificial Sequence: Synthetic oligonucleotide
  Sense strand starting at position 3664 of SEQ ID NO: 1562636
ccacacuuuccaugggaaa

SEQ ID NO: 1761768 - RNA, 19 nt, Artificial Sequence
  Description of Artificial Sequence: Synthetic oligonucleotide
  Antisense strand to SEQ ID NO: 1761767
uuucccauggaaagugugg

SEQ ID NO: 1761769 - RNA, 19 nt, Artificial Sequence
  Description of Artificial Sequence: Synthetic oligonucleotide
  Sense strand starting at position 3693 of SEQ ID NO: 1562636
gucacauugcaauggaaac

SEQ ID NO: 1761770 - RNA, 19 nt, Artificial Sequence
  Description of Artificial Sequence: Synthetic oligonucleotide
  Antisense strand to SEQ ID NO: 1761769
guuuccauugcaaugugac

SEQ ID NO: 1761771 - RNA, 19 nt, Artificial Sequence
  Description of Artificial Sequence: Synthetic oligonucleotide
  Sense strand starting at position 3783 of SEQ ID NO: 1562636
cagugaaguuaugaaugua

SEQ ID NO: 1761772 - RNA, 19 nt, Artificial Sequence
  Description of Artificial Sequence: Synthetic oligonucleotide
  Antisense strand to SEQ ID NO: 1761771
uacauucauaacuucacug

SEQ ID NO: 1761773 - RNA, 19 nt, Artificial Sequence
  Description of Artificial Sequence: Synthetic oligonucleotide
  Sense strand starting at position 3857 of SEQ ID NO: 1562636
aaugaagccuuaguguaua

SEQ ID NO: 1761774 - RNA, 19 nt, Artificial Sequence
  Description of Artificial Sequence: Synthetic oligonucleotide
  Antisense strand to SEQ ID NO: 1761773
uauacacuaaggcuucauu

SEQ ID NO: 1761775 - RNA, 19 nt, Artificial Sequence
  Description of Artificial Sequence: Synthetic oligonucleotide
  Sense strand starting at position 3889 of SEQ ID NO: 1562636
uuucuuagugucuagagcu

SEQ ID NO: 1761776 - RNA, 19 nt, Artificial Sequence
  Description of Artificial Sequence: Synthetic oligonucleotide
  Antisense strand to SEQ ID NO: 1761775
agcucuagacacuaagaaa

SEQ ID NO: 1761777 - RNA, 19 nt, Artificial Sequence
  Description of Artificial Sequence: Synthetic oligonucleotide
  Sense strand starting at position 3896 of SEQ ID NO: 1562636
gugucuagagcucaagaaa

SEQ ID NO: 1761778 - RNA, 19 nt, Artificial Sequence
  Description of Artificial Sequence: Synthetic oligonucleotide
  Antisense strand to SEQ ID NO: 1761777
uuucuugagcucuagacac

SEQ ID NO: 1761779 - RNA, 19 nt, Artificial Sequence
  Description of Artificial Sequence: Synthetic oligonucleotide
  Sense strand starting at position 644 of SEQ ID NO: 1562637
uuacuuugugcauguaaua

SEQ ID NO: 1761780 - RNA, 19 nt, Artificial Sequence
  Description of Artificial Sequence: Synthetic oligonucleotide
  Antisense strand to SEQ ID NO: 1761779
uauuacaugcacaaaguaa

SEQ ID NO: 1761781 - RNA, 19 nt, Artificial Sequence
  Description of Artificial Sequence: Synthetic oligonucleotide
  Sense strand starting at position 686 of SEQ ID NO: 1562637
auuacaacuuguuauagag

SEQ ID NO: 1761782 - RNA, 19 nt, Artificial Sequence
  Description of Artificial Sequence: Synthetic oligonucleotide
  Antisense strand to SEQ ID NO: 1761781
cucuauaacaaguuguaau

SEQ ID NO: 1761783 - RNA, 19 nt, Artificial Sequence
  Description of Artificial Sequence: Synthetic oligonucleotide
  Sense strand starting at position 766 of SEQ ID NO: 1562637
gucacuaauuucugugucu

SEQ ID NO: 1761784 - RNA, 19 nt, Artificial Sequence
  Description of Artificial Sequence: Synthetic oligonucleotide
  Antisense strand to SEQ ID NO: 1761783
agacacagaaauuagugac

SEQ ID NO: 1761785 - RNA, 19 nt, Artificial Sequence
  Description of Artificial Sequence: Synthetic oligonucleotide
  Sense strand starting at position 780 of SEQ ID NO: 1562637
ugucucuuuccagagacac

SEQ ID NO: 1761786 - RNA, 19 nt, Artificial Sequence
  Description of Artificial Sequence: Synthetic oligonucleotide
  Antisense strand to SEQ ID NO: 1761785
gugucucuggaaagagaca

SEQ ID NO: 1761787 - RNA, 19 nt, Artificial Sequence
  Description of Artificial Sequence: Synthetic oligonucleotide
  Sense strand starting at position 860 of SEQ ID NO: 1562637
gugaccacagagugaauaa

SEQ ID NO: 1761788 - RNA, 19 nt, Artificial Sequence
  Description of Artificial Sequence: Synthetic oligonucleotide
  Antisense strand to SEQ ID NO: 1761787
uuauucacucuguggucac

SEQ ID NO: 1761789 - RNA, 19 nt, Artificial Sequence
  Description of Artificial Sequence: Synthetic oligonucleotide
  Sense strand starting at position 970 of SEQ ID NO: 1562637
ucagucaauuaagaaaugu

SEQ ID NO: 1761790 - RNA, 19 nt, Artificial Sequence
  Description of Artificial Sequence: Synthetic oligonucleotide
  Antisense strand to SEQ ID NO: 1761789
acauuucuuaauugacuga

SEQ ID NO: 1761791 - RNA, 19 nt, Artificial Sequence
  Description of Artificial Sequence: Synthetic oligonucleotide
  Sense strand starting at position 979 of SEQ ID NO: 1562637
uaagaaauguacucgagcu

SEQ ID NO: 1761792 - RNA, 19 nt, Artificial Sequence
  Description of Artificial Sequence: Synthetic oligonucleotide
  Antisense strand to SEQ ID NO: 1761791
agcucgaguacauuucuua

SEQ ID NO: 1761793 - RNA, 19 nt, Artificial Sequence
  Description of Artificial Sequence: Synthetic oligonucleotide
  Sense strand starting at position 991 of SEQ ID NO: 1562637
ucgagcuugugguuucagu

SEQ ID NO: 1761794 - RNA, 19 nt, Artificial Sequence
  Description of Artificial Sequence: Synthetic oligonucleotide
  Antisense strand to SEQ ID NO: 1761793
acugaaaccacaagcucga

SEQ ID NO: 1761795 - RNA, 19 nt, Artificial Sequence
  Description of Artificial Sequence: Synthetic oligonucleotide
  Sense strand starting at position 1083 of SEQ ID NO: 1562637
guacaaaucacaggucagu

SEQ ID NO: 1761796 - RNA, 19 nt, Artificial Sequence
  Description of Artificial Sequence: Synthetic oligonucleotide
  Antisense strand to SEQ ID NO: 1761795
acugaccugugauuuguac

SEQ ID NO: 1761797 - RNA, 19 nt, Artificial Sequence
  Description of Artificial Sequence: Synthetic oligonucleotide
  Sense strand starting at position 1158 of SEQ ID NO: 1562637
uuaucaacguaauggaaga

SEQ ID NO: 1761798 - RNA, 19 nt, Artificial Sequence
  Description of Artificial Sequence: Synthetic oligonucleotide
  Antisense strand to SEQ ID NO: 1761797
ucuuccauuacguugauaa

SEQ ID NO: 1761799 - RNA, 19 nt, Artificial Sequence
  Description of Artificial Sequence: Synthetic oligonucleotide
  Sense strand starting at position 1220 of SEQ ID NO: 1562637
cgcuguguuaagcacuuua

SEQ ID NO: 1761800 - RNA, 19 nt, Artificial Sequence
  Description of Artificial Sequence: Synthetic oligonucleotide
  Antisense strand to SEQ ID NO: 1761799
uaaagugcuuaacacagcg

SEQ ID NO: 1761801 - RNA, 19 nt, Artificial Sequence
  Description of Artificial Sequence: Synthetic oligonucleotide
  Sense strand starting at position 1263 of SEQ ID NO: 1562637
ccauuucugucccaugcuu

SEQ ID NO: 1761802 - RNA, 19 nt, Artificial Sequence
  Description of Artificial Sequence: Synthetic oligonucleotide
  Antisense strand to SEQ ID NO: 1761801
aagcaugggacagaaaugg

SEQ ID NO: 1761803 - RNA, 19 nt, Artificial Sequence
  Description of Artificial Sequence: Synthetic oligonucleotide
  Sense strand starting at position 1279 of SEQ ID NO: 1562637
cuuggcauacuuugcagau

SEQ ID NO: 1761804 - RNA, 19 nt, Artificial Sequence
  Description of Artificial Sequence: Synthetic oligonucleotide
  Antisense strand to SEQ ID NO: 1761803
aucugcaaaguaugccaag

SEQ ID NO: 1761805 - RNA, 19 nt, Artificial Sequence
  Description of Artificial Sequence: Synthetic oligonucleotide
  Sense strand starting at position 1281 of SEQ ID NO: 1562637
uggcauacuuugcagauga

SEQ ID NO: 1761806 - RNA, 19 nt, Artificial Sequence
  Description of Artificial Sequence: Synthetic oligonucleotide
  Antisense strand to SEQ ID NO: 1761805
ucaucugcaaaguaugcca

SEQ ID NO: 1761807 - RNA, 19 nt, Artificial Sequence
  Description of Artificial Sequence: Synthetic oligonucleotide
  Sense strand starting at position 1283 of SEQ ID NO: 1562637
gcauacuuugcagaugaga

SEQ ID NO: 1761808 - RNA, 19 nt, Artificial Sequence
  Description of Artificial Sequence: Synthetic oligonucleotide
  Antisense strand to SEQ ID NO: 1761807
ucucaucugcaaaguaugc

SEQ ID NO: 1761809 - RNA, 19 nt, Artificial Sequence
  Description of Artificial Sequence: Synthetic oligonucleotide
  Sense strand starting at position 1303 of SEQ ID NO: 1562637
acugaaaguugucacuaac

SEQ ID NO: 1761810 - RNA, 19 nt, Artificial Sequence
  Description of Artificial Sequence: Synthetic oligonucleotide
  Antisense strand to SEQ ID NO: 1761809
guuagugacaacuuucagu

SEQ ID NO: 1761811 - RNA, 19 nt, Artificial Sequence
  Description of Artificial Sequence: Synthetic oligonucleotide
  Sense strand starting at position 1306 of SEQ ID NO: 1562637
gaaaguugucacuaacagc

SEQ ID NO: 1761812 - RNA, 19 nt, Artificial Sequence
  Description of Artificial Sequence: Synthetic oligonucleotide
  Antisense strand to SEQ ID NO: 1761811
gcuguuagugacaacuuuc

SEQ ID NO: 1761813 - RNA, 19 nt, Artificial Sequence
  Description of Artificial Sequence: Synthetic oligonucleotide
  Sense strand starting at position 1358 of SEQ ID NO: 1562637
ccagguuccaacugggaaa

SEQ ID NO: 1761814 - RNA, 19 nt, Artificial Sequence
  Description of Artificial Sequence: Synthetic oligonucleotide
  Antisense strand to SEQ ID NO: 1761813
uuucccaguuggaaccugg

SEQ ID NO: 1761815 - RNA, 19 nt, Artificial Sequence
  Description of Artificial Sequence: Synthetic oligonucleotide
  Sense strand starting at position 1369 of SEQ ID NO: 1562637
cugggaaagucucacuucu

SEQ ID NO: 1761816 - RNA, 19 nt, Artificial Sequence
  Description of Artificial Sequence: Synthetic oligonucleotide
  Antisense strand to SEQ ID NO: 1761815
agaagugagacuuucccag

SEQ ID NO: 1761817 - RNA, 19 nt, Artificial Sequence
  Description of Artificial Sequence: Synthetic oligonucleotide
  Sense strand starting at position 1989 of SEQ ID NO: 1562637
gccgggauuuguugugugu

SEQ ID NO: 1761818 - RNA, 19 nt, Artificial Sequence
  Description of Artificial Sequence: Synthetic oligonucleotide
  Antisense strand to SEQ ID NO: 1761817
acacacaacaaaucccggc

SEQ ID NO: 1761819 - RNA, 19 nt, Artificial Sequence
  Description of Artificial Sequence: Synthetic oligonucleotide
  Sense strand starting at position 1991 of SEQ ID NO: 1562637
cgggauuuguuguguguag

SEQ ID NO: 1761820 - RNA, 19 nt, Artificial Sequence
  Description of Artificial Sequence: Synthetic oligonucleotide
  Antisense strand to SEQ ID NO: 1761819
cuacacacaacaaaucccg

SEQ ID NO: 1761821 - RNA, 19 nt, Artificial Sequence
  Description of Artificial Sequence: Synthetic oligonucleotide
  Sense strand starting at position 1992 of SEQ ID NO: 1562637
gggauuuguuguguguaga

SEQ ID NO: 1761822 - RNA, 19 nt, Artificial Sequence
  Description of Artificial Sequence: Synthetic oligonucleotide
  Antisense strand to SEQ ID NO: 1761821
ucuacacacaacaaauccc

SEQ ID NO: 1761823 - RNA, 19 nt, Artificial Sequence
  Description of Artificial Sequence: Synthetic oligonucleotide
  Sense strand starting at position 1993 of SEQ ID NO: 1562637
ggauuuguuguguguagag

SEQ ID NO: 1761824 - RNA, 19 nt, Artificial Sequence
  Description of Artificial Sequence: Synthetic oligonucleotide
  Antisense strand to SEQ ID NO: 1761823
cucuacacacaacaaaucc

SEQ ID NO: 1761825 - RNA, 19 nt, Artificial Sequence
  Description of Artificial Sequence: Synthetic oligonucleotide
  Sense strand starting at position 2147 of SEQ ID NO: 1562637
ccgcaaguuucguaucuca

SEQ ID NO: 1761826 - RNA, 19 nt, Artificial Sequence
  Description of Artificial Sequence: Synthetic oligonucleotide
  Antisense strand to SEQ ID NO: 1761825
ugagauacgaaacuugcgg

SEQ ID NO: 1761827 - RNA, 19 nt, Artificial Sequence
  Description of Artificial Sequence: Synthetic oligonucleotide
  Sense strand starting at position 2149 of SEQ ID NO: 1562637
gcaaguuucguaucucagu

SEQ ID NO: 1761828 - RNA, 19 nt, Artificial Sequence
  Description of Artificial Sequence: Synthetic oligonucleotide
  Antisense strand to SEQ ID NO: 1761827
acugagauacgaaacuugc

SEQ ID NO: 1761829 - RNA, 19 nt, Artificial Sequence
  Description of Artificial Sequence: Synthetic oligonucleotide
  Sense strand starting at position 2150 of SEQ ID NO: 1562637
caaguuucguaucucaguu

SEQ ID NO: 1761830 - RNA, 19 nt, Artificial Sequence
  Description of Artificial Sequence: Synthetic oligonucleotide
  Antisense strand to SEQ ID NO: 1761829
aacugagauacgaaacuug

SEQ ID NO: 1761831 - RNA, 19 nt, Artificial Sequence
  Description of Artificial Sequence: Synthetic oligonucleotide
  Sense strand starting at position 2211 of SEQ ID NO: 1562637
agaguugaugugcggagua

SEQ ID NO: 1761832 - RNA, 19 nt, Artificial Sequence
  Description of Artificial Sequence: Synthetic oligonucleotide
  Antisense strand to SEQ ID NO: 1761831
uacuccgcacaucaacucu

SEQ ID NO: 1761833 - RNA, 19 nt, Artificial Sequence
  Description of Artificial Sequence: Synthetic oligonucleotide
  Sense strand starting at position 2213 of SEQ ID NO: 1562637
aguugaugugcggaguaca

SEQ ID NO: 1761834 - RNA, 19 nt, Artificial Sequence
  Description of Artificial Sequence: Synthetic oligonucleotide
  Antisense strand to SEQ ID NO: 1761833
uguacuccgcacaucaacu

SEQ ID NO: 1761835 - RNA, 19 nt, Artificial Sequence
  Description of Artificial Sequence: Synthetic oligonucleotide
  Sense strand starting at position 2214 of SEQ ID NO: 1562637
guugaugugcggaguacau

SEQ ID NO: 1761836 - RNA, 19 nt, Artificial Sequence
  Description of Artificial Sequence: Synthetic oligonucleotide
  Antisense strand to SEQ ID NO: 1761835
auguacuccgcacaucaac

SEQ ID NO: 1761837 - RNA, 19 nt, Artificial Sequence
  Description of Artificial Sequence: Synthetic oligonucleotide
  Sense strand starting at position 2367 of SEQ ID NO: 1562637
agcagugccugacauacaa

SEQ ID NO: 1761838 - RNA, 19 nt, Artificial Sequence
  Description of Artificial Sequence: Synthetic oligonucleotide
  Antisense strand to SEQ ID NO: 1761837
uuguaugucaggcacugcu

SEQ ID NO: 1761839 - RNA, 19 nt, Artificial Sequence
  Description of Artificial Sequence: Synthetic oligonucleotide
  Sense strand starting at position 2387 of SEQ ID NO: 1562637
acacgcucauuaucaguua

SEQ ID NO: 1761840 - RNA, 19 nt, Artificial Sequence
  Description of Artificial Sequence: Synthetic oligonucleotide
  Antisense strand to SEQ ID NO: 1761839
uaacugauaaugagcgugu

SEQ ID NO: 1761841 - RNA, 19 nt, Artificial Sequence
  Description of Artificial Sequence: Synthetic oligonucleotide
  Sense strand starting at position 2390 of SEQ ID NO: 1562637
cgcucauuaucaguuauuc

SEQ ID NO: 1761842 - RNA, 19 nt, Artificial Sequence
  Description of Artificial Sequence: Synthetic oligonucleotide
  Antisense strand to SEQ ID NO: 1761841
gaauaacugauaaugagcg

SEQ ID NO: 1761843 - RNA, 19 nt, Artificial Sequence
  Description of Artificial Sequence: Synthetic oligonucleotide
  Sense strand starting at position 3043 of SEQ ID NO: 1562637
guuacagugggcuauaauu

SEQ ID NO: 1761844 - RNA, 19 nt, Artificial Sequence
  Description of Artificial Sequence: Synthetic oligonucleotide
  Antisense strand to SEQ ID NO: 1761843
aauuauagcccacuguaac

SEQ ID NO: 1761845 - RNA, 19 nt, Artificial Sequence
  Description of Artificial Sequence: Synthetic oligonucleotide
  Sense strand starting at position 3232 of SEQ ID NO: 1562637
gggcuuggcagauggucaa

SEQ ID NO: 1761846 - RNA, 19 nt, Artificial Sequence
  Description of Artificial Sequence: Synthetic oligonucleotide
  Antisense strand to SEQ ID NO: 1761845
uugaccaucugccaagccc

SEQ ID NO: 1761847 - RNA, 19 nt, Artificial Sequence
  Description of Artificial Sequence: Synthetic oligonucleotide
  Sense strand starting at position 3309 of SEQ ID NO: 1562637
cgaaacugcuuaugccaau

SEQ ID NO: 1761848 - RNA, 19 nt, Artificial Sequence
  Description of Artificial Sequence: Synthetic oligonucleotide
  Antisense strand to SEQ ID NO: 1761847
auuggcauaagcaguuucg

SEQ ID NO: 1761849 - RNA, 19 nt, Artificial Sequence
  Description of Artificial Sequence: Synthetic oligonucleotide
  Sense strand starting at position 3315 of SEQ ID NO: 1562637
ugcuuaugccaaugucaau

SEQ ID NO: 1761850 - RNA, 19 nt, Artificial Sequence
  Description of Artificial Sequence: Synthetic oligonucleotide
  Antisense strand to SEQ ID NO: 1761849
auugacauuggcauaagca

SEQ ID NO: 1761851 - RNA, 19 nt, Artificial Sequence
  Description of Artificial Sequence: Synthetic oligonucleotide
  Sense strand starting at position 3387 of SEQ ID NO: 1562637
uacucauuccagugaggaa

SEQ ID NO: 1761852 - RNA, 19 nt, Artificial Sequence
  Description of Artificial Sequence: Synthetic oligonucleotide
  Antisense strand to SEQ ID NO: 1761851
uuccucacuggaaugagua

SEQ ID NO: 1761853 - RNA, 19 nt, Artificial Sequence
  Description of Artificial Sequence: Synthetic oligonucleotide
  Sense strand starting at position 3390 of SEQ ID NO: 1562637
ucauuccagugaggaaauu

SEQ ID NO: 1761854 - RNA, 19 nt, Artificial Sequence
  Description of Artificial Sequence: Synthetic oligonucleotide
  Antisense strand to SEQ ID NO: 1761853
aauuuccucacuggaauga

SEQ ID NO: 1761855 - RNA, 19 nt, Artificial Sequence
  Description of Artificial Sequence: Synthetic oligonucleotide
  Sense strand starting at position 3411 of SEQ ID NO: 1562637
ucccuuaggagguguuaca

SEQ ID NO: 1761856 - RNA, 19 nt, Artificial Sequence
  Description of Artificial Sequence: Synthetic oligonucleotide
  Antisense strand to SEQ ID NO: 1761855
uguaacaccuccuaaggga

SEQ ID NO: 1761857 - RNA, 19 nt, Artificial Sequence
  Description of Artificial Sequence: Synthetic oligonucleotide
  Sense strand starting at position 203 of SEQ ID NO: 1562638
gcugauaugcaacaagcua

SEQ ID NO: 1761858 - RNA, 19 nt, Artificial Sequence
  Description of Artificial Sequence: Synthetic oligonucleotide
  Antisense strand to SEQ ID NO: 1761857
uagcuuguugcauaucagc

SEQ ID NO: 1761859 - RNA, 19 nt, Artificial Sequence
  Description of Artificial Sequence: Synthetic oligonucleotide
  Sense strand starting at position 240 of SEQ ID NO: 1562638
agaucaauguguugcacag

SEQ ID NO: 1761860 - RNA, 19 nt, Artificial Sequence
  Description of Artificial Sequence: Synthetic oligonucleotide
  Antisense strand to SEQ ID NO: 1761859
cugugcaacacauugaucu

SEQ ID NO: 1761861 - RNA, 19 nt, Artificial Sequence
  Description of Artificial Sequence: Synthetic oligonucleotide
  Sense strand starting at position 364 of SEQ ID NO: 1562638
acuugugaacuugguaaau

SEQ ID NO: 1761862 - RNA, 19 nt, Artificial Sequence
  Description of Artificial Sequence: Synthetic oligonucleotide
  Antisense strand to SEQ ID NO: 1761861
auuuaccaaguucacaagu

SEQ ID NO: 1761863 - RNA, 19 nt, Artificial Sequence
  Description of Artificial Sequence: Synthetic oligonucleotide
  Sense strand starting at position 366 of SEQ ID NO: 1562638
uugugaacuugguaaauuu

SEQ ID NO: 1761864 - RNA, 19 nt, Artificial Sequence
  Description of Artificial Sequence: Synthetic oligonucleotide
  Antisense strand to SEQ ID NO: 1761863
aaauuuaccaaguucacaa

SEQ ID NO: 1761865 - RNA, 19 nt, Artificial Sequence
  Description of Artificial Sequence: Synthetic oligonucleotide
  Sense strand starting at position 1107 of SEQ ID NO: 1562638
uuacuuugugcauguaaua

SEQ ID NO: 1761866 - RNA, 19 nt, Artificial Sequence
  Description of Artificial Sequence: Synthetic oligonucleotide
  Antisense strand to SEQ ID NO: 1761865
uauuacaugcacaaaguaa

SEQ ID NO: 1761867 - RNA, 19 nt, Artificial Sequence
  Description of Artificial Sequence: Synthetic oligonucleotide
  Sense strand starting at position 1149 of SEQ ID NO: 1562638
auuacaacuuguuauagag

SEQ ID NO: 1761868 - RNA, 19 nt, Artificial Sequence
  Description of Artificial Sequence: Synthetic oligonucleotide
  Antisense strand to SEQ ID NO: 1761867
cucuauaacaaguuguaau

SEQ ID NO: 1761869 - RNA, 19 nt, Artificial Sequence
  Description of Artificial Sequence: Synthetic oligonucleotide
  Sense strand starting at position 1229 of SEQ ID NO: 1562638
gucacuaauuucugugucu

SEQ ID NO: 1761870 - RNA, 19 nt, Artificial Sequence
  Description of Artificial Sequence: Synthetic oligonucleotide
  Antisense strand to SEQ ID NO: 1761869
agacacagaaauuagugac

SEQ ID NO: 1761871 - RNA, 19 nt, Artificial Sequence
  Description of Artificial Sequence: Synthetic oligonucleotide
  Sense strand starting at position 1243 of SEQ ID NO: 1562638
ugucucuuuccagagacac

SEQ ID NO: 1761872 - RNA, 19 nt, Artificial Sequence
  Description of Artificial Sequence: Synthetic oligonucleotide
  Antisense strand to SEQ ID NO: 1761871
gugucucuggaaagagaca

SEQ ID NO: 1761873 - RNA, 19 nt, Artificial Sequence
  Description of Artificial Sequence: Synthetic oligonucleotide
  Sense strand starting at position 1323 of SEQ ID NO: 1562638
gugaccacagagugaauaa

SEQ ID NO: 1761874 - RNA, 19 nt, Artificial Sequence
  Description of Artificial Sequence: Synthetic oligonucleotide
  Antisense strand to SEQ ID NO: 1761873
uuauucacucuguggucac

SEQ ID NO: 1761875 - RNA, 19 nt, Artificial Sequence
  Description of Artificial Sequence: Synthetic oligonucleotide
  Sense strand starting at position 1433 of SEQ ID NO: 1562638
ucagucaauuaagaaaugu

SEQ ID NO: 1761876 - RNA, 19 nt, Artificial Sequence
  Description of Artificial Sequence: Synthetic oligonucleotide
  Antisense strand to SEQ ID NO: 1761875
acauuucuuaauugacuga

SEQ ID NO: 1761877 - RNA, 19 nt, Artificial Sequence
  Description of Artificial Sequence: Synthetic oligonucleotide
  Sense strand starting at position 1442 of SEQ ID NO: 1562638
uaagaaauguacucgagcu

SEQ ID NO: 1761878 - RNA, 19 nt, Artificial Sequence
  Description of Artificial Sequence: Synthetic oligonucleotide
  Antisense strand to SEQ ID NO: 1761877
agcucgaguacauuucuua

SEQ ID NO: 1761879 - RNA, 19 nt, Artificial Sequence
  Description of Artificial Sequence: Synthetic oligonucleotide
  Sense strand starting at position 1454 of SEQ ID NO: 1562638
ucgagcuugugguuucagu

SEQ ID NO: 1761880 - RNA, 19 nt, Artificial Sequence
  Description of Artificial Sequence: Synthetic oligonucleotide
  Antisense strand to SEQ ID NO: 1761879
acugaaaccacaagcucga

SEQ ID NO: 1761881 - RNA, 19 nt, Artificial Sequence
  Description of Artificial Sequence: Synthetic oligonucleotide
  Sense strand starting at position 1546 of SEQ ID NO: 1562638
guacaaaucacaggucagu

SEQ ID NO: 1761882 - RNA, 19 nt, Artificial Sequence
  Description of Artificial Sequence: Synthetic oligonucleotide
  Antisense strand to SEQ ID NO: 1761881
acugaccugugauuuguac

SEQ ID NO: 1761883 - RNA, 19 nt, Artificial Sequence
  Description of Artificial Sequence: Synthetic oligonucleotide
  Sense strand starting at position 1621 of SEQ ID NO: 1562638
uuaucaacguaauggaaga

SEQ ID NO: 1761884 - RNA, 19 nt, Artificial Sequence
  Description of Artificial Sequence: Synthetic oligonucleotide
  Antisense strand to SEQ ID NO: 1761883
ucuuccauuacguugauaa

SEQ ID NO: 1761885 - RNA, 19 nt, Artificial Sequence
  Description of Artificial Sequence: Synthetic oligonucleotide
  Sense strand starting at position 1683 of SEQ ID NO: 1562638
cgcuguguuaagcacuuua

SEQ ID NO: 1761886 - RNA, 19 nt, Artificial Sequence
  Description of Artificial Sequence: Synthetic oligonucleotide
  Antisense strand to SEQ ID NO: 1761885
uaaagugcuuaacacagcg

SEQ ID NO: 1761887 - RNA, 19 nt, Artificial Sequence
  Description of Artificial Sequence: Synthetic oligonucleotide
  Sense strand starting at position 1726 of SEQ ID NO: 1562638
ccauuucugucccaugcuu

SEQ ID NO: 1761888 - RNA, 19 nt, Artificial Sequence
  Description of Artificial Sequence: Synthetic oligonucleotide
  Antisense strand to SEQ ID NO: 1761887
aagcaugggacagaaaugg

SEQ ID NO: 1761889 - RNA, 19 nt, Artificial Sequence
  Description of Artificial Sequence: Synthetic oligonucleotide
  Sense strand starting at position 1742 of SEQ ID NO: 1562638
cuuggcauacuuugcagau

SEQ ID NO: 1761890 - RNA, 19 nt, Artificial Sequence
  Description of Artificial Sequence: Synthetic oligonucleotide
  Antisense strand to SEQ ID NO: 1761889
aucugcaaaguaugccaag

SEQ ID NO: 1761891 - RNA, 19 nt, Artificial Sequence
  Description of Artificial Sequence: Synthetic oligonucleotide
  Sense strand starting at position 1744 of SEQ ID NO: 1562638
uggcauacuuugcagauga

SEQ ID NO: 1761892 - RNA, 19 nt, Artificial Sequence
  Description of Artificial Sequence: Synthetic oligonucleotide
  Antisense strand to SEQ ID NO: 1761891
ucaucugcaaaguaugcca

SEQ ID NO: 1761893 - RNA, 19 nt, Artificial Sequence
  Description of Artificial Sequence: Synthetic oligonucleotide
  Sense strand starting at position 1746 of SEQ ID NO: 1562638
gcauacuuugcagaugaga

SEQ ID NO: 1761894 - RNA, 19 nt, Artificial Sequence
  Description of Artificial Sequence: Synthetic oligonucleotide
  Antisense strand to SEQ ID NO: 1761893
ucucaucugcaaaguaugc

SEQ ID NO: 1761895 - RNA, 19 nt, Artificial Sequence
  Description of Artificial Sequence: Synthetic oligonucleotide
  Sense strand starting at position 1766 of SEQ ID NO: 1562638
acugaaaguugucacuaac

SEQ ID NO: 1761896 - RNA, 19 nt, Artificial Sequence
  Description of Artificial Sequence: Synthetic oligonucleotide
  Antisense strand to SEQ ID NO: 1761895
guuagugacaacuuucagu

SEQ ID NO: 1761897 - RNA, 19 nt, Artificial Sequence
  Description of Artificial Sequence: Synthetic oligonucleotide
  Sense strand starting at position 1769 of SEQ ID NO: 1562638
gaaaguugucacuaacagc

SEQ ID NO: 1761898 - RNA, 19 nt, Artificial Sequence
  Description of Artificial Sequence: Synthetic oligonucleotide
  Antisense strand to SEQ ID NO: 1761897
gcuguuagugacaacuuuc

SEQ ID NO: 1761899 - RNA, 19 nt, Artificial Sequence
  Description of Artificial Sequence: Synthetic oligonucleotide
  Sense strand starting at position 1821 of SEQ ID NO: 1562638
ccagguuccaacugggaaa

SEQ ID NO: 1761900 - RNA, 19 nt, Artificial Sequence
  Description of Artificial Sequence: Synthetic oligonucleotide
  Antisense strand to SEQ ID NO: 1761899
uuucccaguuggaaccugg

SEQ ID NO: 1761901 - RNA, 19 nt, Artificial Sequence
  Description of Artificial Sequence: Synthetic oligonucleotide
  Sense strand starting at position 1832 of SEQ ID NO: 1562638
cugggaaagucucacuucu

SEQ ID NO: 1761902 - RNA, 19 nt, Artificial Sequence
  Description of Artificial Sequence: Synthetic oligonucleotide
  Antisense strand to SEQ ID NO: 1761901
agaagugagacuuucccag

SEQ ID NO: 1761903 - RNA, 19 nt, Artificial Sequence
  Description of Artificial Sequence: Synthetic oligonucleotide
  Sense strand starting at position 2454 of SEQ ID NO: 1562638
cgggauuuguuguguguag

SEQ ID NO: 1761904 - RNA, 19 nt, Artificial Sequence
  Description of Artificial Sequence: Synthetic oligonucleotide
  Antisense strand to SEQ ID NO: 1761903
cuacacacaacaaaucccg

SEQ ID NO: 1761905 - RNA, 19 nt, Artificial Sequence
  Description of Artificial Sequence: Synthetic oligonucleotide
  Sense strand starting at position 2455 of SEQ ID NO: 1562638
gggauuuguuguguguaga

SEQ ID NO: 1761906 - RNA, 19 nt, Artificial Sequence
  Description of Artificial Sequence: Synthetic oligonucleotide
  Antisense strand to SEQ ID NO: 1761905
ucuacacacaacaaauccc

SEQ ID NO: 1761907 - RNA, 19 nt, Artificial Sequence
  Description of Artificial Sequence: Synthetic oligonucleotide
  Sense strand starting at position 2456 of SEQ ID NO: 1562638
ggauuuguuguguguagag

SEQ ID NO: 1761908 - RNA, 19 nt, Artificial Sequence
  Description of Artificial Sequence: Synthetic oligonucleotide
  Antisense strand to SEQ ID NO: 1761907
cucuacacacaacaaaucc

SEQ ID NO: 1761909 - RNA, 19 nt, Artificial Sequence
  Description of Artificial Sequence: Synthetic oligonucleotide
  Sense strand starting at position 2612 of SEQ ID NO: 1562638
gcaaguuucguaucucagu

SEQ ID NO: 1761910 - RNA, 19 nt, Artificial Sequence
  Description of Artificial Sequence: Synthetic oligonucleotide
  Antisense strand to SEQ ID NO: 1761909
acugagauacgaaacuugc

SEQ ID NO: 1761911 - RNA, 19 nt, Artificial Sequence
  Description of Artificial Sequence: Synthetic oligonucleotide
  Sense strand starting at position 2613 of SEQ ID NO: 1562638
caaguuucguaucucaguu

SEQ ID NO: 1761912 - RNA, 19 nt, Artificial Sequence
  Description of Artificial Sequence: Synthetic oligonucleotide
  Antisense strand to SEQ ID NO: 1761911
aacugagauacgaaacuug

SEQ ID NO: 1761913 - RNA, 19 nt, Artificial Sequence
  Description of Artificial Sequence: Synthetic oligonucleotide
  Sense strand starting at position 2674 of SEQ ID NO: 1562638
agaguugaugugcggagua

SEQ ID NO: 1761914 - RNA, 19 nt, Artificial Sequence
  Description of Artificial Sequence: Synthetic oligonucleotide
  Antisense strand to SEQ ID NO: 1761913
uacuccgcacaucaacucu

SEQ ID NO: 1761915 - RNA, 19 nt, Artificial Sequence
  Description of Artificial Sequence: Synthetic oligonucleotide
  Sense strand starting at position 2676 of SEQ ID NO: 1562638
aguugaugugcggaguaca

SEQ ID NO: 1761916 - RNA, 19 nt, Artificial Sequence
  Description of Artificial Sequence: Synthetic oligonucleotide
  Antisense strand to SEQ ID NO: 1761915
uguacuccgcacaucaacu

SEQ ID NO: 1761917 - RNA, 19 nt, Artificial Sequence
  Description of Artificial Sequence: Synthetic oligonucleotide
  Sense strand starting at position 2677 of SEQ ID NO: 1562638
guugaugugcggaguacau

SEQ ID NO: 1761918 - RNA, 19 nt, Artificial Sequence
  Description of Artificial Sequence: Synthetic oligonucleotide
  Antisense strand to SEQ ID NO: 1761917
auguacuccgcacaucaac

SEQ ID NO: 1761919 - RNA, 19 nt, Artificial Sequence
  Description of Artificial Sequence: Synthetic oligonucleotide
  Sense strand starting at position 2830 of SEQ ID NO: 1562638
agcagugccugacauacaa

SEQ ID NO: 1761920 - RNA, 19 nt, Artificial Sequence
  Description of Artificial Sequence: Synthetic oligonucleotide
  Antisense strand to SEQ ID NO: 1761919
uuguaugucaggcacugcu

SEQ ID NO: 1761921 - RNA, 19 nt, Artificial Sequence
  Description of Artificial Sequence: Synthetic oligonucleotide
  Sense strand starting at position 2850 of SEQ ID NO: 1562638
acacgcucauuaucaguua

SEQ ID NO: 1761922 - RNA, 19 nt, Artificial Sequence
  Description of Artificial Sequence: Synthetic oligonucleotide
  Antisense strand to SEQ ID NO: 1761921
uaacugauaaugagcgugu

SEQ ID NO: 1761923 - RNA, 19 nt, Artificial Sequence
  Description of Artificial Sequence: Synthetic oligonucleotide
  Sense strand starting at position 2853 of SEQ ID NO: 1562638
cgcucauuaucaguuauuc

SEQ ID NO: 1761924 - RNA, 19 nt, Artificial Sequence
  Description of Artificial Sequence: Synthetic oligonucleotide
  Antisense strand to SEQ ID NO: 1761923
gaauaacugauaaugagcg

SEQ ID NO: 1761925 - RNA, 19 nt, Artificial Sequence
  Description of Artificial Sequence: Synthetic oligonucleotide
  Sense strand starting at position 3506 of SEQ ID NO: 1562638
guuacagugggcuauaauu

SEQ ID NO: 1761926 - RNA, 19 nt, Artificial Sequence
  Description of Artificial Sequence: Synthetic oligonucleotide
  Antisense strand to SEQ ID NO: 1761925
aauuauagcccacuguaac

SEQ ID NO: 1761927 - RNA, 19 nt, Artificial Sequence
  Description of Artificial Sequence: Synthetic oligonucleotide
  Sense strand starting at position 3695 of SEQ ID NO: 1562638
gggcuuggcagauggucaa

SEQ ID NO: 1761928 - RNA, 19 nt, Artificial Sequence
  Description of Artificial Sequence: Synthetic oligonucleotide
  Antisense strand to SEQ ID NO: 1761927
uugaccaucugccaagccc

SEQ ID NO: 1761929 - RNA, 19 nt, Artificial Sequence
  Description of Artificial Sequence: Synthetic oligonucleotide
  Sense strand starting at position 3778 of SEQ ID NO: 1562638
ugcuuaugccaaugucaau

SEQ ID NO: 1761930 - RNA, 19 nt, Artificial Sequence
  Description of Artificial Sequence: Synthetic oligonucleotide
  Antisense strand to SEQ ID NO: 1761929
auugacauuggcauaagca

SEQ ID NO: 1761931 - RNA, 19 nt, Artificial Sequence
  Description of Artificial Sequence: Synthetic oligonucleotide
  Sense strand starting at position 3850 of SEQ ID NO: 1562638
uacucauuccagugaggaa

SEQ ID NO: 1761932 - RNA, 19 nt, Artificial Sequence
  Description of Artificial Sequence: Synthetic oligonucleotide
  Antisense strand to SEQ ID NO: 1761931
uuccucacuggaaugagua

SEQ ID NO: 1761933 - RNA, 19 nt, Artificial Sequence
  Description of Artificial Sequence: Synthetic oligonucleotide
  Sense strand starting at position 3853 of SEQ ID NO: 1562638
ucauuccagugaggaaauu

SEQ ID NO: 1761934 - RNA, 19 nt, Artificial Sequence
  Description of Artificial Sequence: Synthetic oligonucleotide
  Antisense strand to SEQ ID NO: 1761933
aauuuccucacuggaauga

SEQ ID NO: 1761935 - RNA, 19 nt, Artificial Sequence
  Description of Artificial Sequence: Synthetic oligonucleotide
  Sense strand starting at position 3874 of SEQ ID NO: 1562638
ucccuuaggagguguuaca

SEQ ID NO: 1761936 - RNA, 19 nt, Artificial Sequence
  Description of Artificial Sequence: Synthetic oligonucleotide
  Antisense strand to SEQ ID NO: 1761935
uguaacaccuccuaaggga

SEQ ID NO: 1761937 - RNA, 19 nt, Artificial Sequence
  Description of Artificial Sequence: Synthetic oligonucleotide
  Sense strand starting at position 287 of SEQ ID NO: 1562639
ggagacuccuagucuccaa

SEQ ID NO: 1761938 - RNA, 19 nt, Artificial Sequence
  Description of Artificial Sequence: Synthetic oligonucleotide
  Antisense strand to SEQ ID NO: 1761937
uuggagacuaggagucucc

SEQ ID NO: 1761939 - RNA, 19 nt, Artificial Sequence
  Description of Artificial Sequence: Synthetic oligonucleotide
  Sense strand starting at position 367 of SEQ ID NO: 1562639
gaugacugaucaguaaagu

SEQ ID NO: 1761940 - RNA, 19 nt, Artificial Sequence
  Description of Artificial Sequence: Synthetic oligonucleotide
  Antisense strand to SEQ ID NO: 1761939
acuuuacugaucagucauc

SEQ ID NO: 1761941 - RNA, 19 nt, Artificial Sequence
  Description of Artificial Sequence: Synthetic oligonucleotide
  Sense strand starting at position 549 of SEQ ID NO: 1562639
gaggguucuuaugcacaaa

SEQ ID NO: 1761942 - RNA, 19 nt, Artificial Sequence
  Description of Artificial Sequence: Synthetic oligonucleotide
  Antisense strand to SEQ ID NO: 1761941
uuugugcauaagaacccuc

SEQ ID NO: 1761943 - RNA, 19 nt, Artificial Sequence
  Description of Artificial Sequence: Synthetic oligonucleotide
  Sense strand starting at position 552 of SEQ ID NO: 1562639
gguucuuaugcacaaauga

SEQ ID NO: 1761944 - RNA, 19 nt, Artificial Sequence
  Description of Artificial Sequence: Synthetic oligonucleotide
  Antisense strand to SEQ ID NO: 1761943
ucauuugugcauaagaacc

SEQ ID NO: 1761945 - RNA, 19 nt, Artificial Sequence
  Description of Artificial Sequence: Synthetic oligonucleotide
  Sense strand starting at position 560 of SEQ ID NO: 1562639
ugcacaaaugacugauaac

SEQ ID NO: 1761946 - RNA, 19 nt, Artificial Sequence
  Description of Artificial Sequence: Synthetic oligonucleotide
  Antisense strand to SEQ ID NO: 1761945
guuaucagucauuugugca

SEQ ID NO: 1761947 - RNA, 19 nt, Artificial Sequence
  Description of Artificial Sequence: Synthetic oligonucleotide
  Sense strand starting at position 563 of SEQ ID NO: 1562639
acaaaugacugauaacaag

SEQ ID NO: 1761948 - RNA, 19 nt, Artificial Sequence
  Description of Artificial Sequence: Synthetic oligonucleotide
  Antisense strand to SEQ ID NO: 1761947
cuuguuaucagucauuugu

SEQ ID NO: 1761949 - RNA, 19 nt, Artificial Sequence
  Description of Artificial Sequence: Synthetic oligonucleotide
  Sense strand starting at position 655 of SEQ ID NO: 1562639
ggacaucugcccugcaacu

SEQ ID NO: 1761950 - RNA, 19 nt, Artificial Sequence
  Description of Artificial Sequence: Synthetic oligonucleotide
  Antisense strand to SEQ ID NO: 1761949
aguugcagggcagaugucc

SEQ ID NO: 1761951 - RNA, 19 nt, Artificial Sequence
  Description of Artificial Sequence: Synthetic oligonucleotide
  Sense strand starting at position 813 of SEQ ID NO: 1562639
guuacuauggcacacauau

SEQ ID NO: 1761952 - RNA, 19 nt, Artificial Sequence
  Description of Artificial Sequence: Synthetic oligonucleotide
  Antisense strand to SEQ ID NO: 1761951
auaugugugccauaguaac

SEQ ID NO: 1761953 - RNA, 19 nt, Artificial Sequence
  Description of Artificial Sequence: Synthetic oligonucleotide
  Sense strand starting at position 887 of SEQ ID NO: 1562639
ugcuauuuagguugacagu

SEQ ID NO: 1761954 - RNA, 19 nt, Artificial Sequence
  Description of Artificial Sequence: Synthetic oligonucleotide
  Antisense strand to SEQ ID NO: 1761953
acugucaaccuaaauagca

SEQ ID NO: 1761955 - RNA, 19 nt, Artificial Sequence
  Description of Artificial Sequence: Synthetic oligonucleotide
  Sense strand starting at position 926 of SEQ ID NO: 1562639
uguucuagaggcgggaaua

SEQ ID NO: 1761956 - RNA, 19 nt, Artificial Sequence
  Description of Artificial Sequence: Synthetic oligonucleotide
  Antisense strand to SEQ ID NO: 1761955
uauucccgccucuagaaca

SEQ ID NO: 1761957 - RNA, 19 nt, Artificial Sequence
  Description of Artificial Sequence: Synthetic oligonucleotide
  Sense strand starting at position 936 of SEQ ID NO: 1562639
gcgggaauacagcaauaaa

SEQ ID NO: 1761958 - RNA, 19 nt, Artificial Sequence
  Description of Artificial Sequence: Synthetic oligonucleotide
  Antisense strand to SEQ ID NO: 1761957
uuuauugcuguauucccgc

SEQ ID NO: 1761959 - RNA, 19 nt, Artificial Sequence
  Description of Artificial Sequence: Synthetic oligonucleotide
  Sense strand starting at position 983 of SEQ ID NO: 1562639
uugucucuaguagggauaa

SEQ ID NO: 1761960 - RNA, 19 nt, Artificial Sequence
  Description of Artificial Sequence: Synthetic oligonucleotide
  Antisense strand to SEQ ID NO: 1761959
uuaucccuacuagagacaa

SEQ ID NO: 1761961 - RNA, 19 nt, Artificial Sequence
  Description of Artificial Sequence: Synthetic oligonucleotide
  Sense strand starting at position 1049 of SEQ ID NO: 1562639
gucggucagguacaagauu

SEQ ID NO: 1761962 - RNA, 19 nt, Artificial Sequence
  Description of Artificial Sequence: Synthetic oligonucleotide
  Antisense strand to SEQ ID NO: 1761961
aaucuuguaccugaccgac

SEQ ID NO: 1761963 - RNA, 19 nt, Artificial Sequence
  Description of Artificial Sequence: Synthetic oligonucleotide
  Sense strand starting at position 1057 of SEQ ID NO: 1562639
gguacaagauuacauaaag

SEQ ID NO: 1761964 - RNA, 19 nt, Artificial Sequence
  Description of Artificial Sequence: Synthetic oligonucleotide
  Antisense strand to SEQ ID NO: 1761963
cuuuauguaaucuuguacc

SEQ ID NO: 1761965 - RNA, 19 nt, Artificial Sequence
  Description of Artificial Sequence: Synthetic oligonucleotide
  Sense strand starting at position 1148 of SEQ ID NO: 1562639
ugaggugacugcccaaagu

SEQ ID NO: 1761966 - RNA, 19 nt, Artificial Sequence
  Description of Artificial Sequence: Synthetic oligonucleotide
  Antisense strand to SEQ ID NO: 1761965
acuuugggcagucaccuca

SEQ ID NO: 1761967 - RNA, 19 nt, Artificial Sequence
  Description of Artificial Sequence: Synthetic oligonucleotide
  Sense strand starting at position 1227 of SEQ ID NO: 1562639
uucugacucuuuguaaaug

SEQ ID NO: 1761968 - RNA, 19 nt, Artificial Sequence
  Description of Artificial Sequence: Synthetic oligonucleotide
  Antisense strand to SEQ ID NO: 1761967
cauuuacaaagagucagaa

SEQ ID NO: 1761969 - RNA, 19 nt, Artificial Sequence
  Description of Artificial Sequence: Synthetic oligonucleotide
  Sense strand starting at position 1303 of SEQ ID NO: 1562639
gggagagaugcucaguuac

SEQ ID NO: 1761970 - RNA, 19 nt, Artificial Sequence
  Description of Artificial Sequence: Synthetic oligonucleotide
  Antisense strand to SEQ ID NO: 1761969
guaacugagcaucucuccc

SEQ ID NO: 1761971 - RNA, 19 nt, Artificial Sequence
  Description of Artificial Sequence: Synthetic oligonucleotide
  Sense strand starting at position 1305 of SEQ ID NO: 1562639
gagagaugcucaguuacag

SEQ ID NO: 1761972 - RNA, 19 nt, Artificial Sequence
  Description of Artificial Sequence: Synthetic oligonucleotide
  Antisense strand to SEQ ID NO: 1761971
cuguaacugagcaucucuc

SEQ ID NO: 1761973 - RNA, 19 nt, Artificial Sequence
  Description of Artificial Sequence: Synthetic oligonucleotide
  Sense strand starting at position 1772 of SEQ ID NO: 1562639
gagcgagccuucucaagga

SEQ ID NO: 1761974 - RNA, 19 nt, Artificial Sequence
  Description of Artificial Sequence: Synthetic oligonucleotide
  Antisense strand to SEQ ID NO: 1761973
uccuugagaaggcucgcuc

SEQ ID NO: 1761975 - RNA, 19 nt, Artificial Sequence
  Description of Artificial Sequence: Synthetic oligonucleotide
  Sense strand starting at position 1859 of SEQ ID NO: 1562639
ucauuauccuucccgggaa

SEQ ID NO: 1761976 - RNA, 19 nt, Artificial Sequence
  Description of Artificial Sequence: Synthetic oligonucleotide
  Antisense strand to SEQ ID NO: 1761975
uucccgggaaggauaauga

SEQ ID NO: 1761977 - RNA, 19 nt, Artificial Sequence
  Description of Artificial Sequence: Synthetic oligonucleotide
  Sense strand starting at position 2215 of SEQ ID NO: 1562639
guacguggcccuggauuua

SEQ ID NO: 1761978 - RNA, 19 nt, Artificial Sequence
  Description of Artificial Sequence: Synthetic oligonucleotide
  Antisense strand to SEQ ID NO: 1761977
uaaauccagggccacguac

SEQ ID NO: 1761979 - RNA, 19 nt, Artificial Sequence
  Description of Artificial Sequence: Synthetic oligonucleotide
  Sense strand starting at position 2231 of SEQ ID NO: 1562639
uuagcuuguguuggaggaa

SEQ ID NO: 1761980 - RNA, 19 nt, Artificial Sequence
  Description of Artificial Sequence: Synthetic oligonucleotide
  Antisense strand to SEQ ID NO: 1761979
uuccuccaacacaagcuaa

SEQ ID NO: 1761981 - RNA, 19 nt, Artificial Sequence
  Description of Artificial Sequence: Synthetic oligonucleotide
  Sense strand starting at position 2246 of SEQ ID NO: 1562639
ggaaguuaaaucugugggu

SEQ ID NO: 1761982 - RNA, 19 nt, Artificial Sequence
  Description of Artificial Sequence: Synthetic oligonucleotide
  Antisense strand to SEQ ID NO: 1761981
acccacagauuuaacuucc

SEQ ID NO: 1761983 - RNA, 19 nt, Artificial Sequence
  Description of Artificial Sequence: Synthetic oligonucleotide
  Sense strand starting at position 2284 of SEQ ID NO: 1562639
aggcgugaaucagcaaacu

SEQ ID NO: 1761984 - RNA, 19 nt, Artificial Sequence
  Description of Artificial Sequence: Synthetic oligonucleotide
  Antisense strand to SEQ ID NO: 1761983
aguuugcugauucacgccu

SEQ ID NO: 1761985 - RNA, 19 nt, Artificial Sequence
  Description of Artificial Sequence: Synthetic oligonucleotide
  Sense strand starting at position 2737 of SEQ ID NO: 1562639
ggacaugcauucccaggau

SEQ ID NO: 1761986 - RNA, 19 nt, Artificial Sequence
  Description of Artificial Sequence: Synthetic oligonucleotide
  Antisense strand to SEQ ID NO: 1761985
auccugggaaugcaugucc

SEQ ID NO: 1761987 - RNA, 19 nt, Artificial Sequence
  Description of Artificial Sequence: Synthetic oligonucleotide
  Sense strand starting at position 2847 of SEQ ID NO: 1562639
ugggacaguuucguucuga

SEQ ID NO: 1761988 - RNA, 19 nt, Artificial Sequence
  Description of Artificial Sequence: Synthetic oligonucleotide
  Antisense strand to SEQ ID NO: 1761987
ucagaacgaaacuguccca

SEQ ID NO: 1761989 - RNA, 19 nt, Artificial Sequence
  Description of Artificial Sequence: Synthetic oligonucleotide
  Sense strand starting at position 2848 of SEQ ID NO: 1562639
gggacaguuucguucugau

SEQ ID NO: 1761990 - RNA, 19 nt, Artificial Sequence
  Description of Artificial Sequence: Synthetic oligonucleotide
  Antisense strand to SEQ ID NO: 1761989
aucagaacgaaacuguccc

SEQ ID NO: 1761991 - RNA, 19 nt, Artificial Sequence
  Description of Artificial Sequence: Synthetic oligonucleotide
  Sense strand starting at position 2886 of SEQ ID NO: 1562639
cccuccuugccuggaaagu

SEQ ID NO: 1761992 - RNA, 19 nt, Artificial Sequence
  Description of Artificial Sequence: Synthetic oligonucleotide
  Antisense strand to SEQ ID NO: 1761991
acuuuccaggcaaggaggg

SEQ ID NO: 1761993 - RNA, 19 nt, Artificial Sequence
  Description of Artificial Sequence: Synthetic oligonucleotide
  Sense strand starting at position 2887 of SEQ ID NO: 1562639
ccuccuugccuggaaaguu

SEQ ID NO: 1761994 - RNA, 19 nt, Artificial Sequence
  Description of Artificial Sequence: Synthetic oligonucleotide
  Antisense strand to SEQ ID NO: 1761993
aacuuuccaggcaaggagg

SEQ ID NO: 1761995 - RNA, 19 nt, Artificial Sequence
  Description of Artificial Sequence: Synthetic oligonucleotide
  Sense strand starting at position 2896 of SEQ ID NO: 1562639
cuggaaaguuuaccucuau

SEQ ID NO: 1761996 - RNA, 19 nt, Artificial Sequence
  Description of Artificial Sequence: Synthetic oligonucleotide
  Antisense strand to SEQ ID NO: 1761995
auagagguaaacuuuccag

SEQ ID NO: 1761997 - RNA, 19 nt, Artificial Sequence
  Description of Artificial Sequence: Synthetic oligonucleotide
  Sense strand starting at position 2897 of SEQ ID NO: 1562639
uggaaaguuuaccucuauc

SEQ ID NO: 1761998 - RNA, 19 nt, Artificial Sequence
  Description of Artificial Sequence: Synthetic oligonucleotide
  Antisense strand to SEQ ID NO: 1761997
gauagagguaaacuuucca

SEQ ID NO: 1761999 - RNA, 19 nt, Artificial Sequence
  Description of Artificial Sequence: Synthetic oligonucleotide
  Sense strand starting at position 3025 of SEQ ID NO: 1562639
acugguguucucugaguac

SEQ ID NO: 1762000 - RNA, 19 nt, Artificial Sequence
  Description of Artificial Sequence: Synthetic oligonucleotide
  Antisense strand to SEQ ID NO: 1761999
guacucagagaacaccagu

SEQ ID NO: 1762001 - RNA, 19 nt, Artificial Sequence
  Description of Artificial Sequence: Synthetic oligonucleotide
  Sense strand starting at position 3055 of SEQ ID NO: 1562639
ccagcugacuccuugaaug

SEQ ID NO: 1762002 - RNA, 19 nt, Artificial Sequence
  Description of Artificial Sequence: Synthetic oligonucleotide
  Antisense strand to SEQ ID NO: 1762001
cauucaaggagucagcugg

SEQ ID NO: 1762003 - RNA, 19 nt, Artificial Sequence
  Description of Artificial Sequence: Synthetic oligonucleotide
  Sense strand starting at position 3057 of SEQ ID NO: 1562639
agcugacuccuugaaugcu

SEQ ID NO: 1762004 - RNA, 19 nt, Artificial Sequence
  Description of Artificial Sequence: Synthetic oligonucleotide
  Antisense strand to SEQ ID NO: 1762003
agcauucaaggagucagcu

SEQ ID NO: 1762005 - RNA, 19 nt, Artificial Sequence
  Description of Artificial Sequence: Synthetic oligonucleotide
  Sense strand starting at position 3120 of SEQ ID NO: 1562639
ccaucagucuccuugcuga

SEQ ID NO: 1762006 - RNA, 19 nt, Artificial Sequence
  Description of Artificial Sequence: Synthetic oligonucleotide
  Antisense strand to SEQ ID NO: 1762005
ucagcaaggagacugaugg

SEQ ID NO: 1762007 - RNA, 19 nt, Artificial Sequence
  Description of Artificial Sequence: Synthetic oligonucleotide
  Sense strand starting at position 3125 of SEQ ID NO: 1562639
agucuccuugcugaaacaa

SEQ ID NO: 1762008 - RNA, 19 nt, Artificial Sequence
  Description of Artificial Sequence: Synthetic oligonucleotide
  Antisense strand to SEQ ID NO: 1762007
uuguuucagcaaggagacu

SEQ ID NO: 1762009 - RNA, 19 nt, Artificial Sequence
  Description of Artificial Sequence: Synthetic oligonucleotide
  Sense strand starting at position 3215 of SEQ ID NO: 1562639
cagguaugugaguguauca

SEQ ID NO: 1762010 - RNA, 19 nt, Artificial Sequence
  Description of Artificial Sequence: Synthetic oligonucleotide
  Antisense strand to SEQ ID NO: 1762009
ugauacacucacauaccug

SEQ ID NO: 1762011 - RNA, 19 nt, Artificial Sequence
  Description of Artificial Sequence: Synthetic oligonucleotide
  Sense strand starting at position 3535 of SEQ ID NO: 1562639
ugagaauagugggauggau

SEQ ID NO: 1762012 - RNA, 19 nt, Artificial Sequence
  Description of Artificial Sequence: Synthetic oligonucleotide
  Antisense strand to SEQ ID NO: 1762011
auccaucccacuauucuca

SEQ ID NO: 1762013 - RNA, 19 nt, Artificial Sequence
  Description of Artificial Sequence: Synthetic oligonucleotide
  Sense strand starting at position 3553 of SEQ ID NO: 1562639
uucugaaauuggguccuga

SEQ ID NO: 1762014 - RNA, 19 nt, Artificial Sequence
  Description of Artificial Sequence: Synthetic oligonucleotide
  Antisense strand to SEQ ID NO: 1762013
ucaggacccaauuucagaa

SEQ ID NO: 1762015 - RNA, 19 nt, Artificial Sequence
  Description of Artificial Sequence: Synthetic oligonucleotide
  Sense strand starting at position 3697 of SEQ ID NO: 1562639
gcaguaucucuggacugca

SEQ ID NO: 1762016 - RNA, 19 nt, Artificial Sequence
  Description of Artificial Sequence: Synthetic oligonucleotide
  Antisense strand to SEQ ID NO: 1762015
ugcaguccagagauacugc

SEQ ID NO: 1762017 - RNA, 19 nt, Artificial Sequence
  Description of Artificial Sequence: Synthetic oligonucleotide
  Sense strand starting at position 19 of SEQ ID NO: 1562640
uaacccuacucgguaaaga

SEQ ID NO: 1762018 - RNA, 19 nt, Artificial Sequence
  Description of Artificial Sequence: Synthetic oligonucleotide
  Antisense strand to SEQ ID NO: 1762017
ucuuuaccgaguaggguua

SEQ ID NO: 1762019 - RNA, 19 nt, Artificial Sequence
  Description of Artificial Sequence: Synthetic oligonucleotide
  Sense strand starting at position 20 of SEQ ID NO: 1562640
aacccuacucgguaaagau

SEQ ID NO: 1762020 - RNA, 19 nt, Artificial Sequence
  Description of Artificial Sequence: Synthetic oligonucleotide
  Antisense strand to SEQ ID NO: 1762019
aucuuuaccgaguaggguu

SEQ ID NO: 1762021 - RNA, 19 nt, Artificial Sequence
  Description of Artificial Sequence: Synthetic oligonucleotide
  Sense strand starting at position 114 of SEQ ID NO: 1562640
agcuauguggcagauguca

SEQ ID NO: 1762022 - RNA, 19 nt, Artificial Sequence
  Description of Artificial Sequence: Synthetic oligonucleotide
  Antisense strand to SEQ ID NO: 1762021
ugacaucugccacauagcu

SEQ ID NO: 1762023 - RNA, 19 nt, Artificial Sequence
  Description of Artificial Sequence: Synthetic oligonucleotide
  Sense strand starting at position 146 of SEQ ID NO: 1562640
gauuguuaauugccuggau

SEQ ID NO: 1762024 - RNA, 19 nt, Artificial Sequence
  Description of Artificial Sequence: Synthetic oligonucleotide
  Antisense strand to SEQ ID NO: 1762023
auccaggcaauuaacaauc

SEQ ID NO: 1762025 - RNA, 19 nt, Artificial Sequence
  Description of Artificial Sequence: Synthetic oligonucleotide
  Sense strand starting at position 205 of SEQ ID NO: 1562640
ugcacuaguagaggaauaa

SEQ ID NO: 1762026 - RNA, 19 nt, Artificial Sequence
  Description of Artificial Sequence: Synthetic oligonucleotide
  Antisense strand to SEQ ID NO: 1762025
uuauuccucuacuagugca

SEQ ID NO: 1762027 - RNA, 19 nt, Artificial Sequence
  Description of Artificial Sequence: Synthetic oligonucleotide
  Sense strand starting at position 218 of SEQ ID NO: 1562640
gaauaagacuggcuugaac

SEQ ID NO: 1762028 - RNA, 19 nt, Artificial Sequence
  Description of Artificial Sequence: Synthetic oligonucleotide
  Antisense strand to SEQ ID NO: 1762027
guucaagccagucuuauuc

SEQ ID NO: 1762029 - RNA, 19 nt, Artificial Sequence
  Description of Artificial Sequence: Synthetic oligonucleotide
  Sense strand starting at position 220 of SEQ ID NO: 1562640
auaagacuggcuugaacuu

SEQ ID NO: 1762030 - RNA, 19 nt, Artificial Sequence
  Description of Artificial Sequence: Synthetic oligonucleotide
  Antisense strand to SEQ ID NO: 1762029
aaguucaagccagucuuau

SEQ ID NO: 1762031 - RNA, 19 nt, Artificial Sequence
  Description of Artificial Sequence: Synthetic oligonucleotide
  Sense strand starting at position 281 of SEQ ID NO: 1562640
guaaauagguugcuauaag

SEQ ID NO: 1762032 - RNA, 19 nt, Artificial Sequence
  Description of Artificial Sequence: Synthetic oligonucleotide
  Antisense strand to SEQ ID NO: 1762031
cuuauagcaaccuauuuac

SEQ ID NO: 1762033 - RNA, 19 nt, Artificial Sequence
  Description of Artificial Sequence: Synthetic oligonucleotide
  Sense strand starting at position 319 of SEQ ID NO: 1562640
ugaaguguugggcacagua

SEQ ID NO: 1762034 - RNA, 19 nt, Artificial Sequence
  Description of Artificial Sequence: Synthetic oligonucleotide
  Antisense strand to SEQ ID NO: 1762033
uacugugcccaacacuuca

SEQ ID NO: 1762035 - RNA, 19 nt, Artificial Sequence
  Description of Artificial Sequence: Synthetic oligonucleotide
  Sense strand starting at position 1250 of SEQ ID NO: 1562640
gaauuaagggcguaggauu

SEQ ID NO: 1762036 - RNA, 19 nt, Artificial Sequence
  Description of Artificial Sequence: Synthetic oligonucleotide
  Antisense strand to SEQ ID NO: 1762035
aauccuacgcccuuaauuc

SEQ ID NO: 1762037 - RNA, 19 nt, Artificial Sequence
  Description of Artificial Sequence: Synthetic oligonucleotide
  Sense strand starting at position 1365 of SEQ ID NO: 1562640
ggcucuccuaaaugagaga

SEQ ID NO: 1762038 - RNA, 19 nt, Artificial Sequence
  Description of Artificial Sequence: Synthetic oligonucleotide
  Antisense strand to SEQ ID NO: 1762037
ucucucauuuaggagagcc

SEQ ID NO: 1762039 - RNA, 19 nt, Artificial Sequence
  Description of Artificial Sequence: Synthetic oligonucleotide
  Sense strand starting at position 2051 of SEQ ID NO: 1562640
ugguguucugguagcgaaa

SEQ ID NO: 1762040 - RNA, 19 nt, Artificial Sequence
  Description of Artificial Sequence: Synthetic oligonucleotide
  Antisense strand to SEQ ID NO: 1762039
uuucgcuaccagaacacca

SEQ ID NO: 1762041 - RNA, 19 nt, Artificial Sequence
  Description of Artificial Sequence: Synthetic oligonucleotide
  Sense strand starting at position 2054 of SEQ ID NO: 1562640
uguucugguagcgaaauga

SEQ ID NO: 1762042 - RNA, 19 nt, Artificial Sequence
  Description of Artificial Sequence: Synthetic oligonucleotide
  Antisense strand to SEQ ID NO: 1762041
ucauuucgcuaccagaaca

SEQ ID NO: 1762043 - RNA, 19 nt, Artificial Sequence
  Description of Artificial Sequence: Synthetic oligonucleotide
  Sense strand starting at position 2134 of SEQ ID NO: 1562640
gcuucuuagaaauguggag

SEQ ID NO: 1762044 - RNA, 19 nt, Artificial Sequence
  Description of Artificial Sequence: Synthetic oligonucleotide
  Antisense strand to SEQ ID NO: 1762043
cuccacauuucuaagaagc

SEQ ID NO: 1762045 - RNA, 19 nt, Artificial Sequence
  Description of Artificial Sequence: Synthetic oligonucleotide
  Sense strand starting at position 2147 of SEQ ID NO: 1562640
guggagucuccgccguaga

SEQ ID NO: 1762046 - RNA, 19 nt, Artificial Sequence
  Description of Artificial Sequence: Synthetic oligonucleotide
  Antisense strand to SEQ ID NO: 1762045
ucuacggcggagacuccac

SEQ ID NO: 1762047 - RNA, 19 nt, Artificial Sequence
  Description of Artificial Sequence: Synthetic oligonucleotide
  Sense strand starting at position 2332 of SEQ ID NO: 1562640
ggauguuaauucucagcau

SEQ ID NO: 1762048 - RNA, 19 nt, Artificial Sequence
  Description of Artificial Sequence: Synthetic oligonucleotide
  Antisense strand to SEQ ID NO: 1762047
augcugagaauuaacaucc

SEQ ID NO: 1762049 - RNA, 19 nt, Artificial Sequence
  Description of Artificial Sequence: Synthetic oligonucleotide
  Sense strand starting at position 2461 of SEQ ID NO: 1562640
auaugagaaugcucaccaa

SEQ ID NO: 1762050 - RNA, 19 nt, Artificial Sequence
  Description of Artificial Sequence: Synthetic oligonucleotide
  Antisense strand to SEQ ID NO: 1762049
uuggugagcauucucauau

SEQ ID NO: 1762051 - RNA, 19 nt, Artificial Sequence
  Description of Artificial Sequence: Synthetic oligonucleotide
  Sense strand starting at position 2464 of SEQ ID NO: 1562640
ugagaaugcucaccaaaug

SEQ ID NO: 1762052 - RNA, 19 nt, Artificial Sequence
  Description of Artificial Sequence: Synthetic oligonucleotide
  Antisense strand to SEQ ID NO: 1762051
cauuuggugagcauucuca

SEQ ID NO: 1762053 - RNA, 19 nt, Artificial Sequence
  Description of Artificial Sequence: Synthetic oligonucleotide
  Sense strand starting at position 2465 of SEQ ID NO: 1562640
gagaaugcucaccaaaugu

SEQ ID NO: 1762054 - RNA, 19 nt, Artificial Sequence
  Description of Artificial Sequence: Synthetic oligonucleotide
  Antisense strand to SEQ ID NO: 1762053
acauuuggugagcauucuc

SEQ ID NO: 1762055 - RNA, 19 nt, Artificial Sequence
  Description of Artificial Sequence: Synthetic oligonucleotide
  Sense strand starting at position 2577 of SEQ ID NO: 1562640
ugauaugcccugugauaga

SEQ ID NO: 1762056 - RNA, 19 nt, Artificial Sequence
  Description of Artificial Sequence: Synthetic oligonucleotide
  Antisense strand to SEQ ID NO: 1762055
ucuaucacagggcauauca

SEQ ID NO: 1762057 - RNA, 19 nt, Artificial Sequence
  Description of Artificial Sequence: Synthetic oligonucleotide
  Sense strand starting at position 2582 of SEQ ID NO: 1562640
ugcccugugauagaaguuu

SEQ ID NO: 1762058 - RNA, 19 nt, Artificial Sequence
  Description of Artificial Sequence: Synthetic oligonucleotide
  Antisense strand to SEQ ID NO: 1762057
aaacuucuaucacagggca

SEQ ID NO: 1762059 - RNA, 19 nt, Artificial Sequence
  Description of Artificial Sequence: Synthetic oligonucleotide
  Sense strand starting at position 2703 of SEQ ID NO: 1562640
gaguuugccagguagguga

SEQ ID NO: 1762060 - RNA, 19 nt, Artificial Sequence
  Description of Artificial Sequence: Synthetic oligonucleotide
  Antisense strand to SEQ ID NO: 1762059
ucaccuaccuggcaaacuc

SEQ ID NO: 1762061 - RNA, 19 nt, Artificial Sequence
  Description of Artificial Sequence: Synthetic oligonucleotide
  Sense strand starting at position 2920 of SEQ ID NO: 1562640
cagauaauaugcgcaaaga

SEQ ID NO: 1762062 - RNA, 19 nt, Artificial Sequence
  Description of Artificial Sequence: Synthetic oligonucleotide
  Antisense strand to SEQ ID NO: 1762061
ucuuugcgcauauuaucug

SEQ ID NO: 1762063 - RNA, 19 nt, Artificial Sequence
  Description of Artificial Sequence: Synthetic oligonucleotide
  Sense strand starting at position 2921 of SEQ ID NO: 1562640
agauaauaugcgcaaagac

SEQ ID NO: 1762064 - RNA, 19 nt, Artificial Sequence
  Description of Artificial Sequence: Synthetic oligonucleotide
  Antisense strand to SEQ ID NO: 1762063
gucuuugcgcauauuaucu

SEQ ID NO: 1762065 - RNA, 19 nt, Artificial Sequence
  Description of Artificial Sequence: Synthetic oligonucleotide
  Sense strand starting at position 2933 of SEQ ID NO: 1562640
caaagacaccgaggugaau

SEQ ID NO: 1762066 - RNA, 19 nt, Artificial Sequence
  Description of Artificial Sequence: Synthetic oligonucleotide
  Antisense strand to SEQ ID NO: 1762065
auucaccucggugucuuug

SEQ ID NO: 1762067 - RNA, 19 nt, Artificial Sequence
  Description of Artificial Sequence: Synthetic oligonucleotide
  Sense strand starting at position 2956 of SEQ ID NO: 1562640
cggugucucugaucaagag

SEQ ID NO: 1762068 - RNA, 19 nt, Artificial Sequence
  Description of Artificial Sequence: Synthetic oligonucleotide
  Antisense strand to SEQ ID NO: 1762067
cucuugaucagagacaccg

SEQ ID NO: 1762069 - RNA, 19 nt, Artificial Sequence
  Description of Artificial Sequence: Synthetic oligonucleotide
  Sense strand starting at position 2957 of SEQ ID NO: 1562640
ggugucucugaucaagagu

SEQ ID NO: 1762070 - RNA, 19 nt, Artificial Sequence
  Description of Artificial Sequence: Synthetic oligonucleotide
  Antisense strand to SEQ ID NO: 1762069
acucuugaucagagacacc

SEQ ID NO: 1762071 - RNA, 19 nt, Artificial Sequence
  Description of Artificial Sequence: Synthetic oligonucleotide
  Sense strand starting at position 2979 of SEQ ID NO: 1562640
ugaacaaguguugaagcau

SEQ ID NO: 1762072 - RNA, 19 nt, Artificial Sequence
  Description of Artificial Sequence: Synthetic oligonucleotide
  Antisense strand to SEQ ID NO: 1762071
augcuucaacacuuguuca

SEQ ID NO: 1762073 - RNA, 19 nt, Artificial Sequence
  Description of Artificial Sequence: Synthetic oligonucleotide
  Sense strand starting at position 2985 of SEQ ID NO: 1562640
aguguugaagcauagacuu

SEQ ID NO: 1762074 - RNA, 19 nt, Artificial Sequence
  Description of Artificial Sequence: Synthetic oligonucleotide
  Antisense strand to SEQ ID NO: 1762073
aagucuaugcuucaacacu

SEQ ID NO: 1762075 - RNA, 19 nt, Artificial Sequence
  Description of Artificial Sequence: Synthetic oligonucleotide
  Sense strand starting at position 3023 of SEQ ID NO: 1562640
augcgauucuuacuuagga

SEQ ID NO: 1762076 - RNA, 19 nt, Artificial Sequence
  Description of Artificial Sequence: Synthetic oligonucleotide
  Antisense strand to SEQ ID NO: 1762075
uccuaaguaagaaucgcau

SEQ ID NO: 1762077 - RNA, 19 nt, Artificial Sequence
  Description of Artificial Sequence: Synthetic oligonucleotide
  Sense strand starting at position 3025 of SEQ ID NO: 1562640
gcgauucuuacuuaggauu

SEQ ID NO: 1762078 - RNA, 19 nt, Artificial Sequence
  Description of Artificial Sequence: Synthetic oligonucleotide
  Antisense strand to SEQ ID NO: 1762077
aauccuaaguaagaaucgc

SEQ ID NO: 1762079 - RNA, 19 nt, Artificial Sequence
  Description of Artificial Sequence: Synthetic oligonucleotide
  Sense strand starting at position 3028 of SEQ ID NO: 1562640
auucuuacuuaggauuuga

SEQ ID NO: 1762080 - RNA, 19 nt, Artificial Sequence
  Description of Artificial Sequence: Synthetic oligonucleotide
  Antisense strand to SEQ ID NO: 1762079
ucaaauccuaaguaagaau

SEQ ID NO: 1762081 - RNA, 19 nt, Artificial Sequence
  Description of Artificial Sequence: Synthetic oligonucleotide
  Sense strand starting at position 3184 of SEQ ID NO: 1562640
gaaggccuggccgagauua

SEQ ID NO: 1762082 - RNA, 19 nt, Artificial Sequence
  Description of Artificial Sequence: Synthetic oligonucleotide
  Antisense strand to SEQ ID NO: 1762081
uaaucucggccaggccuuc

SEQ ID NO: 1762083 - RNA, 19 nt, Artificial Sequence
  Description of Artificial Sequence: Synthetic oligonucleotide
  Sense strand starting at position 3297 of SEQ ID NO: 1562640
ucaucuguaauguggagau

SEQ ID NO: 1762084 - RNA, 19 nt, Artificial Sequence
  Description of Artificial Sequence: Synthetic oligonucleotide
  Antisense strand to SEQ ID NO: 1762083
aucuccacauuacagauga

SEQ ID NO: 1762085 - RNA, 19 nt, Artificial Sequence
  Description of Artificial Sequence: Synthetic oligonucleotide
  Sense strand starting at position 3821 of SEQ ID NO: 1562640
cugagucaccgggauuaua

SEQ ID NO: 1762086 - RNA, 19 nt, Artificial Sequence
  Description of Artificial Sequence: Synthetic oligonucleotide
  Antisense strand to SEQ ID NO: 1762085
uauaaucccggugacucag

SEQ ID NO: 1762087 - RNA, 19 nt, Artificial Sequence
  Description of Artificial Sequence: Synthetic oligonucleotide
  Sense strand starting at position 3861 of SEQ ID NO: 1562640
cuugauaaacguuauuauc

SEQ ID NO: 1762088 - RNA, 19 nt, Artificial Sequence
  Description of Artificial Sequence: Synthetic oligonucleotide
  Antisense strand to SEQ ID NO: 1762087
gauaauaacguuuaucaag

SEQ ID NO: 1762089 - RNA, 19 nt, Artificial Sequence
  Description of Artificial Sequence: Synthetic oligonucleotide
  Sense strand starting at position 3874 of SEQ ID NO: 1562640
auuaucaucgaguguggaa

SEQ ID NO: 1762090 - RNA, 19 nt, Artificial Sequence
  Description of Artificial Sequence: Synthetic oligonucleotide
  Antisense strand to SEQ ID NO: 1762089
uuccacacucgaugauaau

SEQ ID NO: 1762091 - RNA, 19 nt, Artificial Sequence
  Description of Artificial Sequence: Synthetic oligonucleotide
  Sense strand starting at position 3940 of SEQ ID NO: 1562640
guagcuauuccugaggaaa

SEQ ID NO: 1762092 - RNA, 19 nt, Artificial Sequence
  Description of Artificial Sequence: Synthetic oligonucleotide
  Antisense strand to SEQ ID NO: 1762091
uuuccucaggaauagcuac

SEQ ID NO: 1762093 - RNA, 19 nt, Artificial Sequence
  Description of Artificial Sequence: Synthetic oligonucleotide
  Sense strand starting at position 3968 of SEQ ID NO: 1562640
gaugaaagugcccaguagu

SEQ ID NO: 1762094 - RNA, 19 nt, Artificial Sequence
  Description of Artificial Sequence: Synthetic oligonucleotide
  Antisense strand to SEQ ID NO: 1762093
acuacugggcacuuucauc

SEQ ID NO: 1762095 - RNA, 19 nt, Artificial Sequence
  Description of Artificial Sequence: Synthetic oligonucleotide
  Sense strand starting at position 3971 of SEQ ID NO: 1562640
gaaagugcccaguaguuag

SEQ ID NO: 1762096 - RNA, 19 nt, Artificial Sequence
  Description of Artificial Sequence: Synthetic oligonucleotide
  Antisense strand to SEQ ID NO: 1762095
cuaacuacugggcacuuuc

SEQ ID NO: 1762097 - RNA, 19 nt, Artificial Sequence
  Description of Artificial Sequence: Synthetic oligonucleotide
  Sense strand starting at position 21 of SEQ ID NO: 1562641
ggugauuguucccuucuug

SEQ ID NO: 1762098 - RNA, 19 nt, Artificial Sequence
  Description of Artificial Sequence: Synthetic oligonucleotide
  Antisense strand to SEQ ID NO: 1762097
caagaagggaacaaucacc

SEQ ID NO: 1762099 - RNA, 19 nt, Artificial Sequence
  Description of Artificial Sequence: Synthetic oligonucleotide
  Sense strand starting at position 141 of SEQ ID NO: 1562641
uccagaucuccugaugugu

SEQ ID NO: 1762100 - RNA, 19 nt, Artificial Sequence
  Description of Artificial Sequence: Synthetic oligonucleotide
  Antisense strand to SEQ ID NO: 1762099
acacaucaggagaucugga

SEQ ID NO: 1762101 - RNA, 19 nt, Artificial Sequence
  Description of Artificial Sequence: Synthetic oligonucleotide
  Sense strand starting at position 149 of SEQ ID NO: 1562641
uccugaugugugggacuuu

SEQ ID NO: 1762102 - RNA, 19 nt, Artificial Sequence
  Description of Artificial Sequence: Synthetic oligonucleotide
  Antisense strand to SEQ ID NO: 1762101
aaagucccacacaucagga

SEQ ID NO: 1762103 - RNA, 19 nt, Artificial Sequence
  Description of Artificial Sequence: Synthetic oligonucleotide
  Sense strand starting at position 225 of SEQ ID NO: 1562641
cucgaaauccuugggcuuu

SEQ ID NO: 1762104 - RNA, 19 nt, Artificial Sequence
  Description of Artificial Sequence: Synthetic oligonucleotide
  Antisense strand to SEQ ID NO: 1762103
aaagcccaaggauuucgag

SEQ ID NO: 1762105 - RNA, 19 nt, Artificial Sequence
  Description of Artificial Sequence: Synthetic oligonucleotide
  Sense strand starting at position 227 of SEQ ID NO: 1562641
cgaaauccuugggcuuuga

SEQ ID NO: 1762106 - RNA, 19 nt, Artificial Sequence
  Description of Artificial Sequence: Synthetic oligonucleotide
  Antisense strand to SEQ ID NO: 1762105
ucaaagcccaaggauuucg

SEQ ID NO: 1762107 - RNA, 19 nt, Artificial Sequence
  Description of Artificial Sequence: Synthetic oligonucleotide
  Sense strand starting at position 231 of SEQ ID NO: 1562641
auccuugggcuuugacuau

SEQ ID NO: 1762108 - RNA, 19 nt, Artificial Sequence
  Description of Artificial Sequence: Synthetic oligonucleotide
  Antisense strand to SEQ ID NO: 1762107
auagucaaagcccaaggau

SEQ ID NO: 1762109 - RNA, 19 nt, Artificial Sequence
  Description of Artificial Sequence: Synthetic oligonucleotide
  Sense strand starting at position 243 of SEQ ID NO: 1562641
ugacuauuaggguguccca

SEQ ID NO: 1762110 - RNA, 19 nt, Artificial Sequence
  Description of Artificial Sequence: Synthetic oligonucleotide
  Antisense strand to SEQ ID NO: 1762109
ugggacacccuaauaguca

SEQ ID NO: 1762111 - RNA, 19 nt, Artificial Sequence
  Description of Artificial Sequence: Synthetic oligonucleotide
  Sense strand starting at position 346 of SEQ ID NO: 1562641
ugccaucacgucugagaca

SEQ ID NO: 1762112 - RNA, 19 nt, Artificial Sequence
  Description of Artificial Sequence: Synthetic oligonucleotide
  Antisense strand to SEQ ID NO: 1762111
ugucucagacgugauggca

SEQ ID NO: 1762113 - RNA, 19 nt, Artificial Sequence
  Description of Artificial Sequence: Synthetic oligonucleotide
  Sense strand starting at position 351 of SEQ ID NO: 1562641
ucacgucugagacagcuaa

SEQ ID NO: 1762114 - RNA, 19 nt, Artificial Sequence
  Description of Artificial Sequence: Synthetic oligonucleotide
  Antisense strand to SEQ ID NO: 1762113
uuagcugucucagacguga

SEQ ID NO: 1762115 - RNA, 19 nt, Artificial Sequence
  Description of Artificial Sequence: Synthetic oligonucleotide
  Sense strand starting at position 371 of SEQ ID NO: 1562641
ccugcauucucugccaaag

SEQ ID NO: 1762116 - RNA, 19 nt, Artificial Sequence
  Description of Artificial Sequence: Synthetic oligonucleotide
  Antisense strand to SEQ ID NO: 1762115
cuuuggcagagaaugcagg

SEQ ID NO: 1762117 - RNA, 19 nt, Artificial Sequence
  Description of Artificial Sequence: Synthetic oligonucleotide
  Sense strand starting at position 510 of SEQ ID NO: 1562641
cuggaaucagucugggauc

SEQ ID NO: 1762118 - RNA, 19 nt, Artificial Sequence
  Description of Artificial Sequence: Synthetic oligonucleotide
  Antisense strand to SEQ ID NO: 1762117
gaucccagacugauuccag

SEQ ID NO: 1762119 - RNA, 19 nt, Artificial Sequence
  Description of Artificial Sequence: Synthetic oligonucleotide
  Sense strand starting at position 512 of SEQ ID NO: 1562641
ggaaucagucugggaucuu

SEQ ID NO: 1762120 - RNA, 19 nt, Artificial Sequence
  Description of Artificial Sequence: Synthetic oligonucleotide
  Antisense strand to SEQ ID NO: 1762119
aagaucccagacugauucc

SEQ ID NO: 1762121 - RNA, 19 nt, Artificial Sequence
  Description of Artificial Sequence: Synthetic oligonucleotide
  Sense strand starting at position 626 of SEQ ID NO: 1562641
gcaggugugccuguacauu

SEQ ID NO: 1762122 - RNA, 19 nt, Artificial Sequence
  Description of Artificial Sequence: Synthetic oligonucleotide
  Antisense strand to SEQ ID NO: 1762121
aauguacaggcacaccugc

SEQ ID NO: 1762123 - RNA, 19 nt, Artificial Sequence
  Description of Artificial Sequence: Synthetic oligonucleotide
  Sense strand starting at position 762 of SEQ ID NO: 1562641
ucagguaaaugaucuccau

SEQ ID NO: 1762124 - RNA, 19 nt, Artificial Sequence
  Description of Artificial Sequence: Synthetic oligonucleotide
  Antisense strand to SEQ ID NO: 1762123
auggagaucauuuaccuga

SEQ ID NO: 1762125 - RNA, 19 nt, Artificial Sequence
  Description of Artificial Sequence: Synthetic oligonucleotide
  Sense strand starting at position 765 of SEQ ID NO: 1562641
gguaaaugaucuccaucca

SEQ ID NO: 1762126 - RNA, 19 nt, Artificial Sequence
  Description of Artificial Sequence: Synthetic oligonucleotide
  Antisense strand to SEQ ID NO: 1762125
uggauggagaucauuuacc

SEQ ID NO: 1762127 - RNA, 19 nt, Artificial Sequence
  Description of Artificial Sequence: Synthetic oligonucleotide
  Sense strand starting at position 810 of SEQ ID NO: 1562641
cauacuuguccgccagugu

SEQ ID NO: 1762128 - RNA, 19 nt, Artificial Sequence
  Description of Artificial Sequence: Synthetic oligonucleotide
  Antisense strand to SEQ ID NO: 1762127
acacuggcggacaaguaug

SEQ ID NO: 1762129 - RNA, 19 nt, Artificial Sequence
  Description of Artificial Sequence: Synthetic oligonucleotide
  Sense strand starting at position 926 of SEQ ID NO: 1562641
uuacuaaauugagcuagau

SEQ ID NO: 1762130 - RNA, 19 nt, Artificial Sequence
  Description of Artificial Sequence: Synthetic oligonucleotide
  Antisense strand to SEQ ID NO: 1762129
aucuagcucaauuuaguaa

SEQ ID NO: 1762131 - RNA, 19 nt, Artificial Sequence
  Description of Artificial Sequence: Synthetic oligonucleotide
  Sense strand starting at position 1055 of SEQ ID NO: 1562641
cagagcuucccagauauug

SEQ ID NO: 1762132 - RNA, 19 nt, Artificial Sequence
  Description of Artificial Sequence: Synthetic oligonucleotide
  Antisense strand to SEQ ID NO: 1762131
caauaucugggaagcucug

SEQ ID NO: 1762133 - RNA, 19 nt, Artificial Sequence
  Description of Artificial Sequence: Synthetic oligonucleotide
  Sense strand starting at position 1090 of SEQ ID NO: 1562641
gcaggaauccuccaguguc

SEQ ID NO: 1762134 - RNA, 19 nt, Artificial Sequence
  Description of Artificial Sequence: Synthetic oligonucleotide
  Antisense strand to SEQ ID NO: 1762133
gacacuggaggauuccugc

SEQ ID NO: 1762135 - RNA, 19 nt, Artificial Sequence
  Description of Artificial Sequence: Synthetic oligonucleotide
  Sense strand starting at position 1396 of SEQ ID NO: 1562641
caaggcuuccgucagcaga

SEQ ID NO: 1762136 - RNA, 19 nt, Artificial Sequence
  Description of Artificial Sequence: Synthetic oligonucleotide
  Antisense strand to SEQ ID NO: 1762135
ucugcugacggaagccuug

SEQ ID NO: 1762137 - RNA, 19 nt, Artificial Sequence
  Description of Artificial Sequence: Synthetic oligonucleotide
  Sense strand starting at position 1811 of SEQ ID NO: 1562641
gacaccgaucguugaaagu

SEQ ID NO: 1762138 - RNA, 19 nt, Artificial Sequence
  Description of Artificial Sequence: Synthetic oligonucleotide
  Antisense strand to SEQ ID NO: 1762137
acuuucaacgaucgguguc

SEQ ID NO: 1762139 - RNA, 19 nt, Artificial Sequence
  Description of Artificial Sequence: Synthetic oligonucleotide
  Sense strand starting at position 1820 of SEQ ID NO: 1562641
cguugaaaguacucaagag

SEQ ID NO: 1762140 - RNA, 19 nt, Artificial Sequence
  Description of Artificial Sequence: Synthetic oligonucleotide
  Antisense strand to SEQ ID NO: 1762139
cucuugaguacuuucaacg

SEQ ID NO: 1762141 - RNA, 19 nt, Artificial Sequence
  Description of Artificial Sequence: Synthetic oligonucleotide
  Sense strand starting at position 1868 of SEQ ID NO: 1562641
uugauugguaucugaagac

SEQ ID NO: 1762142 - RNA, 19 nt, Artificial Sequence
  Description of Artificial Sequence: Synthetic oligonucleotide
  Antisense strand to SEQ ID NO: 1762141
gucuucagauaccaaucaa

SEQ ID NO: 1762143 - RNA, 19 nt, Artificial Sequence
  Description of Artificial Sequence: Synthetic oligonucleotide
  Sense strand starting at position 1997 of SEQ ID NO: 1562641
caaccuugguggcugaaau

SEQ ID NO: 1762144 - RNA, 19 nt, Artificial Sequence
  Description of Artificial Sequence: Synthetic oligonucleotide
  Antisense strand to SEQ ID NO: 1762143
auuucagccaccaagguug

SEQ ID NO: 1762145 - RNA, 19 nt, Artificial Sequence
  Description of Artificial Sequence: Synthetic oligonucleotide
  Sense strand starting at position 2076 of SEQ ID NO: 1562641
acagaaggcugguuagaac

SEQ ID NO: 1762146 - RNA, 19 nt, Artificial Sequence
  Description of Artificial Sequence: Synthetic oligonucleotide
  Antisense strand to SEQ ID NO: 1762145
guucuaaccagccuucugu

SEQ ID NO: 1762147 - RNA, 19 nt, Artificial Sequence
  Description of Artificial Sequence: Synthetic oligonucleotide
  Sense strand starting at position 2125 of SEQ ID NO: 1562641
ggccuuguccagcaaugga

SEQ ID NO: 1762148 - RNA, 19 nt, Artificial Sequence
  Description of Artificial Sequence: Synthetic oligonucleotide
  Antisense strand to SEQ ID NO: 1762147
uccauugcuggacaaggcc

SEQ ID NO: 1762149 - RNA, 19 nt, Artificial Sequence
  Description of Artificial Sequence: Synthetic oligonucleotide
  Sense strand starting at position 2164 of SEQ ID NO: 1562641
agguuugagacuuguuuaa

SEQ ID NO: 1762150 - RNA, 19 nt, Artificial Sequence
  Description of Artificial Sequence: Synthetic oligonucleotide
  Antisense strand to SEQ ID NO: 1762149
uuaaacaagucucaaaccu

SEQ ID NO: 1762151 - RNA, 19 nt, Artificial Sequence
  Description of Artificial Sequence: Synthetic oligonucleotide
  Sense strand starting at position 2166 of SEQ ID NO: 1562641
guuugagacuuguuuaaac

SEQ ID NO: 1762152 - RNA, 19 nt, Artificial Sequence
  Description of Artificial Sequence: Synthetic oligonucleotide
  Antisense strand to SEQ ID NO: 1762151
guuuaaacaagucucaaac

SEQ ID NO: 1762153 - RNA, 19 nt, Artificial Sequence
  Description of Artificial Sequence: Synthetic oligonucleotide
  Sense strand starting at position 2168 of SEQ ID NO: 1562641
uugagacuuguuuaaacgu

SEQ ID NO: 1762154 - RNA, 19 nt, Artificial Sequence
  Description of Artificial Sequence: Synthetic oligonucleotide
  Antisense strand to SEQ ID NO: 1762153
acguuuaaacaagucucaa

SEQ ID NO: 1762155 - RNA, 19 nt, Artificial Sequence
  Description of Artificial Sequence: Synthetic oligonucleotide
  Sense strand starting at position 2174 of SEQ ID NO: 1562641
cuuguuuaaacguaagaga

SEQ ID NO: 1762156 - RNA, 19 nt, Artificial Sequence
  Description of Artificial Sequence: Synthetic oligonucleotide
  Antisense strand to SEQ ID NO: 1762155
ucucuuacguuuaaacaag

SEQ ID NO: 1762157 - RNA, 19 nt, Artificial Sequence
  Description of Artificial Sequence: Synthetic oligonucleotide
  Sense strand starting at position 2833 of SEQ ID NO: 1562641
agagaugaugucuguguuu

SEQ ID NO: 1762158 - RNA, 19 nt, Artificial Sequence
  Description of Artificial Sequence: Synthetic oligonucleotide
  Antisense strand to SEQ ID NO: 1762157
aaacacagacaucaucucu

SEQ ID NO: 1762159 - RNA, 19 nt, Artificial Sequence
  Description of Artificial Sequence: Synthetic oligonucleotide
  Sense strand starting at position 2878 of SEQ ID NO: 1562641
ugcaguacuguguaauauu

SEQ ID NO: 1762160 - RNA, 19 nt, Artificial Sequence
  Description of Artificial Sequence: Synthetic oligonucleotide
  Antisense strand to SEQ ID NO: 1762159
aauauuacacaguacugca

SEQ ID NO: 1762161 - RNA, 19 nt, Artificial Sequence
  Description of Artificial Sequence: Synthetic oligonucleotide
  Sense strand starting at position 2927 of SEQ ID NO: 1562641
uuggguaucuuaucaguuu

SEQ ID NO: 1762162 - RNA, 19 nt, Artificial Sequence
  Description of Artificial Sequence: Synthetic oligonucleotide
  Antisense strand to SEQ ID NO: 1762161
aaacugauaagauacccaa

SEQ ID NO: 1762163 - RNA, 19 nt, Artificial Sequence
  Description of Artificial Sequence: Synthetic oligonucleotide
  Sense strand starting at position 2954 of SEQ ID NO: 1562641
guaucagguuucuuagggu

SEQ ID NO: 1762164 - RNA, 19 nt, Artificial Sequence
  Description of Artificial Sequence: Synthetic oligonucleotide
  Antisense strand to SEQ ID NO: 1762163
acccuaagaaaccugauac

SEQ ID NO: 1762165 - RNA, 19 nt, Artificial Sequence
  Description of Artificial Sequence: Synthetic oligonucleotide
  Sense strand starting at position 3292 of SEQ ID NO: 1562641
agccuacucggguaaugau

SEQ ID NO: 1762166 - RNA, 19 nt, Artificial Sequence
  Description of Artificial Sequence: Synthetic oligonucleotide
  Antisense strand to SEQ ID NO: 1762165
aucauuacccgaguaggcu

SEQ ID NO: 1762167 - RNA, 19 nt, Artificial Sequence
  Description of Artificial Sequence: Synthetic oligonucleotide
  Sense strand starting at position 3523 of SEQ ID NO: 1562641
agagauaaccauuguuuac

SEQ ID NO: 1762168 - RNA, 19 nt, Artificial Sequence
  Description of Artificial Sequence: Synthetic oligonucleotide
  Antisense strand to SEQ ID NO: 1762167
guaaacaaugguuaucucu

SEQ ID NO: 1762169 - RNA, 19 nt, Artificial Sequence
  Description of Artificial Sequence: Synthetic oligonucleotide
  Sense strand starting at position 3627 of SEQ ID NO: 1562641
auaugcuauucugugauca

SEQ ID NO: 1762170 - RNA, 19 nt, Artificial Sequence
  Description of Artificial Sequence: Synthetic oligonucleotide
  Antisense strand to SEQ ID NO: 1762169
ugaucacagaauagcauau

SEQ ID NO: 1762171 - RNA, 19 nt, Artificial Sequence
  Description of Artificial Sequence: Synthetic oligonucleotide
  Sense strand starting at position 3631 of SEQ ID NO: 1562641
gcuauucugugaucauuuc

SEQ ID NO: 1762172 - RNA, 19 nt, Artificial Sequence
  Description of Artificial Sequence: Synthetic oligonucleotide
  Antisense strand to SEQ ID NO: 1762171
gaaaugaucacagaauagc

SEQ ID NO: 1762173 - RNA, 19 nt, Artificial Sequence
  Description of Artificial Sequence: Synthetic oligonucleotide
  Sense strand starting at position 3657 of SEQ ID NO: 1562641
acauuaucuuggcucagag

SEQ ID NO: 1762174 - RNA, 19 nt, Artificial Sequence
  Description of Artificial Sequence: Synthetic oligonucleotide
  Antisense strand to SEQ ID NO: 1762173
cucugagccaagauaaugu

SEQ ID NO: 1762175 - RNA, 19 nt, Artificial Sequence
  Description of Artificial Sequence: Synthetic oligonucleotide
  Sense strand starting at position 3667 of SEQ ID NO: 1562641
ggcucagagaaauguuucu

SEQ ID NO: 1762176 - RNA, 19 nt, Artificial Sequence
  Description of Artificial Sequence: Synthetic oligonucleotide
  Antisense strand to SEQ ID NO: 1762175
agaaacauuucucugagcc

SEQ ID NO: 1762177 - RNA, 19 nt, Artificial Sequence
  Description of Artificial Sequence: Synthetic oligonucleotide
  Sense strand starting at position 171 of SEQ ID NO: 1562642
gcccguuaguguucagaac

SEQ ID NO: 1762178 - RNA, 19 nt, Artificial Sequence
  Description of Artificial Sequence: Synthetic oligonucleotide
  Antisense strand to SEQ ID NO: 1762177
guucugaacacuaacgggc

SEQ ID NO: 1762179 - RNA, 19 nt, Artificial Sequence
  Description of Artificial Sequence: Synthetic oligonucleotide
  Sense strand starting at position 249 of SEQ ID NO: 1562642
gaccaacauugcugguaaa

SEQ ID NO: 1762180 - RNA, 19 nt, Artificial Sequence
  Description of Artificial Sequence: Synthetic oligonucleotide
  Antisense strand to SEQ ID NO: 1762179
uuuaccagcaauguugguc

SEQ ID NO: 1762181 - RNA, 19 nt, Artificial Sequence
  Description of Artificial Sequence: Synthetic oligonucleotide
  Sense strand starting at position 250 of SEQ ID NO: 1562642
accaacauugcugguaaau

SEQ ID NO: 1762182 - RNA, 19 nt, Artificial Sequence
  Description of Artificial Sequence: Synthetic oligonucleotide
  Antisense strand to SEQ ID NO: 1762181
auuuaccagcaauguuggu

SEQ ID NO: 1762183 - RNA, 19 nt, Artificial Sequence
  Description of Artificial Sequence: Synthetic oligonucleotide
  Sense strand starting at position 434 of SEQ ID NO: 1562642
gccucaguguccuuggagu

SEQ ID NO: 1762184 - RNA, 19 nt, Artificial Sequence
  Description of Artificial Sequence: Synthetic oligonucleotide
  Antisense strand to SEQ ID NO: 1762183
acuccaaggacacugaggc

SEQ ID NO: 1762185 - RNA, 19 nt, Artificial Sequence
  Description of Artificial Sequence: Synthetic oligonucleotide
  Sense strand starting at position 816 of SEQ ID NO: 1562642
ugcucuggucccuggaaua

SEQ ID NO: 1762186 - RNA, 19 nt, Artificial Sequence
  Description of Artificial Sequence: Synthetic oligonucleotide
  Antisense strand to SEQ ID NO: 1762185
uauuccagggaccagagca

SEQ ID NO: 1762187 - RNA, 19 nt, Artificial Sequence
  Description of Artificial Sequence: Synthetic oligonucleotide
  Sense strand starting at position 1166 of SEQ ID NO: 1562642
gccucaguuucccggucua

SEQ ID NO: 1762188 - RNA, 19 nt, Artificial Sequence
  Description of Artificial Sequence: Synthetic oligonucleotide
  Antisense strand to SEQ ID NO: 1762187
uagaccgggaaacugaggc

SEQ ID NO: 1762189 - RNA, 19 nt, Artificial Sequence
  Description of Artificial Sequence: Synthetic oligonucleotide
  Sense strand starting at position 1257 of SEQ ID NO: 1562642
auuggaaguccgggaaaga

SEQ ID NO: 1762190 - RNA, 19 nt, Artificial Sequence
  Description of Artificial Sequence: Synthetic oligonucleotide
  Antisense strand to SEQ ID NO: 1762189
ucuuucccggacuuccaau

SEQ ID NO: 1762191 - RNA, 19 nt, Artificial Sequence
  Description of Artificial Sequence: Synthetic oligonucleotide
  Sense strand starting at position 1677 of SEQ ID NO: 1562642
gcccgaaagcucggaguuu

SEQ ID NO: 1762192 - RNA, 19 nt, Artificial Sequence
  Description of Artificial Sequence: Synthetic oligonucleotide
  Antisense strand to SEQ ID NO: 1762191
aaacuccgagcuuucgggc

SEQ ID NO: 1762193 - RNA, 19 nt, Artificial Sequence
  Description of Artificial Sequence: Synthetic oligonucleotide
  Sense strand starting at position 2392 of SEQ ID NO: 1562642
gccuuuaaaccuugauguu

SEQ ID NO: 1762194 - RNA, 19 nt, Artificial Sequence
  Description of Artificial Sequence: Synthetic oligonucleotide
  Antisense strand to SEQ ID NO: 1762193
aacaucaagguuuaaaggc

SEQ ID NO: 1762195 - RNA, 19 nt, Artificial Sequence
  Description of Artificial Sequence: Synthetic oligonucleotide
  Sense strand starting at position 2401 of SEQ ID NO: 1562642
ccuugauguuuacaggcau

SEQ ID NO: 1762196 - RNA, 19 nt, Artificial Sequence
  Description of Artificial Sequence: Synthetic oligonucleotide
  Antisense strand to SEQ ID NO: 1762195
augccuguaaacaucaagg

SEQ ID NO: 1762197 - RNA, 19 nt, Artificial Sequence
  Description of Artificial Sequence: Synthetic oligonucleotide
  Sense strand starting at position 2579 of SEQ ID NO: 1562642
cugccucagucacuacuua

SEQ ID NO: 1762198 - RNA, 19 nt, Artificial Sequence
  Description of Artificial Sequence: Synthetic oligonucleotide
  Antisense strand to SEQ ID NO: 1762197
uaaguagugacugaggcag

SEQ ID NO: 1762199 - RNA, 19 nt, Artificial Sequence
  Description of Artificial Sequence: Synthetic oligonucleotide
  Sense strand starting at position 2621 of SEQ ID NO: 1562642
aucugaaagugggauagau

SEQ ID NO: 1762200 - RNA, 19 nt, Artificial Sequence
  Description of Artificial Sequence: Synthetic oligonucleotide
  Antisense strand to SEQ ID NO: 1762199
aucuaucccacuuucagau

SEQ ID NO: 1762201 - RNA, 19 nt, Artificial Sequence
  Description of Artificial Sequence: Synthetic oligonucleotide
  Sense strand starting at position 2646 of SEQ ID NO: 1562642
agcaucagauguuguguga

SEQ ID NO: 1762202 - RNA, 19 nt, Artificial Sequence
  Description of Artificial Sequence: Synthetic oligonucleotide
  Antisense strand to SEQ ID NO: 1762201
ucacacaacaucugaugcu

SEQ ID NO: 1762203 - RNA, 19 nt, Artificial Sequence
  Description of Artificial Sequence: Synthetic oligonucleotide
  Sense strand starting at position 2649 of SEQ ID NO: 1562642
aucagauguugugugaagu

SEQ ID NO: 1762204 - RNA, 19 nt, Artificial Sequence
  Description of Artificial Sequence: Synthetic oligonucleotide
  Antisense strand to SEQ ID NO: 1762203
acuucacacaacaucugau

SEQ ID NO: 1762205 - RNA, 19 nt, Artificial Sequence
  Description of Artificial Sequence: Synthetic oligonucleotide
  Sense strand starting at position 2650 of SEQ ID NO: 1562642
ucagauguugugugaagug

SEQ ID NO: 1762206 - RNA, 19 nt, Artificial Sequence
  Description of Artificial Sequence: Synthetic oligonucleotide
  Antisense strand to SEQ ID NO: 1762205
cacuucacacaacaucuga

SEQ ID NO: 1762207 - RNA, 19 nt, Artificial Sequence
  Description of Artificial Sequence: Synthetic oligonucleotide
  Sense strand starting at position 2659 of SEQ ID NO: 1562642
gugugaaguguuuccugcu

SEQ ID NO: 1762208 - RNA, 19 nt, Artificial Sequence
  Description of Artificial Sequence: Synthetic oligonucleotide
  Antisense strand to SEQ ID NO: 1762207
agcaggaaacacuucacac

SEQ ID NO: 1762209 - RNA, 19 nt, Artificial Sequence
  Description of Artificial Sequence: Synthetic oligonucleotide
  Sense strand starting at position 2662 of SEQ ID NO: 1562642
ugaaguguuuccugcucca

SEQ ID NO: 1762210 - RNA, 19 nt, Artificial Sequence
  Description of Artificial Sequence: Synthetic oligonucleotide
  Antisense strand to SEQ ID NO: 1762209
uggagcaggaaacacuuca

SEQ ID NO: 1762211 - RNA, 19 nt, Artificial Sequence
  Description of Artificial Sequence: Synthetic oligonucleotide
  Sense strand starting at position 2665 of SEQ ID NO: 1562642
aguguuuccugcuccaaga

SEQ ID NO: 1762212 - RNA, 19 nt, Artificial Sequence
  Description of Artificial Sequence: Synthetic oligonucleotide
  Antisense strand to SEQ ID NO: 1762211
ucuuggagcaggaaacacu

SEQ ID NO: 1762213 - RNA, 19 nt, Artificial Sequence
  Description of Artificial Sequence: Synthetic oligonucleotide
  Sense strand starting at position 2692 of SEQ ID NO: 1562642
gaggcuugcucggcaggua

SEQ ID NO: 1762214 - RNA, 19 nt, Artificial Sequence
  Description of Artificial Sequence: Synthetic oligonucleotide
  Antisense strand to SEQ ID NO: 1762213
uaccugccgagcaagccuc

SEQ ID NO: 1762215 - RNA, 19 nt, Artificial Sequence
  Description of Artificial Sequence: Synthetic oligonucleotide
  Sense strand starting at position 2693 of SEQ ID NO: 1562642
aggcuugcucggcagguaa

SEQ ID NO: 1762216 - RNA, 19 nt, Artificial Sequence
  Description of Artificial Sequence: Synthetic oligonucleotide
  Antisense strand to SEQ ID NO: 1762215
uuaccugccgagcaagccu

SEQ ID NO: 1762217 - RNA, 19 nt, Artificial Sequence
  Description of Artificial Sequence: Synthetic oligonucleotide
  Sense strand starting at position 2695 of SEQ ID NO: 1562642
gcuugcucggcagguaaau

SEQ ID NO: 1762218 - RNA, 19 nt, Artificial Sequence
  Description of Artificial Sequence: Synthetic oligonucleotide
  Antisense strand to SEQ ID NO: 1762217
auuuaccugccgagcaagc

SEQ ID NO: 1762219 - RNA, 19 nt, Artificial Sequence
  Description of Artificial Sequence: Synthetic oligonucleotide
  Sense strand starting at position 2716 of SEQ ID NO: 1562642
agucgcaucucagagacuu

SEQ ID NO: 1762220 - RNA, 19 nt, Artificial Sequence
  Description of Artificial Sequence: Synthetic oligonucleotide
  Antisense strand to SEQ ID NO: 1762219
aagucucugagaugcgacu

SEQ ID NO: 1762221 - RNA, 19 nt, Artificial Sequence
  Description of Artificial Sequence: Synthetic oligonucleotide
  Sense strand starting at position 2967 of SEQ ID NO: 1562642
gaugauaccugaguuaagu

SEQ ID NO: 1762222 - RNA, 19 nt, Artificial Sequence
  Description of Artificial Sequence: Synthetic oligonucleotide
  Antisense strand to SEQ ID NO: 1762221
acuuaacucagguaucauc

SEQ ID NO: 1762223 - RNA, 19 nt, Artificial Sequence
  Description of Artificial Sequence: Synthetic oligonucleotide
  Sense strand starting at position 3311 of SEQ ID NO: 1562642
acugcaugguugugaguua

SEQ ID NO: 1762224 - RNA, 19 nt, Artificial Sequence
  Description of Artificial Sequence: Synthetic oligonucleotide
  Antisense strand to SEQ ID NO: 1762223
uaacucacaaccaugcagu

SEQ ID NO: 1762225 - RNA, 19 nt, Artificial Sequence
  Description of Artificial Sequence: Synthetic oligonucleotide
  Sense strand starting at position 3312 of SEQ ID NO: 1562642
cugcaugguugugaguuaa

SEQ ID NO: 1762226 - RNA, 19 nt, Artificial Sequence
  Description of Artificial Sequence: Synthetic oligonucleotide
  Antisense strand to SEQ ID NO: 1762225
uuaacucacaaccaugcag

SEQ ID NO: 1762227 - RNA, 19 nt, Artificial Sequence
  Description of Artificial Sequence: Synthetic oligonucleotide
  Sense strand starting at position 3316 of SEQ ID NO: 1562642
augguugugaguuaagucu

SEQ ID NO: 1762228 - RNA, 19 nt, Artificial Sequence
  Description of Artificial Sequence: Synthetic oligonucleotide
  Antisense strand to SEQ ID NO: 1762227
agacuuaacucacaaccau

SEQ ID NO: 1762229 - RNA, 19 nt, Artificial Sequence
  Description of Artificial Sequence: Synthetic oligonucleotide
  Sense strand starting at position 3490 of SEQ ID NO: 1562642
gcuguauuuacccgcaggu

SEQ ID NO: 1762230 - RNA, 19 nt, Artificial Sequence
  Description of Artificial Sequence: Synthetic oligonucleotide
  Antisense strand to SEQ ID NO: 1762229
accugcggguaaauacagc

SEQ ID NO: 1762231 - RNA, 19 nt, Artificial Sequence
  Description of Artificial Sequence: Synthetic oligonucleotide
  Sense strand starting at position 3513 of SEQ ID NO: 1562642
gagacaaggucuuuacugu

SEQ ID NO: 1762232 - RNA, 19 nt, Artificial Sequence
  Description of Artificial Sequence: Synthetic oligonucleotide
  Antisense strand to SEQ ID NO: 1762231
acaguaaagaccuugucuc

SEQ ID NO: 1762233 - RNA, 19 nt, Artificial Sequence
  Description of Artificial Sequence: Synthetic oligonucleotide
  Sense strand starting at position 3514 of SEQ ID NO: 1562642
agacaaggucuuuacuguu

SEQ ID NO: 1762234 - RNA, 19 nt, Artificial Sequence
  Description of Artificial Sequence: Synthetic oligonucleotide
  Antisense strand to SEQ ID NO: 1762233
aacaguaaagaccuugucu

SEQ ID NO: 1762235 - RNA, 19 nt, Artificial Sequence
  Description of Artificial Sequence: Synthetic oligonucleotide
  Sense strand starting at position 3766 of SEQ ID NO: 1562642
gguguacauuuagaagacu

SEQ ID NO: 1762236 - RNA, 19 nt, Artificial Sequence
  Description of Artificial Sequence: Synthetic oligonucleotide
  Antisense strand to SEQ ID NO: 1762235
agucuucuaaauguacacc

SEQ ID NO: 1762237 - RNA, 19 nt, Artificial Sequence
  Description of Artificial Sequence: Synthetic oligonucleotide
  Sense strand starting at position 622 of SEQ ID NO: 1562643
gugguaagucaccaguaaa

SEQ ID NO: 1762238 - RNA, 19 nt, Artificial Sequence
  Description of Artificial Sequence: Synthetic oligonucleotide
  Antisense strand to SEQ ID NO: 1762237
uuuacuggugacuuaccac

SEQ ID NO: 1762239 - RNA, 19 nt, Artificial Sequence
  Description of Artificial Sequence: Synthetic oligonucleotide
  Sense strand starting at position 625 of SEQ ID NO: 1562643
guaagucaccaguaaauac

SEQ ID NO: 1762240 - RNA, 19 nt, Artificial Sequence
  Description of Artificial Sequence: Synthetic oligonucleotide
  Antisense strand to SEQ ID NO: 1762239
guauuuacuggugacuuac

SEQ ID NO: 1762241 - RNA, 19 nt, Artificial Sequence
  Description of Artificial Sequence: Synthetic oligonucleotide
  Sense strand starting at position 673 of SEQ ID NO: 1562643
uguagcugauacuuaaaua

SEQ ID NO: 1762242 - RNA, 19 nt, Artificial Sequence
  Description of Artificial Sequence: Synthetic oligonucleotide
  Antisense strand to SEQ ID NO: 1762241
uauuuaaguaucagcuaca

SEQ ID NO: 1762243 - RNA, 19 nt, Artificial Sequence
  Description of Artificial Sequence: Synthetic oligonucleotide
  Sense strand starting at position 697 of SEQ ID NO: 1562643
uuaaucuaucguggaaaua

SEQ ID NO: 1762244 - RNA, 19 nt, Artificial Sequence
  Description of Artificial Sequence: Synthetic oligonucleotide
  Antisense strand to SEQ ID NO: 1762243
uauuuccacgauagauuaa

SEQ ID NO: 1762245 - RNA, 19 nt, Artificial Sequence
  Description of Artificial Sequence: Synthetic oligonucleotide
  Sense strand starting at position 712 of SEQ ID NO: 1562643
aauagaaugcugugucaag

SEQ ID NO: 1762246 - RNA, 19 nt, Artificial Sequence
  Description of Artificial Sequence: Synthetic oligonucleotide
  Antisense strand to SEQ ID NO: 1762245
cuugacacagcauucuauu

SEQ ID NO: 1762247 - RNA, 19 nt, Artificial Sequence
  Description of Artificial Sequence: Synthetic oligonucleotide
  Sense strand starting at position 713 of SEQ ID NO: 1562643
auagaaugcugugucaaga

SEQ ID NO: 1762248 - RNA, 19 nt, Artificial Sequence
  Description of Artificial Sequence: Synthetic oligonucleotide
  Antisense strand to SEQ ID NO: 1762247
ucuugacacagcauucuau

SEQ ID NO: 1762249 - RNA, 19 nt, Artificial Sequence
  Description of Artificial Sequence: Synthetic oligonucleotide
  Sense strand starting at position 908 of SEQ ID NO: 1562643
uuaggacauuagcaauuua

SEQ ID NO: 1762250 - RNA, 19 nt, Artificial Sequence
  Description of Artificial Sequence: Synthetic oligonucleotide
  Antisense strand to SEQ ID NO: 1762249
uaaauugcuaauguccuaa

SEQ ID NO: 1762251 - RNA, 19 nt, Artificial Sequence
  Description of Artificial Sequence: Synthetic oligonucleotide
  Sense strand starting at position 944 of SEQ ID NO: 1562643
ggaagauuagacggguuga

SEQ ID NO: 1762252 - RNA, 19 nt, Artificial Sequence
  Description of Artificial Sequence: Synthetic oligonucleotide
  Antisense strand to SEQ ID NO: 1762251
ucaacccgucuaaucuucc

SEQ ID NO: 1762253 - RNA, 19 nt, Artificial Sequence
  Description of Artificial Sequence: Synthetic oligonucleotide
  Sense strand starting at position 945 of SEQ ID NO: 1562643
gaagauuagacggguugag

SEQ ID NO: 1762254 - RNA, 19 nt, Artificial Sequence
  Description of Artificial Sequence: Synthetic oligonucleotide
  Antisense strand to SEQ ID NO: 1762253
cucaacccgucuaaucuuc

SEQ ID NO: 1762255 - RNA, 19 nt, Artificial Sequence
  Description of Artificial Sequence: Synthetic oligonucleotide
  Sense strand starting at position 993 of SEQ ID NO: 1562643
uagugaaaugcuuacggga

SEQ ID NO: 1762256 - RNA, 19 nt, Artificial Sequence
  Description of Artificial Sequence: Synthetic oligonucleotide
  Antisense strand to SEQ ID NO: 1762255
ucccguaagcauuucacua

SEQ ID NO: 1762257 - RNA, 19 nt, Artificial Sequence
  Description of Artificial Sequence: Synthetic oligonucleotide
  Sense strand starting at position 1033 of SEQ ID NO: 1562643
gagcguuuaccauaccauu

SEQ ID NO: 1762258 - RNA, 19 nt, Artificial Sequence
  Description of Artificial Sequence: Synthetic oligonucleotide
  Antisense strand to SEQ ID NO: 1762257
aaugguaugguaaacgcuc

SEQ ID NO: 1762259 - RNA, 19 nt, Artificial Sequence
  Description of Artificial Sequence: Synthetic oligonucleotide
  Sense strand starting at position 1242 of SEQ ID NO: 1562643
cgacuauacccacaguugu

SEQ ID NO: 1762260 - RNA, 19 nt, Artificial Sequence
  Description of Artificial Sequence: Synthetic oligonucleotide
  Antisense strand to SEQ ID NO: 1762259
acaacuguggguauagucg

SEQ ID NO: 1762261 - RNA, 19 nt, Artificial Sequence
  Description of Artificial Sequence: Synthetic oligonucleotide
  Sense strand starting at position 2025 of SEQ ID NO: 1562643
gccauuagcgcucugccau

SEQ ID NO: 1762262 - RNA, 19 nt, Artificial Sequence
  Description of Artificial Sequence: Synthetic oligonucleotide
  Antisense strand to SEQ ID NO: 1762261
auggcagagcgcuaauggc

SEQ ID NO: 1762263 - RNA, 19 nt, Artificial Sequence
  Description of Artificial Sequence: Synthetic oligonucleotide
  Sense strand starting at position 2160 of SEQ ID NO: 1562643
ggacaucuuuacuuuggga

SEQ ID NO: 1762264 - RNA, 19 nt, Artificial Sequence
  Description of Artificial Sequence: Synthetic oligonucleotide
  Antisense strand to SEQ ID NO: 1762263
ucccaaaguaaagaugucc

SEQ ID NO: 1762265 - RNA, 19 nt, Artificial Sequence
  Description of Artificial Sequence: Synthetic oligonucleotide
  Sense strand starting at position 2162 of SEQ ID NO: 1562643
acaucuuuacuuugggaag

SEQ ID NO: 1762266 - RNA, 19 nt, Artificial Sequence
  Description of Artificial Sequence: Synthetic oligonucleotide
  Antisense strand to SEQ ID NO: 1762265
cuucccaaaguaaagaugu

SEQ ID NO: 1762267 - RNA, 19 nt, Artificial Sequence
  Description of Artificial Sequence: Synthetic oligonucleotide
  Sense strand starting at position 2213 of SEQ ID NO: 1562643
gggaaaguauacuucuaac

SEQ ID NO: 1762268 - RNA, 19 nt, Artificial Sequence
  Description of Artificial Sequence: Synthetic oligonucleotide
  Antisense strand to SEQ ID NO: 1762267
guuagaaguauacuuuccc

SEQ ID NO: 1762269 - RNA, 19 nt, Artificial Sequence
  Description of Artificial Sequence: Synthetic oligonucleotide
  Sense strand starting at position 2266 of SEQ ID NO: 1562643
agcauuuacguuugcaaua

SEQ ID NO: 1762270 - RNA, 19 nt, Artificial Sequence
  Description of Artificial Sequence: Synthetic oligonucleotide
  Antisense strand to SEQ ID NO: 1762269
uauugcaaacguaaaugcu

SEQ ID NO: 1762271 - RNA, 19 nt, Artificial Sequence
  Description of Artificial Sequence: Synthetic oligonucleotide
  Sense strand starting at position 2267 of SEQ ID NO: 1562643
gcauuuacguuugcaauag

SEQ ID NO: 1762272 - RNA, 19 nt, Artificial Sequence
  Description of Artificial Sequence: Synthetic oligonucleotide
  Antisense strand to SEQ ID NO: 1762271
cuauugcaaacguaaaugc

SEQ ID NO: 1762273 - RNA, 19 nt, Artificial Sequence
  Description of Artificial Sequence: Synthetic oligonucleotide
  Sense strand starting at position 2289 of SEQ ID NO: 1562643
uuuggugugguuugaagaa

SEQ ID NO: 1762274 - RNA, 19 nt, Artificial Sequence
  Description of Artificial Sequence: Synthetic oligonucleotide
  Antisense strand to SEQ ID NO: 1762273
uucuucaaaccacaccaaa

SEQ ID NO: 1762275 - RNA, 19 nt, Artificial Sequence
  Description of Artificial Sequence: Synthetic oligonucleotide
  Sense strand starting at position 2316 of SEQ ID NO: 1562643
agcuuaguuccgcccgagu

SEQ ID NO: 1762276 - RNA, 19 nt, Artificial Sequence
  Description of Artificial Sequence: Synthetic oligonucleotide
  Antisense strand to SEQ ID NO: 1762275
acucgggcggaacuaagcu

SEQ ID NO: 1762277 - RNA, 19 nt, Artificial Sequence
  Description of Artificial Sequence: Synthetic oligonucleotide
  Sense strand starting at position 2374 of SEQ ID NO: 1562643
guggguaguguagucguaa

SEQ ID NO: 1762278 - RNA, 19 nt, Artificial Sequence
  Description of Artificial Sequence: Synthetic oligonucleotide
  Antisense strand to SEQ ID NO: 1762277
uuacgacuacacuacccac

SEQ ID NO: 1762279 - RNA, 19 nt, Artificial Sequence
  Description of Artificial Sequence: Synthetic oligonucleotide
  Sense strand starting at position 2405 of SEQ ID NO: 1562643
cuacuaaauucgucuggag

SEQ ID NO: 1762280 - RNA, 19 nt, Artificial Sequence
  Description of Artificial Sequence: Synthetic oligonucleotide
  Antisense strand to SEQ ID NO: 1762279
cuccagacgaauuuaguag

SEQ ID NO: 1762281 - RNA, 19 nt, Artificial Sequence
  Description of Artificial Sequence: Synthetic oligonucleotide
  Sense strand starting at position 2426 of SEQ ID NO: 1562643
gaauacugucaacacguaa

SEQ ID NO: 1762282 - RNA, 19 nt, Artificial Sequence
  Description of Artificial Sequence: Synthetic oligonucleotide
  Antisense strand to SEQ ID NO: 1762281
uuacguguugacaguauuc

SEQ ID NO: 1762283 - RNA, 19 nt, Artificial Sequence
  Description of Artificial Sequence: Synthetic oligonucleotide
  Sense strand starting at position 2697 of SEQ ID NO: 1562643
guugcauugccugagagga

SEQ ID NO: 1762284 - RNA, 19 nt, Artificial Sequence
  Description of Artificial Sequence: Synthetic oligonucleotide
  Antisense strand to SEQ ID NO: 1762283
uccucucaggcaaugcaac

SEQ ID NO: 1762285 - RNA, 19 nt, Artificial Sequence
  Description of Artificial Sequence: Synthetic oligonucleotide
  Sense strand starting at position 2729 of SEQ ID NO: 1562643
ggugguguccaucauggua

SEQ ID NO: 1762286 - RNA, 19 nt, Artificial Sequence
  Description of Artificial Sequence: Synthetic oligonucleotide
  Antisense strand to SEQ ID NO: 1762285
uaccaugauggacaccacc

SEQ ID NO: 1762287 - RNA, 19 nt, Artificial Sequence
  Description of Artificial Sequence: Synthetic oligonucleotide
  Sense strand starting at position 3038 of SEQ ID NO: 1562643
cgcgcaacagguuuccaua

SEQ ID NO: 1762288 - RNA, 19 nt, Artificial Sequence
  Description of Artificial Sequence: Synthetic oligonucleotide
  Antisense strand to SEQ ID NO: 1762287
uauggaaaccuguugcgcg

SEQ ID NO: 1762289 - RNA, 19 nt, Artificial Sequence
  Description of Artificial Sequence: Synthetic oligonucleotide
  Sense strand starting at position 3040 of SEQ ID NO: 1562643
cgcaacagguuuccauaaa

SEQ ID NO: 1762290 - RNA, 19 nt, Artificial Sequence
  Description of Artificial Sequence: Synthetic oligonucleotide
  Antisense strand to SEQ ID NO: 1762289
uuuauggaaaccuguugcg

SEQ ID NO: 1762291 - RNA, 19 nt, Artificial Sequence
  Description of Artificial Sequence: Synthetic oligonucleotide
  Sense strand starting at position 3191 of SEQ ID NO: 1562643
cggguucgugccuucgaau

SEQ ID NO: 1762292 - RNA, 19 nt, Artificial Sequence
  Description of Artificial Sequence: Synthetic oligonucleotide
  Antisense strand to SEQ ID NO: 1762291
auucgaaggcacgaacccg

SEQ ID NO: 1762293 - RNA, 19 nt, Artificial Sequence
  Description of Artificial Sequence: Synthetic oligonucleotide
  Sense strand starting at position 3192 of SEQ ID NO: 1562643
ggguucgugccuucgaauc

SEQ ID NO: 1762294 - RNA, 19 nt, Artificial Sequence
  Description of Artificial Sequence: Synthetic oligonucleotide
  Antisense strand to SEQ ID NO: 1762293
gauucgaaggcacgaaccc

SEQ ID NO: 1762295 - RNA, 19 nt, Artificial Sequence
  Description of Artificial Sequence: Synthetic oligonucleotide
  Sense strand starting at position 3216 of SEQ ID NO: 1562643
agcgguguuguguucggua

SEQ ID NO: 1762296 - RNA, 19 nt, Artificial Sequence
  Description of Artificial Sequence: Synthetic oligonucleotide
  Antisense strand to SEQ ID NO: 1762295
uaccgaacacaacaccgcu

SEQ ID NO: 1762297 - RNA, 19 nt, Artificial Sequence
  Description of Artificial Sequence: Synthetic oligonucleotide
  Sense strand starting at position 3260 of SEQ ID NO: 1562643
gcugguacauuuccuguua

SEQ ID NO: 1762298 - RNA, 19 nt, Artificial Sequence
  Description of Artificial Sequence: Synthetic oligonucleotide
  Antisense strand to SEQ ID NO: 1762297
uaacaggaaauguaccagc

SEQ ID NO: 1762299 - RNA, 19 nt, Artificial Sequence
  Description of Artificial Sequence: Synthetic oligonucleotide
  Sense strand starting at position 3384 of SEQ ID NO: 1562643
cguuuacagagguacuuua

SEQ ID NO: 1762300 - RNA, 19 nt, Artificial Sequence
  Description of Artificial Sequence: Synthetic oligonucleotide
  Antisense strand to SEQ ID NO: 1762299
uaaaguaccucuguaaacg

SEQ ID NO: 1762301 - RNA, 19 nt, Artificial Sequence
  Description of Artificial Sequence: Synthetic oligonucleotide
  Sense strand starting at position 3391 of SEQ ID NO: 1562643
agagguacuuuauucgagu

SEQ ID NO: 1762302 - RNA, 19 nt, Artificial Sequence
  Description of Artificial Sequence: Synthetic oligonucleotide
  Antisense strand to SEQ ID NO: 1762301
acucgaauaaaguaccucu

SEQ ID NO: 1762303 - RNA, 19 nt, Artificial Sequence
  Description of Artificial Sequence: Synthetic oligonucleotide
  Sense strand starting at position 3402 of SEQ ID NO: 1562643
auucgagucacagaaguag

SEQ ID NO: 1762304 - RNA, 19 nt, Artificial Sequence
  Description of Artificial Sequence: Synthetic oligonucleotide
  Antisense strand to SEQ ID NO: 1762303
cuacuucugugacucgaau

SEQ ID NO: 1762305 - RNA, 19 nt, Artificial Sequence
  Description of Artificial Sequence: Synthetic oligonucleotide
  Sense strand starting at position 3545 of SEQ ID NO: 1562643
gucaaacccuggcuuauuu

SEQ ID NO: 1762306 - RNA, 19 nt, Artificial Sequence
  Description of Artificial Sequence: Synthetic oligonucleotide
  Antisense strand to SEQ ID NO: 1762305
aaauaagccaggguuugac

SEQ ID NO: 1762307 - RNA, 19 nt, Artificial Sequence
  Description of Artificial Sequence: Synthetic oligonucleotide
  Sense strand starting at position 3846 of SEQ ID NO: 1562643
cgcuauuuccuguguuaug

SEQ ID NO: 1762308 - RNA, 19 nt, Artificial Sequence
  Description of Artificial Sequence: Synthetic oligonucleotide
  Antisense strand to SEQ ID NO: 1762307
cauaacacaggaaauagcg

SEQ ID NO: 1762309 - RNA, 19 nt, Artificial Sequence
  Description of Artificial Sequence: Synthetic oligonucleotide
  Sense strand starting at position 3861 of SEQ ID NO: 1562643
uaugguucuggccaagauu

SEQ ID NO: 1762310 - RNA, 19 nt, Artificial Sequence
  Description of Artificial Sequence: Synthetic oligonucleotide
  Antisense strand to SEQ ID NO: 1762309
aaucuuggccagaaccaua

SEQ ID NO: 1762311 - RNA, 19 nt, Artificial Sequence
  Description of Artificial Sequence: Synthetic oligonucleotide
  Sense strand starting at position 3923 of SEQ ID NO: 1562643
uggaaauuacuguguuaga

SEQ ID NO: 1762312 - RNA, 19 nt, Artificial Sequence
  Description of Artificial Sequence: Synthetic oligonucleotide
  Antisense strand to SEQ ID NO: 1762311
ucuaacacaguaauuucca

SEQ ID NO: 1762313 - RNA, 19 nt, Artificial Sequence
  Description of Artificial Sequence: Synthetic oligonucleotide
  Sense strand starting at position 3924 of SEQ ID NO: 1562643
ggaaauuacuguguuagag

SEQ ID NO: 1762314 - RNA, 19 nt, Artificial Sequence
  Description of Artificial Sequence: Synthetic oligonucleotide
  Antisense strand to SEQ ID NO: 1762313
cucuaacacaguaauuucc

SEQ ID NO: 1762315 - RNA, 19 nt, Artificial Sequence
  Description of Artificial Sequence: Synthetic oligonucleotide
  Sense strand starting at position 3938 of SEQ ID NO: 1562643
uagagugccagggaguaaa

SEQ ID NO: 1762316 - RNA, 19 nt, Artificial Sequence
  Description of Artificial Sequence: Synthetic oligonucleotide
  Antisense strand to SEQ ID NO: 1762315
uuuacucccuggcacucua

SEQ ID NO: 1762317 - RNA, 19 nt, Artificial Sequence
  Description of Artificial Sequence: Synthetic oligonucleotide
  Sense strand starting at position 24 of SEQ ID NO: 1562644
aggcuuucucaggaauccu

SEQ ID NO: 1762318 - RNA, 19 nt, Artificial Sequence
  Description of Artificial Sequence: Synthetic oligonucleotide
  Antisense strand to SEQ ID NO: 1762317
aggauuccugagaaagccu

SEQ ID NO: 1762319 - RNA, 19 nt, Artificial Sequence
  Description of Artificial Sequence: Synthetic oligonucleotide
  Sense strand starting at position 178 of SEQ ID NO: 1562644
auuccaaugguuuaagguu

SEQ ID NO: 1762320 - RNA, 19 nt, Artificial Sequence
  Description of Artificial Sequence: Synthetic oligonucleotide
  Antisense strand to SEQ ID NO: 1762319
aaccuuaaaccauuggaau

SEQ ID NO: 1762321 - RNA, 19 nt, Artificial Sequence
  Description of Artificial Sequence: Synthetic oligonucleotide
  Sense strand starting at position 197 of SEQ ID NO: 1562644
uuuguacugcuagagagaa

SEQ ID NO: 1762322 - RNA, 19 nt, Artificial Sequence
  Description of Artificial Sequence: Synthetic oligonucleotide
  Antisense strand to SEQ ID NO: 1762321
uucucucuagcaguacaaa

SEQ ID NO: 1762323 - RNA, 19 nt, Artificial Sequence
  Description of Artificial Sequence: Synthetic oligonucleotide
  Sense strand starting at position 411 of SEQ ID NO: 1562644
acacgugguguggacauua

SEQ ID NO: 1762324 - RNA, 19 nt, Artificial Sequence
  Description of Artificial Sequence: Synthetic oligonucleotide
  Antisense strand to SEQ ID NO: 1762323
uaauguccacaccacgugu

SEQ ID NO: 1762325 - RNA, 19 nt, Artificial Sequence
  Description of Artificial Sequence: Synthetic oligonucleotide
  Sense strand starting at position 416 of SEQ ID NO: 1562644
ugguguggacauuagaacu

SEQ ID NO: 1762326 - RNA, 19 nt, Artificial Sequence
  Description of Artificial Sequence: Synthetic oligonucleotide
  Antisense strand to SEQ ID NO: 1762325
aguucuaauguccacacca

SEQ ID NO: 1762327 - RNA, 19 nt, Artificial Sequence
  Description of Artificial Sequence: Synthetic oligonucleotide
  Sense strand starting at position 798 of SEQ ID NO: 1562644
ggaggccucucuuuccuua

SEQ ID NO: 1762328 - RNA, 19 nt, Artificial Sequence
  Description of Artificial Sequence: Synthetic oligonucleotide
  Antisense strand to SEQ ID NO: 1762327
uaaggaaagagaggccucc

SEQ ID NO: 1762329 - RNA, 19 nt, Artificial Sequence
  Description of Artificial Sequence: Synthetic oligonucleotide
  Sense strand starting at position 801 of SEQ ID NO: 1562644
ggccucucuuuccuuagau

SEQ ID NO: 1762330 - RNA, 19 nt, Artificial Sequence
  Description of Artificial Sequence: Synthetic oligonucleotide
  Antisense strand to SEQ ID NO: 1762329
aucuaaggaaagagaggcc

SEQ ID NO: 1762331 - RNA, 19 nt, Artificial Sequence
  Description of Artificial Sequence: Synthetic oligonucleotide
  Sense strand starting at position 886 of SEQ ID NO: 1562644
cuucuuugacuauggaauc

SEQ ID NO: 1762332 - RNA, 19 nt, Artificial Sequence
  Description of Artificial Sequence: Synthetic oligonucleotide
  Antisense strand to SEQ ID NO: 1762331
gauuccauagucaaagaag

SEQ ID NO: 1762333 - RNA, 19 nt, Artificial Sequence
  Description of Artificial Sequence: Synthetic oligonucleotide
  Sense strand starting at position 898 of SEQ ID NO: 1562644
uggaaucaaguacgacauu

SEQ ID NO: 1762334 - RNA, 19 nt, Artificial Sequence
  Description of Artificial Sequence: Synthetic oligonucleotide
  Antisense strand to SEQ ID NO: 1762333
aaugucguacuugauucca

SEQ ID NO: 1762335 - RNA, 19 nt, Artificial Sequence
  Description of Artificial Sequence: Synthetic oligonucleotide
  Sense strand starting at position 972 of SEQ ID NO: 1562644
uguauaaaggcguaucaaa

SEQ ID NO: 1762336 - RNA, 19 nt, Artificial Sequence
  Description of Artificial Sequence: Synthetic oligonucleotide
  Antisense strand to SEQ ID NO: 1762335
uuugauacgccuuuauaca

SEQ ID NO: 1762337 - RNA, 19 nt, Artificial Sequence
  Description of Artificial Sequence: Synthetic oligonucleotide
  Sense strand starting at position 984 of SEQ ID NO: 1562644
uaucaaaugcgauggcuuu

SEQ ID NO: 1762338 - RNA, 19 nt, Artificial Sequence
  Description of Artificial Sequence: Synthetic oligonucleotide
  Antisense strand to SEQ ID NO: 1762337
aaagccaucgcauuugaua

SEQ ID NO: 1762339 - RNA, 19 nt, Artificial Sequence
  Description of Artificial Sequence: Synthetic oligonucleotide
  Sense strand starting at position 1039 of SEQ ID NO: 1562644
auggguuaccagugacuuu

SEQ ID NO: 1762340 - RNA, 19 nt, Artificial Sequence
  Description of Artificial Sequence: Synthetic oligonucleotide
  Antisense strand to SEQ ID NO: 1762339
aaagucacugguaacccau

SEQ ID NO: 1762341 - RNA, 19 nt, Artificial Sequence
  Description of Artificial Sequence: Synthetic oligonucleotide
  Sense strand starting at position 1040 of SEQ ID NO: 1562644
uggguuaccagugacuuua

SEQ ID NO: 1762342 - RNA, 19 nt, Artificial Sequence
  Description of Artificial Sequence: Synthetic oligonucleotide
  Antisense strand to SEQ ID NO: 1762341
uaaagucacugguaaccca

SEQ ID NO: 1762343 - RNA, 19 nt, Artificial Sequence
  Description of Artificial Sequence: Synthetic oligonucleotide
  Sense strand starting at position 1042 of SEQ ID NO: 1562644
gguuaccagugacuuuaaa

SEQ ID NO: 1762344 - RNA, 19 nt, Artificial Sequence
  Description of Artificial Sequence: Synthetic oligonucleotide
  Antisense strand to SEQ ID NO: 1762343
uuuaaagucacugguaacc

SEQ ID NO: 1762345 - RNA, 19 nt, Artificial Sequence
  Description of Artificial Sequence: Synthetic oligonucleotide
  Sense strand starting at position 1073 of SEQ ID NO: 1562644
cccggugugguugcucaua

SEQ ID NO: 1762346 - RNA, 19 nt, Artificial Sequence
  Description of Artificial Sequence: Synthetic oligonucleotide
  Antisense strand to SEQ ID NO: 1762345
uaugagcaaccacaccggg

SEQ ID NO: 1762347 - RNA, 19 nt, Artificial Sequence
  Description of Artificial Sequence: Synthetic oligonucleotide
  Sense strand starting at position 2264 of SEQ ID NO: 1562644
cugaguguuccgccggguu

SEQ ID NO: 1762348 - RNA, 19 nt, Artificial Sequence
  Description of Artificial Sequence: Synthetic oligonucleotide
  Antisense strand to SEQ ID NO: 1762347
aacccggcggaacacucag

SEQ ID NO: 1762349 - RNA, 19 nt, Artificial Sequence
  Description of Artificial Sequence: Synthetic oligonucleotide
  Sense strand starting at position 2937 of SEQ ID NO: 1562644
gucucuguuccugagagac

SEQ ID NO: 1762350 - RNA, 19 nt, Artificial Sequence
  Description of Artificial Sequence: Synthetic oligonucleotide
  Antisense strand to SEQ ID NO: 1762349
gucucucaggaacagagac

SEQ ID NO: 1762351 - RNA, 19 nt, Artificial Sequence
  Description of Artificial Sequence: Synthetic oligonucleotide
  Sense strand starting at position 2957 of SEQ ID NO: 1562644
agaauuuauucuugguuug

SEQ ID NO: 1762352 - RNA, 19 nt, Artificial Sequence
  Description of Artificial Sequence: Synthetic oligonucleotide
  Antisense strand to SEQ ID NO: 1762351
caaaccaagaauaaauucu

SEQ ID NO: 1762353 - RNA, 19 nt, Artificial Sequence
  Description of Artificial Sequence: Synthetic oligonucleotide
  Sense strand starting at position 2960 of SEQ ID NO: 1562644
auuuauucuugguuuguca

SEQ ID NO: 1762354 - RNA, 19 nt, Artificial Sequence
  Description of Artificial Sequence: Synthetic oligonucleotide
  Antisense strand to SEQ ID NO: 1762353
ugacaaaccaagaauaaau

SEQ ID NO: 1762355 - RNA, 19 nt, Artificial Sequence
  Description of Artificial Sequence: Synthetic oligonucleotide
  Sense strand starting at position 2962 of SEQ ID NO: 1562644
uuauucuugguuugucaag

SEQ ID NO: 1762356 - RNA, 19 nt, Artificial Sequence
  Description of Artificial Sequence: Synthetic oligonucleotide
  Antisense strand to SEQ ID NO: 1762355
cuugacaaaccaagaauaa

SEQ ID NO: 1762357 - RNA, 19 nt, Artificial Sequence
  Description of Artificial Sequence: Synthetic oligonucleotide
  Sense strand starting at position 2978 of SEQ ID NO: 1562644
aagccacaucuguaggaau

SEQ ID NO: 1762358 - RNA, 19 nt, Artificial Sequence
  Description of Artificial Sequence: Synthetic oligonucleotide
  Antisense strand to SEQ ID NO: 1762357
auuccuacagauguggcuu

SEQ ID NO: 1762359 - RNA, 19 nt, Artificial Sequence
  Description of Artificial Sequence: Synthetic oligonucleotide
  Sense strand starting at position 2980 of SEQ ID NO: 1562644
gccacaucuguaggaaugu

SEQ ID NO: 1762360 - RNA, 19 nt, Artificial Sequence
  Description of Artificial Sequence: Synthetic oligonucleotide
  Antisense strand to SEQ ID NO: 1762359
acauuccuacagauguggc

SEQ ID NO: 1762361 - RNA, 19 nt, Artificial Sequence
  Description of Artificial Sequence: Synthetic oligonucleotide
  Sense strand starting at position 2989 of SEQ ID NO: 1562644
guaggaauguugcccaguu

SEQ ID NO: 1762362 - RNA, 19 nt, Artificial Sequence
  Description of Artificial Sequence: Synthetic oligonucleotide
  Antisense strand to SEQ ID NO: 1762361
aacugggcaacauuccuac

SEQ ID NO: 1762363 - RNA, 19 nt, Artificial Sequence
  Description of Artificial Sequence: Synthetic oligonucleotide
  Sense strand starting at position 3031 of SEQ ID NO: 1562644
ugcuccuuuggcgaauuga

SEQ ID NO: 1762364 - RNA, 19 nt, Artificial Sequence
  Description of Artificial Sequence: Synthetic oligonucleotide
  Antisense strand to SEQ ID NO: 1762363
ucaauucgccaaaggagca

SEQ ID NO: 1762365 - RNA, 19 nt, Artificial Sequence
  Description of Artificial Sequence: Synthetic oligonucleotide
  Sense strand starting at position 3188 of SEQ ID NO: 1562644
ggcauucgauucguuggau

SEQ ID NO: 1762366 - RNA, 19 nt, Artificial Sequence
  Description of Artificial Sequence: Synthetic oligonucleotide
  Antisense strand to SEQ ID NO: 1762365
auccaacgaaucgaaugcc

SEQ ID NO: 1762367 - RNA, 19 nt, Artificial Sequence
  Description of Artificial Sequence: Synthetic oligonucleotide
  Sense strand starting at position 3191 of SEQ ID NO: 1562644
auucgauucguuggaucau

SEQ ID NO: 1762368 - RNA, 19 nt, Artificial Sequence
  Description of Artificial Sequence: Synthetic oligonucleotide
  Antisense strand to SEQ ID NO: 1762367
augauccaacgaaucgaau

SEQ ID NO: 1762369 - RNA, 19 nt, Artificial Sequence
  Description of Artificial Sequence: Synthetic oligonucleotide
  Sense strand starting at position 3243 of SEQ ID NO: 1562644
ucuggcggugucuaaagau

SEQ ID NO: 1762370 - RNA, 19 nt, Artificial Sequence
  Description of Artificial Sequence: Synthetic oligonucleotide
  Antisense strand to SEQ ID NO: 1762369
aucuuuagacaccgccaga

SEQ ID NO: 1762371 - RNA, 19 nt, Artificial Sequence
  Description of Artificial Sequence: Synthetic oligonucleotide
  Sense strand starting at position 3249 of SEQ ID NO: 1562644
ggugucuaaagauggaaca

SEQ ID NO: 1762372 - RNA, 19 nt, Artificial Sequence
  Description of Artificial Sequence: Synthetic oligonucleotide
  Antisense strand to SEQ ID NO: 1762371
uguuccaucuuuagacacc

SEQ ID NO: 1762373 - RNA, 19 nt, Artificial Sequence
  Description of Artificial Sequence: Synthetic oligonucleotide
  Sense strand starting at position 3250 of SEQ ID NO: 1562644
gugucuaaagauggaacau

SEQ ID NO: 1762374 - RNA, 19 nt, Artificial Sequence
  Description of Artificial Sequence: Synthetic oligonucleotide
  Antisense strand to SEQ ID NO: 1762373
auguuccaucuuuagacac

SEQ ID NO: 1762375 - RNA, 19 nt, Artificial Sequence
  Description of Artificial Sequence: Synthetic oligonucleotide
  Sense strand starting at position 3347 of SEQ ID NO: 1562644
ugacuuauuguagacaggu

SEQ ID NO: 1762376 - RNA, 19 nt, Artificial Sequence
  Description of Artificial Sequence: Synthetic oligonucleotide
  Antisense strand to SEQ ID NO: 1762375
accugucuacaauaaguca

SEQ ID NO: 1762377 - RNA, 19 nt, Artificial Sequence
  Description of Artificial Sequence: Synthetic oligonucleotide
  Sense strand starting at position 3368 of SEQ ID NO: 1562644
acacaugagaugcguuaaa

SEQ ID NO: 1762378 - RNA, 19 nt, Artificial Sequence
  Description of Artificial Sequence: Synthetic oligonucleotide
  Antisense strand to SEQ ID NO: 1762377
uuuaacgcaucucaugugu

SEQ ID NO: 1762379 - RNA, 19 nt, Artificial Sequence
  Description of Artificial Sequence: Synthetic oligonucleotide
  Sense strand starting at position 3418 of SEQ ID NO: 1562644
agagcaaaucguggucuuu

SEQ ID NO: 1762380 - RNA, 19 nt, Artificial Sequence
  Description of Artificial Sequence: Synthetic oligonucleotide
  Antisense strand to SEQ ID NO: 1762379
aaagaccacgauuugcucu

SEQ ID NO: 1762381 - RNA, 19 nt, Artificial Sequence
  Description of Artificial Sequence: Synthetic oligonucleotide
  Sense strand starting at position 3424 of SEQ ID NO: 1562644
aaucguggucuuuggcaga

SEQ ID NO: 1762382 - RNA, 19 nt, Artificial Sequence
  Description of Artificial Sequence: Synthetic oligonucleotide
  Antisense strand to SEQ ID NO: 1762381
ucugccaaagaccacgauu

SEQ ID NO: 1762383 - RNA, 19 nt, Artificial Sequence
  Description of Artificial Sequence: Synthetic oligonucleotide
  Sense strand starting at position 3467 of SEQ ID NO: 1562644
gcuguccaguuauuacaau

SEQ ID NO: 1762384 - RNA, 19 nt, Artificial Sequence
  Description of Artificial Sequence: Synthetic oligonucleotide
  Antisense strand to SEQ ID NO: 1762383
auuguaauaacuggacagc

SEQ ID NO: 1762385 - RNA, 19 nt, Artificial Sequence
  Description of Artificial Sequence: Synthetic oligonucleotide
  Sense strand starting at position 3623 of SEQ ID NO: 1562644
gaagcauuugcuggagucu

SEQ ID NO: 1762386 - RNA, 19 nt, Artificial Sequence
  Description of Artificial Sequence: Synthetic oligonucleotide
  Antisense strand to SEQ ID NO: 1762385
agacuccagcaaaugcuuc

SEQ ID NO: 1762387 - RNA, 19 nt, Artificial Sequence
  Description of Artificial Sequence: Synthetic oligonucleotide
  Sense strand starting at position 3629 of SEQ ID NO: 1562644
uuugcuggagucugaagaa

SEQ ID NO: 1762388 - RNA, 19 nt, Artificial Sequence
  Description of Artificial Sequence: Synthetic oligonucleotide
  Antisense strand to SEQ ID NO: 1762387
uucuucagacuccagcaaa

SEQ ID NO: 1762389 - RNA, 19 nt, Artificial Sequence
  Description of Artificial Sequence: Synthetic oligonucleotide
  Sense strand starting at position 3660 of SEQ ID NO: 1562644
augaaugauucugaaacua

SEQ ID NO: 1762390 - RNA, 19 nt, Artificial Sequence
  Description of Artificial Sequence: Synthetic oligonucleotide
  Antisense strand to SEQ ID NO: 1762389
uaguuucagaaucauucau

SEQ ID NO: 1762391 - RNA, 19 nt, Artificial Sequence
  Description of Artificial Sequence: Synthetic oligonucleotide
  Sense strand starting at position 3707 of SEQ ID NO: 1562644
gguagaucaagguguagau

SEQ ID NO: 1762392 - RNA, 19 nt, Artificial Sequence
  Description of Artificial Sequence: Synthetic oligonucleotide
  Antisense strand to SEQ ID NO: 1762391
aucuacaccuugaucuacc

SEQ ID NO: 1762393 - RNA, 19 nt, Artificial Sequence
  Description of Artificial Sequence: Synthetic oligonucleotide
  Sense strand starting at position 3711 of SEQ ID NO: 1562644
gaucaagguguagauugua

SEQ ID NO: 1762394 - RNA, 19 nt, Artificial Sequence
  Description of Artificial Sequence: Synthetic oligonucleotide
  Antisense strand to SEQ ID NO: 1762393
uacaaucuacaccuugauc

SEQ ID NO: 1762395 - RNA, 19 nt, Artificial Sequence
  Description of Artificial Sequence: Synthetic oligonucleotide
  Sense strand starting at position 3818 of SEQ ID NO: 1562644
agaaauccuguauggaucu

SEQ ID NO: 1762396 - RNA, 19 nt, Artificial Sequence
  Description of Artificial Sequence: Synthetic oligonucleotide
  Antisense strand to SEQ ID NO: 1762395
agauccauacaggauuucu

SEQ ID NO: 1762397 - RNA, 19 nt, Artificial Sequence
  Description of Artificial Sequence: Synthetic oligonucleotide
  Sense strand starting at position 78 of SEQ ID NO: 1562645
ccaggcgugguguauugaa

SEQ ID NO: 1762398 - RNA, 19 nt, Artificial Sequence
  Description of Artificial Sequence: Synthetic oligonucleotide
  Antisense strand to SEQ ID NO: 1762397
uucaauacaccacgccugg

SEQ ID NO: 1762399 - RNA, 19 nt, Artificial Sequence
  Description of Artificial Sequence: Synthetic oligonucleotide
  Sense strand starting at position 264 of SEQ ID NO: 1562645
acgauuguuucucuacacu

SEQ ID NO: 1762400 - RNA, 19 nt, Artificial Sequence
  Description of Artificial Sequence: Synthetic oligonucleotide
  Antisense strand to SEQ ID NO: 1762399
aguguagagaaacaaucgu

SEQ ID NO: 1762401 - RNA, 19 nt, Artificial Sequence
  Description of Artificial Sequence: Synthetic oligonucleotide
  Sense strand starting at position 267 of SEQ ID NO: 1562645
auuguuucucuacacuuga

SEQ ID NO: 1762402 - RNA, 19 nt, Artificial Sequence
  Description of Artificial Sequence: Synthetic oligonucleotide
  Antisense strand to SEQ ID NO: 1762401
ucaaguguagagaaacaau

SEQ ID NO: 1762403 - RNA, 19 nt, Artificial Sequence
  Description of Artificial Sequence: Synthetic oligonucleotide
  Sense strand starting at position 308 of SEQ ID NO: 1562645
acaugucaagacuguaaau

SEQ ID NO: 1762404 - RNA, 19 nt, Artificial Sequence
  Description of Artificial Sequence: Synthetic oligonucleotide
  Antisense strand to SEQ ID NO: 1762403
auuuacagucuugacaugu

SEQ ID NO: 1762405 - RNA, 19 nt, Artificial Sequence
  Description of Artificial Sequence: Synthetic oligonucleotide
  Sense strand starting at position 356 of SEQ ID NO: 1562645
guaucauucuaacugugca

SEQ ID NO: 1762406 - RNA, 19 nt, Artificial Sequence
  Description of Artificial Sequence: Synthetic oligonucleotide
  Antisense strand to SEQ ID NO: 1762405
ugcacaguuagaaugauac

SEQ ID NO: 1762407 - RNA, 19 nt, Artificial Sequence
  Description of Artificial Sequence: Synthetic oligonucleotide
  Sense strand starting at position 387 of SEQ ID NO: 1562645
ucacuaacgucuccagauc

SEQ ID NO: 1762408 - RNA, 19 nt, Artificial Sequence
  Description of Artificial Sequence: Synthetic oligonucleotide
  Antisense strand to SEQ ID NO: 1762407
gaucuggagacguuaguga

SEQ ID NO: 1762409 - RNA, 19 nt, Artificial Sequence
  Description of Artificial Sequence: Synthetic oligonucleotide
  Sense strand starting at position 403 of SEQ ID NO: 1562645
aucucaguguccucaccua

SEQ ID NO: 1762410 - RNA, 19 nt, Artificial Sequence
  Description of Artificial Sequence: Synthetic oligonucleotide
  Antisense strand to SEQ ID NO: 1762409
uaggugaggacacugagau

SEQ ID NO: 1762411 - RNA, 19 nt, Artificial Sequence
  Description of Artificial Sequence: Synthetic oligonucleotide
  Sense strand starting at position 426 of SEQ ID NO: 1562645
aaagguaacuuggacaaga

SEQ ID NO: 1762412 - RNA, 19 nt, Artificial Sequence
  Description of Artificial Sequence: Synthetic oligonucleotide
  Antisense strand to SEQ ID NO: 1762411
ucuuguccaaguuaccuuu

SEQ ID NO: 1762413 - RNA, 19 nt, Artificial Sequence
  Description of Artificial Sequence: Synthetic oligonucleotide
  Sense strand starting at position 436 of SEQ ID NO: 1562645
uggacaagaucagugguuu

SEQ ID NO: 1762414 - RNA, 19 nt, Artificial Sequence
  Description of Artificial Sequence: Synthetic oligonucleotide
  Antisense strand to SEQ ID NO: 1762413
aaaccacugaucuugucca

SEQ ID NO: 1762415 - RNA, 19 nt, Artificial Sequence
  Description of Artificial Sequence: Synthetic oligonucleotide
  Sense strand starting at position 454 of SEQ ID NO: 1562645
uuccaagugcagcaugaau

SEQ ID NO: 1762416 - RNA, 19 nt, Artificial Sequence
  Description of Artificial Sequence: Synthetic oligonucleotide
  Antisense strand to SEQ ID NO: 1762415
auucaugcugcacuuggaa

SEQ ID NO: 1762417 - RNA, 19 nt, Artificial Sequence
  Description of Artificial Sequence: Synthetic oligonucleotide
  Sense strand starting at position 456 of SEQ ID NO: 1562645
ccaagugcagcaugaauau

SEQ ID NO: 1762418 - RNA, 19 nt, Artificial Sequence
  Description of Artificial Sequence: Synthetic oligonucleotide
  Antisense strand to SEQ ID NO: 1762417
auauucaugcugcacuugg

SEQ ID NO: 1762419 - RNA, 19 nt, Artificial Sequence
  Description of Artificial Sequence: Synthetic oligonucleotide
  Sense strand starting at position 468 of SEQ ID NO: 1562645
ugaauaucaucaguggcau

SEQ ID NO: 1762420 - RNA, 19 nt, Artificial Sequence
  Description of Artificial Sequence: Synthetic oligonucleotide
  Antisense strand to SEQ ID NO: 1762419
augccacugaugauauuca

SEQ ID NO: 1762421 - RNA, 19 nt, Artificial Sequence
  Description of Artificial Sequence: Synthetic oligonucleotide
  Sense strand starting at position 469 of SEQ ID NO: 1562645
gaauaucaucaguggcaua

SEQ ID NO: 1762422 - RNA, 19 nt, Artificial Sequence
  Description of Artificial Sequence: Synthetic oligonucleotide
  Antisense strand to SEQ ID NO: 1762421
uaugccacugaugauauuc

SEQ ID NO: 1762423 - RNA, 19 nt, Artificial Sequence
  Description of Artificial Sequence: Synthetic oligonucleotide
  Sense strand starting at position 474 of SEQ ID NO: 1562645
ucaucaguggcauaaauac

SEQ ID NO: 1762424 - RNA, 19 nt, Artificial Sequence
  Description of Artificial Sequence: Synthetic oligonucleotide
  Antisense strand to SEQ ID NO: 1762423
guauuuaugccacugauga

SEQ ID NO: 1762425 - RNA, 19 nt, Artificial Sequence
  Description of Artificial Sequence: Synthetic oligonucleotide
  Sense strand starting at position 526 of SEQ ID NO: 1562645
uguugacagauagguaauu

SEQ ID NO: 1762426 - RNA, 19 nt, Artificial Sequence
  Description of Artificial Sequence: Synthetic oligonucleotide
  Antisense strand to SEQ ID NO: 1762425
aauuaccuaucugucaaca

SEQ ID NO: 1762427 - RNA, 19 nt, Artificial Sequence
  Description of Artificial Sequence: Synthetic oligonucleotide
  Sense strand starting at position 642 of SEQ ID NO: 1562645
ggugcaaggauaugacaaa

SEQ ID NO: 1762428 - RNA, 19 nt, Artificial Sequence
  Description of Artificial Sequence: Synthetic oligonucleotide
  Antisense strand to SEQ ID NO: 1762427
uuugucauauccuugcacc

SEQ ID NO: 1762429 - RNA, 19 nt, Artificial Sequence
  Description of Artificial Sequence: Synthetic oligonucleotide
  Sense strand starting at position 662 of SEQ ID NO: 1562645
auggaaaguuugcuacuca

SEQ ID NO: 1762430 - RNA, 19 nt, Artificial Sequence
  Description of Artificial Sequence: Synthetic oligonucleotide
  Antisense strand to SEQ ID NO: 1762429
ugaguagcaaacuuuccau

SEQ ID NO: 1762431 - RNA, 19 nt, Artificial Sequence
  Description of Artificial Sequence: Synthetic oligonucleotide
  Sense strand starting at position 715 of SEQ ID NO: 1562645
ucaguuauucuguaguaca

SEQ ID NO: 1762432 - RNA, 19 nt, Artificial Sequence
  Description of Artificial Sequence: Synthetic oligonucleotide
  Antisense strand to SEQ ID NO: 1762431
uguacuacagaauaacuga

SEQ ID NO: 1762433 - RNA, 19 nt, Artificial Sequence
  Description of Artificial Sequence: Synthetic oligonucleotide
  Sense strand starting at position 773 of SEQ ID NO: 1562645
gcaauaugcaguuauggca

SEQ ID NO: 1762434 - RNA, 19 nt, Artificial Sequence
  Description of Artificial Sequence: Synthetic oligonucleotide
  Antisense strand to SEQ ID NO: 1762433
ugccauaacugcauauugc

SEQ ID NO: 1762435 - RNA, 19 nt, Artificial Sequence
  Description of Artificial Sequence: Synthetic oligonucleotide
  Sense strand starting at position 876 of SEQ ID NO: 1562645
cgguguuugccugcuacua

SEQ ID NO: 1762436 - RNA, 19 nt, Artificial Sequence
  Description of Artificial Sequence: Synthetic oligonucleotide
  Antisense strand to SEQ ID NO: 1762435
uaguagcaggcaaacaccg

SEQ ID NO: 1762437 - RNA, 19 nt, Artificial Sequence
  Description of Artificial Sequence: Synthetic oligonucleotide
  Sense strand starting at position 916 of SEQ ID NO: 1562645
ggugacuucuaugucacca

SEQ ID NO: 1762438 - RNA, 19 nt, Artificial Sequence
  Description of Artificial Sequence: Synthetic oligonucleotide
  Antisense strand to SEQ ID NO: 1762437
uggugacauagaagucacc

SEQ ID NO: 1762439 - RNA, 19 nt, Artificial Sequence
  Description of Artificial Sequence: Synthetic oligonucleotide
  Sense strand starting at position 983 of SEQ ID NO: 1562645
cccugucucccuggugaca

SEQ ID NO: 1762440 - RNA, 19 nt, Artificial Sequence
  Description of Artificial Sequence: Synthetic oligonucleotide
  Antisense strand to SEQ ID NO: 1762439
ugucaccagggagacaggg

SEQ ID NO: 1762441 - RNA, 19 nt, Artificial Sequence
  Description of Artificial Sequence: Synthetic oligonucleotide
  Sense strand starting at position 1063 of SEQ ID NO: 1562645
aagcauuugugucccagca

SEQ ID NO: 1762442 - RNA, 19 nt, Artificial Sequence
  Description of Artificial Sequence: Synthetic oligonucleotide
  Antisense strand to SEQ ID NO: 1762441
ugcugggacacaaaugcuu

SEQ ID NO: 1762443 - RNA, 19 nt, Artificial Sequence
  Description of Artificial Sequence: Synthetic oligonucleotide
  Sense strand starting at position 1117 of SEQ ID NO: 1562645
aucuaaugguggucaagac

SEQ ID NO: 1762444 - RNA, 19 nt, Artificial Sequence
  Description of Artificial Sequence: Synthetic oligonucleotide
  Antisense strand to SEQ ID NO: 1762443
gucuugaccaccauuagau

SEQ ID NO: 1762445 - RNA, 19 nt, Artificial Sequence
  Description of Artificial Sequence: Synthetic oligonucleotide
  Sense strand starting at position 1132 of SEQ ID NO: 1562645
agaccugccugguugaaua

SEQ ID NO: 1762446 - RNA, 19 nt, Artificial Sequence
  Description of Artificial Sequence: Synthetic oligonucleotide
  Antisense strand to SEQ ID NO: 1762445
uauucaaccaggcaggucu

SEQ ID NO: 1762447 - RNA, 19 nt, Artificial Sequence
  Description of Artificial Sequence: Synthetic oligonucleotide
  Sense strand starting at position 1258 of SEQ ID NO: 1562645
aaaguaguuugcuuccaga

SEQ ID NO: 1762448 - RNA, 19 nt, Artificial Sequence
  Description of Artificial Sequence: Synthetic oligonucleotide
  Antisense strand to SEQ ID NO: 1762447
ucuggaagcaaacuacuuu

SEQ ID NO: 1762449 - RNA, 19 nt, Artificial Sequence
  Description of Artificial Sequence: Synthetic oligonucleotide
  Sense strand starting at position 1269 of SEQ ID NO: 1562645
cuuccagacuaagaagaaa

SEQ ID NO: 1762450 - RNA, 19 nt, Artificial Sequence
  Description of Artificial Sequence: Synthetic oligonucleotide
  Antisense strand to SEQ ID NO: 1762449
uuucuucuuagucuggaag

SEQ ID NO: 1762451 - RNA, 19 nt, Artificial Sequence
  Description of Artificial Sequence: Synthetic oligonucleotide
  Sense strand starting at position 1572 of SEQ ID NO: 1562645
aucugugguccugaguaaa

SEQ ID NO: 1762452 - RNA, 19 nt, Artificial Sequence
  Description of Artificial Sequence: Synthetic oligonucleotide
  Antisense strand to SEQ ID NO: 1762451
uuuacucaggaccacagau

SEQ ID NO: 1762453 - RNA, 19 nt, Artificial Sequence
  Description of Artificial Sequence: Synthetic oligonucleotide
  Sense strand starting at position 1634 of SEQ ID NO: 1562645
uuacuccuccacugagagu

SEQ ID NO: 1762454 - RNA, 19 nt, Artificial Sequence
  Description of Artificial Sequence: Synthetic oligonucleotide
  Antisense strand to SEQ ID NO: 1762453
acucucaguggaggaguaa

SEQ ID NO: 1762455 - RNA, 19 nt, Artificial Sequence
  Description of Artificial Sequence: Synthetic oligonucleotide
  Sense strand starting at position 1981 of SEQ ID NO: 1562645
ugcugugugcaucugaguu

SEQ ID NO: 1762456 - RNA, 19 nt, Artificial Sequence
  Description of Artificial Sequence: Synthetic oligonucleotide
  Antisense strand to SEQ ID NO: 1762455
aacucagaugcacacagca

SEQ ID NO: 1762457 - RNA, 19 nt, Artificial Sequence
  Description of Artificial Sequence: Synthetic oligonucleotide
  Sense strand starting at position 2049 of SEQ ID NO: 1562645
guguguuucgguuuaugug

SEQ ID NO: 1762458 - RNA, 19 nt, Artificial Sequence
  Description of Artificial Sequence: Synthetic oligonucleotide
  Antisense strand to SEQ ID NO: 1762457
cacauaaaccgaaacacac

SEQ ID NO: 1762459 - RNA, 19 nt, Artificial Sequence
  Description of Artificial Sequence: Synthetic oligonucleotide
  Sense strand starting at position 2435 of SEQ ID NO: 1562645
guguguacugugucuuuga

SEQ ID NO: 1762460 - RNA, 19 nt, Artificial Sequence
  Description of Artificial Sequence: Synthetic oligonucleotide
  Antisense strand to SEQ ID NO: 1762459
ucaaagacacaguacacac

SEQ ID NO: 1762461 - RNA, 19 nt, Artificial Sequence
  Description of Artificial Sequence: Synthetic oligonucleotide
  Sense strand starting at position 2438 of SEQ ID NO: 1562645
uguacugugucuuugaaag

SEQ ID NO: 1762462 - RNA, 19 nt, Artificial Sequence
  Description of Artificial Sequence: Synthetic oligonucleotide
  Antisense strand to SEQ ID NO: 1762461
cuuucaaagacacaguaca

SEQ ID NO: 1762463 - RNA, 19 nt, Artificial Sequence
  Description of Artificial Sequence: Synthetic oligonucleotide
  Sense strand starting at position 2514 of SEQ ID NO: 1562645
ucaugaacucugggaaguu

SEQ ID NO: 1762464 - RNA, 19 nt, Artificial Sequence
  Description of Artificial Sequence: Synthetic oligonucleotide
  Antisense strand to SEQ ID NO: 1762463
aacuucccagaguucauga

SEQ ID NO: 1762465 - RNA, 19 nt, Artificial Sequence
  Description of Artificial Sequence: Synthetic oligonucleotide
  Sense strand starting at position 2884 of SEQ ID NO: 1562645
gaggguccauugucagaau

SEQ ID NO: 1762466 - RNA, 19 nt, Artificial Sequence
  Description of Artificial Sequence: Synthetic oligonucleotide
  Antisense strand to SEQ ID NO: 1762465
auucugacaauggacccuc

SEQ ID NO: 1762467 - RNA, 19 nt, Artificial Sequence
  Description of Artificial Sequence: Synthetic oligonucleotide
  Sense strand starting at position 2947 of SEQ ID NO: 1562645
ugauaaauauuagccauga

SEQ ID NO: 1762468 - RNA, 19 nt, Artificial Sequence
  Description of Artificial Sequence: Synthetic oligonucleotide
  Antisense strand to SEQ ID NO: 1762467
ucauggcuaauauuuauca

SEQ ID NO: 1762469 - RNA, 19 nt, Artificial Sequence
  Description of Artificial Sequence: Synthetic oligonucleotide
  Sense strand starting at position 3048 of SEQ ID NO: 1562645
ugucacaugcauggucuaa

SEQ ID NO: 1762470 - RNA, 19 nt, Artificial Sequence
  Description of Artificial Sequence: Synthetic oligonucleotide
  Antisense strand to SEQ ID NO: 1762469
uuagaccaugcaugugaca

SEQ ID NO: 1762471 - RNA, 19 nt, Artificial Sequence
  Description of Artificial Sequence: Synthetic oligonucleotide
  Sense strand starting at position 3050 of SEQ ID NO: 1562645
ucacaugcauggucuaaag

SEQ ID NO: 1762472 - RNA, 19 nt, Artificial Sequence
  Description of Artificial Sequence: Synthetic oligonucleotide
  Antisense strand to SEQ ID NO: 1762471
cuuuagaccaugcauguga

SEQ ID NO: 1762473 - RNA, 19 nt, Artificial Sequence
  Description of Artificial Sequence: Synthetic oligonucleotide
  Sense strand starting at position 3061 of SEQ ID NO: 1562645
gucuaaagacucgauugca

SEQ ID NO: 1762474 - RNA, 19 nt, Artificial Sequence
  Description of Artificial Sequence: Synthetic oligonucleotide
  Antisense strand to SEQ ID NO: 1762473
ugcaaucgagucuuuagac

SEQ ID NO: 1762475 - RNA, 19 nt, Artificial Sequence
  Description of Artificial Sequence: Synthetic oligonucleotide
  Sense strand starting at position 3944 of SEQ ID NO: 1562645
uuccaaacgcuuuagcuaa

SEQ ID NO: 1762476 - RNA, 19 nt, Artificial Sequence
  Description of Artificial Sequence: Synthetic oligonucleotide
  Antisense strand to SEQ ID NO: 1762475
uuagcuaaagcguuuggaa

SEQ ID NO: 1762477 - RNA, 19 nt, Artificial Sequence
  Description of Artificial Sequence: Synthetic oligonucleotide
  Sense strand starting at position 127 of SEQ ID NO: 1562646
uggguuuauuuguguugga

SEQ ID NO: 1762478 - RNA, 19 nt, Artificial Sequence
  Description of Artificial Sequence: Synthetic oligonucleotide
  Antisense strand to SEQ ID NO: 1762477
uccaacacaaauaaaccca

SEQ ID NO: 1762479 - RNA, 19 nt, Artificial Sequence
  Description of Artificial Sequence: Synthetic oligonucleotide
  Sense strand starting at position 166 of SEQ ID NO: 1562646
guguguacugugucuuuga

SEQ ID NO: 1762480 - RNA, 19 nt, Artificial Sequence
  Description of Artificial Sequence: Synthetic oligonucleotide
  Antisense strand to SEQ ID NO: 1762479
ucaaagacacaguacacac

SEQ ID NO: 1762481 - RNA, 19 nt, Artificial Sequence
  Description of Artificial Sequence: Synthetic oligonucleotide
  Sense strand starting at position 167 of SEQ ID NO: 1562646
uguguacugugucuuugaa

SEQ ID NO: 1762482 - RNA, 19 nt, Artificial Sequence
  Description of Artificial Sequence: Synthetic oligonucleotide
  Antisense strand to SEQ ID NO: 1762481
uucaaagacacaguacaca

SEQ ID NO: 1762483 - RNA, 19 nt, Artificial Sequence
  Description of Artificial Sequence: Synthetic oligonucleotide
  Sense strand starting at position 169 of SEQ ID NO: 1562646
uguacugugucuuugaaag

SEQ ID NO: 1762484 - RNA, 19 nt, Artificial Sequence
  Description of Artificial Sequence: Synthetic oligonucleotide
  Antisense strand to SEQ ID NO: 1762483
cuuucaaagacacaguaca

SEQ ID NO: 1762485 - RNA, 19 nt, Artificial Sequence
  Description of Artificial Sequence: Synthetic oligonucleotide
  Sense strand starting at position 171 of SEQ ID NO: 1562646
uacugugucuuugaaaggu

SEQ ID NO: 1762486 - RNA, 19 nt, Artificial Sequence
  Description of Artificial Sequence: Synthetic oligonucleotide
  Antisense strand to SEQ ID NO: 1762485
accuuucaaagacacagua

SEQ ID NO: 1762487 - RNA, 19 nt, Artificial Sequence
  Description of Artificial Sequence: Synthetic oligonucleotide
  Sense strand starting at position 245 of SEQ ID NO: 1562646
ucaugaacucugggaaguu

SEQ ID NO: 1762488 - RNA, 19 nt, Artificial Sequence
  Description of Artificial Sequence: Synthetic oligonucleotide
  Antisense strand to SEQ ID NO: 1762487
aacuucccagaguucauga

SEQ ID NO: 1762489 - RNA, 19 nt, Artificial Sequence
  Description of Artificial Sequence: Synthetic oligonucleotide
  Sense strand starting at position 275 of SEQ ID NO: 1562646
aaaugugauuguggacugu

SEQ ID NO: 1762490 - RNA, 19 nt, Artificial Sequence
  Description of Artificial Sequence: Synthetic oligonucleotide
  Antisense strand to SEQ ID NO: 1762489
acaguccacaaucacauuu

SEQ ID NO: 1762491 - RNA, 19 nt, Artificial Sequence
  Description of Artificial Sequence: Synthetic oligonucleotide
  Sense strand starting at position 615 of SEQ ID NO: 1562646
gaggguccauugucagaau

SEQ ID NO: 1762492 - RNA, 19 nt, Artificial Sequence
  Description of Artificial Sequence: Synthetic oligonucleotide
  Antisense strand to SEQ ID NO: 1762491
auucugacaauggacccuc

SEQ ID NO: 1762493 - RNA, 19 nt, Artificial Sequence
  Description of Artificial Sequence: Synthetic oligonucleotide
  Sense strand starting at position 616 of SEQ ID NO: 1562646
aggguccauugucagaauu

SEQ ID NO: 1762494 - RNA, 19 nt, Artificial Sequence
  Description of Artificial Sequence: Synthetic oligonucleotide
  Antisense strand to SEQ ID NO: 1762493
aauucugacaauggacccu

SEQ ID NO: 1762495 - RNA, 19 nt, Artificial Sequence
  Description of Artificial Sequence: Synthetic oligonucleotide
  Sense strand starting at position 618 of SEQ ID NO: 1562646
gguccauugucagaauuaa

SEQ ID NO: 1762496 - RNA, 19 nt, Artificial Sequence
  Description of Artificial Sequence: Synthetic oligonucleotide
  Antisense strand to SEQ ID NO: 1762495
uuaauucugacaauggacc

SEQ ID NO: 1762497 - RNA, 19 nt, Artificial Sequence
  Description of Artificial Sequence: Synthetic oligonucleotide
  Sense strand starting at position 666 of SEQ ID NO: 1562646
auagaaagcucuugauaaa

SEQ ID NO: 1762498 - RNA, 19 nt, Artificial Sequence
  Description of Artificial Sequence: Synthetic oligonucleotide
  Antisense strand to SEQ ID NO: 1762497
uuuaucaagagcuuucuau

SEQ ID NO: 1762499 - RNA, 19 nt, Artificial Sequence
  Description of Artificial Sequence: Synthetic oligonucleotide
  Sense strand starting at position 678 of SEQ ID NO: 1562646
ugauaaauauuagccauga

SEQ ID NO: 1762500 - RNA, 19 nt, Artificial Sequence
  Description of Artificial Sequence: Synthetic oligonucleotide
  Antisense strand to SEQ ID NO: 1762499
ucauggcuaauauuuauca

SEQ ID NO: 1762501 - RNA, 19 nt, Artificial Sequence
  Description of Artificial Sequence: Synthetic oligonucleotide
  Sense strand starting at position 694 of SEQ ID NO: 1562646
ugacuauucuuagaaguaa

SEQ ID NO: 1762502 - RNA, 19 nt, Artificial Sequence
  Description of Artificial Sequence: Synthetic oligonucleotide
  Antisense strand to SEQ ID NO: 1762501
uuacuucuaagaauaguca

SEQ ID NO: 1762503 - RNA, 19 nt, Artificial Sequence
  Description of Artificial Sequence: Synthetic oligonucleotide
  Sense strand starting at position 705 of SEQ ID NO: 1562646
agaaguaacuauugggaug

SEQ ID NO: 1762504 - RNA, 19 nt, Artificial Sequence
  Description of Artificial Sequence: Synthetic oligonucleotide
  Antisense strand to SEQ ID NO: 1762503
caucccaauaguuacuucu

SEQ ID NO: 1762505 - RNA, 19 nt, Artificial Sequence
  Description of Artificial Sequence: Synthetic oligonucleotide
  Sense strand starting at position 779 of SEQ ID NO: 1562646
ugucacaugcauggucuaa

SEQ ID NO: 1762506 - RNA, 19 nt, Artificial Sequence
  Description of Artificial Sequence: Synthetic oligonucleotide
  Antisense strand to SEQ ID NO: 1762505
uuagaccaugcaugugaca

SEQ ID NO: 1762507 - RNA, 19 nt, Artificial Sequence
  Description of Artificial Sequence: Synthetic oligonucleotide
  Sense strand starting at position 781 of SEQ ID NO: 1562646
ucacaugcauggucuaaag

SEQ ID NO: 1762508 - RNA, 19 nt, Artificial Sequence
  Description of Artificial Sequence: Synthetic oligonucleotide
  Antisense strand to SEQ ID NO: 1762507
cuuuagaccaugcauguga

SEQ ID NO: 1762509 - RNA, 19 nt, Artificial Sequence
  Description of Artificial Sequence: Synthetic oligonucleotide
  Sense strand starting at position 792 of SEQ ID NO: 1562646
gucuaaagacucgauugca

SEQ ID NO: 1762510 - RNA, 19 nt, Artificial Sequence
  Description of Artificial Sequence: Synthetic oligonucleotide
  Antisense strand to SEQ ID NO: 1762509
ugcaaucgagucuuuagac

SEQ ID NO: 1762511 - RNA, 19 nt, Artificial Sequence
  Description of Artificial Sequence: Synthetic oligonucleotide
  Sense strand starting at position 1370 of SEQ ID NO: 1562646
gauugauuccagcgccgca

SEQ ID NO: 1762512 - RNA, 19 nt, Artificial Sequence
  Description of Artificial Sequence: Synthetic oligonucleotide
  Antisense strand to SEQ ID NO: 1762511
ugcggcgcuggaaucaauc

SEQ ID NO: 1762513 - RNA, 19 nt, Artificial Sequence
  Description of Artificial Sequence: Synthetic oligonucleotide
  Sense strand starting at position 1410 of SEQ ID NO: 1562646
gaaaguaaaucaugugaag

SEQ ID NO: 1762514 - RNA, 19 nt, Artificial Sequence
  Description of Artificial Sequence: Synthetic oligonucleotide
  Antisense strand to SEQ ID NO: 1762513
cuucacaugauuuacuuuc

SEQ ID NO: 1762515 - RNA, 19 nt, Artificial Sequence
  Description of Artificial Sequence: Synthetic oligonucleotide
  Sense strand starting at position 1413 of SEQ ID NO: 1562646
aguaaaucaugugaagggu

SEQ ID NO: 1762516 - RNA, 19 nt, Artificial Sequence
  Description of Artificial Sequence: Synthetic oligonucleotide
  Antisense strand to SEQ ID NO: 1762515
acccuucacaugauuuacu

SEQ ID NO: 1762517 - RNA, 19 nt, Artificial Sequence
  Description of Artificial Sequence: Synthetic oligonucleotide
  Sense strand starting at position 1675 of SEQ ID NO: 1562646
uuccaaacgcuuuagcuaa

SEQ ID NO: 1762518 - RNA, 19 nt, Artificial Sequence
  Description of Artificial Sequence: Synthetic oligonucleotide
  Antisense strand to SEQ ID NO: 1762517
uuagcuaaagcguuuggaa

SEQ ID NO: 1762519 - RNA, 19 nt, Artificial Sequence
  Description of Artificial Sequence: Synthetic oligonucleotide
  Sense strand starting at position 1827 of SEQ ID NO: 1562646
cucagaucuugagguggaa

SEQ ID NO: 1762520 - RNA, 19 nt, Artificial Sequence
  Description of Artificial Sequence: Synthetic oligonucleotide
  Antisense strand to SEQ ID NO: 1762519
uuccaccucaagaucugag

SEQ ID NO: 1762521 - RNA, 19 nt, Artificial Sequence
  Description of Artificial Sequence: Synthetic oligonucleotide
  Sense strand starting at position 1907 of SEQ ID NO: 1562646
caguuagauccuggaggcu

SEQ ID NO: 1762522 - RNA, 19 nt, Artificial Sequence
  Description of Artificial Sequence: Synthetic oligonucleotide
  Antisense strand to SEQ ID NO: 1762521
agccuccaggaucuaacug

SEQ ID NO: 1762523 - RNA, 19 nt, Artificial Sequence
  Description of Artificial Sequence: Synthetic oligonucleotide
  Sense strand starting at position 2120 of SEQ ID NO: 1562646
gccauucgggaagaauauu

SEQ ID NO: 1762524 - RNA, 19 nt, Artificial Sequence
  Description of Artificial Sequence: Synthetic oligonucleotide
  Antisense strand to SEQ ID NO: 1762523
aauauucuucccgaauggc

SEQ ID NO: 1762525 - RNA, 19 nt, Artificial Sequence
  Description of Artificial Sequence: Synthetic oligonucleotide
  Sense strand starting at position 2221 of SEQ ID NO: 1562646
cugggcuuguguucagaac

SEQ ID NO: 1762526 - RNA, 19 nt, Artificial Sequence
  Description of Artificial Sequence: Synthetic oligonucleotide
  Antisense strand to SEQ ID NO: 1762525
guucugaacacaagcccag

SEQ ID NO: 1762527 - RNA, 19 nt, Artificial Sequence
  Description of Artificial Sequence: Synthetic oligonucleotide
  Sense strand starting at position 2329 of SEQ ID NO: 1562646
gguggauuaugaccucaga

SEQ ID NO: 1762528 - RNA, 19 nt, Artificial Sequence
  Description of Artificial Sequence: Synthetic oligonucleotide
  Antisense strand to SEQ ID NO: 1762527
ucugaggucauaauccacc

SEQ ID NO: 1762529 - RNA, 19 nt, Artificial Sequence
  Description of Artificial Sequence: Synthetic oligonucleotide
  Sense strand starting at position 2395 of SEQ ID NO: 1562646
acaaacauuugagagguau

SEQ ID NO: 1762530 - RNA, 19 nt, Artificial Sequence
  Description of Artificial Sequence: Synthetic oligonucleotide
  Antisense strand to SEQ ID NO: 1762529
auaccucucaaauguuugu

SEQ ID NO: 1762531 - RNA, 19 nt, Artificial Sequence
  Description of Artificial Sequence: Synthetic oligonucleotide
  Sense strand starting at position 2488 of SEQ ID NO: 1562646
cagaguuaccagugguuua

SEQ ID NO: 1762532 - RNA, 19 nt, Artificial Sequence
  Description of Artificial Sequence: Synthetic oligonucleotide
  Antisense strand to SEQ ID NO: 1762531
uaaaccacugguaacucug

SEQ ID NO: 1762533 - RNA, 19 nt, Artificial Sequence
  Description of Artificial Sequence: Synthetic oligonucleotide
  Sense strand starting at position 2489 of SEQ ID NO: 1562646
agaguuaccagugguuuaa

SEQ ID NO: 1762534 - RNA, 19 nt, Artificial Sequence
  Description of Artificial Sequence: Synthetic oligonucleotide
  Antisense strand to SEQ ID NO: 1762533
uuaaaccacugguaacucu

SEQ ID NO: 1762535 - RNA, 19 nt, Artificial Sequence
  Description of Artificial Sequence: Synthetic oligonucleotide
  Sense strand starting at position 2505 of SEQ ID NO: 1562646
uaaagugcugcauauauga

SEQ ID NO: 1762536 - RNA, 19 nt, Artificial Sequence
  Description of Artificial Sequence: Synthetic oligonucleotide
  Antisense strand to SEQ ID NO: 1762535
ucauauaugcagcacuuua

SEQ ID NO: 1762537 - RNA, 19 nt, Artificial Sequence
  Description of Artificial Sequence: Synthetic oligonucleotide
  Sense strand starting at position 2512 of SEQ ID NO: 1562646
cugcauauaugauuguuau

SEQ ID NO: 1762538 - RNA, 19 nt, Artificial Sequence
  Description of Artificial Sequence: Synthetic oligonucleotide
  Antisense strand to SEQ ID NO: 1762537
auaacaaucauauaugcag

SEQ ID NO: 1762539 - RNA, 19 nt, Artificial Sequence
  Description of Artificial Sequence: Synthetic oligonucleotide
  Sense strand starting at position 2518 of SEQ ID NO: 1562646
auaugauuguuauaugagg

SEQ ID NO: 1762540 - RNA, 19 nt, Artificial Sequence
  Description of Artificial Sequence: Synthetic oligonucleotide
  Antisense strand to SEQ ID NO: 1762539
ccucauauaacaaucauau

SEQ ID NO: 1762541 - RNA, 19 nt, Artificial Sequence
  Description of Artificial Sequence: Synthetic oligonucleotide
  Sense strand starting at position 2520 of SEQ ID NO: 1562646
augauuguuauaugaggua

SEQ ID NO: 1762542 - RNA, 19 nt, Artificial Sequence
  Description of Artificial Sequence: Synthetic oligonucleotide
  Antisense strand to SEQ ID NO: 1762541
uaccucauauaacaaucau

SEQ ID NO: 1762543 - RNA, 19 nt, Artificial Sequence
  Description of Artificial Sequence: Synthetic oligonucleotide
  Sense strand starting at position 2540 of SEQ ID NO: 1562646
auaagauucucugacccag

SEQ ID NO: 1762544 - RNA, 19 nt, Artificial Sequence
  Description of Artificial Sequence: Synthetic oligonucleotide
  Antisense strand to SEQ ID NO: 1762543
cugggucagagaaucuuau

SEQ ID NO: 1762545 - RNA, 19 nt, Artificial Sequence
  Description of Artificial Sequence: Synthetic oligonucleotide
  Sense strand starting at position 2546 of SEQ ID NO: 1562646
uucucugacccagaguuaa

SEQ ID NO: 1762546 - RNA, 19 nt, Artificial Sequence
  Description of Artificial Sequence: Synthetic oligonucleotide
  Antisense strand to SEQ ID NO: 1762545
uuaacucugggucagagaa

SEQ ID NO: 1762547 - RNA, 19 nt, Artificial Sequence
  Description of Artificial Sequence: Synthetic oligonucleotide
  Sense strand starting at position 2765 of SEQ ID NO: 1562646
gcagcaaucuuauaaggua

SEQ ID NO: 1762548 - RNA, 19 nt, Artificial Sequence
  Description of Artificial Sequence: Synthetic oligonucleotide
  Antisense strand to SEQ ID NO: 1762547
uaccuuauaagauugcugc

SEQ ID NO: 1762549 - RNA, 19 nt, Artificial Sequence
  Description of Artificial Sequence: Synthetic oligonucleotide
  Sense strand starting at position 3030 of SEQ ID NO: 1562646
gacguuaccaggcauaagu

SEQ ID NO: 1762550 - RNA, 19 nt, Artificial Sequence
  Description of Artificial Sequence: Synthetic oligonucleotide
  Antisense strand to SEQ ID NO: 1762549
acuuaugccugguaacguc

SEQ ID NO: 1762551 - RNA, 19 nt, Artificial Sequence
  Description of Artificial Sequence: Synthetic oligonucleotide
  Sense strand starting at position 3177 of SEQ ID NO: 1562646
agcuuuaaucugcaagaag

SEQ ID NO: 1762552 - RNA, 19 nt, Artificial Sequence
  Description of Artificial Sequence: Synthetic oligonucleotide
  Antisense strand to SEQ ID NO: 1762551
cuucuugcagauuaaagcu

SEQ ID NO: 1762553 - RNA, 19 nt, Artificial Sequence
  Description of Artificial Sequence: Synthetic oligonucleotide
  Sense strand starting at position 3397 of SEQ ID NO: 1562646
ccgaguauccaggauuaca

SEQ ID NO: 1762554 - RNA, 19 nt, Artificial Sequence
  Description of Artificial Sequence: Synthetic oligonucleotide
  Antisense strand to SEQ ID NO: 1762553
uguaauccuggauacucgg

SEQ ID NO: 1762555 - RNA, 19 nt, Artificial Sequence
  Description of Artificial Sequence: Synthetic oligonucleotide
  Sense strand starting at position 3532 of SEQ ID NO: 1562646
cuuccaagugcuggcauua

SEQ ID NO: 1762556 - RNA, 19 nt, Artificial Sequence
  Description of Artificial Sequence: Synthetic oligonucleotide
  Antisense strand to SEQ ID NO: 1762555
uaaugccagcacuuggaag

SEQ ID NO: 1762557 - RNA, 19 nt, Artificial Sequence
  Description of Artificial Sequence: Synthetic oligonucleotide
  Sense strand starting at position 395 of SEQ ID NO: 1562647
aggugacagucacuagagu

SEQ ID NO: 1762558 - RNA, 19 nt, Artificial Sequence
  Description of Artificial Sequence: Synthetic oligonucleotide
  Antisense strand to SEQ ID NO: 1762557
acucuagugacugucaccu

SEQ ID NO: 1762559 - RNA, 19 nt, Artificial Sequence
  Description of Artificial Sequence: Synthetic oligonucleotide
  Sense strand starting at position 432 of SEQ ID NO: 1562647
gcacauuggcaucacucaa

SEQ ID NO: 1762560 - RNA, 19 nt, Artificial Sequence
  Description of Artificial Sequence: Synthetic oligonucleotide
  Antisense strand to SEQ ID NO: 1762559
uugagugaugccaaugugc

SEQ ID NO: 1762561 - RNA, 19 nt, Artificial Sequence
  Description of Artificial Sequence: Synthetic oligonucleotide
  Sense strand starting at position 659 of SEQ ID NO: 1562647
gugcguguucucguaaagc

SEQ ID NO: 1762562 - RNA, 19 nt, Artificial Sequence
  Description of Artificial Sequence: Synthetic oligonucleotide
  Antisense strand to SEQ ID NO: 1762561
gcuuuacgagaacacgcac

SEQ ID NO: 1762563 - RNA, 19 nt, Artificial Sequence
  Description of Artificial Sequence: Synthetic oligonucleotide
  Sense strand starting at position 661 of SEQ ID NO: 1562647
gcguguucucguaaagcga

SEQ ID NO: 1762564 - RNA, 19 nt, Artificial Sequence
  Description of Artificial Sequence: Synthetic oligonucleotide
  Antisense strand to SEQ ID NO: 1762563
ucgcuuuacgagaacacgc

SEQ ID NO: 1762565 - RNA, 19 nt, Artificial Sequence
  Description of Artificial Sequence: Synthetic oligonucleotide
  Sense strand starting at position 736 of SEQ ID NO: 1562647
gaaugaaaggucugcuaag

SEQ ID NO: 1762566 - RNA, 19 nt, Artificial Sequence
  Description of Artificial Sequence: Synthetic oligonucleotide
  Antisense strand to SEQ ID NO: 1762565
cuuagcagaccuuucauuc

SEQ ID NO: 1762567 - RNA, 19 nt, Artificial Sequence
  Description of Artificial Sequence: Synthetic oligonucleotide
  Sense strand starting at position 801 of SEQ ID NO: 1562647
acuagaaaugcuuacugua

SEQ ID NO: 1762568 - RNA, 19 nt, Artificial Sequence
  Description of Artificial Sequence: Synthetic oligonucleotide
  Antisense strand to SEQ ID NO: 1762567
uacaguaagcauuucuagu

SEQ ID NO: 1762569 - RNA, 19 nt, Artificial Sequence
  Description of Artificial Sequence: Synthetic oligonucleotide
  Sense strand starting at position 803 of SEQ ID NO: 1562647
uagaaaugcuuacuguaug

SEQ ID NO: 1762570 - RNA, 19 nt, Artificial Sequence
  Description of Artificial Sequence: Synthetic oligonucleotide
  Antisense strand to SEQ ID NO: 1762569
cauacaguaagcauuucua

SEQ ID NO: 1762571 - RNA, 19 nt, Artificial Sequence
  Description of Artificial Sequence: Synthetic oligonucleotide
  Sense strand starting at position 808 of SEQ ID NO: 1562647
augcuuacuguaugaacga

SEQ ID NO: 1762572 - RNA, 19 nt, Artificial Sequence
  Description of Artificial Sequence: Synthetic oligonucleotide
  Antisense strand to SEQ ID NO: 1762571
ucguucauacaguaagcau

SEQ ID NO: 1762573 - RNA, 19 nt, Artificial Sequence
  Description of Artificial Sequence: Synthetic oligonucleotide
  Sense strand starting at position 1062 of SEQ ID NO: 1562647
cggcgagcagccuuuguua

SEQ ID NO: 1762574 - RNA, 19 nt, Artificial Sequence
  Description of Artificial Sequence: Synthetic oligonucleotide
  Antisense strand to SEQ ID NO: 1762573
uaacaaaggcugcucgccg

SEQ ID NO: 1762575 - RNA, 19 nt, Artificial Sequence
  Description of Artificial Sequence: Synthetic oligonucleotide
  Sense strand starting at position 1073 of SEQ ID NO: 1562647
cuuuguuacugagcauuag

SEQ ID NO: 1762576 - RNA, 19 nt, Artificial Sequence
  Description of Artificial Sequence: Synthetic oligonucleotide
  Antisense strand to SEQ ID NO: 1762575
cuaaugcucaguaacaaag

SEQ ID NO: 1762577 - RNA, 19 nt, Artificial Sequence
  Description of Artificial Sequence: Synthetic oligonucleotide
  Sense strand starting at position 1077 of SEQ ID NO: 1562647
guuacugagcauuaggaac

SEQ ID NO: 1762578 - RNA, 19 nt, Artificial Sequence
  Description of Artificial Sequence: Synthetic oligonucleotide
  Antisense strand to SEQ ID NO: 1762577
guuccuaaugcucaguaac

SEQ ID NO: 1762579 - RNA, 19 nt, Artificial Sequence
  Description of Artificial Sequence: Synthetic oligonucleotide
  Sense strand starting at position 1115 of SEQ ID NO: 1562647
ccaggauaguccguccaca

SEQ ID NO: 1762580 - RNA, 19 nt, Artificial Sequence
  Description of Artificial Sequence: Synthetic oligonucleotide
  Antisense strand to SEQ ID NO: 1762579
uguggacggacuauccugg

SEQ ID NO: 1762581 - RNA, 19 nt, Artificial Sequence
  Description of Artificial Sequence: Synthetic oligonucleotide
  Sense strand starting at position 1609 of SEQ ID NO: 1562647
gaugaaagccucugucuca

SEQ ID NO: 1762582 - RNA, 19 nt, Artificial Sequence
  Description of Artificial Sequence: Synthetic oligonucleotide
  Antisense strand to SEQ ID NO: 1762581
ugagacagaggcuuucauc

SEQ ID NO: 1762583 - RNA, 19 nt, Artificial Sequence
  Description of Artificial Sequence: Synthetic oligonucleotide
  Sense strand starting at position 1823 of SEQ ID NO: 1562647
gccagaugcucucugggau

SEQ ID NO: 1762584 - RNA, 19 nt, Artificial Sequence
  Description of Artificial Sequence: Synthetic oligonucleotide
  Antisense strand to SEQ ID NO: 1762583
aucccagagagcaucuggc

SEQ ID NO: 1762585 - RNA, 19 nt, Artificial Sequence
  Description of Artificial Sequence: Synthetic oligonucleotide
  Sense strand starting at position 1971 of SEQ ID NO: 1562647
uugaccuuuccaggcuuua

SEQ ID NO: 1762586 - RNA, 19 nt, Artificial Sequence
  Description of Artificial Sequence: Synthetic oligonucleotide
  Antisense strand to SEQ ID NO: 1762585
uaaagccuggaaaggucaa

SEQ ID NO: 1762587 - RNA, 19 nt, Artificial Sequence
  Description of Artificial Sequence: Synthetic oligonucleotide
  Sense strand starting at position 1988 of SEQ ID NO: 1562647
uaguuucgacaucaauaag

SEQ ID NO: 1762588 - RNA, 19 nt, Artificial Sequence
  Description of Artificial Sequence: Synthetic oligonucleotide
  Antisense strand to SEQ ID NO: 1762587
cuuauugaugucgaaacua

SEQ ID NO: 1762589 - RNA, 19 nt, Artificial Sequence
  Description of Artificial Sequence: Synthetic oligonucleotide
  Sense strand starting at position 2031 of SEQ ID NO: 1562647
cgcgucuguaauccuagua

SEQ ID NO: 1762590 - RNA, 19 nt, Artificial Sequence
  Description of Artificial Sequence: Synthetic oligonucleotide
  Antisense strand to SEQ ID NO: 1762589
uacuaggauuacagacgcg

SEQ ID NO: 1762591 - RNA, 19 nt, Artificial Sequence
  Description of Artificial Sequence: Synthetic oligonucleotide
  Sense strand starting at position 2067 of SEQ ID NO: 1562647
ggguguauuugccugagcu

SEQ ID NO: 1762592 - RNA, 19 nt, Artificial Sequence
  Description of Artificial Sequence: Synthetic oligonucleotide
  Antisense strand to SEQ ID NO: 1762591
agcucaggcaaauacaccc

SEQ ID NO: 1762593 - RNA, 19 nt, Artificial Sequence
  Description of Artificial Sequence: Synthetic oligonucleotide
  Sense strand starting at position 2068 of SEQ ID NO: 1562647
gguguauuugccugagcuc

SEQ ID NO: 1762594 - RNA, 19 nt, Artificial Sequence
  Description of Artificial Sequence: Synthetic oligonucleotide
  Antisense strand to SEQ ID NO: 1762593
gagcucaggcaaauacacc

SEQ ID NO: 1762595 - RNA, 19 nt, Artificial Sequence
  Description of Artificial Sequence: Synthetic oligonucleotide
  Sense strand starting at position 2069 of SEQ ID NO: 1562647
guguauuugccugagcuca

SEQ ID NO: 1762596 - RNA, 19 nt, Artificial Sequence
  Description of Artificial Sequence: Synthetic oligonucleotide
  Antisense strand to SEQ ID NO: 1762595
ugagcucaggcaaauacac

SEQ ID NO: 1762597 - RNA, 19 nt, Artificial Sequence
  Description of Artificial Sequence: Synthetic oligonucleotide
  Sense strand starting at position 2348 of SEQ ID NO: 1562647
guuacaaugcgccaagauc

SEQ ID NO: 1762598 - RNA, 19 nt, Artificial Sequence
  Description of Artificial Sequence: Synthetic oligonucleotide
  Antisense strand to SEQ ID NO: 1762597
gaucuuggcgcauuguaac

SEQ ID NO: 1762599 - RNA, 19 nt, Artificial Sequence
  Description of Artificial Sequence: Synthetic oligonucleotide
  Sense strand starting at position 2573 of SEQ ID NO: 1562647
gaugauuuguguccugugu

SEQ ID NO: 1762600 - RNA, 19 nt, Artificial Sequence
  Description of Artificial Sequence: Synthetic oligonucleotide
  Antisense strand to SEQ ID NO: 1762599
acacaggacacaaaucauc

SEQ ID NO: 1762601 - RNA, 19 nt, Artificial Sequence
  Description of Artificial Sequence: Synthetic oligonucleotide
  Sense strand starting at position 2619 of SEQ ID NO: 1562647
ugaugaaagcuccacugca

SEQ ID NO: 1762602 - RNA, 19 nt, Artificial Sequence
  Description of Artificial Sequence: Synthetic oligonucleotide
  Antisense strand to SEQ ID NO: 1762601
ugcaguggagcuuucauca

SEQ ID NO: 1762603 - RNA, 19 nt, Artificial Sequence
  Description of Artificial Sequence: Synthetic oligonucleotide
  Sense strand starting at position 3003 of SEQ ID NO: 1562647
gcaggagguucccuugaac

SEQ ID NO: 1762604 - RNA, 19 nt, Artificial Sequence
  Description of Artificial Sequence: Synthetic oligonucleotide
  Antisense strand to SEQ ID NO: 1762603
guucaagggaaccuccugc

SEQ ID NO: 1762605 - RNA, 19 nt, Artificial Sequence
  Description of Artificial Sequence: Synthetic oligonucleotide
  Sense strand starting at position 3189 of SEQ ID NO: 1562647
uugaauaacgaguggauca

SEQ ID NO: 1762606 - RNA, 19 nt, Artificial Sequence
  Description of Artificial Sequence: Synthetic oligonucleotide
  Antisense strand to SEQ ID NO: 1762605
ugauccacucguuauucaa

SEQ ID NO: 1762607 - RNA, 19 nt, Artificial Sequence
  Description of Artificial Sequence: Synthetic oligonucleotide
  Sense strand starting at position 3459 of SEQ ID NO: 1562647
agaauuuccugaugaagca

SEQ ID NO: 1762608 - RNA, 19 nt, Artificial Sequence
  Description of Artificial Sequence: Synthetic oligonucleotide
  Antisense strand to SEQ ID NO: 1762607
ugcuucaucaggaaauucu

SEQ ID NO: 1762609 - RNA, 19 nt, Artificial Sequence
  Description of Artificial Sequence: Synthetic oligonucleotide
  Sense strand starting at position 3479 of SEQ ID NO: 1562647
aagugucugguccgaauga

SEQ ID NO: 1762610 - RNA, 19 nt, Artificial Sequence
  Description of Artificial Sequence: Synthetic oligonucleotide
  Antisense strand to SEQ ID NO: 1762609
ucauucggaccagacacuu

SEQ ID NO: 1762611 - RNA, 19 nt, Artificial Sequence
  Description of Artificial Sequence: Synthetic oligonucleotide
  Sense strand starting at position 3484 of SEQ ID NO: 1562647
ucugguccgaaugauaaca

SEQ ID NO: 1762612 - RNA, 19 nt, Artificial Sequence
  Description of Artificial Sequence: Synthetic oligonucleotide
  Antisense strand to SEQ ID NO: 1762611
uguuaucauucggaccaga

SEQ ID NO: 1762613 - RNA, 19 nt, Artificial Sequence
  Description of Artificial Sequence: Synthetic oligonucleotide
  Sense strand starting at position 3509 of SEQ ID NO: 1562647
ugacuuucuuguuuacaca

SEQ ID NO: 1762614 - RNA, 19 nt, Artificial Sequence
  Description of Artificial Sequence: Synthetic oligonucleotide
  Antisense strand to SEQ ID NO: 1762613
uguguaaacaagaaaguca

SEQ ID NO: 1762615 - RNA, 19 nt, Artificial Sequence
  Description of Artificial Sequence: Synthetic oligonucleotide
  Sense strand starting at position 3539 of SEQ ID NO: 1562647
ugaauuuguucagugugua

SEQ ID NO: 1762616 - RNA, 19 nt, Artificial Sequence
  Description of Artificial Sequence: Synthetic oligonucleotide
  Antisense strand to SEQ ID NO: 1762615
uacacacugaacaaauuca

SEQ ID NO: 1762617 - RNA, 19 nt, Artificial Sequence
  Description of Artificial Sequence: Synthetic oligonucleotide
  Sense strand starting at position 3599 of SEQ ID NO: 1562647
uaaacuucggagcguauaa

SEQ ID NO: 1762618 - RNA, 19 nt, Artificial Sequence
  Description of Artificial Sequence: Synthetic oligonucleotide
  Antisense strand to SEQ ID NO: 1762617
uuauacgcuccgaaguuua

SEQ ID NO: 1762619 - RNA, 19 nt, Artificial Sequence
  Description of Artificial Sequence: Synthetic oligonucleotide
  Sense strand starting at position 3698 of SEQ ID NO: 1562647
gcauuuguguauccgauca

SEQ ID NO: 1762620 - RNA, 19 nt, Artificial Sequence
  Description of Artificial Sequence: Synthetic oligonucleotide
  Antisense strand to SEQ ID NO: 1762619
ugaucggauacacaaaugc

SEQ ID NO: 1762621 - RNA, 19 nt, Artificial Sequence
  Description of Artificial Sequence: Synthetic oligonucleotide
  Sense strand starting at position 3703 of SEQ ID NO: 1562647
uguguauccgaucaauaug

SEQ ID NO: 1762622 - RNA, 19 nt, Artificial Sequence
  Description of Artificial Sequence: Synthetic oligonucleotide
  Antisense strand to SEQ ID NO: 1762621
cauauugaucggauacaca

SEQ ID NO: 1762623 - RNA, 19 nt, Artificial Sequence
  Description of Artificial Sequence: Synthetic oligonucleotide
  Sense strand starting at position 3706 of SEQ ID NO: 1562647
guauccgaucaauauguaa

SEQ ID NO: 1762624 - RNA, 19 nt, Artificial Sequence
  Description of Artificial Sequence: Synthetic oligonucleotide
  Antisense strand to SEQ ID NO: 1762623
uuacauauugaucggauac

SEQ ID NO: 1762625 - RNA, 19 nt, Artificial Sequence
  Description of Artificial Sequence: Synthetic oligonucleotide
  Sense strand starting at position 3730 of SEQ ID NO: 1562647
cgagcagacucucuuggau

SEQ ID NO: 1762626 - RNA, 19 nt, Artificial Sequence
  Description of Artificial Sequence: Synthetic oligonucleotide
  Antisense strand to SEQ ID NO: 1762625
auccaagagagucugcucg

SEQ ID NO: 1762627 - RNA, 19 nt, Artificial Sequence
  Description of Artificial Sequence: Synthetic oligonucleotide
  Sense strand starting at position 3733 of SEQ ID NO: 1562647
gcagacucucuuggauaca

SEQ ID NO: 1762628 - RNA, 19 nt, Artificial Sequence
  Description of Artificial Sequence: Synthetic oligonucleotide
  Antisense strand to SEQ ID NO: 1762627
uguauccaagagagucugc

SEQ ID NO: 1762629 - RNA, 19 nt, Artificial Sequence
  Description of Artificial Sequence: Synthetic oligonucleotide
  Sense strand starting at position 3820 of SEQ ID NO: 1562647
gucugagcucaccacauaa

SEQ ID NO: 1762630 - RNA, 19 nt, Artificial Sequence
  Description of Artificial Sequence: Synthetic oligonucleotide
  Antisense strand to SEQ ID NO: 1762629
uuauguggugagcucagac

SEQ ID NO: 1762631 - RNA, 19 nt, Artificial Sequence
  Description of Artificial Sequence: Synthetic oligonucleotide
  Sense strand starting at position 3902 of SEQ ID NO: 1562647
ucaggaaaguucucuccaa

SEQ ID NO: 1762632 - RNA, 19 nt, Artificial Sequence
  Description of Artificial Sequence: Synthetic oligonucleotide
  Antisense strand to SEQ ID NO: 1762631
uuggagagaacuuuccuga

SEQ ID NO: 1762633 - RNA, 19 nt, Artificial Sequence
  Description of Artificial Sequence: Synthetic oligonucleotide
  Sense strand starting at position 3944 of SEQ ID NO: 1562647
agcaguauuugagcaccua

SEQ ID NO: 1762634 - RNA, 19 nt, Artificial Sequence
  Description of Artificial Sequence: Synthetic oligonucleotide
  Antisense strand to SEQ ID NO: 1762633
uaggugcucaaauacugcu

SEQ ID NO: 1762635 - RNA, 19 nt, Artificial Sequence
  Description of Artificial Sequence: Synthetic oligonucleotide
  Sense strand starting at position 3965 of SEQ ID NO: 1562647
gcugcucuccucgaaagau

SEQ ID NO: 1762636 - RNA, 19 nt, Artificial Sequence
  Description of Artificial Sequence: Synthetic oligonucleotide
  Antisense strand to SEQ ID NO: 1762635
aucuuucgaggagagcagc

SEQ ID NO: 1762637 - RNA, 19 nt, Artificial Sequence
  Description of Artificial Sequence: Synthetic oligonucleotide
  Sense strand starting at position 81 of SEQ ID NO: 1562648
cuuagagcagucuacaaau

SEQ ID NO: 1762638 - RNA, 19 nt, Artificial Sequence
  Description of Artificial Sequence: Synthetic oligonucleotide
  Antisense strand to SEQ ID NO: 1762637
auuuguagacugcucuaag

SEQ ID NO: 1762639 - RNA, 19 nt, Artificial Sequence
  Description of Artificial Sequence: Synthetic oligonucleotide
  Sense strand starting at position 107 of SEQ ID NO: 1562648
cauaauaaaugcuugugga

SEQ ID NO: 1762640 - RNA, 19 nt, Artificial Sequence
  Description of Artificial Sequence: Synthetic oligonucleotide
  Antisense strand to SEQ ID NO: 1762639
uccacaagcauuuauuaug

SEQ ID NO: 1762641 - RNA, 19 nt, Artificial Sequence
  Description of Artificial Sequence: Synthetic oligonucleotide
  Sense strand starting at position 108 of SEQ ID NO: 1562648
auaauaaaugcuuguggaa

SEQ ID NO: 1762642 - RNA, 19 nt, Artificial Sequence
  Description of Artificial Sequence: Synthetic oligonucleotide
  Antisense strand to SEQ ID NO: 1762641
uuccacaagcauuuauuau

SEQ ID NO: 1762643 - RNA, 19 nt, Artificial Sequence
  Description of Artificial Sequence: Synthetic oligonucleotide
  Sense strand starting at position 121 of SEQ ID NO: 1562648
guggaauagauguguagua

SEQ ID NO: 1762644 - RNA, 19 nt, Artificial Sequence
  Description of Artificial Sequence: Synthetic oligonucleotide
  Antisense strand to SEQ ID NO: 1762643
uacuacacaucuauuccac

SEQ ID NO: 1762645 - RNA, 19 nt, Artificial Sequence
  Description of Artificial Sequence: Synthetic oligonucleotide
  Sense strand starting at position 123 of SEQ ID NO: 1562648
ggaauagauguguaguaca

SEQ ID NO: 1762646 - RNA, 19 nt, Artificial Sequence
  Description of Artificial Sequence: Synthetic oligonucleotide
  Antisense strand to SEQ ID NO: 1762645
uguacuacacaucuauucc

SEQ ID NO: 1762647 - RNA, 19 nt, Artificial Sequence
  Description of Artificial Sequence: Synthetic oligonucleotide
  Sense strand starting at position 128 of SEQ ID NO: 1562648
agauguguaguacauuacu

SEQ ID NO: 1762648 - RNA, 19 nt, Artificial Sequence
  Description of Artificial Sequence: Synthetic oligonucleotide
  Antisense strand to SEQ ID NO: 1762647
aguaauguacuacacaucu

SEQ ID NO: 1762649 - RNA, 19 nt, Artificial Sequence
  Description of Artificial Sequence: Synthetic oligonucleotide
  Sense strand starting at position 131 of SEQ ID NO: 1562648
uguguaguacauuacuaau

SEQ ID NO: 1762650 - RNA, 19 nt, Artificial Sequence
  Description of Artificial Sequence: Synthetic oligonucleotide
  Antisense strand to SEQ ID NO: 1762649
auuaguaauguacuacaca

SEQ ID NO: 1762651 - RNA, 19 nt, Artificial Sequence
  Description of Artificial Sequence: Synthetic oligonucleotide
  Sense strand starting at position 374 of SEQ ID NO: 1562648
agcagauuauacuuuguaa

SEQ ID NO: 1762652 - RNA, 19 nt, Artificial Sequence
  Description of Artificial Sequence: Synthetic oligonucleotide
  Antisense strand to SEQ ID NO: 1762651
uuacaaaguauaaucugcu

SEQ ID NO: 1762653 - RNA, 19 nt, Artificial Sequence
  Description of Artificial Sequence: Synthetic oligonucleotide
  Sense strand starting at position 415 of SEQ ID NO: 1562648
cuauguaaccuagguuguu

SEQ ID NO: 1762654 - RNA, 19 nt, Artificial Sequence
  Description of Artificial Sequence: Synthetic oligonucleotide
  Antisense strand to SEQ ID NO: 1762653
aacaaccuagguuacauag

SEQ ID NO: 1762655 - RNA, 19 nt, Artificial Sequence
  Description of Artificial Sequence: Synthetic oligonucleotide
  Sense strand starting at position 1145 of SEQ ID NO: 1562648
auggcagaucuuggcucau

SEQ ID NO: 1762656 - RNA, 19 nt, Artificial Sequence
  Description of Artificial Sequence: Synthetic oligonucleotide
  Antisense strand to SEQ ID NO: 1762655
augagccaagaucugccau

SEQ ID NO: 1762657 - RNA, 19 nt, Artificial Sequence
  Description of Artificial Sequence: Synthetic oligonucleotide
  Sense strand starting at position 1237 of SEQ ID NO: 1562648
gucaccaugcuuggacuaa

SEQ ID NO: 1762658 - RNA, 19 nt, Artificial Sequence
  Description of Artificial Sequence: Synthetic oligonucleotide
  Antisense strand to SEQ ID NO: 1762657
uuaguccaagcauggugac

SEQ ID NO: 1762659 - RNA, 19 nt, Artificial Sequence
  Description of Artificial Sequence: Synthetic oligonucleotide
  Sense strand starting at position 1638 of SEQ ID NO: 1562648
gcuugcuguguccuugaau

SEQ ID NO: 1762660 - RNA, 19 nt, Artificial Sequence
  Description of Artificial Sequence: Synthetic oligonucleotide
  Antisense strand to SEQ ID NO: 1762659
auucaaggacacagcaagc

SEQ ID NO: 1762661 - RNA, 19 nt, Artificial Sequence
  Description of Artificial Sequence: Synthetic oligonucleotide
  Sense strand starting at position 1650 of SEQ ID NO: 1562648
cuugaauuccucgggcaca

SEQ ID NO: 1762662 - RNA, 19 nt, Artificial Sequence
  Description of Artificial Sequence: Synthetic oligonucleotide
  Antisense strand to SEQ ID NO: 1762661
ugugcccgaggaauucaag

SEQ ID NO: 1762663 - RNA, 19 nt, Artificial Sequence
  Description of Artificial Sequence: Synthetic oligonucleotide
  Sense strand starting at position 1725 of SEQ ID NO: 1562648
cccagcucugcguaacuaa

SEQ ID NO: 1762664 - RNA, 19 nt, Artificial Sequence
  Description of Artificial Sequence: Synthetic oligonucleotide
  Antisense strand to SEQ ID NO: 1762663
uuaguuacgcagagcuggg

SEQ ID NO: 1762665 - RNA, 19 nt, Artificial Sequence
  Description of Artificial Sequence: Synthetic oligonucleotide
  Sense strand starting at position 1735 of SEQ ID NO: 1562648
cguaacuaaucaccgcauu

SEQ ID NO: 1762666 - RNA, 19 nt, Artificial Sequence
  Description of Artificial Sequence: Synthetic oligonucleotide
  Antisense strand to SEQ ID NO: 1762665
aaugcggugauuaguuacg

SEQ ID NO: 1762667 - RNA, 19 nt, Artificial Sequence
  Description of Artificial Sequence: Synthetic oligonucleotide
  Sense strand starting at position 1736 of SEQ ID NO: 1562648
guaacuaaucaccgcauuu

SEQ ID NO: 1762668 - RNA, 19 nt, Artificial Sequence
  Description of Artificial Sequence: Synthetic oligonucleotide
  Antisense strand to SEQ ID NO: 1762667
aaaugcggugauuaguuac

SEQ ID NO: 1762669 - RNA, 19 nt, Artificial Sequence
  Description of Artificial Sequence: Synthetic oligonucleotide
  Sense strand starting at position 1841 of SEQ ID NO: 1562648
uugggauuguuuccugauc

SEQ ID NO: 1762670 - RNA, 19 nt, Artificial Sequence
  Description of Artificial Sequence: Synthetic oligonucleotide
  Antisense strand to SEQ ID NO: 1762669
gaucaggaaacaaucccaa

SEQ ID NO: 1762671 - RNA, 19 nt, Artificial Sequence
  Description of Artificial Sequence: Synthetic oligonucleotide
  Sense strand starting at position 1846 of SEQ ID NO: 1562648
auuguuuccugauccugau

SEQ ID NO: 1762672 - RNA, 19 nt, Artificial Sequence
  Description of Artificial Sequence: Synthetic oligonucleotide
  Antisense strand to SEQ ID NO: 1762671
aucaggaucaggaaacaau

SEQ ID NO: 1762673 - RNA, 19 nt, Artificial Sequence
  Description of Artificial Sequence: Synthetic oligonucleotide
  Sense strand starting at position 1871 of SEQ ID NO: 1562648
cuuguauuguuaucaggcu

SEQ ID NO: 1762674 - RNA, 19 nt, Artificial Sequence
  Description of Artificial Sequence: Synthetic oligonucleotide
  Antisense strand to SEQ ID NO: 1762673
agccugauaacaauacaag

SEQ ID NO: 1762675 - RNA, 19 nt, Artificial Sequence
  Description of Artificial Sequence: Synthetic oligonucleotide
  Sense strand starting at position 2058 of SEQ ID NO: 1562648
aaggguaagucauaaggaa

SEQ ID NO: 1762676 - RNA, 19 nt, Artificial Sequence
  Description of Artificial Sequence: Synthetic oligonucleotide
  Antisense strand to SEQ ID NO: 1762675
uuccuuaugacuuacccuu

SEQ ID NO: 1762677 - RNA, 19 nt, Artificial Sequence
  Description of Artificial Sequence: Synthetic oligonucleotide
  Sense strand starting at position 2245 of SEQ ID NO: 1562648
guugaauguucugugaagc

SEQ ID NO: 1762678 - RNA, 19 nt, Artificial Sequence
  Description of Artificial Sequence: Synthetic oligonucleotide
  Antisense strand to SEQ ID NO: 1762677
gcuucacagaacauucaac

SEQ ID NO: 1762679 - RNA, 19 nt, Artificial Sequence
  Description of Artificial Sequence: Synthetic oligonucleotide
  Sense strand starting at position 2246 of SEQ ID NO: 1562648
uugaauguucugugaagca

SEQ ID NO: 1762680 - RNA, 19 nt, Artificial Sequence
  Description of Artificial Sequence: Synthetic oligonucleotide
  Antisense strand to SEQ ID NO: 1762679
ugcuucacagaacauucaa

SEQ ID NO: 1762681 - RNA, 19 nt, Artificial Sequence
  Description of Artificial Sequence: Synthetic oligonucleotide
  Sense strand starting at position 2251 of SEQ ID NO: 1562648
uguucugugaagcaaguuu

SEQ ID NO: 1762682 - RNA, 19 nt, Artificial Sequence
  Description of Artificial Sequence: Synthetic oligonucleotide
  Antisense strand to SEQ ID NO: 1762681
aaacuugcuucacagaaca

SEQ ID NO: 1762683 - RNA, 19 nt, Artificial Sequence
  Description of Artificial Sequence: Synthetic oligonucleotide
  Sense strand starting at position 2411 of SEQ ID NO: 1562648
guagccagucacuauaaga

SEQ ID NO: 1762684 - RNA, 19 nt, Artificial Sequence
  Description of Artificial Sequence: Synthetic oligonucleotide
  Antisense strand to SEQ ID NO: 1762683
ucuuauagugacuggcuac

SEQ ID NO: 1762685 - RNA, 19 nt, Artificial Sequence
  Description of Artificial Sequence: Synthetic oligonucleotide
  Sense strand starting at position 2797 of SEQ ID NO: 1562648
gguagaucccuugggcuca

SEQ ID NO: 1762686 - RNA, 19 nt, Artificial Sequence
  Description of Artificial Sequence: Synthetic oligonucleotide
  Antisense strand to SEQ ID NO: 1762685
ugagcccaagggaucuacc

SEQ ID NO: 1762687 - RNA, 19 nt, Artificial Sequence
  Description of Artificial Sequence: Synthetic oligonucleotide
  Sense strand starting at position 2927 of SEQ ID NO: 1562648
uagagaaucugucagaaau

SEQ ID NO: 1762688 - RNA, 19 nt, Artificial Sequence
  Description of Artificial Sequence: Synthetic oligonucleotide
  Antisense strand to SEQ ID NO: 1762687
auuucugacagauucucua

SEQ ID NO: 1762689 - RNA, 19 nt, Artificial Sequence
  Description of Artificial Sequence: Synthetic oligonucleotide
  Sense strand starting at position 2929 of SEQ ID NO: 1562648
gagaaucugucagaaauua

SEQ ID NO: 1762690 - RNA, 19 nt, Artificial Sequence
  Description of Artificial Sequence: Synthetic oligonucleotide
  Antisense strand to SEQ ID NO: 1762689
uaauuucugacagauucuc

SEQ ID NO: 1762691 - RNA, 19 nt, Artificial Sequence
  Description of Artificial Sequence: Synthetic oligonucleotide
  Sense strand starting at position 2971 of SEQ ID NO: 1562648
guaucaauguccucccauu

SEQ ID NO: 1762692 - RNA, 19 nt, Artificial Sequence
  Description of Artificial Sequence: Synthetic oligonucleotide
  Antisense strand to SEQ ID NO: 1762691
aaugggaggacauugauac

SEQ ID NO: 1762693 - RNA, 19 nt, Artificial Sequence
  Description of Artificial Sequence: Synthetic oligonucleotide
  Sense strand starting at position 3050 of SEQ ID NO: 1562648
uggaaacaugccuaacgua

SEQ ID NO: 1762694 - RNA, 19 nt, Artificial Sequence
  Description of Artificial Sequence: Synthetic oligonucleotide
  Antisense strand to SEQ ID NO: 1762693
uacguuaggcauguuucca

SEQ ID NO: 1762695 - RNA, 19 nt, Artificial Sequence
  Description of Artificial Sequence: Synthetic oligonucleotide
  Sense strand starting at position 3240 of SEQ ID NO: 1562648
ggcccuuaagauugguaau

SEQ ID NO: 1762696 - RNA, 19 nt, Artificial Sequence
  Description of Artificial Sequence: Synthetic oligonucleotide
  Antisense strand to SEQ ID NO: 1762695
auuaccaaucuuaagggcc

SEQ ID NO: 1762697 - RNA, 19 nt, Artificial Sequence
  Description of Artificial Sequence: Synthetic oligonucleotide
  Sense strand starting at position 3243 of SEQ ID NO: 1562648
ccuuaagauugguaauuug

SEQ ID NO: 1762698 - RNA, 19 nt, Artificial Sequence
  Description of Artificial Sequence: Synthetic oligonucleotide
  Antisense strand to SEQ ID NO: 1762697
caaauuaccaaucuuaagg

SEQ ID NO: 1762699 - RNA, 19 nt, Artificial Sequence
  Description of Artificial Sequence: Synthetic oligonucleotide
  Sense strand starting at position 3270 of SEQ ID NO: 1562648
gugaaacccaagugucaag

SEQ ID NO: 1762700 - RNA, 19 nt, Artificial Sequence
  Description of Artificial Sequence: Synthetic oligonucleotide
  Antisense strand to SEQ ID NO: 1762699
cuugacacuuggguuucac

SEQ ID NO: 1762701 - RNA, 19 nt, Artificial Sequence
  Description of Artificial Sequence: Synthetic oligonucleotide
  Sense strand starting at position 3299 of SEQ ID NO: 1562648
uccugacccugguugagaa

SEQ ID NO: 1762702 - RNA, 19 nt, Artificial Sequence
  Description of Artificial Sequence: Synthetic oligonucleotide
  Antisense strand to SEQ ID NO: 1762701
uucucaaccagggucagga

SEQ ID NO: 1762703 - RNA, 19 nt, Artificial Sequence
  Description of Artificial Sequence: Synthetic oligonucleotide
  Sense strand starting at position 3300 of SEQ ID NO: 1562648
ccugacccugguugagaaa

SEQ ID NO: 1762704 - RNA, 19 nt, Artificial Sequence
  Description of Artificial Sequence: Synthetic oligonucleotide
  Antisense strand to SEQ ID NO: 1762703
uuucucaaccagggucagg

SEQ ID NO: 1762705 - RNA, 19 nt, Artificial Sequence
  Description of Artificial Sequence: Synthetic oligonucleotide
  Sense strand starting at position 3303 of SEQ ID NO: 1562648
gacccugguugagaaagaa

SEQ ID NO: 1762706 - RNA, 19 nt, Artificial Sequence
  Description of Artificial Sequence: Synthetic oligonucleotide
  Antisense strand to SEQ ID NO: 1762705
uucuuucucaaccaggguc

SEQ ID NO: 1762707 - RNA, 19 nt, Artificial Sequence
  Description of Artificial Sequence: Synthetic oligonucleotide
  Sense strand starting at position 3318 of SEQ ID NO: 1562648
agaaguucagcccggagaa

SEQ ID NO: 1762708 - RNA, 19 nt, Artificial Sequence
  Description of Artificial Sequence: Synthetic oligonucleotide
  Antisense strand to SEQ ID NO: 1762707
uucuccgggcugaacuucu

SEQ ID NO: 1762709 - RNA, 19 nt, Artificial Sequence
  Description of Artificial Sequence: Synthetic oligonucleotide
  Sense strand starting at position 3344 of SEQ ID NO: 1562648
ugcugcuuucuggaguauu

SEQ ID NO: 1762710 - RNA, 19 nt, Artificial Sequence
  Description of Artificial Sequence: Synthetic oligonucleotide
  Antisense strand to SEQ ID NO: 1762709
aauacuccagaaagcagca

SEQ ID NO: 1762711 - RNA, 19 nt, Artificial Sequence
  Description of Artificial Sequence: Synthetic oligonucleotide
  Sense strand starting at position 3791 of SEQ ID NO: 1562648
ggaggaaauuaguacaaau

SEQ ID NO: 1762712 - RNA, 19 nt, Artificial Sequence
  Description of Artificial Sequence: Synthetic oligonucleotide
  Antisense strand to SEQ ID NO: 1762711
auuuguacuaauuuccucc

SEQ ID NO: 1762713 - RNA, 19 nt, Artificial Sequence
  Description of Artificial Sequence: Synthetic oligonucleotide
  Sense strand starting at position 3823 of SEQ ID NO: 1562648
guacccaguggugggaaua

SEQ ID NO: 1762714 - RNA, 19 nt, Artificial Sequence
  Description of Artificial Sequence: Synthetic oligonucleotide
  Antisense strand to SEQ ID NO: 1762713
uauucccaccacuggguac

SEQ ID NO: 1762715 - RNA, 19 nt, Artificial Sequence
  Description of Artificial Sequence: Synthetic oligonucleotide
  Sense strand starting at position 3824 of SEQ ID NO: 1562648
uacccaguggugggaauaa

SEQ ID NO: 1762716 - RNA, 19 nt, Artificial Sequence
  Description of Artificial Sequence: Synthetic oligonucleotide
  Antisense strand to SEQ ID NO: 1762715
uuauucccaccacugggua

SEQ ID NO: 1762717 - RNA, 19 nt, Artificial Sequence
  Description of Artificial Sequence: Synthetic oligonucleotide
  Sense strand starting at position 84 of SEQ ID NO: 1562649
gcccuagacuaucugucua

SEQ ID NO: 1762718 - RNA, 19 nt, Artificial Sequence
  Description of Artificial Sequence: Synthetic oligonucleotide
  Antisense strand to SEQ ID NO: 1762717
uagacagauagucuagggc

SEQ ID NO: 1762719 - RNA, 19 nt, Artificial Sequence
  Description of Artificial Sequence: Synthetic oligonucleotide
  Sense strand starting at position 86 of SEQ ID NO: 1562649
ccuagacuaucugucuaca

SEQ ID NO: 1762720 - RNA, 19 nt, Artificial Sequence
  Description of Artificial Sequence: Synthetic oligonucleotide
  Antisense strand to SEQ ID NO: 1762719
uguagacagauagucuagg

SEQ ID NO: 1762721 - RNA, 19 nt, Artificial Sequence
  Description of Artificial Sequence: Synthetic oligonucleotide
  Sense strand starting at position 89 of SEQ ID NO: 1562649
agacuaucugucuacauuc

SEQ ID NO: 1762722 - RNA, 19 nt, Artificial Sequence
  Description of Artificial Sequence: Synthetic oligonucleotide
  Antisense strand to SEQ ID NO: 1762721
gaauguagacagauagucu

SEQ ID NO: 1762723 - RNA, 19 nt, Artificial Sequence
  Description of Artificial Sequence: Synthetic oligonucleotide
  Sense strand starting at position 253 of SEQ ID NO: 1562649
ggcaaagagcucugaaaua

SEQ ID NO: 1762724 - RNA, 19 nt, Artificial Sequence
  Description of Artificial Sequence: Synthetic oligonucleotide
  Antisense strand to SEQ ID NO: 1762723
uauuucagagcucuuugcc

SEQ ID NO: 1762725 - RNA, 19 nt, Artificial Sequence
  Description of Artificial Sequence: Synthetic oligonucleotide
  Sense strand starting at position 370 of SEQ ID NO: 1562649
uugauuacugcgucggcga

SEQ ID NO: 1762726 - RNA, 19 nt, Artificial Sequence
  Description of Artificial Sequence: Synthetic oligonucleotide
  Antisense strand to SEQ ID NO: 1762725
ucgccgacgcaguaaucaa

SEQ ID NO: 1762727 - RNA, 19 nt, Artificial Sequence
  Description of Artificial Sequence: Synthetic oligonucleotide
  Sense strand starting at position 371 of SEQ ID NO: 1562649
ugauuacugcgucggcgaa

SEQ ID NO: 1762728 - RNA, 19 nt, Artificial Sequence
  Description of Artificial Sequence: Synthetic oligonucleotide
  Antisense strand to SEQ ID NO: 1762727
uucgccgacgcaguaauca

SEQ ID NO: 1762729 - RNA, 19 nt, Artificial Sequence
  Description of Artificial Sequence: Synthetic oligonucleotide
  Sense strand starting at position 470 of SEQ ID NO: 1562649
cgacacauauugccauaga

SEQ ID NO: 1762730 - RNA, 19 nt, Artificial Sequence
  Description of Artificial Sequence: Synthetic oligonucleotide
  Antisense strand to SEQ ID NO: 1762729
ucuauggcaauaugugucg

SEQ ID NO: 1762731 - RNA, 19 nt, Artificial Sequence
  Description of Artificial Sequence: Synthetic oligonucleotide
  Sense strand starting at position 652 of SEQ ID NO: 1562649
ucggguuucggcccaguua

SEQ ID NO: 1762732 - RNA, 19 nt, Artificial Sequence
  Description of Artificial Sequence: Synthetic oligonucleotide
  Antisense strand to SEQ ID NO: 1762731
uaacugggccgaaacccga

SEQ ID NO: 1762733 - RNA, 19 nt, Artificial Sequence
  Description of Artificial Sequence: Synthetic oligonucleotide
  Sense strand starting at position 653 of SEQ ID NO: 1562649
cggguuucggcccaguuau

SEQ ID NO: 1762734 - RNA, 19 nt, Artificial Sequence
  Description of Artificial Sequence: Synthetic oligonucleotide
  Antisense strand to SEQ ID NO: 1762733
auaacugggccgaaacccg

SEQ ID NO: 1762735 - RNA, 19 nt, Artificial Sequence
  Description of Artificial Sequence: Synthetic oligonucleotide
  Sense strand starting at position 746 of SEQ ID NO: 1562649
gauaaugguggcgagauca

SEQ ID NO: 1762736 - RNA, 19 nt, Artificial Sequence
  Description of Artificial Sequence: Synthetic oligonucleotide
  Antisense strand to SEQ ID NO: 1762735
ugaucucgccaccauuauc

SEQ ID NO: 1762737 - RNA, 19 nt, Artificial Sequence
  Description of Artificial Sequence: Synthetic oligonucleotide
  Sense strand starting at position 788 of SEQ ID NO: 1562649
cgauaaagaggcuggauau

SEQ ID NO: 1762738 - RNA, 19 nt, Artificial Sequence
  Description of Artificial Sequence: Synthetic oligonucleotide
  Antisense strand to SEQ ID NO: 1762737
auauccagccucuuuaucg

SEQ ID NO: 1762739 - RNA, 19 nt, Artificial Sequence
  Description of Artificial Sequence: Synthetic oligonucleotide
  Sense strand starting at position 2165 of SEQ ID NO: 1562649
gaagcacuuucccaaggga

SEQ ID NO: 1762740 - RNA, 19 nt, Artificial Sequence
  Description of Artificial Sequence: Synthetic oligonucleotide
  Antisense strand to SEQ ID NO: 1762739
ucccuugggaaagugcuuc

SEQ ID NO: 1762741 - RNA, 19 nt, Artificial Sequence
  Description of Artificial Sequence: Synthetic oligonucleotide
  Sense strand starting at position 2168 of SEQ ID NO: 1562649
gcacuuucccaagggagga

SEQ ID NO: 1762742 - RNA, 19 nt, Artificial Sequence
  Description of Artificial Sequence: Synthetic oligonucleotide
  Antisense strand to SEQ ID NO: 1762741
uccucccuugggaaagugc

SEQ ID NO: 1762743 - RNA, 19 nt, Artificial Sequence
  Description of Artificial Sequence: Synthetic oligonucleotide
  Sense strand starting at position 2307 of SEQ ID NO: 1562649
uauugaugccgagggcaga

SEQ ID NO: 1762744 - RNA, 19 nt, Artificial Sequence
  Description of Artificial Sequence: Synthetic oligonucleotide
  Antisense strand to SEQ ID NO: 1762743
ucugcccucggcaucaaua

SEQ ID NO: 1762745 - RNA, 19 nt, Artificial Sequence
  Description of Artificial Sequence: Synthetic oligonucleotide
  Sense strand starting at position 2341 of SEQ ID NO: 1562649
ggcuguccacccuagaaau

SEQ ID NO: 1762746 - RNA, 19 nt, Artificial Sequence
  Description of Artificial Sequence: Synthetic oligonucleotide
  Antisense strand to SEQ ID NO: 1762745
auuucuaggguggacagcc

SEQ ID NO: 1762747 - RNA, 19 nt, Artificial Sequence
  Description of Artificial Sequence: Synthetic oligonucleotide
  Sense strand starting at position 2478 of SEQ ID NO: 1562649
gcugauugagcuggaacga

SEQ ID NO: 1762748 - RNA, 19 nt, Artificial Sequence
  Description of Artificial Sequence: Synthetic oligonucleotide
  Antisense strand to SEQ ID NO: 1762747
ucguuccagcucaaucagc

SEQ ID NO: 1762749 - RNA, 19 nt, Artificial Sequence
  Description of Artificial Sequence: Synthetic oligonucleotide
  Sense strand starting at position 2652 of SEQ ID NO: 1562649
gaaagagcugccuggaaga

SEQ ID NO: 1762750 - RNA, 19 nt, Artificial Sequence
  Description of Artificial Sequence: Synthetic oligonucleotide
  Antisense strand to SEQ ID NO: 1762749
ucuuccaggcagcucuuuc

SEQ ID NO: 1762751 - RNA, 19 nt, Artificial Sequence
  Description of Artificial Sequence: Synthetic oligonucleotide
  Sense strand starting at position 2654 of SEQ ID NO: 1562649
aagagcugccuggaagagu

SEQ ID NO: 1762752 - RNA, 19 nt, Artificial Sequence
  Description of Artificial Sequence: Synthetic oligonucleotide
  Antisense strand to SEQ ID NO: 1762751
acucuuccaggcagcucuu

SEQ ID NO: 1762753 - RNA, 19 nt, Artificial Sequence
  Description of Artificial Sequence: Synthetic oligonucleotide
  Sense strand starting at position 2663 of SEQ ID NO: 1562649
cuggaagagugagcacaau

SEQ ID NO: 1762754 - RNA, 19 nt, Artificial Sequence
  Description of Artificial Sequence: Synthetic oligonucleotide
  Antisense strand to SEQ ID NO: 1762753
auugugcucacucuuccag

SEQ ID NO: 1762755 - RNA, 19 nt, Artificial Sequence
  Description of Artificial Sequence: Synthetic oligonucleotide
  Sense strand starting at position 2669 of SEQ ID NO: 1562649
gagugagcacaaugugcuu

SEQ ID NO: 1762756 - RNA, 19 nt, Artificial Sequence
  Description of Artificial Sequence: Synthetic oligonucleotide
  Antisense strand to SEQ ID NO: 1762755
aagcacauugugcucacuc

SEQ ID NO: 1762757 - RNA, 19 nt, Artificial Sequence
  Description of Artificial Sequence: Synthetic oligonucleotide
  Sense strand starting at position 2800 of SEQ ID NO: 1562649
uggagugugugcuuuagaa

SEQ ID NO: 1762758 - RNA, 19 nt, Artificial Sequence
  Description of Artificial Sequence: Synthetic oligonucleotide
  Antisense strand to SEQ ID NO: 1762757
uucuaaagcacacacucca

SEQ ID NO: 1762759 - RNA, 19 nt, Artificial Sequence
  Description of Artificial Sequence: Synthetic oligonucleotide
  Sense strand starting at position 2802 of SEQ ID NO: 1562649
gagugugugcuuuagaaau

SEQ ID NO: 1762760 - RNA, 19 nt, Artificial Sequence
  Description of Artificial Sequence: Synthetic oligonucleotide
  Antisense strand to SEQ ID NO: 1762759
auuucuaaagcacacacuc

SEQ ID NO: 1762761 - RNA, 19 nt, Artificial Sequence
  Description of Artificial Sequence: Synthetic oligonucleotide
  Sense strand starting at position 2904 of SEQ ID NO: 1562649
uccauugaaugcucagaua

SEQ ID NO: 1762762 - RNA, 19 nt, Artificial Sequence
  Description of Artificial Sequence: Synthetic oligonucleotide
  Antisense strand to SEQ ID NO: 1762761
uaucugagcauucaaugga

SEQ ID NO: 1762763 - RNA, 19 nt, Artificial Sequence
  Description of Artificial Sequence: Synthetic oligonucleotide
  Sense strand starting at position 2907 of SEQ ID NO: 1562649
auugaaugcucagauauuu

SEQ ID NO: 1762764 - RNA, 19 nt, Artificial Sequence
  Description of Artificial Sequence: Synthetic oligonucleotide
  Antisense strand to SEQ ID NO: 1762763
aaauaucugagcauucaau

SEQ ID NO: 1762765 - RNA, 19 nt, Artificial Sequence
  Description of Artificial Sequence: Synthetic oligonucleotide
  Sense strand starting at position 2915 of SEQ ID NO: 1562649
cucagauauuuguauuggu

SEQ ID NO: 1762766 - RNA, 19 nt, Artificial Sequence
  Description of Artificial Sequence: Synthetic oligonucleotide
  Antisense strand to SEQ ID NO: 1762765
accaauacaaauaucugag

SEQ ID NO: 1762767 - RNA, 19 nt, Artificial Sequence
  Description of Artificial Sequence: Synthetic oligonucleotide
  Sense strand starting at position 2922 of SEQ ID NO: 1562649
auuuguauuggucgucgca

SEQ ID NO: 1762768 - RNA, 19 nt, Artificial Sequence
  Description of Artificial Sequence: Synthetic oligonucleotide
  Antisense strand to SEQ ID NO: 1762767
ugcgacgaccaauacaaau

SEQ ID NO: 1762769 - RNA, 19 nt, Artificial Sequence
  Description of Artificial Sequence: Synthetic oligonucleotide
  Sense strand starting at position 2944 of SEQ ID NO: 1562649
gcauccugcuggucucaga

SEQ ID NO: 1762770 - RNA, 19 nt, Artificial Sequence
  Description of Artificial Sequence: Synthetic oligonucleotide
  Antisense strand to SEQ ID NO: 1762769
ucugagaccagcaggaugc

SEQ ID NO: 1762771 - RNA, 19 nt, Artificial Sequence
  Description of Artificial Sequence: Synthetic oligonucleotide
  Sense strand starting at position 3034 of SEQ ID NO: 1562649
ucaacuauuuauugaguga

SEQ ID NO: 1762772 - RNA, 19 nt, Artificial Sequence
  Description of Artificial Sequence: Synthetic oligonucleotide
  Antisense strand to SEQ ID NO: 1762771
ucacucaauaaauaguuga

SEQ ID NO: 1762773 - RNA, 19 nt, Artificial Sequence
  Description of Artificial Sequence: Synthetic oligonucleotide
  Sense strand starting at position 3065 of SEQ ID NO: 1562649
caaaguguacaaggguuaa

SEQ ID NO: 1762774 - RNA, 19 nt, Artificial Sequence
  Description of Artificial Sequence: Synthetic oligonucleotide
  Antisense strand to SEQ ID NO: 1762773
uuaacccuuguacacuuug

SEQ ID NO: 1762775 - RNA, 19 nt, Artificial Sequence
  Description of Artificial Sequence: Synthetic oligonucleotide
  Sense strand starting at position 3104 of SEQ ID NO: 1562649
cuuuaaguaguguacaauc

SEQ ID NO: 1762776 - RNA, 19 nt, Artificial Sequence
  Description of Artificial Sequence: Synthetic oligonucleotide
  Antisense strand to SEQ ID NO: 1762775
gauuguacacuacuuaaag

SEQ ID NO: 1762777 - RNA, 19 nt, Artificial Sequence
  Description of Artificial Sequence: Synthetic oligonucleotide
  Sense strand starting at position 3112 of SEQ ID NO: 1562649
aguguacaaucuggagaua

SEQ ID NO: 1762778 - RNA, 19 nt, Artificial Sequence
  Description of Artificial Sequence: Synthetic oligonucleotide
  Antisense strand to SEQ ID NO: 1762777
uaucuccagauuguacacu

SEQ ID NO: 1762779 - RNA, 19 nt, Artificial Sequence
  Description of Artificial Sequence: Synthetic oligonucleotide
  Sense strand starting at position 3152 of SEQ ID NO: 1562649
augggcugucuggauaauu

SEQ ID NO: 1762780 - RNA, 19 nt, Artificial Sequence
  Description of Artificial Sequence: Synthetic oligonucleotide
  Antisense strand to SEQ ID NO: 1762779
aauuauccagacagcccau

SEQ ID NO: 1762781 - RNA, 19 nt, Artificial Sequence
  Description of Artificial Sequence: Synthetic oligonucleotide
  Sense strand starting at position 3268 of SEQ ID NO: 1562649
cgugcaucuucugugaauc

SEQ ID NO: 1762782 - RNA, 19 nt, Artificial Sequence
  Description of Artificial Sequence: Synthetic oligonucleotide
  Antisense strand to SEQ ID NO: 1762781
gauucacagaagaugcacg

SEQ ID NO: 1762783 - RNA, 19 nt, Artificial Sequence
  Description of Artificial Sequence: Synthetic oligonucleotide
  Sense strand starting at position 3269 of SEQ ID NO: 1562649
gugcaucuucugugaaucu

SEQ ID NO: 1762784 - RNA, 19 nt, Artificial Sequence
  Description of Artificial Sequence: Synthetic oligonucleotide
  Antisense strand to SEQ ID NO: 1762783
agauucacagaagaugcac

SEQ ID NO: 1762785 - RNA, 19 nt, Artificial Sequence
  Description of Artificial Sequence: Synthetic oligonucleotide
  Sense strand starting at position 3389 of SEQ ID NO: 1562649
cuggaacuauuugaugauu

SEQ ID NO: 1762786 - RNA, 19 nt, Artificial Sequence
  Description of Artificial Sequence: Synthetic oligonucleotide
  Antisense strand to SEQ ID NO: 1762785
aaucaucaaauaguuccag

SEQ ID NO: 1762787 - RNA, 19 nt, Artificial Sequence
  Description of Artificial Sequence: Synthetic oligonucleotide
  Sense strand starting at position 3467 of SEQ ID NO: 1562649
acaugugacugcucccaaa

SEQ ID NO: 1762788 - RNA, 19 nt, Artificial Sequence
  Description of Artificial Sequence: Synthetic oligonucleotide
  Antisense strand to SEQ ID NO: 1762787
uuugggagcagucacaugu

SEQ ID NO: 1762789 - RNA, 19 nt, Artificial Sequence
  Description of Artificial Sequence: Synthetic oligonucleotide
  Sense strand starting at position 3532 of SEQ ID NO: 1562649
ugaguauugcauuagcaag

SEQ ID NO: 1762790 - RNA, 19 nt, Artificial Sequence
  Description of Artificial Sequence: Synthetic oligonucleotide
  Antisense strand to SEQ ID NO: 1762789
cuugcuaaugcaauacuca

SEQ ID NO: 1762791 - RNA, 19 nt, Artificial Sequence
  Description of Artificial Sequence: Synthetic oligonucleotide
  Sense strand starting at position 3538 of SEQ ID NO: 1562649
uugcauuagcaagggagau

SEQ ID NO: 1762792 - RNA, 19 nt, Artificial Sequence
  Description of Artificial Sequence: Synthetic oligonucleotide
  Antisense strand to SEQ ID NO: 1762791
aucucccuugcuaaugcaa

SEQ ID NO: 1762793 - RNA, 19 nt, Artificial Sequence
  Description of Artificial Sequence: Synthetic oligonucleotide
  Sense strand starting at position 3580 of SEQ ID NO: 1562649
ggaauugucacguaaccug

SEQ ID NO: 1762794 - RNA, 19 nt, Artificial Sequence
  Description of Artificial Sequence: Synthetic oligonucleotide
  Antisense strand to SEQ ID NO: 1762793
cagguuacgugacaauucc

SEQ ID NO: 1762795 - RNA, 19 nt, Artificial Sequence
  Description of Artificial Sequence: Synthetic oligonucleotide
  Sense strand starting at position 3933 of SEQ ID NO: 1562649
cagccugagcaguaagagu

SEQ ID NO: 1762796 - RNA, 19 nt, Artificial Sequence
  Description of Artificial Sequence: Synthetic oligonucleotide
  Antisense strand to SEQ ID NO: 1762795
acucuuacugcucaggcug

SEQ ID NO: 1762797 - RNA, 19 nt, Artificial Sequence
  Description of Artificial Sequence: Synthetic oligonucleotide
  Sense strand starting at position 11 of SEQ ID NO: 1562650
gcuucagagguccaggauu

SEQ ID NO: 1762798 - RNA, 19 nt, Artificial Sequence
  Description of Artificial Sequence: Synthetic oligonucleotide
  Antisense strand to SEQ ID NO: 1762797
aauccuggaccucugaagc

SEQ ID NO: 1762799 - RNA, 19 nt, Artificial Sequence
  Description of Artificial Sequence: Synthetic oligonucleotide
  Sense strand starting at position 19 of SEQ ID NO: 1562650
gguccaggauucucuaacu

SEQ ID NO: 1762800 - RNA, 19 nt, Artificial Sequence
  Description of Artificial Sequence: Synthetic oligonucleotide
  Antisense strand to SEQ ID NO: 1762799
aguuagagaauccuggacc

SEQ ID NO: 1762801 - RNA, 19 nt, Artificial Sequence
  Description of Artificial Sequence: Synthetic oligonucleotide
  Sense strand starting at position 99 of SEQ ID NO: 1562650
ggaguuuggaugugcauau

SEQ ID NO: 1762802 - RNA, 19 nt, Artificial Sequence
  Description of Artificial Sequence: Synthetic oligonucleotide
  Antisense strand to SEQ ID NO: 1762801
auaugcacauccaaacucc

SEQ ID NO: 1762803 - RNA, 19 nt, Artificial Sequence
  Description of Artificial Sequence: Synthetic oligonucleotide
  Sense strand starting at position 103 of SEQ ID NO: 1562650
uuuggaugugcauaucuga

SEQ ID NO: 1762804 - RNA, 19 nt, Artificial Sequence
  Description of Artificial Sequence: Synthetic oligonucleotide
  Antisense strand to SEQ ID NO: 1762803
ucagauaugcacauccaaa

SEQ ID NO: 1762805 - RNA, 19 nt, Artificial Sequence
  Description of Artificial Sequence: Synthetic oligonucleotide
  Sense strand starting at position 106 of SEQ ID NO: 1562650
ggaugugcauaucugauca

SEQ ID NO: 1762806 - RNA, 19 nt, Artificial Sequence
  Description of Artificial Sequence: Synthetic oligonucleotide
  Antisense strand to SEQ ID NO: 1762805
ugaucagauaugcacaucc

SEQ ID NO: 1762807 - RNA, 19 nt, Artificial Sequence
  Description of Artificial Sequence: Synthetic oligonucleotide
  Sense strand starting at position 161 of SEQ ID NO: 1562650
gaagcucuccuuuaggagu

SEQ ID NO: 1762808 - RNA, 19 nt, Artificial Sequence
  Description of Artificial Sequence: Synthetic oligonucleotide
  Antisense strand to SEQ ID NO: 1762807
acuccuaaaggagagcuuc

SEQ ID NO: 1762809 - RNA, 19 nt, Artificial Sequence
  Description of Artificial Sequence: Synthetic oligonucleotide
  Sense strand starting at position 207 of SEQ ID NO: 1562650
caguauguucuggagacca

SEQ ID NO: 1762810 - RNA, 19 nt, Artificial Sequence
  Description of Artificial Sequence: Synthetic oligonucleotide
  Antisense strand to SEQ ID NO: 1762809
uggucuccagaacauacug

SEQ ID NO: 1762811 - RNA, 19 nt, Artificial Sequence
  Description of Artificial Sequence: Synthetic oligonucleotide
  Sense strand starting at position 209 of SEQ ID NO: 1562650
guauguucuggagaccaua

SEQ ID NO: 1762812 - RNA, 19 nt, Artificial Sequence
  Description of Artificial Sequence: Synthetic oligonucleotide
  Antisense strand to SEQ ID NO: 1762811
uauggucuccagaacauac

SEQ ID NO: 1762813 - RNA, 19 nt, Artificial Sequence
  Description of Artificial Sequence: Synthetic oligonucleotide
  Sense strand starting at position 627 of SEQ ID NO: 1562650
gggugcucaguuuacauua

SEQ ID NO: 1762814 - RNA, 19 nt, Artificial Sequence
  Description of Artificial Sequence: Synthetic oligonucleotide
  Antisense strand to SEQ ID NO: 1762813
uaauguaaacugagcaccc

SEQ ID NO: 1762815 - RNA, 19 nt, Artificial Sequence
  Description of Artificial Sequence: Synthetic oligonucleotide
  Sense strand starting at position 1006 of SEQ ID NO: 1562650
acaaaugugucugcaucua

SEQ ID NO: 1762816 - RNA, 19 nt, Artificial Sequence
  Description of Artificial Sequence: Synthetic oligonucleotide
  Antisense strand to SEQ ID NO: 1762815
uagaugcagacacauuugu

SEQ ID NO: 1762817 - RNA, 19 nt, Artificial Sequence
  Description of Artificial Sequence: Synthetic oligonucleotide
  Sense strand starting at position 1018 of SEQ ID NO: 1562650
gcaucuagaugucuguaaa

SEQ ID NO: 1762818 - RNA, 19 nt, Artificial Sequence
  Description of Artificial Sequence: Synthetic oligonucleotide
  Antisense strand to SEQ ID NO: 1762817
uuuacagacaucuagaugc

SEQ ID NO: 1762819 - RNA, 19 nt, Artificial Sequence
  Description of Artificial Sequence: Synthetic oligonucleotide
  Sense strand starting at position 1021 of SEQ ID NO: 1562650
ucuagaugucuguaaaccu

SEQ ID NO: 1762820 - RNA, 19 nt, Artificial Sequence
  Description of Artificial Sequence: Synthetic oligonucleotide
  Antisense strand to SEQ ID NO: 1762819
agguuuacagacaucuaga

SEQ ID NO: 1762821 - RNA, 19 nt, Artificial Sequence
  Description of Artificial Sequence: Synthetic oligonucleotide
  Sense strand starting at position 1075 of SEQ ID NO: 1562650
uagguuuggcuguaagaca

SEQ ID NO: 1762822 - RNA, 19 nt, Artificial Sequence
  Description of Artificial Sequence: Synthetic oligonucleotide
  Antisense strand to SEQ ID NO: 1762821
ugucuuacagccaaaccua

SEQ ID NO: 1762823 - RNA, 19 nt, Artificial Sequence
  Description of Artificial Sequence: Synthetic oligonucleotide
  Sense strand starting at position 1107 of SEQ ID NO: 1562650
agagcaguggcuuagauaa

SEQ ID NO: 1762824 - RNA, 19 nt, Artificial Sequence
  Description of Artificial Sequence: Synthetic oligonucleotide
  Antisense strand to SEQ ID NO: 1762823
uuaucuaagccacugcucu

SEQ ID NO: 1762825 - RNA, 19 nt, Artificial Sequence
  Description of Artificial Sequence: Synthetic oligonucleotide
  Sense strand starting at position 1150 of SEQ ID NO: 1562650
aaacgaaguaguugggaga

SEQ ID NO: 1762826 - RNA, 19 nt, Artificial Sequence
  Description of Artificial Sequence: Synthetic oligonucleotide
  Antisense strand to SEQ ID NO: 1762825
ucucccaacuacuucguuu

SEQ ID NO: 1762827 - RNA, 19 nt, Artificial Sequence
  Description of Artificial Sequence: Synthetic oligonucleotide
  Sense strand starting at position 1171 of SEQ ID NO: 1562650
acaacacagccuugguauu

SEQ ID NO: 1762828 - RNA, 19 nt, Artificial Sequence
  Description of Artificial Sequence: Synthetic oligonucleotide
  Antisense strand to SEQ ID NO: 1762827
aauaccaaggcuguguugu

SEQ ID NO: 1762829 - RNA, 19 nt, Artificial Sequence
  Description of Artificial Sequence: Synthetic oligonucleotide
  Sense strand starting at position 1195 of SEQ ID NO: 1562650
uccacaaacuuguuaggua

SEQ ID NO: 1762830 - RNA, 19 nt, Artificial Sequence
  Description of Artificial Sequence: Synthetic oligonucleotide
  Antisense strand to SEQ ID NO: 1762829
uaccuaacaaguuugugga

SEQ ID NO: 1762831 - RNA, 19 nt, Artificial Sequence
  Description of Artificial Sequence: Synthetic oligonucleotide
  Sense strand starting at position 1580 of SEQ ID NO: 1562650
guugguucccaguacagga

SEQ ID NO: 1762832 - RNA, 19 nt, Artificial Sequence
  Description of Artificial Sequence: Synthetic oligonucleotide
  Antisense strand to SEQ ID NO: 1762831
uccuguacugggaaccaac

SEQ ID NO: 1762833 - RNA, 19 nt, Artificial Sequence
  Description of Artificial Sequence: Synthetic oligonucleotide
  Sense strand starting at position 1606 of SEQ ID NO: 1562650
ggaagcuguggcuggaaga

SEQ ID NO: 1762834 - RNA, 19 nt, Artificial Sequence
  Description of Artificial Sequence: Synthetic oligonucleotide
  Antisense strand to SEQ ID NO: 1762833
ucuuccagccacagcuucc

SEQ ID NO: 1762835 - RNA, 19 nt, Artificial Sequence
  Description of Artificial Sequence: Synthetic oligonucleotide
  Sense strand starting at position 1773 of SEQ ID NO: 1562650
agucuugcugagggagaau

SEQ ID NO: 1762836 - RNA, 19 nt, Artificial Sequence
  Description of Artificial Sequence: Synthetic oligonucleotide
  Antisense strand to SEQ ID NO: 1762835
auucucccucagcaagacu

SEQ ID NO: 1762837 - RNA, 19 nt, Artificial Sequence
  Description of Artificial Sequence: Synthetic oligonucleotide
  Sense strand starting at position 1782 of SEQ ID NO: 1562650
gagggagaauucugagaag

SEQ ID NO: 1762838 - RNA, 19 nt, Artificial Sequence
  Description of Artificial Sequence: Synthetic oligonucleotide
  Antisense strand to SEQ ID NO: 1762837
cuucucagaauucucccuc

SEQ ID NO: 1762839 - RNA, 19 nt, Artificial Sequence
  Description of Artificial Sequence: Synthetic oligonucleotide
  Sense strand starting at position 1802 of SEQ ID NO: 1562650
uggaguucucuguagggaa

SEQ ID NO: 1762840 - RNA, 19 nt, Artificial Sequence
  Description of Artificial Sequence: Synthetic oligonucleotide
  Antisense strand to SEQ ID NO: 1762839
uucccuacagagaacucca

SEQ ID NO: 1762841 - RNA, 19 nt, Artificial Sequence
  Description of Artificial Sequence: Synthetic oligonucleotide
  Sense strand starting at position 1803 of SEQ ID NO: 1562650
ggaguucucuguagggaag

SEQ ID NO: 1762842 - RNA, 19 nt, Artificial Sequence
  Description of Artificial Sequence: Synthetic oligonucleotide
  Antisense strand to SEQ ID NO: 1762841
cuucccuacagagaacucc

SEQ ID NO: 1762843 - RNA, 19 nt, Artificial Sequence
  Description of Artificial Sequence: Synthetic oligonucleotide
  Sense strand starting at position 1838 of SEQ ID NO: 1562650
cuagucauguuucccugaa

SEQ ID NO: 1762844 - RNA, 19 nt, Artificial Sequence
  Description of Artificial Sequence: Synthetic oligonucleotide
  Antisense strand to SEQ ID NO: 1762843
uucagggaaacaugacuag

SEQ ID NO: 1762845 - RNA, 19 nt, Artificial Sequence
  Description of Artificial Sequence: Synthetic oligonucleotide
  Sense strand starting at position 1905 of SEQ ID NO: 1562650
gaggaaacgugaguuaccu

SEQ ID NO: 1762846 - RNA, 19 nt, Artificial Sequence
  Description of Artificial Sequence: Synthetic oligonucleotide
  Antisense strand to SEQ ID NO: 1762845
agguaacucacguuuccuc

SEQ ID NO: 1762847 - RNA, 19 nt, Artificial Sequence
  Description of Artificial Sequence: Synthetic oligonucleotide
  Sense strand starting at position 1907 of SEQ ID NO: 1562650
ggaaacgugaguuaccuga

SEQ ID NO: 1762848 - RNA, 19 nt, Artificial Sequence
  Description of Artificial Sequence: Synthetic oligonucleotide
  Antisense strand to SEQ ID NO: 1762847
ucagguaacucacguuucc

SEQ ID NO: 1762849 - RNA, 19 nt, Artificial Sequence
  Description of Artificial Sequence: Synthetic oligonucleotide
  Sense strand starting at position 1909 of SEQ ID NO: 1562650
aaacgugaguuaccugaga

SEQ ID NO: 1762850 - RNA, 19 nt, Artificial Sequence
  Description of Artificial Sequence: Synthetic oligonucleotide
  Antisense strand to SEQ ID NO: 1762849
ucucagguaacucacguuu

SEQ ID NO: 1762851 - RNA, 19 nt, Artificial Sequence
  Description of Artificial Sequence: Synthetic oligonucleotide
  Sense strand starting at position 2258 of SEQ ID NO: 1562650
gcaguggcgcgaucaaagu

SEQ ID NO: 1762852 - RNA, 19 nt, Artificial Sequence
  Description of Artificial Sequence: Synthetic oligonucleotide
  Antisense strand to SEQ ID NO: 1762851
acuuugaucgcgccacugc

SEQ ID NO: 1762853 - RNA, 19 nt, Artificial Sequence
  Description of Artificial Sequence: Synthetic oligonucleotide
  Sense strand starting at position 2394 of SEQ ID NO: 1562650
cacucaggcuggucuagaa

SEQ ID NO: 1762854 - RNA, 19 nt, Artificial Sequence
  Description of Artificial Sequence: Synthetic oligonucleotide
  Antisense strand to SEQ ID NO: 1762853
uucuagaccagccugagug

SEQ ID NO: 1762855 - RNA, 19 nt, Artificial Sequence
  Description of Artificial Sequence: Synthetic oligonucleotide
  Sense strand starting at position 2869 of SEQ ID NO: 1562650
ccacauuaguuuccugagu

SEQ ID NO: 1762856 - RNA, 19 nt, Artificial Sequence
  Description of Artificial Sequence: Synthetic oligonucleotide
  Antisense strand to SEQ ID NO: 1762855
acucaggaaacuaaugugg

SEQ ID NO: 1762857 - RNA, 19 nt, Artificial Sequence
  Description of Artificial Sequence: Synthetic oligonucleotide
  Sense strand starting at position 3113 of SEQ ID NO: 1562650
ggcgccucuguuguaauga

SEQ ID NO: 1762858 - RNA, 19 nt, Artificial Sequence
  Description of Artificial Sequence: Synthetic oligonucleotide
  Antisense strand to SEQ ID NO: 1762857
ucauuacaacagaggcgcc

SEQ ID NO: 1762859 - RNA, 19 nt, Artificial Sequence
  Description of Artificial Sequence: Synthetic oligonucleotide
  Sense strand starting at position 3118 of SEQ ID NO: 1562650
cucuguuguaaugagaguu

SEQ ID NO: 1762860 - RNA, 19 nt, Artificial Sequence
  Description of Artificial Sequence: Synthetic oligonucleotide
  Antisense strand to SEQ ID NO: 1762859
aacucucauuacaacagag

SEQ ID NO: 1762861 - RNA, 19 nt, Artificial Sequence
  Description of Artificial Sequence: Synthetic oligonucleotide
  Sense strand starting at position 3182 of SEQ ID NO: 1562650
gucccuucugaaggcaaga

SEQ ID NO: 1762862 - RNA, 19 nt, Artificial Sequence
  Description of Artificial Sequence: Synthetic oligonucleotide
  Antisense strand to SEQ ID NO: 1762861
ucuugccuucagaagggac

SEQ ID NO: 1762863 - RNA, 19 nt, Artificial Sequence
  Description of Artificial Sequence: Synthetic oligonucleotide
  Sense strand starting at position 3268 of SEQ ID NO: 1562650
ugguccuauccugaacaua

SEQ ID NO: 1762864 - RNA, 19 nt, Artificial Sequence
  Description of Artificial Sequence: Synthetic oligonucleotide
  Antisense strand to SEQ ID NO: 1762863
uauguucaggauaggacca

SEQ ID NO: 1762865 - RNA, 19 nt, Artificial Sequence
  Description of Artificial Sequence: Synthetic oligonucleotide
  Sense strand starting at position 3438 of SEQ ID NO: 1562650
ugucucuccugcuuagaaa

SEQ ID NO: 1762866 - RNA, 19 nt, Artificial Sequence
  Description of Artificial Sequence: Synthetic oligonucleotide
  Antisense strand to SEQ ID NO: 1762865
uuucuaagcaggagagaca

SEQ ID NO: 1762867 - RNA, 19 nt, Artificial Sequence
  Description of Artificial Sequence: Synthetic oligonucleotide
  Sense strand starting at position 3466 of SEQ ID NO: 1562650
gcaggacauggccauguua

SEQ ID NO: 1762868 - RNA, 19 nt, Artificial Sequence
  Description of Artificial Sequence: Synthetic oligonucleotide
  Antisense strand to SEQ ID NO: 1762867
uaacauggccauguccugc

SEQ ID NO: 1762869 - RNA, 19 nt, Artificial Sequence
  Description of Artificial Sequence: Synthetic oligonucleotide
  Sense strand starting at position 3468 of SEQ ID NO: 1562650
aggacauggccauguuaau

SEQ ID NO: 1762870 - RNA, 19 nt, Artificial Sequence
  Description of Artificial Sequence: Synthetic oligonucleotide
  Antisense strand to SEQ ID NO: 1762869
auuaacauggccauguccu

SEQ ID NO: 1762871 - RNA, 19 nt, Artificial Sequence
  Description of Artificial Sequence: Synthetic oligonucleotide
  Sense strand starting at position 3586 of SEQ ID NO: 1562650
caaggcuugccagagauau

SEQ ID NO: 1762872 - RNA, 19 nt, Artificial Sequence
  Description of Artificial Sequence: Synthetic oligonucleotide
  Antisense strand to SEQ ID NO: 1762871
auaucucuggcaagccuug

SEQ ID NO: 1762873 - RNA, 19 nt, Artificial Sequence
  Description of Artificial Sequence: Synthetic oligonucleotide
  Sense strand starting at position 3588 of SEQ ID NO: 1562650
aggcuugccagagauaugu

SEQ ID NO: 1762874 - RNA, 19 nt, Artificial Sequence
  Description of Artificial Sequence: Synthetic oligonucleotide
  Antisense strand to SEQ ID NO: 1762873
acauaucucuggcaagccu

SEQ ID NO: 1762875 - RNA, 19 nt, Artificial Sequence
  Description of Artificial Sequence: Synthetic oligonucleotide
  Sense strand starting at position 3738 of SEQ ID NO: 1562650
ggcugaacacucugucacu

SEQ ID NO: 1762876 - RNA, 19 nt, Artificial Sequence
  Description of Artificial Sequence: Synthetic oligonucleotide
  Antisense strand to SEQ ID NO: 1762875
agugacagaguguucagcc

SEQ ID NO: 1762877 - RNA, 19 nt, Artificial Sequence
  Description of Artificial Sequence: Synthetic oligonucleotide
  Sense strand starting at position 164 of SEQ ID NO: 1562651
cuuggaaagcuauguaaau

SEQ ID NO: 1762878 - RNA, 19 nt, Artificial Sequence
  Description of Artificial Sequence: Synthetic oligonucleotide
  Antisense strand to SEQ ID NO: 1762877
auuuacauagcuuuccaag

SEQ ID NO: 1762879 - RNA, 19 nt, Artificial Sequence
  Description of Artificial Sequence: Synthetic oligonucleotide
  Sense strand starting at position 165 of SEQ ID NO: 1562651
uuggaaagcuauguaaauu

SEQ ID NO: 1762880 - RNA, 19 nt, Artificial Sequence
  Description of Artificial Sequence: Synthetic oligonucleotide
  Antisense strand to SEQ ID NO: 1762879
aauuuacauagcuuuccaa

SEQ ID NO: 1762881 - RNA, 19 nt, Artificial Sequence
  Description of Artificial Sequence: Synthetic oligonucleotide
  Sense strand starting at position 176 of SEQ ID NO: 1562651
uguaaauugccuuaaguga

SEQ ID NO: 1762882 - RNA, 19 nt, Artificial Sequence
  Description of Artificial Sequence: Synthetic oligonucleotide
  Antisense strand to SEQ ID NO: 1762881
ucacuuaaggcaauuuaca

SEQ ID NO: 1762883 - RNA, 19 nt, Artificial Sequence
  Description of Artificial Sequence: Synthetic oligonucleotide
  Sense strand starting at position 189 of SEQ ID NO: 1562651
aagugaagccgcuaacaga

SEQ ID NO: 1762884 - RNA, 19 nt, Artificial Sequence
  Description of Artificial Sequence: Synthetic oligonucleotide
  Antisense strand to SEQ ID NO: 1762883
ucuguuagcggcuucacuu

SEQ ID NO: 1762885 - RNA, 19 nt, Artificial Sequence
  Description of Artificial Sequence: Synthetic oligonucleotide
  Sense strand starting at position 244 of SEQ ID NO: 1562651
ucugucauccugcauucuu

SEQ ID NO: 1762886 - RNA, 19 nt, Artificial Sequence
  Description of Artificial Sequence: Synthetic oligonucleotide
  Antisense strand to SEQ ID NO: 1762885
aagaaugcaggaugacaga

SEQ ID NO: 1762887 - RNA, 19 nt, Artificial Sequence
  Description of Artificial Sequence: Synthetic oligonucleotide
  Sense strand starting at position 268 of SEQ ID NO: 1562651
ucugcucuaccggaagagu

SEQ ID NO: 1762888 - RNA, 19 nt, Artificial Sequence
  Description of Artificial Sequence: Synthetic oligonucleotide
  Antisense strand to SEQ ID NO: 1762887
acucuuccgguagagcaga

SEQ ID NO: 1762889 - RNA, 19 nt, Artificial Sequence
  Description of Artificial Sequence: Synthetic oligonucleotide
  Sense strand starting at position 292 of SEQ ID NO: 1562651
ggagacauuucgggacucu

SEQ ID NO: 1762890 - RNA, 19 nt, Artificial Sequence
  Description of Artificial Sequence: Synthetic oligonucleotide
  Antisense strand to SEQ ID NO: 1762889
agagucccgaaaugucucc

SEQ ID NO: 1762891 - RNA, 19 nt, Artificial Sequence
  Description of Artificial Sequence: Synthetic oligonucleotide
  Sense strand starting at position 304 of SEQ ID NO: 1562651
ggacucugcagagaugcua

SEQ ID NO: 1762892 - RNA, 19 nt, Artificial Sequence
  Description of Artificial Sequence: Synthetic oligonucleotide
  Antisense strand to SEQ ID NO: 1762891
uagcaucucugcagagucc

SEQ ID NO: 1762893 - RNA, 19 nt, Artificial Sequence
  Description of Artificial Sequence: Synthetic oligonucleotide
  Sense strand starting at position 337 of SEQ ID NO: 1562651
guuauaaauaagggcgaua

SEQ ID NO: 1762894 - RNA, 19 nt, Artificial Sequence
  Description of Artificial Sequence: Synthetic oligonucleotide
  Antisense strand to SEQ ID NO: 1762893
uaucgcccuuauuuauaac

SEQ ID NO: 1762895 - RNA, 19 nt, Artificial Sequence
  Description of Artificial Sequence: Synthetic oligonucleotide
  Sense strand starting at position 339 of SEQ ID NO: 1562651
uauaaauaagggcgauauu

SEQ ID NO: 1762896 - RNA, 19 nt, Artificial Sequence
  Description of Artificial Sequence: Synthetic oligonucleotide
  Antisense strand to SEQ ID NO: 1762895
aauaucgcccuuauuuaua

SEQ ID NO: 1762897 - RNA, 19 nt, Artificial Sequence
  Description of Artificial Sequence: Synthetic oligonucleotide
  Sense strand starting at position 349 of SEQ ID NO: 1562651
ggcgauauuuccuuauauu

SEQ ID NO: 1762898 - RNA, 19 nt, Artificial Sequence
  Description of Artificial Sequence: Synthetic oligonucleotide
  Antisense strand to SEQ ID NO: 1762897
aauauaaggaaauaucgcc

SEQ ID NO: 1762899 - RNA, 19 nt, Artificial Sequence
  Description of Artificial Sequence: Synthetic oligonucleotide
  Sense strand starting at position 376 of SEQ ID NO: 1562651
gacaguuuguaaguccuuu

SEQ ID NO: 1762900 - RNA, 19 nt, Artificial Sequence
  Description of Artificial Sequence: Synthetic oligonucleotide
  Antisense strand to SEQ ID NO: 1762899
aaaggacuuacaaacuguc

SEQ ID NO: 1762901 - RNA, 19 nt, Artificial Sequence
  Description of Artificial Sequence: Synthetic oligonucleotide
  Sense strand starting at position 650 of SEQ ID NO: 1562651
auaguacuuuccucggagu

SEQ ID NO: 1762902 - RNA, 19 nt, Artificial Sequence
  Description of Artificial Sequence: Synthetic oligonucleotide
  Antisense strand to SEQ ID NO: 1762901
acuccgaggaaaguacuau

SEQ ID NO: 1762903 - RNA, 19 nt, Artificial Sequence
  Description of Artificial Sequence: Synthetic oligonucleotide
  Sense strand starting at position 683 of SEQ ID NO: 1562651
uacgaauaacugugaagua

SEQ ID NO: 1762904 - RNA, 19 nt, Artificial Sequence
  Description of Artificial Sequence: Synthetic oligonucleotide
  Antisense strand to SEQ ID NO: 1762903
uacuucacaguuauucgua

SEQ ID NO: 1762905 - RNA, 19 nt, Artificial Sequence
  Description of Artificial Sequence: Synthetic oligonucleotide
  Sense strand starting at position 721 of SEQ ID NO: 1562651
caaaguaagcacuaugugu

SEQ ID NO: 1762906 - RNA, 19 nt, Artificial Sequence
  Description of Artificial Sequence: Synthetic oligonucleotide
  Antisense strand to SEQ ID NO: 1762905
acacauagugcuuacuuug

SEQ ID NO: 1762907 - RNA, 19 nt, Artificial Sequence
  Description of Artificial Sequence: Synthetic oligonucleotide
  Sense strand starting at position 1047 of SEQ ID NO: 1562651
augcaaggauuacugugaa

SEQ ID NO: 1762908 - RNA, 19 nt, Artificial Sequence
  Description of Artificial Sequence: Synthetic oligonucleotide
  Antisense strand to SEQ ID NO: 1762907
uucacaguaauccuugcau

SEQ ID NO: 1762909 - RNA, 19 nt, Artificial Sequence
  Description of Artificial Sequence: Synthetic oligonucleotide
  Sense strand starting at position 1050 of SEQ ID NO: 1562651
caaggauuacugugaaauc

SEQ ID NO: 1762910 - RNA, 19 nt, Artificial Sequence
  Description of Artificial Sequence: Synthetic oligonucleotide
  Antisense strand to SEQ ID NO: 1762909
gauuucacaguaauccuug

SEQ ID NO: 1762911 - RNA, 19 nt, Artificial Sequence
  Description of Artificial Sequence: Synthetic oligonucleotide
  Sense strand starting at position 1059 of SEQ ID NO: 1562651
cugugaaauccguauguua

SEQ ID NO: 1762912 - RNA, 19 nt, Artificial Sequence
  Description of Artificial Sequence: Synthetic oligonucleotide
  Antisense strand to SEQ ID NO: 1762911
uaacauacggauuucacag

SEQ ID NO: 1762913 - RNA, 19 nt, Artificial Sequence
  Description of Artificial Sequence: Synthetic oligonucleotide
  Sense strand starting at position 1061 of SEQ ID NO: 1562651
gugaaauccguauguuaau

SEQ ID NO: 1762914 - RNA, 19 nt, Artificial Sequence
  Description of Artificial Sequence: Synthetic oligonucleotide
  Antisense strand to SEQ ID NO: 1762913
auuaacauacggauuucac

SEQ ID NO: 1762915 - RNA, 19 nt, Artificial Sequence
  Description of Artificial Sequence: Synthetic oligonucleotide
  Sense strand starting at position 1062 of SEQ ID NO: 1562651
ugaaauccguauguuaaug

SEQ ID NO: 1762916 - RNA, 19 nt, Artificial Sequence
  Description of Artificial Sequence: Synthetic oligonucleotide
  Antisense strand to SEQ ID NO: 1762915
cauuaacauacggauuuca

SEQ ID NO: 1762917 - RNA, 19 nt, Artificial Sequence
  Description of Artificial Sequence: Synthetic oligonucleotide
  Sense strand starting at position 1476 of SEQ ID NO: 1562651
ggcccaguuuccuccacau

SEQ ID NO: 1762918 - RNA, 19 nt, Artificial Sequence
  Description of Artificial Sequence: Synthetic oligonucleotide
  Antisense strand to SEQ ID NO: 1762917
auguggaggaaacugggcc

SEQ ID NO: 1762919 - RNA, 19 nt, Artificial Sequence
  Description of Artificial Sequence: Synthetic oligonucleotide
  Sense strand starting at position 1519 of SEQ ID NO: 1562651
guccucaugguggaaauca

SEQ ID NO: 1762920 - RNA, 19 nt, Artificial Sequence
  Description of Artificial Sequence: Synthetic oligonucleotide
  Antisense strand to SEQ ID NO: 1762919
ugauuuccaccaugaggac

SEQ ID NO: 1762921 - RNA, 19 nt, Artificial Sequence
  Description of Artificial Sequence: Synthetic oligonucleotide
  Sense strand starting at position 1632 of SEQ ID NO: 1562651
gcgggaguagcguuuccga

SEQ ID NO: 1762922 - RNA, 19 nt, Artificial Sequence
  Description of Artificial Sequence: Synthetic oligonucleotide
  Antisense strand to SEQ ID NO: 1762921
ucggaaacgcuacucccgc

SEQ ID NO: 1762923 - RNA, 19 nt, Artificial Sequence
  Description of Artificial Sequence: Synthetic oligonucleotide
  Sense strand starting at position 2062 of SEQ ID NO: 1562651
cggcaucacgggaguugua

SEQ ID NO: 1762924 - RNA, 19 nt, Artificial Sequence
  Description of Artificial Sequence: Synthetic oligonucleotide
  Antisense strand to SEQ ID NO: 1762923
uacaacucccgugaugccg

SEQ ID NO: 1762925 - RNA, 19 nt, Artificial Sequence
  Description of Artificial Sequence: Synthetic oligonucleotide
  Sense strand starting at position 2589 of SEQ ID NO: 1562651
augacuaagucagcaaaca

SEQ ID NO: 1762926 - RNA, 19 nt, Artificial Sequence
  Description of Artificial Sequence: Synthetic oligonucleotide
  Antisense strand to SEQ ID NO: 1762925
uguuugcugacuuagucau

SEQ ID NO: 1762927 - RNA, 19 nt, Artificial Sequence
  Description of Artificial Sequence: Synthetic oligonucleotide
  Sense strand starting at position 2634 of SEQ ID NO: 1562651
cgcguuucccggaguagac

SEQ ID NO: 1762928 - RNA, 19 nt, Artificial Sequence
  Description of Artificial Sequence: Synthetic oligonucleotide
  Antisense strand to SEQ ID NO: 1762927
gucuacuccgggaaacgcg

SEQ ID NO: 1762929 - RNA, 19 nt, Artificial Sequence
  Description of Artificial Sequence: Synthetic oligonucleotide
  Sense strand starting at position 2769 of SEQ ID NO: 1562651
gauucugcuggaggaaaga

SEQ ID NO: 1762930 - RNA, 19 nt, Artificial Sequence
  Description of Artificial Sequence: Synthetic oligonucleotide
  Antisense strand to SEQ ID NO: 1762929
ucuuuccuccagcagaauc

SEQ ID NO: 1762931 - RNA, 19 nt, Artificial Sequence
  Description of Artificial Sequence: Synthetic oligonucleotide
  Sense strand starting at position 2800 of SEQ ID NO: 1562651
caccguuugaaauguguag

SEQ ID NO: 1762932 - RNA, 19 nt, Artificial Sequence
  Description of Artificial Sequence: Synthetic oligonucleotide
  Antisense strand to SEQ ID NO: 1762931
cuacacauuucaaacggug

SEQ ID NO: 1762933 - RNA, 19 nt, Artificial Sequence
  Description of Artificial Sequence: Synthetic oligonucleotide
  Sense strand starting at position 2802 of SEQ ID NO: 1562651
ccguuugaaauguguagga

SEQ ID NO: 1762934 - RNA, 19 nt, Artificial Sequence
  Description of Artificial Sequence: Synthetic oligonucleotide
  Antisense strand to SEQ ID NO: 1762933
uccuacacauuucaaacgg

SEQ ID NO: 1762935 - RNA, 19 nt, Artificial Sequence
  Description of Artificial Sequence: Synthetic oligonucleotide
  Sense strand starting at position 2804 of SEQ ID NO: 1562651
guuugaaauguguaggaug

SEQ ID NO: 1762936 - RNA, 19 nt, Artificial Sequence
  Description of Artificial Sequence: Synthetic oligonucleotide
  Antisense strand to SEQ ID NO: 1762935
cauccuacacauuucaaac

SEQ ID NO: 1762937 - RNA, 19 nt, Artificial Sequence
  Description of Artificial Sequence: Synthetic oligonucleotide
  Sense strand starting at position 2815 of SEQ ID NO: 1562651
guaggaugcccucagauuc

SEQ ID NO: 1762938 - RNA, 19 nt, Artificial Sequence
  Description of Artificial Sequence: Synthetic oligonucleotide
  Antisense strand to SEQ ID NO: 1762937
gaaucugagggcauccuac

SEQ ID NO: 1762939 - RNA, 19 nt, Artificial Sequence
  Description of Artificial Sequence: Synthetic oligonucleotide
  Sense strand starting at position 2826 of SEQ ID NO: 1562651
ucagauucuuuggcccauu

SEQ ID NO: 1762940 - RNA, 19 nt, Artificial Sequence
  Description of Artificial Sequence: Synthetic oligonucleotide
  Antisense strand to SEQ ID NO: 1762939
aaugggccaaagaaucuga

SEQ ID NO: 1762941 - RNA, 19 nt, Artificial Sequence
  Description of Artificial Sequence: Synthetic oligonucleotide
  Sense strand starting at position 2847 of SEQ ID NO: 1562651
uagguauagcuaugcuaaa

SEQ ID NO: 1762942 - RNA, 19 nt, Artificial Sequence
  Description of Artificial Sequence: Synthetic oligonucleotide
  Antisense strand to SEQ ID NO: 1762941
uuuagcauagcuauaccua

SEQ ID NO: 1762943 - RNA, 19 nt, Artificial Sequence
  Description of Artificial Sequence: Synthetic oligonucleotide
  Sense strand starting at position 2883 of SEQ ID NO: 1562651
uguacuuagcacuagcaga

SEQ ID NO: 1762944 - RNA, 19 nt, Artificial Sequence
  Description of Artificial Sequence: Synthetic oligonucleotide
  Antisense strand to SEQ ID NO: 1762943
ucugcuagugcuaaguaca

SEQ ID NO: 1762945 - RNA, 19 nt, Artificial Sequence
  Description of Artificial Sequence: Synthetic oligonucleotide
  Sense strand starting at position 3517 of SEQ ID NO: 1562651
acaauagcccgacacuuaa

SEQ ID NO: 1762946 - RNA, 19 nt, Artificial Sequence
  Description of Artificial Sequence: Synthetic oligonucleotide
  Antisense strand to SEQ ID NO: 1762945
uuaagugucgggcuauugu

SEQ ID NO: 1762947 - RNA, 19 nt, Artificial Sequence
  Description of Artificial Sequence: Synthetic oligonucleotide
  Sense strand starting at position 3547 of SEQ ID NO: 1562651
ggacauagcucucuaggau

SEQ ID NO: 1762948 - RNA, 19 nt, Artificial Sequence
  Description of Artificial Sequence: Synthetic oligonucleotide
  Antisense strand to SEQ ID NO: 1762947
auccuagagagcuaugucc

SEQ ID NO: 1762949 - RNA, 19 nt, Artificial Sequence
  Description of Artificial Sequence: Synthetic oligonucleotide
  Sense strand starting at position 3548 of SEQ ID NO: 1562651
gacauagcucucuaggauu

SEQ ID NO: 1762950 - RNA, 19 nt, Artificial Sequence
  Description of Artificial Sequence: Synthetic oligonucleotide
  Antisense strand to SEQ ID NO: 1762949
aauccuagagagcuauguc

SEQ ID NO: 1762951 - RNA, 19 nt, Artificial Sequence
  Description of Artificial Sequence: Synthetic oligonucleotide
  Sense strand starting at position 3621 of SEQ ID NO: 1562651
uuagaaauuucuugguaug

SEQ ID NO: 1762952 - RNA, 19 nt, Artificial Sequence
  Description of Artificial Sequence: Synthetic oligonucleotide
  Antisense strand to SEQ ID NO: 1762951
cauaccaagaaauuucuaa

SEQ ID NO: 1762953 - RNA, 19 nt, Artificial Sequence
  Description of Artificial Sequence: Synthetic oligonucleotide
  Sense strand starting at position 3624 of SEQ ID NO: 1562651
gaaauuucuugguaugaug

SEQ ID NO: 1762954 - RNA, 19 nt, Artificial Sequence
  Description of Artificial Sequence: Synthetic oligonucleotide
  Antisense strand to SEQ ID NO: 1762953
caucauaccaagaaauuuc

SEQ ID NO: 1762955 - RNA, 19 nt, Artificial Sequence
  Description of Artificial Sequence: Synthetic oligonucleotide
  Sense strand starting at position 3829 of SEQ ID NO: 1562651
gcucgucaugcaccuguaa

SEQ ID NO: 1762956 - RNA, 19 nt, Artificial Sequence
  Description of Artificial Sequence: Synthetic oligonucleotide
  Antisense strand to SEQ ID NO: 1762955
uuacaggugcaugacgagc

SEQ ID NO: 1762957 - RNA, 19 nt, Artificial Sequence
  Description of Artificial Sequence: Synthetic oligonucleotide
  Sense strand starting at position 22 of SEQ ID NO: 1562652
ccucaauucugagaggcca

SEQ ID NO: 1762958 - RNA, 19 nt, Artificial Sequence
  Description of Artificial Sequence: Synthetic oligonucleotide
  Antisense strand to SEQ ID NO: 1762957
uggccucucagaauugagg

SEQ ID NO: 1762959 - RNA, 19 nt, Artificial Sequence
  Description of Artificial Sequence: Synthetic oligonucleotide
  Sense strand starting at position 245 of SEQ ID NO: 1562652
agaagagguucuugagcau

SEQ ID NO: 1762960 - RNA, 19 nt, Artificial Sequence
  Description of Artificial Sequence: Synthetic oligonucleotide
  Antisense strand to SEQ ID NO: 1762959
augcucaagaaccucuucu

SEQ ID NO: 1762961 - RNA, 19 nt, Artificial Sequence
  Description of Artificial Sequence: Synthetic oligonucleotide
  Sense strand starting at position 248 of SEQ ID NO: 1562652
agagguucuugagcaugaa

SEQ ID NO: 1762962 - RNA, 19 nt, Artificial Sequence
  Description of Artificial Sequence: Synthetic oligonucleotide
  Antisense strand to SEQ ID NO: 1762961
uucaugcucaagaaccucu

SEQ ID NO: 1762963 - RNA, 19 nt, Artificial Sequence
  Description of Artificial Sequence: Synthetic oligonucleotide
  Sense strand starting at position 251 of SEQ ID NO: 1562652
gguucuugagcaugaagau

SEQ ID NO: 1762964 - RNA, 19 nt, Artificial Sequence
  Description of Artificial Sequence: Synthetic oligonucleotide
  Antisense strand to SEQ ID NO: 1762963
aucuucaugcucaagaacc

SEQ ID NO: 1762965 - RNA, 19 nt, Artificial Sequence
  Description of Artificial Sequence: Synthetic oligonucleotide
  Sense strand starting at position 252 of SEQ ID NO: 1562652
guucuugagcaugaagaug

SEQ ID NO: 1762966 - RNA, 19 nt, Artificial Sequence
  Description of Artificial Sequence: Synthetic oligonucleotide
  Antisense strand to SEQ ID NO: 1762965
caucuucaugcucaagaac

SEQ ID NO: 1762967 - RNA, 19 nt, Artificial Sequence
  Description of Artificial Sequence: Synthetic oligonucleotide
  Sense strand starting at position 727 of SEQ ID NO: 1562652
gcgcguagcucgaugaggu

SEQ ID NO: 1762968 - RNA, 19 nt, Artificial Sequence
  Description of Artificial Sequence: Synthetic oligonucleotide
  Antisense strand to SEQ ID NO: 1762967
accucaucgagcuacgcgc

SEQ ID NO: 1762969 - RNA, 19 nt, Artificial Sequence
  Description of Artificial Sequence: Synthetic oligonucleotide
  Sense strand starting at position 737 of SEQ ID NO: 1562652
cgaugaggucuaggaugga

SEQ ID NO: 1762970 - RNA, 19 nt, Artificial Sequence
  Description of Artificial Sequence: Synthetic oligonucleotide
  Antisense strand to SEQ ID NO: 1762969
uccauccuagaccucaucg

SEQ ID NO: 1762971 - RNA, 19 nt, Artificial Sequence
  Description of Artificial Sequence: Synthetic oligonucleotide
  Sense strand starting at position 782 of SEQ ID NO: 1562652
gagugaaggcgauggagua

SEQ ID NO: 1762972 - RNA, 19 nt, Artificial Sequence
  Description of Artificial Sequence: Synthetic oligonucleotide
  Antisense strand to SEQ ID NO: 1762971
uacuccaucgccuucacuc

SEQ ID NO: 1762973 - RNA, 19 nt, Artificial Sequence
  Description of Artificial Sequence: Synthetic oligonucleotide
  Sense strand starting at position 1013 of SEQ ID NO: 1562652
ggcuguucuuggcgaagaa

SEQ ID NO: 1762974 - RNA, 19 nt, Artificial Sequence
  Description of Artificial Sequence: Synthetic oligonucleotide
  Antisense strand to SEQ ID NO: 1762973
uucuucgccaagaacagcc

SEQ ID NO: 1762975 - RNA, 19 nt, Artificial Sequence
  Description of Artificial Sequence: Synthetic oligonucleotide
  Sense strand starting at position 1014 of SEQ ID NO: 1562652
gcuguucuuggcgaagaag

SEQ ID NO: 1762976 - RNA, 19 nt, Artificial Sequence
  Description of Artificial Sequence: Synthetic oligonucleotide
  Antisense strand to SEQ ID NO: 1762975
cuucuucgccaagaacagc

SEQ ID NO: 1762977 - RNA, 19 nt, Artificial Sequence
  Description of Artificial Sequence: Synthetic oligonucleotide
  Sense strand starting at position 2714 of SEQ ID NO: 1562652
agcagaaugggacguaaua

SEQ ID NO: 1762978 - RNA, 19 nt, Artificial Sequence
  Description of Artificial Sequence: Synthetic oligonucleotide
  Antisense strand to SEQ ID NO: 1762977
uauuacgucccauucugcu

SEQ ID NO: 1762979 - RNA, 19 nt, Artificial Sequence
  Description of Artificial Sequence: Synthetic oligonucleotide
  Sense strand starting at position 2733 of SEQ ID NO: 1562652
ggaagaugugucuagcaga

SEQ ID NO: 1762980 - RNA, 19 nt, Artificial Sequence
  Description of Artificial Sequence: Synthetic oligonucleotide
  Antisense strand to SEQ ID NO: 1762979
ucugcuagacacaucuucc

SEQ ID NO: 1762981 - RNA, 19 nt, Artificial Sequence
  Description of Artificial Sequence: Synthetic oligonucleotide
  Sense strand starting at position 2736 of SEQ ID NO: 1562652
agaugugucuagcagagag

SEQ ID NO: 1762982 - RNA, 19 nt, Artificial Sequence
  Description of Artificial Sequence: Synthetic oligonucleotide
  Antisense strand to SEQ ID NO: 1762981
cucucugcuagacacaucu

SEQ ID NO: 1762983 - RNA, 19 nt, Artificial Sequence
  Description of Artificial Sequence: Synthetic oligonucleotide
  Sense strand starting at position 2738 of SEQ ID NO: 1562652
augugucuagcagagagua

SEQ ID NO: 1762984 - RNA, 19 nt, Artificial Sequence
  Description of Artificial Sequence: Synthetic oligonucleotide
  Antisense strand to SEQ ID NO: 1762983
uacucucugcuagacacau

SEQ ID NO: 1762985 - RNA, 19 nt, Artificial Sequence
  Description of Artificial Sequence: Synthetic oligonucleotide
  Sense strand starting at position 2740 of SEQ ID NO: 1562652
gugucuagcagagaguaaa

SEQ ID NO: 1762986 - RNA, 19 nt, Artificial Sequence
  Description of Artificial Sequence: Synthetic oligonucleotide
  Antisense strand to SEQ ID NO: 1762985
uuuacucucugcuagacac

SEQ ID NO: 1762987 - RNA, 19 nt, Artificial Sequence
  Description of Artificial Sequence: Synthetic oligonucleotide
  Sense strand starting at position 2813 of SEQ ID NO: 1562652
gaugauggugaggguuaca

SEQ ID NO: 1762988 - RNA, 19 nt, Artificial Sequence
  Description of Artificial Sequence: Synthetic oligonucleotide
  Antisense strand to SEQ ID NO: 1762987
uguaacccucaccaucauc

SEQ ID NO: 1762989 - RNA, 19 nt, Artificial Sequence
  Description of Artificial Sequence: Synthetic oligonucleotide
  Sense strand starting at position 2886 of SEQ ID NO: 1562652
uagacagucucaggagaga

SEQ ID NO: 1762990 - RNA, 19 nt, Artificial Sequence
  Description of Artificial Sequence: Synthetic oligonucleotide
  Antisense strand to SEQ ID NO: 1762989
ucucuccugagacugucua

SEQ ID NO: 1762991 - RNA, 19 nt, Artificial Sequence
  Description of Artificial Sequence: Synthetic oligonucleotide
  Sense strand starting at position 2942 of SEQ ID NO: 1562652
gauggaugucgaugcagca

SEQ ID NO: 1762992 - RNA, 19 nt, Artificial Sequence
  Description of Artificial Sequence: Synthetic oligonucleotide
  Antisense strand to SEQ ID NO: 1762991
ugcugcaucgacauccauc

SEQ ID NO: 1762993 - RNA, 19 nt, Artificial Sequence
  Description of Artificial Sequence: Synthetic oligonucleotide
  Sense strand starting at position 2975 of SEQ ID NO: 1562652
aagguagagugcugccuuu

SEQ ID NO: 1762994 - RNA, 19 nt, Artificial Sequence
  Description of Artificial Sequence: Synthetic oligonucleotide
  Antisense strand to SEQ ID NO: 1762993
aaaggcagcacucuaccuu

SEQ ID NO: 1762995 - RNA, 19 nt, Artificial Sequence
  Description of Artificial Sequence: Synthetic oligonucleotide
  Sense strand starting at position 3204 of SEQ ID NO: 1562652
aacagcuugcagcgugaua

SEQ ID NO: 1762996 - RNA, 19 nt, Artificial Sequence
  Description of Artificial Sequence: Synthetic oligonucleotide
  Antisense strand to SEQ ID NO: 1762995
uaucacgcugcaagcuguu

SEQ ID NO: 1762997 - RNA, 19 nt, Artificial Sequence
  Description of Artificial Sequence: Synthetic oligonucleotide
  Sense strand starting at position 3206 of SEQ ID NO: 1562652
cagcuugcagcgugauaac

SEQ ID NO: 1762998 - RNA, 19 nt, Artificial Sequence
  Description of Artificial Sequence: Synthetic oligonucleotide
  Antisense strand to SEQ ID NO: 1762997
guuaucacgcugcaagcug

SEQ ID NO: 1762999 - RNA, 19 nt, Artificial Sequence
  Description of Artificial Sequence: Synthetic oligonucleotide
  Sense strand starting at position 3358 of SEQ ID NO: 1562652
acagccaaucccugguaaa

SEQ ID NO: 1763000 - RNA, 19 nt, Artificial Sequence
  Description of Artificial Sequence: Synthetic oligonucleotide
  Antisense strand to SEQ ID NO: 1762999
uuuaccagggauuggcugu

SEQ ID NO: 1763001 - RNA, 19 nt, Artificial Sequence
  Description of Artificial Sequence: Synthetic oligonucleotide
  Sense strand starting at position 3361 of SEQ ID NO: 1562652
gccaaucccugguaaauau

SEQ ID NO: 1763002 - RNA, 19 nt, Artificial Sequence
  Description of Artificial Sequence: Synthetic oligonucleotide
  Antisense strand to SEQ ID NO: 1763001
auauuuaccagggauuggc

SEQ ID NO: 1763003 - RNA, 19 nt, Artificial Sequence
  Description of Artificial Sequence: Synthetic oligonucleotide
  Sense strand starting at position 3499 of SEQ ID NO: 1562652
guggucuuagccugaauau

SEQ ID NO: 1763004 - RNA, 19 nt, Artificial Sequence
  Description of Artificial Sequence: Synthetic oligonucleotide
  Antisense strand to SEQ ID NO: 1763003
auauucaggcuaagaccac

SEQ ID NO: 1763005 - RNA, 19 nt, Artificial Sequence
  Description of Artificial Sequence: Synthetic oligonucleotide
  Sense strand starting at position 3500 of SEQ ID NO: 1562652
uggucuuagccugaauauu

SEQ ID NO: 1763006 - RNA, 19 nt, Artificial Sequence
  Description of Artificial Sequence: Synthetic oligonucleotide
  Antisense strand to SEQ ID NO: 1763005
aauauucaggcuaagacca

SEQ ID NO: 1763007 - RNA, 19 nt, Artificial Sequence
  Description of Artificial Sequence: Synthetic oligonucleotide
  Sense strand starting at position 3524 of SEQ ID NO: 1562652
ucagaauguugaucuguaa

SEQ ID NO: 1763008 - RNA, 19 nt, Artificial Sequence
  Description of Artificial Sequence: Synthetic oligonucleotide
  Antisense strand to SEQ ID NO: 1763007
uuacagaucaacauucuga

SEQ ID NO: 1763009 - RNA, 19 nt, Artificial Sequence
  Description of Artificial Sequence: Synthetic oligonucleotide
  Sense strand starting at position 3527 of SEQ ID NO: 1562652
gaauguugaucuguaaaca

SEQ ID NO: 1763010 - RNA, 19 nt, Artificial Sequence
  Description of Artificial Sequence: Synthetic oligonucleotide
  Antisense strand to SEQ ID NO: 1763009
uguuuacagaucaacauuc

SEQ ID NO: 1763011 - RNA, 19 nt, Artificial Sequence
  Description of Artificial Sequence: Synthetic oligonucleotide
  Sense strand starting at position 3701 of SEQ ID NO: 1562652
uggugauaaucccagcaau

SEQ ID NO: 1763012 - RNA, 19 nt, Artificial Sequence
  Description of Artificial Sequence: Synthetic oligonucleotide
  Antisense strand to SEQ ID NO: 1763011
auugcugggauuaucacca

SEQ ID NO: 1763013 - RNA, 19 nt, Artificial Sequence
  Description of Artificial Sequence: Synthetic oligonucleotide
  Sense strand starting at position 66 of SEQ ID NO: 1562653
ccucaauucugagaggcca

SEQ ID NO: 1763014 - RNA, 19 nt, Artificial Sequence
  Description of Artificial Sequence: Synthetic oligonucleotide
  Antisense strand to SEQ ID NO: 1763013
uggccucucagaauugagg

SEQ ID NO: 1763015 - RNA, 19 nt, Artificial Sequence
  Description of Artificial Sequence: Synthetic oligonucleotide
  Sense strand starting at position 289 of SEQ ID NO: 1562653
agaagagguucuugagcau

SEQ ID NO: 1763016 - RNA, 19 nt, Artificial Sequence
  Description of Artificial Sequence: Synthetic oligonucleotide
  Antisense strand to SEQ ID NO: 1763015
augcucaagaaccucuucu

SEQ ID NO: 1763017 - RNA, 19 nt, Artificial Sequence
  Description of Artificial Sequence: Synthetic oligonucleotide
  Sense strand starting at position 292 of SEQ ID NO: 1562653
agagguucuugagcaugaa

SEQ ID NO: 1763018 - RNA, 19 nt, Artificial Sequence
  Description of Artificial Sequence: Synthetic oligonucleotide
  Antisense strand to SEQ ID NO: 1763017
uucaugcucaagaaccucu

SEQ ID NO: 1763019 - RNA, 19 nt, Artificial Sequence
  Description of Artificial Sequence: Synthetic oligonucleotide
  Sense strand starting at position 295 of SEQ ID NO: 1562653
gguucuugagcaugaagau

SEQ ID NO: 1763020 - RNA, 19 nt, Artificial Sequence
  Description of Artificial Sequence: Synthetic oligonucleotide
  Antisense strand to SEQ ID NO: 1763019
aucuucaugcucaagaacc

SEQ ID NO: 1763021 - RNA, 19 nt, Artificial Sequence
  Description of Artificial Sequence: Synthetic oligonucleotide
  Sense strand starting at position 296 of SEQ ID NO: 1562653
guucuugagcaugaagaug

SEQ ID NO: 1763022 - RNA, 19 nt, Artificial Sequence
  Description of Artificial Sequence: Synthetic oligonucleotide
  Antisense strand to SEQ ID NO: 1763021
caucuucaugcucaagaac

SEQ ID NO: 1763023 - RNA, 19 nt, Artificial Sequence
  Description of Artificial Sequence: Synthetic oligonucleotide
  Sense strand starting at position 771 of SEQ ID NO: 1562653
gcgcguagcucgaugaggu

SEQ ID NO: 1763024 - RNA, 19 nt, Artificial Sequence
  Description of Artificial Sequence: Synthetic oligonucleotide
  Antisense strand to SEQ ID NO: 1763023
accucaucgagcuacgcgc

SEQ ID NO: 1763025 - RNA, 19 nt, Artificial Sequence
  Description of Artificial Sequence: Synthetic oligonucleotide
  Sense strand starting at position 781 of SEQ ID NO: 1562653
cgaugaggucuaggaugga

SEQ ID NO: 1763026 - RNA, 19 nt, Artificial Sequence
  Description of Artificial Sequence: Synthetic oligonucleotide
  Antisense strand to SEQ ID NO: 1763025
uccauccuagaccucaucg

SEQ ID NO: 1763027 - RNA, 19 nt, Artificial Sequence
  Description of Artificial Sequence: Synthetic oligonucleotide
  Sense strand starting at position 826 of SEQ ID NO: 1562653
gagugaaggcgauggagua

SEQ ID NO: 1763028 - RNA, 19 nt, Artificial Sequence
  Description of Artificial Sequence: Synthetic oligonucleotide
  Antisense strand to SEQ ID NO: 1763027
uacuccaucgccuucacuc

SEQ ID NO: 1763029 - RNA, 19 nt, Artificial Sequence
  Description of Artificial Sequence: Synthetic oligonucleotide
  Sense strand starting at position 1057 of SEQ ID NO: 1562653
ggcuguucuuggcgaagaa

SEQ ID NO: 1763030 - RNA, 19 nt, Artificial Sequence
  Description of Artificial Sequence: Synthetic oligonucleotide
  Antisense strand to SEQ ID NO: 1763029
uucuucgccaagaacagcc

SEQ ID NO: 1763031 - RNA, 19 nt, Artificial Sequence
  Description of Artificial Sequence: Synthetic oligonucleotide
  Sense strand starting at position 1058 of SEQ ID NO: 1562653
gcuguucuuggcgaagaag

SEQ ID NO: 1763032 - RNA, 19 nt, Artificial Sequence
  Description of Artificial Sequence: Synthetic oligonucleotide
  Antisense strand to SEQ ID NO: 1763031
cuucuucgccaagaacagc

SEQ ID NO: 1763033 - RNA, 19 nt, Artificial Sequence
  Description of Artificial Sequence: Synthetic oligonucleotide
  Sense strand starting at position 2758 of SEQ ID NO: 1562653
agcagaaugggacguaaua

SEQ ID NO: 1763034 - RNA, 19 nt, Artificial Sequence
  Description of Artificial Sequence: Synthetic oligonucleotide
  Antisense strand to SEQ ID NO: 1763033
uauuacgucccauucugcu

SEQ ID NO: 1763035 - RNA, 19 nt, Artificial Sequence
  Description of Artificial Sequence: Synthetic oligonucleotide
  Sense strand starting at position 2777 of SEQ ID NO: 1562653
ggaagaugugucuagcaga

SEQ ID NO: 1763036 - RNA, 19 nt, Artificial Sequence
  Description of Artificial Sequence: Synthetic oligonucleotide
  Antisense strand to SEQ ID NO: 1763035
ucugcuagacacaucuucc

SEQ ID NO: 1763037 - RNA, 19 nt, Artificial Sequence
  Description of Artificial Sequence: Synthetic oligonucleotide
  Sense strand starting at position 2780 of SEQ ID NO: 1562653
agaugugucuagcagagag

SEQ ID NO: 1763038 - RNA, 19 nt, Artificial Sequence
  Description of Artificial Sequence: Synthetic oligonucleotide
  Antisense strand to SEQ ID NO: 1763037
cucucugcuagacacaucu

SEQ ID NO: 1763039 - RNA, 19 nt, Artificial Sequence
  Description of Artificial Sequence: Synthetic oligonucleotide
  Sense strand starting at position 2782 of SEQ ID NO: 1562653
augugucuagcagagagua

SEQ ID NO: 1763040 - RNA, 19 nt, Artificial Sequence
  Description of Artificial Sequence: Synthetic oligonucleotide
  Antisense strand to SEQ ID NO: 1763039
uacucucugcuagacacau

SEQ ID NO: 1763041 - RNA, 19 nt, Artificial Sequence
  Description of Artificial Sequence: Synthetic oligonucleotide
  Sense strand starting at position 2784 of SEQ ID NO: 1562653
gugucuagcagagaguaaa

SEQ ID NO: 1763042 - RNA, 19 nt, Artificial Sequence
  Description of Artificial Sequence: Synthetic oligonucleotide
  Antisense strand to SEQ ID NO: 1763041
uuuacucucugcuagacac

SEQ ID NO: 1763043 - RNA, 19 nt, Artificial Sequence
  Description of Artificial Sequence: Synthetic oligonucleotide
  Sense strand starting at position 2857 of SEQ ID NO: 1562653
gaugauggugaggguuaca

SEQ ID NO: 1763044 - RNA, 19 nt, Artificial Sequence
  Description of Artificial Sequence: Synthetic oligonucleotide
  Antisense strand to SEQ ID NO: 1763043
uguaacccucaccaucauc

SEQ ID NO: 1763045 - RNA, 19 nt, Artificial Sequence
  Description of Artificial Sequence: Synthetic oligonucleotide
  Sense strand starting at position 2930 of SEQ ID NO: 1562653
uagacagucucaggagaga

SEQ ID NO: 1763046 - RNA, 19 nt, Artificial Sequence
  Description of Artificial Sequence: Synthetic oligonucleotide
  Antisense strand to SEQ ID NO: 1763045
ucucuccugagacugucua

SEQ ID NO: 1763047 - RNA, 19 nt, Artificial Sequence
  Description of Artificial Sequence: Synthetic oligonucleotide
  Sense strand starting at position 2986 of SEQ ID NO: 1562653
gauggaugucgaugcagca

SEQ ID NO: 1763048 - RNA, 19 nt, Artificial Sequence
  Description of Artificial Sequence: Synthetic oligonucleotide
  Antisense strand to SEQ ID NO: 1763047
ugcugcaucgacauccauc

SEQ ID NO: 1763049 - RNA, 19 nt, Artificial Sequence
  Description of Artificial Sequence: Synthetic oligonucleotide
  Sense strand starting at position 3019 of SEQ ID NO: 1562653
aagguagagugcugccuuu

SEQ ID NO: 1763050 - RNA, 19 nt, Artificial Sequence
  Description of Artificial Sequence: Synthetic oligonucleotide
  Antisense strand to SEQ ID NO: 1763049
aaaggcagcacucuaccuu

SEQ ID NO: 1763051 - RNA, 19 nt, Artificial Sequence
  Description of Artificial Sequence: Synthetic oligonucleotide
  Sense strand starting at position 3248 of SEQ ID NO: 1562653
aacagcuugcagcgugaua

SEQ ID NO: 1763052 - RNA, 19 nt, Artificial Sequence
  Description of Artificial Sequence: Synthetic oligonucleotide
  Antisense strand to SEQ ID NO: 1763051
uaucacgcugcaagcuguu

SEQ ID NO: 1763053 - RNA, 19 nt, Artificial Sequence
  Description of Artificial Sequence: Synthetic oligonucleotide
  Sense strand starting at position 3250 of SEQ ID NO: 1562653
cagcuugcagcgugauaac

SEQ ID NO: 1763054 - RNA, 19 nt, Artificial Sequence
  Description of Artificial Sequence: Synthetic oligonucleotide
  Antisense strand to SEQ ID NO: 1763053
guuaucacgcugcaagcug

SEQ ID NO: 1763055 - RNA, 19 nt, Artificial Sequence
  Description of Artificial Sequence: Synthetic oligonucleotide
  Sense strand starting at position 3402 of SEQ ID NO: 1562653
acagccaaucccugguaaa

SEQ ID NO: 1763056 - RNA, 19 nt, Artificial Sequence
  Description of Artificial Sequence: Synthetic oligonucleotide
  Antisense strand to SEQ ID NO: 1763055
uuuaccagggauuggcugu

SEQ ID NO: 1763057 - RNA, 19 nt, Artificial Sequence
  Description of Artificial Sequence: Synthetic oligonucleotide
  Sense strand starting at position 3405 of SEQ ID NO: 1562653
gccaaucccugguaaauau

SEQ ID NO: 1763058 - RNA, 19 nt, Artificial Sequence
  Description of Artificial Sequence: Synthetic oligonucleotide
  Antisense strand to SEQ ID NO: 1763057
auauuuaccagggauuggc

SEQ ID NO: 1763059 - RNA, 19 nt, Artificial Sequence
  Description of Artificial Sequence: Synthetic oligonucleotide
  Sense strand starting at position 3543 of SEQ ID NO: 1562653
guggucuuagccugaauau

SEQ ID NO: 1763060 - RNA, 19 nt, Artificial Sequence
  Description of Artificial Sequence: Synthetic oligonucleotide
  Antisense strand to SEQ ID NO: 1763059
auauucaggcuaagaccac

SEQ ID NO: 1763061 - RNA, 19 nt, Artificial Sequence
  Description of Artificial Sequence: Synthetic oligonucleotide
  Sense strand starting at position 3544 of SEQ ID NO: 1562653
uggucuuagccugaauauu

SEQ ID NO: 1763062 - RNA, 19 nt, Artificial Sequence
  Description of Artificial Sequence: Synthetic oligonucleotide
  Antisense strand to SEQ ID NO: 1763061
aauauucaggcuaagacca

SEQ ID NO: 1763063 - RNA, 19 nt, Artificial Sequence
  Description of Artificial Sequence: Synthetic oligonucleotide
  Sense strand starting at position 3568 of SEQ ID NO: 1562653
ucagaauguugaucuguaa

SEQ ID NO: 1763064 - RNA, 19 nt, Artificial Sequence
  Description of Artificial Sequence: Synthetic oligonucleotide
  Antisense strand to SEQ ID NO: 1763063
uuacagaucaacauucuga

SEQ ID NO: 1763065 - RNA, 19 nt, Artificial Sequence
  Description of Artificial Sequence: Synthetic oligonucleotide
  Sense strand starting at position 3571 of SEQ ID NO: 1562653
gaauguugaucuguaaaca

SEQ ID NO: 1763066 - RNA, 19 nt, Artificial Sequence
  Description of Artificial Sequence: Synthetic oligonucleotide
  Antisense strand to SEQ ID NO: 1763065
uguuuacagaucaacauuc

SEQ ID NO: 1763067 - RNA, 19 nt, Artificial Sequence
  Description of Artificial Sequence: Synthetic oligonucleotide
  Sense strand starting at position 3745 of SEQ ID NO: 1562653
uggugauaaucccagcaau

SEQ ID NO: 1763068 - RNA, 19 nt, Artificial Sequence
  Description of Artificial Sequence: Synthetic oligonucleotide
  Antisense strand to SEQ ID NO: 1763067
auugcugggauuaucacca

SEQ ID NO: 1763069 - RNA, 19 nt, Artificial Sequence
  Description of Artificial Sequence: Synthetic oligonucleotide
  Sense strand starting at position 305 of SEQ ID NO: 1562654
caaagauaggcucguuguc

SEQ ID NO: 1763070 - RNA, 19 nt, Artificial Sequence
  Description of Artificial Sequence: Synthetic oligonucleotide
  Antisense strand to SEQ ID NO: 1763069
gacaacgagccuaucuuug

SEQ ID NO: 1763071 - RNA, 19 nt, Artificial Sequence
  Description of Artificial Sequence: Synthetic oligonucleotide
  Sense strand starting at position 314 of SEQ ID NO: 1562654
gcucguugucguugacauc

SEQ ID NO: 1763072 - RNA, 19 nt, Artificial Sequence
  Description of Artificial Sequence: Synthetic oligonucleotide
  Antisense strand to SEQ ID NO: 1763071
gaugucaacgacaacgagc

SEQ ID NO: 1763073 - RNA, 19 nt, Artificial Sequence
  Description of Artificial Sequence: Synthetic oligonucleotide
  Sense strand starting at position 392 of SEQ ID NO: 1562654
gggccuuaaugcucagcga

SEQ ID NO: 1763074 - RNA, 19 nt, Artificial Sequence
  Description of Artificial Sequence: Synthetic oligonucleotide
  Antisense strand to SEQ ID NO: 1763073
ucgcugagcauuaaggccc

SEQ ID NO: 1763075 - RNA, 19 nt, Artificial Sequence
  Description of Artificial Sequence: Synthetic oligonucleotide
  Sense strand starting at position 395 of SEQ ID NO: 1562654
ccuuaaugcucagcgagua

SEQ ID NO: 1763076 - RNA, 19 nt, Artificial Sequence
  Description of Artificial Sequence: Synthetic oligonucleotide
  Antisense strand to SEQ ID NO: 1763075
uacucgcugagcauuaagg

SEQ ID NO: 1763077 - RNA, 19 nt, Artificial Sequence
  Description of Artificial Sequence: Synthetic oligonucleotide
  Sense strand starting at position 396 of SEQ ID NO: 1562654
cuuaaugcucagcgaguau

SEQ ID NO: 1763078 - RNA, 19 nt, Artificial Sequence
  Description of Artificial Sequence: Synthetic oligonucleotide
  Antisense strand to SEQ ID NO: 1763077
auacucgcugagcauuaag

SEQ ID NO: 1763079 - RNA, 19 nt, Artificial Sequence
  Description of Artificial Sequence: Synthetic oligonucleotide
  Sense strand starting at position 407 of SEQ ID NO: 1562654
gcgaguauuucuggacauc

SEQ ID NO: 1763080 - RNA, 19 nt, Artificial Sequence
  Description of Artificial Sequence: Synthetic oligonucleotide
  Antisense strand to SEQ ID NO: 1763079
gauguccagaaauacucgc

SEQ ID NO: 1763081 - RNA, 19 nt, Artificial Sequence
  Description of Artificial Sequence: Synthetic oligonucleotide
  Sense strand starting at position 416 of SEQ ID NO: 1562654
ucuggacauccucgaaauc

SEQ ID NO: 1763082 - RNA, 19 nt, Artificial Sequence
  Description of Artificial Sequence: Synthetic oligonucleotide
  Antisense strand to SEQ ID NO: 1763081
gauuucgaggauguccaga

SEQ ID NO: 1763083 - RNA, 19 nt, Artificial Sequence
  Description of Artificial Sequence: Synthetic oligonucleotide
  Sense strand starting at position 491 of SEQ ID NO: 1562654
ccacguucccgcugaggau

SEQ ID NO: 1763084 - RNA, 19 nt, Artificial Sequence
  Description of Artificial Sequence: Synthetic oligonucleotide
  Antisense strand to SEQ ID NO: 1763083
auccucagcgggaacgugg

SEQ ID NO: 1763085 - RNA, 19 nt, Artificial Sequence
  Description of Artificial Sequence: Synthetic oligonucleotide
  Sense strand starting at position 608 of SEQ ID NO: 1562654
cguaguucugcucgcugaa

SEQ ID NO: 1763086 - RNA, 19 nt, Artificial Sequence
  Description of Artificial Sequence: Synthetic oligonucleotide
  Antisense strand to SEQ ID NO: 1763085
uucagcgagcagaacuacg

SEQ ID NO: 1763087 - RNA, 19 nt, Artificial Sequence
  Description of Artificial Sequence: Synthetic oligonucleotide
  Sense strand starting at position 609 of SEQ ID NO: 1562654
guaguucugcucgcugaac

SEQ ID NO: 1763088 - RNA, 19 nt, Artificial Sequence
  Description of Artificial Sequence: Synthetic oligonucleotide
  Antisense strand to SEQ ID NO: 1763087
guucagcgagcagaacuac

SEQ ID NO: 1763089 - RNA, 19 nt, Artificial Sequence
  Description of Artificial Sequence: Synthetic oligonucleotide
  Sense strand starting at position 610 of SEQ ID NO: 1562654
uaguucugcucgcugaacu

SEQ ID NO: 1763090 - RNA, 19 nt, Artificial Sequence
  Description of Artificial Sequence: Synthetic oligonucleotide
  Antisense strand to SEQ ID NO: 1763089
aguucagcgagcagaacua

SEQ ID NO: 1763091 - RNA, 19 nt, Artificial Sequence
  Description of Artificial Sequence: Synthetic oligonucleotide
  Sense strand starting at position 631 of SEQ ID NO: 1562654
ggguaguugucguucucgu

SEQ ID NO: 1763092 - RNA, 19 nt, Artificial Sequence
  Description of Artificial Sequence: Synthetic oligonucleotide
  Antisense strand to SEQ ID NO: 1763091
acgagaacgacaacuaccc

SEQ ID NO: 1763093 - RNA, 19 nt, Artificial Sequence
  Description of Artificial Sequence: Synthetic oligonucleotide
  Sense strand starting at position 960 of SEQ ID NO: 1562654
guuggugucuuugaccaag

SEQ ID NO: 1763094 - RNA, 19 nt, Artificial Sequence
  Description of Artificial Sequence: Synthetic oligonucleotide
  Antisense strand to SEQ ID NO: 1763093
cuuggucaaagacaccaac

SEQ ID NO: 1763095 - RNA, 19 nt, Artificial Sequence
  Description of Artificial Sequence: Synthetic oligonucleotide
  Sense strand starting at position 962 of SEQ ID NO: 1562654
uggugucuuugaccaagac

SEQ ID NO: 1763096 - RNA, 19 nt, Artificial Sequence
  Description of Artificial Sequence: Synthetic oligonucleotide
  Antisense strand to SEQ ID NO: 1763095
gucuuggucaaagacacca

SEQ ID NO: 1763097 - RNA, 19 nt, Artificial Sequence
  Description of Artificial Sequence: Synthetic oligonucleotide
  Sense strand starting at position 963 of SEQ ID NO: 1562654
ggugucuuugaccaagaca

SEQ ID NO: 1763098 - RNA, 19 nt, Artificial Sequence
  Description of Artificial Sequence: Synthetic oligonucleotide
  Antisense strand to SEQ ID NO: 1763097
ugucuuggucaaagacacc

SEQ ID NO: 1763099 - RNA, 19 nt, Artificial Sequence
  Description of Artificial Sequence: Synthetic oligonucleotide
  Sense strand starting at position 971 of SEQ ID NO: 1562654
ugaccaagacagugaugua

SEQ ID NO: 1763100 - RNA, 19 nt, Artificial Sequence
  Description of Artificial Sequence: Synthetic oligonucleotide
  Antisense strand to SEQ ID NO: 1763099
uacaucacugucuugguca

SEQ ID NO: 1763101 - RNA, 19 nt, Artificial Sequence
  Description of Artificial Sequence: Synthetic oligonucleotide
  Sense strand starting at position 1100 of SEQ ID NO: 1562654
cagagucgauucggaagua

SEQ ID NO: 1763102 - RNA, 19 nt, Artificial Sequence
  Description of Artificial Sequence: Synthetic oligonucleotide
  Antisense strand to SEQ ID NO: 1763101
uacuuccgaaucgacucug

SEQ ID NO: 1763103 - RNA, 19 nt, Artificial Sequence
  Description of Artificial Sequence: Synthetic oligonucleotide
  Sense strand starting at position 1222 of SEQ ID NO: 1562654
gccgguucguucucaaaca

SEQ ID NO: 1763104 - RNA, 19 nt, Artificial Sequence
  Description of Artificial Sequence: Synthetic oligonucleotide
  Antisense strand to SEQ ID NO: 1763103
uguuugagaacgaaccggc

SEQ ID NO: 1763105 - RNA, 19 nt, Artificial Sequence
  Description of Artificial Sequence: Synthetic oligonucleotide
  Sense strand starting at position 1223 of SEQ ID NO: 1562654
ccgguucguucucaaacaa

SEQ ID NO: 1763106 - RNA, 19 nt, Artificial Sequence
  Description of Artificial Sequence: Synthetic oligonucleotide
  Antisense strand to SEQ ID NO: 1763105
uuguuugagaacgaaccgg

SEQ ID NO: 1763107 - RNA, 19 nt, Artificial Sequence
  Description of Artificial Sequence: Synthetic oligonucleotide
  Sense strand starting at position 2193 of SEQ ID NO: 1562654
ucgagagcacuuugcgaaa

SEQ ID NO: 1763108 - RNA, 19 nt, Artificial Sequence
  Description of Artificial Sequence: Synthetic oligonucleotide
  Antisense strand to SEQ ID NO: 1763107
uuucgcaaagugcucucga

SEQ ID NO: 1763109 - RNA, 19 nt, Artificial Sequence
  Description of Artificial Sequence: Synthetic oligonucleotide
  Sense strand starting at position 2195 of SEQ ID NO: 1562654
gagagcacuuugcgaaagu

SEQ ID NO: 1763110 - RNA, 19 nt, Artificial Sequence
  Description of Artificial Sequence: Synthetic oligonucleotide
  Antisense strand to SEQ ID NO: 1763109
acuuucgcaaagugcucuc

SEQ ID NO: 1763111 - RNA, 19 nt, Artificial Sequence
  Description of Artificial Sequence: Synthetic oligonucleotide
  Sense strand starting at position 2196 of SEQ ID NO: 1562654
agagcacuuugcgaaaguu

SEQ ID NO: 1763112 - RNA, 19 nt, Artificial Sequence
  Description of Artificial Sequence: Synthetic oligonucleotide
  Antisense strand to SEQ ID NO: 1763111
aacuuucgcaaagugcucu

SEQ ID NO: 1763113 - RNA, 19 nt, Artificial Sequence
  Description of Artificial Sequence: Synthetic oligonucleotide
  Sense strand starting at position 2204 of SEQ ID NO: 1562654
uugcgaaaguuugcgaagu

SEQ ID NO: 1763114 - RNA, 19 nt, Artificial Sequence
  Description of Artificial Sequence: Synthetic oligonucleotide
  Antisense strand to SEQ ID NO: 1763113
acuucgcaaacuuucgcaa

SEQ ID NO: 1763115 - RNA, 19 nt, Artificial Sequence
  Description of Artificial Sequence: Synthetic oligonucleotide
  Sense strand starting at position 2205 of SEQ ID NO: 1562654
ugcgaaaguuugcgaaguu

SEQ ID NO: 1763116 - RNA, 19 nt, Artificial Sequence
  Description of Artificial Sequence: Synthetic oligonucleotide
  Antisense strand to SEQ ID NO: 1763115
aacuucgcaaacuuucgca

SEQ ID NO: 1763117 - RNA, 19 nt, Artificial Sequence
  Description of Artificial Sequence: Synthetic oligonucleotide
  Sense strand starting at position 2206 of SEQ ID NO: 1562654
gcgaaaguuugcgaaguug

SEQ ID NO: 1763118 - RNA, 19 nt, Artificial Sequence
  Description of Artificial Sequence: Synthetic oligonucleotide
  Antisense strand to SEQ ID NO: 1763117
caacuucgcaaacuuucgc

SEQ ID NO: 1763119 - RNA, 19 nt, Artificial Sequence
  Description of Artificial Sequence: Synthetic oligonucleotide
  Sense strand starting at position 2214 of SEQ ID NO: 1562654
uugcgaaguugguuucaag

SEQ ID NO: 1763120 - RNA, 19 nt, Artificial Sequence
  Description of Artificial Sequence: Synthetic oligonucleotide
  Antisense strand to SEQ ID NO: 1763119
cuugaaaccaacuucgcaa

SEQ ID NO: 1763121 - RNA, 19 nt, Artificial Sequence
  Description of Artificial Sequence: Synthetic oligonucleotide
  Sense strand starting at position 2217 of SEQ ID NO: 1562654
cgaaguugguuucaagaug

SEQ ID NO: 1763122 - RNA, 19 nt, Artificial Sequence
  Description of Artificial Sequence: Synthetic oligonucleotide
  Antisense strand to SEQ ID NO: 1763121
caucuugaaaccaacuucg

SEQ ID NO: 1763123 - RNA, 19 nt, Artificial Sequence
  Description of Artificial Sequence: Synthetic oligonucleotide
  Sense strand starting at position 3002 of SEQ ID NO: 1562654
gcgucccacuugguuuaaa

SEQ ID NO: 1763124 - RNA, 19 nt, Artificial Sequence
  Description of Artificial Sequence: Synthetic oligonucleotide
  Antisense strand to SEQ ID NO: 1763123
uuuaaaccaagugggacgc

SEQ ID NO: 1763125 - RNA, 19 nt, Artificial Sequence
  Description of Artificial Sequence: Synthetic oligonucleotide
  Sense strand starting at position 3012 of SEQ ID NO: 1562654
ugguuuaaagcgcaacuuu

SEQ ID NO: 1763126 - RNA, 19 nt, Artificial Sequence
  Description of Artificial Sequence: Synthetic oligonucleotide
  Antisense strand to SEQ ID NO: 1763125
aaaguugcgcuuuaaacca

SEQ ID NO: 1763127 - RNA, 19 nt, Artificial Sequence
  Description of Artificial Sequence: Synthetic oligonucleotide
  Sense strand starting at position 3234 of SEQ ID NO: 1562654
gggauuuagagcugugcca

SEQ ID NO: 1763128 - RNA, 19 nt, Artificial Sequence
  Description of Artificial Sequence: Synthetic oligonucleotide
  Antisense strand to SEQ ID NO: 1763127
uggcacagcucuaaauccc

SEQ ID NO: 1763129 - RNA, 19 nt, Artificial Sequence
  Description of Artificial Sequence: Synthetic oligonucleotide
  Sense strand starting at position 3236 of SEQ ID NO: 1562654
gauuuagagcugugccaca

SEQ ID NO: 1763130 - RNA, 19 nt, Artificial Sequence
  Description of Artificial Sequence: Synthetic oligonucleotide
  Antisense strand to SEQ ID NO: 1763129
uguggcacagcucuaaauc

SEQ ID NO: 1763131 - RNA, 19 nt, Artificial Sequence
  Description of Artificial Sequence: Synthetic oligonucleotide
  Sense strand starting at position 3703 of SEQ ID NO: 1562654
agccaaaucucugagcuga

SEQ ID NO: 1763132 - RNA, 19 nt, Artificial Sequence
  Description of Artificial Sequence: Synthetic oligonucleotide
  Antisense strand to SEQ ID NO: 1763131
ucagcucagagauuuggcu

SEQ ID NO: 1763133 - RNA, 19 nt, Artificial Sequence
  Description of Artificial Sequence: Synthetic oligonucleotide
  Sense strand starting at position 3790 of SEQ ID NO: 1562654
gagcgaugugucugugugu

SEQ ID NO: 1763134 - RNA, 19 nt, Artificial Sequence
  Description of Artificial Sequence: Synthetic oligonucleotide
  Antisense strand to SEQ ID NO: 1763133
acacacagacacaucgcuc

SEQ ID NO: 1763135 - RNA, 19 nt, Artificial Sequence
  Description of Artificial Sequence: Synthetic oligonucleotide
  Sense strand starting at position 3849 of SEQ ID NO: 1562654
gaaacagugucuuugugcu

SEQ ID NO: 1763136 - RNA, 19 nt, Artificial Sequence
  Description of Artificial Sequence: Synthetic oligonucleotide
  Antisense strand to SEQ ID NO: 1763135
agcacaaagacacuguuuc

SEQ ID NO: 1763137 - RNA, 19 nt, Artificial Sequence
  Description of Artificial Sequence: Synthetic oligonucleotide
  Sense strand starting at position 3907 of SEQ ID NO: 1562654
uugaacacguuauauugau

SEQ ID NO: 1763138 - RNA, 19 nt, Artificial Sequence
  Description of Artificial Sequence: Synthetic oligonucleotide
  Antisense strand to SEQ ID NO: 1763137
aucaauauaacguguucaa

SEQ ID NO: 1763139 - RNA, 19 nt, Artificial Sequence
  Description of Artificial Sequence: Synthetic oligonucleotide
  Sense strand starting at position 3960 of SEQ ID NO: 1562654
cgagguuuccacuggagag

SEQ ID NO: 1763140 - RNA, 19 nt, Artificial Sequence
  Description of Artificial Sequence: Synthetic oligonucleotide
  Antisense strand to SEQ ID NO: 1763139
cucuccaguggaaaccucg

SEQ ID NO: 1763141 - RNA, 19 nt, Artificial Sequence
  Description of Artificial Sequence: Synthetic oligonucleotide
  Sense strand starting at position 3974 of SEQ ID NO: 1562654
gagaguccuguugggaaau

SEQ ID NO: 1763142 - RNA, 19 nt, Artificial Sequence
  Description of Artificial Sequence: Synthetic oligonucleotide
  Antisense strand to SEQ ID NO: 1763141
auuucccaacaggacucuc

SEQ ID NO: 1763143 - RNA, 19 nt, Artificial Sequence
  Description of Artificial Sequence: Synthetic oligonucleotide
  Sense strand starting at position 3975 of SEQ ID NO: 1562654
agaguccuguugggaaaug

SEQ ID NO: 1763144 - RNA, 19 nt, Artificial Sequence
  Description of Artificial Sequence: Synthetic oligonucleotide
  Antisense strand to SEQ ID NO: 1763143
cauuucccaacaggacucu

SEQ ID NO: 1763145 - RNA, 19 nt, Artificial Sequence
  Description of Artificial Sequence: Synthetic oligonucleotide
  Sense strand starting at position 3976 of SEQ ID NO: 1562654
gaguccuguugggaaaugu

SEQ ID NO: 1763146 - RNA, 19 nt, Artificial Sequence
  Description of Artificial Sequence: Synthetic oligonucleotide
  Antisense strand to SEQ ID NO: 1763145
acauuucccaacaggacuc

SEQ ID NO: 1763147 - RNA, 19 nt, Artificial Sequence
  Description of Artificial Sequence: Synthetic oligonucleotide
  Sense strand starting at position 232 of SEQ ID NO: 1562655
uugcuucucugauccuaga

SEQ ID NO: 1763148 - RNA, 19 nt, Artificial Sequence
  Description of Artificial Sequence: Synthetic oligonucleotide
  Antisense strand to SEQ ID NO: 1763147
ucuaggaucagagaagcaa

SEQ ID NO: 1763149 - RNA, 19 nt, Artificial Sequence
  Description of Artificial Sequence: Synthetic oligonucleotide
  Sense strand starting at position 269 of SEQ ID NO: 1562655
gggugacuuucucuggaga

SEQ ID NO: 1763150 - RNA, 19 nt, Artificial Sequence
  Description of Artificial Sequence: Synthetic oligonucleotide
  Antisense strand to SEQ ID NO: 1763149
ucuccagagaaagucaccc

SEQ ID NO: 1763151 - RNA, 19 nt, Artificial Sequence
  Description of Artificial Sequence: Synthetic oligonucleotide
  Sense strand starting at position 270 of SEQ ID NO: 1562655
ggugacuuucucuggagaa

SEQ ID NO: 1763152 - RNA, 19 nt, Artificial Sequence
  Description of Artificial Sequence: Synthetic oligonucleotide
  Antisense strand to SEQ ID NO: 1763151
uucuccagagaaagucacc

SEQ ID NO: 1763153 - RNA, 19 nt, Artificial Sequence
  Description of Artificial Sequence: Synthetic oligonucleotide
  Sense strand starting at position 271 of SEQ ID NO: 1562655
gugacuuucucuggagaaa

SEQ ID NO: 1763154 - RNA, 19 nt, Artificial Sequence
  Description of Artificial Sequence: Synthetic oligonucleotide
  Antisense strand to SEQ ID NO: 1763153
uuucuccagagaaagucac

SEQ ID NO: 1763155 - RNA, 19 nt, Artificial Sequence
  Description of Artificial Sequence: Synthetic oligonucleotide
  Sense strand starting at position 767 of SEQ ID NO: 1562655
accuguauuugcugugaag

SEQ ID NO: 1763156 - RNA, 19 nt, Artificial Sequence
  Description of Artificial Sequence: Synthetic oligonucleotide
  Antisense strand to SEQ ID NO: 1763155
cuucacagcaaauacaggu

SEQ ID NO: 1763157 - RNA, 19 nt, Artificial Sequence
  Description of Artificial Sequence: Synthetic oligonucleotide
  Sense strand starting at position 769 of SEQ ID NO: 1562655
cuguauuugcugugaagau

SEQ ID NO: 1763158 - RNA, 19 nt, Artificial Sequence
  Description of Artificial Sequence: Synthetic oligonucleotide
  Antisense strand to SEQ ID NO: 1763157
aucuucacagcaaauacag

SEQ ID NO: 1763159 - RNA, 19 nt, Artificial Sequence
  Description of Artificial Sequence: Synthetic oligonucleotide
  Sense strand starting at position 770 of SEQ ID NO: 1562655
uguauuugcugugaagauu

SEQ ID NO: 1763160 - RNA, 19 nt, Artificial Sequence
  Description of Artificial Sequence: Synthetic oligonucleotide
  Antisense strand to SEQ ID NO: 1763159
aaucuucacagcaaauaca

SEQ ID NO: 1763161 - RNA, 19 nt, Artificial Sequence
  Description of Artificial Sequence: Synthetic oligonucleotide
  Sense strand starting at position 904 of SEQ ID NO: 1562655
ccucauagcgaccguuuaa

SEQ ID NO: 1763162 - RNA, 19 nt, Artificial Sequence
  Description of Artificial Sequence: Synthetic oligonucleotide
  Antisense strand to SEQ ID NO: 1763161
uuaaacggucgcuaugagg

SEQ ID NO: 1763163 - RNA, 19 nt, Artificial Sequence
  Description of Artificial Sequence: Synthetic oligonucleotide
  Sense strand starting at position 1042 of SEQ ID NO: 1562655
ucagauuacuccugucuga

SEQ ID NO: 1763164 - RNA, 19 nt, Artificial Sequence
  Description of Artificial Sequence: Synthetic oligonucleotide
  Antisense strand to SEQ ID NO: 1763163
ucagacaggaguaaucuga

SEQ ID NO: 1763165 - RNA, 19 nt, Artificial Sequence
  Description of Artificial Sequence: Synthetic oligonucleotide
  Sense strand starting at position 1057 of SEQ ID NO: 1562655
cugauucccucugccagaa

SEQ ID NO: 1763166 - RNA, 19 nt, Artificial Sequence
  Description of Artificial Sequence: Synthetic oligonucleotide
  Antisense strand to SEQ ID NO: 1763165
uucuggcagagggaaucag

SEQ ID NO: 1763167 - RNA, 19 nt, Artificial Sequence
  Description of Artificial Sequence: Synthetic oligonucleotide
  Sense strand starting at position 1216 of SEQ ID NO: 1562655
ccgaaucccucuggaguga

SEQ ID NO: 1763168 - RNA, 19 nt, Artificial Sequence
  Description of Artificial Sequence: Synthetic oligonucleotide
  Antisense strand to SEQ ID NO: 1763167
ucacuccagagggauucgg

SEQ ID NO: 1763169 - RNA, 19 nt, Artificial Sequence
  Description of Artificial Sequence: Synthetic oligonucleotide
  Sense strand starting at position 1466 of SEQ ID NO: 1562655
gaggacauuucccgagaag

SEQ ID NO: 1763170 - RNA, 19 nt, Artificial Sequence
  Description of Artificial Sequence: Synthetic oligonucleotide
  Antisense strand to SEQ ID NO: 1763169
cuucucgggaaauguccuc

SEQ ID NO: 1763171 - RNA, 19 nt, Artificial Sequence
  Description of Artificial Sequence: Synthetic oligonucleotide
  Sense strand starting at position 2174 of SEQ ID NO: 1562655
uuuagugauuccuuuguuc

SEQ ID NO: 1763172 - RNA, 19 nt, Artificial Sequence
  Description of Artificial Sequence: Synthetic oligonucleotide
  Antisense strand to SEQ ID NO: 1763171
gaacaaaggaaucacuaaa

SEQ ID NO: 1763173 - RNA, 19 nt, Artificial Sequence
  Description of Artificial Sequence: Synthetic oligonucleotide
  Sense strand starting at position 2480 of SEQ ID NO: 1562655
caaagugagugcugagauu

SEQ ID NO: 1763174 - RNA, 19 nt, Artificial Sequence
  Description of Artificial Sequence: Synthetic oligonucleotide
  Antisense strand to SEQ ID NO: 1763173
aaucucagcacucacuuug

SEQ ID NO: 1763175 - RNA, 19 nt, Artificial Sequence
  Description of Artificial Sequence: Synthetic oligonucleotide
  Sense strand starting at position 2570 of SEQ ID NO: 1562655
ggacuauagugacacgauc

SEQ ID NO: 1763176 - RNA, 19 nt, Artificial Sequence
  Description of Artificial Sequence: Synthetic oligonucleotide
  Antisense strand to SEQ ID NO: 1763175
gaucgugucacuauagucc

SEQ ID NO: 1763177 - RNA, 19 nt, Artificial Sequence
  Description of Artificial Sequence: Synthetic oligonucleotide
  Sense strand starting at position 2804 of SEQ ID NO: 1562655
uacagugagugguaagcau

SEQ ID NO: 1763178 - RNA, 19 nt, Artificial Sequence
  Description of Artificial Sequence: Synthetic oligonucleotide
  Antisense strand to SEQ ID NO: 1763177
augcuuaccacucacugua

SEQ ID NO: 1763179 - RNA, 19 nt, Artificial Sequence
  Description of Artificial Sequence: Synthetic oligonucleotide
  Sense strand starting at position 2827 of SEQ ID NO: 1562655
uucuuuguccaaugggaga

SEQ ID NO: 1763180 - RNA, 19 nt, Artificial Sequence
  Description of Artificial Sequence: Synthetic oligonucleotide
  Antisense strand to SEQ ID NO: 1763179
ucucccauuggacaaagaa

SEQ ID NO: 1763181 - RNA, 19 nt, Artificial Sequence
  Description of Artificial Sequence: Synthetic oligonucleotide
  Sense strand starting at position 2840 of SEQ ID NO: 1562655
gggagacuuuaccucaucu

SEQ ID NO: 1763182 - RNA, 19 nt, Artificial Sequence
  Description of Artificial Sequence: Synthetic oligonucleotide
  Antisense strand to SEQ ID NO: 1763181
agaugagguaaagucuccc

SEQ ID NO: 1763183 - RNA, 19 nt, Artificial Sequence
  Description of Artificial Sequence: Synthetic oligonucleotide
  Sense strand starting at position 2861 of SEQ ID NO: 1562655
caagguuccuugcugcaaa

SEQ ID NO: 1763184 - RNA, 19 nt, Artificial Sequence
  Description of Artificial Sequence: Synthetic oligonucleotide
  Antisense strand to SEQ ID NO: 1763183
uuugcagcaaggaaccuug

SEQ ID NO: 1763185 - RNA, 19 nt, Artificial Sequence
  Description of Artificial Sequence: Synthetic oligonucleotide
  Sense strand starting at position 2904 of SEQ ID NO: 1562655
gggucuugcuuucuugaca

SEQ ID NO: 1763186 - RNA, 19 nt, Artificial Sequence
  Description of Artificial Sequence: Synthetic oligonucleotide
  Antisense strand to SEQ ID NO: 1763185
ugucaagaaagcaagaccc

SEQ ID NO: 1763187 - RNA, 19 nt, Artificial Sequence
  Description of Artificial Sequence: Synthetic oligonucleotide
  Sense strand starting at position 2905 of SEQ ID NO: 1562655
ggucuugcuuucuugacau

SEQ ID NO: 1763188 - RNA, 19 nt, Artificial Sequence
  Description of Artificial Sequence: Synthetic oligonucleotide
  Antisense strand to SEQ ID NO: 1763187
augucaagaaagcaagacc

SEQ ID NO: 1763189 - RNA, 19 nt, Artificial Sequence
  Description of Artificial Sequence: Synthetic oligonucleotide
  Sense strand starting at position 2967 of SEQ ID NO: 1562655
ugguucugccaacaguuau

SEQ ID NO: 1763190 - RNA, 19 nt, Artificial Sequence
  Description of Artificial Sequence: Synthetic oligonucleotide
  Antisense strand to SEQ ID NO: 1763189
auaacuguuggcagaacca

SEQ ID NO: 1763191 - RNA, 19 nt, Artificial Sequence
  Description of Artificial Sequence: Synthetic oligonucleotide
  Sense strand starting at position 3034 of SEQ ID NO: 1562655
guuagagacuuugucacuu

SEQ ID NO: 1763192 - RNA, 19 nt, Artificial Sequence
  Description of Artificial Sequence: Synthetic oligonucleotide
  Antisense strand to SEQ ID NO: 1763191
aagugacaaagucucuaac

SEQ ID NO: 1763193 - RNA, 19 nt, Artificial Sequence
  Description of Artificial Sequence: Synthetic oligonucleotide
  Sense strand starting at position 3038 of SEQ ID NO: 1562655
gagacuuugucacuuugua

SEQ ID NO: 1763194 - RNA, 19 nt, Artificial Sequence
  Description of Artificial Sequence: Synthetic oligonucleotide
  Antisense strand to SEQ ID NO: 1763193
uacaaagugacaaagucuc

SEQ ID NO: 1763195 - RNA, 19 nt, Artificial Sequence
  Description of Artificial Sequence: Synthetic oligonucleotide
  Sense strand starting at position 3052 of SEQ ID NO: 1562655
uuguauguccagcacucua

SEQ ID NO: 1763196 - RNA, 19 nt, Artificial Sequence
  Description of Artificial Sequence: Synthetic oligonucleotide
  Antisense strand to SEQ ID NO: 1763195
uagagugcuggacauacaa

SEQ ID NO: 1763197 - RNA, 19 nt, Artificial Sequence
  Description of Artificial Sequence: Synthetic oligonucleotide
  Sense strand starting at position 3080 of SEQ ID NO: 1562655
gguacaucguaguuaauaa

SEQ ID NO: 1763198 - RNA, 19 nt, Artificial Sequence
  Description of Artificial Sequence: Synthetic oligonucleotide
  Antisense strand to SEQ ID NO: 1763197
uuauuaacuacgauguacc

SEQ ID NO: 1763199 - RNA, 19 nt, Artificial Sequence
  Description of Artificial Sequence: Synthetic oligonucleotide
  Sense strand starting at position 3201 of SEQ ID NO: 1562655
ucaguugaaucagacauua

SEQ ID NO: 1763200 - RNA, 19 nt, Artificial Sequence
  Description of Artificial Sequence: Synthetic oligonucleotide
  Antisense strand to SEQ ID NO: 1763199
uaaugucugauucaacuga

SEQ ID NO: 1763201 - RNA, 19 nt, Artificial Sequence
  Description of Artificial Sequence: Synthetic oligonucleotide
  Sense strand starting at position 3221 of SEQ ID NO: 1562655
ugauuaacuuaguuugaug

SEQ ID NO: 1763202 - RNA, 19 nt, Artificial Sequence
  Description of Artificial Sequence: Synthetic oligonucleotide
  Antisense strand to SEQ ID NO: 1763201
caucaaacuaaguuaauca

SEQ ID NO: 1763203 - RNA, 19 nt, Artificial Sequence
  Description of Artificial Sequence: Synthetic oligonucleotide
  Sense strand starting at position 3247 of SEQ ID NO: 1562655
gauagacaaugauaacagu

SEQ ID NO: 1763204 - RNA, 19 nt, Artificial Sequence
  Description of Artificial Sequence: Synthetic oligonucleotide
  Antisense strand to SEQ ID NO: 1763203
acuguuaucauugucuauc

SEQ ID NO: 1763205 - RNA, 19 nt, Artificial Sequence
  Description of Artificial Sequence: Synthetic oligonucleotide
  Sense strand starting at position 3253 of SEQ ID NO: 1562655
caaugauaacaguguguuc

SEQ ID NO: 1763206 - RNA, 19 nt, Artificial Sequence
  Description of Artificial Sequence: Synthetic oligonucleotide
  Antisense strand to SEQ ID NO: 1763205
gaacacacuguuaucauug

SEQ ID NO: 1763207 - RNA, 19 nt, Artificial Sequence
  Description of Artificial Sequence: Synthetic oligonucleotide
  Sense strand starting at position 3264 of SEQ ID NO: 1562655
guguguucauuguuguaau

SEQ ID NO: 1763208 - RNA, 19 nt, Artificial Sequence
  Description of Artificial Sequence: Synthetic oligonucleotide
  Antisense strand to SEQ ID NO: 1763207
auuacaacaaugaacacac

SEQ ID NO: 1763209 - RNA, 19 nt, Artificial Sequence
  Description of Artificial Sequence: Synthetic oligonucleotide
  Sense strand starting at position 3274 of SEQ ID NO: 1562655
uguuguaauaacugggaga

SEQ ID NO: 1763210 - RNA, 19 nt, Artificial Sequence
  Description of Artificial Sequence: Synthetic oligonucleotide
  Antisense strand to SEQ ID NO: 1763209
ucucccaguuauuacaaca

SEQ ID NO: 1763211 - RNA, 19 nt, Artificial Sequence
  Description of Artificial Sequence: Synthetic oligonucleotide
  Sense strand starting at position 3275 of SEQ ID NO: 1562655
guuguaauaacugggagag

SEQ ID NO: 1763212 - RNA, 19 nt, Artificial Sequence
  Description of Artificial Sequence: Synthetic oligonucleotide
  Antisense strand to SEQ ID NO: 1763211
cucucccaguuauuacaac

SEQ ID NO: 1763213 - RNA, 19 nt, Artificial Sequence
  Description of Artificial Sequence: Synthetic oligonucleotide
  Sense strand starting at position 3277 of SEQ ID NO: 1562655
uguaauaacugggagagca

SEQ ID NO: 1763214 - RNA, 19 nt, Artificial Sequence
  Description of Artificial Sequence: Synthetic oligonucleotide
  Antisense strand to SEQ ID NO: 1763213
ugcucucccaguuauuaca

SEQ ID NO: 1763215 - RNA, 19 nt, Artificial Sequence
  Description of Artificial Sequence: Synthetic oligonucleotide
  Sense strand starting at position 3339 of SEQ ID NO: 1562655
aacugugucuugcucagaa

SEQ ID NO: 1763216 - RNA, 19 nt, Artificial Sequence
  Description of Artificial Sequence: Synthetic oligonucleotide
  Antisense strand to SEQ ID NO: 1763215
uucugagcaagacacaguu

SEQ ID NO: 1763217 - RNA, 19 nt, Artificial Sequence
  Description of Artificial Sequence: Synthetic oligonucleotide
  Sense strand starting at position 3341 of SEQ ID NO: 1562655
cugugucuugcucagaaag

SEQ ID NO: 1763218 - RNA, 19 nt, Artificial Sequence
  Description of Artificial Sequence: Synthetic oligonucleotide
  Antisense strand to SEQ ID NO: 1763217
cuuucugagcaagacacag

SEQ ID NO: 1763219 - RNA, 19 nt, Artificial Sequence
  Description of Artificial Sequence: Synthetic oligonucleotide
  Sense strand starting at position 3343 of SEQ ID NO: 1562655
gugucuugcucagaaagau

SEQ ID NO: 1763220 - RNA, 19 nt, Artificial Sequence
  Description of Artificial Sequence: Synthetic oligonucleotide
  Antisense strand to SEQ ID NO: 1763219
aucuuucugagcaagacac

SEQ ID NO: 1763221 - RNA, 19 nt, Artificial Sequence
  Description of Artificial Sequence: Synthetic oligonucleotide
  Sense strand starting at position 3352 of SEQ ID NO: 1562655
ucagaaagaucaggacgua

SEQ ID NO: 1763222 - RNA, 19 nt, Artificial Sequence
  Description of Artificial Sequence: Synthetic oligonucleotide
  Antisense strand to SEQ ID NO: 1763221
uacguccugaucuuucuga

SEQ ID NO: 1763223 - RNA, 19 nt, Artificial Sequence
  Description of Artificial Sequence: Synthetic oligonucleotide
  Sense strand starting at position 3461 of SEQ ID NO: 1562655
aguaguaggcacuaugaca

SEQ ID NO: 1763224 - RNA, 19 nt, Artificial Sequence
  Description of Artificial Sequence: Synthetic oligonucleotide
  Antisense strand to SEQ ID NO: 1763223
ugucauagugccuacuacu

SEQ ID NO: 1763225 - RNA, 19 nt, Artificial Sequence
  Description of Artificial Sequence: Synthetic oligonucleotide
  Sense strand starting at position 3744 of SEQ ID NO: 1562655
cccugucuguacuacuaaa

SEQ ID NO: 1763226 - RNA, 19 nt, Artificial Sequence
  Description of Artificial Sequence: Synthetic oligonucleotide
  Antisense strand to SEQ ID NO: 1763225
uuuaguaguacagacaggg

SEQ ID NO: 1763227 - RNA, 19 nt, Artificial Sequence
  Description of Artificial Sequence: Synthetic oligonucleotide
  Sense strand starting at position 457 of SEQ ID NO: 1562656
acucuuaauuguucugagu

SEQ ID NO: 1763228 - RNA, 19 nt, Artificial Sequence
  Description of Artificial Sequence: Synthetic oligonucleotide
  Antisense strand to SEQ ID NO: 1763227
acucagaacaauuaagagu

SEQ ID NO: 1763229 - RNA, 19 nt, Artificial Sequence
  Description of Artificial Sequence: Synthetic oligonucleotide
  Sense strand starting at position 769 of SEQ ID NO: 1562656
cucaacagagaauguuuau

SEQ ID NO: 1763230 - RNA, 19 nt, Artificial Sequence
  Description of Artificial Sequence: Synthetic oligonucleotide
  Antisense strand to SEQ ID NO: 1763229
auaaacauucucuguugag

SEQ ID NO: 1763231 - RNA, 19 nt, Artificial Sequence
  Description of Artificial Sequence: Synthetic oligonucleotide
  Sense strand starting at position 1290 of SEQ ID NO: 1562656
agagcugagcucugaauca

SEQ ID NO: 1763232 - RNA, 19 nt, Artificial Sequence
  Description of Artificial Sequence: Synthetic oligonucleotide
  Antisense strand to SEQ ID NO: 1763231
ugauucagagcucagcucu

SEQ ID NO: 1763233 - RNA, 19 nt, Artificial Sequence
  Description of Artificial Sequence: Synthetic oligonucleotide
  Sense strand starting at position 1501 of SEQ ID NO: 1562656
acagauguucuagacacgu

SEQ ID NO: 1763234 - RNA, 19 nt, Artificial Sequence
  Description of Artificial Sequence: Synthetic oligonucleotide
  Antisense strand to SEQ ID NO: 1763233
acgugucuagaacaucugu

SEQ ID NO: 1763235 - RNA, 19 nt, Artificial Sequence
  Description of Artificial Sequence: Synthetic oligonucleotide
  Sense strand starting at position 1693 of SEQ ID NO: 1562656
ccagaccugucucucuauu

SEQ ID NO: 1763236 - RNA, 19 nt, Artificial Sequence
  Description of Artificial Sequence: Synthetic oligonucleotide
  Antisense strand to SEQ ID NO: 1763235
aauagagagacaggucugg

SEQ ID NO: 1763237 - RNA, 19 nt, Artificial Sequence
  Description of Artificial Sequence: Synthetic oligonucleotide
  Sense strand starting at position 1705 of SEQ ID NO: 1562656
cucuauuucugcccuaguu

SEQ ID NO: 1763238 - RNA, 19 nt, Artificial Sequence
  Description of Artificial Sequence: Synthetic oligonucleotide
  Antisense strand to SEQ ID NO: 1763237
aacuagggcagaaauagag

SEQ ID NO: 1763239 - RNA, 19 nt, Artificial Sequence
  Description of Artificial Sequence: Synthetic oligonucleotide
  Sense strand starting at position 1967 of SEQ ID NO: 1562656
uccuccuuccacgagguau

SEQ ID NO: 1763240 - RNA, 19 nt, Artificial Sequence
  Description of Artificial Sequence: Synthetic oligonucleotide
  Antisense strand to SEQ ID NO: 1763239
auaccucguggaaggagga

SEQ ID NO: 1763241 - RNA, 19 nt, Artificial Sequence
  Description of Artificial Sequence: Synthetic oligonucleotide
  Sense strand starting at position 2138 of SEQ ID NO: 1562656
uuguuuccuugacuagaac

SEQ ID NO: 1763242 - RNA, 19 nt, Artificial Sequence
  Description of Artificial Sequence: Synthetic oligonucleotide
  Antisense strand to SEQ ID NO: 1763241
guucuagucaaggaaacaa

SEQ ID NO: 1763243 - RNA, 19 nt, Artificial Sequence
  Description of Artificial Sequence: Synthetic oligonucleotide
  Sense strand starting at position 2139 of SEQ ID NO: 1562656
uguuuccuugacuagaaca

SEQ ID NO: 1763244 - RNA, 19 nt, Artificial Sequence
  Description of Artificial Sequence: Synthetic oligonucleotide
  Antisense strand to SEQ ID NO: 1763243
uguucuagucaaggaaaca

SEQ ID NO: 1763245 - RNA, 19 nt, Artificial Sequence
  Description of Artificial Sequence: Synthetic oligonucleotide
  Sense strand starting at position 2512 of SEQ ID NO: 1562656
aacaguggucgguaccaca

SEQ ID NO: 1763246 - RNA, 19 nt, Artificial Sequence
  Description of Artificial Sequence: Synthetic oligonucleotide
  Antisense strand to SEQ ID NO: 1763245
ugugguaccgaccacuguu

SEQ ID NO: 1763247 - RNA, 19 nt, Artificial Sequence
  Description of Artificial Sequence: Synthetic oligonucleotide
  Sense strand starting at position 2573 of SEQ ID NO: 1562656
uggccuuuguuccugaaau

SEQ ID NO: 1763248 - RNA, 19 nt, Artificial Sequence
  Description of Artificial Sequence: Synthetic oligonucleotide
  Antisense strand to SEQ ID NO: 1763247
auuucaggaacaaaggcca

SEQ ID NO: 1763249 - RNA, 19 nt, Artificial Sequence
  Description of Artificial Sequence: Synthetic oligonucleotide
  Sense strand starting at position 2575 of SEQ ID NO: 1562656
gccuuuguuccugaaaucu

SEQ ID NO: 1763250 - RNA, 19 nt, Artificial Sequence
  Description of Artificial Sequence: Synthetic oligonucleotide
  Antisense strand to SEQ ID NO: 1763249
agauuucaggaacaaaggc

SEQ ID NO: 1763251 - RNA, 19 nt, Artificial Sequence
  Description of Artificial Sequence: Synthetic oligonucleotide
  Sense strand starting at position 2586 of SEQ ID NO: 1562656
ugaaaucuaucucuaggcu

SEQ ID NO: 1763252 - RNA, 19 nt, Artificial Sequence
  Description of Artificial Sequence: Synthetic oligonucleotide
  Antisense strand to SEQ ID NO: 1763251
agccuagagauagauuuca

SEQ ID NO: 1763253 - RNA, 19 nt, Artificial Sequence
  Description of Artificial Sequence: Synthetic oligonucleotide
  Sense strand starting at position 2871 of SEQ ID NO: 1562656
ugacucauuuguguuccca

SEQ ID NO: 1763254 - RNA, 19 nt, Artificial Sequence
  Description of Artificial Sequence: Synthetic oligonucleotide
  Antisense strand to SEQ ID NO: 1763253
ugggaacacaaaugaguca

SEQ ID NO: 1763255 - RNA, 19 nt, Artificial Sequence
  Description of Artificial Sequence: Synthetic oligonucleotide
  Sense strand starting at position 2954 of SEQ ID NO: 1562656
uccuguguuuccucaucaa

SEQ ID NO: 1763256 - RNA, 19 nt, Artificial Sequence
  Description of Artificial Sequence: Synthetic oligonucleotide
  Antisense strand to SEQ ID NO: 1763255
uugaugaggaaacacagga

SEQ ID NO: 1763257 - RNA, 19 nt, Artificial Sequence
  Description of Artificial Sequence: Synthetic oligonucleotide
  Sense strand starting at position 2958 of SEQ ID NO: 1562656
guguuuccucaucaaugga

SEQ ID NO: 1763258 - RNA, 19 nt, Artificial Sequence
  Description of Artificial Sequence: Synthetic oligonucleotide
  Antisense strand to SEQ ID NO: 1763257
uccauugaugaggaaacac

SEQ ID NO: 1763259 - RNA, 19 nt, Artificial Sequence
  Description of Artificial Sequence: Synthetic oligonucleotide
  Sense strand starting at position 2984 of SEQ ID NO: 1562656
cgguaauuccugccacgca

SEQ ID NO: 1763260 - RNA, 19 nt, Artificial Sequence
  Description of Artificial Sequence: Synthetic oligonucleotide
  Antisense strand to SEQ ID NO: 1763259
ugcguggcaggaauuaccg

SEQ ID NO: 1763261 - RNA, 19 nt, Artificial Sequence
  Description of Artificial Sequence: Synthetic oligonucleotide
  Sense strand starting at position 2998 of SEQ ID NO: 1562656
acgcaaaggccucaagaua

SEQ ID NO: 1763262 - RNA, 19 nt, Artificial Sequence
  Description of Artificial Sequence: Synthetic oligonucleotide
  Antisense strand to SEQ ID NO: 1763261
uaucuugaggccuuugcgu

SEQ ID NO: 1763263 - RNA, 19 nt, Artificial Sequence
  Description of Artificial Sequence: Synthetic oligonucleotide
  Sense strand starting at position 3033 of SEQ ID NO: 1562656
cucaauuaugcagaagagu

SEQ ID NO: 1763264 - RNA, 19 nt, Artificial Sequence
  Description of Artificial Sequence: Synthetic oligonucleotide
  Antisense strand to SEQ ID NO: 1763263
acucuucugcauaauugag

SEQ ID NO: 1763265 - RNA, 19 nt, Artificial Sequence
  Description of Artificial Sequence: Synthetic oligonucleotide
  Sense strand starting at position 3042 of SEQ ID NO: 1562656
gcagaagaguguucugaag

SEQ ID NO: 1763266 - RNA, 19 nt, Artificial Sequence
  Description of Artificial Sequence: Synthetic oligonucleotide
  Antisense strand to SEQ ID NO: 1763265
cuucagaacacucuucugc

SEQ ID NO: 1763267 - RNA, 19 nt, Artificial Sequence
  Description of Artificial Sequence: Synthetic oligonucleotide
  Sense strand starting at position 3102 of SEQ ID NO: 1562656
gggugcuccaucugaggga

SEQ ID NO: 1763268 - RNA, 19 nt, Artificial Sequence
  Description of Artificial Sequence: Synthetic oligonucleotide
  Antisense strand to SEQ ID NO: 1763267
ucccucagauggagcaccc

SEQ ID NO: 1763269 - RNA, 19 nt, Artificial Sequence
  Description of Artificial Sequence: Synthetic oligonucleotide
  Sense strand starting at position 3106 of SEQ ID NO: 1562656
gcuccaucugagggaugca

SEQ ID NO: 1763270 - RNA, 19 nt, Artificial Sequence
  Description of Artificial Sequence: Synthetic oligonucleotide
  Antisense strand to SEQ ID NO: 1763269
ugcaucccucagauggagc

SEQ ID NO: 1763271 - RNA, 19 nt, Artificial Sequence
  Description of Artificial Sequence: Synthetic oligonucleotide
  Sense strand starting at position 3461 of SEQ ID NO: 1562656
cuguucucucugggaggaa

SEQ ID NO: 1763272 - RNA, 19 nt, Artificial Sequence
  Description of Artificial Sequence: Synthetic oligonucleotide
  Antisense strand to SEQ ID NO: 1763271
uuccucccagagagaacag

SEQ ID NO: 1763273 - RNA, 19 nt, Artificial Sequence
  Description of Artificial Sequence: Synthetic oligonucleotide
  Sense strand starting at position 3518 of SEQ ID NO: 1562656
cagggucccaucugugaga

SEQ ID NO: 1763274 - RNA, 19 nt, Artificial Sequence
  Description of Artificial Sequence: Synthetic oligonucleotide
  Antisense strand to SEQ ID NO: 1763273
ucucacagaugggacccug

SEQ ID NO: 1763275 - RNA, 19 nt, Artificial Sequence
  Description of Artificial Sequence: Synthetic oligonucleotide
  Sense strand starting at position 3531 of SEQ ID NO: 1562656
gugagaucagagugcugau

SEQ ID NO: 1763276 - RNA, 19 nt, Artificial Sequence
  Description of Artificial Sequence: Synthetic oligonucleotide
  Antisense strand to SEQ ID NO: 1763275
aucagcacucugaucucac

SEQ ID NO: 1763277 - RNA, 19 nt, Artificial Sequence
  Description of Artificial Sequence: Synthetic oligonucleotide
  Sense strand starting at position 3583 of SEQ ID NO: 1562656
ggaaaucaaaugcgugaua

SEQ ID NO: 1763278 - RNA, 19 nt, Artificial Sequence
  Description of Artificial Sequence: Synthetic oligonucleotide
  Antisense strand to SEQ ID NO: 1763277
uaucacgcauuugauuucc

SEQ ID NO: 1763279 - RNA, 19 nt, Artificial Sequence
  Description of Artificial Sequence: Synthetic oligonucleotide
  Sense strand starting at position 3585 of SEQ ID NO: 1562656
aaaucaaaugcgugauaga

SEQ ID NO: 1763280 - RNA, 19 nt, Artificial Sequence
  Description of Artificial Sequence: Synthetic oligonucleotide
  Antisense strand to SEQ ID NO: 1763279
ucuaucacgcauuugauuu

SEQ ID NO: 1763281 - RNA, 19 nt, Artificial Sequence
  Description of Artificial Sequence: Synthetic oligonucleotide
  Sense strand starting at position 3586 of SEQ ID NO: 1562656
aaucaaaugcgugauagag

SEQ ID NO: 1763282 - RNA, 19 nt, Artificial Sequence
  Description of Artificial Sequence: Synthetic oligonucleotide
  Antisense strand to SEQ ID NO: 1763281
cucuaucacgcauuugauu

SEQ ID NO: 1763283 - RNA, 19 nt, Artificial Sequence
  Description of Artificial Sequence: Synthetic oligonucleotide
  Sense strand starting at position 3594 of SEQ ID NO: 1562656
gcgugauagagucaagugu

SEQ ID NO: 1763284 - RNA, 19 nt, Artificial Sequence
  Description of Artificial Sequence: Synthetic oligonucleotide
  Antisense strand to SEQ ID NO: 1763283
acacuugacucuaucacgc

SEQ ID NO: 1763285 - RNA, 19 nt, Artificial Sequence
  Description of Artificial Sequence: Synthetic oligonucleotide
  Sense strand starting at position 3598 of SEQ ID NO: 1562656
gauagagucaaguguguau

SEQ ID NO: 1763286 - RNA, 19 nt, Artificial Sequence
  Description of Artificial Sequence: Synthetic oligonucleotide
  Antisense strand to SEQ ID NO: 1763285
auacacacuugacucuauc

SEQ ID NO: 1763287 - RNA, 19 nt, Artificial Sequence
  Description of Artificial Sequence: Synthetic oligonucleotide
  Sense strand starting at position 3600 of SEQ ID NO: 1562656
uagagucaaguguguauca

SEQ ID NO: 1763288 - RNA, 19 nt, Artificial Sequence
  Description of Artificial Sequence: Synthetic oligonucleotide
  Antisense strand to SEQ ID NO: 1763287
ugauacacacuugacucua

SEQ ID NO: 1763289 - RNA, 19 nt, Artificial Sequence
  Description of Artificial Sequence: Synthetic oligonucleotide
  Sense strand starting at position 3601 of SEQ ID NO: 1562656
agagucaaguguguaucau

SEQ ID NO: 1763290 - RNA, 19 nt, Artificial Sequence
  Description of Artificial Sequence: Synthetic oligonucleotide
  Antisense strand to SEQ ID NO: 1763289
augauacacacuugacucu

SEQ ID NO: 1763291 - RNA, 19 nt, Artificial Sequence
  Description of Artificial Sequence: Synthetic oligonucleotide
  Sense strand starting at position 3602 of SEQ ID NO: 1562656
gagucaaguguguaucaug

SEQ ID NO: 1763292 - RNA, 19 nt, Artificial Sequence
  Description of Artificial Sequence: Synthetic oligonucleotide
  Antisense strand to SEQ ID NO: 1763291
caugauacacacuugacuc

SEQ ID NO: 1763293 - RNA, 19 nt, Artificial Sequence
  Description of Artificial Sequence: Synthetic oligonucleotide
  Sense strand starting at position 3612 of SEQ ID NO: 1562656
uguaucaugaucgaugcau

SEQ ID NO: 1763294 - RNA, 19 nt, Artificial Sequence
  Description of Artificial Sequence: Synthetic oligonucleotide
  Antisense strand to SEQ ID NO: 1763293
augcaucgaucaugauaca

SEQ ID NO: 1763295 - RNA, 19 nt, Artificial Sequence
  Description of Artificial Sequence: Synthetic oligonucleotide
  Sense strand starting at position 3671 of SEQ ID NO: 1562656
agugaugagaccugcccaa

SEQ ID NO: 1763296 - RNA, 19 nt, Artificial Sequence
  Description of Artificial Sequence: Synthetic oligonucleotide
  Antisense strand to SEQ ID NO: 1763295
uugggcaggucucaucacu

SEQ ID NO: 1763297 - RNA, 19 nt, Artificial Sequence
  Description of Artificial Sequence: Synthetic oligonucleotide
  Sense strand starting at position 3749 of SEQ ID NO: 1562656
ucugaauucugcccuuaga

SEQ ID NO: 1763298 - RNA, 19 nt, Artificial Sequence
  Description of Artificial Sequence: Synthetic oligonucleotide
  Antisense strand to SEQ ID NO: 1763297
ucuaagggcagaauucaga

SEQ ID NO: 1763299 - RNA, 19 nt, Artificial Sequence
  Description of Artificial Sequence: Synthetic oligonucleotide
  Sense strand starting at position 3803 of SEQ ID NO: 1562656
uggucuagacaguggugau

SEQ ID NO: 1763300 - RNA, 19 nt, Artificial Sequence
  Description of Artificial Sequence: Synthetic oligonucleotide
  Antisense strand to SEQ ID NO: 1763299
aucaccacugucuagacca

SEQ ID NO: 1763301 - RNA, 19 nt, Artificial Sequence
  Description of Artificial Sequence: Synthetic oligonucleotide
  Sense strand starting at position 3820 of SEQ ID NO: 1562656
auggauugguggucacaga

SEQ ID NO: 1763302 - RNA, 19 nt, Artificial Sequence
  Description of Artificial Sequence: Synthetic oligonucleotide
  Antisense strand to SEQ ID NO: 1763301
ucugugaccaccaauccau

SEQ ID NO: 1763303 - RNA, 19 nt, Artificial Sequence
  Description of Artificial Sequence: Synthetic oligonucleotide
  Sense strand starting at position 3821 of SEQ ID NO: 1562656
uggauugguggucacagau

SEQ ID NO: 1763304 - RNA, 19 nt, Artificial Sequence
  Description of Artificial Sequence: Synthetic oligonucleotide
  Antisense strand to SEQ ID NO: 1763303
aucugugaccaccaaucca

SEQ ID NO: 1763305 - RNA, 19 nt, Artificial Sequence
  Description of Artificial Sequence: Synthetic oligonucleotide
  Sense strand starting at position 3833 of SEQ ID NO: 1562656
cacagaucaugugcugacu

SEQ ID NO: 1763306 - RNA, 19 nt, Artificial Sequence
  Description of Artificial Sequence: Synthetic oligonucleotide
  Antisense strand to SEQ ID NO: 1763305
agucagcacaugaucugug

SEQ ID NO: 1763307 - RNA, 19 nt, Artificial Sequence
  Description of Artificial Sequence: Synthetic oligonucleotide
  Sense strand starting at position 26 of SEQ ID NO: 1562657
gcagaaagcagugaugacu

SEQ ID NO: 1763308 - RNA, 19 nt, Artificial Sequence
  Description of Artificial Sequence: Synthetic oligonucleotide
  Antisense strand to SEQ ID NO: 1763307
agucaucacugcuuucugc

SEQ ID NO: 1763309 - RNA, 19 nt, Artificial Sequence
  Description of Artificial Sequence: Synthetic oligonucleotide
  Sense strand starting at position 279 of SEQ ID NO: 1562657
ccugaagccuagggauuua

SEQ ID NO: 1763310 - RNA, 19 nt, Artificial Sequence
  Description of Artificial Sequence: Synthetic oligonucleotide
  Antisense strand to SEQ ID NO: 1763309
uaaaucccuaggcuucagg

SEQ ID NO: 1763311 - RNA, 19 nt, Artificial Sequence
  Description of Artificial Sequence: Synthetic oligonucleotide
  Sense strand starting at position 333 of SEQ ID NO: 1562657
accuguucuccuugugugu

SEQ ID NO: 1763312 - RNA, 19 nt, Artificial Sequence
  Description of Artificial Sequence: Synthetic oligonucleotide
  Antisense strand to SEQ ID NO: 1763311
acacacaaggagaacaggu

SEQ ID NO: 1763313 - RNA, 19 nt, Artificial Sequence
  Description of Artificial Sequence: Synthetic oligonucleotide
  Sense strand starting at position 376 of SEQ ID NO: 1562657
gugugacauuucuaccaaa

SEQ ID NO: 1763314 - RNA, 19 nt, Artificial Sequence
  Description of Artificial Sequence: Synthetic oligonucleotide
  Antisense strand to SEQ ID NO: 1763313
uuugguagaaaugucacac

SEQ ID NO: 1763315 - RNA, 19 nt, Artificial Sequence
  Description of Artificial Sequence: Synthetic oligonucleotide
  Sense strand starting at position 404 of SEQ ID NO: 1562657
agaaauaccuuaggaaagu

SEQ ID NO: 1763316 - RNA, 19 nt, Artificial Sequence
  Description of Artificial Sequence: Synthetic oligonucleotide
  Antisense strand to SEQ ID NO: 1763315
acuuuccuaagguauuucu

SEQ ID NO: 1763317 - RNA, 19 nt, Artificial Sequence
  Description of Artificial Sequence: Synthetic oligonucleotide
  Sense strand starting at position 466 of SEQ ID NO: 1562657
gaaaccaaguguuggucau

SEQ ID NO: 1763318 - RNA, 19 nt, Artificial Sequence
  Description of Artificial Sequence: Synthetic oligonucleotide
  Antisense strand to SEQ ID NO: 1763317
augaccaacacuugguuuc

SEQ ID NO: 1763319 - RNA, 19 nt, Artificial Sequence
  Description of Artificial Sequence: Synthetic oligonucleotide
  Sense strand starting at position 472 of SEQ ID NO: 1562657
aaguguuggucaugggucu

SEQ ID NO: 1763320 - RNA, 19 nt, Artificial Sequence
  Description of Artificial Sequence: Synthetic oligonucleotide
  Antisense strand to SEQ ID NO: 1763319
agacccaugaccaacacuu

SEQ ID NO: 1763321 - RNA, 19 nt, Artificial Sequence
  Description of Artificial Sequence: Synthetic oligonucleotide
  Sense strand starting at position 479 of SEQ ID NO: 1562657
ggucaugggucugagacca

SEQ ID NO: 1763322 - RNA, 19 nt, Artificial Sequence
  Description of Artificial Sequence: Synthetic oligonucleotide
  Antisense strand to SEQ ID NO: 1763321
uggucucagacccaugacc

SEQ ID NO: 1763323 - RNA, 19 nt, Artificial Sequence
  Description of Artificial Sequence: Synthetic oligonucleotide
  Sense strand starting at position 695 of SEQ ID NO: 1562657
ccgcacauccagcaugaau

SEQ ID NO: 1763324 - RNA, 19 nt, Artificial Sequence
  Description of Artificial Sequence: Synthetic oligonucleotide
  Antisense strand to SEQ ID NO: 1763323
auucaugcuggaugugcgg

SEQ ID NO: 1763325 - RNA, 19 nt, Artificial Sequence
  Description of Artificial Sequence: Synthetic oligonucleotide
  Sense strand starting at position 984 of SEQ ID NO: 1562657
ccaagaucguggcauugaa

SEQ ID NO: 1763326 - RNA, 19 nt, Artificial Sequence
  Description of Artificial Sequence: Synthetic oligonucleotide
  Antisense strand to SEQ ID NO: 1763325
uucaaugccacgaucuugg

SEQ ID NO: 1763327 - RNA, 19 nt, Artificial Sequence
  Description of Artificial Sequence: Synthetic oligonucleotide
  Sense strand starting at position 1126 of SEQ ID NO: 1562657
cuaugcguccuccauguuu

SEQ ID NO: 1763328 - RNA, 19 nt, Artificial Sequence
  Description of Artificial Sequence: Synthetic oligonucleotide
  Antisense strand to SEQ ID NO: 1763327
aaacauggaggacgcauag

SEQ ID NO: 1763329 - RNA, 19 nt, Artificial Sequence
  Description of Artificial Sequence: Synthetic oligonucleotide
  Sense strand starting at position 1132 of SEQ ID NO: 1562657
guccuccauguuuaccaaa

SEQ ID NO: 1763330 - RNA, 19 nt, Artificial Sequence
  Description of Artificial Sequence: Synthetic oligonucleotide
  Antisense strand to SEQ ID NO: 1763329
uuugguaaacauggaggac

SEQ ID NO: 1763331 - RNA, 19 nt, Artificial Sequence
  Description of Artificial Sequence: Synthetic oligonucleotide
  Sense strand starting at position 1134 of SEQ ID NO: 1562657
ccuccauguuuaccaaagu

SEQ ID NO: 1763332 - RNA, 19 nt, Artificial Sequence
  Description of Artificial Sequence: Synthetic oligonucleotide
  Antisense strand to SEQ ID NO: 1763331
acuuugguaaacauggagg

SEQ ID NO: 1763333 - RNA, 19 nt, Artificial Sequence
  Description of Artificial Sequence: Synthetic oligonucleotide
  Sense strand starting at position 1319 of SEQ ID NO: 1562657
ucggaucccugcuaaagaa

SEQ ID NO: 1763334 - RNA, 19 nt, Artificial Sequence
  Description of Artificial Sequence: Synthetic oligonucleotide
  Antisense strand to SEQ ID NO: 1763333
uucuuuagcagggauccga

SEQ ID NO: 1763335 - RNA, 19 nt, Artificial Sequence
  Description of Artificial Sequence: Synthetic oligonucleotide
  Sense strand starting at position 1338 of SEQ ID NO: 1562657
aagcaucuguucuuggagu

SEQ ID NO: 1763336 - RNA, 19 nt, Artificial Sequence
  Description of Artificial Sequence: Synthetic oligonucleotide
  Antisense strand to SEQ ID NO: 1763335
acuccaagaacagaugcuu

SEQ ID NO: 1763337 - RNA, 19 nt, Artificial Sequence
  Description of Artificial Sequence: Synthetic oligonucleotide
  Sense strand starting at position 1339 of SEQ ID NO: 1562657
agcaucuguucuuggagua

SEQ ID NO: 1763338 - RNA, 19 nt, Artificial Sequence
  Description of Artificial Sequence: Synthetic oligonucleotide
  Antisense strand to SEQ ID NO: 1763337
uacuccaagaacagaugcu

SEQ ID NO: 1763339 - RNA, 19 nt, Artificial Sequence
  Description of Artificial Sequence: Synthetic oligonucleotide
  Sense strand starting at position 1340 of SEQ ID NO: 1562657
gcaucuguucuuggaguaa

SEQ ID NO: 1763340 - RNA, 19 nt, Artificial Sequence
  Description of Artificial Sequence: Synthetic oligonucleotide
  Antisense strand to SEQ ID NO: 1763339
uuacuccaagaacagaugc

SEQ ID NO: 1763341 - RNA, 19 nt, Artificial Sequence
  Description of Artificial Sequence: Synthetic oligonucleotide
  Sense strand starting at position 2761 of SEQ ID NO: 1562657
guccgcagugcuuaacaca

SEQ ID NO: 1763342 - RNA, 19 nt, Artificial Sequence
  Description of Artificial Sequence: Synthetic oligonucleotide
  Antisense strand to SEQ ID NO: 1763341
uguguuaagcacugcggac

SEQ ID NO: 1763343 - RNA, 19 nt, Artificial Sequence
  Description of Artificial Sequence: Synthetic oligonucleotide
  Sense strand starting at position 2837 of SEQ ID NO: 1562657
agugaagacugugcucaca

SEQ ID NO: 1763344 - RNA, 19 nt, Artificial Sequence
  Description of Artificial Sequence: Synthetic oligonucleotide
  Antisense strand to SEQ ID NO: 1763343
ugugagcacagucuucacu

SEQ ID NO: 1763345 - RNA, 19 nt, Artificial Sequence
  Description of Artificial Sequence: Synthetic oligonucleotide
  Sense strand starting at position 2839 of SEQ ID NO: 1562657
ugaagacugugcucacaga

SEQ ID NO: 1763346 - RNA, 19 nt, Artificial Sequence
  Description of Artificial Sequence: Synthetic oligonucleotide
  Antisense strand to SEQ ID NO: 1763345
ucugugagcacagucuuca

SEQ ID NO: 1763347 - RNA, 19 nt, Artificial Sequence
  Description of Artificial Sequence: Synthetic oligonucleotide
  Sense strand starting at position 3083 of SEQ ID NO: 1562657
uugugacugucuugucuau

SEQ ID NO: 1763348 - RNA, 19 nt, Artificial Sequence
  Description of Artificial Sequence: Synthetic oligonucleotide
  Antisense strand to SEQ ID NO: 1763347
auagacaagacagucacaa

SEQ ID NO: 1763349 - RNA, 19 nt, Artificial Sequence
  Description of Artificial Sequence: Synthetic oligonucleotide
  Sense strand starting at position 3085 of SEQ ID NO: 1562657
gugacugucuugucuauag

SEQ ID NO: 1763350 - RNA, 19 nt, Artificial Sequence
  Description of Artificial Sequence: Synthetic oligonucleotide
  Antisense strand to SEQ ID NO: 1763349
cuauagacaagacagucac

SEQ ID NO: 1763351 - RNA, 19 nt, Artificial Sequence
  Description of Artificial Sequence: Synthetic oligonucleotide
  Sense strand starting at position 3105 of SEQ ID NO: 1562657
gcgggaaccagccaugaau

SEQ ID NO: 1763352 - RNA, 19 nt, Artificial Sequence
  Description of Artificial Sequence: Synthetic oligonucleotide
  Antisense strand to SEQ ID NO: 1763351
auucauggcugguucccgc

SEQ ID NO: 1763353 - RNA, 19 nt, Artificial Sequence
  Description of Artificial Sequence: Synthetic oligonucleotide
  Sense strand starting at position 3107 of SEQ ID NO: 1562657
gggaaccagccaugaauca

SEQ ID NO: 1763354 - RNA, 19 nt, Artificial Sequence
  Description of Artificial Sequence: Synthetic oligonucleotide
  Antisense strand to SEQ ID NO: 1763353
ugauucauggcugguuccc

SEQ ID NO: 1763355 - RNA, 19 nt, Artificial Sequence
  Description of Artificial Sequence: Synthetic oligonucleotide
  Sense strand starting at position 3294 of SEQ ID NO: 1562657
cgcucugaggccugggaaa

SEQ ID NO: 1763356 - RNA, 19 nt, Artificial Sequence
  Description of Artificial Sequence: Synthetic oligonucleotide
  Antisense strand to SEQ ID NO: 1763355
uuucccaggccucagagcg

SEQ ID NO: 1763357 - RNA, 19 nt, Artificial Sequence
  Description of Artificial Sequence: Synthetic oligonucleotide
  Sense strand starting at position 3296 of SEQ ID NO: 1562657
cucugaggccugggaaaug

SEQ ID NO: 1763358 - RNA, 19 nt, Artificial Sequence
  Description of Artificial Sequence: Synthetic oligonucleotide
  Antisense strand to SEQ ID NO: 1763357
cauuucccaggccucagag

SEQ ID NO: 1763359 - RNA, 19 nt, Artificial Sequence
  Description of Artificial Sequence: Synthetic oligonucleotide
  Sense strand starting at position 3310 of SEQ ID NO: 1562657
aaauguggaucugaaacuu

SEQ ID NO: 1763360 - RNA, 19 nt, Artificial Sequence
  Description of Artificial Sequence: Synthetic oligonucleotide
  Antisense strand to SEQ ID NO: 1763359
aaguuucagauccacauuu

SEQ ID NO: 1763361 - RNA, 19 nt, Artificial Sequence
  Description of Artificial Sequence: Synthetic oligonucleotide
  Sense strand starting at position 3490 of SEQ ID NO: 1562657
ggcguauucacguugcugu

SEQ ID NO: 1763362 - RNA, 19 nt, Artificial Sequence
  Description of Artificial Sequence: Synthetic oligonucleotide
  Antisense strand to SEQ ID NO: 1763361
acagcaacgugaauacgcc

SEQ ID NO: 1763363 - RNA, 19 nt, Artificial Sequence
  Description of Artificial Sequence: Synthetic oligonucleotide
  Sense strand starting at position 262 of SEQ ID NO: 1562658
ucaguaucgaucuaugggu

SEQ ID NO: 1763364 - RNA, 19 nt, Artificial Sequence
  Description of Artificial Sequence: Synthetic oligonucleotide
  Antisense strand to SEQ ID NO: 1763363
acccauagaucgauacuga

SEQ ID NO: 1763365 - RNA, 19 nt, Artificial Sequence
  Description of Artificial Sequence: Synthetic oligonucleotide
  Sense strand starting at position 319 of SEQ ID NO: 1562658
agaucaucucccuguuacu

SEQ ID NO: 1763366 - RNA, 19 nt, Artificial Sequence
  Description of Artificial Sequence: Synthetic oligonucleotide
  Antisense strand to SEQ ID NO: 1763365
aguaacagggagaugaucu

SEQ ID NO: 1763367 - RNA, 19 nt, Artificial Sequence
  Description of Artificial Sequence: Synthetic oligonucleotide
  Sense strand starting at position 386 of SEQ ID NO: 1562658
gaaguaauuugccaagguc

SEQ ID NO: 1763368 - RNA, 19 nt, Artificial Sequence
  Description of Artificial Sequence: Synthetic oligonucleotide
  Antisense strand to SEQ ID NO: 1763367
gaccuuggcaaauuacuuc

SEQ ID NO: 1763369 - RNA, 19 nt, Artificial Sequence
  Description of Artificial Sequence: Synthetic oligonucleotide
  Sense strand starting at position 572 of SEQ ID NO: 1562658
ggaguugucacagaugcag

SEQ ID NO: 1763370 - RNA, 19 nt, Artificial Sequence
  Description of Artificial Sequence: Synthetic oligonucleotide
  Antisense strand to SEQ ID NO: 1763369
cugcaucugugacaacucc

SEQ ID NO: 1763371 - RNA, 19 nt, Artificial Sequence
  Description of Artificial Sequence: Synthetic oligonucleotide
  Sense strand starting at position 800 of SEQ ID NO: 1562658
cuccuuugggcccaggaaa

SEQ ID NO: 1763372 - RNA, 19 nt, Artificial Sequence
  Description of Artificial Sequence: Synthetic oligonucleotide
  Antisense strand to SEQ ID NO: 1763371
uuuccugggcccaaaggag

SEQ ID NO: 1763373 - RNA, 19 nt, Artificial Sequence
  Description of Artificial Sequence: Synthetic oligonucleotide
  Sense strand starting at position 869 of SEQ ID NO: 1562658
uccuaugauuaguccuguu

SEQ ID NO: 1763374 - RNA, 19 nt, Artificial Sequence
  Description of Artificial Sequence: Synthetic oligonucleotide
  Antisense strand to SEQ ID NO: 1763373
aacaggacuaaucauagga

SEQ ID NO: 1763375 - RNA, 19 nt, Artificial Sequence
  Description of Artificial Sequence: Synthetic oligonucleotide
  Sense strand starting at position 961 of SEQ ID NO: 1562658
ggacuugcugacugugaga

SEQ ID NO: 1763376 - RNA, 19 nt, Artificial Sequence
  Description of Artificial Sequence: Synthetic oligonucleotide
  Antisense strand to SEQ ID NO: 1763375
ucucacagucagcaagucc

SEQ ID NO: 1763377 - RNA, 19 nt, Artificial Sequence
  Description of Artificial Sequence: Synthetic oligonucleotide
  Sense strand starting at position 963 of SEQ ID NO: 1562658
acuugcugacugugagaau

SEQ ID NO: 1763378 - RNA, 19 nt, Artificial Sequence
  Description of Artificial Sequence: Synthetic oligonucleotide
  Antisense strand to SEQ ID NO: 1763377
auucucacagucagcaagu

SEQ ID NO: 1763379 - RNA, 19 nt, Artificial Sequence
  Description of Artificial Sequence: Synthetic oligonucleotide
  Sense strand starting at position 1052 of SEQ ID NO: 1562658
uccucagacugauaugaug

SEQ ID NO: 1763380 - RNA, 19 nt, Artificial Sequence
  Description of Artificial Sequence: Synthetic oligonucleotide
  Antisense strand to SEQ ID NO: 1763379
caucauaucagucugagga

SEQ ID NO: 1763381 - RNA, 19 nt, Artificial Sequence
  Description of Artificial Sequence: Synthetic oligonucleotide
  Sense strand starting at position 1213 of SEQ ID NO: 1562658
guggaaugacuauggcuua

SEQ ID NO: 1763382 - RNA, 19 nt, Artificial Sequence
  Description of Artificial Sequence: Synthetic oligonucleotide
  Antisense strand to SEQ ID NO: 1763381
uaagccauagucauuccac

SEQ ID NO: 1763383 - RNA, 19 nt, Artificial Sequence
  Description of Artificial Sequence: Synthetic oligonucleotide
  Sense strand starting at position 1330 of SEQ ID NO: 1562658
aauuacuucugguagagac

SEQ ID NO: 1763384 - RNA, 19 nt, Artificial Sequence
  Description of Artificial Sequence: Synthetic oligonucleotide
  Antisense strand to SEQ ID NO: 1763383
gucucuaccagaaguaauu

SEQ ID NO: 1763385 - RNA, 19 nt, Artificial Sequence
  Description of Artificial Sequence: Synthetic oligonucleotide
  Sense strand starting at position 1548 of SEQ ID NO: 1562658
acuggacuaucgucuguuu

SEQ ID NO: 1763386 - RNA, 19 nt, Artificial Sequence
  Description of Artificial Sequence: Synthetic oligonucleotide
  Antisense strand to SEQ ID NO: 1763385
aaacagacgauaguccagu

SEQ ID NO: 1763387 - RNA, 19 nt, Artificial Sequence
  Description of Artificial Sequence: Synthetic oligonucleotide
  Sense strand starting at position 2068 of SEQ ID NO: 1562658
aggcauugucggcagacca

SEQ ID NO: 1763388 - RNA, 19 nt, Artificial Sequence
  Description of Artificial Sequence: Synthetic oligonucleotide
  Antisense strand to SEQ ID NO: 1763387
uggucugccgacaaugccu

SEQ ID NO: 1763389 - RNA, 19 nt, Artificial Sequence
  Description of Artificial Sequence: Synthetic oligonucleotide
  Sense strand starting at position 2417 of SEQ ID NO: 1562658
uccguuugugcuuacacau

SEQ ID NO: 1763390 - RNA, 19 nt, Artificial Sequence
  Description of Artificial Sequence: Synthetic oligonucleotide
  Antisense strand to SEQ ID NO: 1763389
auguguaagcacaaacgga

SEQ ID NO: 1763391 - RNA, 19 nt, Artificial Sequence
  Description of Artificial Sequence: Synthetic oligonucleotide
  Sense strand starting at position 2424 of SEQ ID NO: 1562658
gugcuuacacauugacaua

SEQ ID NO: 1763392 - RNA, 19 nt, Artificial Sequence
  Description of Artificial Sequence: Synthetic oligonucleotide
  Antisense strand to SEQ ID NO: 1763391
uaugucaauguguaagcac

SEQ ID NO: 1763393 - RNA, 19 nt, Artificial Sequence
  Description of Artificial Sequence: Synthetic oligonucleotide
  Sense strand starting at position 2497 of SEQ ID NO: 1562658
cucagauuacugggaguua

SEQ ID NO: 1763394 - RNA, 19 nt, Artificial Sequence
  Description of Artificial Sequence: Synthetic oligonucleotide
  Antisense strand to SEQ ID NO: 1763393
uaacucccaguaaucugag

SEQ ID NO: 1763395 - RNA, 19 nt, Artificial Sequence
  Description of Artificial Sequence: Synthetic oligonucleotide
  Sense strand starting at position 2498 of SEQ ID NO: 1562658
ucagauuacugggaguuau

SEQ ID NO: 1763396 - RNA, 19 nt, Artificial Sequence
  Description of Artificial Sequence: Synthetic oligonucleotide
  Antisense strand to SEQ ID NO: 1763395
auaacucccaguaaucuga

SEQ ID NO: 1763397 - RNA, 19 nt, Artificial Sequence
  Description of Artificial Sequence: Synthetic oligonucleotide
  Sense strand starting at position 2536 of SEQ ID NO: 1562658
ucucauuauucugugguau

SEQ ID NO: 1763398 - RNA, 19 nt, Artificial Sequence
  Description of Artificial Sequence: Synthetic oligonucleotide
  Antisense strand to SEQ ID NO: 1763397
auaccacagaauaaugaga

SEQ ID NO: 1763399 - RNA, 19 nt, Artificial Sequence
  Description of Artificial Sequence: Synthetic oligonucleotide
  Sense strand starting at position 2537 of SEQ ID NO: 1562658
cucauuauucugugguaua

SEQ ID NO: 1763400 - RNA, 19 nt, Artificial Sequence
  Description of Artificial Sequence: Synthetic oligonucleotide
  Antisense strand to SEQ ID NO: 1763399
uauaccacagaauaaugag

SEQ ID NO: 1763401 - RNA, 19 nt, Artificial Sequence
  Description of Artificial Sequence: Synthetic oligonucleotide
  Sense strand starting at position 2542 of SEQ ID NO: 1562658
uauucugugguauauagua

SEQ ID NO: 1763402 - RNA, 19 nt, Artificial Sequence
  Description of Artificial Sequence: Synthetic oligonucleotide
  Antisense strand to SEQ ID NO: 1763401
uacuauauaccacagaaua

SEQ ID NO: 1763403 - RNA, 19 nt, Artificial Sequence
  Description of Artificial Sequence: Synthetic oligonucleotide
  Sense strand starting at position 2544 of SEQ ID NO: 1562658
uucugugguauauaguauu

SEQ ID NO: 1763404 - RNA, 19 nt, Artificial Sequence
  Description of Artificial Sequence: Synthetic oligonucleotide
  Antisense strand to SEQ ID NO: 1763403
aauacuauauaccacagaa

SEQ ID NO: 1763405 - RNA, 19 nt, Artificial Sequence
  Description of Artificial Sequence: Synthetic oligonucleotide
  Sense strand starting at position 2550 of SEQ ID NO: 1562658
gguauauaguauuccauug

SEQ ID NO: 1763406 - RNA, 19 nt, Artificial Sequence
  Description of Artificial Sequence: Synthetic oligonucleotide
  Antisense strand to SEQ ID NO: 1763405
caauggaauacuauauacc

SEQ ID NO: 1763407 - RNA, 19 nt, Artificial Sequence
  Description of Artificial Sequence: Synthetic oligonucleotide
  Sense strand starting at position 2742 of SEQ ID NO: 1562658
ucagauuccugcuucugau

SEQ ID NO: 1763408 - RNA, 19 nt, Artificial Sequence
  Description of Artificial Sequence: Synthetic oligonucleotide
  Antisense strand to SEQ ID NO: 1763407
aucagaagcaggaaucuga

SEQ ID NO: 1763409 - RNA, 19 nt, Artificial Sequence
  Description of Artificial Sequence: Synthetic oligonucleotide
  Sense strand starting at position 2773 of SEQ ID NO: 1562658
ucuacuguuuguuccuuua

SEQ ID NO: 1763410 - RNA, 19 nt, Artificial Sequence
  Description of Artificial Sequence: Synthetic oligonucleotide
  Antisense strand to SEQ ID NO: 1763409
uaaaggaacaaacaguaga

SEQ ID NO: 1763411 - RNA, 19 nt, Artificial Sequence
  Description of Artificial Sequence: Synthetic oligonucleotide
  Sense strand starting at position 2776 of SEQ ID NO: 1562658
acuguuuguuccuuuaauu

SEQ ID NO: 1763412 - RNA, 19 nt, Artificial Sequence
  Description of Artificial Sequence: Synthetic oligonucleotide
  Antisense strand to SEQ ID NO: 1763411
aauuaaaggaacaaacagu

SEQ ID NO: 1763413 - RNA, 19 nt, Artificial Sequence
  Description of Artificial Sequence: Synthetic oligonucleotide
  Sense strand starting at position 2781 of SEQ ID NO: 1562658
uuguuccuuuaauuggaaa

SEQ ID NO: 1763414 - RNA, 19 nt, Artificial Sequence
  Description of Artificial Sequence: Synthetic oligonucleotide
  Antisense strand to SEQ ID NO: 1763413
uuuccaauuaaaggaacaa

SEQ ID NO: 1763415 - RNA, 19 nt, Artificial Sequence
  Description of Artificial Sequence: Synthetic oligonucleotide
  Sense strand starting at position 2903 of SEQ ID NO: 1562658
cagacucugucucaagaga

SEQ ID NO: 1763416 - RNA, 19 nt, Artificial Sequence
  Description of Artificial Sequence: Synthetic oligonucleotide
  Antisense strand to SEQ ID NO: 1763415
ucucuugagacagagucug

SEQ ID NO: 1763417 - RNA, 19 nt, Artificial Sequence
  Description of Artificial Sequence: Synthetic oligonucleotide
  Sense strand starting at position 3272 of SEQ ID NO: 1562658
uguguauacacuuaugugu

SEQ ID NO: 1763418 - RNA, 19 nt, Artificial Sequence
  Description of Artificial Sequence: Synthetic oligonucleotide
  Antisense strand to SEQ ID NO: 1763417
acacauaaguguauacaca

SEQ ID NO: 1763419 - RNA, 19 nt, Artificial Sequence
  Description of Artificial Sequence: Synthetic oligonucleotide
  Sense strand starting at position 3275 of SEQ ID NO: 1562658
guauacacuuaugugugua

SEQ ID NO: 1763420 - RNA, 19 nt, Artificial Sequence
  Description of Artificial Sequence: Synthetic oligonucleotide
  Antisense strand to SEQ ID NO: 1763419
uacacacauaaguguauac

SEQ ID NO: 1763421 - RNA, 19 nt, Artificial Sequence
  Description of Artificial Sequence: Synthetic oligonucleotide
  Sense strand starting at position 3277 of SEQ ID NO: 1562658
auacacuuauguguguaua

SEQ ID NO: 1763422 - RNA, 19 nt, Artificial Sequence
  Description of Artificial Sequence: Synthetic oligonucleotide
  Antisense strand to SEQ ID NO: 1763421
uauacacacauaaguguau

SEQ ID NO: 1763423 - RNA, 19 nt, Artificial Sequence
  Description of Artificial Sequence: Synthetic oligonucleotide
  Sense strand starting at position 3278 of SEQ ID NO: 1562658
uacacuuauguguguauau

SEQ ID NO: 1763424 - RNA, 19 nt, Artificial Sequence
  Description of Artificial Sequence: Synthetic oligonucleotide
  Antisense strand to SEQ ID NO: 1763423
auauacacacauaagugua

SEQ ID NO: 1763425 - RNA, 19 nt, Artificial Sequence
  Description of Artificial Sequence: Synthetic oligonucleotide
  Sense strand starting at position 3279 of SEQ ID NO: 1562658
acacuuauguguguauaua

SEQ ID NO: 1763426 - RNA, 19 nt, Artificial Sequence
  Description of Artificial Sequence: Synthetic oligonucleotide
  Antisense strand to SEQ ID NO: 1763425
uauauacacacauaagugu

SEQ ID NO: 1763427 - RNA, 19 nt, Artificial Sequence
  Description of Artificial Sequence: Synthetic oligonucleotide
  Sense strand starting at position 3280 of SEQ ID NO: 1562658
cacuuauguguguauauau

SEQ ID NO: 1763428 - RNA, 19 nt, Artificial Sequence
  Description of Artificial Sequence: Synthetic oligonucleotide
  Antisense strand to SEQ ID NO: 1763427
auauauacacacauaagug

SEQ ID NO: 1763429 - RNA, 19 nt, Artificial Sequence
  Description of Artificial Sequence: Synthetic oligonucleotide
  Sense strand starting at position 3354 of SEQ ID NO: 1562658
caaugaacaucugugugua

SEQ ID NO: 1763430 - RNA, 19 nt, Artificial Sequence
  Description of Artificial Sequence: Synthetic oligonucleotide
  Antisense strand to SEQ ID NO: 1763429
uacacacagauguucauug

SEQ ID NO: 1763431 - RNA, 19 nt, Artificial Sequence
  Description of Artificial Sequence: Synthetic oligonucleotide
  Sense strand starting at position 3357 of SEQ ID NO: 1562658
ugaacaucuguguguacuu

SEQ ID NO: 1763432 - RNA, 19 nt, Artificial Sequence
  Description of Artificial Sequence: Synthetic oligonucleotide
  Antisense strand to SEQ ID NO: 1763431
aaguacacacagauguuca

SEQ ID NO: 1763433 - RNA, 19 nt, Artificial Sequence
  Description of Artificial Sequence: Synthetic oligonucleotide
  Sense strand starting at position 3358 of SEQ ID NO: 1562658
gaacaucuguguguacuuu

SEQ ID NO: 1763434 - RNA, 19 nt, Artificial Sequence
  Description of Artificial Sequence: Synthetic oligonucleotide
  Antisense strand to SEQ ID NO: 1763433
aaaguacacacagauguuc

SEQ ID NO: 1763435 - RNA, 19 nt, Artificial Sequence
  Description of Artificial Sequence: Synthetic oligonucleotide
  Sense strand starting at position 3503 of SEQ ID NO: 1562658
ggaugacagauguguacca

SEQ ID NO: 1763436 - RNA, 19 nt, Artificial Sequence
  Description of Artificial Sequence: Synthetic oligonucleotide
  Antisense strand to SEQ ID NO: 1763435
ugguacacaucugucaucc

SEQ ID NO: 1763437 - RNA, 19 nt, Artificial Sequence
  Description of Artificial Sequence: Synthetic oligonucleotide
  Sense strand starting at position 3691 of SEQ ID NO: 1562658
gaaauagugccaugccaca

SEQ ID NO: 1763438 - RNA, 19 nt, Artificial Sequence
  Description of Artificial Sequence: Synthetic oligonucleotide
  Antisense strand to SEQ ID NO: 1763437
uguggcauggcacuauuuc

SEQ ID NO: 1763439 - RNA, 19 nt, Artificial Sequence
  Description of Artificial Sequence: Synthetic oligonucleotide
  Sense strand starting at position 3813 of SEQ ID NO: 1562658
gugugagugaagugugauc

SEQ ID NO: 1763440 - RNA, 19 nt, Artificial Sequence
  Description of Artificial Sequence: Synthetic oligonucleotide
  Antisense strand to SEQ ID NO: 1763439
gaucacacuucacucacac

SEQ ID NO: 1763441 - RNA, 19 nt, Artificial Sequence
  Description of Artificial Sequence: Synthetic oligonucleotide
  Sense strand starting at position 3815 of SEQ ID NO: 1562658
gugagugaagugugaucau

SEQ ID NO: 1763442 - RNA, 19 nt, Artificial Sequence
  Description of Artificial Sequence: Synthetic oligonucleotide
  Antisense strand to SEQ ID NO: 1763441
augaucacacuucacucac

SEQ ID NO: 1763443 - RNA, 19 nt, Artificial Sequence
  Description of Artificial Sequence: Synthetic oligonucleotide
  Sense strand starting at position 211 of SEQ ID NO: 1562659
gucacucugagugguggaa

SEQ ID NO: 1763444 - RNA, 19 nt, Artificial Sequence
  Description of Artificial Sequence: Synthetic oligonucleotide
  Antisense strand to SEQ ID NO: 1763443
uuccaccacucagagugac

SEQ ID NO: 1763445 - RNA, 19 nt, Artificial Sequence
  Description of Artificial Sequence: Synthetic oligonucleotide
  Sense strand starting at position 213 of SEQ ID NO: 1562659
cacucugagugguggaaca

SEQ ID NO: 1763446 - RNA, 19 nt, Artificial Sequence
  Description of Artificial Sequence: Synthetic oligonucleotide
  Antisense strand to SEQ ID NO: 1763445
uguuccaccacucagagug

SEQ ID NO: 1763447 - RNA, 19 nt, Artificial Sequence
  Description of Artificial Sequence: Synthetic oligonucleotide
  Sense strand starting at position 215 of SEQ ID NO: 1562659
cucugagugguggaacagu

SEQ ID NO: 1763448 - RNA, 19 nt, Artificial Sequence
  Description of Artificial Sequence: Synthetic oligonucleotide
  Antisense strand to SEQ ID NO: 1763447
acuguuccaccacucagag

SEQ ID NO: 1763449 - RNA, 19 nt, Artificial Sequence
  Description of Artificial Sequence: Synthetic oligonucleotide
  Sense strand starting at position 237 of SEQ ID NO: 1562659
ggaacugccugaucucgua

SEQ ID NO: 1763450 - RNA, 19 nt, Artificial Sequence
  Description of Artificial Sequence: Synthetic oligonucleotide
  Antisense strand to SEQ ID NO: 1763449
uacgagaucaggcaguucc

SEQ ID NO: 1763451 - RNA, 19 nt, Artificial Sequence
  Description of Artificial Sequence: Synthetic oligonucleotide
  Sense strand starting at position 243 of SEQ ID NO: 1562659
gccugaucucguaggcgca

SEQ ID NO: 1763452 - RNA, 19 nt, Artificial Sequence
  Description of Artificial Sequence: Synthetic oligonucleotide
  Antisense strand to SEQ ID NO: 1763451
ugcgccuacgagaucaggc

SEQ ID NO: 1763453 - RNA, 19 nt, Artificial Sequence
  Description of Artificial Sequence: Synthetic oligonucleotide
  Sense strand starting at position 327 of SEQ ID NO: 1562659
gcaggaucagcuuggaguu

SEQ ID NO: 1763454 - RNA, 19 nt, Artificial Sequence
  Description of Artificial Sequence: Synthetic oligonucleotide
  Antisense strand to SEQ ID NO: 1763453
aacuccaagcugauccugc

SEQ ID NO: 1763455 - RNA, 19 nt, Artificial Sequence
  Description of Artificial Sequence: Synthetic oligonucleotide
  Sense strand starting at position 464 of SEQ ID NO: 1562659
gcauguuucugcugccuuu

SEQ ID NO: 1763456 - RNA, 19 nt, Artificial Sequence
  Description of Artificial Sequence: Synthetic oligonucleotide
  Antisense strand to SEQ ID NO: 1763455
aaaggcagcagaaacaugc

SEQ ID NO: 1763457 - RNA, 19 nt, Artificial Sequence
  Description of Artificial Sequence: Synthetic oligonucleotide
  Sense strand starting at position 777 of SEQ ID NO: 1562659
gccucugcugccuucuaau

SEQ ID NO: 1763458 - RNA, 19 nt, Artificial Sequence
  Description of Artificial Sequence: Synthetic oligonucleotide
  Antisense strand to SEQ ID NO: 1763457
auuagaaggcagcagaggc

SEQ ID NO: 1763459 - RNA, 19 nt, Artificial Sequence
  Description of Artificial Sequence: Synthetic oligonucleotide
  Sense strand starting at position 856 of SEQ ID NO: 1562659
ccuguacucucagaguaug

SEQ ID NO: 1763460 - RNA, 19 nt, Artificial Sequence
  Description of Artificial Sequence: Synthetic oligonucleotide
  Antisense strand to SEQ ID NO: 1763459
cauacucugagaguacagg

SEQ ID NO: 1763461 - RNA, 19 nt, Artificial Sequence
  Description of Artificial Sequence: Synthetic oligonucleotide
  Sense strand starting at position 1224 of SEQ ID NO: 1562659
gaagccugccucuaaguga

SEQ ID NO: 1763462 - RNA, 19 nt, Artificial Sequence
  Description of Artificial Sequence: Synthetic oligonucleotide
  Antisense strand to SEQ ID NO: 1763461
ucacuuagaggcaggcuuc

SEQ ID NO: 1763463 - RNA, 19 nt, Artificial Sequence
  Description of Artificial Sequence: Synthetic oligonucleotide
  Sense strand starting at position 1231 of SEQ ID NO: 1562659
gccucuaagugacagugaa

SEQ ID NO: 1763464 - RNA, 19 nt, Artificial Sequence
  Description of Artificial Sequence: Synthetic oligonucleotide
  Antisense strand to SEQ ID NO: 1763463
uucacugucacuuagaggc

SEQ ID NO: 1763465 - RNA, 19 nt, Artificial Sequence
  Description of Artificial Sequence: Synthetic oligonucleotide
  Sense strand starting at position 1292 of SEQ ID NO: 1562659
ggcugaagcaauggugaau

SEQ ID NO: 1763466 - RNA, 19 nt, Artificial Sequence
  Description of Artificial Sequence: Synthetic oligonucleotide
  Antisense strand to SEQ ID NO: 1763465
auucaccauugcuucagcc

SEQ ID NO: 1763467 - RNA, 19 nt, Artificial Sequence
  Description of Artificial Sequence: Synthetic oligonucleotide
  Sense strand starting at position 1349 of SEQ ID NO: 1562659
cuguguggccucgagauaa

SEQ ID NO: 1763468 - RNA, 19 nt, Artificial Sequence
  Description of Artificial Sequence: Synthetic oligonucleotide
  Antisense strand to SEQ ID NO: 1763467
uuaucucgaggccacacag

SEQ ID NO: 1763469 - RNA, 19 nt, Artificial Sequence
  Description of Artificial Sequence: Synthetic oligonucleotide
  Sense strand starting at position 1359 of SEQ ID NO: 1562659
ucgagauaauccugccuca

SEQ ID NO: 1763470 - RNA, 19 nt, Artificial Sequence
  Description of Artificial Sequence: Synthetic oligonucleotide
  Antisense strand to SEQ ID NO: 1763469
ugaggcaggauuaucucga

SEQ ID NO: 1763471 - RNA, 19 nt, Artificial Sequence
  Description of Artificial Sequence: Synthetic oligonucleotide
  Sense strand starting at position 1362 of SEQ ID NO: 1562659
agauaauccugccucaguu

SEQ ID NO: 1763472 - RNA, 19 nt, Artificial Sequence
  Description of Artificial Sequence: Synthetic oligonucleotide
  Antisense strand to SEQ ID NO: 1763471
aacugaggcaggauuaucu

SEQ ID NO: 1763473 - RNA, 19 nt, Artificial Sequence
  Description of Artificial Sequence: Synthetic oligonucleotide
  Sense strand starting at position 1642 of SEQ ID NO: 1562659
aggguuaauccuggccaga

SEQ ID NO: 1763474 - RNA, 19 nt, Artificial Sequence
  Description of Artificial Sequence: Synthetic oligonucleotide
  Antisense strand to SEQ ID NO: 1763473
ucuggccaggauuaacccu

SEQ ID NO: 1763475 - RNA, 19 nt, Artificial Sequence
  Description of Artificial Sequence: Synthetic oligonucleotide
  Sense strand starting at position 2108 of SEQ ID NO: 1562659
ccgggucucggcuggaaau

SEQ ID NO: 1763476 - RNA, 19 nt, Artificial Sequence
  Description of Artificial Sequence: Synthetic oligonucleotide
  Antisense strand to SEQ ID NO: 1763475
auuuccagccgagacccgg

SEQ ID NO: 1763477 - RNA, 19 nt, Artificial Sequence
  Description of Artificial Sequence: Synthetic oligonucleotide
  Sense strand starting at position 2215 of SEQ ID NO: 1562659
gcgacagugccuucuguua

SEQ ID NO: 1763478 - RNA, 19 nt, Artificial Sequence
  Description of Artificial Sequence: Synthetic oligonucleotide
  Antisense strand to SEQ ID NO: 1763477
uaacagaaggcacugucgc

SEQ ID NO: 1763479 - RNA, 19 nt, Artificial Sequence
  Description of Artificial Sequence: Synthetic oligonucleotide
  Sense strand starting at position 2757 of SEQ ID NO: 1562659
ggucaaaucuagcgcaagu

SEQ ID NO: 1763480 - RNA, 19 nt, Artificial Sequence
  Description of Artificial Sequence: Synthetic oligonucleotide
  Antisense strand to SEQ ID NO: 1763479
acuugcgcuagauuugacc

SEQ ID NO: 1763481 - RNA, 19 nt, Artificial Sequence
  Description of Artificial Sequence: Synthetic oligonucleotide
  Sense strand starting at position 2759 of SEQ ID NO: 1562659
ucaaaucuagcgcaaguuu

SEQ ID NO: 1763482 - RNA, 19 nt, Artificial Sequence
  Description of Artificial Sequence: Synthetic oligonucleotide
  Antisense strand to SEQ ID NO: 1763481
aaacuugcgcuagauuuga

SEQ ID NO: 1763483 - RNA, 19 nt, Artificial Sequence
  Description of Artificial Sequence: Synthetic oligonucleotide
  Sense strand starting at position 2848 of SEQ ID NO: 1562659
cuuuccugcucuucgagaa

SEQ ID NO: 1763484 - RNA, 19 nt, Artificial Sequence
  Description of Artificial Sequence: Synthetic oligonucleotide
  Antisense strand to SEQ ID NO: 1763483
uucucgaagagcaggaaag

SEQ ID NO: 1763485 - RNA, 19 nt, Artificial Sequence
  Description of Artificial Sequence: Synthetic oligonucleotide
  Sense strand starting at position 2858 of SEQ ID NO: 1562659
cuucgagaacuugagguuu

SEQ ID NO: 1763486 - RNA, 19 nt, Artificial Sequence
  Description of Artificial Sequence: Synthetic oligonucleotide
  Antisense strand to SEQ ID NO: 1763485
aaaccucaaguucucgaag

SEQ ID NO: 1763487 - RNA, 19 nt, Artificial Sequence
  Description of Artificial Sequence: Synthetic oligonucleotide
  Sense strand starting at position 3212 of SEQ ID NO: 1562659
gugacuuugcaguggucau

SEQ ID NO: 1763488 - RNA, 19 nt, Artificial Sequence
  Description of Artificial Sequence: Synthetic oligonucleotide
  Antisense strand to SEQ ID NO: 1763487
augaccacugcaaagucac

SEQ ID NO: 1763489 - RNA, 19 nt, Artificial Sequence
  Description of Artificial Sequence: Synthetic oligonucleotide
  Sense strand starting at position 3213 of SEQ ID NO: 1562659
ugacuuugcaguggucaua

SEQ ID NO: 1763490 - RNA, 19 nt, Artificial Sequence
  Description of Artificial Sequence: Synthetic oligonucleotide
  Antisense strand to SEQ ID NO: 1763489
uaugaccacugcaaaguca

SEQ ID NO: 1763491 - RNA, 19 nt, Artificial Sequence
  Description of Artificial Sequence: Synthetic oligonucleotide
  Sense strand starting at position 3216 of SEQ ID NO: 1562659
cuuugcaguggucauauua

SEQ ID NO: 1763492 - RNA, 19 nt, Artificial Sequence
  Description of Artificial Sequence: Synthetic oligonucleotide
  Antisense strand to SEQ ID NO: 1763491
uaauaugaccacugcaaag

SEQ ID NO: 1763493 - RNA, 19 nt, Artificial Sequence
  Description of Artificial Sequence: Synthetic oligonucleotide
  Sense strand starting at position 3258 of SEQ ID NO: 1562659
gggacugucccucaucacu

SEQ ID NO: 1763494 - RNA, 19 nt, Artificial Sequence
  Description of Artificial Sequence: Synthetic oligonucleotide
  Antisense strand to SEQ ID NO: 1763493
agugaugagggacaguccc

SEQ ID NO: 1763495 - RNA, 19 nt, Artificial Sequence
  Description of Artificial Sequence: Synthetic oligonucleotide
  Sense strand starting at position 3352 of SEQ ID NO: 1562659
gggugugggucaccaagua

SEQ ID NO: 1763496 - RNA, 19 nt, Artificial Sequence
  Description of Artificial Sequence: Synthetic oligonucleotide
  Antisense strand to SEQ ID NO: 1763495
uacuuggugacccacaccc

SEQ ID NO: 1763497 - RNA, 19 nt, Artificial Sequence
  Description of Artificial Sequence: Synthetic oligonucleotide
  Sense strand starting at position 3487 of SEQ ID NO: 1562659
augcaugcucuccauggaa

SEQ ID NO: 1763498 - RNA, 19 nt, Artificial Sequence
  Description of Artificial Sequence: Synthetic oligonucleotide
  Antisense strand to SEQ ID NO: 1763497
uuccauggagagcaugcau

SEQ ID NO: 1763499 - RNA, 19 nt, Artificial Sequence
  Description of Artificial Sequence: Synthetic oligonucleotide
  Sense strand starting at position 3489 of SEQ ID NO: 1562659
gcaugcucuccauggaagu

SEQ ID NO: 1763500 - RNA, 19 nt, Artificial Sequence
  Description of Artificial Sequence: Synthetic oligonucleotide
  Antisense strand to SEQ ID NO: 1763499
acuuccauggagagcaugc

SEQ ID NO: 1763501 - RNA, 19 nt, Artificial Sequence
  Description of Artificial Sequence: Synthetic oligonucleotide
  Sense strand starting at position 3662 of SEQ ID NO: 1562659
gccauucuuuccuggcaga

SEQ ID NO: 1763502 - RNA, 19 nt, Artificial Sequence
  Description of Artificial Sequence: Synthetic oligonucleotide
  Antisense strand to SEQ ID NO: 1763501
ucugccaggaaagaauggc

SEQ ID NO: 1763503 - RNA, 19 nt, Artificial Sequence
  Description of Artificial Sequence: Synthetic oligonucleotide
  Sense strand starting at position 3788 of SEQ ID NO: 1562659
gccuaaacugcagagaguu

SEQ ID NO: 1763504 - RNA, 19 nt, Artificial Sequence
  Description of Artificial Sequence: Synthetic oligonucleotide
  Antisense strand to SEQ ID NO: 1763503
aacucucugcaguuuaggc

SEQ ID NO: 1763505 - RNA, 19 nt, Artificial Sequence
  Description of Artificial Sequence: Synthetic oligonucleotide
  Sense strand starting at position 3794 of SEQ ID NO: 1562659
acugcagagaguuguuacu

SEQ ID NO: 1763506 - RNA, 19 nt, Artificial Sequence
  Description of Artificial Sequence: Synthetic oligonucleotide
  Antisense strand to SEQ ID NO: 1763505
aguaacaacucucugcagu

SEQ ID NO: 1763507 - RNA, 19 nt, Artificial Sequence
  Description of Artificial Sequence: Synthetic oligonucleotide
  Sense strand starting at position 3796 of SEQ ID NO: 1562659
ugcagagaguuguuacuuc

SEQ ID NO: 1763508 - RNA, 19 nt, Artificial Sequence
  Description of Artificial Sequence: Synthetic oligonucleotide
  Antisense strand to SEQ ID NO: 1763507
gaaguaacaacucucugca

SEQ ID NO: 1763509 - RNA, 19 nt, Artificial Sequence
  Description of Artificial Sequence: Synthetic oligonucleotide
  Sense strand starting at position 3885 of SEQ ID NO: 1562659
uuaaguggguuacacaaau

SEQ ID NO: 1763510 - RNA, 19 nt, Artificial Sequence
  Description of Artificial Sequence: Synthetic oligonucleotide
  Antisense strand to SEQ ID NO: 1763509
auuuguguaacccacuuaa

SEQ ID NO: 1763511 - RNA, 19 nt, Artificial Sequence
  Description of Artificial Sequence: Synthetic oligonucleotide
  Sense strand starting at position 53 of SEQ ID NO: 1562660
accagauguuugucuaauu

SEQ ID NO: 1763512 - RNA, 19 nt, Artificial Sequence
  Description of Artificial Sequence: Synthetic oligonucleotide
  Antisense strand to SEQ ID NO: 1763511
aauuagacaaacaucuggu

SEQ ID NO: 1763513 - RNA, 19 nt, Artificial Sequence
  Description of Artificial Sequence: Synthetic oligonucleotide
  Sense strand starting at position 54 of SEQ ID NO: 1562660
ccagauguuugucuaauua

SEQ ID NO: 1763514 - RNA, 19 nt, Artificial Sequence
  Description of Artificial Sequence: Synthetic oligonucleotide
  Antisense strand to SEQ ID NO: 1763513
uaauuagacaaacaucugg

SEQ ID NO: 1763515 - RNA, 19 nt, Artificial Sequence
  Description of Artificial Sequence: Synthetic oligonucleotide
  Sense strand starting at position 417 of SEQ ID NO: 1562660
uguuauuaguccucacaag

SEQ ID NO: 1763516 - RNA, 19 nt, Artificial Sequence
  Description of Artificial Sequence: Synthetic oligonucleotide
  Antisense strand to SEQ ID NO: 1763515
cuugugaggacuaauaaca

SEQ ID NO: 1763517 - RNA, 19 nt, Artificial Sequence
  Description of Artificial Sequence: Synthetic oligonucleotide
  Sense strand starting at position 418 of SEQ ID NO: 1562660
guuauuaguccucacaaga

SEQ ID NO: 1763518 - RNA, 19 nt, Artificial Sequence
  Description of Artificial Sequence: Synthetic oligonucleotide
  Antisense strand to SEQ ID NO: 1763517
ucuugugaggacuaauaac

SEQ ID NO: 1763519 - RNA, 19 nt, Artificial Sequence
  Description of Artificial Sequence: Synthetic oligonucleotide
  Sense strand starting at position 447 of SEQ ID NO: 1562660
gucauaagagcaggacuuu

SEQ ID NO: 1763520 - RNA, 19 nt, Artificial Sequence
  Description of Artificial Sequence: Synthetic oligonucleotide
  Antisense strand to SEQ ID NO: 1763519
aaaguccugcucuuaugac

SEQ ID NO: 1763521 - RNA, 19 nt, Artificial Sequence
  Description of Artificial Sequence: Synthetic oligonucleotide
  Sense strand starting at position 503 of SEQ ID NO: 1562660
gcugucacucaugauuaac

SEQ ID NO: 1763522 - RNA, 19 nt, Artificial Sequence
  Description of Artificial Sequence: Synthetic oligonucleotide
  Antisense strand to SEQ ID NO: 1763521
guuaaucaugagugacagc

SEQ ID NO: 1763523 - RNA, 19 nt, Artificial Sequence
  Description of Artificial Sequence: Synthetic oligonucleotide
  Sense strand starting at position 523 of SEQ ID NO: 1562660
cccaguauccgccaucaaa

SEQ ID NO: 1763524 - RNA, 19 nt, Artificial Sequence
  Description of Artificial Sequence: Synthetic oligonucleotide
  Antisense strand to SEQ ID NO: 1763523
uuugauggcggauacuggg

SEQ ID NO: 1763525 - RNA, 19 nt, Artificial Sequence
  Description of Artificial Sequence: Synthetic oligonucleotide
  Sense strand starting at position 628 of SEQ ID NO: 1562660
cuuggacugguuugauaac

SEQ ID NO: 1763526 - RNA, 19 nt, Artificial Sequence
  Description of Artificial Sequence: Synthetic oligonucleotide
  Antisense strand to SEQ ID NO: 1763525
guuaucaaaccaguccaag

SEQ ID NO: 1763527 - RNA, 19 nt, Artificial Sequence
  Description of Artificial Sequence: Synthetic oligonucleotide
  Sense strand starting at position 739 of SEQ ID NO: 1562660
uuguguacgguuuacaaua

SEQ ID NO: 1763528 - RNA, 19 nt, Artificial Sequence
  Description of Artificial Sequence: Synthetic oligonucleotide
  Antisense strand to SEQ ID NO: 1763527
uauuguaaaccguacacaa

SEQ ID NO: 1763529 - RNA, 19 nt, Artificial Sequence
  Description of Artificial Sequence: Synthetic oligonucleotide
  Sense strand starting at position 844 of SEQ ID NO: 1562660
uugggaacuccauauagcu

SEQ ID NO: 1763530 - RNA, 19 nt, Artificial Sequence
  Description of Artificial Sequence: Synthetic oligonucleotide
  Antisense strand to SEQ ID NO: 1763529
agcuauauggaguucccaa

SEQ ID NO: 1763531 - RNA, 19 nt, Artificial Sequence
  Description of Artificial Sequence: Synthetic oligonucleotide
  Sense strand starting at position 891 of SEQ ID NO: 1562660
caauaagucugaucuugug

SEQ ID NO: 1763532 - RNA, 19 nt, Artificial Sequence
  Description of Artificial Sequence: Synthetic oligonucleotide
  Antisense strand to SEQ ID NO: 1763531
cacaagaucagacuuauug

SEQ ID NO: 1763533 - RNA, 19 nt, Artificial Sequence
  Description of Artificial Sequence: Synthetic oligonucleotide
  Sense strand starting at position 1007 of SEQ ID NO: 1562660
agaguauugugauuccuca

SEQ ID NO: 1763534 - RNA, 19 nt, Artificial Sequence
  Description of Artificial Sequence: Synthetic oligonucleotide
  Antisense strand to SEQ ID NO: 1763533
ugaggaaucacaauacucu

SEQ ID NO: 1763535 - RNA, 19 nt, Artificial Sequence
  Description of Artificial Sequence: Synthetic oligonucleotide
  Sense strand starting at position 1505 of SEQ ID NO: 1562660
acauuuacuuagggacuua

SEQ ID NO: 1763536 - RNA, 19 nt, Artificial Sequence
  Description of Artificial Sequence: Synthetic oligonucleotide
  Antisense strand to SEQ ID NO: 1763535
uaagucccuaaguaaaugu

SEQ ID NO: 1763537 - RNA, 19 nt, Artificial Sequence
  Description of Artificial Sequence: Synthetic oligonucleotide
  Sense strand starting at position 1597 of SEQ ID NO: 1562660
cuggcuucucuauaaguau

SEQ ID NO: 1763538 - RNA, 19 nt, Artificial Sequence
  Description of Artificial Sequence: Synthetic oligonucleotide
  Antisense strand to SEQ ID NO: 1763537
auacuuauagagaagccag

SEQ ID NO: 1763539 - RNA, 19 nt, Artificial Sequence
  Description of Artificial Sequence: Synthetic oligonucleotide
  Sense strand starting at position 1712 of SEQ ID NO: 1562660
cuucuuauccuguauguuc

SEQ ID NO: 1763540 - RNA, 19 nt, Artificial Sequence
  Description of Artificial Sequence: Synthetic oligonucleotide
  Antisense strand to SEQ ID NO: 1763539
gaacauacaggauaagaag

SEQ ID NO: 1763541 - RNA, 19 nt, Artificial Sequence
  Description of Artificial Sequence: Synthetic oligonucleotide
  Sense strand starting at position 1747 of SEQ ID NO: 1562660
gcaaguaauacgggaagug

SEQ ID NO: 1763542 - RNA, 19 nt, Artificial Sequence
  Description of Artificial Sequence: Synthetic oligonucleotide
  Antisense strand to SEQ ID NO: 1763541
cacuucccguauuacuugc

SEQ ID NO: 1763543 - RNA, 19 nt, Artificial Sequence
  Description of Artificial Sequence: Synthetic oligonucleotide
  Sense strand starting at position 2180 of SEQ ID NO: 1562660
gccaaucagcaacauuagu

SEQ ID NO: 1763544 - RNA, 19 nt, Artificial Sequence
  Description of Artificial Sequence: Synthetic oligonucleotide
  Antisense strand to SEQ ID NO: 1763543
acuaauguugcugauuggc

SEQ ID NO: 1763545 - RNA, 19 nt, Artificial Sequence
  Description of Artificial Sequence: Synthetic oligonucleotide
  Sense strand starting at position 2191 of SEQ ID NO: 1562660
acauuagucugguuagacg

SEQ ID NO: 1763546 - RNA, 19 nt, Artificial Sequence
  Description of Artificial Sequence: Synthetic oligonucleotide
  Antisense strand to SEQ ID NO: 1763545
cgucuaaccagacuaaugu

SEQ ID NO: 1763547 - RNA, 19 nt, Artificial Sequence
  Description of Artificial Sequence: Synthetic oligonucleotide
  Sense strand starting at position 2645 of SEQ ID NO: 1562660
cuugauuucucaggaggaa

SEQ ID NO: 1763548 - RNA, 19 nt, Artificial Sequence
  Description of Artificial Sequence: Synthetic oligonucleotide
  Antisense strand to SEQ ID NO: 1763547
uuccuccugagaaaucaag

SEQ ID NO: 1763549 - RNA, 19 nt, Artificial Sequence
  Description of Artificial Sequence: Synthetic oligonucleotide
  Sense strand starting at position 2690 of SEQ ID NO: 1562660
aacguugagguguggagaa

SEQ ID NO: 1763550 - RNA, 19 nt, Artificial Sequence
  Description of Artificial Sequence: Synthetic oligonucleotide
  Antisense strand to SEQ ID NO: 1763549
uucuccacaccucaacguu

SEQ ID NO: 1763551 - RNA, 19 nt, Artificial Sequence
  Description of Artificial Sequence: Synthetic oligonucleotide
  Sense strand starting at position 2738 of SEQ ID NO: 1562660
gcugaaguuagaggaaaua

SEQ ID NO: 1763552 - RNA, 19 nt, Artificial Sequence
  Description of Artificial Sequence: Synthetic oligonucleotide
  Antisense strand to SEQ ID NO: 1763551
uauuuccucuaacuucagc

SEQ ID NO: 1763553 - RNA, 19 nt, Artificial Sequence
  Description of Artificial Sequence: Synthetic oligonucleotide
  Sense strand starting at position 2895 of SEQ ID NO: 1562660
gugaguaagguuuaaaguu

SEQ ID NO: 1763554 - RNA, 19 nt, Artificial Sequence
  Description of Artificial Sequence: Synthetic oligonucleotide
  Antisense strand to SEQ ID NO: 1763553
aacuuuaaaccuuacucac

SEQ ID NO: 1763555 - RNA, 19 nt, Artificial Sequence
  Description of Artificial Sequence: Synthetic oligonucleotide
  Sense strand starting at position 2904 of SEQ ID NO: 1562660
guuuaaaguuggguugaug

SEQ ID NO: 1763556 - RNA, 19 nt, Artificial Sequence
  Description of Artificial Sequence: Synthetic oligonucleotide
  Antisense strand to SEQ ID NO: 1763555
caucaacccaacuuuaaac

SEQ ID NO: 1763557 - RNA, 19 nt, Artificial Sequence
  Description of Artificial Sequence: Synthetic oligonucleotide
  Sense strand starting at position 2907 of SEQ ID NO: 1562660
uaaaguuggguugauguau

SEQ ID NO: 1763558 - RNA, 19 nt, Artificial Sequence
  Description of Artificial Sequence: Synthetic oligonucleotide
  Antisense strand to SEQ ID NO: 1763557
auacaucaacccaacuuua

SEQ ID NO: 1763559 - RNA, 19 nt, Artificial Sequence
  Description of Artificial Sequence: Synthetic oligonucleotide
  Sense strand starting at position 2918 of SEQ ID NO: 1562660
ugauguauuuaagaaagga

SEQ ID NO: 1763560 - RNA, 19 nt, Artificial Sequence
  Description of Artificial Sequence: Synthetic oligonucleotide
  Antisense strand to SEQ ID NO: 1763559
uccuuucuuaaauacauca

SEQ ID NO: 1763561 - RNA, 19 nt, Artificial Sequence
  Description of Artificial Sequence: Synthetic oligonucleotide
  Sense strand starting at position 2939 of SEQ ID NO: 1562660
gcagaagugugauccgaga

SEQ ID NO: 1763562 - RNA, 19 nt, Artificial Sequence
  Description of Artificial Sequence: Synthetic oligonucleotide
  Antisense strand to SEQ ID NO: 1763561
ucucggaucacacuucugc

SEQ ID NO: 1763563 - RNA, 19 nt, Artificial Sequence
  Description of Artificial Sequence: Synthetic oligonucleotide
  Sense strand starting at position 2941 of SEQ ID NO: 1562660
agaagugugauccgagauu

SEQ ID NO: 1763564 - RNA, 19 nt, Artificial Sequence
  Description of Artificial Sequence: Synthetic oligonucleotide
  Antisense strand to SEQ ID NO: 1763563
aaucucggaucacacuucu

SEQ ID NO: 1763565 - RNA, 19 nt, Artificial Sequence
  Description of Artificial Sequence: Synthetic oligonucleotide
  Sense strand starting at position 3124 of SEQ ID NO: 1562660
cugggaguagaaugugaaa

SEQ ID NO: 1763566 - RNA, 19 nt, Artificial Sequence
  Description of Artificial Sequence: Synthetic oligonucleotide
  Antisense strand to SEQ ID NO: 1763565
uuucacauucuacucccag

SEQ ID NO: 1763567 - RNA, 19 nt, Artificial Sequence
  Description of Artificial Sequence: Synthetic oligonucleotide
  Sense strand starting at position 3353 of SEQ ID NO: 1562660
gaaggaaauuuguagccaa

SEQ ID NO: 1763568 - RNA, 19 nt, Artificial Sequence
  Description of Artificial Sequence: Synthetic oligonucleotide
  Antisense strand to SEQ ID NO: 1763567
uuggcuacaaauuuccuuc

SEQ ID NO: 1763569 - RNA, 19 nt, Artificial Sequence
  Description of Artificial Sequence: Synthetic oligonucleotide
  Sense strand starting at position 3468 of SEQ ID NO: 1562660
gaugaagaaucugaucaga

SEQ ID NO: 1763570 - RNA, 19 nt, Artificial Sequence
  Description of Artificial Sequence: Synthetic oligonucleotide
  Antisense strand to SEQ ID NO: 1763569
ucugaucagauucuucauc

SEQ ID NO: 1763571 - RNA, 19 nt, Artificial Sequence
  Description of Artificial Sequence: Synthetic oligonucleotide
  Sense strand starting at position 3515 of SEQ ID NO: 1562660
cgaggauucuagcuaaacu

SEQ ID NO: 1763572 - RNA, 19 nt, Artificial Sequence
  Description of Artificial Sequence: Synthetic oligonucleotide
  Antisense strand to SEQ ID NO: 1763571
aguuuagcuagaauccucg

SEQ ID NO: 1763573 - RNA, 19 nt, Artificial Sequence
  Description of Artificial Sequence: Synthetic oligonucleotide
  Sense strand starting at position 3532 of SEQ ID NO: 1562660
cugacuuggcaagauuauu

SEQ ID NO: 1763574 - RNA, 19 nt, Artificial Sequence
  Description of Artificial Sequence: Synthetic oligonucleotide
  Antisense strand to SEQ ID NO: 1763573
aauaaucuugccaagucag

SEQ ID NO: 1763575 - RNA, 19 nt, Artificial Sequence
  Description of Artificial Sequence: Synthetic oligonucleotide
  Sense strand starting at position 3628 of SEQ ID NO: 1562660
ggcaaagaaucuuugucug

SEQ ID NO: 1763576 - RNA, 19 nt, Artificial Sequence
  Description of Artificial Sequence: Synthetic oligonucleotide
  Antisense strand to SEQ ID NO: 1763575
cagacaaagauucuuugcc

SEQ ID NO: 1763577 - RNA, 19 nt, Artificial Sequence
  Description of Artificial Sequence: Synthetic oligonucleotide
  Sense strand starting at position 3630 of SEQ ID NO: 1562660
caaagaaucuuugucugug

SEQ ID NO: 1763578 - RNA, 19 nt, Artificial Sequence
  Description of Artificial Sequence: Synthetic oligonucleotide
  Antisense strand to SEQ ID NO: 1763577
cacagacaaagauucuuug

SEQ ID NO: 1763579 - RNA, 19 nt, Artificial Sequence
  Description of Artificial Sequence: Synthetic oligonucleotide
  Sense strand starting at position 3631 of SEQ ID NO: 1562660
aaagaaucuuugucugugu

SEQ ID NO: 1763580 - RNA, 19 nt, Artificial Sequence
  Description of Artificial Sequence: Synthetic oligonucleotide
  Antisense strand to SEQ ID NO: 1763579
acacagacaaagauucuuu

SEQ ID NO: 1763581 - RNA, 19 nt, Artificial Sequence
  Description of Artificial Sequence: Synthetic oligonucleotide
  Sense strand starting at position 3632 of SEQ ID NO: 1562660
aagaaucuuugucugugua

SEQ ID NO: 1763582 - RNA, 19 nt, Artificial Sequence
  Description of Artificial Sequence: Synthetic oligonucleotide
  Antisense strand to SEQ ID NO: 1763581
uacacagacaaagauucuu

SEQ ID NO: 1763583 - RNA, 19 nt, Artificial Sequence
  Description of Artificial Sequence: Synthetic oligonucleotide
  Sense strand starting at position 3636 of SEQ ID NO: 1562660
aucuuugucuguguaauuu

SEQ ID NO: 1763584 - RNA, 19 nt, Artificial Sequence
  Description of Artificial Sequence: Synthetic oligonucleotide
  Antisense strand to SEQ ID NO: 1763583
aaauuacacagacaaagau

SEQ ID NO: 1763585 - RNA, 19 nt, Artificial Sequence
  Description of Artificial Sequence: Synthetic oligonucleotide
  Sense strand starting at position 3667 of SEQ ID NO: 1562660
uuuccuuaacuaugggauc

SEQ ID NO: 1763586 - RNA, 19 nt, Artificial Sequence
  Description of Artificial Sequence: Synthetic oligonucleotide
  Antisense strand to SEQ ID NO: 1763585
gaucccauaguuaaggaaa

SEQ ID NO: 1763587 - RNA, 19 nt, Artificial Sequence
  Description of Artificial Sequence: Synthetic oligonucleotide
  Sense strand starting at position 3719 of SEQ ID NO: 1562660
uacaguaacgcugaucuuu

SEQ ID NO: 1763588 - RNA, 19 nt, Artificial Sequence
  Description of Artificial Sequence: Synthetic oligonucleotide
  Antisense strand to SEQ ID NO: 1763587
aaagaucagcguuacugua

SEQ ID NO: 1763589 - RNA, 19 nt, Artificial Sequence
  Description of Artificial Sequence: Synthetic oligonucleotide
  Sense strand starting at position 3734 of SEQ ID NO: 1562660
cuuuaaguuccucaggcau

SEQ ID NO: 1763590 - RNA, 19 nt, Artificial Sequence
  Description of Artificial Sequence: Synthetic oligonucleotide
  Antisense strand to SEQ ID NO: 1763589
augccugaggaacuuaaag

SEQ ID NO: 1763591 - RNA, 19 nt, Artificial Sequence
  Description of Artificial Sequence: Synthetic oligonucleotide
  Sense strand starting at position 372 of SEQ ID NO: 1562661
ggagguucagcucaggagu

SEQ ID NO: 1763592 - RNA, 19 nt, Artificial Sequence
  Description of Artificial Sequence: Synthetic oligonucleotide
  Antisense strand to SEQ ID NO: 1763591
acuccugagcugaaccucc

SEQ ID NO: 1763593 - RNA, 19 nt, Artificial Sequence
  Description of Artificial Sequence: Synthetic oligonucleotide
  Sense strand starting at position 375 of SEQ ID NO: 1562661
gguucagcucaggaguaca

SEQ ID NO: 1763594 - RNA, 19 nt, Artificial Sequence
  Description of Artificial Sequence: Synthetic oligonucleotide
  Antisense strand to SEQ ID NO: 1763593
uguacuccugagcugaacc

SEQ ID NO: 1763595 - RNA, 19 nt, Artificial Sequence
  Description of Artificial Sequence: Synthetic oligonucleotide
  Sense strand starting at position 464 of SEQ ID NO: 1562661
gcaucuccaugccaugaaa

SEQ ID NO: 1763596 - RNA, 19 nt, Artificial Sequence
  Description of Artificial Sequence: Synthetic oligonucleotide
  Antisense strand to SEQ ID NO: 1763595
uuucauggcauggagaugc

SEQ ID NO: 1763597 - RNA, 19 nt, Artificial Sequence
  Description of Artificial Sequence: Synthetic oligonucleotide
  Sense strand starting at position 477 of SEQ ID NO: 1562661
augaaauugcgccaucuuc

SEQ ID NO: 1763598 - RNA, 19 nt, Artificial Sequence
  Description of Artificial Sequence: Synthetic oligonucleotide
  Antisense strand to SEQ ID NO: 1763597
gaagauggcgcaauuucau

SEQ ID NO: 1763599 - RNA, 19 nt, Artificial Sequence
  Description of Artificial Sequence: Synthetic oligonucleotide
  Sense strand starting at position 485 of SEQ ID NO: 1562661
gcgccaucuucguggcaau

SEQ ID NO: 1763600 - RNA, 19 nt, Artificial Sequence
  Description of Artificial Sequence: Synthetic oligonucleotide
  Antisense strand to SEQ ID NO: 1763599
auugccacgaagauggcgc

SEQ ID NO: 1763601 - RNA, 19 nt, Artificial Sequence
  Description of Artificial Sequence: Synthetic oligonucleotide
  Sense strand starting at position 523 of SEQ ID NO: 1562661
ucucgaagcucuugaguuu

SEQ ID NO: 1763602 - RNA, 19 nt, Artificial Sequence
  Description of Artificial Sequence: Synthetic oligonucleotide
  Antisense strand to SEQ ID NO: 1763601
aaacucaagagcuucgaga

SEQ ID NO: 1763603 - RNA, 19 nt, Artificial Sequence
  Description of Artificial Sequence: Synthetic oligonucleotide
  Sense strand starting at position 566 of SEQ ID NO: 1562661
aagcuaucaggguggugau

SEQ ID NO: 1763604 - RNA, 19 nt, Artificial Sequence
  Description of Artificial Sequence: Synthetic oligonucleotide
  Antisense strand to SEQ ID NO: 1763603
aucaccacccugauagcuu

SEQ ID NO: 1763605 - RNA, 19 nt, Artificial Sequence
  Description of Artificial Sequence: Synthetic oligonucleotide
  Sense strand starting at position 815 of SEQ ID NO: 1562661
ccgcaaguauggcgaacau

SEQ ID NO: 1763606 - RNA, 19 nt, Artificial Sequence
  Description of Artificial Sequence: Synthetic oligonucleotide
  Antisense strand to SEQ ID NO: 1763605
auguucgccauacuugcgg

SEQ ID NO: 1763607 - RNA, 19 nt, Artificial Sequence
  Description of Artificial Sequence: Synthetic oligonucleotide
  Sense strand starting at position 946 of SEQ ID NO: 1562661
ugcgacuucugauccaauu

SEQ ID NO: 1763608 - RNA, 19 nt, Artificial Sequence
  Description of Artificial Sequence: Synthetic oligonucleotide
  Antisense strand to SEQ ID NO: 1763607
aauuggaucagaagucgca

SEQ ID NO: 1763609 - RNA, 19 nt, Artificial Sequence
  Description of Artificial Sequence: Synthetic oligonucleotide
  Sense strand starting at position 985 of SEQ ID NO: 1562661
aggcuuuagcguuggucua

SEQ ID NO: 1763610 - RNA, 19 nt, Artificial Sequence
  Description of Artificial Sequence: Synthetic oligonucleotide
  Antisense strand to SEQ ID NO: 1763609
uagaccaacgcuaaagccu

SEQ ID NO: 1763611 - RNA, 19 nt, Artificial Sequence
  Description of Artificial Sequence: Synthetic oligonucleotide
  Sense strand starting at position 986 of SEQ ID NO: 1562661
ggcuuuagcguuggucuau

SEQ ID NO: 1763612 - RNA, 19 nt, Artificial Sequence
  Description of Artificial Sequence: Synthetic oligonucleotide
  Antisense strand to SEQ ID NO: 1763611
auagaccaacgcuaaagcc

SEQ ID NO: 1763613 - RNA, 19 nt, Artificial Sequence
  Description of Artificial Sequence: Synthetic oligonucleotide
  Sense strand starting at position 987 of SEQ ID NO: 1562661
gcuuuagcguuggucuauu

SEQ ID NO: 1763614 - RNA, 19 nt, Artificial Sequence
  Description of Artificial Sequence: Synthetic oligonucleotide
  Antisense strand to SEQ ID NO: 1763613
aauagaccaacgcuaaagc

SEQ ID NO: 1763615 - RNA, 19 nt, Artificial Sequence
  Description of Artificial Sequence: Synthetic oligonucleotide
  Sense strand starting at position 1108 of SEQ ID NO: 1562661
ggcccaggcuucgguguaa

SEQ ID NO: 1763616 - RNA, 19 nt, Artificial Sequence
  Description of Artificial Sequence: Synthetic oligonucleotide
  Antisense strand to SEQ ID NO: 1763615
uuacaccgaagccugggcc

SEQ ID NO: 1763617 - RNA, 19 nt, Artificial Sequence
  Description of Artificial Sequence: Synthetic oligonucleotide
  Sense strand starting at position 1120 of SEQ ID NO: 1562661
gguguaaugagguguuacu

SEQ ID NO: 1763618 - RNA, 19 nt, Artificial Sequence
  Description of Artificial Sequence: Synthetic oligonucleotide
  Antisense strand to SEQ ID NO: 1763617
aguaacaccucauuacacc

SEQ ID NO: 1763619 - RNA, 19 nt, Artificial Sequence
  Description of Artificial Sequence: Synthetic oligonucleotide
  Sense strand starting at position 1252 of SEQ ID NO: 1562661
gcaagauggcuccguacag

SEQ ID NO: 1763620 - RNA, 19 nt, Artificial Sequence
  Description of Artificial Sequence: Synthetic oligonucleotide
  Antisense strand to SEQ ID NO: 1763619
cuguacggagccaucuugc

SEQ ID NO: 1763621 - RNA, 19 nt, Artificial Sequence
  Description of Artificial Sequence: Synthetic oligonucleotide
  Sense strand starting at position 1880 of SEQ ID NO: 1562661
cugggcuucuccggucaua

SEQ ID NO: 1763622 - RNA, 19 nt, Artificial Sequence
  Description of Artificial Sequence: Synthetic oligonucleotide
  Antisense strand to SEQ ID NO: 1763621
uaugaccggagaagcccag

SEQ ID NO: 1763623 - RNA, 19 nt, Artificial Sequence
  Description of Artificial Sequence: Synthetic oligonucleotide
  Sense strand starting at position 1980 of SEQ ID NO: 1562661
ggccgaauuccgcagaucu

SEQ ID NO: 1763624 - RNA, 19 nt, Artificial Sequence
  Description of Artificial Sequence: Synthetic oligonucleotide
  Antisense strand to SEQ ID NO: 1763623
agaucugcggaauucggcc

SEQ ID NO: 1763625 - RNA, 19 nt, Artificial Sequence
  Description of Artificial Sequence: Synthetic oligonucleotide
  Sense strand starting at position 1982 of SEQ ID NO: 1562661
ccgaauuccgcagaucucu

SEQ ID NO: 1763626 - RNA, 19 nt, Artificial Sequence
  Description of Artificial Sequence: Synthetic oligonucleotide
  Antisense strand to SEQ ID NO: 1763625
agagaucugcggaauucgg

SEQ ID NO: 1763627 - RNA, 19 nt, Artificial Sequence
  Description of Artificial Sequence: Synthetic oligonucleotide
  Sense strand starting at position 2398 of SEQ ID NO: 1562661
guggguacgcaguaaacau

SEQ ID NO: 1763628 - RNA, 19 nt, Artificial Sequence
  Description of Artificial Sequence: Synthetic oligonucleotide
  Antisense strand to SEQ ID NO: 1763627
auguuuacugcguacccac

SEQ ID NO: 1763629 - RNA, 19 nt, Artificial Sequence
  Description of Artificial Sequence: Synthetic oligonucleotide
  Sense strand starting at position 2426 of SEQ ID NO: 1562661
gaaugugacccuugggaca

SEQ ID NO: 1763630 - RNA, 19 nt, Artificial Sequence
  Description of Artificial Sequence: Synthetic oligonucleotide
  Antisense strand to SEQ ID NO: 1763629
ugucccaagggucacauuc

SEQ ID NO: 1763631 - RNA, 19 nt, Artificial Sequence
  Description of Artificial Sequence: Synthetic oligonucleotide
  Sense strand starting at position 2438 of SEQ ID NO: 1562661
ugggacaguuccgaugacu

SEQ ID NO: 1763632 - RNA, 19 nt, Artificial Sequence
  Description of Artificial Sequence: Synthetic oligonucleotide
  Antisense strand to SEQ ID NO: 1763631
agucaucggaacuguccca

SEQ ID NO: 1763633 - RNA, 19 nt, Artificial Sequence
  Description of Artificial Sequence: Synthetic oligonucleotide
  Sense strand starting at position 2452 of SEQ ID NO: 1562661
ugacuccaguugcauaaau

SEQ ID NO: 1763634 - RNA, 19 nt, Artificial Sequence
  Description of Artificial Sequence: Synthetic oligonucleotide
  Antisense strand to SEQ ID NO: 1763633
auuuaugcaacuggaguca

SEQ ID NO: 1763635 - RNA, 19 nt, Artificial Sequence
  Description of Artificial Sequence: Synthetic oligonucleotide
  Sense strand starting at position 2462 of SEQ ID NO: 1562661
ugcauaaaugcccagucua

SEQ ID NO: 1763636 - RNA, 19 nt, Artificial Sequence
  Description of Artificial Sequence: Synthetic oligonucleotide
  Antisense strand to SEQ ID NO: 1763635
uagacugggcauuuaugca

SEQ ID NO: 1763637 - RNA, 19 nt, Artificial Sequence
  Description of Artificial Sequence: Synthetic oligonucleotide
  Sense strand starting at position 2542 of SEQ ID NO: 1562661
uugagaugcgcgucuucau

SEQ ID NO: 1763638 - RNA, 19 nt, Artificial Sequence
  Description of Artificial Sequence: Synthetic oligonucleotide
  Antisense strand to SEQ ID NO: 1763637
augaagacgcgcaucucaa

SEQ ID NO: 1763639 - RNA, 19 nt, Artificial Sequence
  Description of Artificial Sequence: Synthetic oligonucleotide
  Sense strand starting at position 2543 of SEQ ID NO: 1562661
ugagaugcgcgucuucauu

SEQ ID NO: 1763640 - RNA, 19 nt, Artificial Sequence
  Description of Artificial Sequence: Synthetic oligonucleotide
  Antisense strand to SEQ ID NO: 1763639
aaugaagacgcgcaucuca

SEQ ID NO: 1763641 - RNA, 19 nt, Artificial Sequence
  Description of Artificial Sequence: Synthetic oligonucleotide
  Sense strand starting at position 2922 of SEQ ID NO: 1562661
guuuaaaucugagucaguu

SEQ ID NO: 1763642 - RNA, 19 nt, Artificial Sequence
  Description of Artificial Sequence: Synthetic oligonucleotide
  Antisense strand to SEQ ID NO: 1763641
aacugacucagauuuaaac

SEQ ID NO: 1763643 - RNA, 19 nt, Artificial Sequence
  Description of Artificial Sequence: Synthetic oligonucleotide
  Sense strand starting at position 2947 of SEQ ID NO: 1562661
ccuagagcccauuaauuga

SEQ ID NO: 1763644 - RNA, 19 nt, Artificial Sequence
  Description of Artificial Sequence: Synthetic oligonucleotide
  Antisense strand to SEQ ID NO: 1763643
ucaauuaaugggcucuagg

SEQ ID NO: 1763645 - RNA, 19 nt, Artificial Sequence
  Description of Artificial Sequence: Synthetic oligonucleotide
  Sense strand starting at position 3004 of SEQ ID NO: 1562661
accagcaucugagcauaua

SEQ ID NO: 1763646 - RNA, 19 nt, Artificial Sequence
  Description of Artificial Sequence: Synthetic oligonucleotide
  Antisense strand to SEQ ID NO: 1763645
uauaugcucagaugcuggu

SEQ ID NO: 1763647 - RNA, 19 nt, Artificial Sequence
  Description of Artificial Sequence: Synthetic oligonucleotide
  Sense strand starting at position 3270 of SEQ ID NO: 1562661
gcgugacaaucccuugaac

SEQ ID NO: 1763648 - RNA, 19 nt, Artificial Sequence
  Description of Artificial Sequence: Synthetic oligonucleotide
  Antisense strand to SEQ ID NO: 1763647
guucaagggauugucacgc

SEQ ID NO: 1763649 - RNA, 19 nt, Artificial Sequence
  Description of Artificial Sequence: Synthetic oligonucleotide
  Sense strand starting at position 3648 of SEQ ID NO: 1562661
cagcaagacugucugaaca

SEQ ID NO: 1763650 - RNA, 19 nt, Artificial Sequence
  Description of Artificial Sequence: Synthetic oligonucleotide
  Antisense strand to SEQ ID NO: 1763649
uguucagacagucuugcug

SEQ ID NO: 1763651 - RNA, 19 nt, Artificial Sequence
  Description of Artificial Sequence: Synthetic oligonucleotide
  Sense strand starting at position 3688 of SEQ ID NO: 1562661
aaacuaguuuacuucggaa

SEQ ID NO: 1763652 - RNA, 19 nt, Artificial Sequence
  Description of Artificial Sequence: Synthetic oligonucleotide
  Antisense strand to SEQ ID NO: 1763651
uuccgaaguaaacuaguuu

SEQ ID NO: 1763653 - RNA, 19 nt, Artificial Sequence
  Description of Artificial Sequence: Synthetic oligonucleotide
  Sense strand starting at position 3797 of SEQ ID NO: 1562661
ggugcaggcuuauggaaau

SEQ ID NO: 1763654 - RNA, 19 nt, Artificial Sequence
  Description of Artificial Sequence: Synthetic oligonucleotide
  Antisense strand to SEQ ID NO: 1763653
auuuccauaagccugcacc

SEQ ID NO: 1763655 - RNA, 19 nt, Artificial Sequence
  Description of Artificial Sequence: Synthetic oligonucleotide
  Sense strand starting at position 3838 of SEQ ID NO: 1562661
acccgaguccugugguuac

SEQ ID NO: 1763656 - RNA, 19 nt, Artificial Sequence
  Description of Artificial Sequence: Synthetic oligonucleotide
  Antisense strand to SEQ ID NO: 1763655
guaaccacaggacucgggu

SEQ ID NO: 1763657 - RNA, 19 nt, Artificial Sequence
  Description of Artificial Sequence: Synthetic oligonucleotide
  Sense strand starting at position 3851 of SEQ ID NO: 1562661
gguuacuucucuggucuca

SEQ ID NO: 1763658 - RNA, 19 nt, Artificial Sequence
  Description of Artificial Sequence: Synthetic oligonucleotide
  Antisense strand to SEQ ID NO: 1763657
ugagaccagagaaguaacc

SEQ ID NO: 1763659 - RNA, 19 nt, Artificial Sequence
  Description of Artificial Sequence: Synthetic oligonucleotide
  Sense strand starting at position 3869 of SEQ ID NO: 1562661
aaugcauacuugggauguu

SEQ ID NO: 1763660 - RNA, 19 nt, Artificial Sequence
  Description of Artificial Sequence: Synthetic oligonucleotide
  Antisense strand to SEQ ID NO: 1763659
aacaucccaaguaugcauu

SEQ ID NO: 1763661 - RNA, 19 nt, Artificial Sequence
  Description of Artificial Sequence: Synthetic oligonucleotide
  Sense strand starting at position 3870 of SEQ ID NO: 1562661
augcauacuugggauguuu

SEQ ID NO: 1763662 - RNA, 19 nt, Artificial Sequence
  Description of Artificial Sequence: Synthetic oligonucleotide
  Antisense strand to SEQ ID NO: 1763661
aaacaucccaaguaugcau

SEQ ID NO: 1763663 - RNA, 19 nt, Artificial Sequence
  Description of Artificial Sequence: Synthetic oligonucleotide
  Sense strand starting at position 3958 of SEQ ID NO: 1562661
guagaaaccuuugaaacuc

SEQ ID NO: 1763664 - RNA, 19 nt, Artificial Sequence
  Description of Artificial Sequence: Synthetic oligonucleotide
  Antisense strand to SEQ ID NO: 1763663
gaguuucaaagguuucuac

SEQ ID NO: 1763665 - RNA, 19 nt, Artificial Sequence
  Description of Artificial Sequence: Synthetic oligonucleotide
  Sense strand starting at position 267 of SEQ ID NO: 1562662
cguaguucuucuugucgua

SEQ ID NO: 1763666 - RNA, 19 nt, Artificial Sequence
  Description of Artificial Sequence: Synthetic oligonucleotide
  Antisense strand to SEQ ID NO: 1763665
uacgacaagaagaacuacg

SEQ ID NO: 1763667 - RNA, 19 nt, Artificial Sequence
  Description of Artificial Sequence: Synthetic oligonucleotide
  Sense strand starting at position 1905 of SEQ ID NO: 1562662
ggaaguucccagugaccca

SEQ ID NO: 1763668 - RNA, 19 nt, Artificial Sequence
  Description of Artificial Sequence: Synthetic oligonucleotide
  Antisense strand to SEQ ID NO: 1763667
ugggucacugggaacuucc

SEQ ID NO: 1763669 - RNA, 19 nt, Artificial Sequence
  Description of Artificial Sequence: Synthetic oligonucleotide
  Sense strand starting at position 2146 of SEQ ID NO: 1562662
cgcgggauuuccgggcauu

SEQ ID NO: 1763670 - RNA, 19 nt, Artificial Sequence
  Description of Artificial Sequence: Synthetic oligonucleotide
  Antisense strand to SEQ ID NO: 1763669
aaugcccggaaaucccgcg

SEQ ID NO: 1763671 - RNA, 19 nt, Artificial Sequence
  Description of Artificial Sequence: Synthetic oligonucleotide
  Sense strand starting at position 2147 of SEQ ID NO: 1562662
gcgggauuuccgggcauuc

SEQ ID NO: 1763672 - RNA, 19 nt, Artificial Sequence
  Description of Artificial Sequence: Synthetic oligonucleotide
  Antisense strand to SEQ ID NO: 1763671
gaaugcccggaaaucccgc

SEQ ID NO: 1763673 - RNA, 19 nt, Artificial Sequence
  Description of Artificial Sequence: Synthetic oligonucleotide
  Sense strand starting at position 2157 of SEQ ID NO: 1562662
cgggcauucuucugcacaa

SEQ ID NO: 1763674 - RNA, 19 nt, Artificial Sequence
  Description of Artificial Sequence: Synthetic oligonucleotide
  Antisense strand to SEQ ID NO: 1763673
uugugcagaagaaugcccg

SEQ ID NO: 1763675 - RNA, 19 nt, Artificial Sequence
  Description of Artificial Sequence: Synthetic oligonucleotide
  Sense strand starting at position 2392 of SEQ ID NO: 1562662
gucugugcucaguuccauu

SEQ ID NO: 1763676 - RNA, 19 nt, Artificial Sequence
  Description of Artificial Sequence: Synthetic oligonucleotide
  Antisense strand to SEQ ID NO: 1763675
aauggaacugagcacagac

SEQ ID NO: 1763677 - RNA, 19 nt, Artificial Sequence
  Description of Artificial Sequence: Synthetic oligonucleotide
  Sense strand starting at position 2517 of SEQ ID NO: 1562662
auggcucugagaugguaaa

SEQ ID NO: 1763678 - RNA, 19 nt, Artificial Sequence
  Description of Artificial Sequence: Synthetic oligonucleotide
  Antisense strand to SEQ ID NO: 1763677
uuuaccaucucagagccau

SEQ ID NO: 1763679 - RNA, 19 nt, Artificial Sequence
  Description of Artificial Sequence: Synthetic oligonucleotide
  Sense strand starting at position 2518 of SEQ ID NO: 1562662
uggcucugagaugguaaau

SEQ ID NO: 1763680 - RNA, 19 nt, Artificial Sequence
  Description of Artificial Sequence: Synthetic oligonucleotide
  Antisense strand to SEQ ID NO: 1763679
auuuaccaucucagagcca

SEQ ID NO: 1763681 - RNA, 19 nt, Artificial Sequence
  Description of Artificial Sequence: Synthetic oligonucleotide
  Sense strand starting at position 2657 of SEQ ID NO: 1562662
cagguauggcucugaggac

SEQ ID NO: 1763682 - RNA, 19 nt, Artificial Sequence
  Description of Artificial Sequence: Synthetic oligonucleotide
  Antisense strand to SEQ ID NO: 1763681
guccucagagccauaccug

SEQ ID NO: 1763683 - RNA, 19 nt, Artificial Sequence
  Description of Artificial Sequence: Synthetic oligonucleotide
  Sense strand starting at position 2887 of SEQ ID NO: 1562662
caccaucuuccugggauga

SEQ ID NO: 1763684 - RNA, 19 nt, Artificial Sequence
  Description of Artificial Sequence: Synthetic oligonucleotide
  Antisense strand to SEQ ID NO: 1763683
ucaucccaggaagauggug

SEQ ID NO: 1763685 - RNA, 19 nt, Artificial Sequence
  Description of Artificial Sequence: Synthetic oligonucleotide
  Sense strand starting at position 2889 of SEQ ID NO: 1562662
ccaucuuccugggaugacu

SEQ ID NO: 1763686 - RNA, 19 nt, Artificial Sequence
  Description of Artificial Sequence: Synthetic oligonucleotide
  Antisense strand to SEQ ID NO: 1763685
agucaucccaggaagaugg

SEQ ID NO: 1763687 - RNA, 19 nt, Artificial Sequence
  Description of Artificial Sequence: Synthetic oligonucleotide
  Sense strand starting at position 3051 of SEQ ID NO: 1562662
gcuggauugauguguaccu

SEQ ID NO: 1763688 - RNA, 19 nt, Artificial Sequence
  Description of Artificial Sequence: Synthetic oligonucleotide
  Antisense strand to SEQ ID NO: 1763687
agguacacaucaauccagc

SEQ ID NO: 1763689 - RNA, 19 nt, Artificial Sequence
  Description of Artificial Sequence: Synthetic oligonucleotide
  Sense strand starting at position 3223 of SEQ ID NO: 1562662
cugcucaucuucuaagaug

SEQ ID NO: 1763690 - RNA, 19 nt, Artificial Sequence
  Description of Artificial Sequence: Synthetic oligonucleotide
  Antisense strand to SEQ ID NO: 1763689
caucuuagaagaugagcag

SEQ ID NO: 1763691 - RNA, 19 nt, Artificial Sequence
  Description of Artificial Sequence: Synthetic oligonucleotide
  Sense strand starting at position 3226 of SEQ ID NO: 1562662
cucaucuucuaagaugugu

SEQ ID NO: 1763692 - RNA, 19 nt, Artificial Sequence
  Description of Artificial Sequence: Synthetic oligonucleotide
  Antisense strand to SEQ ID NO: 1763691
acacaucuuagaagaugag

SEQ ID NO: 1763693 - RNA, 19 nt, Artificial Sequence
  Description of Artificial Sequence: Synthetic oligonucleotide
  Sense strand starting at position 3237 of SEQ ID NO: 1562662
agauguguugccgagguca

SEQ ID NO: 1763694 - RNA, 19 nt, Artificial Sequence
  Description of Artificial Sequence: Synthetic oligonucleotide
  Antisense strand to SEQ ID NO: 1763693
ugaccucggcaacacaucu

SEQ ID NO: 1763695 - RNA, 19 nt, Artificial Sequence
  Description of Artificial Sequence: Synthetic oligonucleotide
  Sense strand starting at position 3239 of SEQ ID NO: 1562662
auguguugccgaggucauu

SEQ ID NO: 1763696 - RNA, 19 nt, Artificial Sequence
  Description of Artificial Sequence: Synthetic oligonucleotide
  Antisense strand to SEQ ID NO: 1763695
aaugaccucggcaacacau

SEQ ID NO: 1763697 - RNA, 19 nt, Artificial Sequence
  Description of Artificial Sequence: Synthetic oligonucleotide
  Sense strand starting at position 3513 of SEQ ID NO: 1562662
ccagcaagcucauguuucu

SEQ ID NO: 1763698 - RNA, 19 nt, Artificial Sequence
  Description of Artificial Sequence: Synthetic oligonucleotide
  Antisense strand to SEQ ID NO: 1763697
agaaacaugagcuugcugg

SEQ ID NO: 1763699 - RNA, 19 nt, Artificial Sequence
  Description of Artificial Sequence: Synthetic oligonucleotide
  Sense strand starting at position 3941 of SEQ ID NO: 1562662
ggugacauuucacagggau

SEQ ID NO: 1763700 - RNA, 19 nt, Artificial Sequence
  Description of Artificial Sequence: Synthetic oligonucleotide
  Antisense strand to SEQ ID NO: 1763699
aucccugugaaaugucacc

SEQ ID NO: 1763701 - RNA, 19 nt, Artificial Sequence
  Description of Artificial Sequence: Synthetic oligonucleotide
  Sense strand starting at position 102 of SEQ ID NO: 1562663
gcagccauauaggugagaa

SEQ ID NO: 1763702 - RNA, 19 nt, Artificial Sequence
  Description of Artificial Sequence: Synthetic oligonucleotide
  Antisense strand to SEQ ID NO: 1763701
uucucaccuauauggcugc

SEQ ID NO: 1763703 - RNA, 19 nt, Artificial Sequence
  Description of Artificial Sequence: Synthetic oligonucleotide
  Sense strand starting at position 204 of SEQ ID NO: 1562663
ggcugaagucucgaaaugu

SEQ ID NO: 1763704 - RNA, 19 nt, Artificial Sequence
  Description of Artificial Sequence: Synthetic oligonucleotide
  Antisense strand to SEQ ID NO: 1763703
acauuucgagacuucagcc

SEQ ID NO: 1763705 - RNA, 19 nt, Artificial Sequence
  Description of Artificial Sequence: Synthetic oligonucleotide
  Sense strand starting at position 214 of SEQ ID NO: 1562663
ucgaaaugucuguagugaa

SEQ ID NO: 1763706 - RNA, 19 nt, Artificial Sequence
  Description of Artificial Sequence: Synthetic oligonucleotide
  Antisense strand to SEQ ID NO: 1763705
uucacuacagacauuucga

SEQ ID NO: 1763707 - RNA, 19 nt, Artificial Sequence
  Description of Artificial Sequence: Synthetic oligonucleotide
  Sense strand starting at position 250 of SEQ ID NO: 1562663
caguguuugcucuacagaa

SEQ ID NO: 1763708 - RNA, 19 nt, Artificial Sequence
  Description of Artificial Sequence: Synthetic oligonucleotide
  Antisense strand to SEQ ID NO: 1763707
uucuguagagcaaacacug

SEQ ID NO: 1763709 - RNA, 19 nt, Artificial Sequence
  Description of Artificial Sequence: Synthetic oligonucleotide
  Sense strand starting at position 285 of SEQ ID NO: 1562663
agacccagucaguguuaga

SEQ ID NO: 1763710 - RNA, 19 nt, Artificial Sequence
  Description of Artificial Sequence: Synthetic oligonucleotide
  Antisense strand to SEQ ID NO: 1763709
ucuaacacugacugggucu

SEQ ID NO: 1763711 - RNA, 19 nt, Artificial Sequence
  Description of Artificial Sequence: Synthetic oligonucleotide
  Sense strand starting at position 292 of SEQ ID NO: 1562663
gucaguguuagagaccaca

SEQ ID NO: 1763712 - RNA, 19 nt, Artificial Sequence
  Description of Artificial Sequence: Synthetic oligonucleotide
  Antisense strand to SEQ ID NO: 1763711
uguggucucuaacacugac

SEQ ID NO: 1763713 - RNA, 19 nt, Artificial Sequence
  Description of Artificial Sequence: Synthetic oligonucleotide
  Sense strand starting at position 376 of SEQ ID NO: 1562663
aucaacucugauggacauu

SEQ ID NO: 1763714 - RNA, 19 nt, Artificial Sequence
  Description of Artificial Sequence: Synthetic oligonucleotide
  Antisense strand to SEQ ID NO: 1763713
aauguccaucagaguugau

SEQ ID NO: 1763715 - RNA, 19 nt, Artificial Sequence
  Description of Artificial Sequence: Synthetic oligonucleotide
  Sense strand starting at position 474 of SEQ ID NO: 1562663
uuuagauagugguuaagca

SEQ ID NO: 1763716 - RNA, 19 nt, Artificial Sequence
  Description of Artificial Sequence: Synthetic oligonucleotide
  Antisense strand to SEQ ID NO: 1763715
ugcuuaaccacuaucuaaa

SEQ ID NO: 1763717 - RNA, 19 nt, Artificial Sequence
  Description of Artificial Sequence: Synthetic oligonucleotide
  Sense strand starting at position 500 of SEQ ID NO: 1562663
uggaaucagaccuggguua

SEQ ID NO: 1763718 - RNA, 19 nt, Artificial Sequence
  Description of Artificial Sequence: Synthetic oligonucleotide
  Antisense strand to SEQ ID NO: 1763717
uaacccaggucugauucca

SEQ ID NO: 1763719 - RNA, 19 nt, Artificial Sequence
  Description of Artificial Sequence: Synthetic oligonucleotide
  Sense strand starting at position 512 of SEQ ID NO: 1562663
uggguuagaacucaagcuu

SEQ ID NO: 1763720 - RNA, 19 nt, Artificial Sequence
  Description of Artificial Sequence: Synthetic oligonucleotide
  Antisense strand to SEQ ID NO: 1763719
aagcuugaguucuaaccca

SEQ ID NO: 1763721 - RNA, 19 nt, Artificial Sequence
  Description of Artificial Sequence: Synthetic oligonucleotide
  Sense strand starting at position 580 of SEQ ID NO: 1562663
cucagugacccaugguaga

SEQ ID NO: 1763722 - RNA, 19 nt, Artificial Sequence
  Description of Artificial Sequence: Synthetic oligonucleotide
  Antisense strand to SEQ ID NO: 1763721
ucuaccaugggucacugag

SEQ ID NO: 1763723 - RNA, 19 nt, Artificial Sequence
  Description of Artificial Sequence: Synthetic oligonucleotide
  Sense strand starting at position 775 of SEQ ID NO: 1562663
agcuuaguggcagaaugaa

SEQ ID NO: 1763724 - RNA, 19 nt, Artificial Sequence
  Description of Artificial Sequence: Synthetic oligonucleotide
  Antisense strand to SEQ ID NO: 1763723
uucauucugccacuaagcu

SEQ ID NO: 1763725 - RNA, 19 nt, Artificial Sequence
  Description of Artificial Sequence: Synthetic oligonucleotide
  Sense strand starting at position 882 of SEQ ID NO: 1562663
aaguuuccagucugcagaa

SEQ ID NO: 1763726 - RNA, 19 nt, Artificial Sequence
  Description of Artificial Sequence: Synthetic oligonucleotide
  Antisense strand to SEQ ID NO: 1763725
uucugcagacuggaaacuu

SEQ ID NO: 1763727 - RNA, 19 nt, Artificial Sequence
  Description of Artificial Sequence: Synthetic oligonucleotide
  Sense strand starting at position 1045 of SEQ ID NO: 1562663
ugaauccuguucuuauuga

SEQ ID NO: 1763728 - RNA, 19 nt, Artificial Sequence
  Description of Artificial Sequence: Synthetic oligonucleotide
  Antisense strand to SEQ ID NO: 1763727
ucaauaagaacaggauuca

SEQ ID NO: 1763729 - RNA, 19 nt, Artificial Sequence
  Description of Artificial Sequence: Synthetic oligonucleotide
  Sense strand starting at position 1053 of SEQ ID NO: 1562663
guucuuauugaaugaagau

SEQ ID NO: 1763730 - RNA, 19 nt, Artificial Sequence
  Description of Artificial Sequence: Synthetic oligonucleotide
  Antisense strand to SEQ ID NO: 1763729
aucuucauucaauaagaac

SEQ ID NO: 1763731 - RNA, 19 nt, Artificial Sequence
  Description of Artificial Sequence: Synthetic oligonucleotide
  Sense strand starting at position 1062 of SEQ ID NO: 1562663
gaaugaagaugaguucuuu

SEQ ID NO: 1763732 - RNA, 19 nt, Artificial Sequence
  Description of Artificial Sequence: Synthetic oligonucleotide
  Antisense strand to SEQ ID NO: 1763731
aaagaacucaucuucauuc

SEQ ID NO: 1763733 - RNA, 19 nt, Artificial Sequence
  Description of Artificial Sequence: Synthetic oligonucleotide
  Sense strand starting at position 1066 of SEQ ID NO: 1562663
gaagaugaguucuuuaaca

SEQ ID NO: 1763734 - RNA, 19 nt, Artificial Sequence
  Description of Artificial Sequence: Synthetic oligonucleotide
  Antisense strand to SEQ ID NO: 1763733
uguuaaagaacucaucuuc

SEQ ID NO: 1763735 - RNA, 19 nt, Artificial Sequence
  Description of Artificial Sequence: Synthetic oligonucleotide
  Sense strand starting at position 1095 of SEQ ID NO: 1562663
ucgguuuccucaucuagaa

SEQ ID NO: 1763736 - RNA, 19 nt, Artificial Sequence
  Description of Artificial Sequence: Synthetic oligonucleotide
  Antisense strand to SEQ ID NO: 1763735
uucuagaugaggaaaccga

SEQ ID NO: 1763737 - RNA, 19 nt, Artificial Sequence
  Description of Artificial Sequence: Synthetic oligonucleotide
  Sense strand starting at position 1272 of SEQ ID NO: 1562663
accugagccuuugcucaaa

SEQ ID NO: 1763738 - RNA, 19 nt, Artificial Sequence
  Description of Artificial Sequence: Synthetic oligonucleotide
  Antisense strand to SEQ ID NO: 1763737
uuugagcaaaggcucaggu

SEQ ID NO: 1763739 - RNA, 19 nt, Artificial Sequence
  Description of Artificial Sequence: Synthetic oligonucleotide
  Sense strand starting at position 1275 of SEQ ID NO: 1562663
ugagccuuugcucaaagca

SEQ ID NO: 1763740 - RNA, 19 nt, Artificial Sequence
  Description of Artificial Sequence: Synthetic oligonucleotide
  Antisense strand to SEQ ID NO: 1763739
ugcuuugagcaaaggcuca

SEQ ID NO: 1763741 - RNA, 19 nt, Artificial Sequence
  Description of Artificial Sequence: Synthetic oligonucleotide
  Sense strand starting at position 1302 of SEQ ID NO: 1562663
guccuuauguuucugaaca

SEQ ID NO: 1763742 - RNA, 19 nt, Artificial Sequence
  Description of Artificial Sequence: Synthetic oligonucleotide
  Antisense strand to SEQ ID NO: 1763741
uguucagaaacauaaggac

SEQ ID NO: 1763743 - RNA, 19 nt, Artificial Sequence
  Description of Artificial Sequence: Synthetic oligonucleotide
  Sense strand starting at position 1398 of SEQ ID NO: 1562663
uaggcuuggcccugagaaa

SEQ ID NO: 1763744 - RNA, 19 nt, Artificial Sequence
  Description of Artificial Sequence: Synthetic oligonucleotide
  Antisense strand to SEQ ID NO: 1763743
uuucucagggccaagccua

SEQ ID NO: 1763745 - RNA, 19 nt, Artificial Sequence
  Description of Artificial Sequence: Synthetic oligonucleotide
  Sense strand starting at position 2361 of SEQ ID NO: 1562663
gugcuaguucugccgccaa

SEQ ID NO: 1763746 - RNA, 19 nt, Artificial Sequence
  Description of Artificial Sequence: Synthetic oligonucleotide
  Antisense strand to SEQ ID NO: 1763745
uuggcggcagaacuagcac

SEQ ID NO: 1763747 - RNA, 19 nt, Artificial Sequence
  Description of Artificial Sequence: Synthetic oligonucleotide
  Sense strand starting at position 2363 of SEQ ID NO: 1562663
gcuaguucugccgccaacu

SEQ ID NO: 1763748 - RNA, 19 nt, Artificial Sequence
  Description of Artificial Sequence: Synthetic oligonucleotide
  Antisense strand to SEQ ID NO: 1763747
aguuggcggcagaacuagc

SEQ ID NO: 1763749 - RNA, 19 nt, Artificial Sequence
  Description of Artificial Sequence: Synthetic oligonucleotide
  Sense strand starting at position 2460 of SEQ ID NO: 1562663
acaugugccguauaacgaa

SEQ ID NO: 1763750 - RNA, 19 nt, Artificial Sequence
  Description of Artificial Sequence: Synthetic oligonucleotide
  Antisense strand to SEQ ID NO: 1763749
uucguuauacggcacaugu

SEQ ID NO: 1763751 - RNA, 19 nt, Artificial Sequence
  Description of Artificial Sequence: Synthetic oligonucleotide
  Sense strand starting at position 2492 of SEQ ID NO: 1562663
ugaggaggaccguguauau

SEQ ID NO: 1763752 - RNA, 19 nt, Artificial Sequence
  Description of Artificial Sequence: Synthetic oligonucleotide
  Antisense strand to SEQ ID NO: 1763751
auauacacgguccuccuca

SEQ ID NO: 1763753 - RNA, 19 nt, Artificial Sequence
  Description of Artificial Sequence: Synthetic oligonucleotide
  Sense strand starting at position 2711 of SEQ ID NO: 1562663
guggcugugccaucugagu

SEQ ID NO: 1763754 - RNA, 19 nt, Artificial Sequence
  Description of Artificial Sequence: Synthetic oligonucleotide
  Antisense strand to SEQ ID NO: 1763753
acucagauggcacagccac

SEQ ID NO: 1763755 - RNA, 19 nt, Artificial Sequence
  Description of Artificial Sequence: Synthetic oligonucleotide
  Sense strand starting at position 2775 of SEQ ID NO: 1562663
ucagaaugcauggaugcau

SEQ ID NO: 1763756 - RNA, 19 nt, Artificial Sequence
  Description of Artificial Sequence: Synthetic oligonucleotide
  Antisense strand to SEQ ID NO: 1763755
augcauccaugcauucuga

SEQ ID NO: 1763757 - RNA, 19 nt, Artificial Sequence
  Description of Artificial Sequence: Synthetic oligonucleotide
  Sense strand starting at position 2879 of SEQ ID NO: 1562663
gcgguuucuagagaacacu

SEQ ID NO: 1763758 - RNA, 19 nt, Artificial Sequence
  Description of Artificial Sequence: Synthetic oligonucleotide
  Antisense strand to SEQ ID NO: 1763757
aguguucucuagaaaccgc

SEQ ID NO: 1763759 - RNA, 19 nt, Artificial Sequence
  Description of Artificial Sequence: Synthetic oligonucleotide
  Sense strand starting at position 2891 of SEQ ID NO: 1562663
gaacacugugucggaauau

SEQ ID NO: 1763760 - RNA, 19 nt, Artificial Sequence
  Description of Artificial Sequence: Synthetic oligonucleotide
  Antisense strand to SEQ ID NO: 1763759
auauuccgacacaguguuc

SEQ ID NO: 1763761 - RNA, 19 nt, Artificial Sequence
  Description of Artificial Sequence: Synthetic oligonucleotide
  Sense strand starting at position 2901 of SEQ ID NO: 1562663
ucggaauaucaauguagag

SEQ ID NO: 1763762 - RNA, 19 nt, Artificial Sequence
  Description of Artificial Sequence: Synthetic oligonucleotide
  Antisense strand to SEQ ID NO: 1763761
cucuacauugauauuccga

SEQ ID NO: 1763763 - RNA, 19 nt, Artificial Sequence
  Description of Artificial Sequence: Synthetic oligonucleotide
  Sense strand starting at position 3124 of SEQ ID NO: 1562663
aagggaagcccuuggcauu

SEQ ID NO: 1763764 - RNA, 19 nt, Artificial Sequence
  Description of Artificial Sequence: Synthetic oligonucleotide
  Antisense strand to SEQ ID NO: 1763763
aaugccaagggcuucccuu

SEQ ID NO: 1763765 - RNA, 19 nt, Artificial Sequence
  Description of Artificial Sequence: Synthetic oligonucleotide
  Sense strand starting at position 3251 of SEQ ID NO: 1562663
ggugcaauuauuugcgcaa

SEQ ID NO: 1763766 - RNA, 19 nt, Artificial Sequence
  Description of Artificial Sequence: Synthetic oligonucleotide
  Antisense strand to SEQ ID NO: 1763765
uugcgcaaauaauugcacc

SEQ ID NO: 1763767 - RNA, 19 nt, Artificial Sequence
  Description of Artificial Sequence: Synthetic oligonucleotide
  Sense strand starting at position 3252 of SEQ ID NO: 1562663
gugcaauuauuugcgcaau

SEQ ID NO: 1763768 - RNA, 19 nt, Artificial Sequence
  Description of Artificial Sequence: Synthetic oligonucleotide
  Antisense strand to SEQ ID NO: 1763767
auugcgcaaauaauugcac

SEQ ID NO: 1763769 - RNA, 19 nt, Artificial Sequence
  Description of Artificial Sequence: Synthetic oligonucleotide
  Sense strand starting at position 3393 of SEQ ID NO: 1562663
ggccucauccgcuaaauau

SEQ ID NO: 1763770 - RNA, 19 nt, Artificial Sequence
  Description of Artificial Sequence: Synthetic oligonucleotide
  Antisense strand to SEQ ID NO: 1763769
auauuuagcggaugaggcc

SEQ ID NO: 1763771 - RNA, 19 nt, Artificial Sequence
  Description of Artificial Sequence: Synthetic oligonucleotide
  Sense strand starting at position 3630 of SEQ ID NO: 1562663
aagugacaggauuguuaau

SEQ ID NO: 1763772 - RNA, 19 nt, Artificial Sequence
  Description of Artificial Sequence: Synthetic oligonucleotide
  Antisense strand to SEQ ID NO: 1763771
auuaacaauccugucacuu

SEQ ID NO: 1763773 - RNA, 19 nt, Artificial Sequence
  Description of Artificial Sequence: Synthetic oligonucleotide
  Sense strand starting at position 3632 of SEQ ID NO: 1562663
gugacaggauuguuaauac

SEQ ID NO: 1763774 - RNA, 19 nt, Artificial Sequence
  Description of Artificial Sequence: Synthetic oligonucleotide
  Antisense strand to SEQ ID NO: 1763773
guauuaacaauccugucac

SEQ ID NO: 1763775 - RNA, 19 nt, Artificial Sequence
  Description of Artificial Sequence: Synthetic oligonucleotide
  Sense strand starting at position 3768 of SEQ ID NO: 1562663
agugaauauaagugauagu

SEQ ID NO: 1763776 - RNA, 19 nt, Artificial Sequence
  Description of Artificial Sequence: Synthetic oligonucleotide
  Antisense strand to SEQ ID NO: 1763775
acuaucacuuauauucacu

SEQ ID NO: 1763777 - RNA, 19 nt, Artificial Sequence
  Description of Artificial Sequence: Synthetic oligonucleotide
  Sense strand starting at position 3769 of SEQ ID NO: 1562663
gugaauauaagugauaguu

SEQ ID NO: 1763778 - RNA, 19 nt, Artificial Sequence
  Description of Artificial Sequence: Synthetic oligonucleotide
  Antisense strand to SEQ ID NO: 1763777
aacuaucacuuauauucac

SEQ ID NO: 1763779 - RNA, 19 nt, Artificial Sequence
  Description of Artificial Sequence: Synthetic oligonucleotide
  Sense strand starting at position 3775 of SEQ ID NO: 1562663
auaagugauaguuguaguu

SEQ ID NO: 1763780 - RNA, 19 nt, Artificial Sequence
  Description of Artificial Sequence: Synthetic oligonucleotide
  Antisense strand to SEQ ID NO: 1763779
aacuacaacuaucacuuau

SEQ ID NO: 1763781 - RNA, 19 nt, Artificial Sequence
  Description of Artificial Sequence: Synthetic oligonucleotide
  Sense strand starting at position 139 of SEQ ID NO: 1562664
aggcaagaucauggcucau

SEQ ID NO: 1763782 - RNA, 19 nt, Artificial Sequence
  Description of Artificial Sequence: Synthetic oligonucleotide
  Antisense strand to SEQ ID NO: 1763781
augagccaugaucuugccu

SEQ ID NO: 1763783 - RNA, 19 nt, Artificial Sequence
  Description of Artificial Sequence: Synthetic oligonucleotide
  Sense strand starting at position 436 of SEQ ID NO: 1562664
gcuaccaagucucaacaga

SEQ ID NO: 1763784 - RNA, 19 nt, Artificial Sequence
  Description of Artificial Sequence: Synthetic oligonucleotide
  Antisense strand to SEQ ID NO: 1763783
ucuguugagacuugguagc

SEQ ID NO: 1763785 - RNA, 19 nt, Artificial Sequence
  Description of Artificial Sequence: Synthetic oligonucleotide
  Sense strand starting at position 463 of SEQ ID NO: 1562664
cugguaguuuaugaacaca

SEQ ID NO: 1763786 - RNA, 19 nt, Artificial Sequence
  Description of Artificial Sequence: Synthetic oligonucleotide
  Antisense strand to SEQ ID NO: 1763785
uguguucauaaacuaccag

SEQ ID NO: 1763787 - RNA, 19 nt, Artificial Sequence
  Description of Artificial Sequence: Synthetic oligonucleotide
  Sense strand starting at position 585 of SEQ ID NO: 1562664
cagccaggcuccuuagagu

SEQ ID NO: 1763788 - RNA, 19 nt, Artificial Sequence
  Description of Artificial Sequence: Synthetic oligonucleotide
  Antisense strand to SEQ ID NO: 1763787
acucuaaggagccuggcug

SEQ ID NO: 1763789 - RNA, 19 nt, Artificial Sequence
  Description of Artificial Sequence: Synthetic oligonucleotide
  Sense strand starting at position 678 of SEQ ID NO: 1562664
gccacauucccagaacgau

SEQ ID NO: 1763790 - RNA, 19 nt, Artificial Sequence
  Description of Artificial Sequence: Synthetic oligonucleotide
  Antisense strand to SEQ ID NO: 1763789
aucguucugggaauguggc

SEQ ID NO: 1763791 - RNA, 19 nt, Artificial Sequence
  Description of Artificial Sequence: Synthetic oligonucleotide
  Sense strand starting at position 741 of SEQ ID NO: 1562664
acaagaauuuccugugugu

SEQ ID NO: 1763792 - RNA, 19 nt, Artificial Sequence
  Description of Artificial Sequence: Synthetic oligonucleotide
  Antisense strand to SEQ ID NO: 1763791
acacacaggaaauucuugu

SEQ ID NO: 1763793 - RNA, 19 nt, Artificial Sequence
  Description of Artificial Sequence: Synthetic oligonucleotide
  Sense strand starting at position 743 of SEQ ID NO: 1562664
aagaauuuccuguguguuc

SEQ ID NO: 1763794 - RNA, 19 nt, Artificial Sequence
  Description of Artificial Sequence: Synthetic oligonucleotide
  Antisense strand to SEQ ID NO: 1763793
gaacacacaggaaauucuu

SEQ ID NO: 1763795 - RNA, 19 nt, Artificial Sequence
  Description of Artificial Sequence: Synthetic oligonucleotide
  Sense strand starting at position 745 of SEQ ID NO: 1562664
gaauuuccuguguguucca

SEQ ID NO: 1763796 - RNA, 19 nt, Artificial Sequence
  Description of Artificial Sequence: Synthetic oligonucleotide
  Antisense strand to SEQ ID NO: 1763795
uggaacacacaggaaauuc

SEQ ID NO: 1763797 - RNA, 19 nt, Artificial Sequence
  Description of Artificial Sequence: Synthetic oligonucleotide
  Sense strand starting at position 750 of SEQ ID NO: 1562664
uccuguguguuccagccaa

SEQ ID NO: 1763798 - RNA, 19 nt, Artificial Sequence
  Description of Artificial Sequence: Synthetic oligonucleotide
  Antisense strand to SEQ ID NO: 1763797
uuggcuggaacacacagga

SEQ ID NO: 1763799 - RNA, 19 nt, Artificial Sequence
  Description of Artificial Sequence: Synthetic oligonucleotide
  Sense strand starting at position 838 of SEQ ID NO: 1562664
guggcaaacccagaucagu

SEQ ID NO: 1763800 - RNA, 19 nt, Artificial Sequence
  Description of Artificial Sequence: Synthetic oligonucleotide
  Antisense strand to SEQ ID NO: 1763799
acugaucuggguuugccac

SEQ ID NO: 1763801 - RNA, 19 nt, Artificial Sequence
  Description of Artificial Sequence: Synthetic oligonucleotide
  Sense strand starting at position 1001 of SEQ ID NO: 1562664
uucucauguugucaguagu

SEQ ID NO: 1763802 - RNA, 19 nt, Artificial Sequence
  Description of Artificial Sequence: Synthetic oligonucleotide
  Antisense strand to SEQ ID NO: 1763801
acuacugacaacaugagaa

SEQ ID NO: 1763803 - RNA, 19 nt, Artificial Sequence
  Description of Artificial Sequence: Synthetic oligonucleotide
  Sense strand starting at position 1004 of SEQ ID NO: 1562664
ucauguugucaguaguuac

SEQ ID NO: 1763804 - RNA, 19 nt, Artificial Sequence
  Description of Artificial Sequence: Synthetic oligonucleotide
  Antisense strand to SEQ ID NO: 1763803
guaacuacugacaacauga

SEQ ID NO: 1763805 - RNA, 19 nt, Artificial Sequence
  Description of Artificial Sequence: Synthetic oligonucleotide
  Sense strand starting at position 1007 of SEQ ID NO: 1562664
uguugucaguaguuaccaa

SEQ ID NO: 1763806 - RNA, 19 nt, Artificial Sequence
  Description of Artificial Sequence: Synthetic oligonucleotide
  Antisense strand to SEQ ID NO: 1763805
uugguaacuacugacaaca

SEQ ID NO: 1763807 - RNA, 19 nt, Artificial Sequence
  Description of Artificial Sequence: Synthetic oligonucleotide
  Sense strand starting at position 1011 of SEQ ID NO: 1562664
gucaguaguuaccaaguaa

SEQ ID NO: 1763808 - RNA, 19 nt, Artificial Sequence
  Description of Artificial Sequence: Synthetic oligonucleotide
  Antisense strand to SEQ ID NO: 1763807
uuacuugguaacuacugac

SEQ ID NO: 1763809 - RNA, 19 nt, Artificial Sequence
  Description of Artificial Sequence: Synthetic oligonucleotide
  Sense strand starting at position 1043 of SEQ ID NO: 1562664
ugcauuaacuagugucuca

SEQ ID NO: 1763810 - RNA, 19 nt, Artificial Sequence
  Description of Artificial Sequence: Synthetic oligonucleotide
  Antisense strand to SEQ ID NO: 1763809
ugagacacuaguuaaugca

SEQ ID NO: 1763811 - RNA, 19 nt, Artificial Sequence
  Description of Artificial Sequence: Synthetic oligonucleotide
  Sense strand starting at position 1098 of SEQ ID NO: 1562664
cuuggagggucacuuuaaa

SEQ ID NO: 1763812 - RNA, 19 nt, Artificial Sequence
  Description of Artificial Sequence: Synthetic oligonucleotide
  Antisense strand to SEQ ID NO: 1763811
uuuaaagugacccuccaag

SEQ ID NO: 1763813 - RNA, 19 nt, Artificial Sequence
  Description of Artificial Sequence: Synthetic oligonucleotide
  Sense strand starting at position 1335 of SEQ ID NO: 1562664
cagggagccuguuggagaa

SEQ ID NO: 1763814 - RNA, 19 nt, Artificial Sequence
  Description of Artificial Sequence: Synthetic oligonucleotide
  Antisense strand to SEQ ID NO: 1763813
uucuccaacaggcucccug

SEQ ID NO: 1763815 - RNA, 19 nt, Artificial Sequence
  Description of Artificial Sequence: Synthetic oligonucleotide
  Sense strand starting at position 1553 of SEQ ID NO: 1562664
cgggaucucucaccgcuau

SEQ ID NO: 1763816 - RNA, 19 nt, Artificial Sequence
  Description of Artificial Sequence: Synthetic oligonucleotide
  Antisense strand to SEQ ID NO: 1763815
auagcggugagagaucccg

SEQ ID NO: 1763817 - RNA, 19 nt, Artificial Sequence
  Description of Artificial Sequence: Synthetic oligonucleotide
  Sense strand starting at position 2175 of SEQ ID NO: 1562664
ggucuagucuugcucagga

SEQ ID NO: 1763818 - RNA, 19 nt, Artificial Sequence
  Description of Artificial Sequence: Synthetic oligonucleotide
  Antisense strand to SEQ ID NO: 1763817
uccugagcaagacuagacc

SEQ ID NO: 1763819 - RNA, 19 nt, Artificial Sequence
  Description of Artificial Sequence: Synthetic oligonucleotide
  Sense strand starting at position 2177 of SEQ ID NO: 1562664
ucuagucuugcucaggagu

SEQ ID NO: 1763820 - RNA, 19 nt, Artificial Sequence
  Description of Artificial Sequence: Synthetic oligonucleotide
  Antisense strand to SEQ ID NO: 1763819
acuccugagcaagacuaga

SEQ ID NO: 1763821 - RNA, 19 nt, Artificial Sequence
  Description of Artificial Sequence: Synthetic oligonucleotide
  Sense strand starting at position 2303 of SEQ ID NO: 1562664
cugguaucccaguaacaac

SEQ ID NO: 1763822 - RNA, 19 nt, Artificial Sequence
  Description of Artificial Sequence: Synthetic oligonucleotide
  Antisense strand to SEQ ID NO: 1763821
guuguuacugggauaccag

SEQ ID NO: 1763823 - RNA, 19 nt, Artificial Sequence
  Description of Artificial Sequence: Synthetic oligonucleotide
  Sense strand starting at position 2327 of SEQ ID NO: 1562664
uucugaagaugaugauauc

SEQ ID NO: 1763824 - RNA, 19 nt, Artificial Sequence
  Description of Artificial Sequence: Synthetic oligonucleotide
  Antisense strand to SEQ ID NO: 1763823
gauaucaucaucuucagaa

SEQ ID NO: 1763825 - RNA, 19 nt, Artificial Sequence
  Description of Artificial Sequence: Synthetic oligonucleotide
  Sense strand starting at position 2499 of SEQ ID NO: 1562664
ggacaauaaucauaacuga

SEQ ID NO: 1763826 - RNA, 19 nt, Artificial Sequence
  Description of Artificial Sequence: Synthetic oligonucleotide
  Antisense strand to SEQ ID NO: 1763825
ucaguuaugauuauugucc

SEQ ID NO: 1763827 - RNA, 19 nt, Artificial Sequence
  Description of Artificial Sequence: Synthetic oligonucleotide
  Sense strand starting at position 2563 of SEQ ID NO: 1562664
agccucauccuguaggaca

SEQ ID NO: 1763828 - RNA, 19 nt, Artificial Sequence
  Description of Artificial Sequence: Synthetic oligonucleotide
  Antisense strand to SEQ ID NO: 1763827
uguccuacaggaugaggcu

SEQ ID NO: 1763829 - RNA, 19 nt, Artificial Sequence
  Description of Artificial Sequence: Synthetic oligonucleotide
  Sense strand starting at position 2606 of SEQ ID NO: 1562664
gccaccauaucuguuaugu

SEQ ID NO: 1763830 - RNA, 19 nt, Artificial Sequence
  Description of Artificial Sequence: Synthetic oligonucleotide
  Antisense strand to SEQ ID NO: 1763829
acauaacagauaugguggc

SEQ ID NO: 1763831 - RNA, 19 nt, Artificial Sequence
  Description of Artificial Sequence: Synthetic oligonucleotide
  Sense strand starting at position 2608 of SEQ ID NO: 1562664
caccauaucuguuaugugu

SEQ ID NO: 1763832 - RNA, 19 nt, Artificial Sequence
  Description of Artificial Sequence: Synthetic oligonucleotide
  Antisense strand to SEQ ID NO: 1763831
acacauaacagauauggug

SEQ ID NO: 1763833 - RNA, 19 nt, Artificial Sequence
  Description of Artificial Sequence: Synthetic oligonucleotide
  Sense strand starting at position 2616 of SEQ ID NO: 1562664
cuguuauguguggccaguu

SEQ ID NO: 1763834 - RNA, 19 nt, Artificial Sequence
  Description of Artificial Sequence: Synthetic oligonucleotide
  Antisense strand to SEQ ID NO: 1763833
aacuggccacacauaacag

SEQ ID NO: 1763835 - RNA, 19 nt, Artificial Sequence
  Description of Artificial Sequence: Synthetic oligonucleotide
  Sense strand starting at position 2617 of SEQ ID NO: 1562664
uguuauguguggccaguuu

SEQ ID NO: 1763836 - RNA, 19 nt, Artificial Sequence
  Description of Artificial Sequence: Synthetic oligonucleotide
  Antisense strand to SEQ ID NO: 1763835
aaacuggccacacauaaca

SEQ ID NO: 1763837 - RNA, 19 nt, Artificial Sequence
  Description of Artificial Sequence: Synthetic oligonucleotide
  Sense strand starting at position 2913 of SEQ ID NO: 1562664
aacagaguucugggaggca

SEQ ID NO: 1763838 - RNA, 19 nt, Artificial Sequence
  Description of Artificial Sequence: Synthetic oligonucleotide
  Antisense strand to SEQ ID NO: 1763837
ugccucccagaacucuguu

SEQ ID NO: 1763839 - RNA, 19 nt, Artificial Sequence
  Description of Artificial Sequence: Synthetic oligonucleotide
  Sense strand starting at position 3250 of SEQ ID NO: 1562664
ggaauaucauacgagacuu

SEQ ID NO: 1763840 - RNA, 19 nt, Artificial Sequence
  Description of Artificial Sequence: Synthetic oligonucleotide
  Antisense strand to SEQ ID NO: 1763839
aagucucguaugauauucc

SEQ ID NO: 1763841 - RNA, 19 nt, Artificial Sequence
  Description of Artificial Sequence: Synthetic oligonucleotide
  Sense strand starting at position 3273 of SEQ ID NO: 1562664
ggauaaugcccuuaucuuc

SEQ ID NO: 1763842 - RNA, 19 nt, Artificial Sequence
  Description of Artificial Sequence: Synthetic oligonucleotide
  Antisense strand to SEQ ID NO: 1763841
gaagauaagggcauuaucc

SEQ ID NO: 1763843 - RNA, 19 nt, Artificial Sequence
  Description of Artificial Sequence: Synthetic oligonucleotide
  Sense strand starting at position 3347 of SEQ ID NO: 1562664
ugguccucccaguaagaaa

SEQ ID NO: 1763844 - RNA, 19 nt, Artificial Sequence
  Description of Artificial Sequence: Synthetic oligonucleotide
  Antisense strand to SEQ ID NO: 1763843
uuucuuacugggaggacca

SEQ ID NO: 1763845 - RNA, 19 nt, Artificial Sequence
  Description of Artificial Sequence: Synthetic oligonucleotide
  Sense strand starting at position 3370 of SEQ ID NO: 1562664
auaaguagucuccaggcau

SEQ ID NO: 1763846 - RNA, 19 nt, Artificial Sequence
  Description of Artificial Sequence: Synthetic oligonucleotide
  Antisense strand to SEQ ID NO: 1763845
augccuggagacuacuuau

SEQ ID NO: 1763847 - RNA, 19 nt, Artificial Sequence
  Description of Artificial Sequence: Synthetic oligonucleotide
  Sense strand starting at position 3384 of SEQ ID NO: 1562664
ggcauuccuuuccgccaga

SEQ ID NO: 1763848 - RNA, 19 nt, Artificial Sequence
  Description of Artificial Sequence: Synthetic oligonucleotide
  Antisense strand to SEQ ID NO: 1763847
ucuggcggaaaggaaugcc

SEQ ID NO: 1763849 - RNA, 19 nt, Artificial Sequence
  Description of Artificial Sequence: Synthetic oligonucleotide
  Sense strand starting at position 3387 of SEQ ID NO: 1562664
auuccuuuccgccagagga

SEQ ID NO: 1763850 - RNA, 19 nt, Artificial Sequence
  Description of Artificial Sequence: Synthetic oligonucleotide
  Antisense strand to SEQ ID NO: 1763849
uccucuggcggaaaggaau

SEQ ID NO: 1763851 - RNA, 19 nt, Artificial Sequence
  Description of Artificial Sequence: Synthetic oligonucleotide
  Sense strand starting at position 3428 of SEQ ID NO: 1562664
uuucgugcccagucuguua

SEQ ID NO: 1763852 - RNA, 19 nt, Artificial Sequence
  Description of Artificial Sequence: Synthetic oligonucleotide
  Antisense strand to SEQ ID NO: 1763851
uaacagacugggcacgaaa

SEQ ID NO: 1763853 - RNA, 19 nt, Artificial Sequence
  Description of Artificial Sequence: Synthetic oligonucleotide
  Sense strand starting at position 3982 of SEQ ID NO: 1562664
gcuaaucucucuggaagac

SEQ ID NO: 1763854 - RNA, 19 nt, Artificial Sequence
  Description of Artificial Sequence: Synthetic oligonucleotide
  Antisense strand to SEQ ID NO: 1763853
gucuuccagagagauuagc

SEQ ID NO: 1763855 - RNA, 19 nt, Artificial Sequence
  Description of Artificial Sequence: Synthetic oligonucleotide
  Sense strand starting at position 897 of SEQ ID NO: 1562665
agguguaagccauacugca

SEQ ID NO: 1763856 - RNA, 19 nt, Artificial Sequence
  Description of Artificial Sequence: Synthetic oligonucleotide
  Antisense strand to SEQ ID NO: 1763855
ugcaguauggcuuacaccu

SEQ ID NO: 1763857 - RNA, 19 nt, Artificial Sequence
  Description of Artificial Sequence: Synthetic oligonucleotide
  Sense strand starting at position 1000 of SEQ ID NO: 1562665
aagagaauuuccuguguuc

SEQ ID NO: 1763858 - RNA, 19 nt, Artificial Sequence
  Description of Artificial Sequence: Synthetic oligonucleotide
  Antisense strand to SEQ ID NO: 1763857
gaacacaggaaauucucuu

SEQ ID NO: 1763859 - RNA, 19 nt, Artificial Sequence
  Description of Artificial Sequence: Synthetic oligonucleotide
  Sense strand starting at position 1243 of SEQ ID NO: 1562665
uccugucacuggucaccaa

SEQ ID NO: 1763860 - RNA, 19 nt, Artificial Sequence
  Description of Artificial Sequence: Synthetic oligonucleotide
  Antisense strand to SEQ ID NO: 1763859
uuggugaccagugacagga

SEQ ID NO: 1763861 - RNA, 19 nt, Artificial Sequence
  Description of Artificial Sequence: Synthetic oligonucleotide
  Sense strand starting at position 1246 of SEQ ID NO: 1562665
ugucacuggucaccaaaua

SEQ ID NO: 1763862 - RNA, 19 nt, Artificial Sequence
  Description of Artificial Sequence: Synthetic oligonucleotide
  Antisense strand to SEQ ID NO: 1763861
uauuuggugaccagugaca

SEQ ID NO: 1763863 - RNA, 19 nt, Artificial Sequence
  Description of Artificial Sequence: Synthetic oligonucleotide
  Sense strand starting at position 1247 of SEQ ID NO: 1562665
gucacuggucaccaaauau

SEQ ID NO: 1763864 - RNA, 19 nt, Artificial Sequence
  Description of Artificial Sequence: Synthetic oligonucleotide
  Antisense strand to SEQ ID NO: 1763863
auauuuggugaccagugac

SEQ ID NO: 1763865 - RNA, 19 nt, Artificial Sequence
  Description of Artificial Sequence: Synthetic oligonucleotide
  Sense strand starting at position 1431 of SEQ ID NO: 1562665
gcgggagucacaugguuug

SEQ ID NO: 1763866 - RNA, 19 nt, Artificial Sequence
  Description of Artificial Sequence: Synthetic oligonucleotide
  Antisense strand to SEQ ID NO: 1763865
caaaccaugugacucccgc

SEQ ID NO: 1763867 - RNA, 19 nt, Artificial Sequence
  Description of Artificial Sequence: Synthetic oligonucleotide
  Sense strand starting at position 1434 of SEQ ID NO: 1562665
ggagucacaugguuugauu

SEQ ID NO: 1763868 - RNA, 19 nt, Artificial Sequence
  Description of Artificial Sequence: Synthetic oligonucleotide
  Antisense strand to SEQ ID NO: 1763867
aaucaaaccaugugacucc

SEQ ID NO: 1763869 - RNA, 19 nt, Artificial Sequence
  Description of Artificial Sequence: Synthetic oligonucleotide
  Sense strand starting at position 1443 of SEQ ID NO: 1562665
ugguuugauuugugaucca

SEQ ID NO: 1763870 - RNA, 19 nt, Artificial Sequence
  Description of Artificial Sequence: Synthetic oligonucleotide
  Antisense strand to SEQ ID NO: 1763869
uggaucacaaaucaaacca

SEQ ID NO: 1763871 - RNA, 19 nt, Artificial Sequence
  Description of Artificial Sequence: Synthetic oligonucleotide
  Sense strand starting at position 1456 of SEQ ID NO: 1562665
gauccagugguccggaaga

SEQ ID NO: 1763872 - RNA, 19 nt, Artificial Sequence
  Description of Artificial Sequence: Synthetic oligonucleotide
  Antisense strand to SEQ ID NO: 1763871
ucuuccggaccacuggauc

SEQ ID NO: 1763873 - RNA, 19 nt, Artificial Sequence
  Description of Artificial Sequence: Synthetic oligonucleotide
  Sense strand starting at position 1458 of SEQ ID NO: 1562665
uccagugguccggaagaau

SEQ ID NO: 1763874 - RNA, 19 nt, Artificial Sequence
  Description of Artificial Sequence: Synthetic oligonucleotide
  Antisense strand to SEQ ID NO: 1763873
auucuuccggaccacugga

SEQ ID NO: 1763875 - RNA, 19 nt, Artificial Sequence
  Description of Artificial Sequence: Synthetic oligonucleotide
  Sense strand starting at position 1469 of SEQ ID NO: 1562665
ggaagaauaucggaugcag

SEQ ID NO: 1763876 - RNA, 19 nt, Artificial Sequence
  Description of Artificial Sequence: Synthetic oligonucleotide
  Antisense strand to SEQ ID NO: 1763875
cugcauccgauauucuucc

SEQ ID NO: 1763877 - RNA, 19 nt, Artificial Sequence
  Description of Artificial Sequence: Synthetic oligonucleotide
  Sense strand starting at position 1471 of SEQ ID NO: 1562665
aagaauaucggaugcagca

SEQ ID NO: 1763878 - RNA, 19 nt, Artificial Sequence
  Description of Artificial Sequence: Synthetic oligonucleotide
  Antisense strand to SEQ ID NO: 1763877
ugcugcauccgauauucuu

SEQ ID NO: 1763879 - RNA, 19 nt, Artificial Sequence
  Description of Artificial Sequence: Synthetic oligonucleotide
  Sense strand starting at position 1518 of SEQ ID NO: 1562665
uuaugauucugaguaaggc

SEQ ID NO: 1763880 - RNA, 19 nt, Artificial Sequence
  Description of Artificial Sequence: Synthetic oligonucleotide
  Antisense strand to SEQ ID NO: 1763879
gccuuacucagaaucauaa

SEQ ID NO: 1763881 - RNA, 19 nt, Artificial Sequence
  Description of Artificial Sequence: Synthetic oligonucleotide
  Sense strand starting at position 1519 of SEQ ID NO: 1562665
uaugauucugaguaaggcu

SEQ ID NO: 1763882 - RNA, 19 nt, Artificial Sequence
  Description of Artificial Sequence: Synthetic oligonucleotide
  Antisense strand to SEQ ID NO: 1763881
agccuuacucagaaucaua

SEQ ID NO: 1763883 - RNA, 19 nt, Artificial Sequence
  Description of Artificial Sequence: Synthetic oligonucleotide
  Sense strand starting at position 2109 of SEQ ID NO: 1562665
augugacuuuaccaaggau

SEQ ID NO: 1763884 - RNA, 19 nt, Artificial Sequence
  Description of Artificial Sequence: Synthetic oligonucleotide
  Antisense strand to SEQ ID NO: 1763883
auccuugguaaagucacau

SEQ ID NO: 1763885 - RNA, 19 nt, Artificial Sequence
  Description of Artificial Sequence: Synthetic oligonucleotide
  Sense strand starting at position 2145 of SEQ ID NO: 1562665
gcuccuuugggauacuuga

SEQ ID NO: 1763886 - RNA, 19 nt, Artificial Sequence
  Description of Artificial Sequence: Synthetic oligonucleotide
  Antisense strand to SEQ ID NO: 1763885
ucaaguaucccaaaggagc

SEQ ID NO: 1763887 - RNA, 19 nt, Artificial Sequence
  Description of Artificial Sequence: Synthetic oligonucleotide
  Sense strand starting at position 2224 of SEQ ID NO: 1562665
cuuucucuugaaggagaca

SEQ ID NO: 1763888 - RNA, 19 nt, Artificial Sequence
  Description of Artificial Sequence: Synthetic oligonucleotide
  Antisense strand to SEQ ID NO: 1763887
ugucuccuucaagagaaag

SEQ ID NO: 1763889 - RNA, 19 nt, Artificial Sequence
  Description of Artificial Sequence: Synthetic oligonucleotide
  Sense strand starting at position 2408 of SEQ ID NO: 1562665
ggaaacauguagucaucca

SEQ ID NO: 1763890 - RNA, 19 nt, Artificial Sequence
  Description of Artificial Sequence: Synthetic oligonucleotide
  Antisense strand to SEQ ID NO: 1763889
uggaugacuacauguuucc

SEQ ID NO: 1763891 - RNA, 19 nt, Artificial Sequence
  Description of Artificial Sequence: Synthetic oligonucleotide
  Sense strand starting at position 2437 of SEQ ID NO: 1562665
acaagucguaaaggucuua

SEQ ID NO: 1763892 - RNA, 19 nt, Artificial Sequence
  Description of Artificial Sequence: Synthetic oligonucleotide
  Antisense strand to SEQ ID NO: 1763891
uaagaccuuuacgacuugu

SEQ ID NO: 1763893 - RNA, 19 nt, Artificial Sequence
  Description of Artificial Sequence: Synthetic oligonucleotide
  Sense strand starting at position 2494 of SEQ ID NO: 1562665
gcaagugacccuuaacuug

SEQ ID NO: 1763894 - RNA, 19 nt, Artificial Sequence
  Description of Artificial Sequence: Synthetic oligonucleotide
  Antisense strand to SEQ ID NO: 1763893
caaguuaagggucacuugc

SEQ ID NO: 1763895 - RNA, 19 nt, Artificial Sequence
  Description of Artificial Sequence: Synthetic oligonucleotide
  Sense strand starting at position 2511 of SEQ ID NO: 1562665
uguccaauuugccagaaac

SEQ ID NO: 1763896 - RNA, 19 nt, Artificial Sequence
  Description of Artificial Sequence: Synthetic oligonucleotide
  Antisense strand to SEQ ID NO: 1763895
guuucuggcaaauuggaca

SEQ ID NO: 1763897 - RNA, 19 nt, Artificial Sequence
  Description of Artificial Sequence: Synthetic oligonucleotide
  Sense strand starting at position 2760 of SEQ ID NO: 1562665
auauaaacuagugaguugu

SEQ ID NO: 1763898 - RNA, 19 nt, Artificial Sequence
  Description of Artificial Sequence: Synthetic oligonucleotide
  Antisense strand to SEQ ID NO: 1763897
acaacucacuaguuuauau

SEQ ID NO: 1763899 - RNA, 19 nt, Artificial Sequence
  Description of Artificial Sequence: Synthetic oligonucleotide
  Sense strand starting at position 2781 of SEQ ID NO: 1562665
uuuguuaauugcguuugau

SEQ ID NO: 1763900 - RNA, 19 nt, Artificial Sequence
  Description of Artificial Sequence: Synthetic oligonucleotide
  Antisense strand to SEQ ID NO: 1763899
aucaaacgcaauuaacaaa

SEQ ID NO: 1763901 - RNA, 19 nt, Artificial Sequence
  Description of Artificial Sequence: Synthetic oligonucleotide
  Sense strand starting at position 2784 of SEQ ID NO: 1562665
guuaauugcguuugauaau

SEQ ID NO: 1763902 - RNA, 19 nt, Artificial Sequence
  Description of Artificial Sequence: Synthetic oligonucleotide
  Antisense strand to SEQ ID NO: 1763901
auuaucaaacgcaauuaac

SEQ ID NO: 1763903 - RNA, 19 nt, Artificial Sequence
  Description of Artificial Sequence: Synthetic oligonucleotide
  Sense strand starting at position 2847 of SEQ ID NO: 1562665
accucagagucauacuaag

SEQ ID NO: 1763904 - RNA, 19 nt, Artificial Sequence
  Description of Artificial Sequence: Synthetic oligonucleotide
  Antisense strand to SEQ ID NO: 1763903
cuuaguaugacucugaggu

SEQ ID NO: 1763905 - RNA, 19 nt, Artificial Sequence
  Description of Artificial Sequence: Synthetic oligonucleotide
  Sense strand starting at position 2853 of SEQ ID NO: 1562665
gagucauacuaagugaagu

SEQ ID NO: 1763906 - RNA, 19 nt, Artificial Sequence
  Description of Artificial Sequence: Synthetic oligonucleotide
  Antisense strand to SEQ ID NO: 1763905
acuucacuuaguaugacuc

SEQ ID NO: 1763907 - RNA, 19 nt, Artificial Sequence
  Description of Artificial Sequence: Synthetic oligonucleotide
  Sense strand starting at position 2998 of SEQ ID NO: 1562665
aagguauucuggucuguua

SEQ ID NO: 1763908 - RNA, 19 nt, Artificial Sequence
  Description of Artificial Sequence: Synthetic oligonucleotide
  Antisense strand to SEQ ID NO: 1763907
uaacagaccagaauaccuu

SEQ ID NO: 1763909 - RNA, 19 nt, Artificial Sequence
  Description of Artificial Sequence: Synthetic oligonucleotide
  Sense strand starting at position 3000 of SEQ ID NO: 1562665
gguauucuggucuguuaau

SEQ ID NO: 1763910 - RNA, 19 nt, Artificial Sequence
  Description of Artificial Sequence: Synthetic oligonucleotide
  Antisense strand to SEQ ID NO: 1763909
auuaacagaccagaauacc

SEQ ID NO: 1763911 - RNA, 19 nt, Artificial Sequence
  Description of Artificial Sequence: Synthetic oligonucleotide
  Sense strand starting at position 3001 of SEQ ID NO: 1562665
guauucuggucuguuaaua

SEQ ID NO: 1763912 - RNA, 19 nt, Artificial Sequence
  Description of Artificial Sequence: Synthetic oligonucleotide
  Antisense strand to SEQ ID NO: 1763911
uauuaacagaccagaauac

SEQ ID NO: 1763913 - RNA, 19 nt, Artificial Sequence
  Description of Artificial Sequence: Synthetic oligonucleotide
  Sense strand starting at position 3070 of SEQ ID NO: 1562665
uagagauuauaagauggua

SEQ ID NO: 1763914 - RNA, 19 nt, Artificial Sequence
  Description of Artificial Sequence: Synthetic oligonucleotide
  Antisense strand to SEQ ID NO: 1763913
uaccaucuuauaaucucua

SEQ ID NO: 1763915 - RNA, 19 nt, Artificial Sequence
  Description of Artificial Sequence: Synthetic oligonucleotide
  Sense strand starting at position 3308 of SEQ ID NO: 1562665
gcaagacgcugucucuuua

SEQ ID NO: 1763916 - RNA, 19 nt, Artificial Sequence
  Description of Artificial Sequence: Synthetic oligonucleotide
  Antisense strand to SEQ ID NO: 1763915
uaaagagacagcgucuugc

SEQ ID NO: 1763917 - RNA, 19 nt, Artificial Sequence
  Description of Artificial Sequence: Synthetic oligonucleotide
  Sense strand starting at position 3338 of SEQ ID NO: 1562665
ccgguuacuaaugguuaaa

SEQ ID NO: 1763918 - RNA, 19 nt, Artificial Sequence
  Description of Artificial Sequence: Synthetic oligonucleotide
  Antisense strand to SEQ ID NO: 1763917
uuuaaccauuaguaaccgg

SEQ ID NO: 1763919 - RNA, 19 nt, Artificial Sequence
  Description of Artificial Sequence: Synthetic oligonucleotide
  Sense strand starting at position 3557 of SEQ ID NO: 1562665
gccugaauggcccaggaau

SEQ ID NO: 1763920 - RNA, 19 nt, Artificial Sequence
  Description of Artificial Sequence: Synthetic oligonucleotide
  Antisense strand to SEQ ID NO: 1763919
auuccugggccauucaggc

SEQ ID NO: 1763921 - RNA, 19 nt, Artificial Sequence
  Description of Artificial Sequence: Synthetic oligonucleotide
  Sense strand starting at position 3793 of SEQ ID NO: 1562665
gcaacugugaauggauaca

SEQ ID NO: 1763922 - RNA, 19 nt, Artificial Sequence
  Description of Artificial Sequence: Synthetic oligonucleotide
  Antisense strand to SEQ ID NO: 1763921
uguauccauucacaguugc

SEQ ID NO: 1763923 - RNA, 19 nt, Artificial Sequence
  Description of Artificial Sequence: Synthetic oligonucleotide
  Sense strand starting at position 3809 of SEQ ID NO: 1562665
acagaaaguuaucccuaug

SEQ ID NO: 1763924 - RNA, 19 nt, Artificial Sequence
  Description of Artificial Sequence: Synthetic oligonucleotide
  Antisense strand to SEQ ID NO: 1763923
cauagggauaacuuucugu

SEQ ID NO: 1763925 - RNA, 19 nt, Artificial Sequence
  Description of Artificial Sequence: Synthetic oligonucleotide
  Sense strand starting at position 3857 of SEQ ID NO: 1562665
ucaagaaagucugcagaaa

SEQ ID NO: 1763926 - RNA, 19 nt, Artificial Sequence
  Description of Artificial Sequence: Synthetic oligonucleotide
  Antisense strand to SEQ ID NO: 1763925
uuucugcagacuuucuuga

SEQ ID NO: 1763927 - RNA, 19 nt, Artificial Sequence
  Description of Artificial Sequence: Synthetic oligonucleotide
  Sense strand starting at position 3885 of SEQ ID NO: 1562665
auguuaugaggucaaagcu

SEQ ID NO: 1763928 - RNA, 19 nt, Artificial Sequence
  Description of Artificial Sequence: Synthetic oligonucleotide
  Antisense strand to SEQ ID NO: 1763927
agcuuugaccucauaacau

SEQ ID NO: 1763929 - RNA, 19 nt, Artificial Sequence
  Description of Artificial Sequence: Synthetic oligonucleotide
  Sense strand starting at position 3894 of SEQ ID NO: 1562665
ggucaaagcuggcuagaau

SEQ ID NO: 1763930 - RNA, 19 nt, Artificial Sequence
  Description of Artificial Sequence: Synthetic oligonucleotide
  Antisense strand to SEQ ID NO: 1763929
auucuagccagcuuugacc

SEQ ID NO: 1763931 - RNA, 19 nt, Artificial Sequence
  Description of Artificial Sequence: Synthetic oligonucleotide
  Sense strand starting at position 3895 of SEQ ID NO: 1562665
gucaaagcuggcuagaauu

SEQ ID NO: 1763932 - RNA, 19 nt, Artificial Sequence
  Description of Artificial Sequence: Synthetic oligonucleotide
  Antisense strand to SEQ ID NO: 1763931
aauucuagccagcuuugac

SEQ ID NO: 1763933 - RNA, 19 nt, Artificial Sequence
  Description of Artificial Sequence: Synthetic oligonucleotide
  Sense strand starting at position 3897 of SEQ ID NO: 1562665
caaagcuggcuagaauuga

SEQ ID NO: 1763934 - RNA, 19 nt, Artificial Sequence
  Description of Artificial Sequence: Synthetic oligonucleotide
  Antisense strand to SEQ ID NO: 1763933
ucaauucuagccagcuuug

SEQ ID NO: 1763935 - RNA, 19 nt, Artificial Sequence
  Description of Artificial Sequence: Synthetic oligonucleotide
  Sense strand starting at position 291 of SEQ ID NO: 1562666
ggaugugaguggaaucuga

SEQ ID NO: 1763936 - RNA, 19 nt, Artificial Sequence
  Description of Artificial Sequence: Synthetic oligonucleotide
  Antisense strand to SEQ ID NO: 1763935
ucagauuccacucacaucc

SEQ ID NO: 1763937 - RNA, 19 nt, Artificial Sequence
  Description of Artificial Sequence: Synthetic oligonucleotide
  Sense strand starting at position 469 of SEQ ID NO: 1562666
ccuaucaggccuugaacaa

SEQ ID NO: 1763938 - RNA, 19 nt, Artificial Sequence
  Description of Artificial Sequence: Synthetic oligonucleotide
  Antisense strand to SEQ ID NO: 1763937
uuguucaaggccugauagg

SEQ ID NO: 1763939 - RNA, 19 nt, Artificial Sequence
  Description of Artificial Sequence: Synthetic oligonucleotide
  Sense strand starting at position 1482 of SEQ ID NO: 1562666
agguguaagccauacugca

SEQ ID NO: 1763940 - RNA, 19 nt, Artificial Sequence
  Description of Artificial Sequence: Synthetic oligonucleotide
  Antisense strand to SEQ ID NO: 1763939
ugcaguauggcuuacaccu

SEQ ID NO: 1763941 - RNA, 19 nt, Artificial Sequence
  Description of Artificial Sequence: Synthetic oligonucleotide
  Sense strand starting at position 1572 of SEQ ID NO: 1562666
agucauggcuaccaagaga

SEQ ID NO: 1763942 - RNA, 19 nt, Artificial Sequence
  Description of Artificial Sequence: Synthetic oligonucleotide
  Antisense strand to SEQ ID NO: 1763941
ucucuugguagccaugacu

SEQ ID NO: 1763943 - RNA, 19 nt, Artificial Sequence
  Description of Artificial Sequence: Synthetic oligonucleotide
  Sense strand starting at position 1585 of SEQ ID NO: 1562666
aagagaauuuccuguguuc

SEQ ID NO: 1763944 - RNA, 19 nt, Artificial Sequence
  Description of Artificial Sequence: Synthetic oligonucleotide
  Antisense strand to SEQ ID NO: 1763943
gaacacaggaaauucucuu

SEQ ID NO: 1763945 - RNA, 19 nt, Artificial Sequence
  Description of Artificial Sequence: Synthetic oligonucleotide
  Sense strand starting at position 1828 of SEQ ID NO: 1562666
uccugucacuggucaccaa

SEQ ID NO: 1763946 - RNA, 19 nt, Artificial Sequence
  Description of Artificial Sequence: Synthetic oligonucleotide
  Antisense strand to SEQ ID NO: 1763945
uuggugaccagugacagga

SEQ ID NO: 1763947 - RNA, 19 nt, Artificial Sequence
  Description of Artificial Sequence: Synthetic oligonucleotide
  Sense strand starting at position 1831 of SEQ ID NO: 1562666
ugucacuggucaccaaaua

SEQ ID NO: 1763948 - RNA, 19 nt, Artificial Sequence
  Description of Artificial Sequence: Synthetic oligonucleotide
  Antisense strand to SEQ ID NO: 1763947
uauuuggugaccagugaca

SEQ ID NO: 1763949 - RNA, 19 nt, Artificial Sequence
  Description of Artificial Sequence: Synthetic oligonucleotide
  Sense strand starting at position 1832 of SEQ ID NO: 1562666
gucacuggucaccaaauau

SEQ ID NO: 1763950 - RNA, 19 nt, Artificial Sequence
  Description of Artificial Sequence: Synthetic oligonucleotide
  Antisense strand to SEQ ID NO: 1763949
auauuuggugaccagugac

SEQ ID NO: 1763951 - RNA, 19 nt, Artificial Sequence
  Description of Artificial Sequence: Synthetic oligonucleotide
  Sense strand starting at position 2016 of SEQ ID NO: 1562666
gcgggagucacaugguuug

SEQ ID NO: 1763952 - RNA, 19 nt, Artificial Sequence
  Description of Artificial Sequence: Synthetic oligonucleotide
  Antisense strand to SEQ ID NO: 1763951
caaaccaugugacucccgc

SEQ ID NO: 1763953 - RNA, 19 nt, Artificial Sequence
  Description of Artificial Sequence: Synthetic oligonucleotide
  Sense strand starting at position 2019 of SEQ ID NO: 1562666
ggagucacaugguuugauu

SEQ ID NO: 1763954 - RNA, 19 nt, Artificial Sequence
  Description of Artificial Sequence: Synthetic oligonucleotide
  Antisense strand to SEQ ID NO: 1763953
aaucaaaccaugugacucc

SEQ ID NO: 1763955 - RNA, 19 nt, Artificial Sequence
  Description of Artificial Sequence: Synthetic oligonucleotide
  Sense strand starting at position 2028 of SEQ ID NO: 1562666
ugguuugauuugugaucca

SEQ ID NO: 1763956 - RNA, 19 nt, Artificial Sequence
  Description of Artificial Sequence: Synthetic oligonucleotide
  Antisense strand to SEQ ID NO: 1763955
uggaucacaaaucaaacca

SEQ ID NO: 1763957 - RNA, 19 nt, Artificial Sequence
  Description of Artificial Sequence: Synthetic oligonucleotide
  Sense strand starting at position 2041 of SEQ ID NO: 1562666
gauccagugguccggaaga

SEQ ID NO: 1763958 - RNA, 19 nt, Artificial Sequence
  Description of Artificial Sequence: Synthetic oligonucleotide
  Antisense strand to SEQ ID NO: 1763957
ucuuccggaccacuggauc

SEQ ID NO: 1763959 - RNA, 19 nt, Artificial Sequence
  Description of Artificial Sequence: Synthetic oligonucleotide
  Sense strand starting at position 2043 of SEQ ID NO: 1562666
uccagugguccggaagaau

SEQ ID NO: 1763960 - RNA, 19 nt, Artificial Sequence
  Description of Artificial Sequence: Synthetic oligonucleotide
  Antisense strand to SEQ ID NO: 1763959
auucuuccggaccacugga

SEQ ID NO: 1763961 - RNA, 19 nt, Artificial Sequence
  Description of Artificial Sequence: Synthetic oligonucleotide
  Sense strand starting at position 2054 of SEQ ID NO: 1562666
ggaagaauaucggaugcag

SEQ ID NO: 1763962 - RNA, 19 nt, Artificial Sequence
  Description of Artificial Sequence: Synthetic oligonucleotide
  Antisense strand to SEQ ID NO: 1763961
cugcauccgauauucuucc

SEQ ID NO: 1763963 - RNA, 19 nt, Artificial Sequence
  Description of Artificial Sequence: Synthetic oligonucleotide
  Sense strand starting at position 2056 of SEQ ID NO: 1562666
aagaauaucggaugcagca

SEQ ID NO: 1763964 - RNA, 19 nt, Artificial Sequence
  Description of Artificial Sequence: Synthetic oligonucleotide
  Antisense strand to SEQ ID NO: 1763963
ugcugcauccgauauucuu

SEQ ID NO: 1763965 - RNA, 19 nt, Artificial Sequence
  Description of Artificial Sequence: Synthetic oligonucleotide
  Sense strand starting at position 2083 of SEQ ID NO: 1562666
agacauugcuucuaaugau

SEQ ID NO: 1763966 - RNA, 19 nt, Artificial Sequence
  Description of Artificial Sequence: Synthetic oligonucleotide
  Antisense strand to SEQ ID NO: 1763965
aucauuagaagcaaugucu

SEQ ID NO: 1763967 - RNA, 19 nt, Artificial Sequence
  Description of Artificial Sequence: Synthetic oligonucleotide
  Sense strand starting at position 2103 of SEQ ID NO: 1562666
uuaugauucugaguaaggc

SEQ ID NO: 1763968 - RNA, 19 nt, Artificial Sequence
  Description of Artificial Sequence: Synthetic oligonucleotide
  Antisense strand to SEQ ID NO: 1763967
gccuuacucagaaucauaa

SEQ ID NO: 1763969 - RNA, 19 nt, Artificial Sequence
  Description of Artificial Sequence: Synthetic oligonucleotide
  Sense strand starting at position 2104 of SEQ ID NO: 1562666
uaugauucugaguaaggcu

SEQ ID NO: 1763970 - RNA, 19 nt, Artificial Sequence
  Description of Artificial Sequence: Synthetic oligonucleotide
  Antisense strand to SEQ ID NO: 1763969
agccuuacucagaaucaua

SEQ ID NO: 1763971 - RNA, 19 nt, Artificial Sequence
  Description of Artificial Sequence: Synthetic oligonucleotide
  Sense strand starting at position 2694 of SEQ ID NO: 1562666
augugacuuuaccaaggau

SEQ ID NO: 1763972 - RNA, 19 nt, Artificial Sequence
  Description of Artificial Sequence: Synthetic oligonucleotide
  Antisense strand to SEQ ID NO: 1763971
auccuugguaaagucacau

SEQ ID NO: 1763973 - RNA, 19 nt, Artificial Sequence
  Description of Artificial Sequence: Synthetic oligonucleotide
  Sense strand starting at position 2730 of SEQ ID NO: 1562666
gcuccuuugggauacuuga

SEQ ID NO: 1763974 - RNA, 19 nt, Artificial Sequence
  Description of Artificial Sequence: Synthetic oligonucleotide
  Antisense strand to SEQ ID NO: 1763973
ucaaguaucccaaaggagc

SEQ ID NO: 1763975 - RNA, 19 nt, Artificial Sequence
  Description of Artificial Sequence: Synthetic oligonucleotide
  Sense strand starting at position 2805 of SEQ ID NO: 1562666
ccuacuuucucuugaagga

SEQ ID NO: 1763976 - RNA, 19 nt, Artificial Sequence
  Description of Artificial Sequence: Synthetic oligonucleotide
  Antisense strand to SEQ ID NO: 1763975
uccuucaagagaaaguagg

SEQ ID NO: 1763977 - RNA, 19 nt, Artificial Sequence
  Description of Artificial Sequence: Synthetic oligonucleotide
  Sense strand starting at position 2809 of SEQ ID NO: 1562666
cuuucucuugaaggagaca

SEQ ID NO: 1763978 - RNA, 19 nt, Artificial Sequence
  Description of Artificial Sequence: Synthetic oligonucleotide
  Antisense strand to SEQ ID NO: 1763977
ugucuccuucaagagaaag

SEQ ID NO: 1763979 - RNA, 19 nt, Artificial Sequence
  Description of Artificial Sequence: Synthetic oligonucleotide
  Sense strand starting at position 2993 of SEQ ID NO: 1562666
ggaaacauguagucaucca

SEQ ID NO: 1763980 - RNA, 19 nt, Artificial Sequence
  Description of Artificial Sequence: Synthetic oligonucleotide
  Antisense strand to SEQ ID NO: 1763979
uggaugacuacauguuucc

SEQ ID NO: 1763981 - RNA, 19 nt, Artificial Sequence
  Description of Artificial Sequence: Synthetic oligonucleotide
  Sense strand starting at position 3022 of SEQ ID NO: 1562666
acaagucguaaaggucuua

SEQ ID NO: 1763982 - RNA, 19 nt, Artificial Sequence
  Description of Artificial Sequence: Synthetic oligonucleotide
  Antisense strand to SEQ ID NO: 1763981
uaagaccuuuacgacuugu

SEQ ID NO: 1763983 - RNA, 19 nt, Artificial Sequence
  Description of Artificial Sequence: Synthetic oligonucleotide
  Sense strand starting at position 3079 of SEQ ID NO: 1562666
gcaagugacccuuaacuug

SEQ ID NO: 1763984 - RNA, 19 nt, Artificial Sequence
  Description of Artificial Sequence: Synthetic oligonucleotide
  Antisense strand to SEQ ID NO: 1763983
caaguuaagggucacuugc

SEQ ID NO: 1763985 - RNA, 19 nt, Artificial Sequence
  Description of Artificial Sequence: Synthetic oligonucleotide
  Sense strand starting at position 3096 of SEQ ID NO: 1562666
uguccaauuugccagaaac

SEQ ID NO: 1763986 - RNA, 19 nt, Artificial Sequence
  Description of Artificial Sequence: Synthetic oligonucleotide
  Antisense strand to SEQ ID NO: 1763985
guuucuggcaaauuggaca

SEQ ID NO: 1763987 - RNA, 19 nt, Artificial Sequence
  Description of Artificial Sequence: Synthetic oligonucleotide
  Sense strand starting at position 3345 of SEQ ID NO: 1562666
auauaaacuagugaguugu

SEQ ID NO: 1763988 - RNA, 19 nt, Artificial Sequence
  Description of Artificial Sequence: Synthetic oligonucleotide
  Antisense strand to SEQ ID NO: 1763987
acaacucacuaguuuauau

SEQ ID NO: 1763989 - RNA, 19 nt, Artificial Sequence
  Description of Artificial Sequence: Synthetic oligonucleotide
  Sense strand starting at position 3366 of SEQ ID NO: 1562666
uuuguuaauugcguuugau

SEQ ID NO: 1763990 - RNA, 19 nt, Artificial Sequence
  Description of Artificial Sequence: Synthetic oligonucleotide
  Antisense strand to SEQ ID NO: 1763989
aucaaacgcaauuaacaaa

SEQ ID NO: 1763991 - RNA, 19 nt, Artificial Sequence
  Description of Artificial Sequence: Synthetic oligonucleotide
  Sense strand starting at position 3369 of SEQ ID NO: 1562666
guuaauugcguuugauaau

SEQ ID NO: 1763992 - RNA, 19 nt, Artificial Sequence
  Description of Artificial Sequence: Synthetic oligonucleotide
  Antisense strand to SEQ ID NO: 1763991
auuaucaaacgcaauuaac

SEQ ID NO: 1763993 - RNA, 19 nt, Artificial Sequence
  Description of Artificial Sequence: Synthetic oligonucleotide
  Sense strand starting at position 3432 of SEQ ID NO: 1562666
accucagagucauacuaag

SEQ ID NO: 1763994 - RNA, 19 nt, Artificial Sequence
  Description of Artificial Sequence: Synthetic oligonucleotide
  Antisense strand to SEQ ID NO: 1763993
cuuaguaugacucugaggu

SEQ ID NO: 1763995 - RNA, 19 nt, Artificial Sequence
  Description of Artificial Sequence: Synthetic oligonucleotide
  Sense strand starting at position 3438 of SEQ ID NO: 1562666
gagucauacuaagugaagu

SEQ ID NO: 1763996 - RNA, 19 nt, Artificial Sequence
  Description of Artificial Sequence: Synthetic oligonucleotide
  Antisense strand to SEQ ID NO: 1763995
acuucacuuaguaugacuc

SEQ ID NO: 1763997 - RNA, 19 nt, Artificial Sequence
  Description of Artificial Sequence: Synthetic oligonucleotide
  Sense strand starting at position 3499 of SEQ ID NO: 1562666
agaagaaagugcugaaaca

SEQ ID NO: 1763998 - RNA, 19 nt, Artificial Sequence
  Description of Artificial Sequence: Synthetic oligonucleotide
  Antisense strand to SEQ ID NO: 1763997
uguuucagcacuuucuucu

SEQ ID NO: 1763999 - RNA, 19 nt, Artificial Sequence
  Description of Artificial Sequence: Synthetic oligonucleotide
  Sense strand starting at position 3583 of SEQ ID NO: 1562666
aagguauucuggucuguua

SEQ ID NO: 1764000 - RNA, 19 nt, Artificial Sequence
  Description of Artificial Sequence: Synthetic oligonucleotide
  Antisense strand to SEQ ID NO: 1763999
uaacagaccagaauaccuu

SEQ ID NO: 1764001 - RNA, 19 nt, Artificial Sequence
  Description of Artificial Sequence: Synthetic oligonucleotide
  Sense strand starting at position 3585 of SEQ ID NO: 1562666
gguauucuggucuguuaau

SEQ ID NO: 1764002 - RNA, 19 nt, Artificial Sequence
  Description of Artificial Sequence: Synthetic oligonucleotide
  Antisense strand to SEQ ID NO: 1764001
auuaacagaccagaauacc

SEQ ID NO: 1764003 - RNA, 19 nt, Artificial Sequence
  Description of Artificial Sequence: Synthetic oligonucleotide
  Sense strand starting at position 3586 of SEQ ID NO: 1562666
guauucuggucuguuaaua

SEQ ID NO: 1764004 - RNA, 19 nt, Artificial Sequence
  Description of Artificial Sequence: Synthetic oligonucleotide
  Antisense strand to SEQ ID NO: 1764003
uauuaacagaccagaauac

SEQ ID NO: 1764005 - RNA, 19 nt, Artificial Sequence
  Description of Artificial Sequence: Synthetic oligonucleotide
  Sense strand starting at position 3591 of SEQ ID NO: 1562666
cuggucuguuaauaaacau

SEQ ID NO: 1764006 - RNA, 19 nt, Artificial Sequence
  Description of Artificial Sequence: Synthetic oligonucleotide
  Antisense strand to SEQ ID NO: 1764005
auguuuauuaacagaccag

SEQ ID NO: 1764007 - RNA, 19 nt, Artificial Sequence
  Description of Artificial Sequence: Synthetic oligonucleotide
  Sense strand starting at position 3606 of SEQ ID NO: 1562666
acauguacuuggcacuuaa

SEQ ID NO: 1764008 - RNA, 19 nt, Artificial Sequence
  Description of Artificial Sequence: Synthetic oligonucleotide
  Antisense strand to SEQ ID NO: 1764007
uuaagugccaaguacaugu

SEQ ID NO: 1764009 - RNA, 19 nt, Artificial Sequence
  Description of Artificial Sequence: Synthetic oligonucleotide
  Sense strand starting at position 3655 of SEQ ID NO: 1562666
uagagauuauaagauggua

SEQ ID NO: 1764010 - RNA, 19 nt, Artificial Sequence
  Description of Artificial Sequence: Synthetic oligonucleotide
  Antisense strand to SEQ ID NO: 1764009
uaccaucuuauaaucucua

SEQ ID NO: 1764011 - RNA, 19 nt, Artificial Sequence
  Description of Artificial Sequence: Synthetic oligonucleotide
  Sense strand starting at position 3893 of SEQ ID NO: 1562666
gcaagacgcugucucuuua

SEQ ID NO: 1764012 - RNA, 19 nt, Artificial Sequence
  Description of Artificial Sequence: Synthetic oligonucleotide
  Antisense strand to SEQ ID NO: 1764011
uaaagagacagcgucuugc

SEQ ID NO: 1764013 - RNA, 19 nt, Artificial Sequence
  Description of Artificial Sequence: Synthetic oligonucleotide
  Sense strand starting at position 3923 of SEQ ID NO: 1562666
ccgguuacuaaugguuaaa

SEQ ID NO: 1764014 - RNA, 19 nt, Artificial Sequence
  Description of Artificial Sequence: Synthetic oligonucleotide
  Antisense strand to SEQ ID NO: 1764013
uuuaaccauuaguaaccgg

SEQ ID NO: 1764015 - RNA, 19 nt, Artificial Sequence
  Description of Artificial Sequence: Synthetic oligonucleotide
  Sense strand starting at position 582 of SEQ ID NO: 1562667
gcaguuuacccagagcugu

SEQ ID NO: 1764016 - RNA, 19 nt, Artificial Sequence
  Description of Artificial Sequence: Synthetic oligonucleotide
  Antisense strand to SEQ ID NO: 1764015
acagcucuggguaaacugc

SEQ ID NO: 1764017 - RNA, 19 nt, Artificial Sequence
  Description of Artificial Sequence: Synthetic oligonucleotide
  Sense strand starting at position 1270 of SEQ ID NO: 1562667
cccaguguguccuaacaca

SEQ ID NO: 1764018 - RNA, 19 nt, Artificial Sequence
  Description of Artificial Sequence: Synthetic oligonucleotide
  Antisense strand to SEQ ID NO: 1764017
uguguuaggacacacuggg

SEQ ID NO: 1764019 - RNA, 19 nt, Artificial Sequence
  Description of Artificial Sequence: Synthetic oligonucleotide
  Sense strand starting at position 1339 of SEQ ID NO: 1562667
gcacuaguucccugaguca

SEQ ID NO: 1764020 - RNA, 19 nt, Artificial Sequence
  Description of Artificial Sequence: Synthetic oligonucleotide
  Antisense strand to SEQ ID NO: 1764019
ugacucagggaacuagugc

SEQ ID NO: 1764021 - RNA, 19 nt, Artificial Sequence
  Description of Artificial Sequence: Synthetic oligonucleotide
  Sense strand starting at position 2622 of SEQ ID NO: 1562667
cguggcaugucccagauga

SEQ ID NO: 1764022 - RNA, 19 nt, Artificial Sequence
  Description of Artificial Sequence: Synthetic oligonucleotide
  Antisense strand to SEQ ID NO: 1764021
ucaucugggacaugccacg

SEQ ID NO: 1764023 - RNA, 19 nt, Artificial Sequence
  Description of Artificial Sequence: Synthetic oligonucleotide
  Sense strand starting at position 2624 of SEQ ID NO: 1562667
uggcaugucccagaugaga

SEQ ID NO: 1764024 - RNA, 19 nt, Artificial Sequence
  Description of Artificial Sequence: Synthetic oligonucleotide
  Antisense strand to SEQ ID NO: 1764023
ucucaucugggacaugcca

SEQ ID NO: 1764025 - RNA, 19 nt, Artificial Sequence
  Description of Artificial Sequence: Synthetic oligonucleotide
  Sense strand starting at position 2626 of SEQ ID NO: 1562667
gcaugucccagaugagaaa

SEQ ID NO: 1764026 - RNA, 19 nt, Artificial Sequence
  Description of Artificial Sequence: Synthetic oligonucleotide
  Antisense strand to SEQ ID NO: 1764025
uuucucaucugggacaugc

SEQ ID NO: 1764027 - RNA, 19 nt, Artificial Sequence
  Description of Artificial Sequence: Synthetic oligonucleotide
  Sense strand starting at position 2706 of SEQ ID NO: 1562667
cuugaaaccuguuugaaau

SEQ ID NO: 1764028 - RNA, 19 nt, Artificial Sequence
  Description of Artificial Sequence: Synthetic oligonucleotide
  Antisense strand to SEQ ID NO: 1764027
auuucaaacagguuucaag

SEQ ID NO: 1764029 - RNA, 19 nt, Artificial Sequence
  Description of Artificial Sequence: Synthetic oligonucleotide
  Sense strand starting at position 2718 of SEQ ID NO: 1562667
uugaaauccuccuggugug

SEQ ID NO: 1764030 - RNA, 19 nt, Artificial Sequence
  Description of Artificial Sequence: Synthetic oligonucleotide
  Antisense strand to SEQ ID NO: 1764029
cacaccaggaggauuucaa

SEQ ID NO: 1764031 - RNA, 19 nt, Artificial Sequence
  Description of Artificial Sequence: Synthetic oligonucleotide
  Sense strand starting at position 2719 of SEQ ID NO: 1562667
ugaaauccuccugguguga

SEQ ID NO: 1764032 - RNA, 19 nt, Artificial Sequence
  Description of Artificial Sequence: Synthetic oligonucleotide
  Antisense strand to SEQ ID NO: 1764031
ucacaccaggaggauuuca

SEQ ID NO: 1764033 - RNA, 19 nt, Artificial Sequence
  Description of Artificial Sequence: Synthetic oligonucleotide
  Sense strand starting at position 3169 of SEQ ID NO: 1562667
uggacaugugcucagcaga

SEQ ID NO: 1764034 - RNA, 19 nt, Artificial Sequence
  Description of Artificial Sequence: Synthetic oligonucleotide
  Antisense strand to SEQ ID NO: 1764033
ucugcugagcacaugucca

SEQ ID NO: 1764035 - RNA, 19 nt, Artificial Sequence
  Description of Artificial Sequence: Synthetic oligonucleotide
  Sense strand starting at position 3339 of SEQ ID NO: 1562667
agauguuauuucuguggaa

SEQ ID NO: 1764036 - RNA, 19 nt, Artificial Sequence
  Description of Artificial Sequence: Synthetic oligonucleotide
  Antisense strand to SEQ ID NO: 1764035
uuccacagaaauaacaucu

SEQ ID NO: 1764037 - RNA, 19 nt, Artificial Sequence
  Description of Artificial Sequence: Synthetic oligonucleotide
  Sense strand starting at position 3364 of SEQ ID NO: 1562667
uuugccuuuggauaaucau

SEQ ID NO: 1764038 - RNA, 19 nt, Artificial Sequence
  Description of Artificial Sequence: Synthetic oligonucleotide
  Antisense strand to SEQ ID NO: 1764037
augauuauccaaaggcaaa

SEQ ID NO: 1764039 - RNA, 19 nt, Artificial Sequence
  Description of Artificial Sequence: Synthetic oligonucleotide
  Sense strand starting at position 3367 of SEQ ID NO: 1562667
gccuuuggauaaucaucaa

SEQ ID NO: 1764040 - RNA, 19 nt, Artificial Sequence
  Description of Artificial Sequence: Synthetic oligonucleotide
  Antisense strand to SEQ ID NO: 1764039
uugaugauuauccaaaggc

SEQ ID NO: 1764041 - RNA, 19 nt, Artificial Sequence
  Description of Artificial Sequence: Synthetic oligonucleotide
  Sense strand starting at position 3491 of SEQ ID NO: 1562667
cgccuuuccggccucagaa

SEQ ID NO: 1764042 - RNA, 19 nt, Artificial Sequence
  Description of Artificial Sequence: Synthetic oligonucleotide
  Antisense strand to SEQ ID NO: 1764041
uucugaggccggaaaggcg

SEQ ID NO: 1764043 - RNA, 19 nt, Artificial Sequence
  Description of Artificial Sequence: Synthetic oligonucleotide
  Sense strand starting at position 3686 of SEQ ID NO: 1562667
ccugaagaguccuuaguac

SEQ ID NO: 1764044 - RNA, 19 nt, Artificial Sequence
  Description of Artificial Sequence: Synthetic oligonucleotide
  Antisense strand to SEQ ID NO: 1764043
guacuaaggacucuucagg

SEQ ID NO: 1764045 - RNA, 19 nt, Artificial Sequence
  Description of Artificial Sequence: Synthetic oligonucleotide
  Sense strand starting at position 3695 of SEQ ID NO: 1562667
uccuuaguaccuuggaaau

SEQ ID NO: 1764046 - RNA, 19 nt, Artificial Sequence
  Description of Artificial Sequence: Synthetic oligonucleotide
  Antisense strand to SEQ ID NO: 1764045
auuuccaagguacuaagga

SEQ ID NO: 1764047 - RNA, 19 nt, Artificial Sequence
  Description of Artificial Sequence: Synthetic oligonucleotide
  Sense strand starting at position 3697 of SEQ ID NO: 1562667
cuuaguaccuuggaaauga

SEQ ID NO: 1764048 - RNA, 19 nt, Artificial Sequence
  Description of Artificial Sequence: Synthetic oligonucleotide
  Antisense strand to SEQ ID NO: 1764047
ucauuuccaagguacuaag

SEQ ID NO: 1764049 - RNA, 19 nt, Artificial Sequence
  Description of Artificial Sequence: Synthetic oligonucleotide
  Sense strand starting at position 3706 of SEQ ID NO: 1562667
uuggaaaugauguguaaga

SEQ ID NO: 1764050 - RNA, 19 nt, Artificial Sequence
  Description of Artificial Sequence: Synthetic oligonucleotide
  Antisense strand to SEQ ID NO: 1764049
ucuuacacaucauuuccaa

SEQ ID NO: 1764051 - RNA, 19 nt, Artificial Sequence
  Description of Artificial Sequence: Synthetic oligonucleotide
  Sense strand starting at position 3707 of SEQ ID NO: 1562667
uggaaaugauguguaagac

SEQ ID NO: 1764052 - RNA, 19 nt, Artificial Sequence
  Description of Artificial Sequence: Synthetic oligonucleotide
  Antisense strand to SEQ ID NO: 1764051
gucuuacacaucauuucca

SEQ ID NO: 1764053 - RNA, 19 nt, Artificial Sequence
  Description of Artificial Sequence: Synthetic oligonucleotide
  Sense strand starting at position 3728 of SEQ ID NO: 1562667
agggcuaguuuaccaagaa

SEQ ID NO: 1764054 - RNA, 19 nt, Artificial Sequence
  Description of Artificial Sequence: Synthetic oligonucleotide
  Antisense strand to SEQ ID NO: 1764053
uucuugguaaacuagcccu

SEQ ID NO: 1764055 - RNA, 19 nt, Artificial Sequence
  Description of Artificial Sequence: Synthetic oligonucleotide
  Sense strand starting at position 3729 of SEQ ID NO: 1562667
gggcuaguuuaccaagaac

SEQ ID NO: 1764056 - RNA, 19 nt, Artificial Sequence
  Description of Artificial Sequence: Synthetic oligonucleotide
  Antisense strand to SEQ ID NO: 1764055
guucuugguaaacuagccc

SEQ ID NO: 1764057 - RNA, 19 nt, Artificial Sequence
  Description of Artificial Sequence: Synthetic oligonucleotide
  Sense strand starting at position 3906 of SEQ ID NO: 1562667
gugggaaucgugcugccuu

SEQ ID NO: 1764058 - RNA, 19 nt, Artificial Sequence
  Description of Artificial Sequence: Synthetic oligonucleotide
  Antisense strand to SEQ ID NO: 1764057
aaggcagcacgauucccac

SEQ ID NO: 1764059 - RNA, 19 nt, Artificial Sequence
  Description of Artificial Sequence: Synthetic oligonucleotide
  Sense strand starting at position 192 of SEQ ID NO: 1562668
cccagauccuggucaaguu

SEQ ID NO: 1764060 - RNA, 19 nt, Artificial Sequence
  Description of Artificial Sequence: Synthetic oligonucleotide
  Antisense strand to SEQ ID NO: 1764059
aacuugaccaggaucuggg

SEQ ID NO: 1764061 - RNA, 19 nt, Artificial Sequence
  Description of Artificial Sequence: Synthetic oligonucleotide
  Sense strand starting at position 479 of SEQ ID NO: 1562668
gucugacugcaucaaauga

SEQ ID NO: 1764062 - RNA, 19 nt, Artificial Sequence
  Description of Artificial Sequence: Synthetic oligonucleotide
  Antisense strand to SEQ ID NO: 1764061
ucauuugaugcagucagac

SEQ ID NO: 1764063 - RNA, 19 nt, Artificial Sequence
  Description of Artificial Sequence: Synthetic oligonucleotide
  Sense strand starting at position 510 of SEQ ID NO: 1562668
cuaagacaaugguugucau

SEQ ID NO: 1764064 - RNA, 19 nt, Artificial Sequence
  Description of Artificial Sequence: Synthetic oligonucleotide
  Antisense strand to SEQ ID NO: 1764063
augacaaccauugucuuag

SEQ ID NO: 1764065 - RNA, 19 nt, Artificial Sequence
  Description of Artificial Sequence: Synthetic oligonucleotide
  Sense strand starting at position 511 of SEQ ID NO: 1562668
uaagacaaugguugucaua

SEQ ID NO: 1764066 - RNA, 19 nt, Artificial Sequence
  Description of Artificial Sequence: Synthetic oligonucleotide
  Antisense strand to SEQ ID NO: 1764065
uaugacaaccauugucuua

SEQ ID NO: 1764067 - RNA, 19 nt, Artificial Sequence
  Description of Artificial Sequence: Synthetic oligonucleotide
  Sense strand starting at position 513 of SEQ ID NO: 1562668
agacaaugguugucauagg

SEQ ID NO: 1764068 - RNA, 19 nt, Artificial Sequence
  Description of Artificial Sequence: Synthetic oligonucleotide
  Antisense strand to SEQ ID NO: 1764067
ccuaugacaaccauugucu

SEQ ID NO: 1764069 - RNA, 19 nt, Artificial Sequence
  Description of Artificial Sequence: Synthetic oligonucleotide
  Sense strand starting at position 665 of SEQ ID NO: 1562668
gaggcaucucuggaugcaa

SEQ ID NO: 1764070 - RNA, 19 nt, Artificial Sequence
  Description of Artificial Sequence: Synthetic oligonucleotide
  Antisense strand to SEQ ID NO: 1764069
uugcauccagagaugccuc

SEQ ID NO: 1764071 - RNA, 19 nt, Artificial Sequence
  Description of Artificial Sequence: Synthetic oligonucleotide
  Sense strand starting at position 697 of SEQ ID NO: 1562668
aggagauguccacguugca

SEQ ID NO: 1764072 - RNA, 19 nt, Artificial Sequence
  Description of Artificial Sequence: Synthetic oligonucleotide
  Antisense strand to SEQ ID NO: 1764071
ugcaacguggacaucuccu

SEQ ID NO: 1764073 - RNA, 19 nt, Artificial Sequence
  Description of Artificial Sequence: Synthetic oligonucleotide
  Sense strand starting at position 700 of SEQ ID NO: 1562668
agauguccacguugcagaa

SEQ ID NO: 1764074 - RNA, 19 nt, Artificial Sequence
  Description of Artificial Sequence: Synthetic oligonucleotide
  Antisense strand to SEQ ID NO: 1764073
uucugcaacguggacaucu

SEQ ID NO: 1764075 - RNA, 19 nt, Artificial Sequence
  Description of Artificial Sequence: Synthetic oligonucleotide
  Sense strand starting at position 791 of SEQ ID NO: 1562668
gccauucugugggcagaaa

SEQ ID NO: 1764076 - RNA, 19 nt, Artificial Sequence
  Description of Artificial Sequence: Synthetic oligonucleotide
  Antisense strand to SEQ ID NO: 1764075
uuucugcccacagaauggc

SEQ ID NO: 1764077 - RNA, 19 nt, Artificial Sequence
  Description of Artificial Sequence: Synthetic oligonucleotide
  Sense strand starting at position 839 of SEQ ID NO: 1562668
agguuagccugccugugaa

SEQ ID NO: 1764078 - RNA, 19 nt, Artificial Sequence
  Description of Artificial Sequence: Synthetic oligonucleotide
  Antisense strand to SEQ ID NO: 1764077
uucacaggcaggcuaaccu

SEQ ID NO: 1764079 - RNA, 19 nt, Artificial Sequence
  Description of Artificial Sequence: Synthetic oligonucleotide
  Sense strand starting at position 851 of SEQ ID NO: 1562668
cugugaagucuugggaacu

SEQ ID NO: 1764080 - RNA, 19 nt, Artificial Sequence
  Description of Artificial Sequence: Synthetic oligonucleotide
  Antisense strand to SEQ ID NO: 1764079
aguucccaagacuucacag

SEQ ID NO: 1764081 - RNA, 19 nt, Artificial Sequence
  Description of Artificial Sequence: Synthetic oligonucleotide
  Sense strand starting at position 1123 of SEQ ID NO: 1562668
gcguuucuuccaggaguug

SEQ ID NO: 1764082 - RNA, 19 nt, Artificial Sequence
  Description of Artificial Sequence: Synthetic oligonucleotide
  Antisense strand to SEQ ID NO: 1764081
caacuccuggaagaaacgc

SEQ ID NO: 1764083 - RNA, 19 nt, Artificial Sequence
  Description of Artificial Sequence: Synthetic oligonucleotide
  Sense strand starting at position 1124 of SEQ ID NO: 1562668
cguuucuuccaggaguuga

SEQ ID NO: 1764084 - RNA, 19 nt, Artificial Sequence
  Description of Artificial Sequence: Synthetic oligonucleotide
  Antisense strand to SEQ ID NO: 1764083
ucaacuccuggaagaaacg

SEQ ID NO: 1764085 - RNA, 19 nt, Artificial Sequence
  Description of Artificial Sequence: Synthetic oligonucleotide
  Sense strand starting at position 1134 of SEQ ID NO: 1562668
aggaguugaucccagacag

SEQ ID NO: 1764086 - RNA, 19 nt, Artificial Sequence
  Description of Artificial Sequence: Synthetic oligonucleotide
  Antisense strand to SEQ ID NO: 1764085
cugucugggaucaacuccu

SEQ ID NO: 1764087 - RNA, 19 nt, Artificial Sequence
  Description of Artificial Sequence: Synthetic oligonucleotide
  Sense strand starting at position 1911 of SEQ ID NO: 1562668
uggguuucugugcggugaa

SEQ ID NO: 1764088 - RNA, 19 nt, Artificial Sequence
  Description of Artificial Sequence: Synthetic oligonucleotide
  Antisense strand to SEQ ID NO: 1764087
uucaccgcacagaaaccca

SEQ ID NO: 1764089 - RNA, 19 nt, Artificial Sequence
  Description of Artificial Sequence: Synthetic oligonucleotide
  Sense strand starting at position 1914 of SEQ ID NO: 1562668
guuucugugcggugaaggu

SEQ ID NO: 1764090 - RNA, 19 nt, Artificial Sequence
  Description of Artificial Sequence: Synthetic oligonucleotide
  Antisense strand to SEQ ID NO: 1764089
accuucaccgcacagaaac

SEQ ID NO: 1764091 - RNA, 19 nt, Artificial Sequence
  Description of Artificial Sequence: Synthetic oligonucleotide
  Sense strand starting at position 1973 of SEQ ID NO: 1562668
ugaggaugguggcuuuaga

SEQ ID NO: 1764092 - RNA, 19 nt, Artificial Sequence
  Description of Artificial Sequence: Synthetic oligonucleotide
  Antisense strand to SEQ ID NO: 1764091
ucuaaagccaccauccuca

SEQ ID NO: 1764093 - RNA, 19 nt, Artificial Sequence
  Description of Artificial Sequence: Synthetic oligonucleotide
  Sense strand starting at position 2016 of SEQ ID NO: 1562668
aaaggucaccgauguguca

SEQ ID NO: 1764094 - RNA, 19 nt, Artificial Sequence
  Description of Artificial Sequence: Synthetic oligonucleotide
  Antisense strand to SEQ ID NO: 1764093
ugacacaucggugaccuuu

SEQ ID NO: 1764095 - RNA, 19 nt, Artificial Sequence
  Description of Artificial Sequence: Synthetic oligonucleotide
  Sense strand starting at position 2228 of SEQ ID NO: 1562668
aagagucccuuugugugua

SEQ ID NO: 1764096 - RNA, 19 nt, Artificial Sequence
  Description of Artificial Sequence: Synthetic oligonucleotide
  Antisense strand to SEQ ID NO: 1764095
uacacacaaagggacucuu

SEQ ID NO: 1764097 - RNA, 19 nt, Artificial Sequence
  Description of Artificial Sequence: Synthetic oligonucleotide
  Sense strand starting at position 2243 of SEQ ID NO: 1562668
uguacugcucgguuuggua

SEQ ID NO: 1764098 - RNA, 19 nt, Artificial Sequence
  Description of Artificial Sequence: Synthetic oligonucleotide
  Antisense strand to SEQ ID NO: 1764097
uaccaaaccgagcaguaca

SEQ ID NO: 1764099 - RNA, 19 nt, Artificial Sequence
  Description of Artificial Sequence: Synthetic oligonucleotide
  Sense strand starting at position 2299 of SEQ ID NO: 1562668
gaagaagaagcuuguuuau

SEQ ID NO: 1764100 - RNA, 19 nt, Artificial Sequence
  Description of Artificial Sequence: Synthetic oligonucleotide
  Antisense strand to SEQ ID NO: 1764099
auaaacaagcuucuucuuc

SEQ ID NO: 1764101 - RNA, 19 nt, Artificial Sequence
  Description of Artificial Sequence: Synthetic oligonucleotide
  Sense strand starting at position 2301 of SEQ ID NO: 1562668
agaagaagcuuguuuauug

SEQ ID NO: 1764102 - RNA, 19 nt, Artificial Sequence
  Description of Artificial Sequence: Synthetic oligonucleotide
  Antisense strand to SEQ ID NO: 1764101
caauaaacaagcuucuucu

SEQ ID NO: 1764103 - RNA, 19 nt, Artificial Sequence
  Description of Artificial Sequence: Synthetic oligonucleotide
  Sense strand starting at position 2302 of SEQ ID NO: 1562668
gaagaagcuuguuuauugu

SEQ ID NO: 1764104 - RNA, 19 nt, Artificial Sequence
  Description of Artificial Sequence: Synthetic oligonucleotide
  Antisense strand to SEQ ID NO: 1764103
acaauaaacaagcuucuuc

SEQ ID NO: 1764105 - RNA, 19 nt, Artificial Sequence
  Description of Artificial Sequence: Synthetic oligonucleotide
  Sense strand starting at position 2578 of SEQ ID NO: 1562668
ugggcauaguccuagggaa

SEQ ID NO: 1764106 - RNA, 19 nt, Artificial Sequence
  Description of Artificial Sequence: Synthetic oligonucleotide
  Antisense strand to SEQ ID NO: 1764105
uucccuaggacuaugccca

SEQ ID NO: 1764107 - RNA, 19 nt, Artificial Sequence
  Description of Artificial Sequence: Synthetic oligonucleotide
  Sense strand starting at position 2746 of SEQ ID NO: 1562668
cagggucacuuaccaagua

SEQ ID NO: 1764108 - RNA, 19 nt, Artificial Sequence
  Description of Artificial Sequence: Synthetic oligonucleotide
  Antisense strand to SEQ ID NO: 1764107
uacuugguaagugacccug

SEQ ID NO: 1764109 - RNA, 19 nt, Artificial Sequence
  Description of Artificial Sequence: Synthetic oligonucleotide
  Sense strand starting at position 2747 of SEQ ID NO: 1562668
agggucacuuaccaaguaa

SEQ ID NO: 1764110 - RNA, 19 nt, Artificial Sequence
  Description of Artificial Sequence: Synthetic oligonucleotide
  Antisense strand to SEQ ID NO: 1764109
uuacuugguaagugacccu

SEQ ID NO: 1764111 - RNA, 19 nt, Artificial Sequence
  Description of Artificial Sequence: Synthetic oligonucleotide
  Sense strand starting at position 2764 of SEQ ID NO: 1562668
aaccaaauucuauggugga

SEQ ID NO: 1764112 - RNA, 19 nt, Artificial Sequence
  Description of Artificial Sequence: Synthetic oligonucleotide
  Antisense strand to SEQ ID NO: 1764111
uccaccauagaauuugguu

SEQ ID NO: 1764113 - RNA, 19 nt, Artificial Sequence
  Description of Artificial Sequence: Synthetic oligonucleotide
  Sense strand starting at position 2975 of SEQ ID NO: 1562668
uucccugcagcuugauaaa

SEQ ID NO: 1764114 - RNA, 19 nt, Artificial Sequence
  Description of Artificial Sequence: Synthetic oligonucleotide
  Antisense strand to SEQ ID NO: 1764113
uuuaucaagcugcagggaa

SEQ ID NO: 1764115 - RNA, 19 nt, Artificial Sequence
  Description of Artificial Sequence: Synthetic oligonucleotide
  Sense strand starting at position 3109 of SEQ ID NO: 1562668
gggagagggucucaccuuu

SEQ ID NO: 1764116 - RNA, 19 nt, Artificial Sequence
  Description of Artificial Sequence: Synthetic oligonucleotide
  Antisense strand to SEQ ID NO: 1764115
aaaggugagacccucuccc

SEQ ID NO: 1764117 - RNA, 19 nt, Artificial Sequence
  Description of Artificial Sequence: Synthetic oligonucleotide
  Sense strand starting at position 3333 of SEQ ID NO: 1562668
ugggccuugcuuuguagaa

SEQ ID NO: 1764118 - RNA, 19 nt, Artificial Sequence
  Description of Artificial Sequence: Synthetic oligonucleotide
  Antisense strand to SEQ ID NO: 1764117
uucuacaaagcaaggccca

SEQ ID NO: 1764119 - RNA, 19 nt, Artificial Sequence
  Description of Artificial Sequence: Synthetic oligonucleotide
  Sense strand starting at position 3334 of SEQ ID NO: 1562668
gggccuugcuuuguagaaa

SEQ ID NO: 1764120 - RNA, 19 nt, Artificial Sequence
  Description of Artificial Sequence: Synthetic oligonucleotide
  Antisense strand to SEQ ID NO: 1764119
uuucuacaaagcaaggccc

SEQ ID NO: 1764121 - RNA, 19 nt, Artificial Sequence
  Description of Artificial Sequence: Synthetic oligonucleotide
  Sense strand starting at position 3351 of SEQ ID NO: 1562668
aaggccauuccucgugagu

SEQ ID NO: 1764122 - RNA, 19 nt, Artificial Sequence
  Description of Artificial Sequence: Synthetic oligonucleotide
  Antisense strand to SEQ ID NO: 1764121
acucacgaggaauggccuu

SEQ ID NO: 1764123 - RNA, 19 nt, Artificial Sequence
  Description of Artificial Sequence: Synthetic oligonucleotide
  Sense strand starting at position 3354 of SEQ ID NO: 1562668
gccauuccucgugaguaua

SEQ ID NO: 1764124 - RNA, 19 nt, Artificial Sequence
  Description of Artificial Sequence: Synthetic oligonucleotide
  Antisense strand to SEQ ID NO: 1764123
uauacucacgaggaauggc

SEQ ID NO: 1764125 - RNA, 19 nt, Artificial Sequence
  Description of Artificial Sequence: Synthetic oligonucleotide
  Sense strand starting at position 3356 of SEQ ID NO: 1562668
cauuccucgugaguauaau

SEQ ID NO: 1764126 - RNA, 19 nt, Artificial Sequence
  Description of Artificial Sequence: Synthetic oligonucleotide
  Antisense strand to SEQ ID NO: 1764125
auuauacucacgaggaaug

SEQ ID NO: 1764127 - RNA, 19 nt, Artificial Sequence
  Description of Artificial Sequence: Synthetic oligonucleotide
  Sense strand starting at position 3357 of SEQ ID NO: 1562668
auuccucgugaguauaauc

SEQ ID NO: 1764128 - RNA, 19 nt, Artificial Sequence
  Description of Artificial Sequence: Synthetic oligonucleotide
  Antisense strand to SEQ ID NO: 1764127
gauuauacucacgaggaau

SEQ ID NO: 1764129 - RNA, 19 nt, Artificial Sequence
  Description of Artificial Sequence: Synthetic oligonucleotide
  Sense strand starting at position 3362 of SEQ ID NO: 1562668
ucgugaguauaaucauaaa

SEQ ID NO: 1764130 - RNA, 19 nt, Artificial Sequence
  Description of Artificial Sequence: Synthetic oligonucleotide
  Antisense strand to SEQ ID NO: 1764129
uuuaugauuauacucacga

SEQ ID NO: 1764131 - RNA, 19 nt, Artificial Sequence
  Description of Artificial Sequence: Synthetic oligonucleotide
  Sense strand starting at position 3616 of SEQ ID NO: 1562668
gggugagguucugcucacu

SEQ ID NO: 1764132 - RNA, 19 nt, Artificial Sequence
  Description of Artificial Sequence: Synthetic oligonucleotide
  Antisense strand to SEQ ID NO: 1764131
agugagcagaaccucaccc

SEQ ID NO: 1764133 - RNA, 19 nt, Artificial Sequence
  Description of Artificial Sequence: Synthetic oligonucleotide
  Sense strand starting at position 3651 of SEQ ID NO: 1562668
cuuccaucuuggguuagga

SEQ ID NO: 1764134 - RNA, 19 nt, Artificial Sequence
  Description of Artificial Sequence: Synthetic oligonucleotide
  Antisense strand to SEQ ID NO: 1764133
uccuaacccaagauggaag

SEQ ID NO: 1764135 - RNA, 19 nt, Artificial Sequence
  Description of Artificial Sequence: Synthetic oligonucleotide
  Sense strand starting at position 3694 of SEQ ID NO: 1562668
ccuggaugucauuguggca

SEQ ID NO: 1764136 - RNA, 19 nt, Artificial Sequence
  Description of Artificial Sequence: Synthetic oligonucleotide
  Antisense strand to SEQ ID NO: 1764135
ugccacaaugacauccagg

SEQ ID NO: 1764137 - RNA, 19 nt, Artificial Sequence
  Description of Artificial Sequence: Synthetic oligonucleotide
  Sense strand starting at position 3731 of SEQ ID NO: 1562668
gguagacucuaguaacuuc

SEQ ID NO: 1764138 - RNA, 19 nt, Artificial Sequence
  Description of Artificial Sequence: Synthetic oligonucleotide
  Antisense strand to SEQ ID NO: 1764137
gaaguuacuagagucuacc

SEQ ID NO: 1764139 - RNA, 19 nt, Artificial Sequence
  Description of Artificial Sequence: Synthetic oligonucleotide
  Sense strand starting at position 174 of SEQ ID NO: 1562669
cagucuuguccuggaauuc

SEQ ID NO: 1764140 - RNA, 19 nt, Artificial Sequence
  Description of Artificial Sequence: Synthetic oligonucleotide
  Antisense strand to SEQ ID NO: 1764139
gaauuccaggacaagacug

SEQ ID NO: 1764141 - RNA, 19 nt, Artificial Sequence
  Description of Artificial Sequence: Synthetic oligonucleotide
  Sense strand starting at position 175 of SEQ ID NO: 1562669
agucuuguccuggaauucu

SEQ ID NO: 1764142 - RNA, 19 nt, Artificial Sequence
  Description of Artificial Sequence: Synthetic oligonucleotide
  Antisense strand to SEQ ID NO: 1764141
agaauuccaggacaagacu

SEQ ID NO: 1764143 - RNA, 19 nt, Artificial Sequence
  Description of Artificial Sequence: Synthetic oligonucleotide
  Sense strand starting at position 186 of SEQ ID NO: 1562669
ggaauucuuuggccagcaa

SEQ ID NO: 1764144 - RNA, 19 nt, Artificial Sequence
  Description of Artificial Sequence: Synthetic oligonucleotide
  Antisense strand to SEQ ID NO: 1764143
uugcuggccaaagaauucc

SEQ ID NO: 1764145 - RNA, 19 nt, Artificial Sequence
  Description of Artificial Sequence: Synthetic oligonucleotide
  Sense strand starting at position 203 of SEQ ID NO: 1562669
aacuccaugcgguaauauu

SEQ ID NO: 1764146 - RNA, 19 nt, Artificial Sequence
  Description of Artificial Sequence: Synthetic oligonucleotide
  Antisense strand to SEQ ID NO: 1764145
aauauuaccgcauggaguu

SEQ ID NO: 1764147 - RNA, 19 nt, Artificial Sequence
  Description of Artificial Sequence: Synthetic oligonucleotide
  Sense strand starting at position 211 of SEQ ID NO: 1562669
gcgguaauauuccucauca

SEQ ID NO: 1764148 - RNA, 19 nt, Artificial Sequence
  Description of Artificial Sequence: Synthetic oligonucleotide
  Antisense strand to SEQ ID NO: 1764147
ugaugaggaauauuaccgc

SEQ ID NO: 1764149 - RNA, 19 nt, Artificial Sequence
  Description of Artificial Sequence: Synthetic oligonucleotide
  Sense strand starting at position 212 of SEQ ID NO: 1562669
cgguaauauuccucaucau

SEQ ID NO: 1764150 - RNA, 19 nt, Artificial Sequence
  Description of Artificial Sequence: Synthetic oligonucleotide
  Antisense strand to SEQ ID NO: 1764149
augaugaggaauauuaccg

SEQ ID NO: 1764151 - RNA, 19 nt, Artificial Sequence
  Description of Artificial Sequence: Synthetic oligonucleotide
  Sense strand starting at position 461 of SEQ ID NO: 1562669
gcugaauuguggcugacac

SEQ ID NO: 1764152 - RNA, 19 nt, Artificial Sequence
  Description of Artificial Sequence: Synthetic oligonucleotide
  Antisense strand to SEQ ID NO: 1764151
gugucagccacaauucagc

SEQ ID NO: 1764153 - RNA, 19 nt, Artificial Sequence
  Description of Artificial Sequence: Synthetic oligonucleotide
  Sense strand starting at position 501 of SEQ ID NO: 1562669
cagagaugucuggaagcug

SEQ ID NO: 1764154 - RNA, 19 nt, Artificial Sequence
  Description of Artificial Sequence: Synthetic oligonucleotide
  Antisense strand to SEQ ID NO: 1764153
cagcuuccagacaucucug

SEQ ID NO: 1764155 - RNA, 19 nt, Artificial Sequence
  Description of Artificial Sequence: Synthetic oligonucleotide
  Sense strand starting at position 782 of SEQ ID NO: 1562669
cccagauccuggucaaguu

SEQ ID NO: 1764156 - RNA, 19 nt, Artificial Sequence
  Description of Artificial Sequence: Synthetic oligonucleotide
  Antisense strand to SEQ ID NO: 1764155
aacuugaccaggaucuggg

SEQ ID NO: 1764157 - RNA, 19 nt, Artificial Sequence
  Description of Artificial Sequence: Synthetic oligonucleotide
  Sense strand starting at position 1069 of SEQ ID NO: 1562669
gucugacugcaucaaauga

SEQ ID NO: 1764158 - RNA, 19 nt, Artificial Sequence
  Description of Artificial Sequence: Synthetic oligonucleotide
  Antisense strand to SEQ ID NO: 1764157
ucauuugaugcagucagac

SEQ ID NO: 1764159 - RNA, 19 nt, Artificial Sequence
  Description of Artificial Sequence: Synthetic oligonucleotide
  Sense strand starting at position 1100 of SEQ ID NO: 1562669
cuaagacaaugguugucau

SEQ ID NO: 1764160 - RNA, 19 nt, Artificial Sequence
  Description of Artificial Sequence: Synthetic oligonucleotide
  Antisense strand to SEQ ID NO: 1764159
augacaaccauugucuuag

SEQ ID NO: 1764161 - RNA, 19 nt, Artificial Sequence
  Description of Artificial Sequence: Synthetic oligonucleotide
  Sense strand starting at position 1101 of SEQ ID NO: 1562669
uaagacaaugguugucaua

SEQ ID NO: 1764162 - RNA, 19 nt, Artificial Sequence
  Description of Artificial Sequence: Synthetic oligonucleotide
  Antisense strand to SEQ ID NO: 1764161
uaugacaaccauugucuua

SEQ ID NO: 1764163 - RNA, 19 nt, Artificial Sequence
  Description of Artificial Sequence: Synthetic oligonucleotide
  Sense strand starting at position 1103 of SEQ ID NO: 1562669
agacaaugguugucauagg

SEQ ID NO: 1764164 - RNA, 19 nt, Artificial Sequence
  Description of Artificial Sequence: Synthetic oligonucleotide
  Antisense strand to SEQ ID NO: 1764163
ccuaugacaaccauugucu

SEQ ID NO: 1764165 - RNA, 19 nt, Artificial Sequence
  Description of Artificial Sequence: Synthetic oligonucleotide
  Sense strand starting at position 1255 of SEQ ID NO: 1562669
gaggcaucucuggaugcaa

SEQ ID NO: 1764166 - RNA, 19 nt, Artificial Sequence
  Description of Artificial Sequence: Synthetic oligonucleotide
  Antisense strand to SEQ ID NO: 1764165
uugcauccagagaugccuc

SEQ ID NO: 1764167 - RNA, 19 nt, Artificial Sequence
  Description of Artificial Sequence: Synthetic oligonucleotide
  Sense strand starting at position 1287 of SEQ ID NO: 1562669
aggagauguccacguugca

SEQ ID NO: 1764168 - RNA, 19 nt, Artificial Sequence
  Description of Artificial Sequence: Synthetic oligonucleotide
  Antisense strand to SEQ ID NO: 1764167
ugcaacguggacaucuccu

SEQ ID NO: 1764169 - RNA, 19 nt, Artificial Sequence
  Description of Artificial Sequence: Synthetic oligonucleotide
  Sense strand starting at position 1290 of SEQ ID NO: 1562669
agauguccacguugcagaa

SEQ ID NO: 1764170 - RNA, 19 nt, Artificial Sequence
  Description of Artificial Sequence: Synthetic oligonucleotide
  Antisense strand to SEQ ID NO: 1764169
uucugcaacguggacaucu

SEQ ID NO: 1764171 - RNA, 19 nt, Artificial Sequence
  Description of Artificial Sequence: Synthetic oligonucleotide
  Sense strand starting at position 1381 of SEQ ID NO: 1562669
gccauucugugggcagaaa

SEQ ID NO: 1764172 - RNA, 19 nt, Artificial Sequence
  Description of Artificial Sequence: Synthetic oligonucleotide
  Antisense strand to SEQ ID NO: 1764171
uuucugcccacagaauggc

SEQ ID NO: 1764173 - RNA, 19 nt, Artificial Sequence
  Description of Artificial Sequence: Synthetic oligonucleotide
  Sense strand starting at position 1429 of SEQ ID NO: 1562669
agguuagccugccugugaa

SEQ ID NO: 1764174 - RNA, 19 nt, Artificial Sequence
  Description of Artificial Sequence: Synthetic oligonucleotide
  Antisense strand to SEQ ID NO: 1764173
uucacaggcaggcuaaccu

SEQ ID NO: 1764175 - RNA, 19 nt, Artificial Sequence
  Description of Artificial Sequence: Synthetic oligonucleotide
  Sense strand starting at position 1441 of SEQ ID NO: 1562669
cugugaagucuugggaacu

SEQ ID NO: 1764176 - RNA, 19 nt, Artificial Sequence
  Description of Artificial Sequence: Synthetic oligonucleotide
  Antisense strand to SEQ ID NO: 1764175
aguucccaagacuucacag

SEQ ID NO: 1764177 - RNA, 19 nt, Artificial Sequence
  Description of Artificial Sequence: Synthetic oligonucleotide
  Sense strand starting at position 1713 of SEQ ID NO: 1562669
gcguuucuuccaggaguug

SEQ ID NO: 1764178 - RNA, 19 nt, Artificial Sequence
  Description of Artificial Sequence: Synthetic oligonucleotide
  Antisense strand to SEQ ID NO: 1764177
caacuccuggaagaaacgc

SEQ ID NO: 1764179 - RNA, 19 nt, Artificial Sequence
  Description of Artificial Sequence: Synthetic oligonucleotide
  Sense strand starting at position 1714 of SEQ ID NO: 1562669
cguuucuuccaggaguuga

SEQ ID NO: 1764180 - RNA, 19 nt, Artificial Sequence
  Description of Artificial Sequence: Synthetic oligonucleotide
  Antisense strand to SEQ ID NO: 1764179
ucaacuccuggaagaaacg

SEQ ID NO: 1764181 - RNA, 19 nt, Artificial Sequence
  Description of Artificial Sequence: Synthetic oligonucleotide
  Sense strand starting at position 1724 of SEQ ID NO: 1562669
aggaguugaucccagacag

SEQ ID NO: 1764182 - RNA, 19 nt, Artificial Sequence
  Description of Artificial Sequence: Synthetic oligonucleotide
  Antisense strand to SEQ ID NO: 1764181
cugucugggaucaacuccu

SEQ ID NO: 1764183 - RNA, 19 nt, Artificial Sequence
  Description of Artificial Sequence: Synthetic oligonucleotide
  Sense strand starting at position 2563 of SEQ ID NO: 1562669
ugaggaugguggcuuuaga

SEQ ID NO: 1764184 - RNA, 19 nt, Artificial Sequence
  Description of Artificial Sequence: Synthetic oligonucleotide
  Antisense strand to SEQ ID NO: 1764183
ucuaaagccaccauccuca

SEQ ID NO: 1764185 - RNA, 19 nt, Artificial Sequence
  Description of Artificial Sequence: Synthetic oligonucleotide
  Sense strand starting at position 2606 of SEQ ID NO: 1562669
aaaggucaccgauguguca

SEQ ID NO: 1764186 - RNA, 19 nt, Artificial Sequence
  Description of Artificial Sequence: Synthetic oligonucleotide
  Antisense strand to SEQ ID NO: 1764185
ugacacaucggugaccuuu

SEQ ID NO: 1764187 - RNA, 19 nt, Artificial Sequence
  Description of Artificial Sequence: Synthetic oligonucleotide
  Sense strand starting at position 2818 of SEQ ID NO: 1562669
aagagucccuuugugugua

SEQ ID NO: 1764188 - RNA, 19 nt, Artificial Sequence
  Description of Artificial Sequence: Synthetic oligonucleotide
  Antisense strand to SEQ ID NO: 1764187
uacacacaaagggacucuu

SEQ ID NO: 1764189 - RNA, 19 nt, Artificial Sequence
  Description of Artificial Sequence: Synthetic oligonucleotide
  Sense strand starting at position 2833 of SEQ ID NO: 1562669
uguacugcucgguuuggua

SEQ ID NO: 1764190 - RNA, 19 nt, Artificial Sequence
  Description of Artificial Sequence: Synthetic oligonucleotide
  Antisense strand to SEQ ID NO: 1764189
uaccaaaccgagcaguaca

SEQ ID NO: 1764191 - RNA, 19 nt, Artificial Sequence
  Description of Artificial Sequence: Synthetic oligonucleotide
  Sense strand starting at position 2889 of SEQ ID NO: 1562669
gaagaagaagcuuguuuau

SEQ ID NO: 1764192 - RNA, 19 nt, Artificial Sequence
  Description of Artificial Sequence: Synthetic oligonucleotide
  Antisense strand to SEQ ID NO: 1764191
auaaacaagcuucuucuuc

SEQ ID NO: 1764193 - RNA, 19 nt, Artificial Sequence
  Description of Artificial Sequence: Synthetic oligonucleotide
  Sense strand starting at position 2891 of SEQ ID NO: 1562669
agaagaagcuuguuuauug

SEQ ID NO: 1764194 - RNA, 19 nt, Artificial Sequence
  Description of Artificial Sequence: Synthetic oligonucleotide
  Antisense strand to SEQ ID NO: 1764193
caauaaacaagcuucuucu

SEQ ID NO: 1764195 - RNA, 19 nt, Artificial Sequence
  Description of Artificial Sequence: Synthetic oligonucleotide
  Sense strand starting at position 2892 of SEQ ID NO: 1562669
gaagaagcuuguuuauugu

SEQ ID NO: 1764196 - RNA, 19 nt, Artificial Sequence
  Description of Artificial Sequence: Synthetic oligonucleotide
  Antisense strand to SEQ ID NO: 1764195
acaauaaacaagcuucuuc

SEQ ID NO: 1764197 - RNA, 19 nt, Artificial Sequence
  Description of Artificial Sequence: Synthetic oligonucleotide
  Sense strand starting at position 3336 of SEQ ID NO: 1562669
cagggucacuuaccaagua

SEQ ID NO: 1764198 - RNA, 19 nt, Artificial Sequence
  Description of Artificial Sequence: Synthetic oligonucleotide
  Antisense strand to SEQ ID NO: 1764197
uacuugguaagugacccug

SEQ ID NO: 1764199 - RNA, 19 nt, Artificial Sequence
  Description of Artificial Sequence: Synthetic oligonucleotide
  Sense strand starting at position 3337 of SEQ ID NO: 1562669
agggucacuuaccaaguaa

SEQ ID NO: 1764200 - RNA, 19 nt, Artificial Sequence
  Description of Artificial Sequence: Synthetic oligonucleotide
  Antisense strand to SEQ ID NO: 1764199
uuacuugguaagugacccu

SEQ ID NO: 1764201 - RNA, 19 nt, Artificial Sequence
  Description of Artificial Sequence: Synthetic oligonucleotide
  Sense strand starting at position 3354 of SEQ ID NO: 1562669
aaccaaauucuauggugga

SEQ ID NO: 1764202 - RNA, 19 nt, Artificial Sequence
  Description of Artificial Sequence: Synthetic oligonucleotide
  Antisense strand to SEQ ID NO: 1764201
uccaccauagaauuugguu

SEQ ID NO: 1764203 - RNA, 19 nt, Artificial Sequence
  Description of Artificial Sequence: Synthetic oligonucleotide
  Sense strand starting at position 3565 of SEQ ID NO: 1562669
uucccugcagcuugauaaa

SEQ ID NO: 1764204 - RNA, 19 nt, Artificial Sequence
  Description of Artificial Sequence: Synthetic oligonucleotide
  Antisense strand to SEQ ID NO: 1764203
uuuaucaagcugcagggaa

SEQ ID NO: 1764205 - RNA, 19 nt, Artificial Sequence
  Description of Artificial Sequence: Synthetic oligonucleotide
  Sense strand starting at position 3923 of SEQ ID NO: 1562669
ugggccuugcuuuguagaa

SEQ ID NO: 1764206 - RNA, 19 nt, Artificial Sequence
  Description of Artificial Sequence: Synthetic oligonucleotide
  Antisense strand to SEQ ID NO: 1764205
uucuacaaagcaaggccca

SEQ ID NO: 1764207 - RNA, 19 nt, Artificial Sequence
  Description of Artificial Sequence: Synthetic oligonucleotide
  Sense strand starting at position 3924 of SEQ ID NO: 1562669
gggccuugcuuuguagaaa

SEQ ID NO: 1764208 - RNA, 19 nt, Artificial Sequence
  Description of Artificial Sequence: Synthetic oligonucleotide
  Antisense strand to SEQ ID NO: 1764207
uuucuacaaagcaaggccc

SEQ ID NO: 1764209 - RNA, 19 nt, Artificial Sequence
  Description of Artificial Sequence: Synthetic oligonucleotide
  Sense strand starting at position 3941 of SEQ ID NO: 1562669
aaggccauuccucgugagu

SEQ ID NO: 1764210 - RNA, 19 nt, Artificial Sequence
  Description of Artificial Sequence: Synthetic oligonucleotide
  Antisense strand to SEQ ID NO: 1764209
acucacgaggaauggccuu

SEQ ID NO: 1764211 - RNA, 19 nt, Artificial Sequence
  Description of Artificial Sequence: Synthetic oligonucleotide
  Sense strand starting at position 3944 of SEQ ID NO: 1562669
gccauuccucgugaguaua

SEQ ID NO: 1764212 - RNA, 19 nt, Artificial Sequence
  Description of Artificial Sequence: Synthetic oligonucleotide
  Antisense strand to SEQ ID NO: 1764211
uauacucacgaggaauggc

SEQ ID NO: 1764213 - RNA, 19 nt, Artificial Sequence
  Description of Artificial Sequence: Synthetic oligonucleotide
  Sense strand starting at position 3946 of SEQ ID NO: 1562669
cauuccucgugaguauaau

SEQ ID NO: 1764214 - RNA, 19 nt, Artificial Sequence
  Description of Artificial Sequence: Synthetic oligonucleotide
  Antisense strand to SEQ ID NO: 1764213
auuauacucacgaggaaug

SEQ ID NO: 1764215 - RNA, 19 nt, Artificial Sequence
  Description of Artificial Sequence: Synthetic oligonucleotide
  Sense strand starting at position 3947 of SEQ ID NO: 1562669
auuccucgugaguauaauc

SEQ ID NO: 1764216 - RNA, 19 nt, Artificial Sequence
  Description of Artificial Sequence: Synthetic oligonucleotide
  Antisense strand to SEQ ID NO: 1764215
gauuauacucacgaggaau

SEQ ID NO: 1764217 - RNA, 19 nt, Artificial Sequence
  Description of Artificial Sequence: Synthetic oligonucleotide
  Sense strand starting at position 3952 of SEQ ID NO: 1562669
ucgugaguauaaucauaaa

SEQ ID NO: 1764218 - RNA, 19 nt, Artificial Sequence
  Description of Artificial Sequence: Synthetic oligonucleotide
  Antisense strand to SEQ ID NO: 1764217
uuuaugauuauacucacga

SEQ ID NO: 1764219 - RNA, 19 nt, Artificial Sequence
  Description of Artificial Sequence: Synthetic oligonucleotide
  Sense strand starting at position 11 of SEQ ID NO: 1562670
ggaaacaucuccugaaucc

SEQ ID NO: 1764220 - RNA, 19 nt, Artificial Sequence
  Description of Artificial Sequence: Synthetic oligonucleotide
  Antisense strand to SEQ ID NO: 1764219
ggauucaggagauguuucc

SEQ ID NO: 1764221 - RNA, 19 nt, Artificial Sequence
  Description of Artificial Sequence: Synthetic oligonucleotide
  Sense strand starting at position 73 of SEQ ID NO: 1562670
gcugaauuguggcugacac

SEQ ID NO: 1764222 - RNA, 19 nt, Artificial Sequence
  Description of Artificial Sequence: Synthetic oligonucleotide
  Antisense strand to SEQ ID NO: 1764221
gugucagccacaauucagc

SEQ ID NO: 1764223 - RNA, 19 nt, Artificial Sequence
  Description of Artificial Sequence: Synthetic oligonucleotide
  Sense strand starting at position 113 of SEQ ID NO: 1562670
cagagaugucuggaagcug

SEQ ID NO: 1764224 - RNA, 19 nt, Artificial Sequence
  Description of Artificial Sequence: Synthetic oligonucleotide
  Antisense strand to SEQ ID NO: 1764223
cagcuuccagacaucucug

SEQ ID NO: 1764225 - RNA, 19 nt, Artificial Sequence
  Description of Artificial Sequence: Synthetic oligonucleotide
  Sense strand starting at position 394 of SEQ ID NO: 1562670
cccagauccuggucaaguu

SEQ ID NO: 1764226 - RNA, 19 nt, Artificial Sequence
  Description of Artificial Sequence: Synthetic oligonucleotide
  Antisense strand to SEQ ID NO: 1764225
aacuugaccaggaucuggg

SEQ ID NO: 1764227 - RNA, 19 nt, Artificial Sequence
  Description of Artificial Sequence: Synthetic oligonucleotide
  Sense strand starting at position 681 of SEQ ID NO: 1562670
gucugacugcaucaaauga

SEQ ID NO: 1764228 - RNA, 19 nt, Artificial Sequence
  Description of Artificial Sequence: Synthetic oligonucleotide
  Antisense strand to SEQ ID NO: 1764227
ucauuugaugcagucagac

SEQ ID NO: 1764229 - RNA, 19 nt, Artificial Sequence
  Description of Artificial Sequence: Synthetic oligonucleotide
  Sense strand starting at position 712 of SEQ ID NO: 1562670
cuaagacaaugguugucau

SEQ ID NO: 1764230 - RNA, 19 nt, Artificial Sequence
  Description of Artificial Sequence: Synthetic oligonucleotide
  Antisense strand to SEQ ID NO: 1764229
augacaaccauugucuuag

SEQ ID NO: 1764231 - RNA, 19 nt, Artificial Sequence
  Description of Artificial Sequence: Synthetic oligonucleotide
  Sense strand starting at position 713 of SEQ ID NO: 1562670
uaagacaaugguugucaua

SEQ ID NO: 1764232 - RNA, 19 nt, Artificial Sequence
  Description of Artificial Sequence: Synthetic oligonucleotide
  Antisense strand to SEQ ID NO: 1764231
uaugacaaccauugucuua

SEQ ID NO: 1764233 - RNA, 19 nt, Artificial Sequence
  Description of Artificial Sequence: Synthetic oligonucleotide
  Sense strand starting at position 715 of SEQ ID NO: 1562670
agacaaugguugucauagg

SEQ ID NO: 1764234 - RNA, 19 nt, Artificial Sequence
  Description of Artificial Sequence: Synthetic oligonucleotide
  Antisense strand to SEQ ID NO: 1764233
ccuaugacaaccauugucu

SEQ ID NO: 1764235 - RNA, 19 nt, Artificial Sequence
  Description of Artificial Sequence: Synthetic oligonucleotide
  Sense strand starting at position 867 of SEQ ID NO: 1562670
gaggcaucucuggaugcaa

SEQ ID NO: 1764236 - RNA, 19 nt, Artificial Sequence
  Description of Artificial Sequence: Synthetic oligonucleotide
  Antisense strand to SEQ ID NO: 1764235
uugcauccagagaugccuc

SEQ ID NO: 1764237 - RNA, 19 nt, Artificial Sequence
  Description of Artificial Sequence: Synthetic oligonucleotide
  Sense strand starting at position 899 of SEQ ID NO: 1562670
aggagauguccacguugca

SEQ ID NO: 1764238 - RNA, 19 nt, Artificial Sequence
  Description of Artificial Sequence: Synthetic oligonucleotide
  Antisense strand to SEQ ID NO: 1764237
ugcaacguggacaucuccu

SEQ ID NO: 1764239 - RNA, 19 nt, Artificial Sequence
  Description of Artificial Sequence: Synthetic oligonucleotide
  Sense strand starting at position 902 of SEQ ID NO: 1562670
agauguccacguugcagaa

SEQ ID NO: 1764240 - RNA, 19 nt, Artificial Sequence
  Description of Artificial Sequence: Synthetic oligonucleotide
  Antisense strand to SEQ ID NO: 1764239
uucugcaacguggacaucu

SEQ ID NO: 1764241 - RNA, 19 nt, Artificial Sequence
  Description of Artificial Sequence: Synthetic oligonucleotide
  Sense strand starting at position 993 of SEQ ID NO: 1562670
gccauucugugggcagaaa

SEQ ID NO: 1764242 - RNA, 19 nt, Artificial Sequence
  Description of Artificial Sequence: Synthetic oligonucleotide
  Antisense strand to SEQ ID NO: 1764241
uuucugcccacagaauggc

SEQ ID NO: 1764243 - RNA, 19 nt, Artificial Sequence
  Description of Artificial Sequence: Synthetic oligonucleotide
  Sense strand starting at position 1041 of SEQ ID NO: 1562670
agguuagccugccugugaa

SEQ ID NO: 1764244 - RNA, 19 nt, Artificial Sequence
  Description of Artificial Sequence: Synthetic oligonucleotide
  Antisense strand to SEQ ID NO: 1764243
uucacaggcaggcuaaccu

SEQ ID NO: 1764245 - RNA, 19 nt, Artificial Sequence
  Description of Artificial Sequence: Synthetic oligonucleotide
  Sense strand starting at position 1053 of SEQ ID NO: 1562670
cugugaagucuugggaacu

SEQ ID NO: 1764246 - RNA, 19 nt, Artificial Sequence
  Description of Artificial Sequence: Synthetic oligonucleotide
  Antisense strand to SEQ ID NO: 1764245
aguucccaagacuucacag

SEQ ID NO: 1764247 - RNA, 19 nt, Artificial Sequence
  Description of Artificial Sequence: Synthetic oligonucleotide
  Sense strand starting at position 1325 of SEQ ID NO: 1562670
gcguuucuuccaggaguug

SEQ ID NO: 1764248 - RNA, 19 nt, Artificial Sequence
  Description of Artificial Sequence: Synthetic oligonucleotide
  Antisense strand to SEQ ID NO: 1764247
caacuccuggaagaaacgc

SEQ ID NO: 1764249 - RNA, 19 nt, Artificial Sequence
  Description of Artificial Sequence: Synthetic oligonucleotide
  Sense strand starting at position 1326 of SEQ ID NO: 1562670
cguuucuuccaggaguuga

SEQ ID NO: 1764250 - RNA, 19 nt, Artificial Sequence
  Description of Artificial Sequence: Synthetic oligonucleotide
  Antisense strand to SEQ ID NO: 1764249
ucaacuccuggaagaaacg

SEQ ID NO: 1764251 - RNA, 19 nt, Artificial Sequence
  Description of Artificial Sequence: Synthetic oligonucleotide
  Sense strand starting at position 1336 of SEQ ID NO: 1562670
aggaguugaucccagacag

SEQ ID NO: 1764252 - RNA, 19 nt, Artificial Sequence
  Description of Artificial Sequence: Synthetic oligonucleotide
  Antisense strand to SEQ ID NO: 1764251
cugucugggaucaacuccu

SEQ ID NO: 1764253 - RNA, 19 nt, Artificial Sequence
  Description of Artificial Sequence: Synthetic oligonucleotide
  Sense strand starting at position 2113 of SEQ ID NO: 1562670
uggguuucugugcggugaa

SEQ ID NO: 1764254 - RNA, 19 nt, Artificial Sequence
  Description of Artificial Sequence: Synthetic oligonucleotide
  Antisense strand to SEQ ID NO: 1764253
uucaccgcacagaaaccca

SEQ ID NO: 1764255 - RNA, 19 nt, Artificial Sequence
  Description of Artificial Sequence: Synthetic oligonucleotide
  Sense strand starting at position 2175 of SEQ ID NO: 1562670
ugaggaugguggcuuuaga

SEQ ID NO: 1764256 - RNA, 19 nt, Artificial Sequence
  Description of Artificial Sequence: Synthetic oligonucleotide
  Antisense strand to SEQ ID NO: 1764255
ucuaaagccaccauccuca

SEQ ID NO: 1764257 - RNA, 19 nt, Artificial Sequence
  Description of Artificial Sequence: Synthetic oligonucleotide
  Sense strand starting at position 2218 of SEQ ID NO: 1562670
aaaggucaccgauguguca

SEQ ID NO: 1764258 - RNA, 19 nt, Artificial Sequence
  Description of Artificial Sequence: Synthetic oligonucleotide
  Antisense strand to SEQ ID NO: 1764257
ugacacaucggugaccuuu

SEQ ID NO: 1764259 - RNA, 19 nt, Artificial Sequence
  Description of Artificial Sequence: Synthetic oligonucleotide
  Sense strand starting at position 2430 of SEQ ID NO: 1562670
aagagucccuuugugugua

SEQ ID NO: 1764260 - RNA, 19 nt, Artificial Sequence
  Description of Artificial Sequence: Synthetic oligonucleotide
  Antisense strand to SEQ ID NO: 1764259
uacacacaaagggacucuu

SEQ ID NO: 1764261 - RNA, 19 nt, Artificial Sequence
  Description of Artificial Sequence: Synthetic oligonucleotide
  Sense strand starting at position 2445 of SEQ ID NO: 1562670
uguacugcucgguuuggua

SEQ ID NO: 1764262 - RNA, 19 nt, Artificial Sequence
  Description of Artificial Sequence: Synthetic oligonucleotide
  Antisense strand to SEQ ID NO: 1764261
uaccaaaccgagcaguaca

SEQ ID NO: 1764263 - RNA, 19 nt, Artificial Sequence
  Description of Artificial Sequence: Synthetic oligonucleotide
  Sense strand starting at position 2501 of SEQ ID NO: 1562670
gaagaagaagcuuguuuau

SEQ ID NO: 1764264 - RNA, 19 nt, Artificial Sequence
  Description of Artificial Sequence: Synthetic oligonucleotide
  Antisense strand to SEQ ID NO: 1764263
auaaacaagcuucuucuuc

SEQ ID NO: 1764265 - RNA, 19 nt, Artificial Sequence
  Description of Artificial Sequence: Synthetic oligonucleotide
  Sense strand starting at position 2503 of SEQ ID NO: 1562670
agaagaagcuuguuuauug

SEQ ID NO: 1764266 - RNA, 19 nt, Artificial Sequence
  Description of Artificial Sequence: Synthetic oligonucleotide
  Antisense strand to SEQ ID NO: 1764265
caauaaacaagcuucuucu

SEQ ID NO: 1764267 - RNA, 19 nt, Artificial Sequence
  Description of Artificial Sequence: Synthetic oligonucleotide
  Sense strand starting at position 2504 of SEQ ID NO: 1562670
gaagaagcuuguuuauugu

SEQ ID NO: 1764268 - RNA, 19 nt, Artificial Sequence
  Description of Artificial Sequence: Synthetic oligonucleotide
  Antisense strand to SEQ ID NO: 1764267
acaauaaacaagcuucuuc

SEQ ID NO: 1764269 - RNA, 19 nt, Artificial Sequence
  Description of Artificial Sequence: Synthetic oligonucleotide
  Sense strand starting at position 2948 of SEQ ID NO: 1562670
cagggucacuuaccaagua

SEQ ID NO: 1764270 - RNA, 19 nt, Artificial Sequence
  Description of Artificial Sequence: Synthetic oligonucleotide
  Antisense strand to SEQ ID NO: 1764269
uacuugguaagugacccug

SEQ ID NO: 1764271 - RNA, 19 nt, Artificial Sequence
  Description of Artificial Sequence: Synthetic oligonucleotide
  Sense strand starting at position 2949 of SEQ ID NO: 1562670
agggucacuuaccaaguaa

SEQ ID NO: 1764272 - RNA, 19 nt, Artificial Sequence
  Description of Artificial Sequence: Synthetic oligonucleotide
  Antisense strand to SEQ ID NO: 1764271
uuacuugguaagugacccu

SEQ ID NO: 1764273 - RNA, 19 nt, Artificial Sequence
  Description of Artificial Sequence: Synthetic oligonucleotide
  Sense strand starting at position 2966 of SEQ ID NO: 1562670
aaccaaauucuauggugga

SEQ ID NO: 1764274 - RNA, 19 nt, Artificial Sequence
  Description of Artificial Sequence: Synthetic oligonucleotide
  Antisense strand to SEQ ID NO: 1764273
uccaccauagaauuugguu

SEQ ID NO: 1764275 - RNA, 19 nt, Artificial Sequence
  Description of Artificial Sequence: Synthetic oligonucleotide
  Sense strand starting at position 3177 of SEQ ID NO: 1562670
uucccugcagcuugauaaa

SEQ ID NO: 1764276 - RNA, 19 nt, Artificial Sequence
  Description of Artificial Sequence: Synthetic oligonucleotide
  Antisense strand to SEQ ID NO: 1764275
uuuaucaagcugcagggaa

SEQ ID NO: 1764277 - RNA, 19 nt, Artificial Sequence
  Description of Artificial Sequence: Synthetic oligonucleotide
  Sense strand starting at position 3311 of SEQ ID NO: 1562670
gggagagggucucaccuuu

SEQ ID NO: 1764278 - RNA, 19 nt, Artificial Sequence
  Description of Artificial Sequence: Synthetic oligonucleotide
  Antisense strand to SEQ ID NO: 1764277
aaaggugagacccucuccc

SEQ ID NO: 1764279 - RNA, 19 nt, Artificial Sequence
  Description of Artificial Sequence: Synthetic oligonucleotide
  Sense strand starting at position 3535 of SEQ ID NO: 1562670
ugggccuugcuuuguagaa

SEQ ID NO: 1764280 - RNA, 19 nt, Artificial Sequence
  Description of Artificial Sequence: Synthetic oligonucleotide
  Antisense strand to SEQ ID NO: 1764279
uucuacaaagcaaggccca

SEQ ID NO: 1764281 - RNA, 19 nt, Artificial Sequence
  Description of Artificial Sequence: Synthetic oligonucleotide
  Sense strand starting at position 3536 of SEQ ID NO: 1562670
gggccuugcuuuguagaaa

SEQ ID NO: 1764282 - RNA, 19 nt, Artificial Sequence
  Description of Artificial Sequence: Synthetic oligonucleotide
  Antisense strand to SEQ ID NO: 1764281
uuucuacaaagcaaggccc

SEQ ID NO: 1764283 - RNA, 19 nt, Artificial Sequence
  Description of Artificial Sequence: Synthetic oligonucleotide
  Sense strand starting at position 3553 of SEQ ID NO: 1562670
aaggccauuccucgugagu

SEQ ID NO: 1764284 - RNA, 19 nt, Artificial Sequence
  Description of Artificial Sequence: Synthetic oligonucleotide
  Antisense strand to SEQ ID NO: 1764283
acucacgaggaauggccuu

SEQ ID NO: 1764285 - RNA, 19 nt, Artificial Sequence
  Description of Artificial Sequence: Synthetic oligonucleotide
  Sense strand starting at position 3556 of SEQ ID NO: 1562670
gccauuccucgugaguaua

SEQ ID NO: 1764286 - RNA, 19 nt, Artificial Sequence
  Description of Artificial Sequence: Synthetic oligonucleotide
  Antisense strand to SEQ ID NO: 1764285
uauacucacgaggaauggc

SEQ ID NO: 1764287 - RNA, 19 nt, Artificial Sequence
  Description of Artificial Sequence: Synthetic oligonucleotide
  Sense strand starting at position 3558 of SEQ ID NO: 1562670
cauuccucgugaguauaau

SEQ ID NO: 1764288 - RNA, 19 nt, Artificial Sequence
  Description of Artificial Sequence: Synthetic oligonucleotide
  Antisense strand to SEQ ID NO: 1764287
auuauacucacgaggaaug

SEQ ID NO: 1764289 - RNA, 19 nt, Artificial Sequence
  Description of Artificial Sequence: Synthetic oligonucleotide
  Sense strand starting at position 3559 of SEQ ID NO: 1562670
auuccucgugaguauaauc

SEQ ID NO: 1764290 - RNA, 19 nt, Artificial Sequence
  Description of Artificial Sequence: Synthetic oligonucleotide
  Antisense strand to SEQ ID NO: 1764289
gauuauacucacgaggaau

SEQ ID NO: 1764291 - RNA, 19 nt, Artificial Sequence
  Description of Artificial Sequence: Synthetic oligonucleotide
  Sense strand starting at position 3564 of SEQ ID NO: 1562670
ucgugaguauaaucauaaa

SEQ ID NO: 1764292 - RNA, 19 nt, Artificial Sequence
  Description of Artificial Sequence: Synthetic oligonucleotide
  Antisense strand to SEQ ID NO: 1764291
uuuaugauuauacucacga

SEQ ID NO: 1764293 - RNA, 19 nt, Artificial Sequence
  Description of Artificial Sequence: Synthetic oligonucleotide
  Sense strand starting at position 3818 of SEQ ID NO: 1562670
gggugagguucugcucacu

SEQ ID NO: 1764294 - RNA, 19 nt, Artificial Sequence
  Description of Artificial Sequence: Synthetic oligonucleotide
  Antisense strand to SEQ ID NO: 1764293
agugagcagaaccucaccc

SEQ ID NO: 1764295 - RNA, 19 nt, Artificial Sequence
  Description of Artificial Sequence: Synthetic oligonucleotide
  Sense strand starting at position 3853 of SEQ ID NO: 1562670
cuuccaucuuggguuagga

SEQ ID NO: 1764296 - RNA, 19 nt, Artificial Sequence
  Description of Artificial Sequence: Synthetic oligonucleotide
  Antisense strand to SEQ ID NO: 1764295
uccuaacccaagauggaag

SEQ ID NO: 1764297 - RNA, 19 nt, Artificial Sequence
  Description of Artificial Sequence: Synthetic oligonucleotide
  Sense strand starting at position 3896 of SEQ ID NO: 1562670
ccuggaugucauuguggca

SEQ ID NO: 1764298 - RNA, 19 nt, Artificial Sequence
  Description of Artificial Sequence: Synthetic oligonucleotide
  Antisense strand to SEQ ID NO: 1764297
ugccacaaugacauccagg

SEQ ID NO: 1764299 - RNA, 19 nt, Artificial Sequence
  Description of Artificial Sequence: Synthetic oligonucleotide
  Sense strand starting at position 89 of SEQ ID NO: 1562671
aguggacucagcugugaac

SEQ ID NO: 1764300 - RNA, 19 nt, Artificial Sequence
  Description of Artificial Sequence: Synthetic oligonucleotide
  Antisense strand to SEQ ID NO: 1764299
guucacagcugaguccacu

SEQ ID NO: 1764301 - RNA, 19 nt, Artificial Sequence
  Description of Artificial Sequence: Synthetic oligonucleotide
  Sense strand starting at position 168 of SEQ ID NO: 1562671
acgcuaaagcaugagguua

SEQ ID NO: 1764302 - RNA, 19 nt, Artificial Sequence
  Description of Artificial Sequence: Synthetic oligonucleotide
  Antisense strand to SEQ ID NO: 1764301
uaaccucaugcuuuagcgu

SEQ ID NO: 1764303 - RNA, 19 nt, Artificial Sequence
  Description of Artificial Sequence: Synthetic oligonucleotide
  Sense strand starting at position 209 of SEQ ID NO: 1562671
gugcgaagugcuccaagcu

SEQ ID NO: 1764304 - RNA, 19 nt, Artificial Sequence
  Description of Artificial Sequence: Synthetic oligonucleotide
  Antisense strand to SEQ ID NO: 1764303
agcuuggagcacuucgcac

SEQ ID NO: 1764305 - RNA, 19 nt, Artificial Sequence
  Description of Artificial Sequence: Synthetic oligonucleotide
  Sense strand starting at position 316 of SEQ ID NO: 1562671
ucccaagaaucaugagaag

SEQ ID NO: 1764306 - RNA, 19 nt, Artificial Sequence
  Description of Artificial Sequence: Synthetic oligonucleotide
  Antisense strand to SEQ ID NO: 1764305
cuucucaugauucuuggga

SEQ ID NO: 1764307 - RNA, 19 nt, Artificial Sequence
  Description of Artificial Sequence: Synthetic oligonucleotide
  Sense strand starting at position 319 of SEQ ID NO: 1562671
caagaaucaugagaagaag

SEQ ID NO: 1764308 - RNA, 19 nt, Artificial Sequence
  Description of Artificial Sequence: Synthetic oligonucleotide
  Antisense strand to SEQ ID NO: 1764307
cuucuucucaugauucuug

SEQ ID NO: 1764309 - RNA, 19 nt, Artificial Sequence
  Description of Artificial Sequence: Synthetic oligonucleotide
  Sense strand starting at position 360 of SEQ ID NO: 1562671
ggauuucccugaggagaaa

SEQ ID NO: 1764310 - RNA, 19 nt, Artificial Sequence
  Description of Artificial Sequence: Synthetic oligonucleotide
  Antisense strand to SEQ ID NO: 1764309
uuucuccucagggaaaucc

SEQ ID NO: 1764311 - RNA, 19 nt, Artificial Sequence
  Description of Artificial Sequence: Synthetic oligonucleotide
  Sense strand starting at position 535 of SEQ ID NO: 1562671
ugcagcugaacguaacaua

SEQ ID NO: 1764312 - RNA, 19 nt, Artificial Sequence
  Description of Artificial Sequence: Synthetic oligonucleotide
  Antisense strand to SEQ ID NO: 1764311
uauguuacguucagcugca

SEQ ID NO: 1764313 - RNA, 19 nt, Artificial Sequence
  Description of Artificial Sequence: Synthetic oligonucleotide
  Sense strand starting at position 547 of SEQ ID NO: 1562671
uaacauaugcucuggagua

SEQ ID NO: 1764314 - RNA, 19 nt, Artificial Sequence
  Description of Artificial Sequence: Synthetic oligonucleotide
  Antisense strand to SEQ ID NO: 1764313
uacuccagagcauauguua

SEQ ID NO: 1764315 - RNA, 19 nt, Artificial Sequence
  Description of Artificial Sequence: Synthetic oligonucleotide
  Sense strand starting at position 549 of SEQ ID NO: 1562671
acauaugcucuggaguauu

SEQ ID NO: 1764316 - RNA, 19 nt, Artificial Sequence
  Description of Artificial Sequence: Synthetic oligonucleotide
  Antisense strand to SEQ ID NO: 1764315
aauacuccagagcauaugu

SEQ ID NO: 1764317 - RNA, 19 nt, Artificial Sequence
  Description of Artificial Sequence: Synthetic oligonucleotide
  Sense strand starting at position 552 of SEQ ID NO: 1562671
uaugcucuggaguauugua

SEQ ID NO: 1764318 - RNA, 19 nt, Artificial Sequence
  Description of Artificial Sequence: Synthetic oligonucleotide
  Antisense strand to SEQ ID NO: 1764317
uacaauacuccagagcaua

SEQ ID NO: 1764319 - RNA, 19 nt, Artificial Sequence
  Description of Artificial Sequence: Synthetic oligonucleotide
  Sense strand starting at position 566 of SEQ ID NO: 1562671
uuguaagguccaggaaaca

SEQ ID NO: 1764320 - RNA, 19 nt, Artificial Sequence
  Description of Artificial Sequence: Synthetic oligonucleotide
  Antisense strand to SEQ ID NO: 1764319
uguuuccuggaccuuacaa

SEQ ID NO: 1764321 - RNA, 19 nt, Artificial Sequence
  Description of Artificial Sequence: Synthetic oligonucleotide
  Sense strand starting at position 597 of SEQ ID NO: 1562671
uggacagaaucuucuccuu

SEQ ID NO: 1764322 - RNA, 19 nt, Artificial Sequence
  Description of Artificial Sequence: Synthetic oligonucleotide
  Antisense strand to SEQ ID NO: 1764321
aaggagaagauucugucca

SEQ ID NO: 1764323 - RNA, 19 nt, Artificial Sequence
  Description of Artificial Sequence: Synthetic oligonucleotide
  Sense strand starting at position 688 of SEQ ID NO: 1562671
gugggagcucccuacuguu

SEQ ID NO: 1764324 - RNA, 19 nt, Artificial Sequence
  Description of Artificial Sequence: Synthetic oligonucleotide
  Antisense strand to SEQ ID NO: 1764323
aacaguagggagcucccac

SEQ ID NO: 1764325 - RNA, 19 nt, Artificial Sequence
  Description of Artificial Sequence: Synthetic oligonucleotide
  Sense strand starting at position 713 of SEQ ID NO: 1562671
ccuuucuaagucugagguu

SEQ ID NO: 1764326 - RNA, 19 nt, Artificial Sequence
  Description of Artificial Sequence: Synthetic oligonucleotide
  Antisense strand to SEQ ID NO: 1764325
aaccucagacuuagaaagg

SEQ ID NO: 1764327 - RNA, 19 nt, Artificial Sequence
  Description of Artificial Sequence: Synthetic oligonucleotide
  Sense strand starting at position 890 of SEQ ID NO: 1562671
aggcgaaucucgcugaaac

SEQ ID NO: 1764328 - RNA, 19 nt, Artificial Sequence
  Description of Artificial Sequence: Synthetic oligonucleotide
  Antisense strand to SEQ ID NO: 1764327
guuucagcgagauucgccu

SEQ ID NO: 1764329 - RNA, 19 nt, Artificial Sequence
  Description of Artificial Sequence: Synthetic oligonucleotide
  Sense strand starting at position 891 of SEQ ID NO: 1562671
ggcgaaucucgcugaaaca

SEQ ID NO: 1764330 - RNA, 19 nt, Artificial Sequence
  Description of Artificial Sequence: Synthetic oligonucleotide
  Antisense strand to SEQ ID NO: 1764329
uguuucagcgagauucgcc

SEQ ID NO: 1764331 - RNA, 19 nt, Artificial Sequence
  Description of Artificial Sequence: Synthetic oligonucleotide
  Sense strand starting at position 1158 of SEQ ID NO: 1562671
agccauuaguccucaggga

SEQ ID NO: 1764332 - RNA, 19 nt, Artificial Sequence
  Description of Artificial Sequence: Synthetic oligonucleotide
  Antisense strand to SEQ ID NO: 1764331
ucccugaggacuaauggcu

SEQ ID NO: 1764333 - RNA, 19 nt, Artificial Sequence
  Description of Artificial Sequence: Synthetic oligonucleotide
  Sense strand starting at position 1159 of SEQ ID NO: 1562671
gccauuaguccucagggag

SEQ ID NO: 1764334 - RNA, 19 nt, Artificial Sequence
  Description of Artificial Sequence: Synthetic oligonucleotide
  Antisense strand to SEQ ID NO: 1764333
cucccugaggacuaauggc

SEQ ID NO: 1764335 - RNA, 19 nt, Artificial Sequence
  Description of Artificial Sequence: Synthetic oligonucleotide
  Sense strand starting at position 1219 of SEQ ID NO: 1562671
uguucugucucccugucau

SEQ ID NO: 1764336 - RNA, 19 nt, Artificial Sequence
  Description of Artificial Sequence: Synthetic oligonucleotide
  Antisense strand to SEQ ID NO: 1764335
augacagggagacagaaca

SEQ ID NO: 1764337 - RNA, 19 nt, Artificial Sequence
  Description of Artificial Sequence: Synthetic oligonucleotide
  Sense strand starting at position 2019 of SEQ ID NO: 1562671
ccgcuauugguugauggga

SEQ ID NO: 1764338 - RNA, 19 nt, Artificial Sequence
  Description of Artificial Sequence: Synthetic oligonucleotide
  Antisense strand to SEQ ID NO: 1764337
ucccaucaaccaauagcgg

SEQ ID NO: 1764339 - RNA, 19 nt, Artificial Sequence
  Description of Artificial Sequence: Synthetic oligonucleotide
  Sense strand starting at position 2062 of SEQ ID NO: 1562671
auccgaguucgccacgaga

SEQ ID NO: 1764340 - RNA, 19 nt, Artificial Sequence
  Description of Artificial Sequence: Synthetic oligonucleotide
  Antisense strand to SEQ ID NO: 1764339
ucucguggcgaacucggau

SEQ ID NO: 1764341 - RNA, 19 nt, Artificial Sequence
  Description of Artificial Sequence: Synthetic oligonucleotide
  Sense strand starting at position 2777 of SEQ ID NO: 1562671
aggcgcuugaggugaugaa

SEQ ID NO: 1764342 - RNA, 19 nt, Artificial Sequence
  Description of Artificial Sequence: Synthetic oligonucleotide
  Antisense strand to SEQ ID NO: 1764341
uucaucaccucaagcgccu

SEQ ID NO: 1764343 - RNA, 19 nt, Artificial Sequence
  Description of Artificial Sequence: Synthetic oligonucleotide
  Sense strand starting at position 2850 of SEQ ID NO: 1562671
gcgucuggauuucagagaa

SEQ ID NO: 1764344 - RNA, 19 nt, Artificial Sequence
  Description of Artificial Sequence: Synthetic oligonucleotide
  Antisense strand to SEQ ID NO: 1764343
uucucugaaauccagacgc

SEQ ID NO: 1764345 - RNA, 19 nt, Artificial Sequence
  Description of Artificial Sequence: Synthetic oligonucleotide
  Sense strand starting at position 2865 of SEQ ID NO: 1562671
agaacuccugccuguggaa

SEQ ID NO: 1764346 - RNA, 19 nt, Artificial Sequence
  Description of Artificial Sequence: Synthetic oligonucleotide
  Antisense strand to SEQ ID NO: 1764345
uuccacaggcaggaguucu

SEQ ID NO: 1764347 - RNA, 19 nt, Artificial Sequence
  Description of Artificial Sequence: Synthetic oligonucleotide
  Sense strand starting at position 2892 of SEQ ID NO: 1562671
ugcagauaacacugcacau

SEQ ID NO: 1764348 - RNA, 19 nt, Artificial Sequence
  Description of Artificial Sequence: Synthetic oligonucleotide
  Antisense strand to SEQ ID NO: 1764347
augugcaguguuaucugca

SEQ ID NO: 1764349 - RNA, 19 nt, Artificial Sequence
  Description of Artificial Sequence: Synthetic oligonucleotide
  Sense strand starting at position 3066 of SEQ ID NO: 1562671
cuccuaaguugggauuaca

SEQ ID NO: 1764350 - RNA, 19 nt, Artificial Sequence
  Description of Artificial Sequence: Synthetic oligonucleotide
  Antisense strand to SEQ ID NO: 1764349
uguaaucccaacuuaggag

SEQ ID NO: 1764351 - RNA, 19 nt, Artificial Sequence
  Description of Artificial Sequence: Synthetic oligonucleotide
  Sense strand starting at position 3234 of SEQ ID NO: 1562671
ugcuuagccugauuugauc

SEQ ID NO: 1764352 - RNA, 19 nt, Artificial Sequence
  Description of Artificial Sequence: Synthetic oligonucleotide
  Antisense strand to SEQ ID NO: 1764351
gaucaaaucaggcuaagca

SEQ ID NO: 1764353 - RNA, 19 nt, Artificial Sequence
  Description of Artificial Sequence: Synthetic oligonucleotide
  Sense strand starting at position 3246 of SEQ ID NO: 1562671
uuugaucaauuucgguaga

SEQ ID NO: 1764354 - RNA, 19 nt, Artificial Sequence
  Description of Artificial Sequence: Synthetic oligonucleotide
  Antisense strand to SEQ ID NO: 1764353
ucuaccgaaauugaucaaa

SEQ ID NO: 1764355 - RNA, 19 nt, Artificial Sequence
  Description of Artificial Sequence: Synthetic oligonucleotide
  Sense strand starting at position 3295 of SEQ ID NO: 1562671
agggucuuugcaggucauu

SEQ ID NO: 1764356 - RNA, 19 nt, Artificial Sequence
  Description of Artificial Sequence: Synthetic oligonucleotide
  Antisense strand to SEQ ID NO: 1764355
aaugaccugcaaagacccu

SEQ ID NO: 1764357 - RNA, 19 nt, Artificial Sequence
  Description of Artificial Sequence: Synthetic oligonucleotide
  Sense strand starting at position 3304 of SEQ ID NO: 1562671
gcaggucauucccuaaucu

SEQ ID NO: 1764358 - RNA, 19 nt, Artificial Sequence
  Description of Artificial Sequence: Synthetic oligonucleotide
  Antisense strand to SEQ ID NO: 1764357
agauuagggaaugaccugc

SEQ ID NO: 1764359 - RNA, 19 nt, Artificial Sequence
  Description of Artificial Sequence: Synthetic oligonucleotide
  Sense strand starting at position 3308 of SEQ ID NO: 1562671
gucauucccuaaucugaga

SEQ ID NO: 1764360 - RNA, 19 nt, Artificial Sequence
  Description of Artificial Sequence: Synthetic oligonucleotide
  Antisense strand to SEQ ID NO: 1764359
ucucagauuagggaaugac

SEQ ID NO: 1764361 - RNA, 19 nt, Artificial Sequence
  Description of Artificial Sequence: Synthetic oligonucleotide
  Sense strand starting at position 3313 of SEQ ID NO: 1562671
ucccuaaucugagaugcca

SEQ ID NO: 1764362 - RNA, 19 nt, Artificial Sequence
  Description of Artificial Sequence: Synthetic oligonucleotide
  Antisense strand to SEQ ID NO: 1764361
uggcaucucagauuaggga

SEQ ID NO: 1764363 - RNA, 19 nt, Artificial Sequence
  Description of Artificial Sequence: Synthetic oligonucleotide
  Sense strand starting at position 3321 of SEQ ID NO: 1562671
cugagaugccauuguucug

SEQ ID NO: 1764364 - RNA, 19 nt, Artificial Sequence
  Description of Artificial Sequence: Synthetic oligonucleotide
  Antisense strand to SEQ ID NO: 1764363
cagaacaauggcaucucag

SEQ ID NO: 1764365 - RNA, 19 nt, Artificial Sequence
  Description of Artificial Sequence: Synthetic oligonucleotide
  Sense strand starting at position 3324 of SEQ ID NO: 1562671
agaugccauuguucuguaa

SEQ ID NO: 1764366 - RNA, 19 nt, Artificial Sequence
  Description of Artificial Sequence: Synthetic oligonucleotide
  Antisense strand to SEQ ID NO: 1764365
uuacagaacaauggcaucu

SEQ ID NO: 1764367 - RNA, 19 nt, Artificial Sequence
  Description of Artificial Sequence: Synthetic oligonucleotide
  Sense strand starting at position 3328 of SEQ ID NO: 1562671
gccauuguucuguaaacca

SEQ ID NO: 1764368 - RNA, 19 nt, Artificial Sequence
  Description of Artificial Sequence: Synthetic oligonucleotide
  Antisense strand to SEQ ID NO: 1764367
ugguuuacagaacaauggc

SEQ ID NO: 1764369 - RNA, 19 nt, Artificial Sequence
  Description of Artificial Sequence: Synthetic oligonucleotide
  Sense strand starting at position 3381 of SEQ ID NO: 1562671
accugugggugcucucgaa

SEQ ID NO: 1764370 - RNA, 19 nt, Artificial Sequence
  Description of Artificial Sequence: Synthetic oligonucleotide
  Antisense strand to SEQ ID NO: 1764369
uucgagagcacccacaggu

SEQ ID NO: 1764371 - RNA, 19 nt, Artificial Sequence
  Description of Artificial Sequence: Synthetic oligonucleotide
  Sense strand starting at position 3576 of SEQ ID NO: 1562671
uucucaugcccucgaaagu

SEQ ID NO: 1764372 - RNA, 19 nt, Artificial Sequence
  Description of Artificial Sequence: Synthetic oligonucleotide
  Antisense strand to SEQ ID NO: 1764371
acuuucgagggcaugagaa

SEQ ID NO: 1764373 - RNA, 19 nt, Artificial Sequence
  Description of Artificial Sequence: Synthetic oligonucleotide
  Sense strand starting at position 3669 of SEQ ID NO: 1562671
agagucagcacguaauguu

SEQ ID NO: 1764374 - RNA, 19 nt, Artificial Sequence
  Description of Artificial Sequence: Synthetic oligonucleotide
  Antisense strand to SEQ ID NO: 1764373
aacauuacgugcugacucu

SEQ ID NO: 1764375 - RNA, 19 nt, Artificial Sequence
  Description of Artificial Sequence: Synthetic oligonucleotide
  Sense strand starting at position 3794 of SEQ ID NO: 1562671
cacaucuuggcacguagau

SEQ ID NO: 1764376 - RNA, 19 nt, Artificial Sequence
  Description of Artificial Sequence: Synthetic oligonucleotide
  Antisense strand to SEQ ID NO: 1764375
aucuacgugccaagaugug

SEQ ID NO: 1764377 - RNA, 19 nt, Artificial Sequence
  Description of Artificial Sequence: Synthetic oligonucleotide
  Sense strand starting at position 3866 of SEQ ID NO: 1562671
agcccaaguuggucuugaa

SEQ ID NO: 1764378 - RNA, 19 nt, Artificial Sequence
  Description of Artificial Sequence: Synthetic oligonucleotide
  Antisense strand to SEQ ID NO: 1764377
uucaagaccaacuugggcu

SEQ ID NO: 1764379 - RNA, 19 nt, Artificial Sequence
  Description of Artificial Sequence: Synthetic oligonucleotide
  Sense strand starting at position 34 of SEQ ID NO: 1562672
ggauacaacuaagugucau

SEQ ID NO: 1764380 - RNA, 19 nt, Artificial Sequence
  Description of Artificial Sequence: Synthetic oligonucleotide
  Antisense strand to SEQ ID NO: 1764379
augacacuuaguuguaucc

SEQ ID NO: 1764381 - RNA, 19 nt, Artificial Sequence
  Description of Artificial Sequence: Synthetic oligonucleotide
  Sense strand starting at position 105 of SEQ ID NO: 1562672
cagacugaucucuggccua

SEQ ID NO: 1764382 - RNA, 19 nt, Artificial Sequence
  Description of Artificial Sequence: Synthetic oligonucleotide
  Antisense strand to SEQ ID NO: 1764381
uaggccagagaucagucug

SEQ ID NO: 1764383 - RNA, 19 nt, Artificial Sequence
  Description of Artificial Sequence: Synthetic oligonucleotide
  Sense strand starting at position 108 of SEQ ID NO: 1562672
acugaucucuggccuacua

SEQ ID NO: 1764384 - RNA, 19 nt, Artificial Sequence
  Description of Artificial Sequence: Synthetic oligonucleotide
  Antisense strand to SEQ ID NO: 1764383
uaguaggccagagaucagu

SEQ ID NO: 1764385 - RNA, 19 nt, Artificial Sequence
  Description of Artificial Sequence: Synthetic oligonucleotide
  Sense strand starting at position 110 of SEQ ID NO: 1562672
ugaucucuggccuacuaau

SEQ ID NO: 1764386 - RNA, 19 nt, Artificial Sequence
  Description of Artificial Sequence: Synthetic oligonucleotide
  Antisense strand to SEQ ID NO: 1764385
auuaguaggccagagauca

SEQ ID NO: 1764387 - RNA, 19 nt, Artificial Sequence
  Description of Artificial Sequence: Synthetic oligonucleotide
  Sense strand starting at position 202 of SEQ ID NO: 1562672
cuuuguaauuaacguacua

SEQ ID NO: 1764388 - RNA, 19 nt, Artificial Sequence
  Description of Artificial Sequence: Synthetic oligonucleotide
  Antisense strand to SEQ ID NO: 1764387
uaguacguuaauuacaaag

SEQ ID NO: 1764389 - RNA, 19 nt, Artificial Sequence
  Description of Artificial Sequence: Synthetic oligonucleotide
  Sense strand starting at position 305 of SEQ ID NO: 1562672
guuucuaaacgcuaaagca

SEQ ID NO: 1764390 - RNA, 19 nt, Artificial Sequence
  Description of Artificial Sequence: Synthetic oligonucleotide
  Antisense strand to SEQ ID NO: 1764389
ugcuuuagcguuuagaaac

SEQ ID NO: 1764391 - RNA, 19 nt, Artificial Sequence
  Description of Artificial Sequence: Synthetic oligonucleotide
  Sense strand starting at position 408 of SEQ ID NO: 1562672
cgggauggugugcaaacuu

SEQ ID NO: 1764392 - RNA, 19 nt, Artificial Sequence
  Description of Artificial Sequence: Synthetic oligonucleotide
  Antisense strand to SEQ ID NO: 1764391
aaguuugcacaccaucccg

SEQ ID NO: 1764393 - RNA, 19 nt, Artificial Sequence
  Description of Artificial Sequence: Synthetic oligonucleotide
  Sense strand starting at position 415 of SEQ ID NO: 1562672
gugugcaaacuugugugua

SEQ ID NO: 1764394 - RNA, 19 nt, Artificial Sequence
  Description of Artificial Sequence: Synthetic oligonucleotide
  Antisense strand to SEQ ID NO: 1764393
uacacacaaguuugcacac

SEQ ID NO: 1764395 - RNA, 19 nt, Artificial Sequence
  Description of Artificial Sequence: Synthetic oligonucleotide
  Sense strand starting at position 416 of SEQ ID NO: 1562672
ugugcaaacuuguguguac

SEQ ID NO: 1764396 - RNA, 19 nt, Artificial Sequence
  Description of Artificial Sequence: Synthetic oligonucleotide
  Antisense strand to SEQ ID NO: 1764395
guacacacaaguuugcaca

SEQ ID NO: 1764397 - RNA, 19 nt, Artificial Sequence
  Description of Artificial Sequence: Synthetic oligonucleotide
  Sense strand starting at position 476 of SEQ ID NO: 1562672
gguggugagugcucggcua

SEQ ID NO: 1764398 - RNA, 19 nt, Artificial Sequence
  Description of Artificial Sequence: Synthetic oligonucleotide
  Antisense strand to SEQ ID NO: 1764397
uagccgagcacucaccacc

SEQ ID NO: 1764399 - RNA, 19 nt, Artificial Sequence
  Description of Artificial Sequence: Synthetic oligonucleotide
  Sense strand starting at position 477 of SEQ ID NO: 1562672
guggugagugcucggcuau

SEQ ID NO: 1764400 - RNA, 19 nt, Artificial Sequence
  Description of Artificial Sequence: Synthetic oligonucleotide
  Antisense strand to SEQ ID NO: 1764399
auagccgagcacucaccac

SEQ ID NO: 1764401 - RNA, 19 nt, Artificial Sequence
  Description of Artificial Sequence: Synthetic oligonucleotide
  Sense strand starting at position 478 of SEQ ID NO: 1562672
uggugagugcucggcuauc

SEQ ID NO: 1764402 - RNA, 19 nt, Artificial Sequence
  Description of Artificial Sequence: Synthetic oligonucleotide
  Antisense strand to SEQ ID NO: 1764401
gauagccgagcacucacca

SEQ ID NO: 1764403 - RNA, 19 nt, Artificial Sequence
  Description of Artificial Sequence: Synthetic oligonucleotide
  Sense strand starting at position 480 of SEQ ID NO: 1562672
gugagugcucggcuaucuu

SEQ ID NO: 1764404 - RNA, 19 nt, Artificial Sequence
  Description of Artificial Sequence: Synthetic oligonucleotide
  Antisense strand to SEQ ID NO: 1764403
aagauagccgagcacucac

SEQ ID NO: 1764405 - RNA, 19 nt, Artificial Sequence
  Description of Artificial Sequence: Synthetic oligonucleotide
  Sense strand starting at position 507 of SEQ ID NO: 1562672
caaagaagucuauggcuua

SEQ ID NO: 1764406 - RNA, 19 nt, Artificial Sequence
  Description of Artificial Sequence: Synthetic oligonucleotide
  Antisense strand to SEQ ID NO: 1764405
uaagccauagacuucuuug

SEQ ID NO: 1764407 - RNA, 19 nt, Artificial Sequence
  Description of Artificial Sequence: Synthetic oligonucleotide
  Sense strand starting at position 918 of SEQ ID NO: 1562672
cuaugcaaccaccguuaaa

SEQ ID NO: 1764408 - RNA, 19 nt, Artificial Sequence
  Description of Artificial Sequence: Synthetic oligonucleotide
  Antisense strand to SEQ ID NO: 1764407
uuuaacggugguugcauag

SEQ ID NO: 1764409 - RNA, 19 nt, Artificial Sequence
  Description of Artificial Sequence: Synthetic oligonucleotide
  Sense strand starting at position 963 of SEQ ID NO: 1562672
gagaaacagccucgugaga

SEQ ID NO: 1764410 - RNA, 19 nt, Artificial Sequence
  Description of Artificial Sequence: Synthetic oligonucleotide
  Antisense strand to SEQ ID NO: 1764409
ucucacgaggcuguuucuc

SEQ ID NO: 1764411 - RNA, 19 nt, Artificial Sequence
  Description of Artificial Sequence: Synthetic oligonucleotide
  Sense strand starting at position 998 of SEQ ID NO: 1562672
gcauccucuuauccaguga

SEQ ID NO: 1764412 - RNA, 19 nt, Artificial Sequence
  Description of Artificial Sequence: Synthetic oligonucleotide
  Antisense strand to SEQ ID NO: 1764411
ucacuggauaagaggaugc

SEQ ID NO: 1764413 - RNA, 19 nt, Artificial Sequence
  Description of Artificial Sequence: Synthetic oligonucleotide
  Sense strand starting at position 1002 of SEQ ID NO: 1562672
ccucuuauccagugaccca

SEQ ID NO: 1764414 - RNA, 19 nt, Artificial Sequence
  Description of Artificial Sequence: Synthetic oligonucleotide
  Antisense strand to SEQ ID NO: 1764413
ugggucacuggauaagagg

SEQ ID NO: 1764415 - RNA, 19 nt, Artificial Sequence
  Description of Artificial Sequence: Synthetic oligonucleotide
  Sense strand starting at position 1031 of SEQ ID NO: 1562672
cuagcuuucuguuaggaag

SEQ ID NO: 1764416 - RNA, 19 nt, Artificial Sequence
  Description of Artificial Sequence: Synthetic oligonucleotide
  Antisense strand to SEQ ID NO: 1764415
cuuccuaacagaaagcuag

SEQ ID NO: 1764417 - RNA, 19 nt, Artificial Sequence
  Description of Artificial Sequence: Synthetic oligonucleotide
  Sense strand starting at position 1117 of SEQ ID NO: 1562672
acaagcacucuucgacaga

SEQ ID NO: 1764418 - RNA, 19 nt, Artificial Sequence
  Description of Artificial Sequence: Synthetic oligonucleotide
  Antisense strand to SEQ ID NO: 1764417
ucugucgaagagugcuugu

SEQ ID NO: 1764419 - RNA, 19 nt, Artificial Sequence
  Description of Artificial Sequence: Synthetic oligonucleotide
  Sense strand starting at position 2283 of SEQ ID NO: 1562672
accugcuucugggaacaaa

SEQ ID NO: 1764420 - RNA, 19 nt, Artificial Sequence
  Description of Artificial Sequence: Synthetic oligonucleotide
  Antisense strand to SEQ ID NO: 1764419
uuuguucccagaagcaggu

SEQ ID NO: 1764421 - RNA, 19 nt, Artificial Sequence
  Description of Artificial Sequence: Synthetic oligonucleotide
  Sense strand starting at position 2561 of SEQ ID NO: 1562672
ggguuagauugacucaauu

SEQ ID NO: 1764422 - RNA, 19 nt, Artificial Sequence
  Description of Artificial Sequence: Synthetic oligonucleotide
  Antisense strand to SEQ ID NO: 1764421
aauugagucaaucuaaccc

SEQ ID NO: 1764423 - RNA, 19 nt, Artificial Sequence
  Description of Artificial Sequence: Synthetic oligonucleotide
  Sense strand starting at position 2574 of SEQ ID NO: 1562672
ucaauuaaguggucaagga

SEQ ID NO: 1764424 - RNA, 19 nt, Artificial Sequence
  Description of Artificial Sequence: Synthetic oligonucleotide
  Antisense strand to SEQ ID NO: 1764423
uccuugaccacuuaauuga

SEQ ID NO: 1764425 - RNA, 19 nt, Artificial Sequence
  Description of Artificial Sequence: Synthetic oligonucleotide
  Sense strand starting at position 2603 of SEQ ID NO: 1562672
uggguaaccuggcuaucau

SEQ ID NO: 1764426 - RNA, 19 nt, Artificial Sequence
  Description of Artificial Sequence: Synthetic oligonucleotide
  Antisense strand to SEQ ID NO: 1764425
augauagccagguuaccca

SEQ ID NO: 1764427 - RNA, 19 nt, Artificial Sequence
  Description of Artificial Sequence: Synthetic oligonucleotide
  Sense strand starting at position 2604 of SEQ ID NO: 1562672
ggguaaccuggcuaucaug

SEQ ID NO: 1764428 - RNA, 19 nt, Artificial Sequence
  Description of Artificial Sequence: Synthetic oligonucleotide
  Antisense strand to SEQ ID NO: 1764427
caugauagccagguuaccc

SEQ ID NO: 1764429 - RNA, 19 nt, Artificial Sequence
  Description of Artificial Sequence: Synthetic oligonucleotide
  Sense strand starting at position 2625 of SEQ ID NO: 1562672
cucugaacugcugaaagua

SEQ ID NO: 1764430 - RNA, 19 nt, Artificial Sequence
  Description of Artificial Sequence: Synthetic oligonucleotide
  Antisense strand to SEQ ID NO: 1764429
uacuuucagcaguucagag

SEQ ID NO: 1764431 - RNA, 19 nt, Artificial Sequence
  Description of Artificial Sequence: Synthetic oligonucleotide
  Sense strand starting at position 2697 of SEQ ID NO: 1562672
gccugcuucugccuauuua

SEQ ID NO: 1764432 - RNA, 19 nt, Artificial Sequence
  Description of Artificial Sequence: Synthetic oligonucleotide
  Antisense strand to SEQ ID NO: 1764431
uaaauaggcagaagcaggc

SEQ ID NO: 1764433 - RNA, 19 nt, Artificial Sequence
  Description of Artificial Sequence: Synthetic oligonucleotide
  Sense strand starting at position 3668 of SEQ ID NO: 1562672
gacgaaaucucaccauguu

SEQ ID NO: 1764434 - RNA, 19 nt, Artificial Sequence
  Description of Artificial Sequence: Synthetic oligonucleotide
  Antisense strand to SEQ ID NO: 1764433
aacauggugagauuucguc

SEQ ID NO: 1764435 - RNA, 19 nt, Artificial Sequence
  Description of Artificial Sequence: Synthetic oligonucleotide
  Sense strand starting at position 3669 of SEQ ID NO: 1562672
acgaaaucucaccauguug

SEQ ID NO: 1764436 - RNA, 19 nt, Artificial Sequence
  Description of Artificial Sequence: Synthetic oligonucleotide
  Antisense strand to SEQ ID NO: 1764435
caacauggugagauuucgu

SEQ ID NO: 1764437 - RNA, 19 nt, Artificial Sequence
  Description of Artificial Sequence: Synthetic oligonucleotide
  Sense strand starting at position 3753 of SEQ ID NO: 1562672
cgcccagcuauguaugaaa

SEQ ID NO: 1764438 - RNA, 19 nt, Artificial Sequence
  Description of Artificial Sequence: Synthetic oligonucleotide
  Antisense strand to SEQ ID NO: 1764437
uuucauacauagcugggcg

SEQ ID NO: 1764439 - RNA, 19 nt, Artificial Sequence
  Description of Artificial Sequence: Synthetic oligonucleotide
  Sense strand starting at position 3755 of SEQ ID NO: 1562672
cccagcuauguaugaaaca

SEQ ID NO: 1764440 - RNA, 19 nt, Artificial Sequence
  Description of Artificial Sequence: Synthetic oligonucleotide
  Antisense strand to SEQ ID NO: 1764439
uguuucauacauagcuggg

SEQ ID NO: 1764441 - RNA, 19 nt, Artificial Sequence
  Description of Artificial Sequence: Synthetic oligonucleotide
  Sense strand starting at position 3756 of SEQ ID NO: 1562672
ccagcuauguaugaaacaa

SEQ ID NO: 1764442 - RNA, 19 nt, Artificial Sequence
  Description of Artificial Sequence: Synthetic oligonucleotide
  Antisense strand to SEQ ID NO: 1764441
uuguuucauacauagcugg

SEQ ID NO: 1764443 - RNA, 19 nt, Artificial Sequence
  Description of Artificial Sequence: Synthetic oligonucleotide
  Sense strand starting at position 3814 of SEQ ID NO: 1562672
uaguaagcaucauaugagu

SEQ ID NO: 1764444 - RNA, 19 nt, Artificial Sequence
  Description of Artificial Sequence: Synthetic oligonucleotide
  Antisense strand to SEQ ID NO: 1764443
acucauaugaugcuuacua

SEQ ID NO: 1764445 - RNA, 19 nt, Artificial Sequence
  Description of Artificial Sequence: Synthetic oligonucleotide
  Sense strand starting at position 3825 of SEQ ID NO: 1562672
auaugagucuuccauuauu

SEQ ID NO: 1764446 - RNA, 19 nt, Artificial Sequence
  Description of Artificial Sequence: Synthetic oligonucleotide
  Antisense strand to SEQ ID NO: 1764445
aauaauggaagacucauau

SEQ ID NO: 1764447 - RNA, 19 nt, Artificial Sequence
  Description of Artificial Sequence: Synthetic oligonucleotide
  Sense strand starting at position 3828 of SEQ ID NO: 1562672
ugagucuuccauuauuauu

SEQ ID NO: 1764448 - RNA, 19 nt, Artificial Sequence
  Description of Artificial Sequence: Synthetic oligonucleotide
  Antisense strand to SEQ ID NO: 1764447
aauaauaauggaagacuca

SEQ ID NO: 1764449 - RNA, 19 nt, Artificial Sequence
  Description of Artificial Sequence: Synthetic oligonucleotide
  Sense strand starting at position 27 of SEQ ID NO: 1562673
cucugaaauggauggugua

SEQ ID NO: 1764450 - RNA, 19 nt, Artificial Sequence
  Description of Artificial Sequence: Synthetic oligonucleotide
  Antisense strand to SEQ ID NO: 1764449
uacaccauccauuucagag

SEQ ID NO: 1764451 - RNA, 19 nt, Artificial Sequence
  Description of Artificial Sequence: Synthetic oligonucleotide
  Sense strand starting at position 80 of SEQ ID NO: 1562673
acugaaugacacuggucua

SEQ ID NO: 1764452 - RNA, 19 nt, Artificial Sequence
  Description of Artificial Sequence: Synthetic oligonucleotide
  Antisense strand to SEQ ID NO: 1764451
uagaccagugucauucagu

SEQ ID NO: 1764453 - RNA, 19 nt, Artificial Sequence
  Description of Artificial Sequence: Synthetic oligonucleotide
  Sense strand starting at position 116 of SEQ ID NO: 1562673
auuaguguguccuuaacac

SEQ ID NO: 1764454 - RNA, 19 nt, Artificial Sequence
  Description of Artificial Sequence: Synthetic oligonucleotide
  Antisense strand to SEQ ID NO: 1764453
guguuaaggacacacuaau

SEQ ID NO: 1764455 - RNA, 19 nt, Artificial Sequence
  Description of Artificial Sequence: Synthetic oligonucleotide
  Sense strand starting at position 304 of SEQ ID NO: 1562673
gggugauguuggcuuucaa

SEQ ID NO: 1764456 - RNA, 19 nt, Artificial Sequence
  Description of Artificial Sequence: Synthetic oligonucleotide
  Antisense strand to SEQ ID NO: 1764455
uugaaagccaacaucaccc

SEQ ID NO: 1764457 - RNA, 19 nt, Artificial Sequence
  Description of Artificial Sequence: Synthetic oligonucleotide
  Sense strand starting at position 396 of SEQ ID NO: 1562673
ugggcagggucuguguaaa

SEQ ID NO: 1764458 - RNA, 19 nt, Artificial Sequence
  Description of Artificial Sequence: Synthetic oligonucleotide
  Antisense strand to SEQ ID NO: 1764457
uuuacacagacccugccca

SEQ ID NO: 1764459 - RNA, 19 nt, Artificial Sequence
  Description of Artificial Sequence: Synthetic oligonucleotide
  Sense strand starting at position 752 of SEQ ID NO: 1562673
gguggagauccgcaucaga

SEQ ID NO: 1764460 - RNA, 19 nt, Artificial Sequence
  Description of Artificial Sequence: Synthetic oligonucleotide
  Antisense strand to SEQ ID NO: 1764459
ucugaugcggaucuccacc

SEQ ID NO: 1764461 - RNA, 19 nt, Artificial Sequence
  Description of Artificial Sequence: Synthetic oligonucleotide
  Sense strand starting at position 861 of SEQ ID NO: 1562673
aggcaagagcagugauaaa

SEQ ID NO: 1764462 - RNA, 19 nt, Artificial Sequence
  Description of Artificial Sequence: Synthetic oligonucleotide
  Antisense strand to SEQ ID NO: 1764461
uuuaucacugcucuugccu

SEQ ID NO: 1764463 - RNA, 19 nt, Artificial Sequence
  Description of Artificial Sequence: Synthetic oligonucleotide
  Sense strand starting at position 868 of SEQ ID NO: 1562673
agcagugauaaaugugaga

SEQ ID NO: 1764464 - RNA, 19 nt, Artificial Sequence
  Description of Artificial Sequence: Synthetic oligonucleotide
  Antisense strand to SEQ ID NO: 1764463
ucucacauuuaucacugcu

SEQ ID NO: 1764465 - RNA, 19 nt, Artificial Sequence
  Description of Artificial Sequence: Synthetic oligonucleotide
  Sense strand starting at position 940 of SEQ ID NO: 1562673
augguugccaagugggaau

SEQ ID NO: 1764466 - RNA, 19 nt, Artificial Sequence
  Description of Artificial Sequence: Synthetic oligonucleotide
  Antisense strand to SEQ ID NO: 1764465
auucccacuuggcaaccau

SEQ ID NO: 1764467 - RNA, 19 nt, Artificial Sequence
  Description of Artificial Sequence: Synthetic oligonucleotide
  Sense strand starting at position 1127 of SEQ ID NO: 1562673
aguguaacaggucaacuuu

SEQ ID NO: 1764468 - RNA, 19 nt, Artificial Sequence
  Description of Artificial Sequence: Synthetic oligonucleotide
  Antisense strand to SEQ ID NO: 1764467
aaaguugaccuguuacacu

SEQ ID NO: 1764469 - RNA, 19 nt, Artificial Sequence
  Description of Artificial Sequence: Synthetic oligonucleotide
  Sense strand starting at position 1181 of SEQ ID NO: 1562673
cuguaugugacauacaagu

SEQ ID NO: 1764470 - RNA, 19 nt, Artificial Sequence
  Description of Artificial Sequence: Synthetic oligonucleotide
  Antisense strand to SEQ ID NO: 1764469
acuuguaugucacauacag

SEQ ID NO: 1764471 - RNA, 19 nt, Artificial Sequence
  Description of Artificial Sequence: Synthetic oligonucleotide
  Sense strand starting at position 1221 of SEQ ID NO: 1562673
gauugcaccucugugaaau

SEQ ID NO: 1764472 - RNA, 19 nt, Artificial Sequence
  Description of Artificial Sequence: Synthetic oligonucleotide
  Antisense strand to SEQ ID NO: 1764471
auuucacagaggugcaauc

SEQ ID NO: 1764473 - RNA, 19 nt, Artificial Sequence
  Description of Artificial Sequence: Synthetic oligonucleotide
  Sense strand starting at position 1222 of SEQ ID NO: 1562673
auugcaccucugugaaaua

SEQ ID NO: 1764474 - RNA, 19 nt, Artificial Sequence
  Description of Artificial Sequence: Synthetic oligonucleotide
  Antisense strand to SEQ ID NO: 1764473
uauuucacagaggugcaau

SEQ ID NO: 1764475 - RNA, 19 nt, Artificial Sequence
  Description of Artificial Sequence: Synthetic oligonucleotide
  Sense strand starting at position 1696 of SEQ ID NO: 1562673
ugcugaaaugcucagcaua

SEQ ID NO: 1764476 - RNA, 19 nt, Artificial Sequence
  Description of Artificial Sequence: Synthetic oligonucleotide
  Antisense strand to SEQ ID NO: 1764475
uaugcugagcauuucagca

SEQ ID NO: 1764477 - RNA, 19 nt, Artificial Sequence
  Description of Artificial Sequence: Synthetic oligonucleotide
  Sense strand starting at position 1698 of SEQ ID NO: 1562673
cugaaaugcucagcauaag

SEQ ID NO: 1764478 - RNA, 19 nt, Artificial Sequence
  Description of Artificial Sequence: Synthetic oligonucleotide
  Antisense strand to SEQ ID NO: 1764477
cuuaugcugagcauuucag

SEQ ID NO: 1764479 - RNA, 19 nt, Artificial Sequence
  Description of Artificial Sequence: Synthetic oligonucleotide
  Sense strand starting at position 1699 of SEQ ID NO: 1562673
ugaaaugcucagcauaaga

SEQ ID NO: 1764480 - RNA, 19 nt, Artificial Sequence
  Description of Artificial Sequence: Synthetic oligonucleotide
  Antisense strand to SEQ ID NO: 1764479
ucuuaugcugagcauuuca

SEQ ID NO: 1764481 - RNA, 19 nt, Artificial Sequence
  Description of Artificial Sequence: Synthetic oligonucleotide
  Sense strand starting at position 1751 of SEQ ID NO: 1562673
gguagcucugaugguggaa

SEQ ID NO: 1764482 - RNA, 19 nt, Artificial Sequence
  Description of Artificial Sequence: Synthetic oligonucleotide
  Antisense strand to SEQ ID NO: 1764481
uuccaccaucagagcuacc

SEQ ID NO: 1764483 - RNA, 19 nt, Artificial Sequence
  Description of Artificial Sequence: Synthetic oligonucleotide
  Sense strand starting at position 1754 of SEQ ID NO: 1562673
agcucugaugguggaaauu

SEQ ID NO: 1764484 - RNA, 19 nt, Artificial Sequence
  Description of Artificial Sequence: Synthetic oligonucleotide
  Antisense strand to SEQ ID NO: 1764483
aauuuccaccaucagagcu

SEQ ID NO: 1764485 - RNA, 19 nt, Artificial Sequence
  Description of Artificial Sequence: Synthetic oligonucleotide
  Sense strand starting at position 1763 of SEQ ID NO: 1562673
gguggaaauuuaggcaaua

SEQ ID NO: 1764486 - RNA, 19 nt, Artificial Sequence
  Description of Artificial Sequence: Synthetic oligonucleotide
  Antisense strand to SEQ ID NO: 1764485
uauugccuaaauuuccacc

SEQ ID NO: 1764487 - RNA, 19 nt, Artificial Sequence
  Description of Artificial Sequence: Synthetic oligonucleotide
  Sense strand starting at position 1841 of SEQ ID NO: 1562673
ggcucauccuugguuagga

SEQ ID NO: 1764488 - RNA, 19 nt, Artificial Sequence
  Description of Artificial Sequence: Synthetic oligonucleotide
  Antisense strand to SEQ ID NO: 1764487
uccuaaccaaggaugagcc

SEQ ID NO: 1764489 - RNA, 19 nt, Artificial Sequence
  Description of Artificial Sequence: Synthetic oligonucleotide
  Sense strand starting at position 1842 of SEQ ID NO: 1562673
gcucauccuugguuaggau

SEQ ID NO: 1764490 - RNA, 19 nt, Artificial Sequence
  Description of Artificial Sequence: Synthetic oligonucleotide
  Antisense strand to SEQ ID NO: 1764489
auccuaaccaaggaugagc

SEQ ID NO: 1764491 - RNA, 19 nt, Artificial Sequence
  Description of Artificial Sequence: Synthetic oligonucleotide
  Sense strand starting at position 1924 of SEQ ID NO: 1562673
ccagaaugcucacucagaa

SEQ ID NO: 1764492 - RNA, 19 nt, Artificial Sequence
  Description of Artificial Sequence: Synthetic oligonucleotide
  Antisense strand to SEQ ID NO: 1764491
uucugagugagcauucugg

SEQ ID NO: 1764493 - RNA, 19 nt, Artificial Sequence
  Description of Artificial Sequence: Synthetic oligonucleotide
  Sense strand starting at position 1959 of SEQ ID NO: 1562673
ccuccaaaccugggacuua

SEQ ID NO: 1764494 - RNA, 19 nt, Artificial Sequence
  Description of Artificial Sequence: Synthetic oligonucleotide
  Antisense strand to SEQ ID NO: 1764493
uaagucccagguuuggagg

SEQ ID NO: 1764495 - RNA, 19 nt, Artificial Sequence
  Description of Artificial Sequence: Synthetic oligonucleotide
  Sense strand starting at position 2187 of SEQ ID NO: 1562673
agggaucagccacgaagaa

SEQ ID NO: 1764496 - RNA, 19 nt, Artificial Sequence
  Description of Artificial Sequence: Synthetic oligonucleotide
  Antisense strand to SEQ ID NO: 1764495
uucuucguggcugaucccu

SEQ ID NO: 1764497 - RNA, 19 nt, Artificial Sequence
  Description of Artificial Sequence: Synthetic oligonucleotide
  Sense strand starting at position 2214 of SEQ ID NO: 1562673
guggaauauuggcccucau

SEQ ID NO: 1764498 - RNA, 19 nt, Artificial Sequence
  Description of Artificial Sequence: Synthetic oligonucleotide
  Antisense strand to SEQ ID NO: 1764497
augagggccaauauuccac

SEQ ID NO: 1764499 - RNA, 19 nt, Artificial Sequence
  Description of Artificial Sequence: Synthetic oligonucleotide
  Sense strand starting at position 2423 of SEQ ID NO: 1562673
ucaggaaaugccuauuccu

SEQ ID NO: 1764500 - RNA, 19 nt, Artificial Sequence
  Description of Artificial Sequence: Synthetic oligonucleotide
  Antisense strand to SEQ ID NO: 1764499
aggaauaggcauuuccuga

SEQ ID NO: 1764501 - RNA, 19 nt, Artificial Sequence
  Description of Artificial Sequence: Synthetic oligonucleotide
  Sense strand starting at position 2487 of SEQ ID NO: 1562673
uaggcuugccguuagagga

SEQ ID NO: 1764502 - RNA, 19 nt, Artificial Sequence
  Description of Artificial Sequence: Synthetic oligonucleotide
  Antisense strand to SEQ ID NO: 1764501
uccucuaacggcaagccua

SEQ ID NO: 1764503 - RNA, 19 nt, Artificial Sequence
  Description of Artificial Sequence: Synthetic oligonucleotide
  Sense strand starting at position 2513 of SEQ ID NO: 1562673
gaacuagacucugaaggau

SEQ ID NO: 1764504 - RNA, 19 nt, Artificial Sequence
  Description of Artificial Sequence: Synthetic oligonucleotide
  Antisense strand to SEQ ID NO: 1764503
auccuucagagucuaguuc

SEQ ID NO: 1764505 - RNA, 19 nt, Artificial Sequence
  Description of Artificial Sequence: Synthetic oligonucleotide
  Sense strand starting at position 2719 of SEQ ID NO: 1562673
gaugaauccggauggcacu

SEQ ID NO: 1764506 - RNA, 19 nt, Artificial Sequence
  Description of Artificial Sequence: Synthetic oligonucleotide
  Antisense strand to SEQ ID NO: 1764505
agugccauccggauucauc

SEQ ID NO: 1764507 - RNA, 19 nt, Artificial Sequence
  Description of Artificial Sequence: Synthetic oligonucleotide
  Sense strand starting at position 2785 of SEQ ID NO: 1562673
guggcacacuugccaaaua

SEQ ID NO: 1764508 - RNA, 19 nt, Artificial Sequence
  Description of Artificial Sequence: Synthetic oligonucleotide
  Antisense strand to SEQ ID NO: 1764507
uauuuggcaagugugccac

SEQ ID NO: 1764509 - RNA, 19 nt, Artificial Sequence
  Description of Artificial Sequence: Synthetic oligonucleotide
  Sense strand starting at position 2796 of SEQ ID NO: 1562673
gccaaauauccaggacuug

SEQ ID NO: 1764510 - RNA, 19 nt, Artificial Sequence
  Description of Artificial Sequence: Synthetic oligonucleotide
  Antisense strand to SEQ ID NO: 1764509
caaguccuggauauuuggc

SEQ ID NO: 1764511 - RNA, 19 nt, Artificial Sequence
  Description of Artificial Sequence: Synthetic oligonucleotide
  Sense strand starting at position 2856 of SEQ ID NO: 1562673
ugaauuggcguaugaggga

SEQ ID NO: 1764512 - RNA, 19 nt, Artificial Sequence
  Description of Artificial Sequence: Synthetic oligonucleotide
  Antisense strand to SEQ ID NO: 1764511
ucccucauacgccaauuca

SEQ ID NO: 1764513 - RNA, 19 nt, Artificial Sequence
  Description of Artificial Sequence: Synthetic oligonucleotide
  Sense strand starting at position 2894 of SEQ ID NO: 1562673
auacauacuuguguguaaa

SEQ ID NO: 1764514 - RNA, 19 nt, Artificial Sequence
  Description of Artificial Sequence: Synthetic oligonucleotide
  Antisense strand to SEQ ID NO: 1764513
uuuacacacaaguauguau

SEQ ID NO: 1764515 - RNA, 19 nt, Artificial Sequence
  Description of Artificial Sequence: Synthetic oligonucleotide
  Sense strand starting at position 2915 of SEQ ID NO: 1562673
ggguguaacaagcauagga

SEQ ID NO: 1764516 - RNA, 19 nt, Artificial Sequence
  Description of Artificial Sequence: Synthetic oligonucleotide
  Antisense strand to SEQ ID NO: 1764515
uccuaugcuuguuacaccc

SEQ ID NO: 1764517 - RNA, 19 nt, Artificial Sequence
  Description of Artificial Sequence: Synthetic oligonucleotide
  Sense strand starting at position 3026 of SEQ ID NO: 1562673
gcucaugaccuguaaagug

SEQ ID NO: 1764518 - RNA, 19 nt, Artificial Sequence
  Description of Artificial Sequence: Synthetic oligonucleotide
  Antisense strand to SEQ ID NO: 1764517
cacuuuacaggucaugagc

SEQ ID NO: 1764519 - RNA, 19 nt, Artificial Sequence
  Description of Artificial Sequence: Synthetic oligonucleotide
  Sense strand starting at position 3083 of SEQ ID NO: 1562673
cuaucaaacgcaugacuuu

SEQ ID NO: 1764520 - RNA, 19 nt, Artificial Sequence
  Description of Artificial Sequence: Synthetic oligonucleotide
  Antisense strand to SEQ ID NO: 1764519
aaagucaugcguuugauag

SEQ ID NO: 1764521 - RNA, 19 nt, Artificial Sequence
  Description of Artificial Sequence: Synthetic oligonucleotide
  Sense strand starting at position 3408 of SEQ ID NO: 1562673
aggaaugcaugacuuugau

SEQ ID NO: 1764522 - RNA, 19 nt, Artificial Sequence
  Description of Artificial Sequence: Synthetic oligonucleotide
  Antisense strand to SEQ ID NO: 1764521
aucaaagucaugcauuccu

SEQ ID NO: 1764523 - RNA, 19 nt, Artificial Sequence
  Description of Artificial Sequence: Synthetic oligonucleotide
  Sense strand starting at position 3582 of SEQ ID NO: 1562673
guaaguugggauuagucua

SEQ ID NO: 1764524 - RNA, 19 nt, Artificial Sequence
  Description of Artificial Sequence: Synthetic oligonucleotide
  Antisense strand to SEQ ID NO: 1764523
uagacuaaucccaacuuac

SEQ ID NO: 1764525 - RNA, 19 nt, Artificial Sequence
  Description of Artificial Sequence: Synthetic oligonucleotide
  Sense strand starting at position 3779 of SEQ ID NO: 1562673
cuggguucaugaguaaaga

SEQ ID NO: 1764526 - RNA, 19 nt, Artificial Sequence
  Description of Artificial Sequence: Synthetic oligonucleotide
  Antisense strand to SEQ ID NO: 1764525
ucuuuacucaugaacccag

SEQ ID NO: 1764527 - RNA, 19 nt, Artificial Sequence
  Description of Artificial Sequence: Synthetic oligonucleotide
  Sense strand starting at position 3789 of SEQ ID NO: 1562673
gaguaaagaagaugugagu

SEQ ID NO: 1764528 - RNA, 19 nt, Artificial Sequence
  Description of Artificial Sequence: Synthetic oligonucleotide
  Antisense strand to SEQ ID NO: 1764527
acucacaucuucuuuacuc

SEQ ID NO: 1764529 - RNA, 19 nt, Artificial Sequence
  Description of Artificial Sequence: Synthetic oligonucleotide
  Sense strand starting at position 402 of SEQ ID NO: 1562674
gcucguuuccucucuaucu

SEQ ID NO: 1764530 - RNA, 19 nt, Artificial Sequence
  Description of Artificial Sequence: Synthetic oligonucleotide
  Antisense strand to SEQ ID NO: 1764529
agauagagaggaaacgagc

SEQ ID NO: 1764531 - RNA, 19 nt, Artificial Sequence
  Description of Artificial Sequence: Synthetic oligonucleotide
  Sense strand starting at position 429 of SEQ ID NO: 1562674
aacgguuaagccuggaagu

SEQ ID NO: 1764532 - RNA, 19 nt, Artificial Sequence
  Description of Artificial Sequence: Synthetic oligonucleotide
  Antisense strand to SEQ ID NO: 1764531
acuuccaggcuuaaccguu

SEQ ID NO: 1764533 - RNA, 19 nt, Artificial Sequence
  Description of Artificial Sequence: Synthetic oligonucleotide
  Sense strand starting at position 430 of SEQ ID NO: 1562674
acgguuaagccuggaaguu

SEQ ID NO: 1764534 - RNA, 19 nt, Artificial Sequence
  Description of Artificial Sequence: Synthetic oligonucleotide
  Antisense strand to SEQ ID NO: 1764533
aacuuccaggcuuaaccgu

SEQ ID NO: 1764535 - RNA, 19 nt, Artificial Sequence
  Description of Artificial Sequence: Synthetic oligonucleotide
  Sense strand starting at position 431 of SEQ ID NO: 1562674
cgguuaagccuggaaguuu

SEQ ID NO: 1764536 - RNA, 19 nt, Artificial Sequence
  Description of Artificial Sequence: Synthetic oligonucleotide
  Antisense strand to SEQ ID NO: 1764535
aaacuuccaggcuuaaccg

SEQ ID NO: 1764537 - RNA, 19 nt, Artificial Sequence
  Description of Artificial Sequence: Synthetic oligonucleotide
  Sense strand starting at position 621 of SEQ ID NO: 1562674
cacugauuugcuugugcaa

SEQ ID NO: 1764538 - RNA, 19 nt, Artificial Sequence
  Description of Artificial Sequence: Synthetic oligonucleotide
  Antisense strand to SEQ ID NO: 1764537
uugcacaagcaaaucagug

SEQ ID NO: 1764539 - RNA, 19 nt, Artificial Sequence
  Description of Artificial Sequence: Synthetic oligonucleotide
  Sense strand starting at position 684 of SEQ ID NO: 1562674
gaguacuuaaggugugcca

SEQ ID NO: 1764540 - RNA, 19 nt, Artificial Sequence
  Description of Artificial Sequence: Synthetic oligonucleotide
  Antisense strand to SEQ ID NO: 1764539
uggcacaccuuaaguacuc

SEQ ID NO: 1764541 - RNA, 19 nt, Artificial Sequence
  Description of Artificial Sequence: Synthetic oligonucleotide
  Sense strand starting at position 837 of SEQ ID NO: 1562674
gugguagggcucugauuuc

SEQ ID NO: 1764542 - RNA, 19 nt, Artificial Sequence
  Description of Artificial Sequence: Synthetic oligonucleotide
  Antisense strand to SEQ ID NO: 1764541
gaaaucagagcccuaccac

SEQ ID NO: 1764543 - RNA, 19 nt, Artificial Sequence
  Description of Artificial Sequence: Synthetic oligonucleotide
  Sense strand starting at position 1048 of SEQ ID NO: 1562674
gguguaugggugcaaauac

SEQ ID NO: 1764544 - RNA, 19 nt, Artificial Sequence
  Description of Artificial Sequence: Synthetic oligonucleotide
  Antisense strand to SEQ ID NO: 1764543
guauuugcacccauacacc

SEQ ID NO: 1764545 - RNA, 19 nt, Artificial Sequence
  Description of Artificial Sequence: Synthetic oligonucleotide
  Sense strand starting at position 1164 of SEQ ID NO: 1562674
uggagagggcuuuggucaa

SEQ ID NO: 1764546 - RNA, 19 nt, Artificial Sequence
  Description of Artificial Sequence: Synthetic oligonucleotide
  Antisense strand to SEQ ID NO: 1764545
uugaccaaagcccucucca

SEQ ID NO: 1764547 - RNA, 19 nt, Artificial Sequence
  Description of Artificial Sequence: Synthetic oligonucleotide
  Sense strand starting at position 1211 of SEQ ID NO: 1562674
cguggacuccuuugaaugu

SEQ ID NO: 1764548 - RNA, 19 nt, Artificial Sequence
  Description of Artificial Sequence: Synthetic oligonucleotide
  Antisense strand to SEQ ID NO: 1764547
acauucaaaggaguccacg

SEQ ID NO: 1764549 - RNA, 19 nt, Artificial Sequence
  Description of Artificial Sequence: Synthetic oligonucleotide
  Sense strand starting at position 1215 of SEQ ID NO: 1562674
gacuccuuugaauguuuga

SEQ ID NO: 1764550 - RNA, 19 nt, Artificial Sequence
  Description of Artificial Sequence: Synthetic oligonucleotide
  Antisense strand to SEQ ID NO: 1764549
ucaaacauucaaaggaguc

SEQ ID NO: 1764551 - RNA, 19 nt, Artificial Sequence
  Description of Artificial Sequence: Synthetic oligonucleotide
  Sense strand starting at position 1218 of SEQ ID NO: 1562674
uccuuugaauguuugauga

SEQ ID NO: 1764552 - RNA, 19 nt, Artificial Sequence
  Description of Artificial Sequence: Synthetic oligonucleotide
  Antisense strand to SEQ ID NO: 1764551
ucaucaaacauucaaagga

SEQ ID NO: 1764553 - RNA, 19 nt, Artificial Sequence
  Description of Artificial Sequence: Synthetic oligonucleotide
  Sense strand starting at position 1273 of SEQ ID NO: 1562674
ucuuuaacuuuggagacaa

SEQ ID NO: 1764554 - RNA, 19 nt, Artificial Sequence
  Description of Artificial Sequence: Synthetic oligonucleotide
  Antisense strand to SEQ ID NO: 1764553
uugucuccaaaguuaaaga

SEQ ID NO: 1764555 - RNA, 19 nt, Artificial Sequence
  Description of Artificial Sequence: Synthetic oligonucleotide
  Sense strand starting at position 1370 of SEQ ID NO: 1562674
ggcggagcuaguugggaua

SEQ ID NO: 1764556 - RNA, 19 nt, Artificial Sequence
  Description of Artificial Sequence: Synthetic oligonucleotide
  Antisense strand to SEQ ID NO: 1764555
uaucccaacuagcuccgcc

SEQ ID NO: 1764557 - RNA, 19 nt, Artificial Sequence
  Description of Artificial Sequence: Synthetic oligonucleotide
  Sense strand starting at position 1413 of SEQ ID NO: 1562674
ccaggaaggcugugcauau

SEQ ID NO: 1764558 - RNA, 19 nt, Artificial Sequence
  Description of Artificial Sequence: Synthetic oligonucleotide
  Antisense strand to SEQ ID NO: 1764557
auaugcacagccuuccugg

SEQ ID NO: 1764559 - RNA, 19 nt, Artificial Sequence
  Description of Artificial Sequence: Synthetic oligonucleotide
  Sense strand starting at position 1414 of SEQ ID NO: 1562674
caggaaggcugugcauauu

SEQ ID NO: 1764560 - RNA, 19 nt, Artificial Sequence
  Description of Artificial Sequence: Synthetic oligonucleotide
  Antisense strand to SEQ ID NO: 1764559
aauaugcacagccuuccug

SEQ ID NO: 1764561 - RNA, 19 nt, Artificial Sequence
  Description of Artificial Sequence: Synthetic oligonucleotide
  Sense strand starting at position 1477 of SEQ ID NO: 1562674
ccacaucuguggcuuuaaa

SEQ ID NO: 1764562 - RNA, 19 nt, Artificial Sequence
  Description of Artificial Sequence: Synthetic oligonucleotide
  Antisense strand to SEQ ID NO: 1764561
uuuaaagccacagaugugg

SEQ ID NO: 1764563 - RNA, 19 nt, Artificial Sequence
  Description of Artificial Sequence: Synthetic oligonucleotide
  Sense strand starting at position 1520 of SEQ ID NO: 1562674
acucaugccuuccuggaga

SEQ ID NO: 1764564 - RNA, 19 nt, Artificial Sequence
  Description of Artificial Sequence: Synthetic oligonucleotide
  Antisense strand to SEQ ID NO: 1764563
ucuccaggaaggcaugagu

SEQ ID NO: 1764565 - RNA, 19 nt, Artificial Sequence
  Description of Artificial Sequence: Synthetic oligonucleotide
  Sense strand starting at position 1523 of SEQ ID NO: 1562674
caugccuuccuggagauau

SEQ ID NO: 1764566 - RNA, 19 nt, Artificial Sequence
  Description of Artificial Sequence: Synthetic oligonucleotide
  Antisense strand to SEQ ID NO: 1764565
auaucuccaggaaggcaug

SEQ ID NO: 1764567 - RNA, 19 nt, Artificial Sequence
  Description of Artificial Sequence: Synthetic oligonucleotide
  Sense strand starting at position 1700 of SEQ ID NO: 1562674
cucauuguaucuuugcuua

SEQ ID NO: 1764568 - RNA, 19 nt, Artificial Sequence
  Description of Artificial Sequence: Synthetic oligonucleotide
  Antisense strand to SEQ ID NO: 1764567
uaagcaaagauacaaugag

SEQ ID NO: 1764569 - RNA, 19 nt, Artificial Sequence
  Description of Artificial Sequence: Synthetic oligonucleotide
  Sense strand starting at position 1993 of SEQ ID NO: 1562674
ggugcuaugggugacuaga

SEQ ID NO: 1764570 - RNA, 19 nt, Artificial Sequence
  Description of Artificial Sequence: Synthetic oligonucleotide
  Antisense strand to SEQ ID NO: 1764569
ucuagucacccauagcacc

SEQ ID NO: 1764571 - RNA, 19 nt, Artificial Sequence
  Description of Artificial Sequence: Synthetic oligonucleotide
  Sense strand starting at position 2028 of SEQ ID NO: 1562674
uauagucuggcagacauca

SEQ ID NO: 1764572 - RNA, 19 nt, Artificial Sequence
  Description of Artificial Sequence: Synthetic oligonucleotide
  Antisense strand to SEQ ID NO: 1764571
ugaugucugccagacuaua

SEQ ID NO: 1764573 - RNA, 19 nt, Artificial Sequence
  Description of Artificial Sequence: Synthetic oligonucleotide
  Sense strand starting at position 2049 of SEQ ID NO: 1562674
cccuauagucuguggcaca

SEQ ID NO: 1764574 - RNA, 19 nt, Artificial Sequence
  Description of Artificial Sequence: Synthetic oligonucleotide
  Antisense strand to SEQ ID NO: 1764573
ugugccacagacuauaggg

SEQ ID NO: 1764575 - RNA, 19 nt, Artificial Sequence
  Description of Artificial Sequence: Synthetic oligonucleotide
  Sense strand starting at position 2147 of SEQ ID NO: 1562674
agcacuuuccuuugugaga

SEQ ID NO: 1764576 - RNA, 19 nt, Artificial Sequence
  Description of Artificial Sequence: Synthetic oligonucleotide
  Antisense strand to SEQ ID NO: 1764575
ucucacaaaggaaagugcu

SEQ ID NO: 1764577 - RNA, 19 nt, Artificial Sequence
  Description of Artificial Sequence: Synthetic oligonucleotide
  Sense strand starting at position 2148 of SEQ ID NO: 1562674
gcacuuuccuuugugagac

SEQ ID NO: 1764578 - RNA, 19 nt, Artificial Sequence
  Description of Artificial Sequence: Synthetic oligonucleotide
  Antisense strand to SEQ ID NO: 1764577
gucucacaaaggaaagugc

SEQ ID NO: 1764579 - RNA, 19 nt, Artificial Sequence
  Description of Artificial Sequence: Synthetic oligonucleotide
  Sense strand starting at position 2421 of SEQ ID NO: 1562674
gcacgugucccuguuggau

SEQ ID NO: 1764580 - RNA, 19 nt, Artificial Sequence
  Description of Artificial Sequence: Synthetic oligonucleotide
  Antisense strand to SEQ ID NO: 1764579
auccaacagggacacgugc

SEQ ID NO: 1764581 - RNA, 19 nt, Artificial Sequence
  Description of Artificial Sequence: Synthetic oligonucleotide
  Sense strand starting at position 2427 of SEQ ID NO: 1562674
gucccuguuggaugccaua

SEQ ID NO: 1764582 - RNA, 19 nt, Artificial Sequence
  Description of Artificial Sequence: Synthetic oligonucleotide
  Antisense strand to SEQ ID NO: 1764581
uauggcauccaacagggac

SEQ ID NO: 1764583 - RNA, 19 nt, Artificial Sequence
  Description of Artificial Sequence: Synthetic oligonucleotide
  Sense strand starting at position 2494 of SEQ ID NO: 1562674
guggguuugauauggacag

SEQ ID NO: 1764584 - RNA, 19 nt, Artificial Sequence
  Description of Artificial Sequence: Synthetic oligonucleotide
  Antisense strand to SEQ ID NO: 1764583
cuguccauaucaaacccac

SEQ ID NO: 1764585 - RNA, 19 nt, Artificial Sequence
  Description of Artificial Sequence: Synthetic oligonucleotide
  Sense strand starting at position 2498 of SEQ ID NO: 1562674
guuugauauggacagccuu

SEQ ID NO: 1764586 - RNA, 19 nt, Artificial Sequence
  Description of Artificial Sequence: Synthetic oligonucleotide
  Antisense strand to SEQ ID NO: 1764585
aaggcuguccauaucaaac

SEQ ID NO: 1764587 - RNA, 19 nt, Artificial Sequence
  Description of Artificial Sequence: Synthetic oligonucleotide
  Sense strand starting at position 2538 of SEQ ID NO: 1562674
ugccgaacccguguuaucu

SEQ ID NO: 1764588 - RNA, 19 nt, Artificial Sequence
  Description of Artificial Sequence: Synthetic oligonucleotide
  Antisense strand to SEQ ID NO: 1764587
agauaacacggguucggca

SEQ ID NO: 1764589 - RNA, 19 nt, Artificial Sequence
  Description of Artificial Sequence: Synthetic oligonucleotide
  Sense strand starting at position 2544 of SEQ ID NO: 1562674
acccguguuaucucgguca

SEQ ID NO: 1764590 - RNA, 19 nt, Artificial Sequence
  Description of Artificial Sequence: Synthetic oligonucleotide
  Antisense strand to SEQ ID NO: 1764589
ugaccgagauaacacgggu

SEQ ID NO: 1764591 - RNA, 19 nt, Artificial Sequence
  Description of Artificial Sequence: Synthetic oligonucleotide
  Sense strand starting at position 2548 of SEQ ID NO: 1562674
guguuaucucggucagucc

SEQ ID NO: 1764592 - RNA, 19 nt, Artificial Sequence
  Description of Artificial Sequence: Synthetic oligonucleotide
  Antisense strand to SEQ ID NO: 1764591
ggacugaccgagauaacac

SEQ ID NO: 1764593 - RNA, 19 nt, Artificial Sequence
  Description of Artificial Sequence: Synthetic oligonucleotide
  Sense strand starting at position 2844 of SEQ ID NO: 1562674
cugaccuaucgacagugau

SEQ ID NO: 1764594 - RNA, 19 nt, Artificial Sequence
  Description of Artificial Sequence: Synthetic oligonucleotide
  Antisense strand to SEQ ID NO: 1764593
aucacugucgauaggucag

SEQ ID NO: 1764595 - RNA, 19 nt, Artificial Sequence
  Description of Artificial Sequence: Synthetic oligonucleotide
  Sense strand starting at position 2902 of SEQ ID NO: 1562674
cguuaucugaccuggagga

SEQ ID NO: 1764596 - RNA, 19 nt, Artificial Sequence
  Description of Artificial Sequence: Synthetic oligonucleotide
  Antisense strand to SEQ ID NO: 1764595
uccuccaggucagauaacg

SEQ ID NO: 1764597 - RNA, 19 nt, Artificial Sequence
  Description of Artificial Sequence: Synthetic oligonucleotide
  Sense strand starting at position 2934 of SEQ ID NO: 1562674
cagaaauaugacugccugu

SEQ ID NO: 1764598 - RNA, 19 nt, Artificial Sequence
  Description of Artificial Sequence: Synthetic oligonucleotide
  Antisense strand to SEQ ID NO: 1764597
acaggcagucauauuucug

SEQ ID NO: 1764599 - RNA, 19 nt, Artificial Sequence
  Description of Artificial Sequence: Synthetic oligonucleotide
  Sense strand starting at position 3051 of SEQ ID NO: 1562674
caucauggguucucaguca

SEQ ID NO: 1764600 - RNA, 19 nt, Artificial Sequence
  Description of Artificial Sequence: Synthetic oligonucleotide
  Antisense strand to SEQ ID NO: 1764599
ugacugagaacccaugaug

SEQ ID NO: 1764601 - RNA, 19 nt, Artificial Sequence
  Description of Artificial Sequence: Synthetic oligonucleotide
  Sense strand starting at position 3075 of SEQ ID NO: 1562674
uggugacucaauggugguu

SEQ ID NO: 1764602 - RNA, 19 nt, Artificial Sequence
  Description of Artificial Sequence: Synthetic oligonucleotide
  Antisense strand to SEQ ID NO: 1764601
aaccaccauugagucacca

SEQ ID NO: 1764603 - RNA, 19 nt, Artificial Sequence
  Description of Artificial Sequence: Synthetic oligonucleotide
  Sense strand starting at position 3080 of SEQ ID NO: 1562674
acucaauggugguuccaau

SEQ ID NO: 1764604 - RNA, 19 nt, Artificial Sequence
  Description of Artificial Sequence: Synthetic oligonucleotide
  Antisense strand to SEQ ID NO: 1764603
auuggaaccaccauugagu

SEQ ID NO: 1764605 - RNA, 19 nt, Artificial Sequence
  Description of Artificial Sequence: Synthetic oligonucleotide
  Sense strand starting at position 3093 of SEQ ID NO: 1562674
uccaauggaucggaacaga

SEQ ID NO: 1764606 - RNA, 19 nt, Artificial Sequence
  Description of Artificial Sequence: Synthetic oligonucleotide
  Antisense strand to SEQ ID NO: 1764605
ucuguuccgauccauugga

SEQ ID NO: 1764607 - RNA, 19 nt, Artificial Sequence
  Description of Artificial Sequence: Synthetic oligonucleotide
  Sense strand starting at position 3871 of SEQ ID NO: 1562674
gcuccacucugagcauuua

SEQ ID NO: 1764608 - RNA, 19 nt, Artificial Sequence
  Description of Artificial Sequence: Synthetic oligonucleotide
  Antisense strand to SEQ ID NO: 1764607
uaaaugcucagaguggagc

SEQ ID NO: 1764609 - RNA, 19 nt, Artificial Sequence
  Description of Artificial Sequence: Synthetic oligonucleotide
  Sense strand starting at position 495 of SEQ ID NO: 1562675
gagcuuaaaugagguccaa

SEQ ID NO: 1764610 - RNA, 19 nt, Artificial Sequence
  Description of Artificial Sequence: Synthetic oligonucleotide
  Antisense strand to SEQ ID NO: 1764609
uuggaccucauuuaagcuc

SEQ ID NO: 1764611 - RNA, 19 nt, Artificial Sequence
  Description of Artificial Sequence: Synthetic oligonucleotide
  Sense strand starting at position 515 of SEQ ID NO: 1562675
guggguucccaacacucaa

SEQ ID NO: 1764612 - RNA, 19 nt, Artificial Sequence
  Description of Artificial Sequence: Synthetic oligonucleotide
  Antisense strand to SEQ ID NO: 1764611
uugaguguugggaacccac

SEQ ID NO: 1764613 - RNA, 19 nt, Artificial Sequence
  Description of Artificial Sequence: Synthetic oligonucleotide
  Sense strand starting at position 567 of SEQ ID NO: 1562675
uggucaaucccagaacuuc

SEQ ID NO: 1764614 - RNA, 19 nt, Artificial Sequence
  Description of Artificial Sequence: Synthetic oligonucleotide
  Antisense strand to SEQ ID NO: 1764613
gaaguucugggauugacca

SEQ ID NO: 1764615 - RNA, 19 nt, Artificial Sequence
  Description of Artificial Sequence: Synthetic oligonucleotide
  Sense strand starting at position 587 of SEQ ID NO: 1562675
gccuuuaugcaguaauuuc

SEQ ID NO: 1764616 - RNA, 19 nt, Artificial Sequence
  Description of Artificial Sequence: Synthetic oligonucleotide
  Antisense strand to SEQ ID NO: 1764615
gaaauuacugcauaaaggc

SEQ ID NO: 1764617 - RNA, 19 nt, Artificial Sequence
  Description of Artificial Sequence: Synthetic oligonucleotide
  Sense strand starting at position 636 of SEQ ID NO: 1562675
cuaugcauuggcuguauuu

SEQ ID NO: 1764618 - RNA, 19 nt, Artificial Sequence
  Description of Artificial Sequence: Synthetic oligonucleotide
  Antisense strand to SEQ ID NO: 1764617
aaauacagccaaugcauag

SEQ ID NO: 1764619 - RNA, 19 nt, Artificial Sequence
  Description of Artificial Sequence: Synthetic oligonucleotide
  Sense strand starting at position 795 of SEQ ID NO: 1562675
gugaaaucaucugauacag

SEQ ID NO: 1764620 - RNA, 19 nt, Artificial Sequence
  Description of Artificial Sequence: Synthetic oligonucleotide
  Antisense strand to SEQ ID NO: 1764619
cuguaucagaugauuucac

SEQ ID NO: 1764621 - RNA, 19 nt, Artificial Sequence
  Description of Artificial Sequence: Synthetic oligonucleotide
  Sense strand starting at position 841 of SEQ ID NO: 1562675
ugggugcgacgguagaaau

SEQ ID NO: 1764622 - RNA, 19 nt, Artificial Sequence
  Description of Artificial Sequence: Synthetic oligonucleotide
  Antisense strand to SEQ ID NO: 1764621
auuucuaccgucgcaccca

SEQ ID NO: 1764623 - RNA, 19 nt, Artificial Sequence
  Description of Artificial Sequence: Synthetic oligonucleotide
  Sense strand starting at position 892 of SEQ ID NO: 1562675
gccuuagcuagugagaaca

SEQ ID NO: 1764624 - RNA, 19 nt, Artificial Sequence
  Description of Artificial Sequence: Synthetic oligonucleotide
  Antisense strand to SEQ ID NO: 1764623
uguucucacuagcuaaggc

SEQ ID NO: 1764625 - RNA, 19 nt, Artificial Sequence
  Description of Artificial Sequence: Synthetic oligonucleotide
  Sense strand starting at position 1070 of SEQ ID NO: 1562675
ggauguuucccaggaggaa

SEQ ID NO: 1764626 - RNA, 19 nt, Artificial Sequence
  Description of Artificial Sequence: Synthetic oligonucleotide
  Antisense strand to SEQ ID NO: 1764625
uuccuccugggaaacaucc

SEQ ID NO: 1764627 - RNA, 19 nt, Artificial Sequence
  Description of Artificial Sequence: Synthetic oligonucleotide
  Sense strand starting at position 1122 of SEQ ID NO: 1562675
acugcucucccgcaagaaa

SEQ ID NO: 1764628 - RNA, 19 nt, Artificial Sequence
  Description of Artificial Sequence: Synthetic oligonucleotide
  Antisense strand to SEQ ID NO: 1764627
uuucuugcgggagagcagu

SEQ ID NO: 1764629 - RNA, 19 nt, Artificial Sequence
  Description of Artificial Sequence: Synthetic oligonucleotide
  Sense strand starting at position 1144 of SEQ ID NO: 1562675
gcccucugggcuugucaga

SEQ ID NO: 1764630 - RNA, 19 nt, Artificial Sequence
  Description of Artificial Sequence: Synthetic oligonucleotide
  Antisense strand to SEQ ID NO: 1764629
ucugacaagcccagagggc

SEQ ID NO: 1764631 - RNA, 19 nt, Artificial Sequence
  Description of Artificial Sequence: Synthetic oligonucleotide
  Sense strand starting at position 1169 of SEQ ID NO: 1562675
gagguccugccauaucacu

SEQ ID NO: 1764632 - RNA, 19 nt, Artificial Sequence
  Description of Artificial Sequence: Synthetic oligonucleotide
  Antisense strand to SEQ ID NO: 1764631
agugauauggcaggaccuc

SEQ ID NO: 1764633 - RNA, 19 nt, Artificial Sequence
  Description of Artificial Sequence: Synthetic oligonucleotide
  Sense strand starting at position 1338 of SEQ ID NO: 1562675
gucuaauaauaccugugaa

SEQ ID NO: 1764634 - RNA, 19 nt, Artificial Sequence
  Description of Artificial Sequence: Synthetic oligonucleotide
  Antisense strand to SEQ ID NO: 1764633
uucacagguauuauuagac

SEQ ID NO: 1764635 - RNA, 19 nt, Artificial Sequence
  Description of Artificial Sequence: Synthetic oligonucleotide
  Sense strand starting at position 1353 of SEQ ID NO: 1562675
ugaacagguugugaggauu

SEQ ID NO: 1764636 - RNA, 19 nt, Artificial Sequence
  Description of Artificial Sequence: Synthetic oligonucleotide
  Antisense strand to SEQ ID NO: 1764635
aauccucacaaccuguuca

SEQ ID NO: 1764637 - RNA, 19 nt, Artificial Sequence
  Description of Artificial Sequence: Synthetic oligonucleotide
  Sense strand starting at position 1464 of SEQ ID NO: 1562675
agucauuucuaccaugcuu

SEQ ID NO: 1764638 - RNA, 19 nt, Artificial Sequence
  Description of Artificial Sequence: Synthetic oligonucleotide
  Antisense strand to SEQ ID NO: 1764637
aagcaugguagaaaugacu

SEQ ID NO: 1764639 - RNA, 19 nt, Artificial Sequence
  Description of Artificial Sequence: Synthetic oligonucleotide
  Sense strand starting at position 1630 of SEQ ID NO: 1562675
gcugaacugucacugguuu

SEQ ID NO: 1764640 - RNA, 19 nt, Artificial Sequence
  Description of Artificial Sequence: Synthetic oligonucleotide
  Antisense strand to SEQ ID NO: 1764639
aaaccagugacaguucagc

SEQ ID NO: 1764641 - RNA, 19 nt, Artificial Sequence
  Description of Artificial Sequence: Synthetic oligonucleotide
  Sense strand starting at position 1632 of SEQ ID NO: 1562675
ugaacugucacugguuuga

SEQ ID NO: 1764642 - RNA, 19 nt, Artificial Sequence
  Description of Artificial Sequence: Synthetic oligonucleotide
  Antisense strand to SEQ ID NO: 1764641
ucaaaccagugacaguuca

SEQ ID NO: 1764643 - RNA, 19 nt, Artificial Sequence
  Description of Artificial Sequence: Synthetic oligonucleotide
  Sense strand starting at position 1634 of SEQ ID NO: 1562675
aacugucacugguuugauu

SEQ ID NO: 1764644 - RNA, 19 nt, Artificial Sequence
  Description of Artificial Sequence: Synthetic oligonucleotide
  Antisense strand to SEQ ID NO: 1764643
aaucaaaccagugacaguu

SEQ ID NO: 1764645 - RNA, 19 nt, Artificial Sequence
  Description of Artificial Sequence: Synthetic oligonucleotide
  Sense strand starting at position 1642 of SEQ ID NO: 1562675
cugguuugauucuugcaaa

SEQ ID NO: 1764646 - RNA, 19 nt, Artificial Sequence
  Description of Artificial Sequence: Synthetic oligonucleotide
  Antisense strand to SEQ ID NO: 1764645
uuugcaagaaucaaaccag

SEQ ID NO: 1764647 - RNA, 19 nt, Artificial Sequence
  Description of Artificial Sequence: Synthetic oligonucleotide
  Sense strand starting at position 1702 of SEQ ID NO: 1562675
ggaugcugauagucuguuu

SEQ ID NO: 1764648 - RNA, 19 nt, Artificial Sequence
  Description of Artificial Sequence: Synthetic oligonucleotide
  Antisense strand to SEQ ID NO: 1764647
aaacagacuaucagcaucc

SEQ ID NO: 1764649 - RNA, 19 nt, Artificial Sequence
  Description of Artificial Sequence: Synthetic oligonucleotide
  Sense strand starting at position 1705 of SEQ ID NO: 1562675
ugcugauagucuguuuaau

SEQ ID NO: 1764650 - RNA, 19 nt, Artificial Sequence
  Description of Artificial Sequence: Synthetic oligonucleotide
  Antisense strand to SEQ ID NO: 1764649
auuaaacagacuaucagca

SEQ ID NO: 1764651 - RNA, 19 nt, Artificial Sequence
  Description of Artificial Sequence: Synthetic oligonucleotide
  Sense strand starting at position 1707 of SEQ ID NO: 1562675
cugauagucuguuuaauau

SEQ ID NO: 1764652 - RNA, 19 nt, Artificial Sequence
  Description of Artificial Sequence: Synthetic oligonucleotide
  Antisense strand to SEQ ID NO: 1764651
auauuaaacagacuaucag

SEQ ID NO: 1764653 - RNA, 19 nt, Artificial Sequence
  Description of Artificial Sequence: Synthetic oligonucleotide
  Sense strand starting at position 1870 of SEQ ID NO: 1562675
auugaagucucugcccaaa

SEQ ID NO: 1764654 - RNA, 19 nt, Artificial Sequence
  Description of Artificial Sequence: Synthetic oligonucleotide
  Antisense strand to SEQ ID NO: 1764653
uuugggcagagacuucaau

SEQ ID NO: 1764655 - RNA, 19 nt, Artificial Sequence
  Description of Artificial Sequence: Synthetic oligonucleotide
  Sense strand starting at position 1967 of SEQ ID NO: 1562675
gaggcaaucuuaccaguga

SEQ ID NO: 1764656 - RNA, 19 nt, Artificial Sequence
  Description of Artificial Sequence: Synthetic oligonucleotide
  Antisense strand to SEQ ID NO: 1764655
ucacugguaagauugccuc

SEQ ID NO: 1764657 - RNA, 19 nt, Artificial Sequence
  Description of Artificial Sequence: Synthetic oligonucleotide
  Sense strand starting at position 2096 of SEQ ID NO: 1562675
gggugagaaugcuggauua

SEQ ID NO: 1764658 - RNA, 19 nt, Artificial Sequence
  Description of Artificial Sequence: Synthetic oligonucleotide
  Antisense strand to SEQ ID NO: 1764657
uaauccagcauucucaccc

SEQ ID NO: 1764659 - RNA, 19 nt, Artificial Sequence
  Description of Artificial Sequence: Synthetic oligonucleotide
  Sense strand starting at position 2109 of SEQ ID NO: 1562675
ggauuaagcucucaccaaa

SEQ ID NO: 1764660 - RNA, 19 nt, Artificial Sequence
  Description of Artificial Sequence: Synthetic oligonucleotide
  Antisense strand to SEQ ID NO: 1764659
uuuggugagagcuuaaucc

SEQ ID NO: 1764661 - RNA, 19 nt, Artificial Sequence
  Description of Artificial Sequence: Synthetic oligonucleotide
  Sense strand starting at position 2137 of SEQ ID NO: 1562675
agcaaaugcccacagacau

SEQ ID NO: 1764662 - RNA, 19 nt, Artificial Sequence
  Description of Artificial Sequence: Synthetic oligonucleotide
  Antisense strand to SEQ ID NO: 1764661
augucugugggcauuugcu

SEQ ID NO: 1764663 - RNA, 19 nt, Artificial Sequence
  Description of Artificial Sequence: Synthetic oligonucleotide
  Sense strand starting at position 2149 of SEQ ID NO: 1562675
cagacauugugucucugca

SEQ ID NO: 1764664 - RNA, 19 nt, Artificial Sequence
  Description of Artificial Sequence: Synthetic oligonucleotide
  Antisense strand to SEQ ID NO: 1764663
ugcagagacacaaugucug

SEQ ID NO: 1764665 - RNA, 19 nt, Artificial Sequence
  Description of Artificial Sequence: Synthetic oligonucleotide
  Sense strand starting at position 2151 of SEQ ID NO: 1562675
gacauugugucucugcaca

SEQ ID NO: 1764666 - RNA, 19 nt, Artificial Sequence
  Description of Artificial Sequence: Synthetic oligonucleotide
  Antisense strand to SEQ ID NO: 1764665
ugugcagagacacaauguc

SEQ ID NO: 1764667 - RNA, 19 nt, Artificial Sequence
  Description of Artificial Sequence: Synthetic oligonucleotide
  Sense strand starting at position 2156 of SEQ ID NO: 1562675
ugugucucugcacaauaau

SEQ ID NO: 1764668 - RNA, 19 nt, Artificial Sequence
  Description of Artificial Sequence: Synthetic oligonucleotide
  Antisense strand to SEQ ID NO: 1764667
auuauugugcagagacaca

SEQ ID NO: 1764669 - RNA, 19 nt, Artificial Sequence
  Description of Artificial Sequence: Synthetic oligonucleotide
  Sense strand starting at position 2376 of SEQ ID NO: 1562675
ggcagagucugggcuucau

SEQ ID NO: 1764670 - RNA, 19 nt, Artificial Sequence
  Description of Artificial Sequence: Synthetic oligonucleotide
  Antisense strand to SEQ ID NO: 1764669
augaagcccagacucugcc

SEQ ID NO: 1764671 - RNA, 19 nt, Artificial Sequence
  Description of Artificial Sequence: Synthetic oligonucleotide
  Sense strand starting at position 2443 of SEQ ID NO: 1562675
ggugacaaucucuguucca

SEQ ID NO: 1764672 - RNA, 19 nt, Artificial Sequence
  Description of Artificial Sequence: Synthetic oligonucleotide
  Antisense strand to SEQ ID NO: 1764671
uggaacagagauugucacc

SEQ ID NO: 1764673 - RNA, 19 nt, Artificial Sequence
  Description of Artificial Sequence: Synthetic oligonucleotide
  Sense strand starting at position 2444 of SEQ ID NO: 1562675
gugacaaucucuguuccag

SEQ ID NO: 1764674 - RNA, 19 nt, Artificial Sequence
  Description of Artificial Sequence: Synthetic oligonucleotide
  Antisense strand to SEQ ID NO: 1764673
cuggaacagagauugucac

SEQ ID NO: 1764675 - RNA, 19 nt, Artificial Sequence
  Description of Artificial Sequence: Synthetic oligonucleotide
  Sense strand starting at position 2733 of SEQ ID NO: 1562675
gccaauuauggagagugca

SEQ ID NO: 1764676 - RNA, 19 nt, Artificial Sequence
  Description of Artificial Sequence: Synthetic oligonucleotide
  Antisense strand to SEQ ID NO: 1764675
ugcacucuccauaauuggc

SEQ ID NO: 1764677 - RNA, 19 nt, Artificial Sequence
  Description of Artificial Sequence: Synthetic oligonucleotide
  Sense strand starting at position 3141 of SEQ ID NO: 1562675
ugcuguaucuuguuagaga

SEQ ID NO: 1764678 - RNA, 19 nt, Artificial Sequence
  Description of Artificial Sequence: Synthetic oligonucleotide
  Antisense strand to SEQ ID NO: 1764677
ucucuaacaagauacagca

SEQ ID NO: 1764679 - RNA, 19 nt, Artificial Sequence
  Description of Artificial Sequence: Synthetic oligonucleotide
  Sense strand starting at position 3148 of SEQ ID NO: 1562675
ucuuguuagagacaggguu

SEQ ID NO: 1764680 - RNA, 19 nt, Artificial Sequence
  Description of Artificial Sequence: Synthetic oligonucleotide
  Antisense strand to SEQ ID NO: 1764679
aacccugucucuaacaaga

SEQ ID NO: 1764681 - RNA, 19 nt, Artificial Sequence
  Description of Artificial Sequence: Synthetic oligonucleotide
  Sense strand starting at position 3289 of SEQ ID NO: 1562675
ccuagagugaguugcucuu

SEQ ID NO: 1764682 - RNA, 19 nt, Artificial Sequence
  Description of Artificial Sequence: Synthetic oligonucleotide
  Antisense strand to SEQ ID NO: 1764681
aagagcaacucacucuagg

SEQ ID NO: 1764683 - RNA, 19 nt, Artificial Sequence
  Description of Artificial Sequence: Synthetic oligonucleotide
  Sense strand starting at position 3907 of SEQ ID NO: 1562675
cugucuuuccaaugagaag

SEQ ID NO: 1764684 - RNA, 19 nt, Artificial Sequence
  Description of Artificial Sequence: Synthetic oligonucleotide
  Antisense strand to SEQ ID NO: 1764683
cuucucauuggaaagacag

SEQ ID NO: 1764685 - RNA, 19 nt, Artificial Sequence
  Description of Artificial Sequence: Synthetic oligonucleotide
  Sense strand starting at position 3910 of SEQ ID NO: 1562675
ucuuuccaaugagaagaua

SEQ ID NO: 1764686 - RNA, 19 nt, Artificial Sequence
  Description of Artificial Sequence: Synthetic oligonucleotide
  Antisense strand to SEQ ID NO: 1764685
uaucuucucauuggaaaga

SEQ ID NO: 1764687 - RNA, 19 nt, Artificial Sequence
  Description of Artificial Sequence: Synthetic oligonucleotide
  Sense strand starting at position 3957 of SEQ ID NO: 1562675
ccugguuuaccaugguauc

SEQ ID NO: 1764688 - RNA, 19 nt, Artificial Sequence
  Description of Artificial Sequence: Synthetic oligonucleotide
  Antisense strand to SEQ ID NO: 1764687
gauaccaugguaaaccagg

SEQ ID NO: 1764689 - RNA, 19 nt, Artificial Sequence
  Description of Artificial Sequence: Synthetic oligonucleotide
  Sense strand starting at position 148 of SEQ ID NO: 1562676
gcaggaugugggugaccau

SEQ ID NO: 1764690 - RNA, 19 nt, Artificial Sequence
  Description of Artificial Sequence: Synthetic oligonucleotide
  Antisense strand to SEQ ID NO: 1764689
auggucacccacauccugc

SEQ ID NO: 1764691 - RNA, 19 nt, Artificial Sequence
  Description of Artificial Sequence: Synthetic oligonucleotide
  Sense strand starting at position 307 of SEQ ID NO: 1562676
gcugcuuggcugggaagau

SEQ ID NO: 1764692 - RNA, 19 nt, Artificial Sequence
  Description of Artificial Sequence: Synthetic oligonucleotide
  Antisense strand to SEQ ID NO: 1764691
aucuucccagccaagcagc

SEQ ID NO: 1764693 - RNA, 19 nt, Artificial Sequence
  Description of Artificial Sequence: Synthetic oligonucleotide
  Sense strand starting at position 513 of SEQ ID NO: 1562676
ggagaagccagguguugau

SEQ ID NO: 1764694 - RNA, 19 nt, Artificial Sequence
  Description of Artificial Sequence: Synthetic oligonucleotide
  Antisense strand to SEQ ID NO: 1764693
aucaacaccuggcuucucc

SEQ ID NO: 1764695 - RNA, 19 nt, Artificial Sequence
  Description of Artificial Sequence: Synthetic oligonucleotide
  Sense strand starting at position 575 of SEQ ID NO: 1562676
gggcguggcuguaacuuau

SEQ ID NO: 1764696 - RNA, 19 nt, Artificial Sequence
  Description of Artificial Sequence: Synthetic oligonucleotide
  Antisense strand to SEQ ID NO: 1764695
auaaguuacagccacgccc

SEQ ID NO: 1764697 - RNA, 19 nt, Artificial Sequence
  Description of Artificial Sequence: Synthetic oligonucleotide
  Sense strand starting at position 584 of SEQ ID NO: 1562676
uguaacuuaugaucgacau

SEQ ID NO: 1764698 - RNA, 19 nt, Artificial Sequence
  Description of Artificial Sequence: Synthetic oligonucleotide
  Antisense strand to SEQ ID NO: 1764697
augucgaucauaaguuaca

SEQ ID NO: 1764699 - RNA, 19 nt, Artificial Sequence
  Description of Artificial Sequence: Synthetic oligonucleotide
  Sense strand starting at position 585 of SEQ ID NO: 1562676
guaacuuaugaucgacauu

SEQ ID NO: 1764700 - RNA, 19 nt, Artificial Sequence
  Description of Artificial Sequence: Synthetic oligonucleotide
  Antisense strand to SEQ ID NO: 1764699
aaugucgaucauaaguuac

SEQ ID NO: 1764701 - RNA, 19 nt, Artificial Sequence
  Description of Artificial Sequence: Synthetic oligonucleotide
  Sense strand starting at position 818 of SEQ ID NO: 1562676
cucagagcucucugcagau

SEQ ID NO: 1764702 - RNA, 19 nt, Artificial Sequence
  Description of Artificial Sequence: Synthetic oligonucleotide
  Antisense strand to SEQ ID NO: 1764701
aucugcagagagcucugag

SEQ ID NO: 1764703 - RNA, 19 nt, Artificial Sequence
  Description of Artificial Sequence: Synthetic oligonucleotide
  Sense strand starting at position 872 of SEQ ID NO: 1562676
cagggaguuuccucuacag

SEQ ID NO: 1764704 - RNA, 19 nt, Artificial Sequence
  Description of Artificial Sequence: Synthetic oligonucleotide
  Antisense strand to SEQ ID NO: 1764703
cuguagaggaaacucccug

SEQ ID NO: 1764705 - RNA, 19 nt, Artificial Sequence
  Description of Artificial Sequence: Synthetic oligonucleotide
  Sense strand starting at position 1107 of SEQ ID NO: 1562676
uucgguuacucauuccuua

SEQ ID NO: 1764706 - RNA, 19 nt, Artificial Sequence
  Description of Artificial Sequence: Synthetic oligonucleotide
  Antisense strand to SEQ ID NO: 1764705
uaaggaaugaguaaccgaa

SEQ ID NO: 1764707 - RNA, 19 nt, Artificial Sequence
  Description of Artificial Sequence: Synthetic oligonucleotide
  Sense strand starting at position 1196 of SEQ ID NO: 1562676
gggacagugacacgcaaua

SEQ ID NO: 1764708 - RNA, 19 nt, Artificial Sequence
  Description of Artificial Sequence: Synthetic oligonucleotide
  Antisense strand to SEQ ID NO: 1764707
uauugcgugucacuguccc

SEQ ID NO: 1764709 - RNA, 19 nt, Artificial Sequence
  Description of Artificial Sequence: Synthetic oligonucleotide
  Sense strand starting at position 1238 of SEQ ID NO: 1562676
gaaggauucucaucauugu

SEQ ID NO: 1764710 - RNA, 19 nt, Artificial Sequence
  Description of Artificial Sequence: Synthetic oligonucleotide
  Antisense strand to SEQ ID NO: 1764709
acaaugaugagaauccuuc

SEQ ID NO: 1764711 - RNA, 19 nt, Artificial Sequence
  Description of Artificial Sequence: Synthetic oligonucleotide
  Sense strand starting at position 1283 of SEQ ID NO: 1562676
uucuguuugucagcacaca

SEQ ID NO: 1764712 - RNA, 19 nt, Artificial Sequence
  Description of Artificial Sequence: Synthetic oligonucleotide
  Antisense strand to SEQ ID NO: 1764711
ugugugcugacaaacagaa

SEQ ID NO: 1764713 - RNA, 19 nt, Artificial Sequence
  Description of Artificial Sequence: Synthetic oligonucleotide
  Sense strand starting at position 1329 of SEQ ID NO: 1562676
uucuauggucacuaucagu

SEQ ID NO: 1764714 - RNA, 19 nt, Artificial Sequence
  Description of Artificial Sequence: Synthetic oligonucleotide
  Antisense strand to SEQ ID NO: 1764713
acugauagugaccauagaa

SEQ ID NO: 1764715 - RNA, 19 nt, Artificial Sequence
  Description of Artificial Sequence: Synthetic oligonucleotide
  Sense strand starting at position 1431 of SEQ ID NO: 1562676
agacauccacagugguaaa

SEQ ID NO: 1764716 - RNA, 19 nt, Artificial Sequence
  Description of Artificial Sequence: Synthetic oligonucleotide
  Antisense strand to SEQ ID NO: 1764715
uuuaccacuguggaugucu

SEQ ID NO: 1764717 - RNA, 19 nt, Artificial Sequence
  Description of Artificial Sequence: Synthetic oligonucleotide
  Sense strand starting at position 1582 of SEQ ID NO: 1562676
gucgguucugucucuccua

SEQ ID NO: 1764718 - RNA, 19 nt, Artificial Sequence
  Description of Artificial Sequence: Synthetic oligonucleotide
  Antisense strand to SEQ ID NO: 1764717
uaggagagacagaaccgac

SEQ ID NO: 1764719 - RNA, 19 nt, Artificial Sequence
  Description of Artificial Sequence: Synthetic oligonucleotide
  Sense strand starting at position 1859 of SEQ ID NO: 1562676
gcgcgucccacagaaacua

SEQ ID NO: 1764720 - RNA, 19 nt, Artificial Sequence
  Description of Artificial Sequence: Synthetic oligonucleotide
  Antisense strand to SEQ ID NO: 1764719
uaguuucugugggacgcgc

SEQ ID NO: 1764721 - RNA, 19 nt, Artificial Sequence
  Description of Artificial Sequence: Synthetic oligonucleotide
  Sense strand starting at position 2014 of SEQ ID NO: 1562676
ugcuauuuaugagcacuuu

SEQ ID NO: 1764722 - RNA, 19 nt, Artificial Sequence
  Description of Artificial Sequence: Synthetic oligonucleotide
  Antisense strand to SEQ ID NO: 1764721
aaagugcucauaaauagca

SEQ ID NO: 1764723 - RNA, 19 nt, Artificial Sequence
  Description of Artificial Sequence: Synthetic oligonucleotide
  Sense strand starting at position 2292 of SEQ ID NO: 1562676
accauuuccuauugaguca

SEQ ID NO: 1764724 - RNA, 19 nt, Artificial Sequence
  Description of Artificial Sequence: Synthetic oligonucleotide
  Antisense strand to SEQ ID NO: 1764723
ugacucaauaggaaauggu

SEQ ID NO: 1764725 - RNA, 19 nt, Artificial Sequence
  Description of Artificial Sequence: Synthetic oligonucleotide
  Sense strand starting at position 2333 of SEQ ID NO: 1562676
uaguucuuaaagugaggga

SEQ ID NO: 1764726 - RNA, 19 nt, Artificial Sequence
  Description of Artificial Sequence: Synthetic oligonucleotide
  Antisense strand to SEQ ID NO: 1764725
ucccucacuuuaagaacua

SEQ ID NO: 1764727 - RNA, 19 nt, Artificial Sequence
  Description of Artificial Sequence: Synthetic oligonucleotide
  Sense strand starting at position 2376 of SEQ ID NO: 1562676
gugccauguggccuaaguu

SEQ ID NO: 1764728 - RNA, 19 nt, Artificial Sequence
  Description of Artificial Sequence: Synthetic oligonucleotide
  Antisense strand to SEQ ID NO: 1764727
aacuuaggccacauggcac

SEQ ID NO: 1764729 - RNA, 19 nt, Artificial Sequence
  Description of Artificial Sequence: Synthetic oligonucleotide
  Sense strand starting at position 2377 of SEQ ID NO: 1562676
ugccauguggccuaaguuu

SEQ ID NO: 1764730 - RNA, 19 nt, Artificial Sequence
  Description of Artificial Sequence: Synthetic oligonucleotide
  Antisense strand to SEQ ID NO: 1764729
aaacuuaggccacauggca

SEQ ID NO: 1764731 - RNA, 19 nt, Artificial Sequence
  Description of Artificial Sequence: Synthetic oligonucleotide
  Sense strand starting at position 2399 of SEQ ID NO: 1562676
gucagaucacgcuaaccau

SEQ ID NO: 1764732 - RNA, 19 nt, Artificial Sequence
  Description of Artificial Sequence: Synthetic oligonucleotide
  Antisense strand to SEQ ID NO: 1764731
augguuagcgugaucugac

SEQ ID NO: 1764733 - RNA, 19 nt, Artificial Sequence
  Description of Artificial Sequence: Synthetic oligonucleotide
  Sense strand starting at position 2456 of SEQ ID NO: 1562676
auaggaugccgucacagaa

SEQ ID NO: 1764734 - RNA, 19 nt, Artificial Sequence
  Description of Artificial Sequence: Synthetic oligonucleotide
  Antisense strand to SEQ ID NO: 1764733
uucugugacggcauccuau

SEQ ID NO: 1764735 - RNA, 19 nt, Artificial Sequence
  Description of Artificial Sequence: Synthetic oligonucleotide
  Sense strand starting at position 2497 of SEQ ID NO: 1562676
guagaagacacgcacgaau

SEQ ID NO: 1764736 - RNA, 19 nt, Artificial Sequence
  Description of Artificial Sequence: Synthetic oligonucleotide
  Antisense strand to SEQ ID NO: 1764735
auucgugcgugucuucuac

SEQ ID NO: 1764737 - RNA, 19 nt, Artificial Sequence
  Description of Artificial Sequence: Synthetic oligonucleotide
  Sense strand starting at position 2500 of SEQ ID NO: 1562676
gaagacacgcacgaauaau

SEQ ID NO: 1764738 - RNA, 19 nt, Artificial Sequence
  Description of Artificial Sequence: Synthetic oligonucleotide
  Antisense strand to SEQ ID NO: 1764737
auuauucgugcgugucuuc

SEQ ID NO: 1764739 - RNA, 19 nt, Artificial Sequence
  Description of Artificial Sequence: Synthetic oligonucleotide
  Sense strand starting at position 2567 of SEQ ID NO: 1562676
ucacaagcauuguauggaa

SEQ ID NO: 1764740 - RNA, 19 nt, Artificial Sequence
  Description of Artificial Sequence: Synthetic oligonucleotide
  Antisense strand to SEQ ID NO: 1764739
uuccauacaaugcuuguga

SEQ ID NO: 1764741 - RNA, 19 nt, Artificial Sequence
  Description of Artificial Sequence: Synthetic oligonucleotide
  Sense strand starting at position 2569 of SEQ ID NO: 1562676
acaagcauuguauggaauu

SEQ ID NO: 1764742 - RNA, 19 nt, Artificial Sequence
  Description of Artificial Sequence: Synthetic oligonucleotide
  Antisense strand to SEQ ID NO: 1764741
aauuccauacaaugcuugu

SEQ ID NO: 1764743 - RNA, 19 nt, Artificial Sequence
  Description of Artificial Sequence: Synthetic oligonucleotide
  Sense strand starting at position 2715 of SEQ ID NO: 1562676
cugggaucuuagccucaau

SEQ ID NO: 1764744 - RNA, 19 nt, Artificial Sequence
  Description of Artificial Sequence: Synthetic oligonucleotide
  Antisense strand to SEQ ID NO: 1764743
auugaggcuaagaucccag

SEQ ID NO: 1764745 - RNA, 19 nt, Artificial Sequence
  Description of Artificial Sequence: Synthetic oligonucleotide
  Sense strand starting at position 2877 of SEQ ID NO: 1562676
ucuccucaguguccugaau

SEQ ID NO: 1764746 - RNA, 19 nt, Artificial Sequence
  Description of Artificial Sequence: Synthetic oligonucleotide
  Antisense strand to SEQ ID NO: 1764745
auucaggacacugaggaga

SEQ ID NO: 1764747 - RNA, 19 nt, Artificial Sequence
  Description of Artificial Sequence: Synthetic oligonucleotide
  Sense strand starting at position 2944 of SEQ ID NO: 1562676
uuaagugucuaacaaagua

SEQ ID NO: 1764748 - RNA, 19 nt, Artificial Sequence
  Description of Artificial Sequence: Synthetic oligonucleotide
  Antisense strand to SEQ ID NO: 1764747
uacuuuguuagacacuuaa

SEQ ID NO: 1764749 - RNA, 19 nt, Artificial Sequence
  Description of Artificial Sequence: Synthetic oligonucleotide
  Sense strand starting at position 3020 of SEQ ID NO: 1562676
ggagcaaaggagugaguua

SEQ ID NO: 1764750 - RNA, 19 nt, Artificial Sequence
  Description of Artificial Sequence: Synthetic oligonucleotide
  Antisense strand to SEQ ID NO: 1764749
uaacucacuccuuugcucc

SEQ ID NO: 1764751 - RNA, 19 nt, Artificial Sequence
  Description of Artificial Sequence: Synthetic oligonucleotide
  Sense strand starting at position 3452 of SEQ ID NO: 1562676
ggugagaugcuguggauga

SEQ ID NO: 1764752 - RNA, 19 nt, Artificial Sequence
  Description of Artificial Sequence: Synthetic oligonucleotide
  Antisense strand to SEQ ID NO: 1764751
ucauccacagcaucucacc

SEQ ID NO: 1764753 - RNA, 19 nt, Artificial Sequence
  Description of Artificial Sequence: Synthetic oligonucleotide
  Sense strand starting at position 3477 of SEQ ID NO: 1562676
gacucugagucaggcagau

SEQ ID NO: 1764754 - RNA, 19 nt, Artificial Sequence
  Description of Artificial Sequence: Synthetic oligonucleotide
  Antisense strand to SEQ ID NO: 1764753
aucugccugacucagaguc

SEQ ID NO: 1764755 - RNA, 19 nt, Artificial Sequence
  Description of Artificial Sequence: Synthetic oligonucleotide
  Sense strand starting at position 3508 of SEQ ID NO: 1562676
ggacgaguuccugaagguc

SEQ ID NO: 1764756 - RNA, 19 nt, Artificial Sequence
  Description of Artificial Sequence: Synthetic oligonucleotide
  Antisense strand to SEQ ID NO: 1764755
gaccuucaggaacucgucc

SEQ ID NO: 1764757 - RNA, 19 nt, Artificial Sequence
  Description of Artificial Sequence: Synthetic oligonucleotide
  Sense strand starting at position 3532 of SEQ ID NO: 1562676
gcuacugucuccucaccau

SEQ ID NO: 1764758 - RNA, 19 nt, Artificial Sequence
  Description of Artificial Sequence: Synthetic oligonucleotide
  Antisense strand to SEQ ID NO: 1764757
auggugaggagacaguagc

SEQ ID NO: 1764759 - RNA, 19 nt, Artificial Sequence
  Description of Artificial Sequence: Synthetic oligonucleotide
  Sense strand starting at position 3555 of SEQ ID NO: 1562676
ggagaaccuucucuccacu

SEQ ID NO: 1764760 - RNA, 19 nt, Artificial Sequence
  Description of Artificial Sequence: Synthetic oligonucleotide
  Antisense strand to SEQ ID NO: 1764759
aguggagagaagguucucc

SEQ ID NO: 1764761 - RNA, 19 nt, Artificial Sequence
  Description of Artificial Sequence: Synthetic oligonucleotide
  Sense strand starting at position 3609 of SEQ ID NO: 1562676
gcgcacaguaucuguuauu

SEQ ID NO: 1764762 - RNA, 19 nt, Artificial Sequence
  Description of Artificial Sequence: Synthetic oligonucleotide
  Antisense strand to SEQ ID NO: 1764761
aauaacagauacugugcgc

SEQ ID NO: 1764763 - RNA, 19 nt, Artificial Sequence
  Description of Artificial Sequence: Synthetic oligonucleotide
  Sense strand starting at position 3610 of SEQ ID NO: 1562676
cgcacaguaucuguuauuu

SEQ ID NO: 1764764 - RNA, 19 nt, Artificial Sequence
  Description of Artificial Sequence: Synthetic oligonucleotide
  Antisense strand to SEQ ID NO: 1764763
aaauaacagauacugugcg

SEQ ID NO: 1764765 - RNA, 19 nt, Artificial Sequence
  Description of Artificial Sequence: Synthetic oligonucleotide
  Sense strand starting at position 3799 of SEQ ID NO: 1562676
cccaucacaucuuugagga

SEQ ID NO: 1764766 - RNA, 19 nt, Artificial Sequence
  Description of Artificial Sequence: Synthetic oligonucleotide
  Antisense strand to SEQ ID NO: 1764765
uccucaaagaugugauggg

SEQ ID NO: 1764767 - RNA, 19 nt, Artificial Sequence
  Description of Artificial Sequence: Synthetic oligonucleotide
  Sense strand starting at position 3836 of SEQ ID NO: 1562676
cgcucagcacuuugaugua

SEQ ID NO: 1764768 - RNA, 19 nt, Artificial Sequence
  Description of Artificial Sequence: Synthetic oligonucleotide
  Antisense strand to SEQ ID NO: 1764767
uacaucaaagugcugagcg

SEQ ID NO: 1764769 - RNA, 19 nt, Artificial Sequence
  Description of Artificial Sequence: Synthetic oligonucleotide
  Sense strand starting at position 88 of SEQ ID NO: 1562677
ggaauagacuggucaaagu

SEQ ID NO: 1764770 - RNA, 19 nt, Artificial Sequence
  Description of Artificial Sequence: Synthetic oligonucleotide
  Antisense strand to SEQ ID NO: 1764769
acuuugaccagucuauucc

SEQ ID NO: 1764771 - RNA, 19 nt, Artificial Sequence
  Description of Artificial Sequence: Synthetic oligonucleotide
  Sense strand starting at position 97 of SEQ ID NO: 1562677
uggucaaagucauacauac

SEQ ID NO: 1764772 - RNA, 19 nt, Artificial Sequence
  Description of Artificial Sequence: Synthetic oligonucleotide
  Antisense strand to SEQ ID NO: 1764771
guauguaugacuuugacca

SEQ ID NO: 1764773 - RNA, 19 nt, Artificial Sequence
  Description of Artificial Sequence: Synthetic oligonucleotide
  Sense strand starting at position 219 of SEQ ID NO: 1562677
agaagagcucccuacuacu

SEQ ID NO: 1764774 - RNA, 19 nt, Artificial Sequence
  Description of Artificial Sequence: Synthetic oligonucleotide
  Antisense strand to SEQ ID NO: 1764773
aguaguagggagcucuucu

SEQ ID NO: 1764775 - RNA, 19 nt, Artificial Sequence
  Description of Artificial Sequence: Synthetic oligonucleotide
  Sense strand starting at position 470 of SEQ ID NO: 1562677
cugcgcauccgugaacauu

SEQ ID NO: 1764776 - RNA, 19 nt, Artificial Sequence
  Description of Artificial Sequence: Synthetic oligonucleotide
  Antisense strand to SEQ ID NO: 1764775
aauguucacggaugcgcag

SEQ ID NO: 1764777 - RNA, 19 nt, Artificial Sequence
  Description of Artificial Sequence: Synthetic oligonucleotide
  Sense strand starting at position 480 of SEQ ID NO: 1562677
gugaacauugccuagccau

SEQ ID NO: 1764778 - RNA, 19 nt, Artificial Sequence
  Description of Artificial Sequence: Synthetic oligonucleotide
  Antisense strand to SEQ ID NO: 1764777
auggcuaggcaauguucac

SEQ ID NO: 1764779 - RNA, 19 nt, Artificial Sequence
  Description of Artificial Sequence: Synthetic oligonucleotide
  Sense strand starting at position 516 of SEQ ID NO: 1562677
agagccaucuguggccaaa

SEQ ID NO: 1764780 - RNA, 19 nt, Artificial Sequence
  Description of Artificial Sequence: Synthetic oligonucleotide
  Antisense strand to SEQ ID NO: 1764779
uuuggccacagauggcucu

SEQ ID NO: 1764781 - RNA, 19 nt, Artificial Sequence
  Description of Artificial Sequence: Synthetic oligonucleotide
  Sense strand starting at position 564 of SEQ ID NO: 1562677
gcaggcaguuccugucuau

SEQ ID NO: 1764782 - RNA, 19 nt, Artificial Sequence
  Description of Artificial Sequence: Synthetic oligonucleotide
  Antisense strand to SEQ ID NO: 1764781
auagacaggaacugccugc

SEQ ID NO: 1764783 - RNA, 19 nt, Artificial Sequence
  Description of Artificial Sequence: Synthetic oligonucleotide
  Sense strand starting at position 745 of SEQ ID NO: 1562677
uggagucagguuugggaaa

SEQ ID NO: 1764784 - RNA, 19 nt, Artificial Sequence
  Description of Artificial Sequence: Synthetic oligonucleotide
  Antisense strand to SEQ ID NO: 1764783
uuucccaaaccugacucca

SEQ ID NO: 1764785 - RNA, 19 nt, Artificial Sequence
  Description of Artificial Sequence: Synthetic oligonucleotide
  Sense strand starting at position 1119 of SEQ ID NO: 1562677
gucccuguaucccaagaua

SEQ ID NO: 1764786 - RNA, 19 nt, Artificial Sequence
  Description of Artificial Sequence: Synthetic oligonucleotide
  Antisense strand to SEQ ID NO: 1764785
uaucuugggauacagggac

SEQ ID NO: 1764787 - RNA, 19 nt, Artificial Sequence
  Description of Artificial Sequence: Synthetic oligonucleotide
  Sense strand starting at position 2093 of SEQ ID NO: 1562677
uggcucauggcccagacau

SEQ ID NO: 1764788 - RNA, 19 nt, Artificial Sequence
  Description of Artificial Sequence: Synthetic oligonucleotide
  Antisense strand to SEQ ID NO: 1764787
augucugggccaugagcca

SEQ ID NO: 1764789 - RNA, 19 nt, Artificial Sequence
  Description of Artificial Sequence: Synthetic oligonucleotide
  Sense strand starting at position 2278 of SEQ ID NO: 1562677
gcgccacguuccugguaau

SEQ ID NO: 1764790 - RNA, 19 nt, Artificial Sequence
  Description of Artificial Sequence: Synthetic oligonucleotide
  Antisense strand to SEQ ID NO: 1764789
auuaccaggaacguggcgc

SEQ ID NO: 1764791 - RNA, 19 nt, Artificial Sequence
  Description of Artificial Sequence: Synthetic oligonucleotide
  Sense strand starting at position 2279 of SEQ ID NO: 1562677
cgccacguuccugguaauu

SEQ ID NO: 1764792 - RNA, 19 nt, Artificial Sequence
  Description of Artificial Sequence: Synthetic oligonucleotide
  Antisense strand to SEQ ID NO: 1764791
aauuaccaggaacguggcg

SEQ ID NO: 1764793 - RNA, 19 nt, Artificial Sequence
  Description of Artificial Sequence: Synthetic oligonucleotide
  Sense strand starting at position 2281 of SEQ ID NO: 1562677
ccacguuccugguaauuag

SEQ ID NO: 1764794 - RNA, 19 nt, Artificial Sequence
  Description of Artificial Sequence: Synthetic oligonucleotide
  Antisense strand to SEQ ID NO: 1764793
cuaauuaccaggaacgugg

SEQ ID NO: 1764795 - RNA, 19 nt, Artificial Sequence
  Description of Artificial Sequence: Synthetic oligonucleotide
  Sense strand starting at position 2284 of SEQ ID NO: 1562677
cguuccugguaauuagaga

SEQ ID NO: 1764796 - RNA, 19 nt, Artificial Sequence
  Description of Artificial Sequence: Synthetic oligonucleotide
  Antisense strand to SEQ ID NO: 1764795
ucucuaauuaccaggaacg

SEQ ID NO: 1764797 - RNA, 19 nt, Artificial Sequence
  Description of Artificial Sequence: Synthetic oligonucleotide
  Sense strand starting at position 2314 of SEQ ID NO: 1562677
ggugaguuugagugugagu

SEQ ID NO: 1764798 - RNA, 19 nt, Artificial Sequence
  Description of Artificial Sequence: Synthetic oligonucleotide
  Antisense strand to SEQ ID NO: 1764797
acucacacucaaacucacc

SEQ ID NO: 1764799 - RNA, 19 nt, Artificial Sequence
  Description of Artificial Sequence: Synthetic oligonucleotide
  Sense strand starting at position 2381 of SEQ ID NO: 1562677
gggugagucugggagaaug

SEQ ID NO: 1764800 - RNA, 19 nt, Artificial Sequence
  Description of Artificial Sequence: Synthetic oligonucleotide
  Antisense strand to SEQ ID NO: 1764799
cauucucccagacucaccc

SEQ ID NO: 1764801 - RNA, 19 nt, Artificial Sequence
  Description of Artificial Sequence: Synthetic oligonucleotide
  Sense strand starting at position 2588 of SEQ ID NO: 1562677
aagugaucggcuugaaggu

SEQ ID NO: 1764802 - RNA, 19 nt, Artificial Sequence
  Description of Artificial Sequence: Synthetic oligonucleotide
  Antisense strand to SEQ ID NO: 1764801
accuucaagccgaucacuu

SEQ ID NO: 1764803 - RNA, 19 nt, Artificial Sequence
  Description of Artificial Sequence: Synthetic oligonucleotide
  Sense strand starting at position 2629 of SEQ ID NO: 1562677
cugggaggcucugaguaga

SEQ ID NO: 1764804 - RNA, 19 nt, Artificial Sequence
  Description of Artificial Sequence: Synthetic oligonucleotide
  Antisense strand to SEQ ID NO: 1764803
ucuacucagagccucccag

SEQ ID NO: 1764805 - RNA, 19 nt, Artificial Sequence
  Description of Artificial Sequence: Synthetic oligonucleotide
  Sense strand starting at position 2766 of SEQ ID NO: 1562677
ggagguugagugugugaug

SEQ ID NO: 1764806 - RNA, 19 nt, Artificial Sequence
  Description of Artificial Sequence: Synthetic oligonucleotide
  Antisense strand to SEQ ID NO: 1764805
caucacacacucaaccucc

SEQ ID NO: 1764807 - RNA, 19 nt, Artificial Sequence
  Description of Artificial Sequence: Synthetic oligonucleotide
  Sense strand starting at position 2777 of SEQ ID NO: 1562677
gugugauguuccuaaaccc

SEQ ID NO: 1764808 - RNA, 19 nt, Artificial Sequence
  Description of Artificial Sequence: Synthetic oligonucleotide
  Antisense strand to SEQ ID NO: 1764807
ggguuuaggaacaucacac

SEQ ID NO: 1764809 - RNA, 19 nt, Artificial Sequence
  Description of Artificial Sequence: Synthetic oligonucleotide
  Sense strand starting at position 2855 of SEQ ID NO: 1562677
cagccucagcuuggaaaga

SEQ ID NO: 1764810 - RNA, 19 nt, Artificial Sequence
  Description of Artificial Sequence: Synthetic oligonucleotide
  Antisense strand to SEQ ID NO: 1764809
ucuuuccaagcugaggcug

SEQ ID NO: 1764811 - RNA, 19 nt, Artificial Sequence
  Description of Artificial Sequence: Synthetic oligonucleotide
  Sense strand starting at position 2856 of SEQ ID NO: 1562677
agccucagcuuggaaagaa

SEQ ID NO: 1764812 - RNA, 19 nt, Artificial Sequence
  Description of Artificial Sequence: Synthetic oligonucleotide
  Antisense strand to SEQ ID NO: 1764811
uucuuuccaagcugaggcu

SEQ ID NO: 1764813 - RNA, 19 nt, Artificial Sequence
  Description of Artificial Sequence: Synthetic oligonucleotide
  Sense strand starting at position 2889 of SEQ ID NO: 1562677
ggugucuccugguacuacu

SEQ ID NO: 1764814 - RNA, 19 nt, Artificial Sequence
  Description of Artificial Sequence: Synthetic oligonucleotide
  Antisense strand to SEQ ID NO: 1764813
aguaguaccaggagacacc

SEQ ID NO: 1764815 - RNA, 19 nt, Artificial Sequence
  Description of Artificial Sequence: Synthetic oligonucleotide
  Sense strand starting at position 3102 of SEQ ID NO: 1562677
cuacuuuaccggugaggaa

SEQ ID NO: 1764816 - RNA, 19 nt, Artificial Sequence
  Description of Artificial Sequence: Synthetic oligonucleotide
  Antisense strand to SEQ ID NO: 1764815
uuccucaccgguaaaguag

SEQ ID NO: 1764817 - RNA, 19 nt, Artificial Sequence
  Description of Artificial Sequence: Synthetic oligonucleotide
  Sense strand starting at position 3103 of SEQ ID NO: 1562677
uacuuuaccggugaggaau

SEQ ID NO: 1764818 - RNA, 19 nt, Artificial Sequence
  Description of Artificial Sequence: Synthetic oligonucleotide
  Antisense strand to SEQ ID NO: 1764817
auuccucaccgguaaagua

SEQ ID NO: 1764819 - RNA, 19 nt, Artificial Sequence
  Description of Artificial Sequence: Synthetic oligonucleotide
  Sense strand starting at position 3105 of SEQ ID NO: 1562677
cuuuaccggugaggaauua

SEQ ID NO: 1764820 - RNA, 19 nt, Artificial Sequence
  Description of Artificial Sequence: Synthetic oligonucleotide
  Antisense strand to SEQ ID NO: 1764819
uaauuccucaccgguaaag

SEQ ID NO: 1764821 - RNA, 19 nt, Artificial Sequence
  Description of Artificial Sequence: Synthetic oligonucleotide
  Sense strand starting at position 3143 of SEQ ID NO: 1562677
ggacuugacuugccuauau

SEQ ID NO: 1764822 - RNA, 19 nt, Artificial Sequence
  Description of Artificial Sequence: Synthetic oligonucleotide
  Antisense strand to SEQ ID NO: 1764821
auauaggcaagucaagucc

SEQ ID NO: 1764823 - RNA, 19 nt, Artificial Sequence
  Description of Artificial Sequence: Synthetic oligonucleotide
  Sense strand starting at position 3270 of SEQ ID NO: 1562677
ucugguucugcaggagaga

SEQ ID NO: 1764824 - RNA, 19 nt, Artificial Sequence
  Description of Artificial Sequence: Synthetic oligonucleotide
  Antisense strand to SEQ ID NO: 1764823
ucucuccugcagaaccaga

SEQ ID NO: 1764825 - RNA, 19 nt, Artificial Sequence
  Description of Artificial Sequence: Synthetic oligonucleotide
  Sense strand starting at position 3281 of SEQ ID NO: 1562677
aggagagacuguugagaaa

SEQ ID NO: 1764826 - RNA, 19 nt, Artificial Sequence
  Description of Artificial Sequence: Synthetic oligonucleotide
  Antisense strand to SEQ ID NO: 1764825
uuucucaacagucucuccu

SEQ ID NO: 1764827 - RNA, 19 nt, Artificial Sequence
  Description of Artificial Sequence: Synthetic oligonucleotide
  Sense strand starting at position 3294 of SEQ ID NO: 1562677
gagaaaugcugccuguggu

SEQ ID NO: 1764828 - RNA, 19 nt, Artificial Sequence
  Description of Artificial Sequence: Synthetic oligonucleotide
  Antisense strand to SEQ ID NO: 1764827
accacaggcagcauuucuc

SEQ ID NO: 1764829 - RNA, 19 nt, Artificial Sequence
  Description of Artificial Sequence: Synthetic oligonucleotide
  Sense strand starting at position 3295 of SEQ ID NO: 1562677
agaaaugcugccugugguu

SEQ ID NO: 1764830 - RNA, 19 nt, Artificial Sequence
  Description of Artificial Sequence: Synthetic oligonucleotide
  Antisense strand to SEQ ID NO: 1764829
aaccacaggcagcauuucu

SEQ ID NO: 1764831 - RNA, 19 nt, Artificial Sequence
  Description of Artificial Sequence: Synthetic oligonucleotide
  Sense strand starting at position 28 of SEQ ID NO: 1562678
gaaacaaucuaggugucga

SEQ ID NO: 1764832 - RNA, 19 nt, Artificial Sequence
  Description of Artificial Sequence: Synthetic oligonucleotide
  Antisense strand to SEQ ID NO: 1764831
ucgacaccuagauuguuuc

SEQ ID NO: 1764833 - RNA, 19 nt, Artificial Sequence
  Description of Artificial Sequence: Synthetic oligonucleotide
  Sense strand starting at position 41 of SEQ ID NO: 1562678
ugucgaucaacgugagauu

SEQ ID NO: 1764834 - RNA, 19 nt, Artificial Sequence
  Description of Artificial Sequence: Synthetic oligonucleotide
  Antisense strand to SEQ ID NO: 1764833
aaucucacguugaucgaca

SEQ ID NO: 1764835 - RNA, 19 nt, Artificial Sequence
  Description of Artificial Sequence: Synthetic oligonucleotide
  Sense strand starting at position 42 of SEQ ID NO: 1562678
gucgaucaacgugagauua

SEQ ID NO: 1764836 - RNA, 19 nt, Artificial Sequence
  Description of Artificial Sequence: Synthetic oligonucleotide
  Antisense strand to SEQ ID NO: 1764835
uaaucucacguugaucgac

SEQ ID NO: 1764837 - RNA, 19 nt, Artificial Sequence
  Description of Artificial Sequence: Synthetic oligonucleotide
  Sense strand starting at position 63 of SEQ ID NO: 1562678
ugaauugugguguacccau

SEQ ID NO: 1764838 - RNA, 19 nt, Artificial Sequence
  Description of Artificial Sequence: Synthetic oligonucleotide
  Antisense strand to SEQ ID NO: 1764837
auggguacaccacaauuca

SEQ ID NO: 1764839 - RNA, 19 nt, Artificial Sequence
  Description of Artificial Sequence: Synthetic oligonucleotide
  Sense strand starting at position 93 of SEQ ID NO: 1562678
ccacauauuucuuaggguu

SEQ ID NO: 1764840 - RNA, 19 nt, Artificial Sequence
  Description of Artificial Sequence: Synthetic oligonucleotide
  Antisense strand to SEQ ID NO: 1764839
aacccuaagaaauaugugg

SEQ ID NO: 1764841 - RNA, 19 nt, Artificial Sequence
  Description of Artificial Sequence: Synthetic oligonucleotide
  Sense strand starting at position 107 of SEQ ID NO: 1562678
ggguuacuuaacgaguuaa

SEQ ID NO: 1764842 - RNA, 19 nt, Artificial Sequence
  Description of Artificial Sequence: Synthetic oligonucleotide
  Antisense strand to SEQ ID NO: 1764841
uuaacucguuaaguaaccc

SEQ ID NO: 1764843 - RNA, 19 nt, Artificial Sequence
  Description of Artificial Sequence: Synthetic oligonucleotide
  Sense strand starting at position 117 of SEQ ID NO: 1562678
acgaguuaaaucuguaugu

SEQ ID NO: 1764844 - RNA, 19 nt, Artificial Sequence
  Description of Artificial Sequence: Synthetic oligonucleotide
  Antisense strand to SEQ ID NO: 1764843
acauacagauuuaacucgu

SEQ ID NO: 1764845 - RNA, 19 nt, Artificial Sequence
  Description of Artificial Sequence: Synthetic oligonucleotide
  Sense strand starting at position 118 of SEQ ID NO: 1562678
cgaguuaaaucuguaugua

SEQ ID NO: 1764846 - RNA, 19 nt, Artificial Sequence
  Description of Artificial Sequence: Synthetic oligonucleotide
  Antisense strand to SEQ ID NO: 1764845
uacauacagauuuaacucg

SEQ ID NO: 1764847 - RNA, 19 nt, Artificial Sequence
  Description of Artificial Sequence: Synthetic oligonucleotide
  Sense strand starting at position 128 of SEQ ID NO: 1562678
cuguauguauuauuguaga

SEQ ID NO: 1764848 - RNA, 19 nt, Artificial Sequence
  Description of Artificial Sequence: Synthetic oligonucleotide
  Antisense strand to SEQ ID NO: 1764847
ucuacaauaauacauacag

SEQ ID NO: 1764849 - RNA, 19 nt, Artificial Sequence
  Description of Artificial Sequence: Synthetic oligonucleotide
  Sense strand starting at position 585 of SEQ ID NO: 1562678
cuuguaucaugcuuagaaa

SEQ ID NO: 1764850 - RNA, 19 nt, Artificial Sequence
  Description of Artificial Sequence: Synthetic oligonucleotide
  Antisense strand to SEQ ID NO: 1764849
uuucuaagcaugauacaag

SEQ ID NO: 1764851 - RNA, 19 nt, Artificial Sequence
  Description of Artificial Sequence: Synthetic oligonucleotide
  Sense strand starting at position 776 of SEQ ID NO: 1562678
ugaauuauccugugguguu

SEQ ID NO: 1764852 - RNA, 19 nt, Artificial Sequence
  Description of Artificial Sequence: Synthetic oligonucleotide
  Antisense strand to SEQ ID NO: 1764851
aacaccacaggauaauuca

SEQ ID NO: 1764853 - RNA, 19 nt, Artificial Sequence
  Description of Artificial Sequence: Synthetic oligonucleotide
  Sense strand starting at position 792 of SEQ ID NO: 1562678
guugguauaucuguauacu

SEQ ID NO: 1764854 - RNA, 19 nt, Artificial Sequence
  Description of Artificial Sequence: Synthetic oligonucleotide
  Antisense strand to SEQ ID NO: 1764853
aguauacagauauaccaac

SEQ ID NO: 1764855 - RNA, 19 nt, Artificial Sequence
  Description of Artificial Sequence: Synthetic oligonucleotide
  Sense strand starting at position 793 of SEQ ID NO: 1562678
uugguauaucuguauacug

SEQ ID NO: 1764856 - RNA, 19 nt, Artificial Sequence
  Description of Artificial Sequence: Synthetic oligonucleotide
  Antisense strand to SEQ ID NO: 1764855
caguauacagauauaccaa

SEQ ID NO: 1764857 - RNA, 19 nt, Artificial Sequence
  Description of Artificial Sequence: Synthetic oligonucleotide
  Sense strand starting at position 795 of SEQ ID NO: 1562678
gguauaucuguauacugga

SEQ ID NO: 1764858 - RNA, 19 nt, Artificial Sequence
  Description of Artificial Sequence: Synthetic oligonucleotide
  Antisense strand to SEQ ID NO: 1764857
uccaguauacagauauacc

SEQ ID NO: 1764859 - RNA, 19 nt, Artificial Sequence
  Description of Artificial Sequence: Synthetic oligonucleotide
  Sense strand starting at position 864 of SEQ ID NO: 1562678
aggaaauguuuacucauua

SEQ ID NO: 1764860 - RNA, 19 nt, Artificial Sequence
  Description of Artificial Sequence: Synthetic oligonucleotide
  Antisense strand to SEQ ID NO: 1764859
uaaugaguaaacauuuccu

SEQ ID NO: 1764861 - RNA, 19 nt, Artificial Sequence
  Description of Artificial Sequence: Synthetic oligonucleotide
  Sense strand starting at position 865 of SEQ ID NO: 1562678
ggaaauguuuacucauuau

SEQ ID NO: 1764862 - RNA, 19 nt, Artificial Sequence
  Description of Artificial Sequence: Synthetic oligonucleotide
  Antisense strand to SEQ ID NO: 1764861
auaaugaguaaacauuucc

SEQ ID NO: 1764863 - RNA, 19 nt, Artificial Sequence
  Description of Artificial Sequence: Synthetic oligonucleotide
  Sense strand starting at position 921 of SEQ ID NO: 1562678
uuagaauugggcuguacaa

SEQ ID NO: 1764864 - RNA, 19 nt, Artificial Sequence
  Description of Artificial Sequence: Synthetic oligonucleotide
  Antisense strand to SEQ ID NO: 1764863
uuguacagcccaauucuaa

SEQ ID NO: 1764865 - RNA, 19 nt, Artificial Sequence
  Description of Artificial Sequence: Synthetic oligonucleotide
  Sense strand starting at position 1107 of SEQ ID NO: 1562678
cagcauacuuggguacaga

SEQ ID NO: 1764866 - RNA, 19 nt, Artificial Sequence
  Description of Artificial Sequence: Synthetic oligonucleotide
  Antisense strand to SEQ ID NO: 1764865
ucuguacccaaguaugcug

SEQ ID NO: 1764867 - RNA, 19 nt, Artificial Sequence
  Description of Artificial Sequence: Synthetic oligonucleotide
  Sense strand starting at position 1497 of SEQ ID NO: 1562678
ccaagaugucagggacuau

SEQ ID NO: 1764868 - RNA, 19 nt, Artificial Sequence
  Description of Artificial Sequence: Synthetic oligonucleotide
  Antisense strand to SEQ ID NO: 1764867
auagucccugacaucuugg

SEQ ID NO: 1764869 - RNA, 19 nt, Artificial Sequence
  Description of Artificial Sequence: Synthetic oligonucleotide
  Sense strand starting at position 1582 of SEQ ID NO: 1562678
accagcaucuuagugacaa

SEQ ID NO: 1764870 - RNA, 19 nt, Artificial Sequence
  Description of Artificial Sequence: Synthetic oligonucleotide
  Antisense strand to SEQ ID NO: 1764869
uugucacuaagaugcuggu

SEQ ID NO: 1764871 - RNA, 19 nt, Artificial Sequence
  Description of Artificial Sequence: Synthetic oligonucleotide
  Sense strand starting at position 2011 of SEQ ID NO: 1562678
cucccacguuuccuauuua

SEQ ID NO: 1764872 - RNA, 19 nt, Artificial Sequence
  Description of Artificial Sequence: Synthetic oligonucleotide
  Antisense strand to SEQ ID NO: 1764871
uaaauaggaaacgugggag

SEQ ID NO: 1764873 - RNA, 19 nt, Artificial Sequence
  Description of Artificial Sequence: Synthetic oligonucleotide
  Sense strand starting at position 2237 of SEQ ID NO: 1562678
gguggaaguggcugcaaua

SEQ ID NO: 1764874 - RNA, 19 nt, Artificial Sequence
  Description of Artificial Sequence: Synthetic oligonucleotide
  Antisense strand to SEQ ID NO: 1764873
uauugcagccacuuccacc

SEQ ID NO: 1764875 - RNA, 19 nt, Artificial Sequence
  Description of Artificial Sequence: Synthetic oligonucleotide
  Sense strand starting at position 2279 of SEQ ID NO: 1562678
gccagacagaucuguguug

SEQ ID NO: 1764876 - RNA, 19 nt, Artificial Sequence
  Description of Artificial Sequence: Synthetic oligonucleotide
  Antisense strand to SEQ ID NO: 1764875
caacacagaucugucuggc

SEQ ID NO: 1764877 - RNA, 19 nt, Artificial Sequence
  Description of Artificial Sequence: Synthetic oligonucleotide
  Sense strand starting at position 2322 of SEQ ID NO: 1562678
aagcguguccuugugcaaa

SEQ ID NO: 1764878 - RNA, 19 nt, Artificial Sequence
  Description of Artificial Sequence: Synthetic oligonucleotide
  Antisense strand to SEQ ID NO: 1764877
uuugcacaaggacacgcuu

SEQ ID NO: 1764879 - RNA, 19 nt, Artificial Sequence
  Description of Artificial Sequence: Synthetic oligonucleotide
  Sense strand starting at position 2369 of SEQ ID NO: 1562678
gggacauccaucugucugu

SEQ ID NO: 1764880 - RNA, 19 nt, Artificial Sequence
  Description of Artificial Sequence: Synthetic oligonucleotide
  Antisense strand to SEQ ID NO: 1764879
acagacagauggauguccc

SEQ ID NO: 1764881 - RNA, 19 nt, Artificial Sequence
  Description of Artificial Sequence: Synthetic oligonucleotide
  Sense strand starting at position 2438 of SEQ ID NO: 1562678
gugagauucugugcaggaa

SEQ ID NO: 1764882 - RNA, 19 nt, Artificial Sequence
  Description of Artificial Sequence: Synthetic oligonucleotide
  Antisense strand to SEQ ID NO: 1764881
uuccugcacagaaucucac

SEQ ID NO: 1764883 - RNA, 19 nt, Artificial Sequence
  Description of Artificial Sequence: Synthetic oligonucleotide
  Sense strand starting at position 2439 of SEQ ID NO: 1562678
ugagauucugugcaggaag

SEQ ID NO: 1764884 - RNA, 19 nt, Artificial Sequence
  Description of Artificial Sequence: Synthetic oligonucleotide
  Antisense strand to SEQ ID NO: 1764883
cuuccugcacagaaucuca

SEQ ID NO: 1764885 - RNA, 19 nt, Artificial Sequence
  Description of Artificial Sequence: Synthetic oligonucleotide
  Sense strand starting at position 2557 of SEQ ID NO: 1562678
ccaugugucauauggucau

SEQ ID NO: 1764886 - RNA, 19 nt, Artificial Sequence
  Description of Artificial Sequence: Synthetic oligonucleotide
  Antisense strand to SEQ ID NO: 1764885
augaccauaugacacaugg

SEQ ID NO: 1764887 - RNA, 19 nt, Artificial Sequence
  Description of Artificial Sequence: Synthetic oligonucleotide
  Sense strand starting at position 2687 of SEQ ID NO: 1562678
accuuugacugugugcaaa

SEQ ID NO: 1764888 - RNA, 19 nt, Artificial Sequence
  Description of Artificial Sequence: Synthetic oligonucleotide
  Antisense strand to SEQ ID NO: 1764887
uuugcacacagucaaaggu

SEQ ID NO: 1764889 - RNA, 19 nt, Artificial Sequence
  Description of Artificial Sequence: Synthetic oligonucleotide
  Sense strand starting at position 2695 of SEQ ID NO: 1562678
cugugugcaaaugaauaga

SEQ ID NO: 1764890 - RNA, 19 nt, Artificial Sequence
  Description of Artificial Sequence: Synthetic oligonucleotide
  Antisense strand to SEQ ID NO: 1764889
ucuauucauuugcacacag

SEQ ID NO: 1764891 - RNA, 19 nt, Artificial Sequence
  Description of Artificial Sequence: Synthetic oligonucleotide
  Sense strand starting at position 2804 of SEQ ID NO: 1562678
gcagucucucgugcucaaa

SEQ ID NO: 1764892 - RNA, 19 nt, Artificial Sequence
  Description of Artificial Sequence: Synthetic oligonucleotide
  Antisense strand to SEQ ID NO: 1764891
uuugagcacgagagacugc

SEQ ID NO: 1764893 - RNA, 19 nt, Artificial Sequence
  Description of Artificial Sequence: Synthetic oligonucleotide
  Sense strand starting at position 3008 of SEQ ID NO: 1562678
ggcugccucccaggagaaa

SEQ ID NO: 1764894 - RNA, 19 nt, Artificial Sequence
  Description of Artificial Sequence: Synthetic oligonucleotide
  Antisense strand to SEQ ID NO: 1764893
uuucuccugggaggcagcc

SEQ ID NO: 1764895 - RNA, 19 nt, Artificial Sequence
  Description of Artificial Sequence: Synthetic oligonucleotide
  Sense strand starting at position 3101 of SEQ ID NO: 1562678
ccucgaagccacuggaauu

SEQ ID NO: 1764896 - RNA, 19 nt, Artificial Sequence
  Description of Artificial Sequence: Synthetic oligonucleotide
  Antisense strand to SEQ ID NO: 1764895
aauuccaguggcuucgagg

SEQ ID NO: 1764897 - RNA, 19 nt, Artificial Sequence
  Description of Artificial Sequence: Synthetic oligonucleotide
  Sense strand starting at position 3112 of SEQ ID NO: 1562678
cuggaauucuggccugauu

SEQ ID NO: 1764898 - RNA, 19 nt, Artificial Sequence
  Description of Artificial Sequence: Synthetic oligonucleotide
  Antisense strand to SEQ ID NO: 1764897
aaucaggccagaauuccag

SEQ ID NO: 1764899 - RNA, 19 nt, Artificial Sequence
  Description of Artificial Sequence: Synthetic oligonucleotide
  Sense strand starting at position 3114 of SEQ ID NO: 1562678
ggaauucuggccugauugu

SEQ ID NO: 1764900 - RNA, 19 nt, Artificial Sequence
  Description of Artificial Sequence: Synthetic oligonucleotide
  Antisense strand to SEQ ID NO: 1764899
acaaucaggccagaauucc

SEQ ID NO: 1764901 - RNA, 19 nt, Artificial Sequence
  Description of Artificial Sequence: Synthetic oligonucleotide
  Sense strand starting at position 3115 of SEQ ID NO: 1562678
gaauucuggccugauuguu

SEQ ID NO: 1764902 - RNA, 19 nt, Artificial Sequence
  Description of Artificial Sequence: Synthetic oligonucleotide
  Antisense strand to SEQ ID NO: 1764901
aacaaucaggccagaauuc

SEQ ID NO: 1764903 - RNA, 19 nt, Artificial Sequence
  Description of Artificial Sequence: Synthetic oligonucleotide
  Sense strand starting at position 3220 of SEQ ID NO: 1562678
gaggaaggcaugugugguu

SEQ ID NO: 1764904 - RNA, 19 nt, Artificial Sequence
  Description of Artificial Sequence: Synthetic oligonucleotide
  Antisense strand to SEQ ID NO: 1764903
aaccacacaugccuuccuc

SEQ ID NO: 1764905 - RNA, 19 nt, Artificial Sequence
  Description of Artificial Sequence: Synthetic oligonucleotide
  Sense strand starting at position 3645 of SEQ ID NO: 1562678
aguucuaagcgagaagaau

SEQ ID NO: 1764906 - RNA, 19 nt, Artificial Sequence
  Description of Artificial Sequence: Synthetic oligonucleotide
  Antisense strand to SEQ ID NO: 1764905
auucuucucgcuuagaacu

SEQ ID NO: 1764907 - RNA, 19 nt, Artificial Sequence
  Description of Artificial Sequence: Synthetic oligonucleotide
  Sense strand starting at position 3823 of SEQ ID NO: 1562678
gcauuuacgcugugagcag

SEQ ID NO: 1764908 - RNA, 19 nt, Artificial Sequence
  Description of Artificial Sequence: Synthetic oligonucleotide
  Antisense strand to SEQ ID NO: 1764907
cugcucacagcguaaaugc

SEQ ID NO: 1764909 - RNA, 19 nt, Artificial Sequence
  Description of Artificial Sequence: Synthetic oligonucleotide
  Sense strand starting at position 3956 of SEQ ID NO: 1562678
uaguaacucguauauguua

SEQ ID NO: 1764910 - RNA, 19 nt, Artificial Sequence
  Description of Artificial Sequence: Synthetic oligonucleotide
  Antisense strand to SEQ ID NO: 1764909
uaacauauacgaguuacua

SEQ ID NO: 1764911 - RNA, 19 nt, Artificial Sequence
  Description of Artificial Sequence: Synthetic oligonucleotide
  Sense strand starting at position 173 of SEQ ID NO: 1562679
ccuugucccucggacgauu

SEQ ID NO: 1764912 - RNA, 19 nt, Artificial Sequence
  Description of Artificial Sequence: Synthetic oligonucleotide
  Antisense strand to SEQ ID NO: 1764911
aaucguccgagggacaagg

SEQ ID NO: 1764913 - RNA, 19 nt, Artificial Sequence
  Description of Artificial Sequence: Synthetic oligonucleotide
  Sense strand starting at position 176 of SEQ ID NO: 1562679
ugucccucggacgauuaaa

SEQ ID NO: 1764914 - RNA, 19 nt, Artificial Sequence
  Description of Artificial Sequence: Synthetic oligonucleotide
  Antisense strand to SEQ ID NO: 1764913
uuuaaucguccgagggaca

SEQ ID NO: 1764915 - RNA, 19 nt, Artificial Sequence
  Description of Artificial Sequence: Synthetic oligonucleotide
  Sense strand starting at position 246 of SEQ ID NO: 1562679
aggcauugcuuggaagcaa

SEQ ID NO: 1764916 - RNA, 19 nt, Artificial Sequence
  Description of Artificial Sequence: Synthetic oligonucleotide
  Antisense strand to SEQ ID NO: 1764915
uugcuuccaagcaaugccu

SEQ ID NO: 1764917 - RNA, 19 nt, Artificial Sequence
  Description of Artificial Sequence: Synthetic oligonucleotide
  Sense strand starting at position 316 of SEQ ID NO: 1562679
gaggcuaugccaggaagaa

SEQ ID NO: 1764918 - RNA, 19 nt, Artificial Sequence
  Description of Artificial Sequence: Synthetic oligonucleotide
  Antisense strand to SEQ ID NO: 1764917
uucuuccuggcauagccuc

SEQ ID NO: 1764919 - RNA, 19 nt, Artificial Sequence
  Description of Artificial Sequence: Synthetic oligonucleotide
  Sense strand starting at position 378 of SEQ ID NO: 1562679
cccacuucgaguuagggua

SEQ ID NO: 1764920 - RNA, 19 nt, Artificial Sequence
  Description of Artificial Sequence: Synthetic oligonucleotide
  Antisense strand to SEQ ID NO: 1764919
uacccuaacucgaaguggg

SEQ ID NO: 1764921 - RNA, 19 nt, Artificial Sequence
  Description of Artificial Sequence: Synthetic oligonucleotide
  Sense strand starting at position 386 of SEQ ID NO: 1562679
gaguuaggguauuaacaag

SEQ ID NO: 1764922 - RNA, 19 nt, Artificial Sequence
  Description of Artificial Sequence: Synthetic oligonucleotide
  Antisense strand to SEQ ID NO: 1764921
cuuguuaauacccuaacuc

SEQ ID NO: 1764923 - RNA, 19 nt, Artificial Sequence
  Description of Artificial Sequence: Synthetic oligonucleotide
  Sense strand starting at position 397 of SEQ ID NO: 1562679
uuaacaagagcuugggaau

SEQ ID NO: 1764924 - RNA, 19 nt, Artificial Sequence
  Description of Artificial Sequence: Synthetic oligonucleotide
  Antisense strand to SEQ ID NO: 1764923
auucccaagcucuuguuaa

SEQ ID NO: 1764925 - RNA, 19 nt, Artificial Sequence
  Description of Artificial Sequence: Synthetic oligonucleotide
  Sense strand starting at position 441 of SEQ ID NO: 1562679
uugcguuccuuagagacuu

SEQ ID NO: 1764926 - RNA, 19 nt, Artificial Sequence
  Description of Artificial Sequence: Synthetic oligonucleotide
  Antisense strand to SEQ ID NO: 1764925
aagucucuaaggaacgcaa

SEQ ID NO: 1764927 - RNA, 19 nt, Artificial Sequence
  Description of Artificial Sequence: Synthetic oligonucleotide
  Sense strand starting at position 449 of SEQ ID NO: 1562679
cuuagagacuugcaagaca

SEQ ID NO: 1764928 - RNA, 19 nt, Artificial Sequence
  Description of Artificial Sequence: Synthetic oligonucleotide
  Antisense strand to SEQ ID NO: 1764927
ugucuugcaagucucuaag

SEQ ID NO: 1764929 - RNA, 19 nt, Artificial Sequence
  Description of Artificial Sequence: Synthetic oligonucleotide
  Sense strand starting at position 491 of SEQ ID NO: 1562679
agaauccgauccgacaaau

SEQ ID NO: 1764930 - RNA, 19 nt, Artificial Sequence
  Description of Artificial Sequence: Synthetic oligonucleotide
  Antisense strand to SEQ ID NO: 1764929
auuugucggaucggauucu

SEQ ID NO: 1764931 - RNA, 19 nt, Artificial Sequence
  Description of Artificial Sequence: Synthetic oligonucleotide
  Sense strand starting at position 671 of SEQ ID NO: 1562679
gccggugauuguccgauga

SEQ ID NO: 1764932 - RNA, 19 nt, Artificial Sequence
  Description of Artificial Sequence: Synthetic oligonucleotide
  Antisense strand to SEQ ID NO: 1764931
ucaucggacaaucaccggc

SEQ ID NO: 1764933 - RNA, 19 nt, Artificial Sequence
  Description of Artificial Sequence: Synthetic oligonucleotide
  Sense strand starting at position 673 of SEQ ID NO: 1562679
cggugauuguccgaugaaa

SEQ ID NO: 1764934 - RNA, 19 nt, Artificial Sequence
  Description of Artificial Sequence: Synthetic oligonucleotide
  Antisense strand to SEQ ID NO: 1764933
uuucaucggacaaucaccg

SEQ ID NO: 1764935 - RNA, 19 nt, Artificial Sequence
  Description of Artificial Sequence: Synthetic oligonucleotide
  Sense strand starting at position 675 of SEQ ID NO: 1562679
gugauuguccgaugaaacg

SEQ ID NO: 1764936 - RNA, 19 nt, Artificial Sequence
  Description of Artificial Sequence: Synthetic oligonucleotide
  Antisense strand to SEQ ID NO: 1764935
cguuucaucggacaaucac

SEQ ID NO: 1764937 - RNA, 19 nt, Artificial Sequence
  Description of Artificial Sequence: Synthetic oligonucleotide
  Sense strand starting at position 1143 of SEQ ID NO: 1562679
gggcggaugccggaggauu

SEQ ID NO: 1764938 - RNA, 19 nt, Artificial Sequence
  Description of Artificial Sequence: Synthetic oligonucleotide
  Antisense strand to SEQ ID NO: 1764937
aauccuccggcauccgccc

SEQ ID NO: 1764939 - RNA, 19 nt, Artificial Sequence
  Description of Artificial Sequence: Synthetic oligonucleotide
  Sense strand starting at position 1885 of SEQ ID NO: 1562679
guagccugggcucauacau

SEQ ID NO: 1764940 - RNA, 19 nt, Artificial Sequence
  Description of Artificial Sequence: Synthetic oligonucleotide
  Antisense strand to SEQ ID NO: 1764939
auguaugagcccaggcuac

SEQ ID NO: 1764941 - RNA, 19 nt, Artificial Sequence
  Description of Artificial Sequence: Synthetic oligonucleotide
  Sense strand starting at position 2104 of SEQ ID NO: 1562679
gagcuuggguuuccuuaaa

SEQ ID NO: 1764942 - RNA, 19 nt, Artificial Sequence
  Description of Artificial Sequence: Synthetic oligonucleotide
  Antisense strand to SEQ ID NO: 1764941
uuuaaggaaacccaagcuc

SEQ ID NO: 1764943 - RNA, 19 nt, Artificial Sequence
  Description of Artificial Sequence: Synthetic oligonucleotide
  Sense strand starting at position 2199 of SEQ ID NO: 1562679
gaugaaagguugcagaaca

SEQ ID NO: 1764944 - RNA, 19 nt, Artificial Sequence
  Description of Artificial Sequence: Synthetic oligonucleotide
  Antisense strand to SEQ ID NO: 1764943
uguucugcaaccuuucauc

SEQ ID NO: 1764945 - RNA, 19 nt, Artificial Sequence
  Description of Artificial Sequence: Synthetic oligonucleotide
  Sense strand starting at position 2343 of SEQ ID NO: 1562679
cacaguuccugggaggagu

SEQ ID NO: 1764946 - RNA, 19 nt, Artificial Sequence
  Description of Artificial Sequence: Synthetic oligonucleotide
  Antisense strand to SEQ ID NO: 1764945
acuccucccaggaacugug

SEQ ID NO: 1764947 - RNA, 19 nt, Artificial Sequence
  Description of Artificial Sequence: Synthetic oligonucleotide
  Sense strand starting at position 2356 of SEQ ID NO: 1562679
aggagucacuucuauaaua

SEQ ID NO: 1764948 - RNA, 19 nt, Artificial Sequence
  Description of Artificial Sequence: Synthetic oligonucleotide
  Antisense strand to SEQ ID NO: 1764947
uauuauagaagugacuccu

SEQ ID NO: 1764949 - RNA, 19 nt, Artificial Sequence
  Description of Artificial Sequence: Synthetic oligonucleotide
  Sense strand starting at position 2367 of SEQ ID NO: 1562679
cuauaauagccguaucuuc

SEQ ID NO: 1764950 - RNA, 19 nt, Artificial Sequence
  Description of Artificial Sequence: Synthetic oligonucleotide
  Antisense strand to SEQ ID NO: 1764949
gaagauacggcuauuauag

SEQ ID NO: 1764951 - RNA, 19 nt, Artificial Sequence
  Description of Artificial Sequence: Synthetic oligonucleotide
  Sense strand starting at position 2536 of SEQ ID NO: 1562679
cagcgaucaccaggaaacu

SEQ ID NO: 1764952 - RNA, 19 nt, Artificial Sequence
  Description of Artificial Sequence: Synthetic oligonucleotide
  Antisense strand to SEQ ID NO: 1764951
aguuuccuggugaucgcug

SEQ ID NO: 1764953 - RNA, 19 nt, Artificial Sequence
  Description of Artificial Sequence: Synthetic oligonucleotide
  Sense strand starting at position 2622 of SEQ ID NO: 1562679
cagugacaccuuugccaga

SEQ ID NO: 1764954 - RNA, 19 nt, Artificial Sequence
  Description of Artificial Sequence: Synthetic oligonucleotide
  Antisense strand to SEQ ID NO: 1764953
ucuggcaaaggugucacug

SEQ ID NO: 1764955 - RNA, 19 nt, Artificial Sequence
  Description of Artificial Sequence: Synthetic oligonucleotide
  Sense strand starting at position 3191 of SEQ ID NO: 1562679
uguuucuuuccucacauga

SEQ ID NO: 1764956 - RNA, 19 nt, Artificial Sequence
  Description of Artificial Sequence: Synthetic oligonucleotide
  Antisense strand to SEQ ID NO: 1764955
ucaugugaggaaagaaaca

SEQ ID NO: 1764957 - RNA, 19 nt, Artificial Sequence
  Description of Artificial Sequence: Synthetic oligonucleotide
  Sense strand starting at position 3363 of SEQ ID NO: 1562679
gagguuauuuguuaucuca

SEQ ID NO: 1764958 - RNA, 19 nt, Artificial Sequence
  Description of Artificial Sequence: Synthetic oligonucleotide
  Antisense strand to SEQ ID NO: 1764957
ugagauaacaaauaaccuc

SEQ ID NO: 1764959 - RNA, 19 nt, Artificial Sequence
  Description of Artificial Sequence: Synthetic oligonucleotide
  Sense strand starting at position 3365 of SEQ ID NO: 1562679
gguuauuuguuaucucauu

SEQ ID NO: 1764960 - RNA, 19 nt, Artificial Sequence
  Description of Artificial Sequence: Synthetic oligonucleotide
  Antisense strand to SEQ ID NO: 1764959
aaugagauaacaaauaacc

SEQ ID NO: 1764961 - RNA, 19 nt, Artificial Sequence
  Description of Artificial Sequence: Synthetic oligonucleotide
  Sense strand starting at position 3528 of SEQ ID NO: 1562679
gccagaucgccaggucuga

SEQ ID NO: 1764962 - RNA, 19 nt, Artificial Sequence
  Description of Artificial Sequence: Synthetic oligonucleotide
  Antisense strand to SEQ ID NO: 1764961
ucagaccuggcgaucuggc

SEQ ID NO: 1764963 - RNA, 19 nt, Artificial Sequence
  Description of Artificial Sequence: Synthetic oligonucleotide
  Sense strand starting at position 3635 of SEQ ID NO: 1562679
uuaagauccugcucaguuc

SEQ ID NO: 1764964 - RNA, 19 nt, Artificial Sequence
  Description of Artificial Sequence: Synthetic oligonucleotide
  Antisense strand to SEQ ID NO: 1764963
gaacugagcaggaucuuaa

SEQ ID NO: 1764965 - RNA, 19 nt, Artificial Sequence
  Description of Artificial Sequence: Synthetic oligonucleotide
  Sense strand starting at position 3747 of SEQ ID NO: 1562679
gccugaguugugggcccaa

SEQ ID NO: 1764966 - RNA, 19 nt, Artificial Sequence
  Description of Artificial Sequence: Synthetic oligonucleotide
  Antisense strand to SEQ ID NO: 1764965
uugggcccacaacucaggc

SEQ ID NO: 1764967 - RNA, 19 nt, Artificial Sequence
  Description of Artificial Sequence: Synthetic oligonucleotide
  Sense strand starting at position 3774 of SEQ ID NO: 1562679
ccuuccuaucccuggaaga

SEQ ID NO: 1764968 - RNA, 19 nt, Artificial Sequence
  Description of Artificial Sequence: Synthetic oligonucleotide
  Antisense strand to SEQ ID NO: 1764967
ucuuccagggauaggaagg

SEQ ID NO: 1764969 - RNA, 19 nt, Artificial Sequence
  Description of Artificial Sequence: Synthetic oligonucleotide
  Sense strand starting at position 3775 of SEQ ID NO: 1562679
cuuccuaucccuggaagac

SEQ ID NO: 1764970 - RNA, 19 nt, Artificial Sequence
  Description of Artificial Sequence: Synthetic oligonucleotide
  Antisense strand to SEQ ID NO: 1764969
gucuuccagggauaggaag

SEQ ID NO: 1764971 - RNA, 19 nt, Artificial Sequence
  Description of Artificial Sequence: Synthetic oligonucleotide
  Sense strand starting at position 3811 of SEQ ID NO: 1562679
caaagagcuuugcagugaa

SEQ ID NO: 1764972 - RNA, 19 nt, Artificial Sequence
  Description of Artificial Sequence: Synthetic oligonucleotide
  Antisense strand to SEQ ID NO: 1764971
uucacugcaaagcucuuug

SEQ ID NO: 1764973 - RNA, 19 nt, Artificial Sequence
  Description of Artificial Sequence: Synthetic oligonucleotide
  Sense strand starting at position 3814 of SEQ ID NO: 1562679
agagcuuugcagugaagcu

SEQ ID NO: 1764974 - RNA, 19 nt, Artificial Sequence
  Description of Artificial Sequence: Synthetic oligonucleotide
  Antisense strand to SEQ ID NO: 1764973
agcuucacugcaaagcucu

SEQ ID NO: 1764975 - RNA, 19 nt, Artificial Sequence
  Description of Artificial Sequence: Synthetic oligonucleotide
  Sense strand starting at position 3944 of SEQ ID NO: 1562679
cgacuugguucacagugau

SEQ ID NO: 1764976 - RNA, 19 nt, Artificial Sequence
  Description of Artificial Sequence: Synthetic oligonucleotide
  Antisense strand to SEQ ID NO: 1764975
aucacugugaaccaagucg

SEQ ID NO: 1764977 - RNA, 19 nt, Artificial Sequence
  Description of Artificial Sequence: Synthetic oligonucleotide
  Sense strand starting at position 3957 of SEQ ID NO: 1562679
agugauuccucucagauuu

SEQ ID NO: 1764978 - RNA, 19 nt, Artificial Sequence
  Description of Artificial Sequence: Synthetic oligonucleotide
  Antisense strand to SEQ ID NO: 1764977
aaaucugagaggaaucacu

SEQ ID NO: 1764979 - RNA, 19 nt, Artificial Sequence
  Description of Artificial Sequence: Synthetic oligonucleotide
  Sense strand starting at position 54 of SEQ ID NO: 1562680
auaugcuuggccugucuca

SEQ ID NO: 1764980 - RNA, 19 nt, Artificial Sequence
  Description of Artificial Sequence: Synthetic oligonucleotide
  Antisense strand to SEQ ID NO: 1764979
ugagacaggccaagcauau

SEQ ID NO: 1764981 - RNA, 19 nt, Artificial Sequence
  Description of Artificial Sequence: Synthetic oligonucleotide
  Sense strand starting at position 154 of SEQ ID NO: 1562680
ccagcuucccgagugugua

SEQ ID NO: 1764982 - RNA, 19 nt, Artificial Sequence
  Description of Artificial Sequence: Synthetic oligonucleotide
  Antisense strand to SEQ ID NO: 1764981
uacacacucgggaagcugg

SEQ ID NO: 1764983 - RNA, 19 nt, Artificial Sequence
  Description of Artificial Sequence: Synthetic oligonucleotide
  Sense strand starting at position 372 of SEQ ID NO: 1562680
cacgccggguuauauaaau

SEQ ID NO: 1764984 - RNA, 19 nt, Artificial Sequence
  Description of Artificial Sequence: Synthetic oligonucleotide
  Antisense strand to SEQ ID NO: 1764983
auuuauauaacccggcgug

SEQ ID NO: 1764985 - RNA, 19 nt, Artificial Sequence
  Description of Artificial Sequence: Synthetic oligonucleotide
  Sense strand starting at position 402 of SEQ ID NO: 1562680
cugucugggugucuuacau

SEQ ID NO: 1764986 - RNA, 19 nt, Artificial Sequence
  Description of Artificial Sequence: Synthetic oligonucleotide
  Antisense strand to SEQ ID NO: 1764985
auguaagacacccagacag

SEQ ID NO: 1764987 - RNA, 19 nt, Artificial Sequence
  Description of Artificial Sequence: Synthetic oligonucleotide
  Sense strand starting at position 406 of SEQ ID NO: 1562680
cugggugucuuacauaaau

SEQ ID NO: 1764988 - RNA, 19 nt, Artificial Sequence
  Description of Artificial Sequence: Synthetic oligonucleotide
  Antisense strand to SEQ ID NO: 1764987
auuuauguaagacacccag

SEQ ID NO: 1764989 - RNA, 19 nt, Artificial Sequence
  Description of Artificial Sequence: Synthetic oligonucleotide
  Sense strand starting at position 849 of SEQ ID NO: 1562680
ccuugucccucggacgauu

SEQ ID NO: 1764990 - RNA, 19 nt, Artificial Sequence
  Description of Artificial Sequence: Synthetic oligonucleotide
  Antisense strand to SEQ ID NO: 1764989
aaucguccgagggacaagg

SEQ ID NO: 1764991 - RNA, 19 nt, Artificial Sequence
  Description of Artificial Sequence: Synthetic oligonucleotide
  Sense strand starting at position 852 of SEQ ID NO: 1562680
ugucccucggacgauuaaa

SEQ ID NO: 1764992 - RNA, 19 nt, Artificial Sequence
  Description of Artificial Sequence: Synthetic oligonucleotide
  Antisense strand to SEQ ID NO: 1764991
uuuaaucguccgagggaca

SEQ ID NO: 1764993 - RNA, 19 nt, Artificial Sequence
  Description of Artificial Sequence: Synthetic oligonucleotide
  Sense strand starting at position 922 of SEQ ID NO: 1562680
aggcauugcuuggaagcaa

SEQ ID NO: 1764994 - RNA, 19 nt, Artificial Sequence
  Description of Artificial Sequence: Synthetic oligonucleotide
  Antisense strand to SEQ ID NO: 1764993
uugcuuccaagcaaugccu

SEQ ID NO: 1764995 - RNA, 19 nt, Artificial Sequence
  Description of Artificial Sequence: Synthetic oligonucleotide
  Sense strand starting at position 992 of SEQ ID NO: 1562680
gaggcuaugccaggaagaa

SEQ ID NO: 1764996 - RNA, 19 nt, Artificial Sequence
  Description of Artificial Sequence: Synthetic oligonucleotide
  Antisense strand to SEQ ID NO: 1764995
uucuuccuggcauagccuc

SEQ ID NO: 1764997 - RNA, 19 nt, Artificial Sequence
  Description of Artificial Sequence: Synthetic oligonucleotide
  Sense strand starting at position 1054 of SEQ ID NO: 1562680
cccacuucgaguuagggua

SEQ ID NO: 1764998 - RNA, 19 nt, Artificial Sequence
  Description of Artificial Sequence: Synthetic oligonucleotide
  Antisense strand to SEQ ID NO: 1764997
uacccuaacucgaaguggg

SEQ ID NO: 1764999 - RNA, 19 nt, Artificial Sequence
  Description of Artificial Sequence: Synthetic oligonucleotide
  Sense strand starting at position 1062 of SEQ ID NO: 1562680
gaguuaggguauuaacaag

SEQ ID NO: 1765000 - RNA, 19 nt, Artificial Sequence
  Description of Artificial Sequence: Synthetic oligonucleotide
  Antisense strand to SEQ ID NO: 1764999
cuuguuaauacccuaacuc

SEQ ID NO: 1765001 - RNA, 19 nt, Artificial Sequence
  Description of Artificial Sequence: Synthetic oligonucleotide
  Sense strand starting at position 1073 of SEQ ID NO: 1562680
uuaacaagagcuugggaau

SEQ ID NO: 1765002 - RNA, 19 nt, Artificial Sequence
  Description of Artificial Sequence: Synthetic oligonucleotide
  Antisense strand to SEQ ID NO: 1765001
auucccaagcucuuguuaa

SEQ ID NO: 1765003 - RNA, 19 nt, Artificial Sequence
  Description of Artificial Sequence: Synthetic oligonucleotide
  Sense strand starting at position 1117 of SEQ ID NO: 1562680
uugcguuccuuagagacuu

SEQ ID NO: 1765004 - RNA, 19 nt, Artificial Sequence
  Description of Artificial Sequence: Synthetic oligonucleotide
  Antisense strand to SEQ ID NO: 1765003
aagucucuaaggaacgcaa

SEQ ID NO: 1765005 - RNA, 19 nt, Artificial Sequence
  Description of Artificial Sequence: Synthetic oligonucleotide
  Sense strand starting at position 1125 of SEQ ID NO: 1562680
cuuagagacuugcaagaca

SEQ ID NO: 1765006 - RNA, 19 nt, Artificial Sequence
  Description of Artificial Sequence: Synthetic oligonucleotide
  Antisense strand to SEQ ID NO: 1765005
ugucuugcaagucucuaag

SEQ ID NO: 1765007 - RNA, 19 nt, Artificial Sequence
  Description of Artificial Sequence: Synthetic oligonucleotide
  Sense strand starting at position 1167 of SEQ ID NO: 1562680
agaauccgauccgacaaau

SEQ ID NO: 1765008 - RNA, 19 nt, Artificial Sequence
  Description of Artificial Sequence: Synthetic oligonucleotide
  Antisense strand to SEQ ID NO: 1765007
auuugucggaucggauucu

SEQ ID NO: 1765009 - RNA, 19 nt, Artificial Sequence
  Description of Artificial Sequence: Synthetic oligonucleotide
  Sense strand starting at position 1347 of SEQ ID NO: 1562680
gccggugauuguccgauga

SEQ ID NO: 1765010 - RNA, 19 nt, Artificial Sequence
  Description of Artificial Sequence: Synthetic oligonucleotide
  Antisense strand to SEQ ID NO: 1765009
ucaucggacaaucaccggc

SEQ ID NO: 1765011 - RNA, 19 nt, Artificial Sequence
  Description of Artificial Sequence: Synthetic oligonucleotide
  Sense strand starting at position 1349 of SEQ ID NO: 1562680
cggugauuguccgaugaaa

SEQ ID NO: 1765012 - RNA, 19 nt, Artificial Sequence
  Description of Artificial Sequence: Synthetic oligonucleotide
  Antisense strand to SEQ ID NO: 1765011
uuucaucggacaaucaccg

SEQ ID NO: 1765013 - RNA, 19 nt, Artificial Sequence
  Description of Artificial Sequence: Synthetic oligonucleotide
  Sense strand starting at position 1351 of SEQ ID NO: 1562680
gugauuguccgaugaaacg

SEQ ID NO: 1765014 - RNA, 19 nt, Artificial Sequence
  Description of Artificial Sequence: Synthetic oligonucleotide
  Antisense strand to SEQ ID NO: 1765013
cguuucaucggacaaucac

SEQ ID NO: 1765015 - RNA, 19 nt, Artificial Sequence
  Description of Artificial Sequence: Synthetic oligonucleotide
  Sense strand starting at position 1819 of SEQ ID NO: 1562680
gggcggaugccggaggauu

SEQ ID NO: 1765016 - RNA, 19 nt, Artificial Sequence
  Description of Artificial Sequence: Synthetic oligonucleotide
  Antisense strand to SEQ ID NO: 1765015
aauccuccggcauccgccc

SEQ ID NO: 1765017 - RNA, 19 nt, Artificial Sequence
  Description of Artificial Sequence: Synthetic oligonucleotide
  Sense strand starting at position 2561 of SEQ ID NO: 1562680
guagccugggcucauacau

SEQ ID NO: 1765018 - RNA, 19 nt, Artificial Sequence
  Description of Artificial Sequence: Synthetic oligonucleotide
  Antisense strand to SEQ ID NO: 1765017
auguaugagcccaggcuac

SEQ ID NO: 1765019 - RNA, 19 nt, Artificial Sequence
  Description of Artificial Sequence: Synthetic oligonucleotide
  Sense strand starting at position 2780 of SEQ ID NO: 1562680
gagcuuggguuuccuuaaa

SEQ ID NO: 1765020 - RNA, 19 nt, Artificial Sequence
  Description of Artificial Sequence: Synthetic oligonucleotide
  Antisense strand to SEQ ID NO: 1765019
uuuaaggaaacccaagcuc

SEQ ID NO: 1765021 - RNA, 19 nt, Artificial Sequence
  Description of Artificial Sequence: Synthetic oligonucleotide
  Sense strand starting at position 2875 of SEQ ID NO: 1562680
gaugaaagguugcagaaca

SEQ ID NO: 1765022 - RNA, 19 nt, Artificial Sequence
  Description of Artificial Sequence: Synthetic oligonucleotide
  Antisense strand to SEQ ID NO: 1765021
uguucugcaaccuuucauc

SEQ ID NO: 1765023 - RNA, 19 nt, Artificial Sequence
  Description of Artificial Sequence: Synthetic oligonucleotide
  Sense strand starting at position 3019 of SEQ ID NO: 1562680
cacaguuccugggaggagu

SEQ ID NO: 1765024 - RNA, 19 nt, Artificial Sequence
  Description of Artificial Sequence: Synthetic oligonucleotide
  Antisense strand to SEQ ID NO: 1765023
acuccucccaggaacugug

SEQ ID NO: 1765025 - RNA, 19 nt, Artificial Sequence
  Description of Artificial Sequence: Synthetic oligonucleotide
  Sense strand starting at position 3032 of SEQ ID NO: 1562680
aggagucacuucuauaaua

SEQ ID NO: 1765026 - RNA, 19 nt, Artificial Sequence
  Description of Artificial Sequence: Synthetic oligonucleotide
  Antisense strand to SEQ ID NO: 1765025
uauuauagaagugacuccu

SEQ ID NO: 1765027 - RNA, 19 nt, Artificial Sequence
  Description of Artificial Sequence: Synthetic oligonucleotide
  Sense strand starting at position 3043 of SEQ ID NO: 1562680
cuauaauagccguaucuuc

SEQ ID NO: 1765028 - RNA, 19 nt, Artificial Sequence
  Description of Artificial Sequence: Synthetic oligonucleotide
  Antisense strand to SEQ ID NO: 1765027
gaagauacggcuauuauag

SEQ ID NO: 1765029 - RNA, 19 nt, Artificial Sequence
  Description of Artificial Sequence: Synthetic oligonucleotide
  Sense strand starting at position 3212 of SEQ ID NO: 1562680
cagcgaucaccaggaaacu

SEQ ID NO: 1765030 - RNA, 19 nt, Artificial Sequence
  Description of Artificial Sequence: Synthetic oligonucleotide
  Antisense strand to SEQ ID NO: 1765029
aguuuccuggugaucgcug

SEQ ID NO: 1765031 - RNA, 19 nt, Artificial Sequence
  Description of Artificial Sequence: Synthetic oligonucleotide
  Sense strand starting at position 3298 of SEQ ID NO: 1562680
cagugacaccuuugccaga

SEQ ID NO: 1765032 - RNA, 19 nt, Artificial Sequence
  Description of Artificial Sequence: Synthetic oligonucleotide
  Antisense strand to SEQ ID NO: 1765031
ucuggcaaaggugucacug

SEQ ID NO: 1765033 - RNA, 19 nt, Artificial Sequence
  Description of Artificial Sequence: Synthetic oligonucleotide
  Sense strand starting at position 3867 of SEQ ID NO: 1562680
uguuucuuuccucacauga

SEQ ID NO: 1765034 - RNA, 19 nt, Artificial Sequence
  Description of Artificial Sequence: Synthetic oligonucleotide
  Antisense strand to SEQ ID NO: 1765033
ucaugugaggaaagaaaca

SEQ ID NO: 1765035 - RNA, 19 nt, Artificial Sequence
  Description of Artificial Sequence: Synthetic oligonucleotide
  Sense strand starting at position 31 of SEQ ID NO: 1562681
gcaagacauugucuccauu

SEQ ID NO: 1765036 - RNA, 19 nt, Artificial Sequence
  Description of Artificial Sequence: Synthetic oligonucleotide
  Antisense strand to SEQ ID NO: 1765035
aauggagacaaugucuugc

SEQ ID NO: 1765037 - RNA, 19 nt, Artificial Sequence
  Description of Artificial Sequence: Synthetic oligonucleotide
  Sense strand starting at position 436 of SEQ ID NO: 1562681
cacuacugucugggugaga

SEQ ID NO: 1765038 - RNA, 19 nt, Artificial Sequence
  Description of Artificial Sequence: Synthetic oligonucleotide
  Antisense strand to SEQ ID NO: 1765037
ucucacccagacaguagug

SEQ ID NO: 1765039 - RNA, 19 nt, Artificial Sequence
  Description of Artificial Sequence: Synthetic oligonucleotide
  Sense strand starting at position 449 of SEQ ID NO: 1562681
gugagagacucuucucaaa

SEQ ID NO: 1765040 - RNA, 19 nt, Artificial Sequence
  Description of Artificial Sequence: Synthetic oligonucleotide
  Antisense strand to SEQ ID NO: 1765039
uuugagaagagucucucac

SEQ ID NO: 1765041 - RNA, 19 nt, Artificial Sequence
  Description of Artificial Sequence: Synthetic oligonucleotide
  Sense strand starting at position 727 of SEQ ID NO: 1562681
gucugaacaucccgaaguu

SEQ ID NO: 1765042 - RNA, 19 nt, Artificial Sequence
  Description of Artificial Sequence: Synthetic oligonucleotide
  Antisense strand to SEQ ID NO: 1765041
aacuucgggauguucagac

SEQ ID NO: 1765043 - RNA, 19 nt, Artificial Sequence
  Description of Artificial Sequence: Synthetic oligonucleotide
  Sense strand starting at position 911 of SEQ ID NO: 1562681
gcugauuccuccugugcca

SEQ ID NO: 1765044 - RNA, 19 nt, Artificial Sequence
  Description of Artificial Sequence: Synthetic oligonucleotide
  Antisense strand to SEQ ID NO: 1765043
uggcacaggaggaaucagc

SEQ ID NO: 1765045 - RNA, 19 nt, Artificial Sequence
  Description of Artificial Sequence: Synthetic oligonucleotide
  Sense strand starting at position 1173 of SEQ ID NO: 1562681
ggccaagacuaguuugcau

SEQ ID NO: 1765046 - RNA, 19 nt, Artificial Sequence
  Description of Artificial Sequence: Synthetic oligonucleotide
  Antisense strand to SEQ ID NO: 1765045
augcaaacuagucuuggcc

SEQ ID NO: 1765047 - RNA, 19 nt, Artificial Sequence
  Description of Artificial Sequence: Synthetic oligonucleotide
  Sense strand starting at position 1323 of SEQ ID NO: 1562681
gugucauccggguucuguu

SEQ ID NO: 1765048 - RNA, 19 nt, Artificial Sequence
  Description of Artificial Sequence: Synthetic oligonucleotide
  Antisense strand to SEQ ID NO: 1765047
aacagaacccggaugacac

SEQ ID NO: 1765049 - RNA, 19 nt, Artificial Sequence
  Description of Artificial Sequence: Synthetic oligonucleotide
  Sense strand starting at position 1335 of SEQ ID NO: 1562681
uucuguuccuuguugcuaa

SEQ ID NO: 1765050 - RNA, 19 nt, Artificial Sequence
  Description of Artificial Sequence: Synthetic oligonucleotide
  Antisense strand to SEQ ID NO: 1765049
uuagcaacaaggaacagaa

SEQ ID NO: 1765051 - RNA, 19 nt, Artificial Sequence
  Description of Artificial Sequence: Synthetic oligonucleotide
  Sense strand starting at position 1336 of SEQ ID NO: 1562681
ucuguuccuuguugcuaaa

SEQ ID NO: 1765052 - RNA, 19 nt, Artificial Sequence
  Description of Artificial Sequence: Synthetic oligonucleotide
  Antisense strand to SEQ ID NO: 1765051
uuuagcaacaaggaacaga

SEQ ID NO: 1765053 - RNA, 19 nt, Artificial Sequence
  Description of Artificial Sequence: Synthetic oligonucleotide
  Sense strand starting at position 1339 of SEQ ID NO: 1562681
guuccuuguugcuaaacgu

SEQ ID NO: 1765054 - RNA, 19 nt, Artificial Sequence
  Description of Artificial Sequence: Synthetic oligonucleotide
  Antisense strand to SEQ ID NO: 1765053
acguuuagcaacaaggaac

SEQ ID NO: 1765055 - RNA, 19 nt, Artificial Sequence
  Description of Artificial Sequence: Synthetic oligonucleotide
  Sense strand starting at position 2176 of SEQ ID NO: 1562681
ccucguucgccgccauaaa

SEQ ID NO: 1765056 - RNA, 19 nt, Artificial Sequence
  Description of Artificial Sequence: Synthetic oligonucleotide
  Antisense strand to SEQ ID NO: 1765055
uuuauggcggcgaacgagg

SEQ ID NO: 1765057 - RNA, 19 nt, Artificial Sequence
  Description of Artificial Sequence: Synthetic oligonucleotide
  Sense strand starting at position 2213 of SEQ ID NO: 1562681
cccggaugggagcgagaau

SEQ ID NO: 1765058 - RNA, 19 nt, Artificial Sequence
  Description of Artificial Sequence: Synthetic oligonucleotide
  Antisense strand to SEQ ID NO: 1765057
auucucgcucccauccggg

SEQ ID NO: 1765059 - RNA, 19 nt, Artificial Sequence
  Description of Artificial Sequence: Synthetic oligonucleotide
  Sense strand starting at position 2214 of SEQ ID NO: 1562681
ccggaugggagcgagaaua

SEQ ID NO: 1765060 - RNA, 19 nt, Artificial Sequence
  Description of Artificial Sequence: Synthetic oligonucleotide
  Antisense strand to SEQ ID NO: 1765059
uauucucgcucccauccgg

SEQ ID NO: 1765061 - RNA, 19 nt, Artificial Sequence
  Description of Artificial Sequence: Synthetic oligonucleotide
  Sense strand starting at position 2333 of SEQ ID NO: 1562681
ggccuuugaauuuguaguu

SEQ ID NO: 1765062 - RNA, 19 nt, Artificial Sequence
  Description of Artificial Sequence: Synthetic oligonucleotide
  Antisense strand to SEQ ID NO: 1765061
aacuacaaauucaaaggcc

SEQ ID NO: 1765063 - RNA, 19 nt, Artificial Sequence
  Description of Artificial Sequence: Synthetic oligonucleotide
  Sense strand starting at position 2388 of SEQ ID NO: 1562681
guuaaaugcugcggucuca

SEQ ID NO: 1765064 - RNA, 19 nt, Artificial Sequence
  Description of Artificial Sequence: Synthetic oligonucleotide
  Antisense strand to SEQ ID NO: 1765063
ugagaccgcagcauuuaac

SEQ ID NO: 1765065 - RNA, 19 nt, Artificial Sequence
  Description of Artificial Sequence: Synthetic oligonucleotide
  Sense strand starting at position 2463 of SEQ ID NO: 1562681
cccacuguggagugaucuu

SEQ ID NO: 1765066 - RNA, 19 nt, Artificial Sequence
  Description of Artificial Sequence: Synthetic oligonucleotide
  Antisense strand to SEQ ID NO: 1765065
aagaucacuccacaguggg

SEQ ID NO: 1765067 - RNA, 19 nt, Artificial Sequence
  Description of Artificial Sequence: Synthetic oligonucleotide
  Sense strand starting at position 2470 of SEQ ID NO: 1562681
uggagugaucuuuguccca

SEQ ID NO: 1765068 - RNA, 19 nt, Artificial Sequence
  Description of Artificial Sequence: Synthetic oligonucleotide
  Antisense strand to SEQ ID NO: 1765067
ugggacaaagaucacucca

SEQ ID NO: 1765069 - RNA, 19 nt, Artificial Sequence
  Description of Artificial Sequence: Synthetic oligonucleotide
  Sense strand starting at position 2472 of SEQ ID NO: 1562681
gagugaucuuugucccacu

SEQ ID NO: 1765070 - RNA, 19 nt, Artificial Sequence
  Description of Artificial Sequence: Synthetic oligonucleotide
  Antisense strand to SEQ ID NO: 1765069
agugggacaaagaucacuc

SEQ ID NO: 1765071 - RNA, 19 nt, Artificial Sequence
  Description of Artificial Sequence: Synthetic oligonucleotide
  Sense strand starting at position 2473 of SEQ ID NO: 1562681
agugaucuuugucccacuu

SEQ ID NO: 1765072 - RNA, 19 nt, Artificial Sequence
  Description of Artificial Sequence: Synthetic oligonucleotide
  Antisense strand to SEQ ID NO: 1765071
aagugggacaaagaucacu

SEQ ID NO: 1765073 - RNA, 19 nt, Artificial Sequence
  Description of Artificial Sequence: Synthetic oligonucleotide
  Sense strand starting at position 2563 of SEQ ID NO: 1562681
ggcccuaucugguuugaag

SEQ ID NO: 1765074 - RNA, 19 nt, Artificial Sequence
  Description of Artificial Sequence: Synthetic oligonucleotide
  Antisense strand to SEQ ID NO: 1765073
cuucaaaccagauagggcc

SEQ ID NO: 1765075 - RNA, 19 nt, Artificial Sequence
  Description of Artificial Sequence: Synthetic oligonucleotide
  Sense strand starting at position 3611 of SEQ ID NO: 1562681
gccuuagcgucauucucuu

SEQ ID NO: 1765076 - RNA, 19 nt, Artificial Sequence
  Description of Artificial Sequence: Synthetic oligonucleotide
  Antisense strand to SEQ ID NO: 1765075
aagagaaugacgcuaaggc

SEQ ID NO: 1765077 - RNA, 19 nt, Artificial Sequence
  Description of Artificial Sequence: Synthetic oligonucleotide
  Sense strand starting at position 3647 of SEQ ID NO: 1562681
gggucuuggacccagaugu

SEQ ID NO: 1765078 - RNA, 19 nt, Artificial Sequence
  Description of Artificial Sequence: Synthetic oligonucleotide
  Antisense strand to SEQ ID NO: 1765077
acaucuggguccaagaccc

SEQ ID NO: 1765079 - RNA, 19 nt, Artificial Sequence
  Description of Artificial Sequence: Synthetic oligonucleotide
  Sense strand starting at position 3930 of SEQ ID NO: 1562681
gagugacucacuggguuua

SEQ ID NO: 1765080 - RNA, 19 nt, Artificial Sequence
  Description of Artificial Sequence: Synthetic oligonucleotide
  Antisense strand to SEQ ID NO: 1765079
uaaacccagugagucacuc

SEQ ID NO: 1765081 - RNA, 19 nt, Artificial Sequence
  Description of Artificial Sequence: Synthetic oligonucleotide
  Sense strand starting at position 3932 of SEQ ID NO: 1562681
gugacucacuggguuuauu

SEQ ID NO: 1765082 - RNA, 19 nt, Artificial Sequence
  Description of Artificial Sequence: Synthetic oligonucleotide
  Antisense strand to SEQ ID NO: 1765081
aauaaacccagugagucac

SEQ ID NO: 1765083 - RNA, 19 nt, Artificial Sequence
  Description of Artificial Sequence: Synthetic oligonucleotide
  Sense strand starting at position 11 of SEQ ID NO: 1562682
gguggagccugguuucuga

SEQ ID NO: 1765084 - RNA, 19 nt, Artificial Sequence
  Description of Artificial Sequence: Synthetic oligonucleotide
  Antisense strand to SEQ ID NO: 1765083
ucagaaaccaggcuccacc

SEQ ID NO: 1765085 - RNA, 19 nt, Artificial Sequence
  Description of Artificial Sequence: Synthetic oligonucleotide
  Sense strand starting at position 113 of SEQ ID NO: 1562682
aagacacccgcguauuagu

SEQ ID NO: 1765086 - RNA, 19 nt, Artificial Sequence
  Description of Artificial Sequence: Synthetic oligonucleotide
  Antisense strand to SEQ ID NO: 1765085
acuaauacgcgggugucuu

SEQ ID NO: 1765087 - RNA, 19 nt, Artificial Sequence
  Description of Artificial Sequence: Synthetic oligonucleotide
  Sense strand starting at position 122 of SEQ ID NO: 1562682
gcguauuaguggcuccgau

SEQ ID NO: 1765088 - RNA, 19 nt, Artificial Sequence
  Description of Artificial Sequence: Synthetic oligonucleotide
  Antisense strand to SEQ ID NO: 1765087
aucggagccacuaauacgc

SEQ ID NO: 1765089 - RNA, 19 nt, Artificial Sequence
  Description of Artificial Sequence: Synthetic oligonucleotide
  Sense strand starting at position 185 of SEQ ID NO: 1562682
cccacaagucuccagaagu

SEQ ID NO: 1765090 - RNA, 19 nt, Artificial Sequence
  Description of Artificial Sequence: Synthetic oligonucleotide
  Antisense strand to SEQ ID NO: 1765089
acuucuggagacuuguggg

SEQ ID NO: 1765091 - RNA, 19 nt, Artificial Sequence
  Description of Artificial Sequence: Synthetic oligonucleotide
  Sense strand starting at position 223 of SEQ ID NO: 1562682
ggaucugugucugucguca

SEQ ID NO: 1765092 - RNA, 19 nt, Artificial Sequence
  Description of Artificial Sequence: Synthetic oligonucleotide
  Antisense strand to SEQ ID NO: 1765091
ugacgacagacacagaucc

SEQ ID NO: 1765093 - RNA, 19 nt, Artificial Sequence
  Description of Artificial Sequence: Synthetic oligonucleotide
  Sense strand starting at position 404 of SEQ ID NO: 1562682
gccuguccuguuugucaga

SEQ ID NO: 1765094 - RNA, 19 nt, Artificial Sequence
  Description of Artificial Sequence: Synthetic oligonucleotide
  Antisense strand to SEQ ID NO: 1765093
ucugacaaacaggacaggc

SEQ ID NO: 1765095 - RNA, 19 nt, Artificial Sequence
  Description of Artificial Sequence: Synthetic oligonucleotide
  Sense strand starting at position 405 of SEQ ID NO: 1562682
ccuguccuguuugucagaa

SEQ ID NO: 1765096 - RNA, 19 nt, Artificial Sequence
  Description of Artificial Sequence: Synthetic oligonucleotide
  Antisense strand to SEQ ID NO: 1765095
uucugacaaacaggacagg

SEQ ID NO: 1765097 - RNA, 19 nt, Artificial Sequence
  Description of Artificial Sequence: Synthetic oligonucleotide
  Sense strand starting at position 426 of SEQ ID NO: 1562682
gcccgcuuguccuccaaga

SEQ ID NO: 1765098 - RNA, 19 nt, Artificial Sequence
  Description of Artificial Sequence: Synthetic oligonucleotide
  Antisense strand to SEQ ID NO: 1765097
ucuuggaggacaagcgggc

SEQ ID NO: 1765099 - RNA, 19 nt, Artificial Sequence
  Description of Artificial Sequence: Synthetic oligonucleotide
  Sense strand starting at position 850 of SEQ ID NO: 1562682
ucagucguuuaguccacaa

SEQ ID NO: 1765100 - RNA, 19 nt, Artificial Sequence
  Description of Artificial Sequence: Synthetic oligonucleotide
  Antisense strand to SEQ ID NO: 1765099
uuguggacuaaacgacuga

SEQ ID NO: 1765101 - RNA, 19 nt, Artificial Sequence
  Description of Artificial Sequence: Synthetic oligonucleotide
  Sense strand starting at position 852 of SEQ ID NO: 1562682
agucguuuaguccacaaac

SEQ ID NO: 1765102 - RNA, 19 nt, Artificial Sequence
  Description of Artificial Sequence: Synthetic oligonucleotide
  Antisense strand to SEQ ID NO: 1765101
guuuguggacuaaacgacu

SEQ ID NO: 1765103 - RNA, 19 nt, Artificial Sequence
  Description of Artificial Sequence: Synthetic oligonucleotide
  Sense strand starting at position 1637 of SEQ ID NO: 1562682
gggugacuugcuuaccugu

SEQ ID NO: 1765104 - RNA, 19 nt, Artificial Sequence
  Description of Artificial Sequence: Synthetic oligonucleotide
  Antisense strand to SEQ ID NO: 1765103
acagguaagcaagucaccc

SEQ ID NO: 1765105 - RNA, 19 nt, Artificial Sequence
  Description of Artificial Sequence: Synthetic oligonucleotide
  Sense strand starting at position 1713 of SEQ ID NO: 1562682
cuguucuaaccgggaggaa

SEQ ID NO: 1765106 - RNA, 19 nt, Artificial Sequence
  Description of Artificial Sequence: Synthetic oligonucleotide
  Antisense strand to SEQ ID NO: 1765105
uuccucccgguuagaacag

SEQ ID NO: 1765107 - RNA, 19 nt, Artificial Sequence
  Description of Artificial Sequence: Synthetic oligonucleotide
  Sense strand starting at position 2033 of SEQ ID NO: 1562682
cccacaaaguguugggaga

SEQ ID NO: 1765108 - RNA, 19 nt, Artificial Sequence
  Description of Artificial Sequence: Synthetic oligonucleotide
  Antisense strand to SEQ ID NO: 1765107
ucucccaacacuuuguggg

SEQ ID NO: 1765109 - RNA, 19 nt, Artificial Sequence
  Description of Artificial Sequence: Synthetic oligonucleotide
  Sense strand starting at position 2063 of SEQ ID NO: 1562682
gggccugcaugucuuagau

SEQ ID NO: 1765110 - RNA, 19 nt, Artificial Sequence
  Description of Artificial Sequence: Synthetic oligonucleotide
  Antisense strand to SEQ ID NO: 1765109
aucuaagacaugcaggccc

SEQ ID NO: 1765111 - RNA, 19 nt, Artificial Sequence
  Description of Artificial Sequence: Synthetic oligonucleotide
  Sense strand starting at position 2065 of SEQ ID NO: 1562682
gccugcaugucuuagauaa

SEQ ID NO: 1765112 - RNA, 19 nt, Artificial Sequence
  Description of Artificial Sequence: Synthetic oligonucleotide
  Antisense strand to SEQ ID NO: 1765111
uuaucuaagacaugcaggc

SEQ ID NO: 1765113 - RNA, 19 nt, Artificial Sequence
  Description of Artificial Sequence: Synthetic oligonucleotide
  Sense strand starting at position 2067 of SEQ ID NO: 1562682
cugcaugucuuagauaaga

SEQ ID NO: 1765114 - RNA, 19 nt, Artificial Sequence
  Description of Artificial Sequence: Synthetic oligonucleotide
  Antisense strand to SEQ ID NO: 1765113
ucuuaucuaagacaugcag

SEQ ID NO: 1765115 - RNA, 19 nt, Artificial Sequence
  Description of Artificial Sequence: Synthetic oligonucleotide
  Sense strand starting at position 2156 of SEQ ID NO: 1562682
ucagaaugugcuggagaca

SEQ ID NO: 1765116 - RNA, 19 nt, Artificial Sequence
  Description of Artificial Sequence: Synthetic oligonucleotide
  Antisense strand to SEQ ID NO: 1765115
ugucuccagcacauucuga

SEQ ID NO: 1765117 - RNA, 19 nt, Artificial Sequence
  Description of Artificial Sequence: Synthetic oligonucleotide
  Sense strand starting at position 2167 of SEQ ID NO: 1562682
uggagacauucugggccaa

SEQ ID NO: 1765118 - RNA, 19 nt, Artificial Sequence
  Description of Artificial Sequence: Synthetic oligonucleotide
  Antisense strand to SEQ ID NO: 1765117
uuggcccagaaugucucca

SEQ ID NO: 1765119 - RNA, 19 nt, Artificial Sequence
  Description of Artificial Sequence: Synthetic oligonucleotide
  Sense strand starting at position 2325 of SEQ ID NO: 1562682
acagaaauauauggaauga

SEQ ID NO: 1765120 - RNA, 19 nt, Artificial Sequence
  Description of Artificial Sequence: Synthetic oligonucleotide
  Antisense strand to SEQ ID NO: 1765119
ucauuccauauauuucugu

SEQ ID NO: 1765121 - RNA, 19 nt, Artificial Sequence
  Description of Artificial Sequence: Synthetic oligonucleotide
  Sense strand starting at position 2353 of SEQ ID NO: 1562682
cggcguucacaccuguaau

SEQ ID NO: 1765122 - RNA, 19 nt, Artificial Sequence
  Description of Artificial Sequence: Synthetic oligonucleotide
  Antisense strand to SEQ ID NO: 1765121
auuacaggugugaacgccg

SEQ ID NO: 1765123 - RNA, 19 nt, Artificial Sequence
  Description of Artificial Sequence: Synthetic oligonucleotide
  Sense strand starting at position 2441 of SEQ ID NO: 1562682
gcaagacauugucuccauu

SEQ ID NO: 1765124 - RNA, 19 nt, Artificial Sequence
  Description of Artificial Sequence: Synthetic oligonucleotide
  Antisense strand to SEQ ID NO: 1765123
aauggagacaaugucuugc

SEQ ID NO: 1765125 - RNA, 19 nt, Artificial Sequence
  Description of Artificial Sequence: Synthetic oligonucleotide
  Sense strand starting at position 2846 of SEQ ID NO: 1562682
cacuacugucugggugaga

SEQ ID NO: 1765126 - RNA, 19 nt, Artificial Sequence
  Description of Artificial Sequence: Synthetic oligonucleotide
  Antisense strand to SEQ ID NO: 1765125
ucucacccagacaguagug

SEQ ID NO: 1765127 - RNA, 19 nt, Artificial Sequence
  Description of Artificial Sequence: Synthetic oligonucleotide
  Sense strand starting at position 2859 of SEQ ID NO: 1562682
gugagagacucuucucaaa

SEQ ID NO: 1765128 - RNA, 19 nt, Artificial Sequence
  Description of Artificial Sequence: Synthetic oligonucleotide
  Antisense strand to SEQ ID NO: 1765127
uuugagaagagucucucac

SEQ ID NO: 1765129 - RNA, 19 nt, Artificial Sequence
  Description of Artificial Sequence: Synthetic oligonucleotide
  Sense strand starting at position 3137 of SEQ ID NO: 1562682
gucugaacaucccgaaguu

SEQ ID NO: 1765130 - RNA, 19 nt, Artificial Sequence
  Description of Artificial Sequence: Synthetic oligonucleotide
  Antisense strand to SEQ ID NO: 1765129
aacuucgggauguucagac

SEQ ID NO: 1765131 - RNA, 19 nt, Artificial Sequence
  Description of Artificial Sequence: Synthetic oligonucleotide
  Sense strand starting at position 3321 of SEQ ID NO: 1562682
gcugauuccuccugugcca

SEQ ID NO: 1765132 - RNA, 19 nt, Artificial Sequence
  Description of Artificial Sequence: Synthetic oligonucleotide
  Antisense strand to SEQ ID NO: 1765131
uggcacaggaggaaucagc

SEQ ID NO: 1765133 - RNA, 19 nt, Artificial Sequence
  Description of Artificial Sequence: Synthetic oligonucleotide
  Sense strand starting at position 3583 of SEQ ID NO: 1562682
ggccaagacuaguuugcau

SEQ ID NO: 1765134 - RNA, 19 nt, Artificial Sequence
  Description of Artificial Sequence: Synthetic oligonucleotide
  Antisense strand to SEQ ID NO: 1765133
augcaaacuagucuuggcc

SEQ ID NO: 1765135 - RNA, 19 nt, Artificial Sequence
  Description of Artificial Sequence: Synthetic oligonucleotide
  Sense strand starting at position 3733 of SEQ ID NO: 1562682
gugucauccggguucuguu

SEQ ID NO: 1765136 - RNA, 19 nt, Artificial Sequence
  Description of Artificial Sequence: Synthetic oligonucleotide
  Antisense strand to SEQ ID NO: 1765135
aacagaacccggaugacac

SEQ ID NO: 1765137 - RNA, 19 nt, Artificial Sequence
  Description of Artificial Sequence: Synthetic oligonucleotide
  Sense strand starting at position 3745 of SEQ ID NO: 1562682
uucuguuccuuguugcuaa

SEQ ID NO: 1765138 - RNA, 19 nt, Artificial Sequence
  Description of Artificial Sequence: Synthetic oligonucleotide
  Antisense strand to SEQ ID NO: 1765137
uuagcaacaaggaacagaa

SEQ ID NO: 1765139 - RNA, 19 nt, Artificial Sequence
  Description of Artificial Sequence: Synthetic oligonucleotide
  Sense strand starting at position 3746 of SEQ ID NO: 1562682
ucuguuccuuguugcuaaa

SEQ ID NO: 1765140 - RNA, 19 nt, Artificial Sequence
  Description of Artificial Sequence: Synthetic oligonucleotide
  Antisense strand to SEQ ID NO: 1765139
uuuagcaacaaggaacaga

SEQ ID NO: 1765141 - RNA, 19 nt, Artificial Sequence
  Description of Artificial Sequence: Synthetic oligonucleotide
  Sense strand starting at position 3749 of SEQ ID NO: 1562682
guuccuuguugcuaaacgu

SEQ ID NO: 1765142 - RNA, 19 nt, Artificial Sequence
  Description of Artificial Sequence: Synthetic oligonucleotide
  Antisense strand to SEQ ID NO: 1765141
acguuuagcaacaaggaac

SEQ ID NO: 1765143 - RNA, 19 nt, Artificial Sequence
  Description of Artificial Sequence: Synthetic oligonucleotide
  Sense strand starting at position 135 of SEQ ID NO: 1562683
gugugaagcccauacuggu

SEQ ID NO: 1765144 - RNA, 19 nt, Artificial Sequence
  Description of Artificial Sequence: Synthetic oligonucleotide
  Antisense strand to SEQ ID NO: 1765143
accaguaugggcuucacac

SEQ ID NO: 1765145 - RNA, 19 nt, Artificial Sequence
  Description of Artificial Sequence: Synthetic oligonucleotide
  Sense strand starting at position 244 of SEQ ID NO: 1562683
auauaccucccugauugua

SEQ ID NO: 1765146 - RNA, 19 nt, Artificial Sequence
  Description of Artificial Sequence: Synthetic oligonucleotide
  Antisense strand to SEQ ID NO: 1765145
uacaaucagggagguauau

SEQ ID NO: 1765147 - RNA, 19 nt, Artificial Sequence
  Description of Artificial Sequence: Synthetic oligonucleotide
  Sense strand starting at position 256 of SEQ ID NO: 1562683
gauuguaguucucccagca

SEQ ID NO: 1765148 - RNA, 19 nt, Artificial Sequence
  Description of Artificial Sequence: Synthetic oligonucleotide
  Antisense strand to SEQ ID NO: 1765147
ugcugggagaacuacaauc

SEQ ID NO: 1765149 - RNA, 19 nt, Artificial Sequence
  Description of Artificial Sequence: Synthetic oligonucleotide
  Sense strand starting at position 272 of SEQ ID NO: 1562683
gcaaaugugcauguguguu

SEQ ID NO: 1765150 - RNA, 19 nt, Artificial Sequence
  Description of Artificial Sequence: Synthetic oligonucleotide
  Antisense strand to SEQ ID NO: 1765149
aacacacaugcacauuugc

SEQ ID NO: 1765151 - RNA, 19 nt, Artificial Sequence
  Description of Artificial Sequence: Synthetic oligonucleotide
  Sense strand starting at position 278 of SEQ ID NO: 1562683
gugcauguguguucucuua

SEQ ID NO: 1765152 - RNA, 19 nt, Artificial Sequence
  Description of Artificial Sequence: Synthetic oligonucleotide
  Antisense strand to SEQ ID NO: 1765151
uaagagaacacacaugcac

SEQ ID NO: 1765153 - RNA, 19 nt, Artificial Sequence
  Description of Artificial Sequence: Synthetic oligonucleotide
  Sense strand starting at position 280 of SEQ ID NO: 1562683
gcauguguguucucuuauc

SEQ ID NO: 1765154 - RNA, 19 nt, Artificial Sequence
  Description of Artificial Sequence: Synthetic oligonucleotide
  Antisense strand to SEQ ID NO: 1765153
gauaagagaacacacaugc

SEQ ID NO: 1765155 - RNA, 19 nt, Artificial Sequence
  Description of Artificial Sequence: Synthetic oligonucleotide
  Sense strand starting at position 285 of SEQ ID NO: 1562683
uguguucucuuaucauuac

SEQ ID NO: 1765156 - RNA, 19 nt, Artificial Sequence
  Description of Artificial Sequence: Synthetic oligonucleotide
  Antisense strand to SEQ ID NO: 1765155
guaaugauaagagaacaca

SEQ ID NO: 1765157 - RNA, 19 nt, Artificial Sequence
  Description of Artificial Sequence: Synthetic oligonucleotide
  Sense strand starting at position 344 of SEQ ID NO: 1562683
gaaacaaguuccuugcaug

SEQ ID NO: 1765158 - RNA, 19 nt, Artificial Sequence
  Description of Artificial Sequence: Synthetic oligonucleotide
  Antisense strand to SEQ ID NO: 1765157
caugcaaggaacuuguuuc

SEQ ID NO: 1765159 - RNA, 19 nt, Artificial Sequence
  Description of Artificial Sequence: Synthetic oligonucleotide
  Sense strand starting at position 416 of SEQ ID NO: 1562683
guauauccugcagaacaca

SEQ ID NO: 1765160 - RNA, 19 nt, Artificial Sequence
  Description of Artificial Sequence: Synthetic oligonucleotide
  Antisense strand to SEQ ID NO: 1765159
uguguucugcaggauauac

SEQ ID NO: 1765161 - RNA, 19 nt, Artificial Sequence
  Description of Artificial Sequence: Synthetic oligonucleotide
  Sense strand starting at position 465 of SEQ ID NO: 1562683
guaagaugcuccuaaccuc

SEQ ID NO: 1765162 - RNA, 19 nt, Artificial Sequence
  Description of Artificial Sequence: Synthetic oligonucleotide
  Antisense strand to SEQ ID NO: 1765161
gagguuaggagcaucuuac

SEQ ID NO: 1765163 - RNA, 19 nt, Artificial Sequence
  Description of Artificial Sequence: Synthetic oligonucleotide
  Sense strand starting at position 574 of SEQ ID NO: 1562683
ccacguguccugucuguaa

SEQ ID NO: 1765164 - RNA, 19 nt, Artificial Sequence
  Description of Artificial Sequence: Synthetic oligonucleotide
  Antisense strand to SEQ ID NO: 1765163
uuacagacaggacacgugg

SEQ ID NO: 1765165 - RNA, 19 nt, Artificial Sequence
  Description of Artificial Sequence: Synthetic oligonucleotide
  Sense strand starting at position 613 of SEQ ID NO: 1562683
gccuaucuccuugaagcga

SEQ ID NO: 1765166 - RNA, 19 nt, Artificial Sequence
  Description of Artificial Sequence: Synthetic oligonucleotide
  Antisense strand to SEQ ID NO: 1765165
ucgcuucaaggagauaggc

SEQ ID NO: 1765167 - RNA, 19 nt, Artificial Sequence
  Description of Artificial Sequence: Synthetic oligonucleotide
  Sense strand starting at position 622 of SEQ ID NO: 1562683
cuugaagcgaugugagaug

SEQ ID NO: 1765168 - RNA, 19 nt, Artificial Sequence
  Description of Artificial Sequence: Synthetic oligonucleotide
  Antisense strand to SEQ ID NO: 1765167
caucucacaucgcuucaag

SEQ ID NO: 1765169 - RNA, 19 nt, Artificial Sequence
  Description of Artificial Sequence: Synthetic oligonucleotide
  Sense strand starting at position 668 of SEQ ID NO: 1562683
gggucuauaaccugggaag

SEQ ID NO: 1765170 - RNA, 19 nt, Artificial Sequence
  Description of Artificial Sequence: Synthetic oligonucleotide
  Antisense strand to SEQ ID NO: 1765169
cuucccagguuauagaccc

SEQ ID NO: 1765171 - RNA, 19 nt, Artificial Sequence
  Description of Artificial Sequence: Synthetic oligonucleotide
  Sense strand starting at position 669 of SEQ ID NO: 1562683
ggucuauaaccugggaagu

SEQ ID NO: 1765172 - RNA, 19 nt, Artificial Sequence
  Description of Artificial Sequence: Synthetic oligonucleotide
  Antisense strand to SEQ ID NO: 1765171
acuucccagguuauagacc

SEQ ID NO: 1765173 - RNA, 19 nt, Artificial Sequence
  Description of Artificial Sequence: Synthetic oligonucleotide
  Sense strand starting at position 670 of SEQ ID NO: 1562683
gucuauaaccugggaaguc

SEQ ID NO: 1765174 - RNA, 19 nt, Artificial Sequence
  Description of Artificial Sequence: Synthetic oligonucleotide
  Antisense strand to SEQ ID NO: 1765173
gacuucccagguuauagac

SEQ ID NO: 1765175 - RNA, 19 nt, Artificial Sequence
  Description of Artificial Sequence: Synthetic oligonucleotide
  Sense strand starting at position 871 of SEQ ID NO: 1562683
guccuuuguugggcuuaaa

SEQ ID NO: 1765176 - RNA, 19 nt, Artificial Sequence
  Description of Artificial Sequence: Synthetic oligonucleotide
  Antisense strand to SEQ ID NO: 1765175
uuuaagcccaacaaaggac

SEQ ID NO: 1765177 - RNA, 19 nt, Artificial Sequence
  Description of Artificial Sequence: Synthetic oligonucleotide
  Sense strand starting at position 1151 of SEQ ID NO: 1562683
uugagucccagcuaaggau

SEQ ID NO: 1765178 - RNA, 19 nt, Artificial Sequence
  Description of Artificial Sequence: Synthetic oligonucleotide
  Antisense strand to SEQ ID NO: 1765177
auccuuagcugggacucaa

SEQ ID NO: 1765179 - RNA, 19 nt, Artificial Sequence
  Description of Artificial Sequence: Synthetic oligonucleotide
  Sense strand starting at position 1171 of SEQ ID NO: 1562683
gcaggagagucgcuucacu

SEQ ID NO: 1765180 - RNA, 19 nt, Artificial Sequence
  Description of Artificial Sequence: Synthetic oligonucleotide
  Antisense strand to SEQ ID NO: 1765179
agugaagcgacucuccugc

SEQ ID NO: 1765181 - RNA, 19 nt, Artificial Sequence
  Description of Artificial Sequence: Synthetic oligonucleotide
  Sense strand starting at position 1284 of SEQ ID NO: 1562683
gcggguuuccuggaauacu

SEQ ID NO: 1765182 - RNA, 19 nt, Artificial Sequence
  Description of Artificial Sequence: Synthetic oligonucleotide
  Antisense strand to SEQ ID NO: 1765181
aguauuccaggaaacccgc

SEQ ID NO: 1765183 - RNA, 19 nt, Artificial Sequence
  Description of Artificial Sequence: Synthetic oligonucleotide
  Sense strand starting at position 1374 of SEQ ID NO: 1562683
gagugaccugcccggagua

SEQ ID NO: 1765184 - RNA, 19 nt, Artificial Sequence
  Description of Artificial Sequence: Synthetic oligonucleotide
  Antisense strand to SEQ ID NO: 1765183
uacuccgggcaggucacuc

SEQ ID NO: 1765185 - RNA, 19 nt, Artificial Sequence
  Description of Artificial Sequence: Synthetic oligonucleotide
  Sense strand starting at position 1425 of SEQ ID NO: 1562683
acaugacacuguuaucuau

SEQ ID NO: 1765186 - RNA, 19 nt, Artificial Sequence
  Description of Artificial Sequence: Synthetic oligonucleotide
  Antisense strand to SEQ ID NO: 1765185
auagauaacagugucaugu

SEQ ID NO: 1765187 - RNA, 19 nt, Artificial Sequence
  Description of Artificial Sequence: Synthetic oligonucleotide
  Sense strand starting at position 1434 of SEQ ID NO: 1562683
uguuaucuaucccucagau

SEQ ID NO: 1765188 - RNA, 19 nt, Artificial Sequence
  Description of Artificial Sequence: Synthetic oligonucleotide
  Antisense strand to SEQ ID NO: 1765187
aucugagggauagauaaca

SEQ ID NO: 1765189 - RNA, 19 nt, Artificial Sequence
  Description of Artificial Sequence: Synthetic oligonucleotide
  Sense strand starting at position 1460 of SEQ ID NO: 1562683
gugaccugccaaggucaua

SEQ ID NO: 1765190 - RNA, 19 nt, Artificial Sequence
  Description of Artificial Sequence: Synthetic oligonucleotide
  Antisense strand to SEQ ID NO: 1765189
uaugaccuuggcaggucac

SEQ ID NO: 1765191 - RNA, 19 nt, Artificial Sequence
  Description of Artificial Sequence: Synthetic oligonucleotide
  Sense strand starting at position 1898 of SEQ ID NO: 1562683
ucaaaucuucccugaugag

SEQ ID NO: 1765192 - RNA, 19 nt, Artificial Sequence
  Description of Artificial Sequence: Synthetic oligonucleotide
  Antisense strand to SEQ ID NO: 1765191
cucaucagggaagauuuga

SEQ ID NO: 1765193 - RNA, 19 nt, Artificial Sequence
  Description of Artificial Sequence: Synthetic oligonucleotide
  Sense strand starting at position 1989 of SEQ ID NO: 1562683
aaguacuauuccgaggauu

SEQ ID NO: 1765194 - RNA, 19 nt, Artificial Sequence
  Description of Artificial Sequence: Synthetic oligonucleotide
  Antisense strand to SEQ ID NO: 1765193
aauccucggaauaguacuu

SEQ ID NO: 1765195 - RNA, 19 nt, Artificial Sequence
  Description of Artificial Sequence: Synthetic oligonucleotide
  Sense strand starting at position 1991 of SEQ ID NO: 1562683
guacuauuccgaggauucc

SEQ ID NO: 1765196 - RNA, 19 nt, Artificial Sequence
  Description of Artificial Sequence: Synthetic oligonucleotide
  Antisense strand to SEQ ID NO: 1765195
ggaauccucggaauaguac

SEQ ID NO: 1765197 - RNA, 19 nt, Artificial Sequence
  Description of Artificial Sequence: Synthetic oligonucleotide
  Sense strand starting at position 1992 of SEQ ID NO: 1562683
uacuauuccgaggauuccu

SEQ ID NO: 1765198 - RNA, 19 nt, Artificial Sequence
  Description of Artificial Sequence: Synthetic oligonucleotide
  Antisense strand to SEQ ID NO: 1765197
aggaauccucggaauagua

SEQ ID NO: 1765199 - RNA, 19 nt, Artificial Sequence
  Description of Artificial Sequence: Synthetic oligonucleotide
  Sense strand starting at position 2000 of SEQ ID NO: 1562683
cgaggauuccucugcuauc

SEQ ID NO: 1765200 - RNA, 19 nt, Artificial Sequence
  Description of Artificial Sequence: Synthetic oligonucleotide
  Antisense strand to SEQ ID NO: 1765199
gauagcagaggaauccucg

SEQ ID NO: 1765201 - RNA, 19 nt, Artificial Sequence
  Description of Artificial Sequence: Synthetic oligonucleotide
  Sense strand starting at position 2160 of SEQ ID NO: 1562683
cuuggugcucccuggaguu

SEQ ID NO: 1765202 - RNA, 19 nt, Artificial Sequence
  Description of Artificial Sequence: Synthetic oligonucleotide
  Antisense strand to SEQ ID NO: 1765201
aacuccagggagcaccaag

SEQ ID NO: 1765203 - RNA, 19 nt, Artificial Sequence
  Description of Artificial Sequence: Synthetic oligonucleotide
  Sense strand starting at position 2366 of SEQ ID NO: 1562683
gguggagccugguuucuga

SEQ ID NO: 1765204 - RNA, 19 nt, Artificial Sequence
  Description of Artificial Sequence: Synthetic oligonucleotide
  Antisense strand to SEQ ID NO: 1765203
ucagaaaccaggcuccacc

SEQ ID NO: 1765205 - RNA, 19 nt, Artificial Sequence
  Description of Artificial Sequence: Synthetic oligonucleotide
  Sense strand starting at position 2468 of SEQ ID NO: 1562683
aagacacccgcguauuagu

SEQ ID NO: 1765206 - RNA, 19 nt, Artificial Sequence
  Description of Artificial Sequence: Synthetic oligonucleotide
  Antisense strand to SEQ ID NO: 1765205
acuaauacgcgggugucuu

SEQ ID NO: 1765207 - RNA, 19 nt, Artificial Sequence
  Description of Artificial Sequence: Synthetic oligonucleotide
  Sense strand starting at position 2477 of SEQ ID NO: 1562683
gcguauuaguggcuccgau

SEQ ID NO: 1765208 - RNA, 19 nt, Artificial Sequence
  Description of Artificial Sequence: Synthetic oligonucleotide
  Antisense strand to SEQ ID NO: 1765207
aucggagccacuaauacgc

SEQ ID NO: 1765209 - RNA, 19 nt, Artificial Sequence
  Description of Artificial Sequence: Synthetic oligonucleotide
  Sense strand starting at position 2540 of SEQ ID NO: 1562683
cccacaagucuccagaagu

SEQ ID NO: 1765210 - RNA, 19 nt, Artificial Sequence
  Description of Artificial Sequence: Synthetic oligonucleotide
  Antisense strand to SEQ ID NO: 1765209
acuucuggagacuuguggg

SEQ ID NO: 1765211 - RNA, 19 nt, Artificial Sequence
  Description of Artificial Sequence: Synthetic oligonucleotide
  Sense strand starting at position 2578 of SEQ ID NO: 1562683
ggaucugugucugucguca

SEQ ID NO: 1765212 - RNA, 19 nt, Artificial Sequence
  Description of Artificial Sequence: Synthetic oligonucleotide
  Antisense strand to SEQ ID NO: 1765211
ugacgacagacacagaucc

SEQ ID NO: 1765213 - RNA, 19 nt, Artificial Sequence
  Description of Artificial Sequence: Synthetic oligonucleotide
  Sense strand starting at position 2759 of SEQ ID NO: 1562683
gccuguccuguuugucaga

SEQ ID NO: 1765214 - RNA, 19 nt, Artificial Sequence
  Description of Artificial Sequence: Synthetic oligonucleotide
  Antisense strand to SEQ ID NO: 1765213
ucugacaaacaggacaggc

SEQ ID NO: 1765215 - RNA, 19 nt, Artificial Sequence
  Description of Artificial Sequence: Synthetic oligonucleotide
  Sense strand starting at position 2760 of SEQ ID NO: 1562683
ccuguccuguuugucagaa

SEQ ID NO: 1765216 - RNA, 19 nt, Artificial Sequence
  Description of Artificial Sequence: Synthetic oligonucleotide
  Antisense strand to SEQ ID NO: 1765215
uucugacaaacaggacagg

SEQ ID NO: 1765217 - RNA, 19 nt, Artificial Sequence
  Description of Artificial Sequence: Synthetic oligonucleotide
  Sense strand starting at position 2781 of SEQ ID NO: 1562683
gcccgcuuguccuccaaga

SEQ ID NO: 1765218 - RNA, 19 nt, Artificial Sequence
  Description of Artificial Sequence: Synthetic oligonucleotide
  Antisense strand to SEQ ID NO: 1765217
ucuuggaggacaagcgggc

SEQ ID NO: 1765219 - RNA, 19 nt, Artificial Sequence
  Description of Artificial Sequence: Synthetic oligonucleotide
  Sense strand starting at position 3205 of SEQ ID NO: 1562683
ucagucguuuaguccacaa

SEQ ID NO: 1765220 - RNA, 19 nt, Artificial Sequence
  Description of Artificial Sequence: Synthetic oligonucleotide
  Antisense strand to SEQ ID NO: 1765219
uuguggacuaaacgacuga

SEQ ID NO: 1765221 - RNA, 19 nt, Artificial Sequence
  Description of Artificial Sequence: Synthetic oligonucleotide
  Sense strand starting at position 3207 of SEQ ID NO: 1562683
agucguuuaguccacaaac

SEQ ID NO: 1765222 - RNA, 19 nt, Artificial Sequence
  Description of Artificial Sequence: Synthetic oligonucleotide
  Antisense strand to SEQ ID NO: 1765221
guuuguggacuaaacgacu

SEQ ID NO: 1765223 - RNA, 19 nt, Artificial Sequence
  Description of Artificial Sequence: Synthetic oligonucleotide
  Sense strand starting at position 23 of SEQ ID NO: 1562684
cacggcuuuguccaagaga

SEQ ID NO: 1765224 - RNA, 19 nt, Artificial Sequence
  Description of Artificial Sequence: Synthetic oligonucleotide
  Antisense strand to SEQ ID NO: 1765223
ucucuuggacaaagccgug

SEQ ID NO: 1765225 - RNA, 19 nt, Artificial Sequence
  Description of Artificial Sequence: Synthetic oligonucleotide
  Sense strand starting at position 506 of SEQ ID NO: 1562684
cgccuuugcacucagggaa

SEQ ID NO: 1765226 - RNA, 19 nt, Artificial Sequence
  Description of Artificial Sequence: Synthetic oligonucleotide
  Antisense strand to SEQ ID NO: 1765225
uucccugagugcaaaggcg

SEQ ID NO: 1765227 - RNA, 19 nt, Artificial Sequence
  Description of Artificial Sequence: Synthetic oligonucleotide
  Sense strand starting at position 596 of SEQ ID NO: 1562684
ccggauuccagcugggaaa

SEQ ID NO: 1765228 - RNA, 19 nt, Artificial Sequence
  Description of Artificial Sequence: Synthetic oligonucleotide
  Antisense strand to SEQ ID NO: 1765227
uuucccagcuggaauccgg

SEQ ID NO: 1765229 - RNA, 19 nt, Artificial Sequence
  Description of Artificial Sequence: Synthetic oligonucleotide
  Sense strand starting at position 597 of SEQ ID NO: 1562684
cggauuccagcugggaaau

SEQ ID NO: 1765230 - RNA, 19 nt, Artificial Sequence
  Description of Artificial Sequence: Synthetic oligonucleotide
  Antisense strand to SEQ ID NO: 1765229
auuucccagcuggaauccg

SEQ ID NO: 1765231 - RNA, 19 nt, Artificial Sequence
  Description of Artificial Sequence: Synthetic oligonucleotide
  Sense strand starting at position 2237 of SEQ ID NO: 1562684
ugcaaagccuucugggaua

SEQ ID NO: 1765232 - RNA, 19 nt, Artificial Sequence
  Description of Artificial Sequence: Synthetic oligonucleotide
  Antisense strand to SEQ ID NO: 1765231
uaucccagaaggcuuugca

SEQ ID NO: 1765233 - RNA, 19 nt, Artificial Sequence
  Description of Artificial Sequence: Synthetic oligonucleotide
  Sense strand starting at position 2249 of SEQ ID NO: 1562684
ugggauaaccaggguuuca

SEQ ID NO: 1765234 - RNA, 19 nt, Artificial Sequence
  Description of Artificial Sequence: Synthetic oligonucleotide
  Antisense strand to SEQ ID NO: 1765233
ugaaacccugguuauccca

SEQ ID NO: 1765235 - RNA, 19 nt, Artificial Sequence
  Description of Artificial Sequence: Synthetic oligonucleotide
  Sense strand starting at position 2801 of SEQ ID NO: 1562684
cgggcuauggcuucuuguu

SEQ ID NO: 1765236 - RNA, 19 nt, Artificial Sequence
  Description of Artificial Sequence: Synthetic oligonucleotide
  Antisense strand to SEQ ID NO: 1765235
aacaagaagccauagcccg

SEQ ID NO: 1765237 - RNA, 19 nt, Artificial Sequence
  Description of Artificial Sequence: Synthetic oligonucleotide
  Sense strand starting at position 2806 of SEQ ID NO: 1562684
uauggcuucuuguuugcaa

SEQ ID NO: 1765238 - RNA, 19 nt, Artificial Sequence
  Description of Artificial Sequence: Synthetic oligonucleotide
  Antisense strand to SEQ ID NO: 1765237
uugcaaacaagaagccaua

SEQ ID NO: 1765239 - RNA, 19 nt, Artificial Sequence
  Description of Artificial Sequence: Synthetic oligonucleotide
  Sense strand starting at position 2808 of SEQ ID NO: 1562684
uggcuucuuguuugcaaca

SEQ ID NO: 1765240 - RNA, 19 nt, Artificial Sequence
  Description of Artificial Sequence: Synthetic oligonucleotide
  Antisense strand to SEQ ID NO: 1765239
uguugcaaacaagaagcca

SEQ ID NO: 1765241 - RNA, 19 nt, Artificial Sequence
  Description of Artificial Sequence: Synthetic oligonucleotide
  Sense strand starting at position 2948 of SEQ ID NO: 1562684
uuagaaaucuggugggaac

SEQ ID NO: 1765242 - RNA, 19 nt, Artificial Sequence
  Description of Artificial Sequence: Synthetic oligonucleotide
  Antisense strand to SEQ ID NO: 1765241
guucccaccagauuucuaa

SEQ ID NO: 1765243 - RNA, 19 nt, Artificial Sequence
  Description of Artificial Sequence: Synthetic oligonucleotide
  Sense strand starting at position 2951 of SEQ ID NO: 1562684
gaaaucuggugggaacguu

SEQ ID NO: 1765244 - RNA, 19 nt, Artificial Sequence
  Description of Artificial Sequence: Synthetic oligonucleotide
  Antisense strand to SEQ ID NO: 1765243
aacguucccaccagauuuc

SEQ ID NO: 1765245 - RNA, 19 nt, Artificial Sequence
  Description of Artificial Sequence: Synthetic oligonucleotide
  Sense strand starting at position 2987 of SEQ ID NO: 1562684
caggauauguugcuuuauu

SEQ ID NO: 1765246 - RNA, 19 nt, Artificial Sequence
  Description of Artificial Sequence: Synthetic oligonucleotide
  Antisense strand to SEQ ID NO: 1765245
aauaaagcaacauauccug

SEQ ID NO: 1765247 - RNA, 19 nt, Artificial Sequence
  Description of Artificial Sequence: Synthetic oligonucleotide
  Sense strand starting at position 3209 of SEQ ID NO: 1562684
cccuccauugugcaaugau

SEQ ID NO: 1765248 - RNA, 19 nt, Artificial Sequence
  Description of Artificial Sequence: Synthetic oligonucleotide
  Antisense strand to SEQ ID NO: 1765247
aucauugcacaauggaggg

SEQ ID NO: 1765249 - RNA, 19 nt, Artificial Sequence
  Description of Artificial Sequence: Synthetic oligonucleotide
  Sense strand starting at position 3212 of SEQ ID NO: 1562684
uccauugugcaaugaugca

SEQ ID NO: 1765250 - RNA, 19 nt, Artificial Sequence
  Description of Artificial Sequence: Synthetic oligonucleotide
  Antisense strand to SEQ ID NO: 1765249
ugcaucauugcacaaugga

SEQ ID NO: 1765251 - RNA, 19 nt, Artificial Sequence
  Description of Artificial Sequence: Synthetic oligonucleotide
  Sense strand starting at position 3669 of SEQ ID NO: 1562684
cuggacuucuacgggauca

SEQ ID NO: 1765252 - RNA, 19 nt, Artificial Sequence
  Description of Artificial Sequence: Synthetic oligonucleotide
  Antisense strand to SEQ ID NO: 1765251
ugaucccguagaaguccag

SEQ ID NO: 1765253 - RNA, 19 nt, Artificial Sequence
  Description of Artificial Sequence: Synthetic oligonucleotide
  Sense strand starting at position 3670 of SEQ ID NO: 1562684
uggacuucuacgggaucau

SEQ ID NO: 1765254 - RNA, 19 nt, Artificial Sequence
  Description of Artificial Sequence: Synthetic oligonucleotide
  Antisense strand to SEQ ID NO: 1765253
augaucccguagaagucca

SEQ ID NO: 1765255 - RNA, 19 nt, Artificial Sequence
  Description of Artificial Sequence: Synthetic oligonucleotide
  Sense strand starting at position 3827 of SEQ ID NO: 1562684
auccaugagugguacuuga

SEQ ID NO: 1765256 - RNA, 19 nt, Artificial Sequence
  Description of Artificial Sequence: Synthetic oligonucleotide
  Antisense strand to SEQ ID NO: 1765255
ucaaguaccacucauggau

SEQ ID NO: 1765257 - RNA, 19 nt, Artificial Sequence
  Description of Artificial Sequence: Synthetic oligonucleotide
  Sense strand starting at position 3840 of SEQ ID NO: 1562684
acuugauguggcugcagaa

SEQ ID NO: 1765258 - RNA, 19 nt, Artificial Sequence
  Description of Artificial Sequence: Synthetic oligonucleotide
  Antisense strand to SEQ ID NO: 1765257
uucugcagccacaucaagu

SEQ ID NO: 1765259 - RNA, 19 nt, Artificial Sequence
  Description of Artificial Sequence: Synthetic oligonucleotide
  Sense strand starting at position 3885 of SEQ ID NO: 1562684
cacaacugucccuggguau

SEQ ID NO: 1765260 - RNA, 19 nt, Artificial Sequence
  Description of Artificial Sequence: Synthetic oligonucleotide
  Antisense strand to SEQ ID NO: 1765259
auacccagggacaguugug

SEQ ID NO: 1765261 - RNA, 19 nt, Artificial Sequence
  Description of Artificial Sequence: Synthetic oligonucleotide
  Sense strand starting at position 3886 of SEQ ID NO: 1562684
acaacugucccuggguaua

SEQ ID NO: 1765262 - RNA, 19 nt, Artificial Sequence
  Description of Artificial Sequence: Synthetic oligonucleotide
  Antisense strand to SEQ ID NO: 1765261
uauacccagggacaguugu

SEQ ID NO: 1765263 - RNA, 19 nt, Artificial Sequence
  Description of Artificial Sequence: Synthetic oligonucleotide
  Sense strand starting at position 1638 of SEQ ID NO: 1562685
ugauccagccugugguuua

SEQ ID NO: 1765264 - RNA, 19 nt, Artificial Sequence
  Description of Artificial Sequence: Synthetic oligonucleotide
  Antisense strand to SEQ ID NO: 1765263
uaaaccacaggcuggauca

SEQ ID NO: 1765265 - RNA, 19 nt, Artificial Sequence
  Description of Artificial Sequence: Synthetic oligonucleotide
  Sense strand starting at position 1639 of SEQ ID NO: 1562685
gauccagccugugguuuaa

SEQ ID NO: 1765266 - RNA, 19 nt, Artificial Sequence
  Description of Artificial Sequence: Synthetic oligonucleotide
  Antisense strand to SEQ ID NO: 1765265
uuaaaccacaggcuggauc

SEQ ID NO: 1765267 - RNA, 19 nt, Artificial Sequence
  Description of Artificial Sequence: Synthetic oligonucleotide
  Sense strand starting at position 2237 of SEQ ID NO: 1562685
cacacaggcuucugggaua

SEQ ID NO: 1765268 - RNA, 19 nt, Artificial Sequence
  Description of Artificial Sequence: Synthetic oligonucleotide
  Antisense strand to SEQ ID NO: 1765267
uaucccagaagccugugug

SEQ ID NO: 1765269 - RNA, 19 nt, Artificial Sequence
  Description of Artificial Sequence: Synthetic oligonucleotide
  Sense strand starting at position 2729 of SEQ ID NO: 1562685
cgagguuuccuggauggga

SEQ ID NO: 1765270 - RNA, 19 nt, Artificial Sequence
  Description of Artificial Sequence: Synthetic oligonucleotide
  Antisense strand to SEQ ID NO: 1765269
ucccauccaggaaaccucg

SEQ ID NO: 1765271 - RNA, 19 nt, Artificial Sequence
  Description of Artificial Sequence: Synthetic oligonucleotide
  Sense strand starting at position 2837 of SEQ ID NO: 1562685
ugacuuccuguuugcaaca

SEQ ID NO: 1765272 - RNA, 19 nt, Artificial Sequence
  Description of Artificial Sequence: Synthetic oligonucleotide
  Antisense strand to SEQ ID NO: 1765271
uguugcaaacaggaaguca

SEQ ID NO: 1765273 - RNA, 19 nt, Artificial Sequence
  Description of Artificial Sequence: Synthetic oligonucleotide
  Sense strand starting at position 2929 of SEQ ID NO: 1562685
gccugagggucgucauucu

SEQ ID NO: 1765274 - RNA, 19 nt, Artificial Sequence
  Description of Artificial Sequence: Synthetic oligonucleotide
  Antisense strand to SEQ ID NO: 1765273
agaaugacgacccucaggc

SEQ ID NO: 1765275 - RNA, 19 nt, Artificial Sequence
  Description of Artificial Sequence: Synthetic oligonucleotide
  Sense strand starting at position 2977 of SEQ ID NO: 1562685
uuagaaaucugguggaaac

SEQ ID NO: 1765276 - RNA, 19 nt, Artificial Sequence
  Description of Artificial Sequence: Synthetic oligonucleotide
  Antisense strand to SEQ ID NO: 1765275
guuuccaccagauuucuaa

SEQ ID NO: 1765277 - RNA, 19 nt, Artificial Sequence
  Description of Artificial Sequence: Synthetic oligonucleotide
  Sense strand starting at position 2989 of SEQ ID NO: 1562685
uggaaacauuauggaggau

SEQ ID NO: 1765278 - RNA, 19 nt, Artificial Sequence
  Description of Artificial Sequence: Synthetic oligonucleotide
  Antisense strand to SEQ ID NO: 1765277
auccuccauaauguuucca

SEQ ID NO: 1765279 - RNA, 19 nt, Artificial Sequence
  Description of Artificial Sequence: Synthetic oligonucleotide
  Sense strand starting at position 3007 of SEQ ID NO: 1562685
uccuuuauuuaggauaugu

SEQ ID NO: 1765280 - RNA, 19 nt, Artificial Sequence
  Description of Artificial Sequence: Synthetic oligonucleotide
  Antisense strand to SEQ ID NO: 1765279
acauauccuaaauaaagga

SEQ ID NO: 1765281 - RNA, 19 nt, Artificial Sequence
  Description of Artificial Sequence: Synthetic oligonucleotide
  Sense strand starting at position 3402 of SEQ ID NO: 1562685
ggcaucugauaauuaaacu

SEQ ID NO: 1765282 - RNA, 19 nt, Artificial Sequence
  Description of Artificial Sequence: Synthetic oligonucleotide
  Antisense strand to SEQ ID NO: 1765281
aguuuaauuaucagaugcc

SEQ ID NO: 1765283 - RNA, 19 nt, Artificial Sequence
  Description of Artificial Sequence: Synthetic oligonucleotide
  Sense strand starting at position 3483 of SEQ ID NO: 1562685
gcaguagagcuccaauaca

SEQ ID NO: 1765284 - RNA, 19 nt, Artificial Sequence
  Description of Artificial Sequence: Synthetic oligonucleotide
  Antisense strand to SEQ ID NO: 1765283
uguauuggagcucuacugc

SEQ ID NO: 1765285 - RNA, 19 nt, Artificial Sequence
  Description of Artificial Sequence: Synthetic oligonucleotide
  Sense strand starting at position 3515 of SEQ ID NO: 1562685
ccaccuuuccaguggaaac

SEQ ID NO: 1765286 - RNA, 19 nt, Artificial Sequence
  Description of Artificial Sequence: Synthetic oligonucleotide
  Antisense strand to SEQ ID NO: 1765285
guuuccacuggaaaggugg

SEQ ID NO: 1765287 - RNA, 19 nt, Artificial Sequence
  Description of Artificial Sequence: Synthetic oligonucleotide
  Sense strand starting at position 3599 of SEQ ID NO: 1562685
agaauaacguaucuggcaa

SEQ ID NO: 1765288 - RNA, 19 nt, Artificial Sequence
  Description of Artificial Sequence: Synthetic oligonucleotide
  Antisense strand to SEQ ID NO: 1765287
uugccagauacguuauucu

SEQ ID NO: 1765289 - RNA, 19 nt, Artificial Sequence
  Description of Artificial Sequence: Synthetic oligonucleotide
  Sense strand starting at position 205 of SEQ ID NO: 1562686
ucguuuguagagugaauga

SEQ ID NO: 1765290 - RNA, 19 nt, Artificial Sequence
  Description of Artificial Sequence: Synthetic oligonucleotide
  Antisense strand to SEQ ID NO: 1765289
ucauucacucuacaaacga

SEQ ID NO: 1765291 - RNA, 19 nt, Artificial Sequence
  Description of Artificial Sequence: Synthetic oligonucleotide
  Sense strand starting at position 233 of SEQ ID NO: 1562686
ccaacuacucgauggagaa

SEQ ID NO: 1765292 - RNA, 19 nt, Artificial Sequence
  Description of Artificial Sequence: Synthetic oligonucleotide
  Antisense strand to SEQ ID NO: 1765291
uucuccaucgaguaguugg

SEQ ID NO: 1765293 - RNA, 19 nt, Artificial Sequence
  Description of Artificial Sequence: Synthetic oligonucleotide
  Sense strand starting at position 234 of SEQ ID NO: 1562686
caacuacucgauggagaac

SEQ ID NO: 1765294 - RNA, 19 nt, Artificial Sequence
  Description of Artificial Sequence: Synthetic oligonucleotide
  Antisense strand to SEQ ID NO: 1765293
guucuccaucgaguaguug

SEQ ID NO: 1765295 - RNA, 19 nt, Artificial Sequence
  Description of Artificial Sequence: Synthetic oligonucleotide
  Sense strand starting at position 481 of SEQ ID NO: 1562686
cuguaaccucaguauguua

SEQ ID NO: 1765296 - RNA, 19 nt, Artificial Sequence
  Description of Artificial Sequence: Synthetic oligonucleotide
  Antisense strand to SEQ ID NO: 1765295
uaacauacugagguuacag

SEQ ID NO: 1765297 - RNA, 19 nt, Artificial Sequence
  Description of Artificial Sequence: Synthetic oligonucleotide
  Sense strand starting at position 581 of SEQ ID NO: 1562686
acccucaugucugcugaga

SEQ ID NO: 1765298 - RNA, 19 nt, Artificial Sequence
  Description of Artificial Sequence: Synthetic oligonucleotide
  Antisense strand to SEQ ID NO: 1765297
ucucagcagacaugagggu

SEQ ID NO: 1765299 - RNA, 19 nt, Artificial Sequence
  Description of Artificial Sequence: Synthetic oligonucleotide
  Sense strand starting at position 717 of SEQ ID NO: 1562686
cagagugagcccuggauag

SEQ ID NO: 1765300 - RNA, 19 nt, Artificial Sequence
  Description of Artificial Sequence: Synthetic oligonucleotide
  Antisense strand to SEQ ID NO: 1765299
cuauccagggcucacucug

SEQ ID NO: 1765301 - RNA, 19 nt, Artificial Sequence
  Description of Artificial Sequence: Synthetic oligonucleotide
  Sense strand starting at position 826 of SEQ ID NO: 1562686
gcuguugaaauggaucagu

SEQ ID NO: 1765302 - RNA, 19 nt, Artificial Sequence
  Description of Artificial Sequence: Synthetic oligonucleotide
  Antisense strand to SEQ ID NO: 1765301
acugauccauuucaacagc

SEQ ID NO: 1765303 - RNA, 19 nt, Artificial Sequence
  Description of Artificial Sequence: Synthetic oligonucleotide
  Sense strand starting at position 1191 of SEQ ID NO: 1562686
ccagacacauugucuuagu

SEQ ID NO: 1765304 - RNA, 19 nt, Artificial Sequence
  Description of Artificial Sequence: Synthetic oligonucleotide
  Antisense strand to SEQ ID NO: 1765303
acuaagacaaugugucugg

SEQ ID NO: 1765305 - RNA, 19 nt, Artificial Sequence
  Description of Artificial Sequence: Synthetic oligonucleotide
  Sense strand starting at position 1446 of SEQ ID NO: 1562686
cuggaauguuuguuccuua

SEQ ID NO: 1765306 - RNA, 19 nt, Artificial Sequence
  Description of Artificial Sequence: Synthetic oligonucleotide
  Antisense strand to SEQ ID NO: 1765305
uaaggaacaaacauuccag

SEQ ID NO: 1765307 - RNA, 19 nt, Artificial Sequence
  Description of Artificial Sequence: Synthetic oligonucleotide
  Sense strand starting at position 1449 of SEQ ID NO: 1562686
gaauguuuguuccuuagaa

SEQ ID NO: 1765308 - RNA, 19 nt, Artificial Sequence
  Description of Artificial Sequence: Synthetic oligonucleotide
  Antisense strand to SEQ ID NO: 1765307
uucuaaggaacaaacauuc

SEQ ID NO: 1765309 - RNA, 19 nt, Artificial Sequence
  Description of Artificial Sequence: Synthetic oligonucleotide
  Sense strand starting at position 1451 of SEQ ID NO: 1562686
auguuuguuccuuagaaag

SEQ ID NO: 1765310 - RNA, 19 nt, Artificial Sequence
  Description of Artificial Sequence: Synthetic oligonucleotide
  Antisense strand to SEQ ID NO: 1765309
cuuucuaaggaacaaacau

SEQ ID NO: 1765311 - RNA, 19 nt, Artificial Sequence
  Description of Artificial Sequence: Synthetic oligonucleotide
  Sense strand starting at position 1490 of SEQ ID NO: 1562686
ucaggucccucaucagaca

SEQ ID NO: 1765312 - RNA, 19 nt, Artificial Sequence
  Description of Artificial Sequence: Synthetic oligonucleotide
  Antisense strand to SEQ ID NO: 1765311
ugucugaugagggaccuga

SEQ ID NO: 1765313 - RNA, 19 nt, Artificial Sequence
  Description of Artificial Sequence: Synthetic oligonucleotide
  Sense strand starting at position 1768 of SEQ ID NO: 1562686
gcuguauuccuuuaucuag

SEQ ID NO: 1765314 - RNA, 19 nt, Artificial Sequence
  Description of Artificial Sequence: Synthetic oligonucleotide
  Antisense strand to SEQ ID NO: 1765313
cuagauaaaggaauacagc

SEQ ID NO: 1765315 - RNA, 19 nt, Artificial Sequence
  Description of Artificial Sequence: Synthetic oligonucleotide
  Sense strand starting at position 1770 of SEQ ID NO: 1562686
uguauuccuuuaucuagga

SEQ ID NO: 1765316 - RNA, 19 nt, Artificial Sequence
  Description of Artificial Sequence: Synthetic oligonucleotide
  Antisense strand to SEQ ID NO: 1765315
uccuagauaaaggaauaca

SEQ ID NO: 1765317 - RNA, 19 nt, Artificial Sequence
  Description of Artificial Sequence: Synthetic oligonucleotide
  Sense strand starting at position 2276 of SEQ ID NO: 1562686
gggcgauguucacugagga

SEQ ID NO: 1765318 - RNA, 19 nt, Artificial Sequence
  Description of Artificial Sequence: Synthetic oligonucleotide
  Antisense strand to SEQ ID NO: 1765317
uccucagugaacaucgccc

SEQ ID NO: 1765319 - RNA, 19 nt, Artificial Sequence
  Description of Artificial Sequence: Synthetic oligonucleotide
  Sense strand starting at position 2277 of SEQ ID NO: 1562686
ggcgauguucacugaggac

SEQ ID NO: 1765320 - RNA, 19 nt, Artificial Sequence
  Description of Artificial Sequence: Synthetic oligonucleotide
  Antisense strand to SEQ ID NO: 1765319
guccucagugaacaucgcc

SEQ ID NO: 1765321 - RNA, 19 nt, Artificial Sequence
  Description of Artificial Sequence: Synthetic oligonucleotide
  Sense strand starting at position 2551 of SEQ ID NO: 1562686
cugggaaacucaucgucaa

SEQ ID NO: 1765322 - RNA, 19 nt, Artificial Sequence
  Description of Artificial Sequence: Synthetic oligonucleotide
  Antisense strand to SEQ ID NO: 1765321
uugacgaugaguuucccag

SEQ ID NO: 1765323 - RNA, 19 nt, Artificial Sequence
  Description of Artificial Sequence: Synthetic oligonucleotide
  Sense strand starting at position 2552 of SEQ ID NO: 1562686
ugggaaacucaucgucaaa

SEQ ID NO: 1765324 - RNA, 19 nt, Artificial Sequence
  Description of Artificial Sequence: Synthetic oligonucleotide
  Antisense strand to SEQ ID NO: 1765323
uuugacgaugaguuuccca

SEQ ID NO: 1765325 - RNA, 19 nt, Artificial Sequence
  Description of Artificial Sequence: Synthetic oligonucleotide
  Sense strand starting at position 2554 of SEQ ID NO: 1562686
ggaaacucaucgucaaauc

SEQ ID NO: 1765326 - RNA, 19 nt, Artificial Sequence
  Description of Artificial Sequence: Synthetic oligonucleotide
  Antisense strand to SEQ ID NO: 1765325
gauuugacgaugaguuucc

SEQ ID NO: 1765327 - RNA, 19 nt, Artificial Sequence
  Description of Artificial Sequence: Synthetic oligonucleotide
  Sense strand starting at position 2581 of SEQ ID NO: 1562686
aucgacagcuauucuauga

SEQ ID NO: 1765328 - RNA, 19 nt, Artificial Sequence
  Description of Artificial Sequence: Synthetic oligonucleotide
  Antisense strand to SEQ ID NO: 1765327
ucauagaauagcugucgau

SEQ ID NO: 1765329 - RNA, 19 nt, Artificial Sequence
  Description of Artificial Sequence: Synthetic oligonucleotide
  Sense strand starting at position 2664 of SEQ ID NO: 1562686
uuugcuuaucucugaaagg

SEQ ID NO: 1765330 - RNA, 19 nt, Artificial Sequence
  Description of Artificial Sequence: Synthetic oligonucleotide
  Antisense strand to SEQ ID NO: 1765329
ccuuucagagauaagcaaa

SEQ ID NO: 1765331 - RNA, 19 nt, Artificial Sequence
  Description of Artificial Sequence: Synthetic oligonucleotide
  Sense strand starting at position 2722 of SEQ ID NO: 1562686
agaggaugugucggagaug

SEQ ID NO: 1765332 - RNA, 19 nt, Artificial Sequence
  Description of Artificial Sequence: Synthetic oligonucleotide
  Antisense strand to SEQ ID NO: 1765331
caucuccgacacauccucu

SEQ ID NO: 1765333 - RNA, 19 nt, Artificial Sequence
  Description of Artificial Sequence: Synthetic oligonucleotide
  Sense strand starting at position 2725 of SEQ ID NO: 1562686
ggaugugucggagaugcuu

SEQ ID NO: 1765334 - RNA, 19 nt, Artificial Sequence
  Description of Artificial Sequence: Synthetic oligonucleotide
  Antisense strand to SEQ ID NO: 1765333
aagcaucuccgacacaucc

SEQ ID NO: 1765335 - RNA, 19 nt, Artificial Sequence
  Description of Artificial Sequence: Synthetic oligonucleotide
  Sense strand starting at position 2731 of SEQ ID NO: 1562686
gucggagaugcuugggaca

SEQ ID NO: 1765336 - RNA, 19 nt, Artificial Sequence
  Description of Artificial Sequence: Synthetic oligonucleotide
  Antisense strand to SEQ ID NO: 1765335
ugucccaagcaucuccgac

SEQ ID NO: 1765337 - RNA, 19 nt, Artificial Sequence
  Description of Artificial Sequence: Synthetic oligonucleotide
  Sense strand starting at position 2835 of SEQ ID NO: 1562686
cuggcagguugguucaaau

SEQ ID NO: 1765338 - RNA, 19 nt, Artificial Sequence
  Description of Artificial Sequence: Synthetic oligonucleotide
  Antisense strand to SEQ ID NO: 1765337
auuugaaccaaccugccag

SEQ ID NO: 1765339 - RNA, 19 nt, Artificial Sequence
  Description of Artificial Sequence: Synthetic oligonucleotide
  Sense strand starting at position 2873 of SEQ ID NO: 1562686
gcuguaaagaaacagguau

SEQ ID NO: 1765340 - RNA, 19 nt, Artificial Sequence
  Description of Artificial Sequence: Synthetic oligonucleotide
  Antisense strand to SEQ ID NO: 1765339
auaccuguuucuuuacagc

SEQ ID NO: 1765341 - RNA, 19 nt, Artificial Sequence
  Description of Artificial Sequence: Synthetic oligonucleotide
  Sense strand starting at position 3030 of SEQ ID NO: 1562686
ugugcaaguguggaaugaa

SEQ ID NO: 1765342 - RNA, 19 nt, Artificial Sequence
  Description of Artificial Sequence: Synthetic oligonucleotide
  Antisense strand to SEQ ID NO: 1765341
uucauuccacacuugcaca

SEQ ID NO: 1765343 - RNA, 19 nt, Artificial Sequence
  Description of Artificial Sequence: Synthetic oligonucleotide
  Sense strand starting at position 3089 of SEQ ID NO: 1562686
ggaagagaucacggccgau

SEQ ID NO: 1765344 - RNA, 19 nt, Artificial Sequence
  Description of Artificial Sequence: Synthetic oligonucleotide
  Antisense strand to SEQ ID NO: 1765343
aucggccgugaucucuucc

SEQ ID NO: 1765345 - RNA, 19 nt, Artificial Sequence
  Description of Artificial Sequence: Synthetic oligonucleotide
  Sense strand starting at position 3095 of SEQ ID NO: 1562686
gaucacggccgaugugaaa

SEQ ID NO: 1765346 - RNA, 19 nt, Artificial Sequence
  Description of Artificial Sequence: Synthetic oligonucleotide
  Antisense strand to SEQ ID NO: 1765345
uuucacaucggccgugauc

SEQ ID NO: 1765347 - RNA, 19 nt, Artificial Sequence
  Description of Artificial Sequence: Synthetic oligonucleotide
  Sense strand starting at position 3108 of SEQ ID NO: 1562686
gugaaagcuagcuacaagu

SEQ ID NO: 1765348 - RNA, 19 nt, Artificial Sequence
  Description of Artificial Sequence: Synthetic oligonucleotide
  Antisense strand to SEQ ID NO: 1765347
acuuguagcuagcuuucac

SEQ ID NO: 1765349 - RNA, 19 nt, Artificial Sequence
  Description of Artificial Sequence: Synthetic oligonucleotide
  Sense strand starting at position 3208 of SEQ ID NO: 1562686
ugggcaucucuuugaccaa

SEQ ID NO: 1765350 - RNA, 19 nt, Artificial Sequence
  Description of Artificial Sequence: Synthetic oligonucleotide
  Antisense strand to SEQ ID NO: 1765349
uuggucaaagagaugccca

SEQ ID NO: 1765351 - RNA, 19 nt, Artificial Sequence
  Description of Artificial Sequence: Synthetic oligonucleotide
  Sense strand starting at position 3211 of SEQ ID NO: 1562686
gcaucucuuugaccaauag

SEQ ID NO: 1765352 - RNA, 19 nt, Artificial Sequence
  Description of Artificial Sequence: Synthetic oligonucleotide
  Antisense strand to SEQ ID NO: 1765351
cuauuggucaaagagaugc

SEQ ID NO: 1765353 - RNA, 19 nt, Artificial Sequence
  Description of Artificial Sequence: Synthetic oligonucleotide
  Sense strand starting at position 3479 of SEQ ID NO: 1562686
cauagcacugugggaaaua

SEQ ID NO: 1765354 - RNA, 19 nt, Artificial Sequence
  Description of Artificial Sequence: Synthetic oligonucleotide
  Antisense strand to SEQ ID NO: 1765353
uauuucccacagugcuaug

SEQ ID NO: 1765355 - RNA, 19 nt, Artificial Sequence
  Description of Artificial Sequence: Synthetic oligonucleotide
  Sense strand starting at position 3580 of SEQ ID NO: 1562686
gcugucauuuccucggaga

SEQ ID NO: 1765356 - RNA, 19 nt, Artificial Sequence
  Description of Artificial Sequence: Synthetic oligonucleotide
  Antisense strand to SEQ ID NO: 1765355
ucuccgaggaaaugacagc

SEQ ID NO: 1765357 - RNA, 19 nt, Artificial Sequence
  Description of Artificial Sequence: Synthetic oligonucleotide
  Sense strand starting at position 3583 of SEQ ID NO: 1562686
gucauuuccucggagagaa

SEQ ID NO: 1765358 - RNA, 19 nt, Artificial Sequence
  Description of Artificial Sequence: Synthetic oligonucleotide
  Antisense strand to SEQ ID NO: 1765357
uucucuccgaggaaaugac

SEQ ID NO: 1765359 - RNA, 19 nt, Artificial Sequence
  Description of Artificial Sequence: Synthetic oligonucleotide
  Sense strand starting at position 3606 of SEQ ID NO: 1562686
gaggcuuauuucugggaaa

SEQ ID NO: 1765360 - RNA, 19 nt, Artificial Sequence
  Description of Artificial Sequence: Synthetic oligonucleotide
  Antisense strand to SEQ ID NO: 1765359
uuucccagaaauaagccuc

SEQ ID NO: 1765361 - RNA, 19 nt, Artificial Sequence
  Description of Artificial Sequence: Synthetic oligonucleotide
  Sense strand starting at position 3609 of SEQ ID NO: 1562686
gcuuauuucugggaaacac

SEQ ID NO: 1765362 - RNA, 19 nt, Artificial Sequence
  Description of Artificial Sequence: Synthetic oligonucleotide
  Antisense strand to SEQ ID NO: 1765361
guguuucccagaaauaagc

SEQ ID NO: 1765363 - RNA, 19 nt, Artificial Sequence
  Description of Artificial Sequence: Synthetic oligonucleotide
  Sense strand starting at position 3744 of SEQ ID NO: 1562686
ccaccuggguucuuguaua

SEQ ID NO: 1765364 - RNA, 19 nt, Artificial Sequence
  Description of Artificial Sequence: Synthetic oligonucleotide
  Antisense strand to SEQ ID NO: 1765363
uauacaagaacccaggugg

SEQ ID NO: 1765365 - RNA, 19 nt, Artificial Sequence
  Description of Artificial Sequence: Synthetic oligonucleotide
  Sense strand starting at position 3749 of SEQ ID NO: 1562686
uggguucuuguauaacuca

SEQ ID NO: 1765366 - RNA, 19 nt, Artificial Sequence
  Description of Artificial Sequence: Synthetic oligonucleotide
  Antisense strand to SEQ ID NO: 1765365
ugaguuauacaagaaccca

SEQ ID NO: 1765367 - RNA, 19 nt, Artificial Sequence
  Description of Artificial Sequence: Synthetic oligonucleotide
  Sense strand starting at position 3757 of SEQ ID NO: 1562686
uguauaacucaugguucuu

SEQ ID NO: 1765368 - RNA, 19 nt, Artificial Sequence
  Description of Artificial Sequence: Synthetic oligonucleotide
  Antisense strand to SEQ ID NO: 1765367
aagaaccaugaguuauaca

SEQ ID NO: 1765369 - RNA, 19 nt, Artificial Sequence
  Description of Artificial Sequence: Synthetic oligonucleotide
  Sense strand starting at position 120 of SEQ ID NO: 1562687
ugaaucaacagaugcguaa

SEQ ID NO: 1765370 - RNA, 19 nt, Artificial Sequence
  Description of Artificial Sequence: Synthetic oligonucleotide
  Antisense strand to SEQ ID NO: 1765369
uuacgcaucuguugauuca

SEQ ID NO: 1765371 - RNA, 19 nt, Artificial Sequence
  Description of Artificial Sequence: Synthetic oligonucleotide
  Sense strand starting at position 133 of SEQ ID NO: 1562687
gcguaacccagugauacag

SEQ ID NO: 1765372 - RNA, 19 nt, Artificial Sequence
  Description of Artificial Sequence: Synthetic oligonucleotide
  Antisense strand to SEQ ID NO: 1765371
cuguaucacuggguuacgc

SEQ ID NO: 1765373 - RNA, 19 nt, Artificial Sequence
  Description of Artificial Sequence: Synthetic oligonucleotide
  Sense strand starting at position 159 of SEQ ID NO: 1562687
acuguauuauuccucugua

SEQ ID NO: 1765374 - RNA, 19 nt, Artificial Sequence
  Description of Artificial Sequence: Synthetic oligonucleotide
  Antisense strand to SEQ ID NO: 1765373
uacagaggaauaauacagu

SEQ ID NO: 1765375 - RNA, 19 nt, Artificial Sequence
  Description of Artificial Sequence: Synthetic oligonucleotide
  Sense strand starting at position 160 of SEQ ID NO: 1562687
cuguauuauuccucuguag

SEQ ID NO: 1765376 - RNA, 19 nt, Artificial Sequence
  Description of Artificial Sequence: Synthetic oligonucleotide
  Antisense strand to SEQ ID NO: 1765375
cuacagaggaauaauacag

SEQ ID NO: 1765377 - RNA, 19 nt, Artificial Sequence
  Description of Artificial Sequence: Synthetic oligonucleotide
  Sense strand starting at position 462 of SEQ ID NO: 1562687
cuacaacuccugggucaaa

SEQ ID NO: 1765378 - RNA, 19 nt, Artificial Sequence
  Description of Artificial Sequence: Synthetic oligonucleotide
  Antisense strand to SEQ ID NO: 1765377
uuugacccaggaguuguag

SEQ ID NO: 1765379 - RNA, 19 nt, Artificial Sequence
  Description of Artificial Sequence: Synthetic oligonucleotide
  Sense strand starting at position 592 of SEQ ID NO: 1562687
guggcucaagaauaucuuu

SEQ ID NO: 1765380 - RNA, 19 nt, Artificial Sequence
  Description of Artificial Sequence: Synthetic oligonucleotide
  Antisense strand to SEQ ID NO: 1765379
aaagauauucuugagccac

SEQ ID NO: 1765381 - RNA, 19 nt, Artificial Sequence
  Description of Artificial Sequence: Synthetic oligonucleotide
  Sense strand starting at position 625 of SEQ ID NO: 1562687
cuuuaacucggucacagaa

SEQ ID NO: 1765382 - RNA, 19 nt, Artificial Sequence
  Description of Artificial Sequence: Synthetic oligonucleotide
  Antisense strand to SEQ ID NO: 1765381
uucugugaccgaguuaaag

SEQ ID NO: 1765383 - RNA, 19 nt, Artificial Sequence
  Description of Artificial Sequence: Synthetic oligonucleotide
  Sense strand starting at position 712 of SEQ ID NO: 1562687
gagguugccaacuggagau

SEQ ID NO: 1765384 - RNA, 19 nt, Artificial Sequence
  Description of Artificial Sequence: Synthetic oligonucleotide
  Antisense strand to SEQ ID NO: 1765383
aucuccaguuggcaaccuc

SEQ ID NO: 1765385 - RNA, 19 nt, Artificial Sequence
  Description of Artificial Sequence: Synthetic oligonucleotide
  Sense strand starting at position 778 of SEQ ID NO: 1562687
gaaagcagaugucuagaca

SEQ ID NO: 1765386 - RNA, 19 nt, Artificial Sequence
  Description of Artificial Sequence: Synthetic oligonucleotide
  Antisense strand to SEQ ID NO: 1765385
ugucuagacaucugcuuuc

SEQ ID NO: 1765387 - RNA, 19 nt, Artificial Sequence
  Description of Artificial Sequence: Synthetic oligonucleotide
  Sense strand starting at position 789 of SEQ ID NO: 1562687
ucuagacauccaggccaau

SEQ ID NO: 1765388 - RNA, 19 nt, Artificial Sequence
  Description of Artificial Sequence: Synthetic oligonucleotide
  Antisense strand to SEQ ID NO: 1765387
auuggccuggaugucuaga

SEQ ID NO: 1765389 - RNA, 19 nt, Artificial Sequence
  Description of Artificial Sequence: Synthetic oligonucleotide
  Sense strand starting at position 1238 of SEQ ID NO: 1562687
gcggcagucccacauggau

SEQ ID NO: 1765390 - RNA, 19 nt, Artificial Sequence
  Description of Artificial Sequence: Synthetic oligonucleotide
  Antisense strand to SEQ ID NO: 1765389
auccaugugggacugccgc

SEQ ID NO: 1765391 - RNA, 19 nt, Artificial Sequence
  Description of Artificial Sequence: Synthetic oligonucleotide
  Sense strand starting at position 1292 of SEQ ID NO: 1562687
gcuagcuccuuggugagaa

SEQ ID NO: 1765392 - RNA, 19 nt, Artificial Sequence
  Description of Artificial Sequence: Synthetic oligonucleotide
  Antisense strand to SEQ ID NO: 1765391
uucucaccaaggagcuagc

SEQ ID NO: 1765393 - RNA, 19 nt, Artificial Sequence
  Description of Artificial Sequence: Synthetic oligonucleotide
  Sense strand starting at position 1673 of SEQ ID NO: 1562687
cagagcuuggcgugaggaa

SEQ ID NO: 1765394 - RNA, 19 nt, Artificial Sequence
  Description of Artificial Sequence: Synthetic oligonucleotide
  Antisense strand to SEQ ID NO: 1765393
uuccucacgccaagcucug

SEQ ID NO: 1765395 - RNA, 19 nt, Artificial Sequence
  Description of Artificial Sequence: Synthetic oligonucleotide
  Sense strand starting at position 1674 of SEQ ID NO: 1562687
agagcuuggcgugaggaaa

SEQ ID NO: 1765396 - RNA, 19 nt, Artificial Sequence
  Description of Artificial Sequence: Synthetic oligonucleotide
  Antisense strand to SEQ ID NO: 1765395
uuuccucacgccaagcucu

SEQ ID NO: 1765397 - RNA, 19 nt, Artificial Sequence
  Description of Artificial Sequence: Synthetic oligonucleotide
  Sense strand starting at position 1821 of SEQ ID NO: 1562687
cagguuugcccaggaugga

SEQ ID NO: 1765398 - RNA, 19 nt, Artificial Sequence
  Description of Artificial Sequence: Synthetic oligonucleotide
  Antisense strand to SEQ ID NO: 1765397
uccauccugggcaaaccug

SEQ ID NO: 1765399 - RNA, 19 nt, Artificial Sequence
  Description of Artificial Sequence: Synthetic oligonucleotide
  Sense strand starting at position 1892 of SEQ ID NO: 1562687
ggcaaauucguguccagcu

SEQ ID NO: 1765400 - RNA, 19 nt, Artificial Sequence
  Description of Artificial Sequence: Synthetic oligonucleotide
  Antisense strand to SEQ ID NO: 1765399
agcuggacacgaauuugcc

SEQ ID NO: 1765401 - RNA, 19 nt, Artificial Sequence
  Description of Artificial Sequence: Synthetic oligonucleotide
  Sense strand starting at position 1943 of SEQ ID NO: 1562687
acagcucuggcggaagaaa

SEQ ID NO: 1765402 - RNA, 19 nt, Artificial Sequence
  Description of Artificial Sequence: Synthetic oligonucleotide
  Antisense strand to SEQ ID NO: 1765401
uuucuuccgccagagcugu

SEQ ID NO: 1765403 - RNA, 19 nt, Artificial Sequence
  Description of Artificial Sequence: Synthetic oligonucleotide
  Sense strand starting at position 2024 of SEQ ID NO: 1562687
uucucauuggcuggacaga

SEQ ID NO: 1765404 - RNA, 19 nt, Artificial Sequence
  Description of Artificial Sequence: Synthetic oligonucleotide
  Antisense strand to SEQ ID NO: 1765403
ucuguccagccaaugagaa

SEQ ID NO: 1765405 - RNA, 19 nt, Artificial Sequence
  Description of Artificial Sequence: Synthetic oligonucleotide
  Sense strand starting at position 2099 of SEQ ID NO: 1562687
ucacgugugccggcugauu

SEQ ID NO: 1765406 - RNA, 19 nt, Artificial Sequence
  Description of Artificial Sequence: Synthetic oligonucleotide
  Antisense strand to SEQ ID NO: 1765405
aaucagccggcacacguga

SEQ ID NO: 1765407 - RNA, 19 nt, Artificial Sequence
  Description of Artificial Sequence: Synthetic oligonucleotide
  Sense strand starting at position 2263 of SEQ ID NO: 1562687
gguuccuagcccuauuaga

SEQ ID NO: 1765408 - RNA, 19 nt, Artificial Sequence
  Description of Artificial Sequence: Synthetic oligonucleotide
  Antisense strand to SEQ ID NO: 1765407
ucuaauagggcuaggaacc

SEQ ID NO: 1765409 - RNA, 19 nt, Artificial Sequence
  Description of Artificial Sequence: Synthetic oligonucleotide
  Sense strand starting at position 2270 of SEQ ID NO: 1562687
agcccuauuagaggucuga

SEQ ID NO: 1765410 - RNA, 19 nt, Artificial Sequence
  Description of Artificial Sequence: Synthetic oligonucleotide
  Antisense strand to SEQ ID NO: 1765409
ucagaccucuaauagggcu

SEQ ID NO: 1765411 - RNA, 19 nt, Artificial Sequence
  Description of Artificial Sequence: Synthetic oligonucleotide
  Sense strand starting at position 2274 of SEQ ID NO: 1562687
cuauuagaggucugaacac

SEQ ID NO: 1765412 - RNA, 19 nt, Artificial Sequence
  Description of Artificial Sequence: Synthetic oligonucleotide
  Antisense strand to SEQ ID NO: 1765411
guguucagaccucuaauag

SEQ ID NO: 1765413 - RNA, 19 nt, Artificial Sequence
  Description of Artificial Sequence: Synthetic oligonucleotide
  Sense strand starting at position 2451 of SEQ ID NO: 1562687
gcagucaggagaugugguu

SEQ ID NO: 1765414 - RNA, 19 nt, Artificial Sequence
  Description of Artificial Sequence: Synthetic oligonucleotide
  Antisense strand to SEQ ID NO: 1765413
aaccacaucuccugacugc

SEQ ID NO: 1765415 - RNA, 19 nt, Artificial Sequence
  Description of Artificial Sequence: Synthetic oligonucleotide
  Sense strand starting at position 2529 of SEQ ID NO: 1562687
auugacaucugccugugua

SEQ ID NO: 1765416 - RNA, 19 nt, Artificial Sequence
  Description of Artificial Sequence: Synthetic oligonucleotide
  Antisense strand to SEQ ID NO: 1765415
uacacaggcagaugucaau

SEQ ID NO: 1765417 - RNA, 19 nt, Artificial Sequence
  Description of Artificial Sequence: Synthetic oligonucleotide
  Sense strand starting at position 2923 of SEQ ID NO: 1562687
ucuguuggcguggcuuaaa

SEQ ID NO: 1765418 - RNA, 19 nt, Artificial Sequence
  Description of Artificial Sequence: Synthetic oligonucleotide
  Antisense strand to SEQ ID NO: 1765417
uuuaagccacgccaacaga

SEQ ID NO: 1765419 - RNA, 19 nt, Artificial Sequence
  Description of Artificial Sequence: Synthetic oligonucleotide
  Sense strand starting at position 2932 of SEQ ID NO: 1562687
guggcuuaaacaugagugu

SEQ ID NO: 1765420 - RNA, 19 nt, Artificial Sequence
  Description of Artificial Sequence: Synthetic oligonucleotide
  Antisense strand to SEQ ID NO: 1765419
acacucauguuuaagccac

SEQ ID NO: 1765421 - RNA, 19 nt, Artificial Sequence
  Description of Artificial Sequence: Synthetic oligonucleotide
  Sense strand starting at position 2997 of SEQ ID NO: 1562687
gaaguuguggucgagcaau

SEQ ID NO: 1765422 - RNA, 19 nt, Artificial Sequence
  Description of Artificial Sequence: Synthetic oligonucleotide
  Antisense strand to SEQ ID NO: 1765421
auugcucgaccacaacuuc

SEQ ID NO: 1765423 - RNA, 19 nt, Artificial Sequence
  Description of Artificial Sequence: Synthetic oligonucleotide
  Sense strand starting at position 2999 of SEQ ID NO: 1562687
aguuguggucgagcaaugu

SEQ ID NO: 1765424 - RNA, 19 nt, Artificial Sequence
  Description of Artificial Sequence: Synthetic oligonucleotide
  Antisense strand to SEQ ID NO: 1765423
acauugcucgaccacaacu

SEQ ID NO: 1765425 - RNA, 19 nt, Artificial Sequence
  Description of Artificial Sequence: Synthetic oligonucleotide
  Sense strand starting at position 3149 of SEQ ID NO: 1562687
gaagaaaucugggugcugu

SEQ ID NO: 1765426 - RNA, 19 nt, Artificial Sequence
  Description of Artificial Sequence: Synthetic oligonucleotide
  Antisense strand to SEQ ID NO: 1765425
acagcacccagauuucuuc

SEQ ID NO: 1765427 - RNA, 19 nt, Artificial Sequence
  Description of Artificial Sequence: Synthetic oligonucleotide
  Sense strand starting at position 3335 of SEQ ID NO: 1562687
gcaaguuuauauguacaau

SEQ ID NO: 1765428 - RNA, 19 nt, Artificial Sequence
  Description of Artificial Sequence: Synthetic oligonucleotide
  Antisense strand to SEQ ID NO: 1765427
auuguacauauaaacuugc

SEQ ID NO: 1765429 - RNA, 19 nt, Artificial Sequence
  Description of Artificial Sequence: Synthetic oligonucleotide
  Sense strand starting at position 3375 of SEQ ID NO: 1562687
cucuauaagugugcauacu

SEQ ID NO: 1765430 - RNA, 19 nt, Artificial Sequence
  Description of Artificial Sequence: Synthetic oligonucleotide
  Antisense strand to SEQ ID NO: 1765429
aguaugcacacuuauagag

SEQ ID NO: 1765431 - RNA, 19 nt, Artificial Sequence
  Description of Artificial Sequence: Synthetic oligonucleotide
  Sense strand starting at position 3376 of SEQ ID NO: 1562687
ucuauaagugugcauacuu

SEQ ID NO: 1765432 - RNA, 19 nt, Artificial Sequence
  Description of Artificial Sequence: Synthetic oligonucleotide
  Antisense strand to SEQ ID NO: 1765431
aaguaugcacacuuauaga

SEQ ID NO: 1765433 - RNA, 19 nt, Artificial Sequence
  Description of Artificial Sequence: Synthetic oligonucleotide
  Sense strand starting at position 3422 of SEQ ID NO: 1562687
gagucucugucugucauga

SEQ ID NO: 1765434 - RNA, 19 nt, Artificial Sequence
  Description of Artificial Sequence: Synthetic oligonucleotide
  Antisense strand to SEQ ID NO: 1765433
ucaugacagacagagacuc

SEQ ID NO: 1765435 - RNA, 19 nt, Artificial Sequence
  Description of Artificial Sequence: Synthetic oligonucleotide
  Sense strand starting at position 3435 of SEQ ID NO: 1562687
ucaugaucuuguccuauua

SEQ ID NO: 1765436 - RNA, 19 nt, Artificial Sequence
  Description of Artificial Sequence: Synthetic oligonucleotide
  Antisense strand to SEQ ID NO: 1765435
uaauaggacaagaucauga

SEQ ID NO: 1765437 - RNA, 19 nt, Artificial Sequence
  Description of Artificial Sequence: Synthetic oligonucleotide
  Sense strand starting at position 3454 of SEQ ID NO: 1562687
gcaguuuguuuauuagaug

SEQ ID NO: 1765438 - RNA, 19 nt, Artificial Sequence
  Description of Artificial Sequence: Synthetic oligonucleotide
  Antisense strand to SEQ ID NO: 1765437
caucuaauaaacaaacugc

SEQ ID NO: 1765439 - RNA, 19 nt, Artificial Sequence
  Description of Artificial Sequence: Synthetic oligonucleotide
  Sense strand starting at position 3466 of SEQ ID NO: 1562687
uuagaugacucagauauca

SEQ ID NO: 1765440 - RNA, 19 nt, Artificial Sequence
  Description of Artificial Sequence: Synthetic oligonucleotide
  Antisense strand to SEQ ID NO: 1765439
ugauaucugagucaucuaa

SEQ ID NO: 1765441 - RNA, 19 nt, Artificial Sequence
  Description of Artificial Sequence: Synthetic oligonucleotide
  Sense strand starting at position 3604 of SEQ ID NO: 1562687
uagagaagacuguggucaa

SEQ ID NO: 1765442 - RNA, 19 nt, Artificial Sequence
  Description of Artificial Sequence: Synthetic oligonucleotide
  Antisense strand to SEQ ID NO: 1765441
uugaccacagucuucucua

SEQ ID NO: 1765443 - RNA, 19 nt, Artificial Sequence
  Description of Artificial Sequence: Synthetic oligonucleotide
  Sense strand starting at position 3608 of SEQ ID NO: 1562687
gaagacuguggucaagguu

SEQ ID NO: 1765444 - RNA, 19 nt, Artificial Sequence
  Description of Artificial Sequence: Synthetic oligonucleotide
  Antisense strand to SEQ ID NO: 1765443
aaccuugaccacagucuuc

SEQ ID NO: 1765445 - RNA, 19 nt, Artificial Sequence
  Description of Artificial Sequence: Synthetic oligonucleotide
  Sense strand starting at position 3611 of SEQ ID NO: 1562687
gacuguggucaagguuaug

SEQ ID NO: 1765446 - RNA, 19 nt, Artificial Sequence
  Description of Artificial Sequence: Synthetic oligonucleotide
  Antisense strand to SEQ ID NO: 1765445
cauaaccuugaccacaguc

SEQ ID NO: 1765447 - RNA, 19 nt, Artificial Sequence
  Description of Artificial Sequence: Synthetic oligonucleotide
  Sense strand starting at position 3779 of SEQ ID NO: 1562687
acaucuuuccaccagguca

SEQ ID NO: 1765448 - RNA, 19 nt, Artificial Sequence
  Description of Artificial Sequence: Synthetic oligonucleotide
  Antisense strand to SEQ ID NO: 1765447
ugaccugguggaaagaugu

SEQ ID NO: 1765449 - RNA, 19 nt, Artificial Sequence
  Description of Artificial Sequence: Synthetic oligonucleotide
  Sense strand starting at position 127 of SEQ ID NO: 1562688
cgggaauguguguaugaau

SEQ ID NO: 1765450 - RNA, 19 nt, Artificial Sequence
  Description of Artificial Sequence: Synthetic oligonucleotide
  Antisense strand to SEQ ID NO: 1765449
auucauacacacauucccg

SEQ ID NO: 1765451 - RNA, 19 nt, Artificial Sequence
  Description of Artificial Sequence: Synthetic oligonucleotide
  Sense strand starting at position 140 of SEQ ID NO: 1562688
augaauccucccuggaauc

SEQ ID NO: 1765452 - RNA, 19 nt, Artificial Sequence
  Description of Artificial Sequence: Synthetic oligonucleotide
  Antisense strand to SEQ ID NO: 1765451
gauuccagggaggauucau

SEQ ID NO: 1765453 - RNA, 19 nt, Artificial Sequence
  Description of Artificial Sequence: Synthetic oligonucleotide
  Sense strand starting at position 150 of SEQ ID NO: 1562688
ccuggaaucugguuacagu

SEQ ID NO: 1765454 - RNA, 19 nt, Artificial Sequence
  Description of Artificial Sequence: Synthetic oligonucleotide
  Antisense strand to SEQ ID NO: 1765453
acuguaaccagauuccagg

SEQ ID NO: 1765455 - RNA, 19 nt, Artificial Sequence
  Description of Artificial Sequence: Synthetic oligonucleotide
  Sense strand starting at position 151 of SEQ ID NO: 1562688
cuggaaucugguuacaguu

SEQ ID NO: 1765456 - RNA, 19 nt, Artificial Sequence
  Description of Artificial Sequence: Synthetic oligonucleotide
  Antisense strand to SEQ ID NO: 1765455
aacuguaaccagauuccag

SEQ ID NO: 1765457 - RNA, 19 nt, Artificial Sequence
  Description of Artificial Sequence: Synthetic oligonucleotide
  Sense strand starting at position 412 of SEQ ID NO: 1562688
uccuuauugcccgauggau

SEQ ID NO: 1765458 - RNA, 19 nt, Artificial Sequence
  Description of Artificial Sequence: Synthetic oligonucleotide
  Antisense strand to SEQ ID NO: 1765457
auccaucgggcaauaagga

SEQ ID NO: 1765459 - RNA, 19 nt, Artificial Sequence
  Description of Artificial Sequence: Synthetic oligonucleotide
  Sense strand starting at position 466 of SEQ ID NO: 1562688
gcgugucuaccuguuucau

SEQ ID NO: 1765460 - RNA, 19 nt, Artificial Sequence
  Description of Artificial Sequence: Synthetic oligonucleotide
  Antisense strand to SEQ ID NO: 1765459
augaaacagguagacacgc

SEQ ID NO: 1765461 - RNA, 19 nt, Artificial Sequence
  Description of Artificial Sequence: Synthetic oligonucleotide
  Sense strand starting at position 627 of SEQ ID NO: 1562688
ccuugauuauuacugaagu

SEQ ID NO: 1765462 - RNA, 19 nt, Artificial Sequence
  Description of Artificial Sequence: Synthetic oligonucleotide
  Antisense strand to SEQ ID NO: 1765461
acuucaguaauaaucaagg

SEQ ID NO: 1765463 - RNA, 19 nt, Artificial Sequence
  Description of Artificial Sequence: Synthetic oligonucleotide
  Sense strand starting at position 704 of SEQ ID NO: 1562688
cugauuuccuucgcucauu

SEQ ID NO: 1765464 - RNA, 19 nt, Artificial Sequence
  Description of Artificial Sequence: Synthetic oligonucleotide
  Antisense strand to SEQ ID NO: 1765463
aaugagcgaaggaaaucag

SEQ ID NO: 1765465 - RNA, 19 nt, Artificial Sequence
  Description of Artificial Sequence: Synthetic oligonucleotide
  Sense strand starting at position 1047 of SEQ ID NO: 1562688
ucugauggguuucuaagaa

SEQ ID NO: 1765466 - RNA, 19 nt, Artificial Sequence
  Description of Artificial Sequence: Synthetic oligonucleotide
  Antisense strand to SEQ ID NO: 1765465
uucuuagaaacccaucaga

SEQ ID NO: 1765467 - RNA, 19 nt, Artificial Sequence
  Description of Artificial Sequence: Synthetic oligonucleotide
  Sense strand starting at position 1075 of SEQ ID NO: 1562688
ggacauuacuuccuucuga

SEQ ID NO: 1765468 - RNA, 19 nt, Artificial Sequence
  Description of Artificial Sequence: Synthetic oligonucleotide
  Antisense strand to SEQ ID NO: 1765467
ucagaaggaaguaaugucc

SEQ ID NO: 1765469 - RNA, 19 nt, Artificial Sequence
  Description of Artificial Sequence: Synthetic oligonucleotide
  Sense strand starting at position 1158 of SEQ ID NO: 1562688
aguaaccuuguauauguau

SEQ ID NO: 1765470 - RNA, 19 nt, Artificial Sequence
  Description of Artificial Sequence: Synthetic oligonucleotide
  Antisense strand to SEQ ID NO: 1765469
auacauauacaagguuacu

SEQ ID NO: 1765471 - RNA, 19 nt, Artificial Sequence
  Description of Artificial Sequence: Synthetic oligonucleotide
  Sense strand starting at position 1205 of SEQ ID NO: 1562688
uguucugaggcuuagaaag

SEQ ID NO: 1765472 - RNA, 19 nt, Artificial Sequence
  Description of Artificial Sequence: Synthetic oligonucleotide
  Antisense strand to SEQ ID NO: 1765471
cuuucuaagccucagaaca

SEQ ID NO: 1765473 - RNA, 19 nt, Artificial Sequence
  Description of Artificial Sequence: Synthetic oligonucleotide
  Sense strand starting at position 1249 of SEQ ID NO: 1562688
aacagaucccgugagagua

SEQ ID NO: 1765474 - RNA, 19 nt, Artificial Sequence
  Description of Artificial Sequence: Synthetic oligonucleotide
  Antisense strand to SEQ ID NO: 1765473
uacucucacgggaucuguu

SEQ ID NO: 1765475 - RNA, 19 nt, Artificial Sequence
  Description of Artificial Sequence: Synthetic oligonucleotide
  Sense strand starting at position 1351 of SEQ ID NO: 1562688
ccucgaacucaggaaaugu

SEQ ID NO: 1765476 - RNA, 19 nt, Artificial Sequence
  Description of Artificial Sequence: Synthetic oligonucleotide
  Antisense strand to SEQ ID NO: 1765475
acauuuccugaguucgagg

SEQ ID NO: 1765477 - RNA, 19 nt, Artificial Sequence
  Description of Artificial Sequence: Synthetic oligonucleotide
  Sense strand starting at position 1591 of SEQ ID NO: 1562688
gagguucccggacagucau

SEQ ID NO: 1765478 - RNA, 19 nt, Artificial Sequence
  Description of Artificial Sequence: Synthetic oligonucleotide
  Antisense strand to SEQ ID NO: 1765477
augacuguccgggaaccuc

SEQ ID NO: 1765479 - RNA, 19 nt, Artificial Sequence
  Description of Artificial Sequence: Synthetic oligonucleotide
  Sense strand starting at position 1878 of SEQ ID NO: 1562688
gaaacagagcucugaacga

SEQ ID NO: 1765480 - RNA, 19 nt, Artificial Sequence
  Description of Artificial Sequence: Synthetic oligonucleotide
  Antisense strand to SEQ ID NO: 1765479
ucguucagagcucuguuuc

SEQ ID NO: 1765481 - RNA, 19 nt, Artificial Sequence
  Description of Artificial Sequence: Synthetic oligonucleotide
  Sense strand starting at position 2421 of SEQ ID NO: 1562688
cuacaucuucgccaagaag

SEQ ID NO: 1765482 - RNA, 19 nt, Artificial Sequence
  Description of Artificial Sequence: Synthetic oligonucleotide
  Antisense strand to SEQ ID NO: 1765481
cuucuuggcgaagauguag

SEQ ID NO: 1765483 - RNA, 19 nt, Artificial Sequence
  Description of Artificial Sequence: Synthetic oligonucleotide
  Sense strand starting at position 2693 of SEQ ID NO: 1562688
ccuucugcucuguagggau

SEQ ID NO: 1765484 - RNA, 19 nt, Artificial Sequence
  Description of Artificial Sequence: Synthetic oligonucleotide
  Antisense strand to SEQ ID NO: 1765483
aucccuacagagcagaagg

SEQ ID NO: 1765485 - RNA, 19 nt, Artificial Sequence
  Description of Artificial Sequence: Synthetic oligonucleotide
  Sense strand starting at position 2697 of SEQ ID NO: 1562688
cugcucuguagggauggaa

SEQ ID NO: 1765486 - RNA, 19 nt, Artificial Sequence
  Description of Artificial Sequence: Synthetic oligonucleotide
  Antisense strand to SEQ ID NO: 1765485
uuccaucccuacagagcag

SEQ ID NO: 1765487 - RNA, 19 nt, Artificial Sequence
  Description of Artificial Sequence: Synthetic oligonucleotide
  Sense strand starting at position 2750 of SEQ ID NO: 1562688
guggaaugcacgcauauaa

SEQ ID NO: 1765488 - RNA, 19 nt, Artificial Sequence
  Description of Artificial Sequence: Synthetic oligonucleotide
  Antisense strand to SEQ ID NO: 1765487
uuauaugcgugcauuccac

SEQ ID NO: 1765489 - RNA, 19 nt, Artificial Sequence
  Description of Artificial Sequence: Synthetic oligonucleotide
  Sense strand starting at position 3137 of SEQ ID NO: 1562688
ggaguucuugcagaucaac

SEQ ID NO: 1765490 - RNA, 19 nt, Artificial Sequence
  Description of Artificial Sequence: Synthetic oligonucleotide
  Antisense strand to SEQ ID NO: 1765489
guugaucugcaagaacucc

SEQ ID NO: 1765491 - RNA, 19 nt, Artificial Sequence
  Description of Artificial Sequence: Synthetic oligonucleotide
  Sense strand starting at position 126 of SEQ ID NO: 1562689
cgggaauguguguaugaau

SEQ ID NO: 1765492 - RNA, 19 nt, Artificial Sequence
  Description of Artificial Sequence: Synthetic oligonucleotide
  Antisense strand to SEQ ID NO: 1765491
auucauacacacauucccg

SEQ ID NO: 1765493 - RNA, 19 nt, Artificial Sequence
  Description of Artificial Sequence: Synthetic oligonucleotide
  Sense strand starting at position 139 of SEQ ID NO: 1562689
augaauccucccuggaauc

SEQ ID NO: 1765494 - RNA, 19 nt, Artificial Sequence
  Description of Artificial Sequence: Synthetic oligonucleotide
  Antisense strand to SEQ ID NO: 1765493
gauuccagggaggauucau

SEQ ID NO: 1765495 - RNA, 19 nt, Artificial Sequence
  Description of Artificial Sequence: Synthetic oligonucleotide
  Sense strand starting at position 149 of SEQ ID NO: 1562689
ccuggaaucugguuacagu

SEQ ID NO: 1765496 - RNA, 19 nt, Artificial Sequence
  Description of Artificial Sequence: Synthetic oligonucleotide
  Antisense strand to SEQ ID NO: 1765495
acuguaaccagauuccagg

SEQ ID NO: 1765497 - RNA, 19 nt, Artificial Sequence
  Description of Artificial Sequence: Synthetic oligonucleotide
  Sense strand starting at position 150 of SEQ ID NO: 1562689
cuggaaucugguuacaguu

SEQ ID NO: 1765498 - RNA, 19 nt, Artificial Sequence
  Description of Artificial Sequence: Synthetic oligonucleotide
  Antisense strand to SEQ ID NO: 1765497
aacuguaaccagauuccag

SEQ ID NO: 1765499 - RNA, 19 nt, Artificial Sequence
  Description of Artificial Sequence: Synthetic oligonucleotide
  Sense strand starting at position 391 of SEQ ID NO: 1562689
acaguuaagguguggaaac

SEQ ID NO: 1765500 - RNA, 19 nt, Artificial Sequence
  Description of Artificial Sequence: Synthetic oligonucleotide
  Antisense strand to SEQ ID NO: 1765499
guuuccacaccuuaacugu

SEQ ID NO: 1765501 - RNA, 19 nt, Artificial Sequence
  Description of Artificial Sequence: Synthetic oligonucleotide
  Sense strand starting at position 411 of SEQ ID NO: 1562689
uccuuauugcccgauggau

SEQ ID NO: 1765502 - RNA, 19 nt, Artificial Sequence
  Description of Artificial Sequence: Synthetic oligonucleotide
  Antisense strand to SEQ ID NO: 1765501
auccaucgggcaauaagga

SEQ ID NO: 1765503 - RNA, 19 nt, Artificial Sequence
  Description of Artificial Sequence: Synthetic oligonucleotide
  Sense strand starting at position 465 of SEQ ID NO: 1562689
gcgugucuaccuguuucau

SEQ ID NO: 1765504 - RNA, 19 nt, Artificial Sequence
  Description of Artificial Sequence: Synthetic oligonucleotide
  Antisense strand to SEQ ID NO: 1765503
augaaacagguagacacgc

SEQ ID NO: 1765505 - RNA, 19 nt, Artificial Sequence
  Description of Artificial Sequence: Synthetic oligonucleotide
  Sense strand starting at position 626 of SEQ ID NO: 1562689
ccuugauuauuacugaagu

SEQ ID NO: 1765506 - RNA, 19 nt, Artificial Sequence
  Description of Artificial Sequence: Synthetic oligonucleotide
  Antisense strand to SEQ ID NO: 1765505
acuucaguaauaaucaagg

SEQ ID NO: 1765507 - RNA, 19 nt, Artificial Sequence
  Description of Artificial Sequence: Synthetic oligonucleotide
  Sense strand starting at position 703 of SEQ ID NO: 1562689
cugauuuccuucgcucauu

SEQ ID NO: 1765508 - RNA, 19 nt, Artificial Sequence
  Description of Artificial Sequence: Synthetic oligonucleotide
  Antisense strand to SEQ ID NO: 1765507
aaugagcgaaggaaaucag

SEQ ID NO: 1765509 - RNA, 19 nt, Artificial Sequence
  Description of Artificial Sequence: Synthetic oligonucleotide
  Sense strand starting at position 1046 of SEQ ID NO: 1562689
ucugauggguuucuaagaa

SEQ ID NO: 1765510 - RNA, 19 nt, Artificial Sequence
  Description of Artificial Sequence: Synthetic oligonucleotide
  Antisense strand to SEQ ID NO: 1765509
uucuuagaaacccaucaga

SEQ ID NO: 1765511 - RNA, 19 nt, Artificial Sequence
  Description of Artificial Sequence: Synthetic oligonucleotide
  Sense strand starting at position 1074 of SEQ ID NO: 1562689
ggacauuacuuccuucuga

SEQ ID NO: 1765512 - RNA, 19 nt, Artificial Sequence
  Description of Artificial Sequence: Synthetic oligonucleotide
  Antisense strand to SEQ ID NO: 1765511
ucagaaggaaguaaugucc

SEQ ID NO: 1765513 - RNA, 19 nt, Artificial Sequence
  Description of Artificial Sequence: Synthetic oligonucleotide
  Sense strand starting at position 1157 of SEQ ID NO: 1562689
aguaaccuuguauauguau

SEQ ID NO: 1765514 - RNA, 19 nt, Artificial Sequence
  Description of Artificial Sequence: Synthetic oligonucleotide
  Antisense strand to SEQ ID NO: 1765513
auacauauacaagguuacu

SEQ ID NO: 1765515 - RNA, 19 nt, Artificial Sequence
  Description of Artificial Sequence: Synthetic oligonucleotide
  Sense strand starting at position 1204 of SEQ ID NO: 1562689
uguucugaggcuuagaaag

SEQ ID NO: 1765516 - RNA, 19 nt, Artificial Sequence
  Description of Artificial Sequence: Synthetic oligonucleotide
  Antisense strand to SEQ ID NO: 1765515
cuuucuaagccucagaaca

SEQ ID NO: 1765517 - RNA, 19 nt, Artificial Sequence
  Description of Artificial Sequence: Synthetic oligonucleotide
  Sense strand starting at position 1248 of SEQ ID NO: 1562689
aacagaucccgugagagua

SEQ ID NO: 1765518 - RNA, 19 nt, Artificial Sequence
  Description of Artificial Sequence: Synthetic oligonucleotide
  Antisense strand to SEQ ID NO: 1765517
uacucucacgggaucuguu

SEQ ID NO: 1765519 - RNA, 19 nt, Artificial Sequence
  Description of Artificial Sequence: Synthetic oligonucleotide
  Sense strand starting at position 1350 of SEQ ID NO: 1562689
ccucgaacucaggaaaugu

SEQ ID NO: 1765520 - RNA, 19 nt, Artificial Sequence
  Description of Artificial Sequence: Synthetic oligonucleotide
  Antisense strand to SEQ ID NO: 1765519
acauuuccugaguucgagg

SEQ ID NO: 1765521 - RNA, 19 nt, Artificial Sequence
  Description of Artificial Sequence: Synthetic oligonucleotide
  Sense strand starting at position 1590 of SEQ ID NO: 1562689
gagguucccggacagucau

SEQ ID NO: 1765522 - RNA, 19 nt, Artificial Sequence
  Description of Artificial Sequence: Synthetic oligonucleotide
  Antisense strand to SEQ ID NO: 1765521
augacuguccgggaaccuc

SEQ ID NO: 1765523 - RNA, 19 nt, Artificial Sequence
  Description of Artificial Sequence: Synthetic oligonucleotide
  Sense strand starting at position 1877 of SEQ ID NO: 1562689
gaaacagagcucugaacga

SEQ ID NO: 1765524 - RNA, 19 nt, Artificial Sequence
  Description of Artificial Sequence: Synthetic oligonucleotide
  Antisense strand to SEQ ID NO: 1765523
ucguucagagcucuguuuc

SEQ ID NO: 1765525 - RNA, 19 nt, Artificial Sequence
  Description of Artificial Sequence: Synthetic oligonucleotide
  Sense strand starting at position 2696 of SEQ ID NO: 1562689
cugcucuguagggauggaa

SEQ ID NO: 1765526 - RNA, 19 nt, Artificial Sequence
  Description of Artificial Sequence: Synthetic oligonucleotide
  Antisense strand to SEQ ID NO: 1765525
uuccaucccuacagagcag

SEQ ID NO: 1765527 - RNA, 19 nt, Artificial Sequence
  Description of Artificial Sequence: Synthetic oligonucleotide
  Sense strand starting at position 2749 of SEQ ID NO: 1562689
guggaaugcacgcauauaa

SEQ ID NO: 1765528 - RNA, 19 nt, Artificial Sequence
  Description of Artificial Sequence: Synthetic oligonucleotide
  Antisense strand to SEQ ID NO: 1765527
uuauaugcgugcauuccac

SEQ ID NO: 1765529 - RNA, 19 nt, Artificial Sequence
  Description of Artificial Sequence: Synthetic oligonucleotide
  Sense strand starting at position 42 of SEQ ID NO: 1562690
aggaauaaagucuauacgu

SEQ ID NO: 1765530 - RNA, 19 nt, Artificial Sequence
  Description of Artificial Sequence: Synthetic oligonucleotide
  Antisense strand to SEQ ID NO: 1765529
acguauagacuuuauuccu

SEQ ID NO: 1765531 - RNA, 19 nt, Artificial Sequence
  Description of Artificial Sequence: Synthetic oligonucleotide
  Sense strand starting at position 44 of SEQ ID NO: 1562690
gaauaaagucuauacguau

SEQ ID NO: 1765532 - RNA, 19 nt, Artificial Sequence
  Description of Artificial Sequence: Synthetic oligonucleotide
  Antisense strand to SEQ ID NO: 1765531
auacguauagacuuuauuc

SEQ ID NO: 1765533 - RNA, 19 nt, Artificial Sequence
  Description of Artificial Sequence: Synthetic oligonucleotide
  Sense strand starting at position 121 of SEQ ID NO: 1562690
ugaaucaacagaugcguaa

SEQ ID NO: 1765534 - RNA, 19 nt, Artificial Sequence
  Description of Artificial Sequence: Synthetic oligonucleotide
  Antisense strand to SEQ ID NO: 1765533
uuacgcaucuguugauuca

SEQ ID NO: 1765535 - RNA, 19 nt, Artificial Sequence
  Description of Artificial Sequence: Synthetic oligonucleotide
  Sense strand starting at position 134 of SEQ ID NO: 1562690
gcguaacccagugauacag

SEQ ID NO: 1765536 - RNA, 19 nt, Artificial Sequence
  Description of Artificial Sequence: Synthetic oligonucleotide
  Antisense strand to SEQ ID NO: 1765535
cuguaucacuggguuacgc

SEQ ID NO: 1765537 - RNA, 19 nt, Artificial Sequence
  Description of Artificial Sequence: Synthetic oligonucleotide
  Sense strand starting at position 160 of SEQ ID NO: 1562690
acuguauuauuccucugua

SEQ ID NO: 1765538 - RNA, 19 nt, Artificial Sequence
  Description of Artificial Sequence: Synthetic oligonucleotide
  Antisense strand to SEQ ID NO: 1765537
uacagaggaauaauacagu

SEQ ID NO: 1765539 - RNA, 19 nt, Artificial Sequence
  Description of Artificial Sequence: Synthetic oligonucleotide
  Sense strand starting at position 161 of SEQ ID NO: 1562690
cuguauuauuccucuguag

SEQ ID NO: 1765540 - RNA, 19 nt, Artificial Sequence
  Description of Artificial Sequence: Synthetic oligonucleotide
  Antisense strand to SEQ ID NO: 1765539
cuacagaggaauaauacag

SEQ ID NO: 1765541 - RNA, 19 nt, Artificial Sequence
  Description of Artificial Sequence: Synthetic oligonucleotide
  Sense strand starting at position 463 of SEQ ID NO: 1562690
cuacaacuccugggucaaa

SEQ ID NO: 1765542 - RNA, 19 nt, Artificial Sequence
  Description of Artificial Sequence: Synthetic oligonucleotide
  Antisense strand to SEQ ID NO: 1765541
uuugacccaggaguuguag

SEQ ID NO: 1765543 - RNA, 19 nt, Artificial Sequence
  Description of Artificial Sequence: Synthetic oligonucleotide
  Sense strand starting at position 593 of SEQ ID NO: 1562690
guggcucaagaauaucuuu

SEQ ID NO: 1765544 - RNA, 19 nt, Artificial Sequence
  Description of Artificial Sequence: Synthetic oligonucleotide
  Antisense strand to SEQ ID NO: 1765543
aaagauauucuugagccac

SEQ ID NO: 1765545 - RNA, 19 nt, Artificial Sequence
  Description of Artificial Sequence: Synthetic oligonucleotide
  Sense strand starting at position 626 of SEQ ID NO: 1562690
cuuuaacucggucacagaa

SEQ ID NO: 1765546 - RNA, 19 nt, Artificial Sequence
  Description of Artificial Sequence: Synthetic oligonucleotide
  Antisense strand to SEQ ID NO: 1765545
uucugugaccgaguuaaag

SEQ ID NO: 1765547 - RNA, 19 nt, Artificial Sequence
  Description of Artificial Sequence: Synthetic oligonucleotide
  Sense strand starting at position 713 of SEQ ID NO: 1562690
gagguugccaacuggagau

SEQ ID NO: 1765548 - RNA, 19 nt, Artificial Sequence
  Description of Artificial Sequence: Synthetic oligonucleotide
  Antisense strand to SEQ ID NO: 1765547
aucuccaguuggcaaccuc

SEQ ID NO: 1765549 - RNA, 19 nt, Artificial Sequence
  Description of Artificial Sequence: Synthetic oligonucleotide
  Sense strand starting at position 779 of SEQ ID NO: 1562690
gaaagcagaugucuagaca

SEQ ID NO: 1765550 - RNA, 19 nt, Artificial Sequence
  Description of Artificial Sequence: Synthetic oligonucleotide
  Antisense strand to SEQ ID NO: 1765549
ugucuagacaucugcuuuc

SEQ ID NO: 1765551 - RNA, 19 nt, Artificial Sequence
  Description of Artificial Sequence: Synthetic oligonucleotide
  Sense strand starting at position 790 of SEQ ID NO: 1562690
ucuagacauccaggccaau

SEQ ID NO: 1765552 - RNA, 19 nt, Artificial Sequence
  Description of Artificial Sequence: Synthetic oligonucleotide
  Antisense strand to SEQ ID NO: 1765551
auuggccuggaugucuaga

SEQ ID NO: 1765553 - RNA, 19 nt, Artificial Sequence
  Description of Artificial Sequence: Synthetic oligonucleotide
  Sense strand starting at position 1239 of SEQ ID NO: 1562690
gcggcagucccacauggau

SEQ ID NO: 1765554 - RNA, 19 nt, Artificial Sequence
  Description of Artificial Sequence: Synthetic oligonucleotide
  Antisense strand to SEQ ID NO: 1765553
auccaugugggacugccgc

SEQ ID NO: 1765555 - RNA, 19 nt, Artificial Sequence
  Description of Artificial Sequence: Synthetic oligonucleotide
  Sense strand starting at position 1674 of SEQ ID NO: 1562690
cagagcuuggcgugaggaa

SEQ ID NO: 1765556 - RNA, 19 nt, Artificial Sequence
  Description of Artificial Sequence: Synthetic oligonucleotide
  Antisense strand to SEQ ID NO: 1765555
uuccucacgccaagcucug

SEQ ID NO: 1765557 - RNA, 19 nt, Artificial Sequence
  Description of Artificial Sequence: Synthetic oligonucleotide
  Sense strand starting at position 2025 of SEQ ID NO: 1562690
uucucauuggcuggacaga

SEQ ID NO: 1765558 - RNA, 19 nt, Artificial Sequence
  Description of Artificial Sequence: Synthetic oligonucleotide
  Antisense strand to SEQ ID NO: 1765557
ucuguccagccaaugagaa

SEQ ID NO: 1765559 - RNA, 19 nt, Artificial Sequence
  Description of Artificial Sequence: Synthetic oligonucleotide
  Sense strand starting at position 2100 of SEQ ID NO: 1562690
ucacgugugccggcugauu

SEQ ID NO: 1765560 - RNA, 19 nt, Artificial Sequence
  Description of Artificial Sequence: Synthetic oligonucleotide
  Antisense strand to SEQ ID NO: 1765559
aaucagccggcacacguga

SEQ ID NO: 1765561 - RNA, 19 nt, Artificial Sequence
  Description of Artificial Sequence: Synthetic oligonucleotide
  Sense strand starting at position 2264 of SEQ ID NO: 1562690
gguuccuagcccuauuaga

SEQ ID NO: 1765562 - RNA, 19 nt, Artificial Sequence
  Description of Artificial Sequence: Synthetic oligonucleotide
  Antisense strand to SEQ ID NO: 1765561
ucuaauagggcuaggaacc

SEQ ID NO: 1765563 - RNA, 19 nt, Artificial Sequence
  Description of Artificial Sequence: Synthetic oligonucleotide
  Sense strand starting at position 2271 of SEQ ID NO: 1562690
agcccuauuagaggucuga

SEQ ID NO: 1765564 - RNA, 19 nt, Artificial Sequence
  Description of Artificial Sequence: Synthetic oligonucleotide
  Antisense strand to SEQ ID NO: 1765563
ucagaccucuaauagggcu

SEQ ID NO: 1765565 - RNA, 19 nt, Artificial Sequence
  Description of Artificial Sequence: Synthetic oligonucleotide
  Sense strand starting at position 2275 of SEQ ID NO: 1562690
cuauuagaggucugaacac

SEQ ID NO: 1765566 - RNA, 19 nt, Artificial Sequence
  Description of Artificial Sequence: Synthetic oligonucleotide
  Antisense strand to SEQ ID NO: 1765565
guguucagaccucuaauag

SEQ ID NO: 1765567 - RNA, 19 nt, Artificial Sequence
  Description of Artificial Sequence: Synthetic oligonucleotide
  Sense strand starting at position 2452 of SEQ ID NO: 1562690
gcagucaggagaugugguu

SEQ ID NO: 1765568 - RNA, 19 nt, Artificial Sequence
  Description of Artificial Sequence: Synthetic oligonucleotide
  Antisense strand to SEQ ID NO: 1765567
aaccacaucuccugacugc

SEQ ID NO: 1765569 - RNA, 19 nt, Artificial Sequence
  Description of Artificial Sequence: Synthetic oligonucleotide
  Sense strand starting at position 2530 of SEQ ID NO: 1562690
auugacaucugccugugua

SEQ ID NO: 1765570 - RNA, 19 nt, Artificial Sequence
  Description of Artificial Sequence: Synthetic oligonucleotide
  Antisense strand to SEQ ID NO: 1765569
uacacaggcagaugucaau

SEQ ID NO: 1765571 - RNA, 19 nt, Artificial Sequence
  Description of Artificial Sequence: Synthetic oligonucleotide
  Sense strand starting at position 2924 of SEQ ID NO: 1562690
ucuguuggcguggcuuaaa

SEQ ID NO: 1765572 - RNA, 19 nt, Artificial Sequence
  Description of Artificial Sequence: Synthetic oligonucleotide
  Antisense strand to SEQ ID NO: 1765571
uuuaagccacgccaacaga

SEQ ID NO: 1765573 - RNA, 19 nt, Artificial Sequence
  Description of Artificial Sequence: Synthetic oligonucleotide
  Sense strand starting at position 2933 of SEQ ID NO: 1562690
guggcuuaaacaugagugu

SEQ ID NO: 1765574 - RNA, 19 nt, Artificial Sequence
  Description of Artificial Sequence: Synthetic oligonucleotide
  Antisense strand to SEQ ID NO: 1765573
acacucauguuuaagccac

SEQ ID NO: 1765575 - RNA, 19 nt, Artificial Sequence
  Description of Artificial Sequence: Synthetic oligonucleotide
  Sense strand starting at position 2998 of SEQ ID NO: 1562690
gaaguuguggucgagcaau

SEQ ID NO: 1765576 - RNA, 19 nt, Artificial Sequence
  Description of Artificial Sequence: Synthetic oligonucleotide
  Antisense strand to SEQ ID NO: 1765575
auugcucgaccacaacuuc

SEQ ID NO: 1765577 - RNA, 19 nt, Artificial Sequence
  Description of Artificial Sequence: Synthetic oligonucleotide
  Sense strand starting at position 3000 of SEQ ID NO: 1562690
aguuguggucgagcaaugu

SEQ ID NO: 1765578 - RNA, 19 nt, Artificial Sequence
  Description of Artificial Sequence: Synthetic oligonucleotide
  Antisense strand to SEQ ID NO: 1765577
acauugcucgaccacaacu

SEQ ID NO: 1765579 - RNA, 19 nt, Artificial Sequence
  Description of Artificial Sequence: Synthetic oligonucleotide
  Sense strand starting at position 3149 of SEQ ID NO: 1562690
gaaagaaaucugggugcug

SEQ ID NO: 1765580 - RNA, 19 nt, Artificial Sequence
  Description of Artificial Sequence: Synthetic oligonucleotide
  Antisense strand to SEQ ID NO: 1765579
cagcacccagauuucuuuc

SEQ ID NO: 1765581 - RNA, 19 nt, Artificial Sequence
  Description of Artificial Sequence: Synthetic oligonucleotide
  Sense strand starting at position 3150 of SEQ ID NO: 1562690
aaagaaaucugggugcugu

SEQ ID NO: 1765582 - RNA, 19 nt, Artificial Sequence
  Description of Artificial Sequence: Synthetic oligonucleotide
  Antisense strand to SEQ ID NO: 1765581
acagcacccagauuucuuu

SEQ ID NO: 1765583 - RNA, 19 nt, Artificial Sequence
  Description of Artificial Sequence: Synthetic oligonucleotide
  Sense strand starting at position 3336 of SEQ ID NO: 1562690
gcaaguuuauauguacaau

SEQ ID NO: 1765584 - RNA, 19 nt, Artificial Sequence
  Description of Artificial Sequence: Synthetic oligonucleotide
  Antisense strand to SEQ ID NO: 1765583
auuguacauauaaacuugc

SEQ ID NO: 1765585 - RNA, 19 nt, Artificial Sequence
  Description of Artificial Sequence: Synthetic oligonucleotide
  Sense strand starting at position 3376 of SEQ ID NO: 1562690
cucuauaagugugcauacu

SEQ ID NO: 1765586 - RNA, 19 nt, Artificial Sequence
  Description of Artificial Sequence: Synthetic oligonucleotide
  Antisense strand to SEQ ID NO: 1765585
aguaugcacacuuauagag

SEQ ID NO: 1765587 - RNA, 19 nt, Artificial Sequence
  Description of Artificial Sequence: Synthetic oligonucleotide
  Sense strand starting at position 3377 of SEQ ID NO: 1562690
ucuauaagugugcauacuu

SEQ ID NO: 1765588 - RNA, 19 nt, Artificial Sequence
  Description of Artificial Sequence: Synthetic oligonucleotide
  Antisense strand to SEQ ID NO: 1765587
aaguaugcacacuuauaga

SEQ ID NO: 1765589 - RNA, 19 nt, Artificial Sequence
  Description of Artificial Sequence: Synthetic oligonucleotide
  Sense strand starting at position 3423 of SEQ ID NO: 1562690
gagucucugucugucauga

SEQ ID NO: 1765590 - RNA, 19 nt, Artificial Sequence
  Description of Artificial Sequence: Synthetic oligonucleotide
  Antisense strand to SEQ ID NO: 1765589
ucaugacagacagagacuc

SEQ ID NO: 1765591 - RNA, 19 nt, Artificial Sequence
  Description of Artificial Sequence: Synthetic oligonucleotide
  Sense strand starting at position 3436 of SEQ ID NO: 1562690
ucaugaucuuguccuauua

SEQ ID NO: 1765592 - RNA, 19 nt, Artificial Sequence
  Description of Artificial Sequence: Synthetic oligonucleotide
  Antisense strand to SEQ ID NO: 1765591
uaauaggacaagaucauga

SEQ ID NO: 1765593 - RNA, 19 nt, Artificial Sequence
  Description of Artificial Sequence: Synthetic oligonucleotide
  Sense strand starting at position 3455 of SEQ ID NO: 1562690
gcaguuuguuuauuagaug

SEQ ID NO: 1765594 - RNA, 19 nt, Artificial Sequence
  Description of Artificial Sequence: Synthetic oligonucleotide
  Antisense strand to SEQ ID NO: 1765593
caucuaauaaacaaacugc

SEQ ID NO: 1765595 - RNA, 19 nt, Artificial Sequence
  Description of Artificial Sequence: Synthetic oligonucleotide
  Sense strand starting at position 3467 of SEQ ID NO: 1562690
uuagaugacucagauauca

SEQ ID NO: 1765596 - RNA, 19 nt, Artificial Sequence
  Description of Artificial Sequence: Synthetic oligonucleotide
  Antisense strand to SEQ ID NO: 1765595
ugauaucugagucaucuaa

SEQ ID NO: 1765597 - RNA, 19 nt, Artificial Sequence
  Description of Artificial Sequence: Synthetic oligonucleotide
  Sense strand starting at position 3605 of SEQ ID NO: 1562690
uagagaagacuguggucaa

SEQ ID NO: 1765598 - RNA, 19 nt, Artificial Sequence
  Description of Artificial Sequence: Synthetic oligonucleotide
  Antisense strand to SEQ ID NO: 1765597
uugaccacagucuucucua

SEQ ID NO: 1765599 - RNA, 19 nt, Artificial Sequence
  Description of Artificial Sequence: Synthetic oligonucleotide
  Sense strand starting at position 3608 of SEQ ID NO: 1562690
agaagacuguggucaaggu

SEQ ID NO: 1765600 - RNA, 19 nt, Artificial Sequence
  Description of Artificial Sequence: Synthetic oligonucleotide
  Antisense strand to SEQ ID NO: 1765599
accuugaccacagucuucu

SEQ ID NO: 1765601 - RNA, 19 nt, Artificial Sequence
  Description of Artificial Sequence: Synthetic oligonucleotide
  Sense strand starting at position 3609 of SEQ ID NO: 1562690
gaagacuguggucaagguu

SEQ ID NO: 1765602 - RNA, 19 nt, Artificial Sequence
  Description of Artificial Sequence: Synthetic oligonucleotide
  Antisense strand to SEQ ID NO: 1765601
aaccuugaccacagucuuc

SEQ ID NO: 1765603 - RNA, 19 nt, Artificial Sequence
  Description of Artificial Sequence: Synthetic oligonucleotide
  Sense strand starting at position 3612 of SEQ ID NO: 1562690
gacuguggucaagguuaug

SEQ ID NO: 1765604 - RNA, 19 nt, Artificial Sequence
  Description of Artificial Sequence: Synthetic oligonucleotide
  Antisense strand to SEQ ID NO: 1765603
cauaaccuugaccacaguc

SEQ ID NO: 1765605 - RNA, 19 nt, Artificial Sequence
  Description of Artificial Sequence: Synthetic oligonucleotide
  Sense strand starting at position 3780 of SEQ ID NO: 1562690
acaucuuuccaccagguca

SEQ ID NO: 1765606 - RNA, 19 nt, Artificial Sequence
  Description of Artificial Sequence: Synthetic oligonucleotide
  Antisense strand to SEQ ID NO: 1765605
ugaccugguggaaagaugu

SEQ ID NO: 1765607 - RNA, 19 nt, Artificial Sequence
  Description of Artificial Sequence: Synthetic oligonucleotide
  Sense strand starting at position 3908 of SEQ ID NO: 1562690
ggaagucucccuggagaag

SEQ ID NO: 1765608 - RNA, 19 nt, Artificial Sequence
  Description of Artificial Sequence: Synthetic oligonucleotide
  Antisense strand to SEQ ID NO: 1765607
cuucuccagggagacuucc

SEQ ID NO: 1765609 - RNA, 19 nt, Artificial Sequence
  Description of Artificial Sequence: Synthetic oligonucleotide
  Sense strand starting at position 87 of SEQ ID NO: 1562691
ggcauuacagucuagggua

SEQ ID NO: 1765610 - RNA, 19 nt, Artificial Sequence
  Description of Artificial Sequence: Synthetic oligonucleotide
  Antisense strand to SEQ ID NO: 1765609
uacccuagacuguaaugcc

SEQ ID NO: 1765611 - RNA, 19 nt, Artificial Sequence
  Description of Artificial Sequence: Synthetic oligonucleotide
  Sense strand starting at position 89 of SEQ ID NO: 1562691
cauuacagucuaggguaua

SEQ ID NO: 1765612 - RNA, 19 nt, Artificial Sequence
  Description of Artificial Sequence: Synthetic oligonucleotide
  Antisense strand to SEQ ID NO: 1765611
uauacccuagacuguaaug

SEQ ID NO: 1765613 - RNA, 19 nt, Artificial Sequence
  Description of Artificial Sequence: Synthetic oligonucleotide
  Sense strand starting at position 316 of SEQ ID NO: 1562691
aacugaagugcuugagacu

SEQ ID NO: 1765614 - RNA, 19 nt, Artificial Sequence
  Description of Artificial Sequence: Synthetic oligonucleotide
  Antisense strand to SEQ ID NO: 1765613
agucucaagcacuucaguu

SEQ ID NO: 1765615 - RNA, 19 nt, Artificial Sequence
  Description of Artificial Sequence: Synthetic oligonucleotide
  Sense strand starting at position 317 of SEQ ID NO: 1562691
acugaagugcuugagacua

SEQ ID NO: 1765616 - RNA, 19 nt, Artificial Sequence
  Description of Artificial Sequence: Synthetic oligonucleotide
  Antisense strand to SEQ ID NO: 1765615
uagucucaagcacuucagu

SEQ ID NO: 1765617 - RNA, 19 nt, Artificial Sequence
  Description of Artificial Sequence: Synthetic oligonucleotide
  Sense strand starting at position 322 of SEQ ID NO: 1562691
agugcuugagacuaguaaa

SEQ ID NO: 1765618 - RNA, 19 nt, Artificial Sequence
  Description of Artificial Sequence: Synthetic oligonucleotide
  Antisense strand to SEQ ID NO: 1765617
uuuacuagucucaagcacu

SEQ ID NO: 1765619 - RNA, 19 nt, Artificial Sequence
  Description of Artificial Sequence: Synthetic oligonucleotide
  Sense strand starting at position 334 of SEQ ID NO: 1562691
uaguaaauccagcaguugu

SEQ ID NO: 1765620 - RNA, 19 nt, Artificial Sequence
  Description of Artificial Sequence: Synthetic oligonucleotide
  Antisense strand to SEQ ID NO: 1765619
acaacugcuggauuuacua

SEQ ID NO: 1765621 - RNA, 19 nt, Artificial Sequence
  Description of Artificial Sequence: Synthetic oligonucleotide
  Sense strand starting at position 405 of SEQ ID NO: 1562691
cgccuacuacagugagacu

SEQ ID NO: 1765622 - RNA, 19 nt, Artificial Sequence
  Description of Artificial Sequence: Synthetic oligonucleotide
  Antisense strand to SEQ ID NO: 1765621
agucucacuguaguaggcg

SEQ ID NO: 1765623 - RNA, 19 nt, Artificial Sequence
  Description of Artificial Sequence: Synthetic oligonucleotide
  Sense strand starting at position 510 of SEQ ID NO: 1562691
guaggaucuugaccaaggu

SEQ ID NO: 1765624 - RNA, 19 nt, Artificial Sequence
  Description of Artificial Sequence: Synthetic oligonucleotide
  Antisense strand to SEQ ID NO: 1765623
accuuggucaagauccuac

SEQ ID NO: 1765625 - RNA, 19 nt, Artificial Sequence
  Description of Artificial Sequence: Synthetic oligonucleotide
  Sense strand starting at position 514 of SEQ ID NO: 1562691
gaucuugaccaaggucaca

SEQ ID NO: 1765626 - RNA, 19 nt, Artificial Sequence
  Description of Artificial Sequence: Synthetic oligonucleotide
  Antisense strand to SEQ ID NO: 1765625
ugugaccuuggucaagauc

SEQ ID NO: 1765627 - RNA, 19 nt, Artificial Sequence
  Description of Artificial Sequence: Synthetic oligonucleotide
  Sense strand starting at position 541 of SEQ ID NO: 1562691
uaucaaguggcgucacgua

SEQ ID NO: 1765628 - RNA, 19 nt, Artificial Sequence
  Description of Artificial Sequence: Synthetic oligonucleotide
  Antisense strand to SEQ ID NO: 1765627
uacgugacgccacuugaua

SEQ ID NO: 1765629 - RNA, 19 nt, Artificial Sequence
  Description of Artificial Sequence: Synthetic oligonucleotide
  Sense strand starting at position 884 of SEQ ID NO: 1562691
uuucuagcgaggcagaaua

SEQ ID NO: 1765630 - RNA, 19 nt, Artificial Sequence
  Description of Artificial Sequence: Synthetic oligonucleotide
  Antisense strand to SEQ ID NO: 1765629
uauucugccucgcuagaaa

SEQ ID NO: 1765631 - RNA, 19 nt, Artificial Sequence
  Description of Artificial Sequence: Synthetic oligonucleotide
  Sense strand starting at position 997 of SEQ ID NO: 1562691
ucauuuagauggcaagcaa

SEQ ID NO: 1765632 - RNA, 19 nt, Artificial Sequence
  Description of Artificial Sequence: Synthetic oligonucleotide
  Antisense strand to SEQ ID NO: 1765631
uugcuugccaucuaaauga

SEQ ID NO: 1765633 - RNA, 19 nt, Artificial Sequence
  Description of Artificial Sequence: Synthetic oligonucleotide
  Sense strand starting at position 1036 of SEQ ID NO: 1562691
augcauuuccuccgacuua

SEQ ID NO: 1765634 - RNA, 19 nt, Artificial Sequence
  Description of Artificial Sequence: Synthetic oligonucleotide
  Antisense strand to SEQ ID NO: 1765633
uaagucggaggaaaugcau

SEQ ID NO: 1765635 - RNA, 19 nt, Artificial Sequence
  Description of Artificial Sequence: Synthetic oligonucleotide
  Sense strand starting at position 1090 of SEQ ID NO: 1562691
aaaugagaaguuggucuuu

SEQ ID NO: 1765636 - RNA, 19 nt, Artificial Sequence
  Description of Artificial Sequence: Synthetic oligonucleotide
  Antisense strand to SEQ ID NO: 1765635
aaagaccaacuucucauuu

SEQ ID NO: 1765637 - RNA, 19 nt, Artificial Sequence
  Description of Artificial Sequence: Synthetic oligonucleotide
  Sense strand starting at position 1158 of SEQ ID NO: 1562691
ugccauuucguguaaggcu

SEQ ID NO: 1765638 - RNA, 19 nt, Artificial Sequence
  Description of Artificial Sequence: Synthetic oligonucleotide
  Antisense strand to SEQ ID NO: 1765637
agccuuacacgaaauggca

SEQ ID NO: 1765639 - RNA, 19 nt, Artificial Sequence
  Description of Artificial Sequence: Synthetic oligonucleotide
  Sense strand starting at position 1171 of SEQ ID NO: 1562691
aaggcuuuccugggcugaa

SEQ ID NO: 1765640 - RNA, 19 nt, Artificial Sequence
  Description of Artificial Sequence: Synthetic oligonucleotide
  Antisense strand to SEQ ID NO: 1765639
uucagcccaggaaagccuu

SEQ ID NO: 1765641 - RNA, 19 nt, Artificial Sequence
  Description of Artificial Sequence: Synthetic oligonucleotide
  Sense strand starting at position 1190 of SEQ ID NO: 1562691
guguucucucaggaagauc

SEQ ID NO: 1765642 - RNA, 19 nt, Artificial Sequence
  Description of Artificial Sequence: Synthetic oligonucleotide
  Antisense strand to SEQ ID NO: 1765641
gaucuuccugagagaacac

SEQ ID NO: 1765643 - RNA, 19 nt, Artificial Sequence
  Description of Artificial Sequence: Synthetic oligonucleotide
  Sense strand starting at position 1980 of SEQ ID NO: 1562691
cugagucggcuccaacuua

SEQ ID NO: 1765644 - RNA, 19 nt, Artificial Sequence
  Description of Artificial Sequence: Synthetic oligonucleotide
  Antisense strand to SEQ ID NO: 1765643
uaaguuggagccgacucag

SEQ ID NO: 1765645 - RNA, 19 nt, Artificial Sequence
  Description of Artificial Sequence: Synthetic oligonucleotide
  Sense strand starting at position 2060 of SEQ ID NO: 1562691
gggaacuacggguauucuu

SEQ ID NO: 1765646 - RNA, 19 nt, Artificial Sequence
  Description of Artificial Sequence: Synthetic oligonucleotide
  Antisense strand to SEQ ID NO: 1765645
aagaauacccguaguuccc

SEQ ID NO: 1765647 - RNA, 19 nt, Artificial Sequence
  Description of Artificial Sequence: Synthetic oligonucleotide
  Sense strand starting at position 2067 of SEQ ID NO: 1562691
acggguauucuuggaagca

SEQ ID NO: 1765648 - RNA, 19 nt, Artificial Sequence
  Description of Artificial Sequence: Synthetic oligonucleotide
  Antisense strand to SEQ ID NO: 1765647
ugcuuccaagaauacccgu

SEQ ID NO: 1765649 - RNA, 19 nt, Artificial Sequence
  Description of Artificial Sequence: Synthetic oligonucleotide
  Sense strand starting at position 2264 of SEQ ID NO: 1562691
cgcaguaugcguaacgcau

SEQ ID NO: 1765650 - RNA, 19 nt, Artificial Sequence
  Description of Artificial Sequence: Synthetic oligonucleotide
  Antisense strand to SEQ ID NO: 1765649
augcguuacgcauacugcg

SEQ ID NO: 1765651 - RNA, 19 nt, Artificial Sequence
  Description of Artificial Sequence: Synthetic oligonucleotide
  Sense strand starting at position 2271 of SEQ ID NO: 1562691
ugcguaacgcauucuguuu

SEQ ID NO: 1765652 - RNA, 19 nt, Artificial Sequence
  Description of Artificial Sequence: Synthetic oligonucleotide
  Antisense strand to SEQ ID NO: 1765651
aaacagaaugcguuacgca

SEQ ID NO: 1765653 - RNA, 19 nt, Artificial Sequence
  Description of Artificial Sequence: Synthetic oligonucleotide
  Sense strand starting at position 2272 of SEQ ID NO: 1562691
gcguaacgcauucuguuua

SEQ ID NO: 1765654 - RNA, 19 nt, Artificial Sequence
  Description of Artificial Sequence: Synthetic oligonucleotide
  Antisense strand to SEQ ID NO: 1765653
uaaacagaaugcguuacgc

SEQ ID NO: 1765655 - RNA, 19 nt, Artificial Sequence
  Description of Artificial Sequence: Synthetic oligonucleotide
  Sense strand starting at position 2276 of SEQ ID NO: 1562691
aacgcauucuguuuagaga

SEQ ID NO: 1765656 - RNA, 19 nt, Artificial Sequence
  Description of Artificial Sequence: Synthetic oligonucleotide
  Antisense strand to SEQ ID NO: 1765655
ucucuaaacagaaugcguu

SEQ ID NO: 1765657 - RNA, 19 nt, Artificial Sequence
  Description of Artificial Sequence: Synthetic oligonucleotide
  Sense strand starting at position 2277 of SEQ ID NO: 1562691
acgcauucuguuuagagaa

SEQ ID NO: 1765658 - RNA, 19 nt, Artificial Sequence
  Description of Artificial Sequence: Synthetic oligonucleotide
  Antisense strand to SEQ ID NO: 1765657
uucucuaaacagaaugcgu

SEQ ID NO: 1765659 - RNA, 19 nt, Artificial Sequence
  Description of Artificial Sequence: Synthetic oligonucleotide
  Sense strand starting at position 2348 of SEQ ID NO: 1562691
agaaguugcuuugcagaga

SEQ ID NO: 1765660 - RNA, 19 nt, Artificial Sequence
  Description of Artificial Sequence: Synthetic oligonucleotide
  Antisense strand to SEQ ID NO: 1765659
ucucugcaaagcaacuucu

SEQ ID NO: 1765661 - RNA, 19 nt, Artificial Sequence
  Description of Artificial Sequence: Synthetic oligonucleotide
  Sense strand starting at position 2351 of SEQ ID NO: 1562691
aguugcuuugcagagacaa

SEQ ID NO: 1765662 - RNA, 19 nt, Artificial Sequence
  Description of Artificial Sequence: Synthetic oligonucleotide
  Antisense strand to SEQ ID NO: 1765661
uugucucugcaaagcaacu

SEQ ID NO: 1765663 - RNA, 19 nt, Artificial Sequence
  Description of Artificial Sequence: Synthetic oligonucleotide
  Sense strand starting at position 2379 of SEQ ID NO: 1562691
uccauauuguuaucaaguu

SEQ ID NO: 1765664 - RNA, 19 nt, Artificial Sequence
  Description of Artificial Sequence: Synthetic oligonucleotide
  Antisense strand to SEQ ID NO: 1765663
aacuugauaacaauaugga

SEQ ID NO: 1765665 - RNA, 19 nt, Artificial Sequence
  Description of Artificial Sequence: Synthetic oligonucleotide
  Sense strand starting at position 2440 of SEQ ID NO: 1562691
cguggcuggccuuccuaua

SEQ ID NO: 1765666 - RNA, 19 nt, Artificial Sequence
  Description of Artificial Sequence: Synthetic oligonucleotide
  Antisense strand to SEQ ID NO: 1765665
uauaggaaggccagccacg

SEQ ID NO: 1765667 - RNA, 19 nt, Artificial Sequence
  Description of Artificial Sequence: Synthetic oligonucleotide
  Sense strand starting at position 2615 of SEQ ID NO: 1562691
augucccuuccagguuaaa

SEQ ID NO: 1765668 - RNA, 19 nt, Artificial Sequence
  Description of Artificial Sequence: Synthetic oligonucleotide
  Antisense strand to SEQ ID NO: 1765667
uuuaaccuggaagggacau

SEQ ID NO: 1765669 - RNA, 19 nt, Artificial Sequence
  Description of Artificial Sequence: Synthetic oligonucleotide
  Sense strand starting at position 3133 of SEQ ID NO: 1562691
aagguuucagagcgauggu

SEQ ID NO: 1765670 - RNA, 19 nt, Artificial Sequence
  Description of Artificial Sequence: Synthetic oligonucleotide
  Antisense strand to SEQ ID NO: 1765669
accaucgcucugaaaccuu

SEQ ID NO: 1765671 - RNA, 19 nt, Artificial Sequence
  Description of Artificial Sequence: Synthetic oligonucleotide
  Sense strand starting at position 3142 of SEQ ID NO: 1562691
gagcgauggucuuuagaca

SEQ ID NO: 1765672 - RNA, 19 nt, Artificial Sequence
  Description of Artificial Sequence: Synthetic oligonucleotide
  Antisense strand to SEQ ID NO: 1765671
ugucuaaagaccaucgcuc

SEQ ID NO: 1765673 - RNA, 19 nt, Artificial Sequence
  Description of Artificial Sequence: Synthetic oligonucleotide
  Sense strand starting at position 3204 of SEQ ID NO: 1562691
ccacguucuccgcucaauu

SEQ ID NO: 1765674 - RNA, 19 nt, Artificial Sequence
  Description of Artificial Sequence: Synthetic oligonucleotide
  Antisense strand to SEQ ID NO: 1765673
aauugagcggagaacgugg

SEQ ID NO: 1765675 - RNA, 19 nt, Artificial Sequence
  Description of Artificial Sequence: Synthetic oligonucleotide
  Sense strand starting at position 3213 of SEQ ID NO: 1562691
ccgcucaauuccuuccaga

SEQ ID NO: 1765676 - RNA, 19 nt, Artificial Sequence
  Description of Artificial Sequence: Synthetic oligonucleotide
  Antisense strand to SEQ ID NO: 1765675
ucuggaaggaauugagcgg

SEQ ID NO: 1765677 - RNA, 19 nt, Artificial Sequence
  Description of Artificial Sequence: Synthetic oligonucleotide
  Sense strand starting at position 3406 of SEQ ID NO: 1562691
gggugcugaguguuuguuu

SEQ ID NO: 1765678 - RNA, 19 nt, Artificial Sequence
  Description of Artificial Sequence: Synthetic oligonucleotide
  Antisense strand to SEQ ID NO: 1765677
aaacaaacacucagcaccc

SEQ ID NO: 1765679 - RNA, 19 nt, Artificial Sequence
  Description of Artificial Sequence: Synthetic oligonucleotide
  Sense strand starting at position 3413 of SEQ ID NO: 1562691
gaguguuuguuucccaaau

SEQ ID NO: 1765680 - RNA, 19 nt, Artificial Sequence
  Description of Artificial Sequence: Synthetic oligonucleotide
  Antisense strand to SEQ ID NO: 1765679
auuugggaaacaaacacuc

SEQ ID NO: 1765681 - RNA, 19 nt, Artificial Sequence
  Description of Artificial Sequence: Synthetic oligonucleotide
  Sense strand starting at position 3519 of SEQ ID NO: 1562691
ccaaguacguucuuaacau

SEQ ID NO: 1765682 - RNA, 19 nt, Artificial Sequence
  Description of Artificial Sequence: Synthetic oligonucleotide
  Antisense strand to SEQ ID NO: 1765681
auguuaagaacguacuugg

SEQ ID NO: 1765683 - RNA, 19 nt, Artificial Sequence
  Description of Artificial Sequence: Synthetic oligonucleotide
  Sense strand starting at position 3564 of SEQ ID NO: 1562691
gagacucgccugggucaua

SEQ ID NO: 1765684 - RNA, 19 nt, Artificial Sequence
  Description of Artificial Sequence: Synthetic oligonucleotide
  Antisense strand to SEQ ID NO: 1765683
uaugacccaggcgagucuc

SEQ ID NO: 1765685 - RNA, 19 nt, Artificial Sequence
  Description of Artificial Sequence: Synthetic oligonucleotide
  Sense strand starting at position 3708 of SEQ ID NO: 1562691
cucgcacuuggcuaauauu

SEQ ID NO: 1765686 - RNA, 19 nt, Artificial Sequence
  Description of Artificial Sequence: Synthetic oligonucleotide
  Antisense strand to SEQ ID NO: 1765685
aauauuagccaagugcgag

SEQ ID NO: 1765687 - RNA, 19 nt, Artificial Sequence
  Description of Artificial Sequence: Synthetic oligonucleotide
  Sense strand starting at position 3895 of SEQ ID NO: 1562691
aucucuugccuggaugacu

SEQ ID NO: 1765688 - RNA, 19 nt, Artificial Sequence
  Description of Artificial Sequence: Synthetic oligonucleotide
  Antisense strand to SEQ ID NO: 1765687
agucauccaggcaagagau

SEQ ID NO: 1765689 - RNA, 19 nt, Artificial Sequence
  Description of Artificial Sequence: Synthetic oligonucleotide
  Sense strand starting at position 51 of SEQ ID NO: 1562692
gacucagugaucugcaggu

SEQ ID NO: 1765690 - RNA, 19 nt, Artificial Sequence
  Description of Artificial Sequence: Synthetic oligonucleotide
  Antisense strand to SEQ ID NO: 1765689
accugcagaucacugaguc

SEQ ID NO: 1765691 - RNA, 19 nt, Artificial Sequence
  Description of Artificial Sequence: Synthetic oligonucleotide
  Sense strand starting at position 68 of SEQ ID NO: 1562692
gugcccagaucauugcuau

SEQ ID NO: 1765692 - RNA, 19 nt, Artificial Sequence
  Description of Artificial Sequence: Synthetic oligonucleotide
  Antisense strand to SEQ ID NO: 1765691
auagcaaugaucugggcac

SEQ ID NO: 1765693 - RNA, 19 nt, Artificial Sequence
  Description of Artificial Sequence: Synthetic oligonucleotide
  Sense strand starting at position 71 of SEQ ID NO: 1562692
cccagaucauugcuaugga

SEQ ID NO: 1765694 - RNA, 19 nt, Artificial Sequence
  Description of Artificial Sequence: Synthetic oligonucleotide
  Antisense strand to SEQ ID NO: 1765693
uccauagcaaugaucuggg

SEQ ID NO: 1765695 - RNA, 19 nt, Artificial Sequence
  Description of Artificial Sequence: Synthetic oligonucleotide
  Sense strand starting at position 88 of SEQ ID NO: 1562692
gaggguuucgcucauggac

SEQ ID NO: 1765696 - RNA, 19 nt, Artificial Sequence
  Description of Artificial Sequence: Synthetic oligonucleotide
  Antisense strand to SEQ ID NO: 1765695
guccaugagcgaaacccuc

SEQ ID NO: 1765697 - RNA, 19 nt, Artificial Sequence
  Description of Artificial Sequence: Synthetic oligonucleotide
  Sense strand starting at position 213 of SEQ ID NO: 1562692
uaacuuuccgaauggguuu

SEQ ID NO: 1765698 - RNA, 19 nt, Artificial Sequence
  Description of Artificial Sequence: Synthetic oligonucleotide
  Antisense strand to SEQ ID NO: 1765697
aaacccauucggaaaguua

SEQ ID NO: 1765699 - RNA, 19 nt, Artificial Sequence
  Description of Artificial Sequence: Synthetic oligonucleotide
  Sense strand starting at position 238 of SEQ ID NO: 1562692
auaacacgagaaugucuua

SEQ ID NO: 1765700 - RNA, 19 nt, Artificial Sequence
  Description of Artificial Sequence: Synthetic oligonucleotide
  Antisense strand to SEQ ID NO: 1765699
uaagacauucucguguuau

SEQ ID NO: 1765701 - RNA, 19 nt, Artificial Sequence
  Description of Artificial Sequence: Synthetic oligonucleotide
  Sense strand starting at position 243 of SEQ ID NO: 1562692
acgagaaugucuuaaggaa

SEQ ID NO: 1765702 - RNA, 19 nt, Artificial Sequence
  Description of Artificial Sequence: Synthetic oligonucleotide
  Antisense strand to SEQ ID NO: 1765701
uuccuuaagacauucucgu

SEQ ID NO: 1765703 - RNA, 19 nt, Artificial Sequence
  Description of Artificial Sequence: Synthetic oligonucleotide
  Sense strand starting at position 618 of SEQ ID NO: 1562692
gggcaacaguauugaacua

SEQ ID NO: 1765704 - RNA, 19 nt, Artificial Sequence
  Description of Artificial Sequence: Synthetic oligonucleotide
  Antisense strand to SEQ ID NO: 1765703
uaguucaauacuguugccc

SEQ ID NO: 1765705 - RNA, 19 nt, Artificial Sequence
  Description of Artificial Sequence: Synthetic oligonucleotide
  Sense strand starting at position 749 of SEQ ID NO: 1562692
uccagagagugcuagaguu

SEQ ID NO: 1765706 - RNA, 19 nt, Artificial Sequence
  Description of Artificial Sequence: Synthetic oligonucleotide
  Antisense strand to SEQ ID NO: 1765705
aacucuagcacucucugga

SEQ ID NO: 1765707 - RNA, 19 nt, Artificial Sequence
  Description of Artificial Sequence: Synthetic oligonucleotide
  Sense strand starting at position 751 of SEQ ID NO: 1562692
cagagagugcuagaguuaa

SEQ ID NO: 1765708 - RNA, 19 nt, Artificial Sequence
  Description of Artificial Sequence: Synthetic oligonucleotide
  Antisense strand to SEQ ID NO: 1765707
uuaacucuagcacucucug

SEQ ID NO: 1765709 - RNA, 19 nt, Artificial Sequence
  Description of Artificial Sequence: Synthetic oligonucleotide
  Sense strand starting at position 755 of SEQ ID NO: 1562692
gagugcuagaguuaaugcu

SEQ ID NO: 1765710 - RNA, 19 nt, Artificial Sequence
  Description of Artificial Sequence: Synthetic oligonucleotide
  Antisense strand to SEQ ID NO: 1765709
agcauuaacucuagcacuc

SEQ ID NO: 1765711 - RNA, 19 nt, Artificial Sequence
  Description of Artificial Sequence: Synthetic oligonucleotide
  Sense strand starting at position 780 of SEQ ID NO: 1562692
uuuagaagacuauaugcuu

SEQ ID NO: 1765712 - RNA, 19 nt, Artificial Sequence
  Description of Artificial Sequence: Synthetic oligonucleotide
  Antisense strand to SEQ ID NO: 1765711
aagcauauagucuucuaaa

SEQ ID NO: 1765713 - RNA, 19 nt, Artificial Sequence
  Description of Artificial Sequence: Synthetic oligonucleotide
  Sense strand starting at position 862 of SEQ ID NO: 1562692
ccuggcuuuccugaugaug

SEQ ID NO: 1765714 - RNA, 19 nt, Artificial Sequence
  Description of Artificial Sequence: Synthetic oligonucleotide
  Antisense strand to SEQ ID NO: 1765713
caucaucaggaaagccagg

SEQ ID NO: 1765715 - RNA, 19 nt, Artificial Sequence
  Description of Artificial Sequence: Synthetic oligonucleotide
  Sense strand starting at position 864 of SEQ ID NO: 1562692
uggcuuuccugaugaugau

SEQ ID NO: 1765716 - RNA, 19 nt, Artificial Sequence
  Description of Artificial Sequence: Synthetic oligonucleotide
  Antisense strand to SEQ ID NO: 1765715
aucaucaucaggaaagcca

SEQ ID NO: 1765717 - RNA, 19 nt, Artificial Sequence
  Description of Artificial Sequence: Synthetic oligonucleotide
  Sense strand starting at position 896 of SEQ ID NO: 1562692
cuuggacaccugcgguaau

SEQ ID NO: 1765718 - RNA, 19 nt, Artificial Sequence
  Description of Artificial Sequence: Synthetic oligonucleotide
  Antisense strand to SEQ ID NO: 1765717
auuaccgcagguguccaag

SEQ ID NO: 1765719 - RNA, 19 nt, Artificial Sequence
  Description of Artificial Sequence: Synthetic oligonucleotide
  Sense strand starting at position 897 of SEQ ID NO: 1562692
uuggacaccugcgguaaua

SEQ ID NO: 1765720 - RNA, 19 nt, Artificial Sequence
  Description of Artificial Sequence: Synthetic oligonucleotide
  Antisense strand to SEQ ID NO: 1765719
uauuaccgcagguguccaa

SEQ ID NO: 1765721 - RNA, 19 nt, Artificial Sequence
  Description of Artificial Sequence: Synthetic oligonucleotide
  Sense strand starting at position 899 of SEQ ID NO: 1562692
ggacaccugcgguaauaga

SEQ ID NO: 1765722 - RNA, 19 nt, Artificial Sequence
  Description of Artificial Sequence: Synthetic oligonucleotide
  Antisense strand to SEQ ID NO: 1765721
ucuauuaccgcaggugucc

SEQ ID NO: 1765723 - RNA, 19 nt, Artificial Sequence
  Description of Artificial Sequence: Synthetic oligonucleotide
  Sense strand starting at position 1013 of SEQ ID NO: 1562692
guguguuacacaggacaca

SEQ ID NO: 1765724 - RNA, 19 nt, Artificial Sequence
  Description of Artificial Sequence: Synthetic oligonucleotide
  Antisense strand to SEQ ID NO: 1765723
uguguccuguguaacacac

SEQ ID NO: 1765725 - RNA, 19 nt, Artificial Sequence
  Description of Artificial Sequence: Synthetic oligonucleotide
  Sense strand starting at position 1206 of SEQ ID NO: 1562692
gggucuggaucugaugcua

SEQ ID NO: 1765726 - RNA, 19 nt, Artificial Sequence
  Description of Artificial Sequence: Synthetic oligonucleotide
  Antisense strand to SEQ ID NO: 1765725
uagcaucagauccagaccc

SEQ ID NO: 1765727 - RNA, 19 nt, Artificial Sequence
  Description of Artificial Sequence: Synthetic oligonucleotide
  Sense strand starting at position 1214 of SEQ ID NO: 1562692
aucugaugcuaggugaaca

SEQ ID NO: 1765728 - RNA, 19 nt, Artificial Sequence
  Description of Artificial Sequence: Synthetic oligonucleotide
  Antisense strand to SEQ ID NO: 1765727
uguucaccuagcaucagau

SEQ ID NO: 1765729 - RNA, 19 nt, Artificial Sequence
  Description of Artificial Sequence: Synthetic oligonucleotide
  Sense strand starting at position 1215 of SEQ ID NO: 1562692
ucugaugcuaggugaacaa

SEQ ID NO: 1765730 - RNA, 19 nt, Artificial Sequence
  Description of Artificial Sequence: Synthetic oligonucleotide
  Antisense strand to SEQ ID NO: 1765729
uuguucaccuagcaucaga

SEQ ID NO: 1765731 - RNA, 19 nt, Artificial Sequence
  Description of Artificial Sequence: Synthetic oligonucleotide
  Sense strand starting at position 1309 of SEQ ID NO: 1562692
cagugauggcagcaaagga

SEQ ID NO: 1765732 - RNA, 19 nt, Artificial Sequence
  Description of Artificial Sequence: Synthetic oligonucleotide
  Antisense strand to SEQ ID NO: 1765731
uccuuugcugccaucacug

SEQ ID NO: 1765733 - RNA, 19 nt, Artificial Sequence
  Description of Artificial Sequence: Synthetic oligonucleotide
  Sense strand starting at position 1332 of SEQ ID NO: 1562692
auccgagaccuuuguugca

SEQ ID NO: 1765734 - RNA, 19 nt, Artificial Sequence
  Description of Artificial Sequence: Synthetic oligonucleotide
  Antisense strand to SEQ ID NO: 1765733
ugcaacaaaggucucggau

SEQ ID NO: 1765735 - RNA, 19 nt, Artificial Sequence
  Description of Artificial Sequence: Synthetic oligonucleotide
  Sense strand starting at position 1334 of SEQ ID NO: 1562692
ccgagaccuuuguugcaga

SEQ ID NO: 1765736 - RNA, 19 nt, Artificial Sequence
  Description of Artificial Sequence: Synthetic oligonucleotide
  Antisense strand to SEQ ID NO: 1765735
ucugcaacaaaggucucgg

SEQ ID NO: 1765737 - RNA, 19 nt, Artificial Sequence
  Description of Artificial Sequence: Synthetic oligonucleotide
  Sense strand starting at position 1335 of SEQ ID NO: 1562692
cgagaccuuuguugcagaa

SEQ ID NO: 1765738 - RNA, 19 nt, Artificial Sequence
  Description of Artificial Sequence: Synthetic oligonucleotide
  Antisense strand to SEQ ID NO: 1765737
uucugcaacaaaggucucg

SEQ ID NO: 1765739 - RNA, 19 nt, Artificial Sequence
  Description of Artificial Sequence: Synthetic oligonucleotide
  Sense strand starting at position 1480 of SEQ ID NO: 1562692
ugagacauuuacugggaaa

SEQ ID NO: 1765740 - RNA, 19 nt, Artificial Sequence
  Description of Artificial Sequence: Synthetic oligonucleotide
  Antisense strand to SEQ ID NO: 1765739
uuucccaguaaaugucuca

SEQ ID NO: 1765741 - RNA, 19 nt, Artificial Sequence
  Description of Artificial Sequence: Synthetic oligonucleotide
  Sense strand starting at position 1532 of SEQ ID NO: 1562692
gcuccaucccaaugugaag

SEQ ID NO: 1765742 - RNA, 19 nt, Artificial Sequence
  Description of Artificial Sequence: Synthetic oligonucleotide
  Antisense strand to SEQ ID NO: 1765741
cuucacauugggauggagc

SEQ ID NO: 1765743 - RNA, 19 nt, Artificial Sequence
  Description of Artificial Sequence: Synthetic oligonucleotide
  Sense strand starting at position 2374 of SEQ ID NO: 1562692
gcggaauggcguccucacu

SEQ ID NO: 1765744 - RNA, 19 nt, Artificial Sequence
  Description of Artificial Sequence: Synthetic oligonucleotide
  Antisense strand to SEQ ID NO: 1765743
agugaggacgccauuccgc

SEQ ID NO: 1765745 - RNA, 19 nt, Artificial Sequence
  Description of Artificial Sequence: Synthetic oligonucleotide
  Sense strand starting at position 3022 of SEQ ID NO: 1562692
ccacguguuguucggauca

SEQ ID NO: 1765746 - RNA, 19 nt, Artificial Sequence
  Description of Artificial Sequence: Synthetic oligonucleotide
  Antisense strand to SEQ ID NO: 1765745
ugauccgaacaacacgugg

SEQ ID NO: 1765747 - RNA, 19 nt, Artificial Sequence
  Description of Artificial Sequence: Synthetic oligonucleotide
  Sense strand starting at position 3024 of SEQ ID NO: 1562692
acguguuguucggaucauc

SEQ ID NO: 1765748 - RNA, 19 nt, Artificial Sequence
  Description of Artificial Sequence: Synthetic oligonucleotide
  Antisense strand to SEQ ID NO: 1765747
gaugauccgaacaacacgu

SEQ ID NO: 1765749 - RNA, 19 nt, Artificial Sequence
  Description of Artificial Sequence: Synthetic oligonucleotide
  Sense strand starting at position 3067 of SEQ ID NO: 1562692
cccaucuagguuugucaca

SEQ ID NO: 1765750 - RNA, 19 nt, Artificial Sequence
  Description of Artificial Sequence: Synthetic oligonucleotide
  Antisense strand to SEQ ID NO: 1765749
ugugacaaaccuagauggg

SEQ ID NO: 1765751 - RNA, 19 nt, Artificial Sequence
  Description of Artificial Sequence: Synthetic oligonucleotide
  Sense strand starting at position 3068 of SEQ ID NO: 1562692
ccaucuagguuugucacau

SEQ ID NO: 1765752 - RNA, 19 nt, Artificial Sequence
  Description of Artificial Sequence: Synthetic oligonucleotide
  Antisense strand to SEQ ID NO: 1765751
augugacaaaccuagaugg

SEQ ID NO: 1765753 - RNA, 19 nt, Artificial Sequence
  Description of Artificial Sequence: Synthetic oligonucleotide
  Sense strand starting at position 3072 of SEQ ID NO: 1562692
cuagguuugucacauaaca

SEQ ID NO: 1765754 - RNA, 19 nt, Artificial Sequence
  Description of Artificial Sequence: Synthetic oligonucleotide
  Antisense strand to SEQ ID NO: 1765753
uguuaugugacaaaccuag

SEQ ID NO: 1765755 - RNA, 19 nt, Artificial Sequence
  Description of Artificial Sequence: Synthetic oligonucleotide
  Sense strand starting at position 3731 of SEQ ID NO: 1562692
ccaaauugcugaggcauaa

SEQ ID NO: 1765756 - RNA, 19 nt, Artificial Sequence
  Description of Artificial Sequence: Synthetic oligonucleotide
  Antisense strand to SEQ ID NO: 1765755
uuaugccucagcaauuugg

SEQ ID NO: 1765757 - RNA, 19 nt, Artificial Sequence
  Description of Artificial Sequence: Synthetic oligonucleotide
  Sense strand starting at position 3740 of SEQ ID NO: 1562692
ugaggcauaaccuggguau

SEQ ID NO: 1765758 - RNA, 19 nt, Artificial Sequence
  Description of Artificial Sequence: Synthetic oligonucleotide
  Antisense strand to SEQ ID NO: 1765757
auacccagguuaugccuca

SEQ ID NO: 1765759 - RNA, 19 nt, Artificial Sequence
  Description of Artificial Sequence: Synthetic oligonucleotide
  Sense strand starting at position 3741 of SEQ ID NO: 1562692
gaggcauaaccuggguaua

SEQ ID NO: 1765760 - RNA, 19 nt, Artificial Sequence
  Description of Artificial Sequence: Synthetic oligonucleotide
  Antisense strand to SEQ ID NO: 1765759
uauacccagguuaugccuc

SEQ ID NO: 1765761 - RNA, 19 nt, Artificial Sequence
  Description of Artificial Sequence: Synthetic oligonucleotide
  Sense strand starting at position 3742 of SEQ ID NO: 1562692
aggcauaaccuggguauau

SEQ ID NO: 1765762 - RNA, 19 nt, Artificial Sequence
  Description of Artificial Sequence: Synthetic oligonucleotide
  Antisense strand to SEQ ID NO: 1765761
auauacccagguuaugccu

SEQ ID NO: 1765763 - RNA, 19 nt, Artificial Sequence
  Description of Artificial Sequence: Synthetic oligonucleotide
  Sense strand starting at position 3743 of SEQ ID NO: 1562692
ggcauaaccuggguauaug

SEQ ID NO: 1765764 - RNA, 19 nt, Artificial Sequence
  Description of Artificial Sequence: Synthetic oligonucleotide
  Antisense strand to SEQ ID NO: 1765763
cauauacccagguuaugcc

SEQ ID NO: 1765765 - RNA, 19 nt, Artificial Sequence
  Description of Artificial Sequence: Synthetic oligonucleotide
  Sense strand starting at position 3744 of SEQ ID NO: 1562692
gcauaaccuggguauaugu

SEQ ID NO: 1765766 - RNA, 19 nt, Artificial Sequence
  Description of Artificial Sequence: Synthetic oligonucleotide
  Antisense strand to SEQ ID NO: 1765765
acauauacccagguuaugc

SEQ ID NO: 1765767 - RNA, 19 nt, Artificial Sequence
  Description of Artificial Sequence: Synthetic oligonucleotide
  Sense strand starting at position 3958 of SEQ ID NO: 1562692
gcggucaccugugauccua

SEQ ID NO: 1765768 - RNA, 19 nt, Artificial Sequence
  Description of Artificial Sequence: Synthetic oligonucleotide
  Antisense strand to SEQ ID NO: 1765767
uaggaucacaggugaccgc

SEQ ID NO: 1765769 - RNA, 19 nt, Artificial Sequence
  Description of Artificial Sequence: Synthetic oligonucleotide
  Sense strand starting at position 560 of SEQ ID NO: 1562693
cagaguagauacucagacu

SEQ ID NO: 1765770 - RNA, 19 nt, Artificial Sequence
  Description of Artificial Sequence: Synthetic oligonucleotide
  Antisense strand to SEQ ID NO: 1765769
agucugaguaucuacucug

SEQ ID NO: 1765771 - RNA, 19 nt, Artificial Sequence
  Description of Artificial Sequence: Synthetic oligonucleotide
  Sense strand starting at position 575 of SEQ ID NO: 1562693
gacuauagcucagugcaga

SEQ ID NO: 1765772 - RNA, 19 nt, Artificial Sequence
  Description of Artificial Sequence: Synthetic oligonucleotide
  Antisense strand to SEQ ID NO: 1765771
ucugcacugagcuauaguc

SEQ ID NO: 1765773 - RNA, 19 nt, Artificial Sequence
  Description of Artificial Sequence: Synthetic oligonucleotide
  Sense strand starting at position 576 of SEQ ID NO: 1562693
acuauagcucagugcagaa

SEQ ID NO: 1765774 - RNA, 19 nt, Artificial Sequence
  Description of Artificial Sequence: Synthetic oligonucleotide
  Antisense strand to SEQ ID NO: 1765773
uucugcacugagcuauagu

SEQ ID NO: 1765775 - RNA, 19 nt, Artificial Sequence
  Description of Artificial Sequence: Synthetic oligonucleotide
  Sense strand starting at position 578 of SEQ ID NO: 1562693
uauagcucagugcagaaua

SEQ ID NO: 1765776 - RNA, 19 nt, Artificial Sequence
  Description of Artificial Sequence: Synthetic oligonucleotide
  Antisense strand to SEQ ID NO: 1765775
uauucugcacugagcuaua

SEQ ID NO: 1765777 - RNA, 19 nt, Artificial Sequence
  Description of Artificial Sequence: Synthetic oligonucleotide
  Sense strand starting at position 777 of SEQ ID NO: 1562693
acggaagauuuguaauuaa

SEQ ID NO: 1765778 - RNA, 19 nt, Artificial Sequence
  Description of Artificial Sequence: Synthetic oligonucleotide
  Antisense strand to SEQ ID NO: 1765777
uuaauuacaaaucuuccgu

SEQ ID NO: 1765779 - RNA, 19 nt, Artificial Sequence
  Description of Artificial Sequence: Synthetic oligonucleotide
  Sense strand starting at position 819 of SEQ ID NO: 1562693
guaguaaaccggcagcauu

SEQ ID NO: 1765780 - RNA, 19 nt, Artificial Sequence
  Description of Artificial Sequence: Synthetic oligonucleotide
  Antisense strand to SEQ ID NO: 1765779
aaugcugccgguuuacuac

SEQ ID NO: 1765781 - RNA, 19 nt, Artificial Sequence
  Description of Artificial Sequence: Synthetic oligonucleotide
  Sense strand starting at position 896 of SEQ ID NO: 1562693
auuguuacuguaugacagu

SEQ ID NO: 1765782 - RNA, 19 nt, Artificial Sequence
  Description of Artificial Sequence: Synthetic oligonucleotide
  Antisense strand to SEQ ID NO: 1765781
acugucauacaguaacaau

SEQ ID NO: 1765783 - RNA, 19 nt, Artificial Sequence
  Description of Artificial Sequence: Synthetic oligonucleotide
  Sense strand starting at position 917 of SEQ ID NO: 1562693
cugcuuuagucuguuuagu

SEQ ID NO: 1765784 - RNA, 19 nt, Artificial Sequence
  Description of Artificial Sequence: Synthetic oligonucleotide
  Antisense strand to SEQ ID NO: 1765783
acuaaacagacuaaagcag

SEQ ID NO: 1765785 - RNA, 19 nt, Artificial Sequence
  Description of Artificial Sequence: Synthetic oligonucleotide
  Sense strand starting at position 927 of SEQ ID NO: 1562693
cuguuuagucgccuguuua

SEQ ID NO: 1765786 - RNA, 19 nt, Artificial Sequence
  Description of Artificial Sequence: Synthetic oligonucleotide
  Antisense strand to SEQ ID NO: 1765785
uaaacaggcgacuaaacag

SEQ ID NO: 1765787 - RNA, 19 nt, Artificial Sequence
  Description of Artificial Sequence: Synthetic oligonucleotide
  Sense strand starting at position 938 of SEQ ID NO: 1562693
ccuguuuagccucaauugu

SEQ ID NO: 1765788 - RNA, 19 nt, Artificial Sequence
  Description of Artificial Sequence: Synthetic oligonucleotide
  Antisense strand to SEQ ID NO: 1765787
acaauugaggcuaaacagg

SEQ ID NO: 1765789 - RNA, 19 nt, Artificial Sequence
  Description of Artificial Sequence: Synthetic oligonucleotide
  Sense strand starting at position 960 of SEQ ID NO: 1562693
acgagucaguguguaauuu

SEQ ID NO: 1765790 - RNA, 19 nt, Artificial Sequence
  Description of Artificial Sequence: Synthetic oligonucleotide
  Antisense strand to SEQ ID NO: 1765789
aaauuacacacugacucgu

SEQ ID NO: 1765791 - RNA, 19 nt, Artificial Sequence
  Description of Artificial Sequence: Synthetic oligonucleotide
  Sense strand starting at position 968 of SEQ ID NO: 1562693
guguguaauuucuagguau

SEQ ID NO: 1765792 - RNA, 19 nt, Artificial Sequence
  Description of Artificial Sequence: Synthetic oligonucleotide
  Antisense strand to SEQ ID NO: 1765791
auaccuagaaauuacacac

SEQ ID NO: 1765793 - RNA, 19 nt, Artificial Sequence
  Description of Artificial Sequence: Synthetic oligonucleotide
  Sense strand starting at position 970 of SEQ ID NO: 1562693
guguaauuucuagguauug

SEQ ID NO: 1765794 - RNA, 19 nt, Artificial Sequence
  Description of Artificial Sequence: Synthetic oligonucleotide
  Antisense strand to SEQ ID NO: 1765793
caauaccuagaaauuacac

SEQ ID NO: 1765795 - RNA, 19 nt, Artificial Sequence
  Description of Artificial Sequence: Synthetic oligonucleotide
  Sense strand starting at position 1246 of SEQ ID NO: 1562693
ugguguuccucugcuguga

SEQ ID NO: 1765796 - RNA, 19 nt, Artificial Sequence
  Description of Artificial Sequence: Synthetic oligonucleotide
  Antisense strand to SEQ ID NO: 1765795
ucacagcagaggaacacca

SEQ ID NO: 1765797 - RNA, 19 nt, Artificial Sequence
  Description of Artificial Sequence: Synthetic oligonucleotide
  Sense strand starting at position 1274 of SEQ ID NO: 1562693
aagugacucucggaagaag

SEQ ID NO: 1765798 - RNA, 19 nt, Artificial Sequence
  Description of Artificial Sequence: Synthetic oligonucleotide
  Antisense strand to SEQ ID NO: 1765797
cuucuuccgagagucacuu

SEQ ID NO: 1765799 - RNA, 19 nt, Artificial Sequence
  Description of Artificial Sequence: Synthetic oligonucleotide
  Sense strand starting at position 1288 of SEQ ID NO: 1562693
agaagucacuccuccaguu

SEQ ID NO: 1765800 - RNA, 19 nt, Artificial Sequence
  Description of Artificial Sequence: Synthetic oligonucleotide
  Antisense strand to SEQ ID NO: 1765799
aacuggaggagugacuucu

SEQ ID NO: 1765801 - RNA, 19 nt, Artificial Sequence
  Description of Artificial Sequence: Synthetic oligonucleotide
  Sense strand starting at position 1375 of SEQ ID NO: 1562693
agucaaaccuaggagaaga

SEQ ID NO: 1765802 - RNA, 19 nt, Artificial Sequence
  Description of Artificial Sequence: Synthetic oligonucleotide
  Antisense strand to SEQ ID NO: 1765801
ucuucuccuagguuugacu

SEQ ID NO: 1765803 - RNA, 19 nt, Artificial Sequence
  Description of Artificial Sequence: Synthetic oligonucleotide
  Sense strand starting at position 1519 of SEQ ID NO: 1562693
agaugaugaaagugugacu

SEQ ID NO: 1765804 - RNA, 19 nt, Artificial Sequence
  Description of Artificial Sequence: Synthetic oligonucleotide
  Antisense strand to SEQ ID NO: 1765803
agucacacuuucaucaucu

SEQ ID NO: 1765805 - RNA, 19 nt, Artificial Sequence
  Description of Artificial Sequence: Synthetic oligonucleotide
  Sense strand starting at position 1740 of SEQ ID NO: 1562693
gagagacuuguccaagguc

SEQ ID NO: 1765806 - RNA, 19 nt, Artificial Sequence
  Description of Artificial Sequence: Synthetic oligonucleotide
  Antisense strand to SEQ ID NO: 1765805
gaccuuggacaagucucuc

SEQ ID NO: 1765807 - RNA, 19 nt, Artificial Sequence
  Description of Artificial Sequence: Synthetic oligonucleotide
  Sense strand starting at position 2293 of SEQ ID NO: 1562693
cacagagcuucguuuccga

SEQ ID NO: 1765808 - RNA, 19 nt, Artificial Sequence
  Description of Artificial Sequence: Synthetic oligonucleotide
  Antisense strand to SEQ ID NO: 1765807
ucggaaacgaagcucugug

SEQ ID NO: 1765809 - RNA, 19 nt, Artificial Sequence
  Description of Artificial Sequence: Synthetic oligonucleotide
  Sense strand starting at position 2302 of SEQ ID NO: 1562693
ucguuuccgacucagugau

SEQ ID NO: 1765810 - RNA, 19 nt, Artificial Sequence
  Description of Artificial Sequence: Synthetic oligonucleotide
  Antisense strand to SEQ ID NO: 1765809
aucacugagucggaaacga

SEQ ID NO: 1765811 - RNA, 19 nt, Artificial Sequence
  Description of Artificial Sequence: Synthetic oligonucleotide
  Sense strand starting at position 2332 of SEQ ID NO: 1562693
ggaaacgagauccgucaga

SEQ ID NO: 1765812 - RNA, 19 nt, Artificial Sequence
  Description of Artificial Sequence: Synthetic oligonucleotide
  Antisense strand to SEQ ID NO: 1765811
ucugacggaucucguuucc

SEQ ID NO: 1765813 - RNA, 19 nt, Artificial Sequence
  Description of Artificial Sequence: Synthetic oligonucleotide
  Sense strand starting at position 2361 of SEQ ID NO: 1562693
cuguuauaugaacgagguu

SEQ ID NO: 1765814 - RNA, 19 nt, Artificial Sequence
  Description of Artificial Sequence: Synthetic oligonucleotide
  Antisense strand to SEQ ID NO: 1765813
aaccucguucauauaacag

SEQ ID NO: 1765815 - RNA, 19 nt, Artificial Sequence
  Description of Artificial Sequence: Synthetic oligonucleotide
  Sense strand starting at position 2364 of SEQ ID NO: 1562693
uuauaugaacgagguuaau

SEQ ID NO: 1765816 - RNA, 19 nt, Artificial Sequence
  Description of Artificial Sequence: Synthetic oligonucleotide
  Antisense strand to SEQ ID NO: 1765815
auuaaccucguucauauaa

SEQ ID NO: 1765817 - RNA, 19 nt, Artificial Sequence
  Description of Artificial Sequence: Synthetic oligonucleotide
  Sense strand starting at position 2373 of SEQ ID NO: 1562693
cgagguuaaugacucaugu

SEQ ID NO: 1765818 - RNA, 19 nt, Artificial Sequence
  Description of Artificial Sequence: Synthetic oligonucleotide
  Antisense strand to SEQ ID NO: 1765817
acaugagucauuaaccucg

SEQ ID NO: 1765819 - RNA, 19 nt, Artificial Sequence
  Description of Artificial Sequence: Synthetic oligonucleotide
  Sense strand starting at position 2382 of SEQ ID NO: 1562693
ugacucauguggccucauu

SEQ ID NO: 1765820 - RNA, 19 nt, Artificial Sequence
  Description of Artificial Sequence: Synthetic oligonucleotide
  Antisense strand to SEQ ID NO: 1765819
aaugaggccacaugaguca

SEQ ID NO: 1765821 - RNA, 19 nt, Artificial Sequence
  Description of Artificial Sequence: Synthetic oligonucleotide
  Sense strand starting at position 2422 of SEQ ID NO: 1562693
gagaguuucugggaggacu

SEQ ID NO: 1765822 - RNA, 19 nt, Artificial Sequence
  Description of Artificial Sequence: Synthetic oligonucleotide
  Antisense strand to SEQ ID NO: 1765821
aguccucccagaaacucuc

SEQ ID NO: 1765823 - RNA, 19 nt, Artificial Sequence
  Description of Artificial Sequence: Synthetic oligonucleotide
  Sense strand starting at position 2556 of SEQ ID NO: 1562693
cccucagguuauuaauaag

SEQ ID NO: 1765824 - RNA, 19 nt, Artificial Sequence
  Description of Artificial Sequence: Synthetic oligonucleotide
  Antisense strand to SEQ ID NO: 1765823
cuuauuaauaaccugaggg

SEQ ID NO: 1765825 - RNA, 19 nt, Artificial Sequence
  Description of Artificial Sequence: Synthetic oligonucleotide
  Sense strand starting at position 2787 of SEQ ID NO: 1562693
cgcgucugucaggauaucu

SEQ ID NO: 1765826 - RNA, 19 nt, Artificial Sequence
  Description of Artificial Sequence: Synthetic oligonucleotide
  Antisense strand to SEQ ID NO: 1765825
agauauccugacagacgcg

SEQ ID NO: 1765827 - RNA, 19 nt, Artificial Sequence
  Description of Artificial Sequence: Synthetic oligonucleotide
  Sense strand starting at position 2798 of SEQ ID NO: 1562693
ggauaucuuucucuccaag

SEQ ID NO: 1765828 - RNA, 19 nt, Artificial Sequence
  Description of Artificial Sequence: Synthetic oligonucleotide
  Antisense strand to SEQ ID NO: 1765827
cuuggagagaaagauaucc

SEQ ID NO: 1765829 - RNA, 19 nt, Artificial Sequence
  Description of Artificial Sequence: Synthetic oligonucleotide
  Sense strand starting at position 2997 of SEQ ID NO: 1562693
uaacuagaaucggugucuu

SEQ ID NO: 1765830 - RNA, 19 nt, Artificial Sequence
  Description of Artificial Sequence: Synthetic oligonucleotide
  Antisense strand to SEQ ID NO: 1765829
aagacaccgauucuaguua

SEQ ID NO: 1765831 - RNA, 19 nt, Artificial Sequence
  Description of Artificial Sequence: Synthetic oligonucleotide
  Sense strand starting at position 3114 of SEQ ID NO: 1562693
gugcccauuucuuacggau

SEQ ID NO: 1765832 - RNA, 19 nt, Artificial Sequence
  Description of Artificial Sequence: Synthetic oligonucleotide
  Antisense strand to SEQ ID NO: 1765831
auccguaagaaaugggcac

SEQ ID NO: 1765833 - RNA, 19 nt, Artificial Sequence
  Description of Artificial Sequence: Synthetic oligonucleotide
  Sense strand starting at position 3116 of SEQ ID NO: 1562693
gcccauuucuuacggauuu

SEQ ID NO: 1765834 - RNA, 19 nt, Artificial Sequence
  Description of Artificial Sequence: Synthetic oligonucleotide
  Antisense strand to SEQ ID NO: 1765833
aaauccguaagaaaugggc

SEQ ID NO: 1765835 - RNA, 19 nt, Artificial Sequence
  Description of Artificial Sequence: Synthetic oligonucleotide
  Sense strand starting at position 3164 of SEQ ID NO: 1562693
cauguuacacuguagugaa

SEQ ID NO: 1765836 - RNA, 19 nt, Artificial Sequence
  Description of Artificial Sequence: Synthetic oligonucleotide
  Antisense strand to SEQ ID NO: 1765835
uucacuacaguguaacaug

SEQ ID NO: 1765837 - RNA, 19 nt, Artificial Sequence
  Description of Artificial Sequence: Synthetic oligonucleotide
  Sense strand starting at position 3224 of SEQ ID NO: 1562693
caacguucuuaagcaugga

SEQ ID NO: 1765838 - RNA, 19 nt, Artificial Sequence
  Description of Artificial Sequence: Synthetic oligonucleotide
  Antisense strand to SEQ ID NO: 1765837
uccaugcuuaagaacguug

SEQ ID NO: 1765839 - RNA, 19 nt, Artificial Sequence
  Description of Artificial Sequence: Synthetic oligonucleotide
  Sense strand starting at position 3286 of SEQ ID NO: 1562693
aguguuaaguaauugcaau

SEQ ID NO: 1765840 - RNA, 19 nt, Artificial Sequence
  Description of Artificial Sequence: Synthetic oligonucleotide
  Antisense strand to SEQ ID NO: 1765839
auugcaauuacuuaacacu

SEQ ID NO: 1765841 - RNA, 19 nt, Artificial Sequence
  Description of Artificial Sequence: Synthetic oligonucleotide
  Sense strand starting at position 3763 of SEQ ID NO: 1562693
ggcugaaauuguuuaucuu

SEQ ID NO: 1765842 - RNA, 19 nt, Artificial Sequence
  Description of Artificial Sequence: Synthetic oligonucleotide
  Antisense strand to SEQ ID NO: 1765841
aagauaaacaauuucagcc

SEQ ID NO: 1765843 - RNA, 19 nt, Artificial Sequence
  Description of Artificial Sequence: Synthetic oligonucleotide
  Sense strand starting at position 3764 of SEQ ID NO: 1562693
gcugaaauuguuuaucuug

SEQ ID NO: 1765844 - RNA, 19 nt, Artificial Sequence
  Description of Artificial Sequence: Synthetic oligonucleotide
  Antisense strand to SEQ ID NO: 1765843
caagauaaacaauuucagc

SEQ ID NO: 1765845 - RNA, 19 nt, Artificial Sequence
  Description of Artificial Sequence: Synthetic oligonucleotide
  Sense strand starting at position 3912 of SEQ ID NO: 1562693
gucuuuagcaauggugguu

SEQ ID NO: 1765846 - RNA, 19 nt, Artificial Sequence
  Description of Artificial Sequence: Synthetic oligonucleotide
  Antisense strand to SEQ ID NO: 1765845
aaccaccauugcuaaagac

SEQ ID NO: 1765847 - RNA, 19 nt, Artificial Sequence
  Description of Artificial Sequence: Synthetic oligonucleotide
  Sense strand starting at position 3975 of SEQ ID NO: 1562693
cuucuuagcccucaaggga

SEQ ID NO: 1765848 - RNA, 19 nt, Artificial Sequence
  Description of Artificial Sequence: Synthetic oligonucleotide
  Antisense strand to SEQ ID NO: 1765847
ucccuugagggcuaagaag

SEQ ID NO: 1765849 - RNA, 19 nt, Artificial Sequence
  Description of Artificial Sequence: Synthetic oligonucleotide
  Sense strand starting at position 218 of SEQ ID NO: 1562694
uccagcuguuaguuguauu

SEQ ID NO: 1765850 - RNA, 19 nt, Artificial Sequence
  Description of Artificial Sequence: Synthetic oligonucleotide
  Antisense strand to SEQ ID NO: 1765849
aauacaacuaacagcugga

SEQ ID NO: 1765851 - RNA, 19 nt, Artificial Sequence
  Description of Artificial Sequence: Synthetic oligonucleotide
  Sense strand starting at position 219 of SEQ ID NO: 1562694
ccagcuguuaguuguauuu

SEQ ID NO: 1765852 - RNA, 19 nt, Artificial Sequence
  Description of Artificial Sequence: Synthetic oligonucleotide
  Antisense strand to SEQ ID NO: 1765851
aaauacaacuaacagcugg

SEQ ID NO: 1765853 - RNA, 19 nt, Artificial Sequence
  Description of Artificial Sequence: Synthetic oligonucleotide
  Sense strand starting at position 243 of SEQ ID NO: 1562694
uauagucuugcagaagacu

SEQ ID NO: 1765854 - RNA, 19 nt, Artificial Sequence
  Description of Artificial Sequence: Synthetic oligonucleotide
  Antisense strand to SEQ ID NO: 1765853
agucuucugcaagacuaua

SEQ ID NO: 1765855 - RNA, 19 nt, Artificial Sequence
  Description of Artificial Sequence: Synthetic oligonucleotide
  Sense strand starting at position 305 of SEQ ID NO: 1562694
uguauuuguauacguugua

SEQ ID NO: 1765856 - RNA, 19 nt, Artificial Sequence
  Description of Artificial Sequence: Synthetic oligonucleotide
  Antisense strand to SEQ ID NO: 1765855
uacaacguauacaaauaca

SEQ ID NO: 1765857 - RNA, 19 nt, Artificial Sequence
  Description of Artificial Sequence: Synthetic oligonucleotide
  Sense strand starting at position 306 of SEQ ID NO: 1562694
guauuuguauacguuguau

SEQ ID NO: 1765858 - RNA, 19 nt, Artificial Sequence
  Description of Artificial Sequence: Synthetic oligonucleotide
  Antisense strand to SEQ ID NO: 1765857
auacaacguauacaaauac

SEQ ID NO: 1765859 - RNA, 19 nt, Artificial Sequence
  Description of Artificial Sequence: Synthetic oligonucleotide
  Sense strand starting at position 465 of SEQ ID NO: 1562694
augccuguagccugguaau

SEQ ID NO: 1765860 - RNA, 19 nt, Artificial Sequence
  Description of Artificial Sequence: Synthetic oligonucleotide
  Antisense strand to SEQ ID NO: 1765859
auuaccaggcuacaggcau

SEQ ID NO: 1765861 - RNA, 19 nt, Artificial Sequence
  Description of Artificial Sequence: Synthetic oligonucleotide
  Sense strand starting at position 471 of SEQ ID NO: 1562694
guagccugguaauuacaau

SEQ ID NO: 1765862 - RNA, 19 nt, Artificial Sequence
  Description of Artificial Sequence: Synthetic oligonucleotide
  Antisense strand to SEQ ID NO: 1765861
auuguaauuaccaggcuac

SEQ ID NO: 1765863 - RNA, 19 nt, Artificial Sequence
  Description of Artificial Sequence: Synthetic oligonucleotide
  Sense strand starting at position 556 of SEQ ID NO: 1562694
gccucacaaugcucuauga

SEQ ID NO: 1765864 - RNA, 19 nt, Artificial Sequence
  Description of Artificial Sequence: Synthetic oligonucleotide
  Antisense strand to SEQ ID NO: 1765863
ucauagagcauugugaggc

SEQ ID NO: 1765865 - RNA, 19 nt, Artificial Sequence
  Description of Artificial Sequence: Synthetic oligonucleotide
  Sense strand starting at position 618 of SEQ ID NO: 1562694
ggaggcuuauaccuacaua

SEQ ID NO: 1765866 - RNA, 19 nt, Artificial Sequence
  Description of Artificial Sequence: Synthetic oligonucleotide
  Antisense strand to SEQ ID NO: 1765865
uauguagguauaagccucc

SEQ ID NO: 1765867 - RNA, 19 nt, Artificial Sequence
  Description of Artificial Sequence: Synthetic oligonucleotide
  Sense strand starting at position 621 of SEQ ID NO: 1562694
ggcuuauaccuacauaaug

SEQ ID NO: 1765868 - RNA, 19 nt, Artificial Sequence
  Description of Artificial Sequence: Synthetic oligonucleotide
  Antisense strand to SEQ ID NO: 1765867
cauuauguagguauaagcc

SEQ ID NO: 1765869 - RNA, 19 nt, Artificial Sequence
  Description of Artificial Sequence: Synthetic oligonucleotide
  Sense strand starting at position 1399 of SEQ ID NO: 1562694
cagaguagauacucagacu

SEQ ID NO: 1765870 - RNA, 19 nt, Artificial Sequence
  Description of Artificial Sequence: Synthetic oligonucleotide
  Antisense strand to SEQ ID NO: 1765869
agucugaguaucuacucug

SEQ ID NO: 1765871 - RNA, 19 nt, Artificial Sequence
  Description of Artificial Sequence: Synthetic oligonucleotide
  Sense strand starting at position 1414 of SEQ ID NO: 1562694
gacuauagcucagugcaga

SEQ ID NO: 1765872 - RNA, 19 nt, Artificial Sequence
  Description of Artificial Sequence: Synthetic oligonucleotide
  Antisense strand to SEQ ID NO: 1765871
ucugcacugagcuauaguc

SEQ ID NO: 1765873 - RNA, 19 nt, Artificial Sequence
  Description of Artificial Sequence: Synthetic oligonucleotide
  Sense strand starting at position 1415 of SEQ ID NO: 1562694
acuauagcucagugcagaa

SEQ ID NO: 1765874 - RNA, 19 nt, Artificial Sequence
  Description of Artificial Sequence: Synthetic oligonucleotide
  Antisense strand to SEQ ID NO: 1765873
uucugcacugagcuauagu

SEQ ID NO: 1765875 - RNA, 19 nt, Artificial Sequence
  Description of Artificial Sequence: Synthetic oligonucleotide
  Sense strand starting at position 1417 of SEQ ID NO: 1562694
uauagcucagugcagaaua

SEQ ID NO: 1765876 - RNA, 19 nt, Artificial Sequence
  Description of Artificial Sequence: Synthetic oligonucleotide
  Antisense strand to SEQ ID NO: 1765875
uauucugcacugagcuaua

SEQ ID NO: 1765877 - RNA, 19 nt, Artificial Sequence
  Description of Artificial Sequence: Synthetic oligonucleotide
  Sense strand starting at position 1616 of SEQ ID NO: 1562694
acggaagauuuguaauuaa

SEQ ID NO: 1765878 - RNA, 19 nt, Artificial Sequence
  Description of Artificial Sequence: Synthetic oligonucleotide
  Antisense strand to SEQ ID NO: 1765877
uuaauuacaaaucuuccgu

SEQ ID NO: 1765879 - RNA, 19 nt, Artificial Sequence
  Description of Artificial Sequence: Synthetic oligonucleotide
  Sense strand starting at position 1658 of SEQ ID NO: 1562694
guaguaaaccggcagcauu

SEQ ID NO: 1765880 - RNA, 19 nt, Artificial Sequence
  Description of Artificial Sequence: Synthetic oligonucleotide
  Antisense strand to SEQ ID NO: 1765879
aaugcugccgguuuacuac

SEQ ID NO: 1765881 - RNA, 19 nt, Artificial Sequence
  Description of Artificial Sequence: Synthetic oligonucleotide
  Sense strand starting at position 1735 of SEQ ID NO: 1562694
auuguuacuguaugacagu

SEQ ID NO: 1765882 - RNA, 19 nt, Artificial Sequence
  Description of Artificial Sequence: Synthetic oligonucleotide
  Antisense strand to SEQ ID NO: 1765881
acugucauacaguaacaau

SEQ ID NO: 1765883 - RNA, 19 nt, Artificial Sequence
  Description of Artificial Sequence: Synthetic oligonucleotide
  Sense strand starting at position 1766 of SEQ ID NO: 1562694
cuguuuagucgccuguuua

SEQ ID NO: 1765884 - RNA, 19 nt, Artificial Sequence
  Description of Artificial Sequence: Synthetic oligonucleotide
  Antisense strand to SEQ ID NO: 1765883
uaaacaggcgacuaaacag

SEQ ID NO: 1765885 - RNA, 19 nt, Artificial Sequence
  Description of Artificial Sequence: Synthetic oligonucleotide
  Sense strand starting at position 1777 of SEQ ID NO: 1562694
ccuguuuagccucaauugu

SEQ ID NO: 1765886 - RNA, 19 nt, Artificial Sequence
  Description of Artificial Sequence: Synthetic oligonucleotide
  Antisense strand to SEQ ID NO: 1765885
acaauugaggcuaaacagg

SEQ ID NO: 1765887 - RNA, 19 nt, Artificial Sequence
  Description of Artificial Sequence: Synthetic oligonucleotide
  Sense strand starting at position 1799 of SEQ ID NO: 1562694
acgagucaguguguaauuu

SEQ ID NO: 1765888 - RNA, 19 nt, Artificial Sequence
  Description of Artificial Sequence: Synthetic oligonucleotide
  Antisense strand to SEQ ID NO: 1765887
aaauuacacacugacucgu

SEQ ID NO: 1765889 - RNA, 19 nt, Artificial Sequence
  Description of Artificial Sequence: Synthetic oligonucleotide
  Sense strand starting at position 1807 of SEQ ID NO: 1562694
guguguaauuucuagguau

SEQ ID NO: 1765890 - RNA, 19 nt, Artificial Sequence
  Description of Artificial Sequence: Synthetic oligonucleotide
  Antisense strand to SEQ ID NO: 1765889
auaccuagaaauuacacac

SEQ ID NO: 1765891 - RNA, 19 nt, Artificial Sequence
  Description of Artificial Sequence: Synthetic oligonucleotide
  Sense strand starting at position 1809 of SEQ ID NO: 1562694
guguaauuucuagguauug

SEQ ID NO: 1765892 - RNA, 19 nt, Artificial Sequence
  Description of Artificial Sequence: Synthetic oligonucleotide
  Antisense strand to SEQ ID NO: 1765891
caauaccuagaaauuacac

SEQ ID NO: 1765893 - RNA, 19 nt, Artificial Sequence
  Description of Artificial Sequence: Synthetic oligonucleotide
  Sense strand starting at position 2113 of SEQ ID NO: 1562694
aagugacucucggaagaag

SEQ ID NO: 1765894 - RNA, 19 nt, Artificial Sequence
  Description of Artificial Sequence: Synthetic oligonucleotide
  Antisense strand to SEQ ID NO: 1765893
cuucuuccgagagucacuu

SEQ ID NO: 1765895 - RNA, 19 nt, Artificial Sequence
  Description of Artificial Sequence: Synthetic oligonucleotide
  Sense strand starting at position 2127 of SEQ ID NO: 1562694
agaagucacuccuccaguu

SEQ ID NO: 1765896 - RNA, 19 nt, Artificial Sequence
  Description of Artificial Sequence: Synthetic oligonucleotide
  Antisense strand to SEQ ID NO: 1765895
aacuggaggagugacuucu

SEQ ID NO: 1765897 - RNA, 19 nt, Artificial Sequence
  Description of Artificial Sequence: Synthetic oligonucleotide
  Sense strand starting at position 2214 of SEQ ID NO: 1562694
agucaaaccuaggagaaga

SEQ ID NO: 1765898 - RNA, 19 nt, Artificial Sequence
  Description of Artificial Sequence: Synthetic oligonucleotide
  Antisense strand to SEQ ID NO: 1765897
ucuucuccuagguuugacu

SEQ ID NO: 1765899 - RNA, 19 nt, Artificial Sequence
  Description of Artificial Sequence: Synthetic oligonucleotide
  Sense strand starting at position 2358 of SEQ ID NO: 1562694
agaugaugaaagugugacu

SEQ ID NO: 1765900 - RNA, 19 nt, Artificial Sequence
  Description of Artificial Sequence: Synthetic oligonucleotide
  Antisense strand to SEQ ID NO: 1765899
agucacacuuucaucaucu

SEQ ID NO: 1765901 - RNA, 19 nt, Artificial Sequence
  Description of Artificial Sequence: Synthetic oligonucleotide
  Sense strand starting at position 2579 of SEQ ID NO: 1562694
gagagacuuguccaagguc

SEQ ID NO: 1765902 - RNA, 19 nt, Artificial Sequence
  Description of Artificial Sequence: Synthetic oligonucleotide
  Antisense strand to SEQ ID NO: 1765901
gaccuuggacaagucucuc

SEQ ID NO: 1765903 - RNA, 19 nt, Artificial Sequence
  Description of Artificial Sequence: Synthetic oligonucleotide
  Sense strand starting at position 3132 of SEQ ID NO: 1562694
cacagagcuucguuuccga

SEQ ID NO: 1765904 - RNA, 19 nt, Artificial Sequence
  Description of Artificial Sequence: Synthetic oligonucleotide
  Antisense strand to SEQ ID NO: 1765903
ucggaaacgaagcucugug

SEQ ID NO: 1765905 - RNA, 19 nt, Artificial Sequence
  Description of Artificial Sequence: Synthetic oligonucleotide
  Sense strand starting at position 3141 of SEQ ID NO: 1562694
ucguuuccgacucagugau

SEQ ID NO: 1765906 - RNA, 19 nt, Artificial Sequence
  Description of Artificial Sequence: Synthetic oligonucleotide
  Antisense strand to SEQ ID NO: 1765905
aucacugagucggaaacga

SEQ ID NO: 1765907 - RNA, 19 nt, Artificial Sequence
  Description of Artificial Sequence: Synthetic oligonucleotide
  Sense strand starting at position 3171 of SEQ ID NO: 1562694
ggaaacgagauccgucaga

SEQ ID NO: 1765908 - RNA, 19 nt, Artificial Sequence
  Description of Artificial Sequence: Synthetic oligonucleotide
  Antisense strand to SEQ ID NO: 1765907
ucugacggaucucguuucc

SEQ ID NO: 1765909 - RNA, 19 nt, Artificial Sequence
  Description of Artificial Sequence: Synthetic oligonucleotide
  Sense strand starting at position 3200 of SEQ ID NO: 1562694
cuguuauaugaacgagguu

SEQ ID NO: 1765910 - RNA, 19 nt, Artificial Sequence
  Description of Artificial Sequence: Synthetic oligonucleotide
  Antisense strand to SEQ ID NO: 1765909
aaccucguucauauaacag

SEQ ID NO: 1765911 - RNA, 19 nt, Artificial Sequence
  Description of Artificial Sequence: Synthetic oligonucleotide
  Sense strand starting at position 3203 of SEQ ID NO: 1562694
uuauaugaacgagguuaau

SEQ ID NO: 1765912 - RNA, 19 nt, Artificial Sequence
  Description of Artificial Sequence: Synthetic oligonucleotide
  Antisense strand to SEQ ID NO: 1765911
auuaaccucguucauauaa

SEQ ID NO: 1765913 - RNA, 19 nt, Artificial Sequence
  Description of Artificial Sequence: Synthetic oligonucleotide
  Sense strand starting at position 3212 of SEQ ID NO: 1562694
cgagguuaaugacucaugu

SEQ ID NO: 1765914 - RNA, 19 nt, Artificial Sequence
  Description of Artificial Sequence: Synthetic oligonucleotide
  Antisense strand to SEQ ID NO: 1765913
acaugagucauuaaccucg

SEQ ID NO: 1765915 - RNA, 19 nt, Artificial Sequence
  Description of Artificial Sequence: Synthetic oligonucleotide
  Sense strand starting at position 3221 of SEQ ID NO: 1562694
ugacucauguggccucauu

SEQ ID NO: 1765916 - RNA, 19 nt, Artificial Sequence
  Description of Artificial Sequence: Synthetic oligonucleotide
  Antisense strand to SEQ ID NO: 1765915
aaugaggccacaugaguca

SEQ ID NO: 1765917 - RNA, 19 nt, Artificial Sequence
  Description of Artificial Sequence: Synthetic oligonucleotide
  Sense strand starting at position 3261 of SEQ ID NO: 1562694
gagaguuucugggaggacu

SEQ ID NO: 1765918 - RNA, 19 nt, Artificial Sequence
  Description of Artificial Sequence: Synthetic oligonucleotide
  Antisense strand to SEQ ID NO: 1765917
aguccucccagaaacucuc

SEQ ID NO: 1765919 - RNA, 19 nt, Artificial Sequence
  Description of Artificial Sequence: Synthetic oligonucleotide
  Sense strand starting at position 3395 of SEQ ID NO: 1562694
cccucagguuauuaauaag

SEQ ID NO: 1765920 - RNA, 19 nt, Artificial Sequence
  Description of Artificial Sequence: Synthetic oligonucleotide
  Antisense strand to SEQ ID NO: 1765919
cuuauuaauaaccugaggg

SEQ ID NO: 1765921 - RNA, 19 nt, Artificial Sequence
  Description of Artificial Sequence: Synthetic oligonucleotide
  Sense strand starting at position 3626 of SEQ ID NO: 1562694
cgcgucugucaggauaucu

SEQ ID NO: 1765922 - RNA, 19 nt, Artificial Sequence
  Description of Artificial Sequence: Synthetic oligonucleotide
  Antisense strand to SEQ ID NO: 1765921
agauauccugacagacgcg

SEQ ID NO: 1765923 - RNA, 19 nt, Artificial Sequence
  Description of Artificial Sequence: Synthetic oligonucleotide
  Sense strand starting at position 3637 of SEQ ID NO: 1562694
ggauaucuuucucuccaag

SEQ ID NO: 1765924 - RNA, 19 nt, Artificial Sequence
  Description of Artificial Sequence: Synthetic oligonucleotide
  Antisense strand to SEQ ID NO: 1765923
cuuggagagaaagauaucc

SEQ ID NO: 1765925 - RNA, 19 nt, Artificial Sequence
  Description of Artificial Sequence: Synthetic oligonucleotide
  Sense strand starting at position 3836 of SEQ ID NO: 1562694
uaacuagaaucggugucuu

SEQ ID NO: 1765926 - RNA, 19 nt, Artificial Sequence
  Description of Artificial Sequence: Synthetic oligonucleotide
  Antisense strand to SEQ ID NO: 1765925
aagacaccgauucuaguua

SEQ ID NO: 1765927 - RNA, 19 nt, Artificial Sequence
  Description of Artificial Sequence: Synthetic oligonucleotide
  Sense strand starting at position 3955 of SEQ ID NO: 1562694
gcccauuucuuacggauuu

SEQ ID NO: 1765928 - RNA, 19 nt, Artificial Sequence
  Description of Artificial Sequence: Synthetic oligonucleotide
  Antisense strand to SEQ ID NO: 1765927
aaauccguaagaaaugggc

SEQ ID NO: 1765929 - RNA, 19 nt, Artificial Sequence
  Description of Artificial Sequence: Synthetic oligonucleotide
  Sense strand starting at position 488 of SEQ ID NO: 1562695
cagaguagauacucagacu

SEQ ID NO: 1765930 - RNA, 19 nt, Artificial Sequence
  Description of Artificial Sequence: Synthetic oligonucleotide
  Antisense strand to SEQ ID NO: 1765929
agucugaguaucuacucug

SEQ ID NO: 1765931 - RNA, 19 nt, Artificial Sequence
  Description of Artificial Sequence: Synthetic oligonucleotide
  Sense strand starting at position 503 of SEQ ID NO: 1562695
gacuauagcucagugcaga

SEQ ID NO: 1765932 - RNA, 19 nt, Artificial Sequence
  Description of Artificial Sequence: Synthetic oligonucleotide
  Antisense strand to SEQ ID NO: 1765931
ucugcacugagcuauaguc

SEQ ID NO: 1765933 - RNA, 19 nt, Artificial Sequence
  Description of Artificial Sequence: Synthetic oligonucleotide
  Sense strand starting at position 504 of SEQ ID NO: 1562695
acuauagcucagugcagaa

SEQ ID NO: 1765934 - RNA, 19 nt, Artificial Sequence
  Description of Artificial Sequence: Synthetic oligonucleotide
  Antisense strand to SEQ ID NO: 1765933
uucugcacugagcuauagu

SEQ ID NO: 1765935 - RNA, 19 nt, Artificial Sequence
  Description of Artificial Sequence: Synthetic oligonucleotide
  Sense strand starting at position 506 of SEQ ID NO: 1562695
uauagcucagugcagaaua

SEQ ID NO: 1765936 - RNA, 19 nt, Artificial Sequence
  Description of Artificial Sequence: Synthetic oligonucleotide
  Antisense strand to SEQ ID NO: 1765935
uauucugcacugagcuaua

SEQ ID NO: 1765937 - RNA, 19 nt, Artificial Sequence
  Description of Artificial Sequence: Synthetic oligonucleotide
  Sense strand starting at position 705 of SEQ ID NO: 1562695
acggaagauuuguaauuaa

SEQ ID NO: 1765938 - RNA, 19 nt, Artificial Sequence
  Description of Artificial Sequence: Synthetic oligonucleotide
  Antisense strand to SEQ ID NO: 1765937
uuaauuacaaaucuuccgu

SEQ ID NO: 1765939 - RNA, 19 nt, Artificial Sequence
  Description of Artificial Sequence: Synthetic oligonucleotide
  Sense strand starting at position 747 of SEQ ID NO: 1562695
guaguaaaccggcagcauu

SEQ ID NO: 1765940 - RNA, 19 nt, Artificial Sequence
  Description of Artificial Sequence: Synthetic oligonucleotide
  Antisense strand to SEQ ID NO: 1765939
aaugcugccgguuuacuac

SEQ ID NO: 1765941 - RNA, 19 nt, Artificial Sequence
  Description of Artificial Sequence: Synthetic oligonucleotide
  Sense strand starting at position 824 of SEQ ID NO: 1562695
auuguuacuguaugacagu

SEQ ID NO: 1765942 - RNA, 19 nt, Artificial Sequence
  Description of Artificial Sequence: Synthetic oligonucleotide
  Antisense strand to SEQ ID NO: 1765941
acugucauacaguaacaau

SEQ ID NO: 1765943 - RNA, 19 nt, Artificial Sequence
  Description of Artificial Sequence: Synthetic oligonucleotide
  Sense strand starting at position 855 of SEQ ID NO: 1562695
cuguuuagucgccuguuua

SEQ ID NO: 1765944 - RNA, 19 nt, Artificial Sequence
  Description of Artificial Sequence: Synthetic oligonucleotide
  Antisense strand to SEQ ID NO: 1765943
uaaacaggcgacuaaacag

SEQ ID NO: 1765945 - RNA, 19 nt, Artificial Sequence
  Description of Artificial Sequence: Synthetic oligonucleotide
  Sense strand starting at position 866 of SEQ ID NO: 1562695
ccuguuuagccucaauugu

SEQ ID NO: 1765946 - RNA, 19 nt, Artificial Sequence
  Description of Artificial Sequence: Synthetic oligonucleotide
  Antisense strand to SEQ ID NO: 1765945
acaauugaggcuaaacagg

SEQ ID NO: 1765947 - RNA, 19 nt, Artificial Sequence
  Description of Artificial Sequence: Synthetic oligonucleotide
  Sense strand starting at position 888 of SEQ ID NO: 1562695
acgagucaguguguaauuu

SEQ ID NO: 1765948 - RNA, 19 nt, Artificial Sequence
  Description of Artificial Sequence: Synthetic oligonucleotide
  Antisense strand to SEQ ID NO: 1765947
aaauuacacacugacucgu

SEQ ID NO: 1765949 - RNA, 19 nt, Artificial Sequence
  Description of Artificial Sequence: Synthetic oligonucleotide
  Sense strand starting at position 896 of SEQ ID NO: 1562695
guguguaauuucuagguau

SEQ ID NO: 1765950 - RNA, 19 nt, Artificial Sequence
  Description of Artificial Sequence: Synthetic oligonucleotide
  Antisense strand to SEQ ID NO: 1765949
auaccuagaaauuacacac

SEQ ID NO: 1765951 - RNA, 19 nt, Artificial Sequence
  Description of Artificial Sequence: Synthetic oligonucleotide
  Sense strand starting at position 898 of SEQ ID NO: 1562695
guguaauuucuagguauug

SEQ ID NO: 1765952 - RNA, 19 nt, Artificial Sequence
  Description of Artificial Sequence: Synthetic oligonucleotide
  Antisense strand to SEQ ID NO: 1765951
caauaccuagaaauuacac

SEQ ID NO: 1765953 - RNA, 19 nt, Artificial Sequence
  Description of Artificial Sequence: Synthetic oligonucleotide
  Sense strand starting at position 1174 of SEQ ID NO: 1562695
ugguguuccucugcuguga

SEQ ID NO: 1765954 - RNA, 19 nt, Artificial Sequence
  Description of Artificial Sequence: Synthetic oligonucleotide
  Antisense strand to SEQ ID NO: 1765953
ucacagcagaggaacacca

SEQ ID NO: 1765955 - RNA, 19 nt, Artificial Sequence
  Description of Artificial Sequence: Synthetic oligonucleotide
  Sense strand starting at position 1202 of SEQ ID NO: 1562695
aagugacucucggaagaag

SEQ ID NO: 1765956 - RNA, 19 nt, Artificial Sequence
  Description of Artificial Sequence: Synthetic oligonucleotide
  Antisense strand to SEQ ID NO: 1765955
cuucuuccgagagucacuu

SEQ ID NO: 1765957 - RNA, 19 nt, Artificial Sequence
  Description of Artificial Sequence: Synthetic oligonucleotide
  Sense strand starting at position 1216 of SEQ ID NO: 1562695
agaagucacuccuccaguu

SEQ ID NO: 1765958 - RNA, 19 nt, Artificial Sequence
  Description of Artificial Sequence: Synthetic oligonucleotide
  Antisense strand to SEQ ID NO: 1765957
aacuggaggagugacuucu

SEQ ID NO: 1765959 - RNA, 19 nt, Artificial Sequence
  Description of Artificial Sequence: Synthetic oligonucleotide
  Sense strand starting at position 1303 of SEQ ID NO: 1562695
agucaaaccuaggagaaga

SEQ ID NO: 1765960 - RNA, 19 nt, Artificial Sequence
  Description of Artificial Sequence: Synthetic oligonucleotide
  Antisense strand to SEQ ID NO: 1765959
ucuucuccuagguuugacu

SEQ ID NO: 1765961 - RNA, 19 nt, Artificial Sequence
  Description of Artificial Sequence: Synthetic oligonucleotide
  Sense strand starting at position 1447 of SEQ ID NO: 1562695
agaugaugaaagugugacu

SEQ ID NO: 1765962 - RNA, 19 nt, Artificial Sequence
  Description of Artificial Sequence: Synthetic oligonucleotide
  Antisense strand to SEQ ID NO: 1765961
agucacacuuucaucaucu

SEQ ID NO: 1765963 - RNA, 19 nt, Artificial Sequence
  Description of Artificial Sequence: Synthetic oligonucleotide
  Sense strand starting at position 1668 of SEQ ID NO: 1562695
gagagacuuguccaagguc

SEQ ID NO: 1765964 - RNA, 19 nt, Artificial Sequence
  Description of Artificial Sequence: Synthetic oligonucleotide
  Antisense strand to SEQ ID NO: 1765963
gaccuuggacaagucucuc

SEQ ID NO: 1765965 - RNA, 19 nt, Artificial Sequence
  Description of Artificial Sequence: Synthetic oligonucleotide
  Sense strand starting at position 2221 of SEQ ID NO: 1562695
cacagagcuucguuuccga

SEQ ID NO: 1765966 - RNA, 19 nt, Artificial Sequence
  Description of Artificial Sequence: Synthetic oligonucleotide
  Antisense strand to SEQ ID NO: 1765965
ucggaaacgaagcucugug

SEQ ID NO: 1765967 - RNA, 19 nt, Artificial Sequence
  Description of Artificial Sequence: Synthetic oligonucleotide
  Sense strand starting at position 2230 of SEQ ID NO: 1562695
ucguuuccgacucagugau

SEQ ID NO: 1765968 - RNA, 19 nt, Artificial Sequence
  Description of Artificial Sequence: Synthetic oligonucleotide
  Antisense strand to SEQ ID NO: 1765967
aucacugagucggaaacga

SEQ ID NO: 1765969 - RNA, 19 nt, Artificial Sequence
  Description of Artificial Sequence: Synthetic oligonucleotide
  Sense strand starting at position 2260 of SEQ ID NO: 1562695
ggaaacgagauccgucaga

SEQ ID NO: 1765970 - RNA, 19 nt, Artificial Sequence
  Description of Artificial Sequence: Synthetic oligonucleotide
  Antisense strand to SEQ ID NO: 1765969
ucugacggaucucguuucc

SEQ ID NO: 1765971 - RNA, 19 nt, Artificial Sequence
  Description of Artificial Sequence: Synthetic oligonucleotide
  Sense strand starting at position 2289 of SEQ ID NO: 1562695
cuguuauaugaacgagguu

SEQ ID NO: 1765972 - RNA, 19 nt, Artificial Sequence
  Description of Artificial Sequence: Synthetic oligonucleotide
  Antisense strand to SEQ ID NO: 1765971
aaccucguucauauaacag

SEQ ID NO: 1765973 - RNA, 19 nt, Artificial Sequence
  Description of Artificial Sequence: Synthetic oligonucleotide
  Sense strand starting at position 2292 of SEQ ID NO: 1562695
uuauaugaacgagguuaau

SEQ ID NO: 1765974 - RNA, 19 nt, Artificial Sequence
  Description of Artificial Sequence: Synthetic oligonucleotide
  Antisense strand to SEQ ID NO: 1765973
auuaaccucguucauauaa

SEQ ID NO: 1765975 - RNA, 19 nt, Artificial Sequence
  Description of Artificial Sequence: Synthetic oligonucleotide
  Sense strand starting at position 2301 of SEQ ID NO: 1562695
cgagguuaaugacucaugu

SEQ ID NO: 1765976 - RNA, 19 nt, Artificial Sequence
  Description of Artificial Sequence: Synthetic oligonucleotide
  Antisense strand to SEQ ID NO: 1765975
acaugagucauuaaccucg

SEQ ID NO: 1765977 - RNA, 19 nt, Artificial Sequence
  Description of Artificial Sequence: Synthetic oligonucleotide
  Sense strand starting at position 2310 of SEQ ID NO: 1562695
ugacucauguggccucauu

SEQ ID NO: 1765978 - RNA, 19 nt, Artificial Sequence
  Description of Artificial Sequence: Synthetic oligonucleotide
  Antisense strand to SEQ ID NO: 1765977
aaugaggccacaugaguca

SEQ ID NO: 1765979 - RNA, 19 nt, Artificial Sequence
  Description of Artificial Sequence: Synthetic oligonucleotide
  Sense strand starting at position 2350 of SEQ ID NO: 1562695
gagaguuucugggaggacu

SEQ ID NO: 1765980 - RNA, 19 nt, Artificial Sequence
  Description of Artificial Sequence: Synthetic oligonucleotide
  Antisense strand to SEQ ID NO: 1765979
aguccucccagaaacucuc

SEQ ID NO: 1765981 - RNA, 19 nt, Artificial Sequence
  Description of Artificial Sequence: Synthetic oligonucleotide
  Sense strand starting at position 2484 of SEQ ID NO: 1562695
cccucagguuauuaauaag

SEQ ID NO: 1765982 - RNA, 19 nt, Artificial Sequence
  Description of Artificial Sequence: Synthetic oligonucleotide
  Antisense strand to SEQ ID NO: 1765981
cuuauuaauaaccugaggg

SEQ ID NO: 1765983 - RNA, 19 nt, Artificial Sequence
  Description of Artificial Sequence: Synthetic oligonucleotide
  Sense strand starting at position 2715 of SEQ ID NO: 1562695
cgcgucugucaggauaucu

SEQ ID NO: 1765984 - RNA, 19 nt, Artificial Sequence
  Description of Artificial Sequence: Synthetic oligonucleotide
  Antisense strand to SEQ ID NO: 1765983
agauauccugacagacgcg

SEQ ID NO: 1765985 - RNA, 19 nt, Artificial Sequence
  Description of Artificial Sequence: Synthetic oligonucleotide
  Sense strand starting at position 2726 of SEQ ID NO: 1562695
ggauaucuuucucuccaag

SEQ ID NO: 1765986 - RNA, 19 nt, Artificial Sequence
  Description of Artificial Sequence: Synthetic oligonucleotide
  Antisense strand to SEQ ID NO: 1765985
cuuggagagaaagauaucc

SEQ ID NO: 1765987 - RNA, 19 nt, Artificial Sequence
  Description of Artificial Sequence: Synthetic oligonucleotide
  Sense strand starting at position 2925 of SEQ ID NO: 1562695
uaacuagaaucggugucuu

SEQ ID NO: 1765988 - RNA, 19 nt, Artificial Sequence
  Description of Artificial Sequence: Synthetic oligonucleotide
  Antisense strand to SEQ ID NO: 1765987
aagacaccgauucuaguua

SEQ ID NO: 1765989 - RNA, 19 nt, Artificial Sequence
  Description of Artificial Sequence: Synthetic oligonucleotide
  Sense strand starting at position 3042 of SEQ ID NO: 1562695
gugcccauuucuuacggau

SEQ ID NO: 1765990 - RNA, 19 nt, Artificial Sequence
  Description of Artificial Sequence: Synthetic oligonucleotide
  Antisense strand to SEQ ID NO: 1765989
auccguaagaaaugggcac

SEQ ID NO: 1765991 - RNA, 19 nt, Artificial Sequence
  Description of Artificial Sequence: Synthetic oligonucleotide
  Sense strand starting at position 3044 of SEQ ID NO: 1562695
gcccauuucuuacggauuu

SEQ ID NO: 1765992 - RNA, 19 nt, Artificial Sequence
  Description of Artificial Sequence: Synthetic oligonucleotide
  Antisense strand to SEQ ID NO: 1765991
aaauccguaagaaaugggc

SEQ ID NO: 1765993 - RNA, 19 nt, Artificial Sequence
  Description of Artificial Sequence: Synthetic oligonucleotide
  Sense strand starting at position 3092 of SEQ ID NO: 1562695
cauguuacacuguagugaa

SEQ ID NO: 1765994 - RNA, 19 nt, Artificial Sequence
  Description of Artificial Sequence: Synthetic oligonucleotide
  Antisense strand to SEQ ID NO: 1765993
uucacuacaguguaacaug

SEQ ID NO: 1765995 - RNA, 19 nt, Artificial Sequence
  Description of Artificial Sequence: Synthetic oligonucleotide
  Sense strand starting at position 3152 of SEQ ID NO: 1562695
caacguucuuaagcaugga

SEQ ID NO: 1765996 - RNA, 19 nt, Artificial Sequence
  Description of Artificial Sequence: Synthetic oligonucleotide
  Antisense strand to SEQ ID NO: 1765995
uccaugcuuaagaacguug

SEQ ID NO: 1765997 - RNA, 19 nt, Artificial Sequence
  Description of Artificial Sequence: Synthetic oligonucleotide
  Sense strand starting at position 3214 of SEQ ID NO: 1562695
aguguuaaguaauugcaau

SEQ ID NO: 1765998 - RNA, 19 nt, Artificial Sequence
  Description of Artificial Sequence: Synthetic oligonucleotide
  Antisense strand to SEQ ID NO: 1765997
auugcaauuacuuaacacu

SEQ ID NO: 1765999 - RNA, 19 nt, Artificial Sequence
  Description of Artificial Sequence: Synthetic oligonucleotide
  Sense strand starting at position 3691 of SEQ ID NO: 1562695
ggcugaaauuguuuaucuu

SEQ ID NO: 1766000 - RNA, 19 nt, Artificial Sequence
  Description of Artificial Sequence: Synthetic oligonucleotide
  Antisense strand to SEQ ID NO: 1765999
aagauaaacaauuucagcc

SEQ ID NO: 1766001 - RNA, 19 nt, Artificial Sequence
  Description of Artificial Sequence: Synthetic oligonucleotide
  Sense strand starting at position 3692 of SEQ ID NO: 1562695
gcugaaauuguuuaucuug

SEQ ID NO: 1766002 - RNA, 19 nt, Artificial Sequence
  Description of Artificial Sequence: Synthetic oligonucleotide
  Antisense strand to SEQ ID NO: 1766001
caagauaaacaauuucagc

SEQ ID NO: 1766003 - RNA, 19 nt, Artificial Sequence
  Description of Artificial Sequence: Synthetic oligonucleotide
  Sense strand starting at position 3840 of SEQ ID NO: 1562695
gucuuuagcaauggugguu

SEQ ID NO: 1766004 - RNA, 19 nt, Artificial Sequence
  Description of Artificial Sequence: Synthetic oligonucleotide
  Antisense strand to SEQ ID NO: 1766003
aaccaccauugcuaaagac

SEQ ID NO: 1766005 - RNA, 19 nt, Artificial Sequence
  Description of Artificial Sequence: Synthetic oligonucleotide
  Sense strand starting at position 3903 of SEQ ID NO: 1562695
cuucuuagcccucaaggga

SEQ ID NO: 1766006 - RNA, 19 nt, Artificial Sequence
  Description of Artificial Sequence: Synthetic oligonucleotide
  Antisense strand to SEQ ID NO: 1766005
ucccuugagggcuaagaag

SEQ ID NO: 1766007 - RNA, 19 nt, Artificial Sequence
  Description of Artificial Sequence: Synthetic oligonucleotide
  Sense strand starting at position 3924 of SEQ ID NO: 1562695
uugauuccuucuccugaga

SEQ ID NO: 1766008 - RNA, 19 nt, Artificial Sequence
  Description of Artificial Sequence: Synthetic oligonucleotide
  Antisense strand to SEQ ID NO: 1766007
ucucaggagaaggaaucaa

SEQ ID NO: 1766009 - RNA, 19 nt, Artificial Sequence
  Description of Artificial Sequence: Synthetic oligonucleotide
  Sense strand starting at position 101 of SEQ ID NO: 1562696
agacguccuccaggaagua

SEQ ID NO: 1766010 - RNA, 19 nt, Artificial Sequence
  Description of Artificial Sequence: Synthetic oligonucleotide
  Antisense strand to SEQ ID NO: 1766009
uacuuccuggaggacgucu

SEQ ID NO: 1766011 - RNA, 19 nt, Artificial Sequence
  Description of Artificial Sequence: Synthetic oligonucleotide
  Sense strand starting at position 132 of SEQ ID NO: 1562696
caccgcaaucccugugaga

SEQ ID NO: 1766012 - RNA, 19 nt, Artificial Sequence
  Description of Artificial Sequence: Synthetic oligonucleotide
  Antisense strand to SEQ ID NO: 1766011
ucucacagggauugcggug

SEQ ID NO: 1766013 - RNA, 19 nt, Artificial Sequence
  Description of Artificial Sequence: Synthetic oligonucleotide
  Sense strand starting at position 134 of SEQ ID NO: 1562696
ccgcaaucccugugagaca

SEQ ID NO: 1766014 - RNA, 19 nt, Artificial Sequence
  Description of Artificial Sequence: Synthetic oligonucleotide
  Antisense strand to SEQ ID NO: 1766013
ugucucacagggauugcgg

SEQ ID NO: 1766015 - RNA, 19 nt, Artificial Sequence
  Description of Artificial Sequence: Synthetic oligonucleotide
  Sense strand starting at position 290 of SEQ ID NO: 1562696
ccggguuggccgugaagga

SEQ ID NO: 1766016 - RNA, 19 nt, Artificial Sequence
  Description of Artificial Sequence: Synthetic oligonucleotide
  Antisense strand to SEQ ID NO: 1766015
uccuucacggccaacccgg

SEQ ID NO: 1766017 - RNA, 19 nt, Artificial Sequence
  Description of Artificial Sequence: Synthetic oligonucleotide
  Sense strand starting at position 428 of SEQ ID NO: 1562696
gugcaagcaucaguagauc

SEQ ID NO: 1766018 - RNA, 19 nt, Artificial Sequence
  Description of Artificial Sequence: Synthetic oligonucleotide
  Antisense strand to SEQ ID NO: 1766017
gaucuacugaugcuugcac

SEQ ID NO: 1766019 - RNA, 19 nt, Artificial Sequence
  Description of Artificial Sequence: Synthetic oligonucleotide
  Sense strand starting at position 446 of SEQ ID NO: 1562696
ccguccugacgaugcaaau

SEQ ID NO: 1766020 - RNA, 19 nt, Artificial Sequence
  Description of Artificial Sequence: Synthetic oligonucleotide
  Antisense strand to SEQ ID NO: 1766019
auuugcaucgucaggacgg

SEQ ID NO: 1766021 - RNA, 19 nt, Artificial Sequence
  Description of Artificial Sequence: Synthetic oligonucleotide
  Sense strand starting at position 903 of SEQ ID NO: 1562696
uucccaagacccuggaauu

SEQ ID NO: 1766022 - RNA, 19 nt, Artificial Sequence
  Description of Artificial Sequence: Synthetic oligonucleotide
  Antisense strand to SEQ ID NO: 1766021
aauuccagggucuugggaa

SEQ ID NO: 1766023 - RNA, 19 nt, Artificial Sequence
  Description of Artificial Sequence: Synthetic oligonucleotide
  Sense strand starting at position 940 of SEQ ID NO: 1562696
augugcuauucccucauca

SEQ ID NO: 1766024 - RNA, 19 nt, Artificial Sequence
  Description of Artificial Sequence: Synthetic oligonucleotide
  Antisense strand to SEQ ID NO: 1766023
ugaugagggaauagcacau

SEQ ID NO: 1766025 - RNA, 19 nt, Artificial Sequence
  Description of Artificial Sequence: Synthetic oligonucleotide
  Sense strand starting at position 942 of SEQ ID NO: 1562696
gugcuauucccucaucaag

SEQ ID NO: 1766026 - RNA, 19 nt, Artificial Sequence
  Description of Artificial Sequence: Synthetic oligonucleotide
  Antisense strand to SEQ ID NO: 1766025
cuugaugagggaauagcac

SEQ ID NO: 1766027 - RNA, 19 nt, Artificial Sequence
  Description of Artificial Sequence: Synthetic oligonucleotide
  Sense strand starting at position 1135 of SEQ ID NO: 1562696
uugugcauggcuuuguauu

SEQ ID NO: 1766028 - RNA, 19 nt, Artificial Sequence
  Description of Artificial Sequence: Synthetic oligonucleotide
  Antisense strand to SEQ ID NO: 1766027
aauacaaagccaugcacaa

SEQ ID NO: 1766029 - RNA, 19 nt, Artificial Sequence
  Description of Artificial Sequence: Synthetic oligonucleotide
  Sense strand starting at position 1136 of SEQ ID NO: 1562696
ugugcauggcuuuguauuu

SEQ ID NO: 1766030 - RNA, 19 nt, Artificial Sequence
  Description of Artificial Sequence: Synthetic oligonucleotide
  Antisense strand to SEQ ID NO: 1766029
aaauacaaagccaugcaca

SEQ ID NO: 1766031 - RNA, 19 nt, Artificial Sequence
  Description of Artificial Sequence: Synthetic oligonucleotide
  Sense strand starting at position 1328 of SEQ ID NO: 1562696
cgggaaggauacggucaua

SEQ ID NO: 1766032 - RNA, 19 nt, Artificial Sequence
  Description of Artificial Sequence: Synthetic oligonucleotide
  Antisense strand to SEQ ID NO: 1766031
uaugaccguauccuucccg

SEQ ID NO: 1766033 - RNA, 19 nt, Artificial Sequence
  Description of Artificial Sequence: Synthetic oligonucleotide
  Sense strand starting at position 1550 of SEQ ID NO: 1562696
acacgaagagcauguugaa

SEQ ID NO: 1766034 - RNA, 19 nt, Artificial Sequence
  Description of Artificial Sequence: Synthetic oligonucleotide
  Antisense strand to SEQ ID NO: 1766033
uucaacaugcucuucgugu

SEQ ID NO: 1766035 - RNA, 19 nt, Artificial Sequence
  Description of Artificial Sequence: Synthetic oligonucleotide
  Sense strand starting at position 1553 of SEQ ID NO: 1562696
cgaagagcauguugaagaa

SEQ ID NO: 1766036 - RNA, 19 nt, Artificial Sequence
  Description of Artificial Sequence: Synthetic oligonucleotide
  Antisense strand to SEQ ID NO: 1766035
uucuucaacaugcucuucg

SEQ ID NO: 1766037 - RNA, 19 nt, Artificial Sequence
  Description of Artificial Sequence: Synthetic oligonucleotide
  Sense strand starting at position 2004 of SEQ ID NO: 1562696
ccagcaacgcgcucuuuaa

SEQ ID NO: 1766038 - RNA, 19 nt, Artificial Sequence
  Description of Artificial Sequence: Synthetic oligonucleotide
  Antisense strand to SEQ ID NO: 1766037
uuaaagagcgcguugcugg

SEQ ID NO: 1766039 - RNA, 19 nt, Artificial Sequence
  Description of Artificial Sequence: Synthetic oligonucleotide
  Sense strand starting at position 2238 of SEQ ID NO: 1562696
acguguggccaaugaggaa

SEQ ID NO: 1766040 - RNA, 19 nt, Artificial Sequence
  Description of Artificial Sequence: Synthetic oligonucleotide
  Antisense strand to SEQ ID NO: 1766039
uuccucauuggccacacgu

SEQ ID NO: 1766041 - RNA, 19 nt, Artificial Sequence
  Description of Artificial Sequence: Synthetic oligonucleotide
  Sense strand starting at position 2268 of SEQ ID NO: 1562696
gcggcuuucuaggagagga

SEQ ID NO: 1766042 - RNA, 19 nt, Artificial Sequence
  Description of Artificial Sequence: Synthetic oligonucleotide
  Antisense strand to SEQ ID NO: 1766041
uccucuccuagaaagccgc

SEQ ID NO: 1766043 - RNA, 19 nt, Artificial Sequence
  Description of Artificial Sequence: Synthetic oligonucleotide
  Sense strand starting at position 2324 of SEQ ID NO: 1562696
uaagaucguauggguuaca

SEQ ID NO: 1766044 - RNA, 19 nt, Artificial Sequence
  Description of Artificial Sequence: Synthetic oligonucleotide
  Antisense strand to SEQ ID NO: 1766043
uguaacccauacgaucuua

SEQ ID NO: 1766045 - RNA, 19 nt, Artificial Sequence
  Description of Artificial Sequence: Synthetic oligonucleotide
  Sense strand starting at position 2327 of SEQ ID NO: 1562696
gaucguauggguuacagga

SEQ ID NO: 1766046 - RNA, 19 nt, Artificial Sequence
  Description of Artificial Sequence: Synthetic oligonucleotide
  Antisense strand to SEQ ID NO: 1766045
uccuguaacccauacgauc

SEQ ID NO: 1766047 - RNA, 19 nt, Artificial Sequence
  Description of Artificial Sequence: Synthetic oligonucleotide
  Sense strand starting at position 2502 of SEQ ID NO: 1562696
cagggaggcauucgggaau

SEQ ID NO: 1766048 - RNA, 19 nt, Artificial Sequence
  Description of Artificial Sequence: Synthetic oligonucleotide
  Antisense strand to SEQ ID NO: 1766047
auucccgaaugccucccug

SEQ ID NO: 1766049 - RNA, 19 nt, Artificial Sequence
  Description of Artificial Sequence: Synthetic oligonucleotide
  Sense strand starting at position 2514 of SEQ ID NO: 1562696
cgggaauguguccaaaccu

SEQ ID NO: 1766050 - RNA, 19 nt, Artificial Sequence
  Description of Artificial Sequence: Synthetic oligonucleotide
  Antisense strand to SEQ ID NO: 1766049
agguuuggacacauucccg

SEQ ID NO: 1766051 - RNA, 19 nt, Artificial Sequence
  Description of Artificial Sequence: Synthetic oligonucleotide
  Sense strand starting at position 2795 of SEQ ID NO: 1562696
gccugacacuguucuagau

SEQ ID NO: 1766052 - RNA, 19 nt, Artificial Sequence
  Description of Artificial Sequence: Synthetic oligonucleotide
  Antisense strand to SEQ ID NO: 1766051
aucuagaacagugucaggc

SEQ ID NO: 1766053 - RNA, 19 nt, Artificial Sequence
  Description of Artificial Sequence: Synthetic oligonucleotide
  Sense strand starting at position 2797 of SEQ ID NO: 1562696
cugacacuguucuagaugu

SEQ ID NO: 1766054 - RNA, 19 nt, Artificial Sequence
  Description of Artificial Sequence: Synthetic oligonucleotide
  Antisense strand to SEQ ID NO: 1766053
acaucuagaacagugucag

SEQ ID NO: 1766055 - RNA, 19 nt, Artificial Sequence
  Description of Artificial Sequence: Synthetic oligonucleotide
  Sense strand starting at position 2819 of SEQ ID NO: 1562696
ggauguagcaugcaauaaa

SEQ ID NO: 1766056 - RNA, 19 nt, Artificial Sequence
  Description of Artificial Sequence: Synthetic oligonucleotide
  Antisense strand to SEQ ID NO: 1766055
uuuauugcaugcuacaucc

SEQ ID NO: 1766057 - RNA, 19 nt, Artificial Sequence
  Description of Artificial Sequence: Synthetic oligonucleotide
  Sense strand starting at position 2839 of SEQ ID NO: 1562696
gacacugucucuuagaguc

SEQ ID NO: 1766058 - RNA, 19 nt, Artificial Sequence
  Description of Artificial Sequence: Synthetic oligonucleotide
  Antisense strand to SEQ ID NO: 1766057
gacucuaagagacaguguc

SEQ ID NO: 1766059 - RNA, 19 nt, Artificial Sequence
  Description of Artificial Sequence: Synthetic oligonucleotide
  Sense strand starting at position 2890 of SEQ ID NO: 1562696
gcugacacuugaugagaau

SEQ ID NO: 1766060 - RNA, 19 nt, Artificial Sequence
  Description of Artificial Sequence: Synthetic oligonucleotide
  Antisense strand to SEQ ID NO: 1766059
auucucaucaagugucagc

SEQ ID NO: 1766061 - RNA, 19 nt, Artificial Sequence
  Description of Artificial Sequence: Synthetic oligonucleotide
  Sense strand starting at position 2902 of SEQ ID NO: 1562696
ugagaauauugccaaguga

SEQ ID NO: 1766062 - RNA, 19 nt, Artificial Sequence
  Description of Artificial Sequence: Synthetic oligonucleotide
  Antisense strand to SEQ ID NO: 1766061
ucacuuggcaauauucuca

SEQ ID NO: 1766063 - RNA, 19 nt, Artificial Sequence
  Description of Artificial Sequence: Synthetic oligonucleotide
  Sense strand starting at position 2972 of SEQ ID NO: 1562696
ccucuaaaguuugucacuu

SEQ ID NO: 1766064 - RNA, 19 nt, Artificial Sequence
  Description of Artificial Sequence: Synthetic oligonucleotide
  Antisense strand to SEQ ID NO: 1766063
aagugacaaacuuuagagg

SEQ ID NO: 1766065 - RNA, 19 nt, Artificial Sequence
  Description of Artificial Sequence: Synthetic oligonucleotide
  Sense strand starting at position 2973 of SEQ ID NO: 1562696
cucuaaaguuugucacuuu

SEQ ID NO: 1766066 - RNA, 19 nt, Artificial Sequence
  Description of Artificial Sequence: Synthetic oligonucleotide
  Antisense strand to SEQ ID NO: 1766065
aaagugacaaacuuuagag

SEQ ID NO: 1766067 - RNA, 19 nt, Artificial Sequence
  Description of Artificial Sequence: Synthetic oligonucleotide
  Sense strand starting at position 3113 of SEQ ID NO: 1562696
uggugcauccgcugugaaa

SEQ ID NO: 1766068 - RNA, 19 nt, Artificial Sequence
  Description of Artificial Sequence: Synthetic oligonucleotide
  Antisense strand to SEQ ID NO: 1766067
uuucacagcggaugcacca

SEQ ID NO: 1766069 - RNA, 19 nt, Artificial Sequence
  Description of Artificial Sequence: Synthetic oligonucleotide
  Sense strand starting at position 3316 of SEQ ID NO: 1562696
augugcugucuacaugcaa

SEQ ID NO: 1766070 - RNA, 19 nt, Artificial Sequence
  Description of Artificial Sequence: Synthetic oligonucleotide
  Antisense strand to SEQ ID NO: 1766069
uugcauguagacagcacau

SEQ ID NO: 1766071 - RNA, 19 nt, Artificial Sequence
  Description of Artificial Sequence: Synthetic oligonucleotide
  Sense strand starting at position 3323 of SEQ ID NO: 1562696
gucuacaugcaaugcaaua

SEQ ID NO: 1766072 - RNA, 19 nt, Artificial Sequence
  Description of Artificial Sequence: Synthetic oligonucleotide
  Antisense strand to SEQ ID NO: 1766071
uauugcauugcauguagac

SEQ ID NO: 1766073 - RNA, 19 nt, Artificial Sequence
  Description of Artificial Sequence: Synthetic oligonucleotide
  Sense strand starting at position 3776 of SEQ ID NO: 1562696
ggaucagggaguuauuguu

SEQ ID NO: 1766074 - RNA, 19 nt, Artificial Sequence
  Description of Artificial Sequence: Synthetic oligonucleotide
  Antisense strand to SEQ ID NO: 1766073
aacaauaacucccugaucc

SEQ ID NO: 1766075 - RNA, 19 nt, Artificial Sequence
  Description of Artificial Sequence: Synthetic oligonucleotide
  Sense strand starting at position 3790 of SEQ ID NO: 1562696
uuguuuaaugagugcaguu

SEQ ID NO: 1766076 - RNA, 19 nt, Artificial Sequence
  Description of Artificial Sequence: Synthetic oligonucleotide
  Antisense strand to SEQ ID NO: 1766075
aacugcacucauuaaacaa

SEQ ID NO: 1766077 - RNA, 19 nt, Artificial Sequence
  Description of Artificial Sequence: Synthetic oligonucleotide
  Sense strand starting at position 3803 of SEQ ID NO: 1562696
gcaguuccaguuugggaaa

SEQ ID NO: 1766078 - RNA, 19 nt, Artificial Sequence
  Description of Artificial Sequence: Synthetic oligonucleotide
  Antisense strand to SEQ ID NO: 1766077
uuucccaaacuggaacugc

SEQ ID NO: 1766079 - RNA, 19 nt, Artificial Sequence
  Description of Artificial Sequence: Synthetic oligonucleotide
  Sense strand starting at position 3855 of SEQ ID NO: 1562696
guugcauaagaauguuuaa

SEQ ID NO: 1766080 - RNA, 19 nt, Artificial Sequence
  Description of Artificial Sequence: Synthetic oligonucleotide
  Antisense strand to SEQ ID NO: 1766079
uuaaacauucuuaugcaac

SEQ ID NO: 1766081 - RNA, 19 nt, Artificial Sequence
  Description of Artificial Sequence: Synthetic oligonucleotide
  Sense strand starting at position 3858 of SEQ ID NO: 1562696
gcauaagaauguuuaauac

SEQ ID NO: 1766082 - RNA, 19 nt, Artificial Sequence
  Description of Artificial Sequence: Synthetic oligonucleotide
  Antisense strand to SEQ ID NO: 1766081
guauuaaacauucuuaugc

SEQ ID NO: 1766083 - RNA, 19 nt, Artificial Sequence
  Description of Artificial Sequence: Synthetic oligonucleotide
  Sense strand starting at position 3917 of SEQ ID NO: 1562696
uguuguguauauguuacua

SEQ ID NO: 1766084 - RNA, 19 nt, Artificial Sequence
  Description of Artificial Sequence: Synthetic oligonucleotide
  Antisense strand to SEQ ID NO: 1766083
uaguaacauauacacaaca

SEQ ID NO: 1766085 - RNA, 19 nt, Artificial Sequence
  Description of Artificial Sequence: Synthetic oligonucleotide
  Sense strand starting at position 3950 of SEQ ID NO: 1562696
acaacaaaccucuguguuu

SEQ ID NO: 1766086 - RNA, 19 nt, Artificial Sequence
  Description of Artificial Sequence: Synthetic oligonucleotide
  Antisense strand to SEQ ID NO: 1766085
aaacacagagguuuguugu

SEQ ID NO: 1766087 - RNA, 19 nt, Artificial Sequence
  Description of Artificial Sequence: Synthetic oligonucleotide
  Sense strand starting at position 3961 of SEQ ID NO: 1562696
cuguguuugcugucagggu

SEQ ID NO: 1766088 - RNA, 19 nt, Artificial Sequence
  Description of Artificial Sequence: Synthetic oligonucleotide
  Antisense strand to SEQ ID NO: 1766087
acccugacagcaaacacag

SEQ ID NO: 1766089 - RNA, 19 nt, Artificial Sequence
  Description of Artificial Sequence: Synthetic oligonucleotide
  Sense strand starting at position 96 of SEQ ID NO: 1562697
ucagaugugccucaaucau

SEQ ID NO: 1766090 - RNA, 19 nt, Artificial Sequence
  Description of Artificial Sequence: Synthetic oligonucleotide
  Antisense strand to SEQ ID NO: 1766089
augauugaggcacaucuga

SEQ ID NO: 1766091 - RNA, 19 nt, Artificial Sequence
  Description of Artificial Sequence: Synthetic oligonucleotide
  Sense strand starting at position 122 of SEQ ID NO: 1562697
acugguuaucuaggcccaa

SEQ ID NO: 1766092 - RNA, 19 nt, Artificial Sequence
  Description of Artificial Sequence: Synthetic oligonucleotide
  Antisense strand to SEQ ID NO: 1766091
uugggccuagauaaccagu

SEQ ID NO: 1766093 - RNA, 19 nt, Artificial Sequence
  Description of Artificial Sequence: Synthetic oligonucleotide
  Sense strand starting at position 123 of SEQ ID NO: 1562697
cugguuaucuaggcccaaa

SEQ ID NO: 1766094 - RNA, 19 nt, Artificial Sequence
  Description of Artificial Sequence: Synthetic oligonucleotide
  Antisense strand to SEQ ID NO: 1766093
uuugggccuagauaaccag

SEQ ID NO: 1766095 - RNA, 19 nt, Artificial Sequence
  Description of Artificial Sequence: Synthetic oligonucleotide
  Sense strand starting at position 134 of SEQ ID NO: 1562697
ggcccaaaucccugucaaa

SEQ ID NO: 1766096 - RNA, 19 nt, Artificial Sequence
  Description of Artificial Sequence: Synthetic oligonucleotide
  Antisense strand to SEQ ID NO: 1766095
uuugacagggauuugggcc

SEQ ID NO: 1766097 - RNA, 19 nt, Artificial Sequence
  Description of Artificial Sequence: Synthetic oligonucleotide
  Sense strand starting at position 177 of SEQ ID NO: 1562697
agcugauaagcucauuaaa

SEQ ID NO: 1766098 - RNA, 19 nt, Artificial Sequence
  Description of Artificial Sequence: Synthetic oligonucleotide
  Antisense strand to SEQ ID NO: 1766097
uuuaaugagcuuaucagcu

SEQ ID NO: 1766099 - RNA, 19 nt, Artificial Sequence
  Description of Artificial Sequence: Synthetic oligonucleotide
  Sense strand starting at position 403 of SEQ ID NO: 1562697
guuaucaauuucuugugua

SEQ ID NO: 1766100 - RNA, 19 nt, Artificial Sequence
  Description of Artificial Sequence: Synthetic oligonucleotide
  Antisense strand to SEQ ID NO: 1766099
uacacaagaaauugauaac

SEQ ID NO: 1766101 - RNA, 19 nt, Artificial Sequence
  Description of Artificial Sequence: Synthetic oligonucleotide
  Sense strand starting at position 528 of SEQ ID NO: 1562697
guuggaaaugaggguaucu

SEQ ID NO: 1766102 - RNA, 19 nt, Artificial Sequence
  Description of Artificial Sequence: Synthetic oligonucleotide
  Antisense strand to SEQ ID NO: 1766101
agauacccucauuuccaac

SEQ ID NO: 1766103 - RNA, 19 nt, Artificial Sequence
  Description of Artificial Sequence: Synthetic oligonucleotide
  Sense strand starting at position 533 of SEQ ID NO: 1562697
aaaugaggguaucugcauu

SEQ ID NO: 1766104 - RNA, 19 nt, Artificial Sequence
  Description of Artificial Sequence: Synthetic oligonucleotide
  Antisense strand to SEQ ID NO: 1766103
aaugcagauacccucauuu

SEQ ID NO: 1766105 - RNA, 19 nt, Artificial Sequence
  Description of Artificial Sequence: Synthetic oligonucleotide
  Sense strand starting at position 665 of SEQ ID NO: 1562697
auugaaggaugcccucaaa

SEQ ID NO: 1766106 - RNA, 19 nt, Artificial Sequence
  Description of Artificial Sequence: Synthetic oligonucleotide
  Antisense strand to SEQ ID NO: 1766105
uuugagggcauccuucaau

SEQ ID NO: 1766107 - RNA, 19 nt, Artificial Sequence
  Description of Artificial Sequence: Synthetic oligonucleotide
  Sense strand starting at position 712 of SEQ ID NO: 1562697
ccucgucucacagagauga

SEQ ID NO: 1766108 - RNA, 19 nt, Artificial Sequence
  Description of Artificial Sequence: Synthetic oligonucleotide
  Antisense strand to SEQ ID NO: 1766107
ucaucucugugagacgagg

SEQ ID NO: 1766109 - RNA, 19 nt, Artificial Sequence
  Description of Artificial Sequence: Synthetic oligonucleotide
  Sense strand starting at position 728 of SEQ ID NO: 1562697
ugaacuaaaucauucgcca

SEQ ID NO: 1766110 - RNA, 19 nt, Artificial Sequence
  Description of Artificial Sequence: Synthetic oligonucleotide
  Antisense strand to SEQ ID NO: 1766109
uggcgaaugauuuaguuca

SEQ ID NO: 1766111 - RNA, 19 nt, Artificial Sequence
  Description of Artificial Sequence: Synthetic oligonucleotide
  Sense strand starting at position 817 of SEQ ID NO: 1562697
uggaauucuuuccugcuca

SEQ ID NO: 1766112 - RNA, 19 nt, Artificial Sequence
  Description of Artificial Sequence: Synthetic oligonucleotide
  Antisense strand to SEQ ID NO: 1766111
ugagcaggaaagaauucca

SEQ ID NO: 1766113 - RNA, 19 nt, Artificial Sequence
  Description of Artificial Sequence: Synthetic oligonucleotide
  Sense strand starting at position 855 of SEQ ID NO: 1562697
accugacaauuccuguguu

SEQ ID NO: 1766114 - RNA, 19 nt, Artificial Sequence
  Description of Artificial Sequence: Synthetic oligonucleotide
  Antisense strand to SEQ ID NO: 1766113
aacacaggaauugucaggu

SEQ ID NO: 1766115 - RNA, 19 nt, Artificial Sequence
  Description of Artificial Sequence: Synthetic oligonucleotide
  Sense strand starting at position 858 of SEQ ID NO: 1562697
ugacaauuccuguguuaca

SEQ ID NO: 1766116 - RNA, 19 nt, Artificial Sequence
  Description of Artificial Sequence: Synthetic oligonucleotide
  Antisense strand to SEQ ID NO: 1766115
uguaacacaggaauuguca

SEQ ID NO: 1766117 - RNA, 19 nt, Artificial Sequence
  Description of Artificial Sequence: Synthetic oligonucleotide
  Sense strand starting at position 897 of SEQ ID NO: 1562697
guugaaauaaggugugauc

SEQ ID NO: 1766118 - RNA, 19 nt, Artificial Sequence
  Description of Artificial Sequence: Synthetic oligonucleotide
  Antisense strand to SEQ ID NO: 1766117
gaucacaccuuauuucaac

SEQ ID NO: 1766119 - RNA, 19 nt, Artificial Sequence
  Description of Artificial Sequence: Synthetic oligonucleotide
  Sense strand starting at position 899 of SEQ ID NO: 1562697
ugaaauaaggugugaucgu

SEQ ID NO: 1766120 - RNA, 19 nt, Artificial Sequence
  Description of Artificial Sequence: Synthetic oligonucleotide
  Antisense strand to SEQ ID NO: 1766119
acgaucacaccuuauuuca

SEQ ID NO: 1766121 - RNA, 19 nt, Artificial Sequence
  Description of Artificial Sequence: Synthetic oligonucleotide
  Sense strand starting at position 906 of SEQ ID NO: 1562697
aggugugaucgucacugaa

SEQ ID NO: 1766122 - RNA, 19 nt, Artificial Sequence
  Description of Artificial Sequence: Synthetic oligonucleotide
  Antisense strand to SEQ ID NO: 1766121
uucagugacgaucacaccu

SEQ ID NO: 1766123 - RNA, 19 nt, Artificial Sequence
  Description of Artificial Sequence: Synthetic oligonucleotide
  Sense strand starting at position 909 of SEQ ID NO: 1562697
ugugaucgucacugaauga

SEQ ID NO: 1766124 - RNA, 19 nt, Artificial Sequence
  Description of Artificial Sequence: Synthetic oligonucleotide
  Antisense strand to SEQ ID NO: 1766123
ucauucagugacgaucaca

SEQ ID NO: 1766125 - RNA, 19 nt, Artificial Sequence
  Description of Artificial Sequence: Synthetic oligonucleotide
  Sense strand starting at position 943 of SEQ ID NO: 1562697
cugccaguuaaguaguuua

SEQ ID NO: 1766126 - RNA, 19 nt, Artificial Sequence
  Description of Artificial Sequence: Synthetic oligonucleotide
  Antisense strand to SEQ ID NO: 1766125
uaaacuacuuaacuggcag

SEQ ID NO: 1766127 - RNA, 19 nt, Artificial Sequence
  Description of Artificial Sequence: Synthetic oligonucleotide
  Sense strand starting at position 946 of SEQ ID NO: 1562697
ccaguuaaguaguuuaaug

SEQ ID NO: 1766128 - RNA, 19 nt, Artificial Sequence
  Description of Artificial Sequence: Synthetic oligonucleotide
  Antisense strand to SEQ ID NO: 1766127
cauuaaacuacuuaacugg

SEQ ID NO: 1766129 - RNA, 19 nt, Artificial Sequence
  Description of Artificial Sequence: Synthetic oligonucleotide
  Sense strand starting at position 948 of SEQ ID NO: 1562697
aguuaaguaguuuaaugga

SEQ ID NO: 1766130 - RNA, 19 nt, Artificial Sequence
  Description of Artificial Sequence: Synthetic oligonucleotide
  Antisense strand to SEQ ID NO: 1766129
uccauuaaacuacuuaacu

SEQ ID NO: 1766131 - RNA, 19 nt, Artificial Sequence
  Description of Artificial Sequence: Synthetic oligonucleotide
  Sense strand starting at position 953 of SEQ ID NO: 1562697
aguaguuuaauggagcaca

SEQ ID NO: 1766132 - RNA, 19 nt, Artificial Sequence
  Description of Artificial Sequence: Synthetic oligonucleotide
  Antisense strand to SEQ ID NO: 1766131
ugugcuccauuaaacuacu

SEQ ID NO: 1766133 - RNA, 19 nt, Artificial Sequence
  Description of Artificial Sequence: Synthetic oligonucleotide
  Sense strand starting at position 1079 of SEQ ID NO: 1562697
ggagaagacugcuugguga

SEQ ID NO: 1766134 - RNA, 19 nt, Artificial Sequence
  Description of Artificial Sequence: Synthetic oligonucleotide
  Antisense strand to SEQ ID NO: 1766133
ucaccaagcagucuucucc

SEQ ID NO: 1766135 - RNA, 19 nt, Artificial Sequence
  Description of Artificial Sequence: Synthetic oligonucleotide
  Sense strand starting at position 1227 of SEQ ID NO: 1562697
gagacaagguucuccgaga

SEQ ID NO: 1766136 - RNA, 19 nt, Artificial Sequence
  Description of Artificial Sequence: Synthetic oligonucleotide
  Antisense strand to SEQ ID NO: 1766135
ucucggagaaccuugucuc

SEQ ID NO: 1766137 - RNA, 19 nt, Artificial Sequence
  Description of Artificial Sequence: Synthetic oligonucleotide
  Sense strand starting at position 1965 of SEQ ID NO: 1562697
acuacugugaggugacaga

SEQ ID NO: 1766138 - RNA, 19 nt, Artificial Sequence
  Description of Artificial Sequence: Synthetic oligonucleotide
  Antisense strand to SEQ ID NO: 1766137
ucugucaccucacaguagu

SEQ ID NO: 1766139 - RNA, 19 nt, Artificial Sequence
  Description of Artificial Sequence: Synthetic oligonucleotide
  Sense strand starting at position 2389 of SEQ ID NO: 1562697
guuagcguuagccuuaagu

SEQ ID NO: 1766140 - RNA, 19 nt, Artificial Sequence
  Description of Artificial Sequence: Synthetic oligonucleotide
  Antisense strand to SEQ ID NO: 1766139
acuuaaggcuaacgcuaac

SEQ ID NO: 1766141 - RNA, 19 nt, Artificial Sequence
  Description of Artificial Sequence: Synthetic oligonucleotide
  Sense strand starting at position 2535 of SEQ ID NO: 1562697
gccugucugcguuugagau

SEQ ID NO: 1766142 - RNA, 19 nt, Artificial Sequence
  Description of Artificial Sequence: Synthetic oligonucleotide
  Antisense strand to SEQ ID NO: 1766141
aucucaaacgcagacaggc

SEQ ID NO: 1766143 - RNA, 19 nt, Artificial Sequence
  Description of Artificial Sequence: Synthetic oligonucleotide
  Sense strand starting at position 2558 of SEQ ID NO: 1562697
uugggcgugauugaggaau

SEQ ID NO: 1766144 - RNA, 19 nt, Artificial Sequence
  Description of Artificial Sequence: Synthetic oligonucleotide
  Antisense strand to SEQ ID NO: 1766143
auuccucaaucacgcccaa

SEQ ID NO: 1766145 - RNA, 19 nt, Artificial Sequence
  Description of Artificial Sequence: Synthetic oligonucleotide
  Sense strand starting at position 2614 of SEQ ID NO: 1562697
uccguuagucagcauagaa

SEQ ID NO: 1766146 - RNA, 19 nt, Artificial Sequence
  Description of Artificial Sequence: Synthetic oligonucleotide
  Antisense strand to SEQ ID NO: 1766145
uucuaugcugacuaacgga

SEQ ID NO: 1766147 - RNA, 19 nt, Artificial Sequence
  Description of Artificial Sequence: Synthetic oligonucleotide
  Sense strand starting at position 2866 of SEQ ID NO: 1562697
gaaccuagaggucgguauu

SEQ ID NO: 1766148 - RNA, 19 nt, Artificial Sequence
  Description of Artificial Sequence: Synthetic oligonucleotide
  Antisense strand to SEQ ID NO: 1766147
aauaccgaccucuagguuc

SEQ ID NO: 1766149 - RNA, 19 nt, Artificial Sequence
  Description of Artificial Sequence: Synthetic oligonucleotide
  Sense strand starting at position 2917 of SEQ ID NO: 1562697
aacgucuuucgccuaguga

SEQ ID NO: 1766150 - RNA, 19 nt, Artificial Sequence
  Description of Artificial Sequence: Synthetic oligonucleotide
  Antisense strand to SEQ ID NO: 1766149
ucacuaggcgaaagacguu

SEQ ID NO: 1766151 - RNA, 19 nt, Artificial Sequence
  Description of Artificial Sequence: Synthetic oligonucleotide
  Sense strand starting at position 2920 of SEQ ID NO: 1562697
gucuuucgccuagugagca

SEQ ID NO: 1766152 - RNA, 19 nt, Artificial Sequence
  Description of Artificial Sequence: Synthetic oligonucleotide
  Antisense strand to SEQ ID NO: 1766151
ugcucacuaggcgaaagac

SEQ ID NO: 1766153 - RNA, 19 nt, Artificial Sequence
  Description of Artificial Sequence: Synthetic oligonucleotide
  Sense strand starting at position 3233 of SEQ ID NO: 1562697
ggacacugguaguuugaca

SEQ ID NO: 1766154 - RNA, 19 nt, Artificial Sequence
  Description of Artificial Sequence: Synthetic oligonucleotide
  Antisense strand to SEQ ID NO: 1766153
ugucaaacuaccagugucc

SEQ ID NO: 1766155 - RNA, 19 nt, Artificial Sequence
  Description of Artificial Sequence: Synthetic oligonucleotide
  Sense strand starting at position 3271 of SEQ ID NO: 1562697
uggccaugaccauagguau

SEQ ID NO: 1766156 - RNA, 19 nt, Artificial Sequence
  Description of Artificial Sequence: Synthetic oligonucleotide
  Antisense strand to SEQ ID NO: 1766155
auaccuauggucauggcca

SEQ ID NO: 1766157 - RNA, 19 nt, Artificial Sequence
  Description of Artificial Sequence: Synthetic oligonucleotide
  Sense strand starting at position 3314 of SEQ ID NO: 1562697
gugagacccuucucaucca

SEQ ID NO: 1766158 - RNA, 19 nt, Artificial Sequence
  Description of Artificial Sequence: Synthetic oligonucleotide
  Antisense strand to SEQ ID NO: 1766157
uggaugagaagggucucac

SEQ ID NO: 1766159 - RNA, 19 nt, Artificial Sequence
  Description of Artificial Sequence: Synthetic oligonucleotide
  Sense strand starting at position 3321 of SEQ ID NO: 1562697
ccuucucauccaggaaagu

SEQ ID NO: 1766160 - RNA, 19 nt, Artificial Sequence
  Description of Artificial Sequence: Synthetic oligonucleotide
  Antisense strand to SEQ ID NO: 1766159
acuuuccuggaugagaagg

SEQ ID NO: 1766161 - RNA, 19 nt, Artificial Sequence
  Description of Artificial Sequence: Synthetic oligonucleotide
  Sense strand starting at position 3425 of SEQ ID NO: 1562697
guuacaggaaagugauuga

SEQ ID NO: 1766162 - RNA, 19 nt, Artificial Sequence
  Description of Artificial Sequence: Synthetic oligonucleotide
  Antisense strand to SEQ ID NO: 1766161
ucaaucacuuuccuguaac

SEQ ID NO: 1766163 - RNA, 19 nt, Artificial Sequence
  Description of Artificial Sequence: Synthetic oligonucleotide
  Sense strand starting at position 3435 of SEQ ID NO: 1562697
agugauugauucccucacu

SEQ ID NO: 1766164 - RNA, 19 nt, Artificial Sequence
  Description of Artificial Sequence: Synthetic oligonucleotide
  Antisense strand to SEQ ID NO: 1766163
agugagggaaucaaucacu

SEQ ID NO: 1766165 - RNA, 19 nt, Artificial Sequence
  Description of Artificial Sequence: Synthetic oligonucleotide
  Sense strand starting at position 3436 of SEQ ID NO: 1562697
gugauugauucccucacua

SEQ ID NO: 1766166 - RNA, 19 nt, Artificial Sequence
  Description of Artificial Sequence: Synthetic oligonucleotide
  Antisense strand to SEQ ID NO: 1766165
uagugagggaaucaaucac

SEQ ID NO: 1766167 - RNA, 19 nt, Artificial Sequence
  Description of Artificial Sequence: Synthetic oligonucleotide
  Sense strand starting at position 3551 of SEQ ID NO: 1562697
uuuaacuccugagcagaaa

SEQ ID NO: 1766168 - RNA, 19 nt, Artificial Sequence
  Description of Artificial Sequence: Synthetic oligonucleotide
  Antisense strand to SEQ ID NO: 1766167
uuucugcucaggaguuaaa

SEQ ID NO: 1766169 - RNA, 19 nt, Artificial Sequence
  Description of Artificial Sequence: Synthetic oligonucleotide
  Sense strand starting at position 68 of SEQ ID NO: 1562698
ggacaucuugcccaaggca

SEQ ID NO: 1766170 - RNA, 19 nt, Artificial Sequence
  Description of Artificial Sequence: Synthetic oligonucleotide
  Antisense strand to SEQ ID NO: 1766169
ugccuugggcaagaugucc

SEQ ID NO: 1766171 - RNA, 19 nt, Artificial Sequence
  Description of Artificial Sequence: Synthetic oligonucleotide
  Sense strand starting at position 169 of SEQ ID NO: 1562698
gcuucuccacaucaggaaa

SEQ ID NO: 1766172 - RNA, 19 nt, Artificial Sequence
  Description of Artificial Sequence: Synthetic oligonucleotide
  Antisense strand to SEQ ID NO: 1766171
uuuccugauguggagaagc

SEQ ID NO: 1766173 - RNA, 19 nt, Artificial Sequence
  Description of Artificial Sequence: Synthetic oligonucleotide
  Sense strand starting at position 695 of SEQ ID NO: 1562698
uugagcaucccauauggua

SEQ ID NO: 1766174 - RNA, 19 nt, Artificial Sequence
  Description of Artificial Sequence: Synthetic oligonucleotide
  Antisense strand to SEQ ID NO: 1766173
uaccauaugggaugcucaa

SEQ ID NO: 1766175 - RNA, 19 nt, Artificial Sequence
  Description of Artificial Sequence: Synthetic oligonucleotide
  Sense strand starting at position 746 of SEQ ID NO: 1562698
ucuucugaaguccgugaaa

SEQ ID NO: 1766176 - RNA, 19 nt, Artificial Sequence
  Description of Artificial Sequence: Synthetic oligonucleotide
  Antisense strand to SEQ ID NO: 1766175
uuucacggacuucagaaga

SEQ ID NO: 1766177 - RNA, 19 nt, Artificial Sequence
  Description of Artificial Sequence: Synthetic oligonucleotide
  Sense strand starting at position 783 of SEQ ID NO: 1562698
gcuaacuggucauucucau

SEQ ID NO: 1766178 - RNA, 19 nt, Artificial Sequence
  Description of Artificial Sequence: Synthetic oligonucleotide
  Antisense strand to SEQ ID NO: 1766177
augagaaugaccaguuagc

SEQ ID NO: 1766179 - RNA, 19 nt, Artificial Sequence
  Description of Artificial Sequence: Synthetic oligonucleotide
  Sense strand starting at position 789 of SEQ ID NO: 1562698
uggucauucucauucucca

SEQ ID NO: 1766180 - RNA, 19 nt, Artificial Sequence
  Description of Artificial Sequence: Synthetic oligonucleotide
  Antisense strand to SEQ ID NO: 1766179
uggagaaugagaaugacca

SEQ ID NO: 1766181 - RNA, 19 nt, Artificial Sequence
  Description of Artificial Sequence: Synthetic oligonucleotide
  Sense strand starting at position 1436 of SEQ ID NO: 1562698
gguccacucacucgagaug

SEQ ID NO: 1766182 - RNA, 19 nt, Artificial Sequence
  Description of Artificial Sequence: Synthetic oligonucleotide
  Antisense strand to SEQ ID NO: 1766181
caucucgagugaguggacc

SEQ ID NO: 1766183 - RNA, 19 nt, Artificial Sequence
  Description of Artificial Sequence: Synthetic oligonucleotide
  Sense strand starting at position 1465 of SEQ ID NO: 1562698
ugcggucucuuuccaggaa

SEQ ID NO: 1766184 - RNA, 19 nt, Artificial Sequence
  Description of Artificial Sequence: Synthetic oligonucleotide
  Antisense strand to SEQ ID NO: 1766183
uuccuggaaagagaccgca

SEQ ID NO: 1766185 - RNA, 19 nt, Artificial Sequence
  Description of Artificial Sequence: Synthetic oligonucleotide
  Sense strand starting at position 1503 of SEQ ID NO: 1562698
ugccaccgcucuuuagaaa

SEQ ID NO: 1766186 - RNA, 19 nt, Artificial Sequence
  Description of Artificial Sequence: Synthetic oligonucleotide
  Antisense strand to SEQ ID NO: 1766185
uuucuaaagagcgguggca

SEQ ID NO: 1766187 - RNA, 19 nt, Artificial Sequence
  Description of Artificial Sequence: Synthetic oligonucleotide
  Sense strand starting at position 1537 of SEQ ID NO: 1562698
auccuuccaguuugucaaa

SEQ ID NO: 1766188 - RNA, 19 nt, Artificial Sequence
  Description of Artificial Sequence: Synthetic oligonucleotide
  Antisense strand to SEQ ID NO: 1766187
uuugacaaacuggaaggau

SEQ ID NO: 1766189 - RNA, 19 nt, Artificial Sequence
  Description of Artificial Sequence: Synthetic oligonucleotide
  Sense strand starting at position 1539 of SEQ ID NO: 1562698
ccuuccaguuugucaaacu

SEQ ID NO: 1766190 - RNA, 19 nt, Artificial Sequence
  Description of Artificial Sequence: Synthetic oligonucleotide
  Antisense strand to SEQ ID NO: 1766189
aguuugacaaacuggaagg

SEQ ID NO: 1766191 - RNA, 19 nt, Artificial Sequence
  Description of Artificial Sequence: Synthetic oligonucleotide
  Sense strand starting at position 1683 of SEQ ID NO: 1562698
guuuacuugacucguggga

SEQ ID NO: 1766192 - RNA, 19 nt, Artificial Sequence
  Description of Artificial Sequence: Synthetic oligonucleotide
  Antisense strand to SEQ ID NO: 1766191
ucccacgagucaaguaaac

SEQ ID NO: 1766193 - RNA, 19 nt, Artificial Sequence
  Description of Artificial Sequence: Synthetic oligonucleotide
  Sense strand starting at position 1819 of SEQ ID NO: 1562698
gaggucguaccucgauaua

SEQ ID NO: 1766194 - RNA, 19 nt, Artificial Sequence
  Description of Artificial Sequence: Synthetic oligonucleotide
  Antisense strand to SEQ ID NO: 1766193
uauaucgagguacgaccuc

SEQ ID NO: 1766195 - RNA, 19 nt, Artificial Sequence
  Description of Artificial Sequence: Synthetic oligonucleotide
  Sense strand starting at position 1822 of SEQ ID NO: 1562698
gucguaccucgauauacuc

SEQ ID NO: 1766196 - RNA, 19 nt, Artificial Sequence
  Description of Artificial Sequence: Synthetic oligonucleotide
  Antisense strand to SEQ ID NO: 1766195
gaguauaucgagguacgac

SEQ ID NO: 1766197 - RNA, 19 nt, Artificial Sequence
  Description of Artificial Sequence: Synthetic oligonucleotide
  Sense strand starting at position 2097 of SEQ ID NO: 1562698
ccguucugacgucacuaua

SEQ ID NO: 1766198 - RNA, 19 nt, Artificial Sequence
  Description of Artificial Sequence: Synthetic oligonucleotide
  Antisense strand to SEQ ID NO: 1766197
uauagugacgucagaacgg

SEQ ID NO: 1766199 - RNA, 19 nt, Artificial Sequence
  Description of Artificial Sequence: Synthetic oligonucleotide
  Sense strand starting at position 2100 of SEQ ID NO: 1562698
uucugacgucacuauaaau

SEQ ID NO: 1766200 - RNA, 19 nt, Artificial Sequence
  Description of Artificial Sequence: Synthetic oligonucleotide
  Antisense strand to SEQ ID NO: 1766199
auuuauagugacgucagaa

SEQ ID NO: 1766201 - RNA, 19 nt, Artificial Sequence
  Description of Artificial Sequence: Synthetic oligonucleotide
  Sense strand starting at position 2130 of SEQ ID NO: 1562698
uuggaaauguaguccuugu

SEQ ID NO: 1766202 - RNA, 19 nt, Artificial Sequence
  Description of Artificial Sequence: Synthetic oligonucleotide
  Antisense strand to SEQ ID NO: 1766201
acaaggacuacauuuccaa

SEQ ID NO: 1766203 - RNA, 19 nt, Artificial Sequence
  Description of Artificial Sequence: Synthetic oligonucleotide
  Sense strand starting at position 2170 of SEQ ID NO: 1562698
uugucaaugcugugaacac

SEQ ID NO: 1766204 - RNA, 19 nt, Artificial Sequence
  Description of Artificial Sequence: Synthetic oligonucleotide
  Antisense strand to SEQ ID NO: 1766203
guguucacagcauugacaa

SEQ ID NO: 1766205 - RNA, 19 nt, Artificial Sequence
  Description of Artificial Sequence: Synthetic oligonucleotide
  Sense strand starting at position 2229 of SEQ ID NO: 1562698
cguguucuucacgcgagaa

SEQ ID NO: 1766206 - RNA, 19 nt, Artificial Sequence
  Description of Artificial Sequence: Synthetic oligonucleotide
  Antisense strand to SEQ ID NO: 1766205
uucucgcgugaagaacacg

SEQ ID NO: 1766207 - RNA, 19 nt, Artificial Sequence
  Description of Artificial Sequence: Synthetic oligonucleotide
  Sense strand starting at position 2231 of SEQ ID NO: 1562698
uguucuucacgcgagaaau

SEQ ID NO: 1766208 - RNA, 19 nt, Artificial Sequence
  Description of Artificial Sequence: Synthetic oligonucleotide
  Antisense strand to SEQ ID NO: 1766207
auuucucgcgugaagaaca

SEQ ID NO: 1766209 - RNA, 19 nt, Artificial Sequence
  Description of Artificial Sequence: Synthetic oligonucleotide
  Sense strand starting at position 2243 of SEQ ID NO: 1562698
gagaaauucuggcuuugca

SEQ ID NO: 1766210 - RNA, 19 nt, Artificial Sequence
  Description of Artificial Sequence: Synthetic oligonucleotide
  Antisense strand to SEQ ID NO: 1766209
ugcaaagccagaauuucuc

SEQ ID NO: 1766211 - RNA, 19 nt, Artificial Sequence
  Description of Artificial Sequence: Synthetic oligonucleotide
  Sense strand starting at position 2252 of SEQ ID NO: 1562698
uggcuuugcagcguccaaa

SEQ ID NO: 1766212 - RNA, 19 nt, Artificial Sequence
  Description of Artificial Sequence: Synthetic oligonucleotide
  Antisense strand to SEQ ID NO: 1766211
uuuggacgcugcaaagcca

SEQ ID NO: 1766213 - RNA, 19 nt, Artificial Sequence
  Description of Artificial Sequence: Synthetic oligonucleotide
  Sense strand starting at position 2300 of SEQ ID NO: 1562698
agaacuauguaugcuucga

SEQ ID NO: 1766214 - RNA, 19 nt, Artificial Sequence
  Description of Artificial Sequence: Synthetic oligonucleotide
  Antisense strand to SEQ ID NO: 1766213
ucgaagcauacauaguucu

SEQ ID NO: 1766215 - RNA, 19 nt, Artificial Sequence
  Description of Artificial Sequence: Synthetic oligonucleotide
  Sense strand starting at position 2302 of SEQ ID NO: 1562698
aacuauguaugcuucgaga

SEQ ID NO: 1766216 - RNA, 19 nt, Artificial Sequence
  Description of Artificial Sequence: Synthetic oligonucleotide
  Antisense strand to SEQ ID NO: 1766215
ucucgaagcauacauaguu

SEQ ID NO: 1766217 - RNA, 19 nt, Artificial Sequence
  Description of Artificial Sequence: Synthetic oligonucleotide
  Sense strand starting at position 2304 of SEQ ID NO: 1562698
cuauguaugcuucgagauu

SEQ ID NO: 1766218 - RNA, 19 nt, Artificial Sequence
  Description of Artificial Sequence: Synthetic oligonucleotide
  Antisense strand to SEQ ID NO: 1766217
aaucucgaagcauacauag

SEQ ID NO: 1766219 - RNA, 19 nt, Artificial Sequence
  Description of Artificial Sequence: Synthetic oligonucleotide
  Sense strand starting at position 2310 of SEQ ID NO: 1562698
augcuucgagauuauucua

SEQ ID NO: 1766220 - RNA, 19 nt, Artificial Sequence
  Description of Artificial Sequence: Synthetic oligonucleotide
  Antisense strand to SEQ ID NO: 1766219
uagaauaaucucgaagcau

SEQ ID NO: 1766221 - RNA, 19 nt, Artificial Sequence
  Description of Artificial Sequence: Synthetic oligonucleotide
  Sense strand starting at position 2313 of SEQ ID NO: 1562698
cuucgagauuauucuacaa

SEQ ID NO: 1766222 - RNA, 19 nt, Artificial Sequence
  Description of Artificial Sequence: Synthetic oligonucleotide
  Antisense strand to SEQ ID NO: 1766221
uuguagaauaaucucgaag

SEQ ID NO: 1766223 - RNA, 19 nt, Artificial Sequence
  Description of Artificial Sequence: Synthetic oligonucleotide
  Sense strand starting at position 2687 of SEQ ID NO: 1562698
acaagacagugguucgauu

SEQ ID NO: 1766224 - RNA, 19 nt, Artificial Sequence
  Description of Artificial Sequence: Synthetic oligonucleotide
  Antisense strand to SEQ ID NO: 1766223
aaucgaaccacugucuugu

SEQ ID NO: 1766225 - RNA, 19 nt, Artificial Sequence
  Description of Artificial Sequence: Synthetic oligonucleotide
  Sense strand starting at position 2689 of SEQ ID NO: 1562698
aagacagugguucgauuaa

SEQ ID NO: 1766226 - RNA, 19 nt, Artificial Sequence
  Description of Artificial Sequence: Synthetic oligonucleotide
  Antisense strand to SEQ ID NO: 1766225
uuaaucgaaccacugucuu

SEQ ID NO: 1766227 - RNA, 19 nt, Artificial Sequence
  Description of Artificial Sequence: Synthetic oligonucleotide
  Sense strand starting at position 2713 of SEQ ID NO: 1562698
gucuaaagauuauucugua

SEQ ID NO: 1766228 - RNA, 19 nt, Artificial Sequence
  Description of Artificial Sequence: Synthetic oligonucleotide
  Antisense strand to SEQ ID NO: 1766227
uacagaauaaucuuuagac

SEQ ID NO: 1766229 - RNA, 19 nt, Artificial Sequence
  Description of Artificial Sequence: Synthetic oligonucleotide
  Sense strand starting at position 3398 of SEQ ID NO: 1562698
ggaauuucuucccaaacga

SEQ ID NO: 1766230 - RNA, 19 nt, Artificial Sequence
  Description of Artificial Sequence: Synthetic oligonucleotide
  Antisense strand to SEQ ID NO: 1766229
ucguuugggaagaaauucc

SEQ ID NO: 1766231 - RNA, 19 nt, Artificial Sequence
  Description of Artificial Sequence: Synthetic oligonucleotide
  Sense strand starting at position 3409 of SEQ ID NO: 1562698
ccaaacgaaagaugugaau

SEQ ID NO: 1766232 - RNA, 19 nt, Artificial Sequence
  Description of Artificial Sequence: Synthetic oligonucleotide
  Antisense strand to SEQ ID NO: 1766231
auucacaucuuucguuugg

SEQ ID NO: 1766233 - RNA, 19 nt, Artificial Sequence
  Description of Artificial Sequence: Synthetic oligonucleotide
  Sense strand starting at position 3563 of SEQ ID NO: 1562698
cagagacacuuguuagauc

SEQ ID NO: 1766234 - RNA, 19 nt, Artificial Sequence
  Description of Artificial Sequence: Synthetic oligonucleotide
  Antisense strand to SEQ ID NO: 1766233
gaucuaacaagugucucug

SEQ ID NO: 1766235 - RNA, 19 nt, Artificial Sequence
  Description of Artificial Sequence: Synthetic oligonucleotide
  Sense strand starting at position 3571 of SEQ ID NO: 1562698
cuuguuagaucaucacaca

SEQ ID NO: 1766236 - RNA, 19 nt, Artificial Sequence
  Description of Artificial Sequence: Synthetic oligonucleotide
  Antisense strand to SEQ ID NO: 1766235
ugugugaugaucuaacaag

SEQ ID NO: 1766237 - RNA, 19 nt, Artificial Sequence
  Description of Artificial Sequence: Synthetic oligonucleotide
  Sense strand starting at position 3607 of SEQ ID NO: 1562698
agcuguguccgugcaagaa

SEQ ID NO: 1766238 - RNA, 19 nt, Artificial Sequence
  Description of Artificial Sequence: Synthetic oligonucleotide
  Antisense strand to SEQ ID NO: 1766237
uucuugcacggacacagcu

SEQ ID NO: 1766239 - RNA, 19 nt, Artificial Sequence
  Description of Artificial Sequence: Synthetic oligonucleotide
  Sense strand starting at position 3652 of SEQ ID NO: 1562698
ccuaguucgggaggucaga

SEQ ID NO: 1766240 - RNA, 19 nt, Artificial Sequence
  Description of Artificial Sequence: Synthetic oligonucleotide
  Antisense strand to SEQ ID NO: 1766239
ucugaccucccgaacuagg

SEQ ID NO: 1766241 - RNA, 19 nt, Artificial Sequence
  Description of Artificial Sequence: Synthetic oligonucleotide
  Sense strand starting at position 3683 of SEQ ID NO: 1562698
ggcagaaagugauugcaga

SEQ ID NO: 1766242 - RNA, 19 nt, Artificial Sequence
  Description of Artificial Sequence: Synthetic oligonucleotide
  Antisense strand to SEQ ID NO: 1766241
ucugcaaucacuuucugcc

SEQ ID NO: 1766243 - RNA, 19 nt, Artificial Sequence
  Description of Artificial Sequence: Synthetic oligonucleotide
  Sense strand starting at position 3684 of SEQ ID NO: 1562698
gcagaaagugauugcagau

SEQ ID NO: 1766244 - RNA, 19 nt, Artificial Sequence
  Description of Artificial Sequence: Synthetic oligonucleotide
  Antisense strand to SEQ ID NO: 1766243
aucugcaaucacuuucugc

SEQ ID NO: 1766245 - RNA, 19 nt, Artificial Sequence
  Description of Artificial Sequence: Synthetic oligonucleotide
  Sense strand starting at position 3722 of SEQ ID NO: 1562698
gcaacagucagguggaaag

SEQ ID NO: 1766246 - RNA, 19 nt, Artificial Sequence
  Description of Artificial Sequence: Synthetic oligonucleotide
  Antisense strand to SEQ ID NO: 1766245
cuuuccaccugacuguugc

SEQ ID NO: 1766247 - RNA, 19 nt, Artificial Sequence
  Description of Artificial Sequence: Synthetic oligonucleotide
  Sense strand starting at position 3972 of SEQ ID NO: 1562698
auaguuugaggucagaagu

SEQ ID NO: 1766248 - RNA, 19 nt, Artificial Sequence
  Description of Artificial Sequence: Synthetic oligonucleotide
  Antisense strand to SEQ ID NO: 1766247
acuucugaccucaaacuau

SEQ ID NO: 1766249 - RNA, 19 nt, Artificial Sequence
  Description of Artificial Sequence: Synthetic oligonucleotide
  Sense strand starting at position 5 of SEQ ID NO: 1562699
uuguucuugucacuuggau

SEQ ID NO: 1766250 - RNA, 19 nt, Artificial Sequence
  Description of Artificial Sequence: Synthetic oligonucleotide
  Antisense strand to SEQ ID NO: 1766249
auccaagugacaagaacaa

SEQ ID NO: 1766251 - RNA, 19 nt, Artificial Sequence
  Description of Artificial Sequence: Synthetic oligonucleotide
  Sense strand starting at position 83 of SEQ ID NO: 1562699
guuggcaggcuaugugaaa

SEQ ID NO: 1766252 - RNA, 19 nt, Artificial Sequence
  Description of Artificial Sequence: Synthetic oligonucleotide
  Antisense strand to SEQ ID NO: 1766251
uuucacauagccugccaac

SEQ ID NO: 1766253 - RNA, 19 nt, Artificial Sequence
  Description of Artificial Sequence: Synthetic oligonucleotide
  Sense strand starting at position 127 of SEQ ID NO: 1562699
ggacgucagucaccucuau

SEQ ID NO: 1766254 - RNA, 19 nt, Artificial Sequence
  Description of Artificial Sequence: Synthetic oligonucleotide
  Antisense strand to SEQ ID NO: 1766253
auagaggugacugacgucc

SEQ ID NO: 1766255 - RNA, 19 nt, Artificial Sequence
  Description of Artificial Sequence: Synthetic oligonucleotide
  Sense strand starting at position 201 of SEQ ID NO: 1562699
auaauauggccucaccuga

SEQ ID NO: 1766256 - RNA, 19 nt, Artificial Sequence
  Description of Artificial Sequence: Synthetic oligonucleotide
  Antisense strand to SEQ ID NO: 1766255
ucaggugaggccauauuau

SEQ ID NO: 1766257 - RNA, 19 nt, Artificial Sequence
  Description of Artificial Sequence: Synthetic oligonucleotide
  Sense strand starting at position 308 of SEQ ID NO: 1562699
agaaguuaaucacaagaau

SEQ ID NO: 1766258 - RNA, 19 nt, Artificial Sequence
  Description of Artificial Sequence: Synthetic oligonucleotide
  Antisense strand to SEQ ID NO: 1766257
auucuugugauuaacuucu

SEQ ID NO: 1766259 - RNA, 19 nt, Artificial Sequence
  Description of Artificial Sequence: Synthetic oligonucleotide
  Sense strand starting at position 348 of SEQ ID NO: 1562699
ccuccaagagccuauauga

SEQ ID NO: 1766260 - RNA, 19 nt, Artificial Sequence
  Description of Artificial Sequence: Synthetic oligonucleotide
  Antisense strand to SEQ ID NO: 1766259
ucauauaggcucuuggagg

SEQ ID NO: 1766261 - RNA, 19 nt, Artificial Sequence
  Description of Artificial Sequence: Synthetic oligonucleotide
  Sense strand starting at position 395 of SEQ ID NO: 1562699
uggcuucuguucuuaccaa

SEQ ID NO: 1766262 - RNA, 19 nt, Artificial Sequence
  Description of Artificial Sequence: Synthetic oligonucleotide
  Antisense strand to SEQ ID NO: 1766261
uugguaagaacagaagcca

SEQ ID NO: 1766263 - RNA, 19 nt, Artificial Sequence
  Description of Artificial Sequence: Synthetic oligonucleotide
  Sense strand starting at position 502 of SEQ ID NO: 1562699
cacugaaucuguccagguu

SEQ ID NO: 1766264 - RNA, 19 nt, Artificial Sequence
  Description of Artificial Sequence: Synthetic oligonucleotide
  Antisense strand to SEQ ID NO: 1766263
aaccuggacagauucagug

SEQ ID NO: 1766265 - RNA, 19 nt, Artificial Sequence
  Description of Artificial Sequence: Synthetic oligonucleotide
  Sense strand starting at position 718 of SEQ ID NO: 1562699
ugggaccuuuccuccauua

SEQ ID NO: 1766266 - RNA, 19 nt, Artificial Sequence
  Description of Artificial Sequence: Synthetic oligonucleotide
  Antisense strand to SEQ ID NO: 1766265
uaauggaggaaagguccca

SEQ ID NO: 1766267 - RNA, 19 nt, Artificial Sequence
  Description of Artificial Sequence: Synthetic oligonucleotide
  Sense strand starting at position 772 of SEQ ID NO: 1562699
guauaaagaugacuguauu

SEQ ID NO: 1766268 - RNA, 19 nt, Artificial Sequence
  Description of Artificial Sequence: Synthetic oligonucleotide
  Antisense strand to SEQ ID NO: 1766267
aauacagucaucuuuauac

SEQ ID NO: 1766269 - RNA, 19 nt, Artificial Sequence
  Description of Artificial Sequence: Synthetic oligonucleotide
  Sense strand starting at position 905 of SEQ ID NO: 1562699
ccaggauuccugugccuga

SEQ ID NO: 1766270 - RNA, 19 nt, Artificial Sequence
  Description of Artificial Sequence: Synthetic oligonucleotide
  Antisense strand to SEQ ID NO: 1766269
ucaggcacaggaauccugg

SEQ ID NO: 1766271 - RNA, 19 nt, Artificial Sequence
  Description of Artificial Sequence: Synthetic oligonucleotide
  Sense strand starting at position 906 of SEQ ID NO: 1562699
caggauuccugugccugau

SEQ ID NO: 1766272 - RNA, 19 nt, Artificial Sequence
  Description of Artificial Sequence: Synthetic oligonucleotide
  Antisense strand to SEQ ID NO: 1766271
aucaggcacaggaauccug

SEQ ID NO: 1766273 - RNA, 19 nt, Artificial Sequence
  Description of Artificial Sequence: Synthetic oligonucleotide
  Sense strand starting at position 909 of SEQ ID NO: 1562699
gauuccugugccugaugga

SEQ ID NO: 1766274 - RNA, 19 nt, Artificial Sequence
  Description of Artificial Sequence: Synthetic oligonucleotide
  Antisense strand to SEQ ID NO: 1766273
uccaucaggcacaggaauc

SEQ ID NO: 1766275 - RNA, 19 nt, Artificial Sequence
  Description of Artificial Sequence: Synthetic oligonucleotide
  Sense strand starting at position 910 of SEQ ID NO: 1562699
auuccugugccugauggau

SEQ ID NO: 1766276 - RNA, 19 nt, Artificial Sequence
  Description of Artificial Sequence: Synthetic oligonucleotide
  Antisense strand to SEQ ID NO: 1766275
auccaucaggcacaggaau

SEQ ID NO: 1766277 - RNA, 19 nt, Artificial Sequence
  Description of Artificial Sequence: Synthetic oligonucleotide
  Sense strand starting at position 1215 of SEQ ID NO: 1562699
ugaggacuuccuuagcgca

SEQ ID NO: 1766278 - RNA, 19 nt, Artificial Sequence
  Description of Artificial Sequence: Synthetic oligonucleotide
  Antisense strand to SEQ ID NO: 1766277
ugcgcuaaggaaguccuca

SEQ ID NO: 1766279 - RNA, 19 nt, Artificial Sequence
  Description of Artificial Sequence: Synthetic oligonucleotide
  Sense strand starting at position 1274 of SEQ ID NO: 1562699
cgaggaguuuccaggacug

SEQ ID NO: 1766280 - RNA, 19 nt, Artificial Sequence
  Description of Artificial Sequence: Synthetic oligonucleotide
  Antisense strand to SEQ ID NO: 1766279
caguccuggaaacuccucg

SEQ ID NO: 1766281 - RNA, 19 nt, Artificial Sequence
  Description of Artificial Sequence: Synthetic oligonucleotide
  Sense strand starting at position 1316 of SEQ ID NO: 1562699
ugggaggacgucugugaaa

SEQ ID NO: 1766282 - RNA, 19 nt, Artificial Sequence
  Description of Artificial Sequence: Synthetic oligonucleotide
  Antisense strand to SEQ ID NO: 1766281
uuucacagacguccuccca

SEQ ID NO: 1766283 - RNA, 19 nt, Artificial Sequence
  Description of Artificial Sequence: Synthetic oligonucleotide
  Sense strand starting at position 2027 of SEQ ID NO: 1562699
gccaaugaccgucaagaug

SEQ ID NO: 1766284 - RNA, 19 nt, Artificial Sequence
  Description of Artificial Sequence: Synthetic oligonucleotide
  Antisense strand to SEQ ID NO: 1766283
caucuugacggucauuggc

SEQ ID NO: 1766285 - RNA, 19 nt, Artificial Sequence
  Description of Artificial Sequence: Synthetic oligonucleotide
  Sense strand starting at position 2179 of SEQ ID NO: 1562699
gccauugguuaagcagaga

SEQ ID NO: 1766286 - RNA, 19 nt, Artificial Sequence
  Description of Artificial Sequence: Synthetic oligonucleotide
  Antisense strand to SEQ ID NO: 1766285
ucucugcuuaaccaauggc

SEQ ID NO: 1766287 - RNA, 19 nt, Artificial Sequence
  Description of Artificial Sequence: Synthetic oligonucleotide
  Sense strand starting at position 2628 of SEQ ID NO: 1562699
gccacaugugcaggaaaga

SEQ ID NO: 1766288 - RNA, 19 nt, Artificial Sequence
  Description of Artificial Sequence: Synthetic oligonucleotide
  Antisense strand to SEQ ID NO: 1766287
ucuuuccugcacauguggc

SEQ ID NO: 1766289 - RNA, 19 nt, Artificial Sequence
  Description of Artificial Sequence: Synthetic oligonucleotide
  Sense strand starting at position 2736 of SEQ ID NO: 1562699
ggcagugucggcgaagagu

SEQ ID NO: 1766290 - RNA, 19 nt, Artificial Sequence
  Description of Artificial Sequence: Synthetic oligonucleotide
  Antisense strand to SEQ ID NO: 1766289
acucuucgccgacacugcc

SEQ ID NO: 1766291 - RNA, 19 nt, Artificial Sequence
  Description of Artificial Sequence: Synthetic oligonucleotide
  Sense strand starting at position 2776 of SEQ ID NO: 1562699
agacauuucuucugagcca

SEQ ID NO: 1766292 - RNA, 19 nt, Artificial Sequence
  Description of Artificial Sequence: Synthetic oligonucleotide
  Antisense strand to SEQ ID NO: 1766291
uggcucagaagaaaugucu

SEQ ID NO: 1766293 - RNA, 19 nt, Artificial Sequence
  Description of Artificial Sequence: Synthetic oligonucleotide
  Sense strand starting at position 2789 of SEQ ID NO: 1562699
gagccaauaugugaccaau

SEQ ID NO: 1766294 - RNA, 19 nt, Artificial Sequence
  Description of Artificial Sequence: Synthetic oligonucleotide
  Antisense strand to SEQ ID NO: 1766293
auuggucacauauuggcuc

SEQ ID NO: 1766295 - RNA, 19 nt, Artificial Sequence
  Description of Artificial Sequence: Synthetic oligonucleotide
  Sense strand starting at position 2791 of SEQ ID NO: 1562699
gccaauaugugaccaauag

SEQ ID NO: 1766296 - RNA, 19 nt, Artificial Sequence
  Description of Artificial Sequence: Synthetic oligonucleotide
  Antisense strand to SEQ ID NO: 1766295
cuauuggucacauauuggc

SEQ ID NO: 1766297 - RNA, 19 nt, Artificial Sequence
  Description of Artificial Sequence: Synthetic oligonucleotide
  Sense strand starting at position 2800 of SEQ ID NO: 1562699
ugaccaauagccugggaca

SEQ ID NO: 1766298 - RNA, 19 nt, Artificial Sequence
  Description of Artificial Sequence: Synthetic oligonucleotide
  Antisense strand to SEQ ID NO: 1766297
ugucccaggcuauugguca

SEQ ID NO: 1766299 - RNA, 19 nt, Artificial Sequence
  Description of Artificial Sequence: Synthetic oligonucleotide
  Sense strand starting at position 3066 of SEQ ID NO: 1562699
agaccaaguuucuuaggca

SEQ ID NO: 1766300 - RNA, 19 nt, Artificial Sequence
  Description of Artificial Sequence: Synthetic oligonucleotide
  Antisense strand to SEQ ID NO: 1766299
ugccuaagaaacuuggucu

SEQ ID NO: 1766301 - RNA, 19 nt, Artificial Sequence
  Description of Artificial Sequence: Synthetic oligonucleotide
  Sense strand starting at position 3067 of SEQ ID NO: 1562699
gaccaaguuucuuaggcaa

SEQ ID NO: 1766302 - RNA, 19 nt, Artificial Sequence
  Description of Artificial Sequence: Synthetic oligonucleotide
  Antisense strand to SEQ ID NO: 1766301
uugccuaagaaacuugguc

SEQ ID NO: 1766303 - RNA, 19 nt, Artificial Sequence
  Description of Artificial Sequence: Synthetic oligonucleotide
  Sense strand starting at position 3070 of SEQ ID NO: 1562699
caaguuucuuaggcaaaug

SEQ ID NO: 1766304 - RNA, 19 nt, Artificial Sequence
  Description of Artificial Sequence: Synthetic oligonucleotide
  Antisense strand to SEQ ID NO: 1766303
cauuugccuaagaaacuug

SEQ ID NO: 1766305 - RNA, 19 nt, Artificial Sequence
  Description of Artificial Sequence: Synthetic oligonucleotide
  Sense strand starting at position 3084 of SEQ ID NO: 1562699
aaaugaagccuccagguau

SEQ ID NO: 1766306 - RNA, 19 nt, Artificial Sequence
  Description of Artificial Sequence: Synthetic oligonucleotide
  Antisense strand to SEQ ID NO: 1766305
auaccuggaggcuucauuu

SEQ ID NO: 1766307 - RNA, 19 nt, Artificial Sequence
  Description of Artificial Sequence: Synthetic oligonucleotide
  Sense strand starting at position 3488 of SEQ ID NO: 1562699
ggugccagacucuaguuaa

SEQ ID NO: 1766308 - RNA, 19 nt, Artificial Sequence
  Description of Artificial Sequence: Synthetic oligonucleotide
  Antisense strand to SEQ ID NO: 1766307
uuaacuagagucuggcacc

SEQ ID NO: 1766309 - RNA, 19 nt, Artificial Sequence
  Description of Artificial Sequence: Synthetic oligonucleotide
  Sense strand starting at position 3491 of SEQ ID NO: 1562699
gccagacucuaguuaauuc

SEQ ID NO: 1766310 - RNA, 19 nt, Artificial Sequence
  Description of Artificial Sequence: Synthetic oligonucleotide
  Antisense strand to SEQ ID NO: 1766309
gaauuaacuagagucuggc

SEQ ID NO: 1766311 - RNA, 19 nt, Artificial Sequence
  Description of Artificial Sequence: Synthetic oligonucleotide
  Sense strand starting at position 3499 of SEQ ID NO: 1562699
cuaguuaauucucucagga

SEQ ID NO: 1766312 - RNA, 19 nt, Artificial Sequence
  Description of Artificial Sequence: Synthetic oligonucleotide
  Antisense strand to SEQ ID NO: 1766311
uccugagagaauuaacuag

SEQ ID NO: 1766313 - RNA, 19 nt, Artificial Sequence
  Description of Artificial Sequence: Synthetic oligonucleotide
  Sense strand starting at position 3501 of SEQ ID NO: 1562699
aguuaauucucucaggaga

SEQ ID NO: 1766314 - RNA, 19 nt, Artificial Sequence
  Description of Artificial Sequence: Synthetic oligonucleotide
  Antisense strand to SEQ ID NO: 1766313
ucuccugagagaauuaacu

SEQ ID NO: 1766315 - RNA, 19 nt, Artificial Sequence
  Description of Artificial Sequence: Synthetic oligonucleotide
  Sense strand starting at position 3503 of SEQ ID NO: 1562699
uuaauucucucaggagaaa

SEQ ID NO: 1766316 - RNA, 19 nt, Artificial Sequence
  Description of Artificial Sequence: Synthetic oligonucleotide
  Antisense strand to SEQ ID NO: 1766315
uuucuccugagagaauuaa

SEQ ID NO: 1766317 - RNA, 19 nt, Artificial Sequence
  Description of Artificial Sequence: Synthetic oligonucleotide
  Sense strand starting at position 3648 of SEQ ID NO: 1562699
gccugcugucaugcuggua

SEQ ID NO: 1766318 - RNA, 19 nt, Artificial Sequence
  Description of Artificial Sequence: Synthetic oligonucleotide
  Antisense strand to SEQ ID NO: 1766317
uaccagcaugacagcaggc

SEQ ID NO: 1766319 - RNA, 19 nt, Artificial Sequence
  Description of Artificial Sequence: Synthetic oligonucleotide
  Sense strand starting at position 3649 of SEQ ID NO: 1562699
ccugcugucaugcugguau

SEQ ID NO: 1766320 - RNA, 19 nt, Artificial Sequence
  Description of Artificial Sequence: Synthetic oligonucleotide
  Antisense strand to SEQ ID NO: 1766319
auaccagcaugacagcagg

SEQ ID NO: 1766321 - RNA, 19 nt, Artificial Sequence
  Description of Artificial Sequence: Synthetic oligonucleotide
  Sense strand starting at position 3652 of SEQ ID NO: 1562699
gcugucaugcugguaucuu

SEQ ID NO: 1766322 - RNA, 19 nt, Artificial Sequence
  Description of Artificial Sequence: Synthetic oligonucleotide
  Antisense strand to SEQ ID NO: 1766321
aagauaccagcaugacagc

SEQ ID NO: 1766323 - RNA, 19 nt, Artificial Sequence
  Description of Artificial Sequence: Synthetic oligonucleotide
  Sense strand starting at position 3700 of SEQ ID NO: 1562699
agucucugugucgauguua

SEQ ID NO: 1766324 - RNA, 19 nt, Artificial Sequence
  Description of Artificial Sequence: Synthetic oligonucleotide
  Antisense strand to SEQ ID NO: 1766323
uaacaucgacacagagacu

SEQ ID NO: 1766325 - RNA, 19 nt, Artificial Sequence
  Description of Artificial Sequence: Synthetic oligonucleotide
  Sense strand starting at position 3780 of SEQ ID NO: 1562699
ccuaucacggccugaaaua

SEQ ID NO: 1766326 - RNA, 19 nt, Artificial Sequence
  Description of Artificial Sequence: Synthetic oligonucleotide
  Antisense strand to SEQ ID NO: 1766325
uauuucaggccgugauagg

SEQ ID NO: 1766327 - RNA, 19 nt, Artificial Sequence
  Description of Artificial Sequence: Synthetic oligonucleotide
  Sense strand starting at position 3977 of SEQ ID NO: 1562699
ggcagucagcguuagggaa

SEQ ID NO: 1766328 - RNA, 19 nt, Artificial Sequence
  Description of Artificial Sequence: Synthetic oligonucleotide
  Antisense strand to SEQ ID NO: 1766327
uucccuaacgcugacugcc

SEQ ID NO: 1766329 - RNA, 19 nt, Artificial Sequence
  Description of Artificial Sequence: Synthetic oligonucleotide
  Sense strand starting at position 208 of SEQ ID NO: 1562700
aguggagaagcagguuaaa

SEQ ID NO: 1766330 - RNA, 19 nt, Artificial Sequence
  Description of Artificial Sequence: Synthetic oligonucleotide
  Antisense strand to SEQ ID NO: 1766329
uuuaaccugcuucuccacu

SEQ ID NO: 1766331 - RNA, 19 nt, Artificial Sequence
  Description of Artificial Sequence: Synthetic oligonucleotide
  Sense strand starting at position 219 of SEQ ID NO: 1562700
agguuaaaugcacgaggaa

SEQ ID NO: 1766332 - RNA, 19 nt, Artificial Sequence
  Description of Artificial Sequence: Synthetic oligonucleotide
  Antisense strand to SEQ ID NO: 1766331
uuccucgugcauuuaaccu

SEQ ID NO: 1766333 - RNA, 19 nt, Artificial Sequence
  Description of Artificial Sequence: Synthetic oligonucleotide
  Sense strand starting at position 237 of SEQ ID NO: 1562700
agcauuuccucugauagau

SEQ ID NO: 1766334 - RNA, 19 nt, Artificial Sequence
  Description of Artificial Sequence: Synthetic oligonucleotide
  Antisense strand to SEQ ID NO: 1766333
aucuaucagaggaaaugcu

SEQ ID NO: 1766335 - RNA, 19 nt, Artificial Sequence
  Description of Artificial Sequence: Synthetic oligonucleotide
  Sense strand starting at position 263 of SEQ ID NO: 1562700
agggcauucuaauuauaga

SEQ ID NO: 1766336 - RNA, 19 nt, Artificial Sequence
  Description of Artificial Sequence: Synthetic oligonucleotide
  Antisense strand to SEQ ID NO: 1766335
ucuauaauuagaaugcccu

SEQ ID NO: 1766337 - RNA, 19 nt, Artificial Sequence
  Description of Artificial Sequence: Synthetic oligonucleotide
  Sense strand starting at position 374 of SEQ ID NO: 1562700
uggacuggauccuuacuua

SEQ ID NO: 1766338 - RNA, 19 nt, Artificial Sequence
  Description of Artificial Sequence: Synthetic oligonucleotide
  Antisense strand to SEQ ID NO: 1766337
uaaguaaggauccagucca

SEQ ID NO: 1766339 - RNA, 19 nt, Artificial Sequence
  Description of Artificial Sequence: Synthetic oligonucleotide
  Sense strand starting at position 397 of SEQ ID NO: 1562700
gcaacaauuugccacaagu

SEQ ID NO: 1766340 - RNA, 19 nt, Artificial Sequence
  Description of Artificial Sequence: Synthetic oligonucleotide
  Antisense strand to SEQ ID NO: 1766339
acuuguggcaaauuguugc

SEQ ID NO: 1766341 - RNA, 19 nt, Artificial Sequence
  Description of Artificial Sequence: Synthetic oligonucleotide
  Sense strand starting at position 510 of SEQ ID NO: 1562700
gcucuuguucuagagcacu

SEQ ID NO: 1766342 - RNA, 19 nt, Artificial Sequence
  Description of Artificial Sequence: Synthetic oligonucleotide
  Antisense strand to SEQ ID NO: 1766341
agugcucuagaacaagagc

SEQ ID NO: 1766343 - RNA, 19 nt, Artificial Sequence
  Description of Artificial Sequence: Synthetic oligonucleotide
  Sense strand starting at position 564 of SEQ ID NO: 1562700
ccagguugucuggaggcau

SEQ ID NO: 1766344 - RNA, 19 nt, Artificial Sequence
  Description of Artificial Sequence: Synthetic oligonucleotide
  Antisense strand to SEQ ID NO: 1766343
augccuccagacaaccugg

SEQ ID NO: 1766345 - RNA, 19 nt, Artificial Sequence
  Description of Artificial Sequence: Synthetic oligonucleotide
  Sense strand starting at position 674 of SEQ ID NO: 1562700
cagcauggcuggguugaaa

SEQ ID NO: 1766346 - RNA, 19 nt, Artificial Sequence
  Description of Artificial Sequence: Synthetic oligonucleotide
  Antisense strand to SEQ ID NO: 1766345
uuucaacccagccaugcug

SEQ ID NO: 1766347 - RNA, 19 nt, Artificial Sequence
  Description of Artificial Sequence: Synthetic oligonucleotide
  Sense strand starting at position 713 of SEQ ID NO: 1562700
ugaagacucuuggugaauu

SEQ ID NO: 1766348 - RNA, 19 nt, Artificial Sequence
  Description of Artificial Sequence: Synthetic oligonucleotide
  Antisense strand to SEQ ID NO: 1766347
aauucaccaagagucuuca

SEQ ID NO: 1766349 - RNA, 19 nt, Artificial Sequence
  Description of Artificial Sequence: Synthetic oligonucleotide
  Sense strand starting at position 723 of SEQ ID NO: 1562700
uggugaauucuaugcuguc

SEQ ID NO: 1766350 - RNA, 19 nt, Artificial Sequence
  Description of Artificial Sequence: Synthetic oligonucleotide
  Antisense strand to SEQ ID NO: 1766349
gacagcauagaauucacca

SEQ ID NO: 1766351 - RNA, 19 nt, Artificial Sequence
  Description of Artificial Sequence: Synthetic oligonucleotide
  Sense strand starting at position 724 of SEQ ID NO: 1562700
ggugaauucuaugcuguca

SEQ ID NO: 1766352 - RNA, 19 nt, Artificial Sequence
  Description of Artificial Sequence: Synthetic oligonucleotide
  Antisense strand to SEQ ID NO: 1766351
ugacagcauagaauucacc

SEQ ID NO: 1766353 - RNA, 19 nt, Artificial Sequence
  Description of Artificial Sequence: Synthetic oligonucleotide
  Sense strand starting at position 735 of SEQ ID NO: 1562700
ugcugucacauguauguau

SEQ ID NO: 1766354 - RNA, 19 nt, Artificial Sequence
  Description of Artificial Sequence: Synthetic oligonucleotide
  Antisense strand to SEQ ID NO: 1766353
auacauacaugugacagca

SEQ ID NO: 1766355 - RNA, 19 nt, Artificial Sequence
  Description of Artificial Sequence: Synthetic oligonucleotide
  Sense strand starting at position 789 of SEQ ID NO: 1562700
acugaacuuucgguggaga

SEQ ID NO: 1766356 - RNA, 19 nt, Artificial Sequence
  Description of Artificial Sequence: Synthetic oligonucleotide
  Antisense strand to SEQ ID NO: 1766355
ucuccaccgaaaguucagu

SEQ ID NO: 1766357 - RNA, 19 nt, Artificial Sequence
  Description of Artificial Sequence: Synthetic oligonucleotide
  Sense strand starting at position 792 of SEQ ID NO: 1562700
gaacuuucgguggagagca

SEQ ID NO: 1766358 - RNA, 19 nt, Artificial Sequence
  Description of Artificial Sequence: Synthetic oligonucleotide
  Antisense strand to SEQ ID NO: 1766357
ugcucuccaccgaaaguuc

SEQ ID NO: 1766359 - RNA, 19 nt, Artificial Sequence
  Description of Artificial Sequence: Synthetic oligonucleotide
  Sense strand starting at position 920 of SEQ ID NO: 1562700
ggaccugcccuauauaauu

SEQ ID NO: 1766360 - RNA, 19 nt, Artificial Sequence
  Description of Artificial Sequence: Synthetic oligonucleotide
  Antisense strand to SEQ ID NO: 1766359
aauuauauagggcaggucc

SEQ ID NO: 1766361 - RNA, 19 nt, Artificial Sequence
  Description of Artificial Sequence: Synthetic oligonucleotide
  Sense strand starting at position 929 of SEQ ID NO: 1562700
cuauauaauuugcaggaaa

SEQ ID NO: 1766362 - RNA, 19 nt, Artificial Sequence
  Description of Artificial Sequence: Synthetic oligonucleotide
  Antisense strand to SEQ ID NO: 1766361
uuuccugcaaauuauauag

SEQ ID NO: 1766363 - RNA, 19 nt, Artificial Sequence
  Description of Artificial Sequence: Synthetic oligonucleotide
  Sense strand starting at position 980 of SEQ ID NO: 1562700
gugggaagcucuucugguu

SEQ ID NO: 1766364 - RNA, 19 nt, Artificial Sequence
  Description of Artificial Sequence: Synthetic oligonucleotide
  Antisense strand to SEQ ID NO: 1766363
aaccagaagagcuucccac

SEQ ID NO: 1766365 - RNA, 19 nt, Artificial Sequence
  Description of Artificial Sequence: Synthetic oligonucleotide
  Sense strand starting at position 985 of SEQ ID NO: 1562700
aagcucuucugguuuggga

SEQ ID NO: 1766366 - RNA, 19 nt, Artificial Sequence
  Description of Artificial Sequence: Synthetic oligonucleotide
  Antisense strand to SEQ ID NO: 1766365
ucccaaaccagaagagcuu

SEQ ID NO: 1766367 - RNA, 19 nt, Artificial Sequence
  Description of Artificial Sequence: Synthetic oligonucleotide
  Sense strand starting at position 1013 of SEQ ID NO: 1562700
aggagacagugcuuaggaa

SEQ ID NO: 1766368 - RNA, 19 nt, Artificial Sequence
  Description of Artificial Sequence: Synthetic oligonucleotide
  Antisense strand to SEQ ID NO: 1766367
uuccuaagcacugucuccu

SEQ ID NO: 1766369 - RNA, 19 nt, Artificial Sequence
  Description of Artificial Sequence: Synthetic oligonucleotide
  Sense strand starting at position 1025 of SEQ ID NO: 1562700
uuaggaauuugaugugcaa

SEQ ID NO: 1766370 - RNA, 19 nt, Artificial Sequence
  Description of Artificial Sequence: Synthetic oligonucleotide
  Antisense strand to SEQ ID NO: 1766369
uugcacaucaaauuccuaa

SEQ ID NO: 1766371 - RNA, 19 nt, Artificial Sequence
  Description of Artificial Sequence: Synthetic oligonucleotide
  Sense strand starting at position 1270 of SEQ ID NO: 1562700
cagggaguuucugcuaaga

SEQ ID NO: 1766372 - RNA, 19 nt, Artificial Sequence
  Description of Artificial Sequence: Synthetic oligonucleotide
  Antisense strand to SEQ ID NO: 1766371
ucuuagcagaaacucccug

SEQ ID NO: 1766373 - RNA, 19 nt, Artificial Sequence
  Description of Artificial Sequence: Synthetic oligonucleotide
  Sense strand starting at position 1323 of SEQ ID NO: 1562700
uggacacauuggucaccaa

SEQ ID NO: 1766374 - RNA, 19 nt, Artificial Sequence
  Description of Artificial Sequence: Synthetic oligonucleotide
  Antisense strand to SEQ ID NO: 1766373
uuggugaccaaugugucca

SEQ ID NO: 1766375 - RNA, 19 nt, Artificial Sequence
  Description of Artificial Sequence: Synthetic oligonucleotide
  Sense strand starting at position 2082 of SEQ ID NO: 1562700
gaggguuucgcucagcuga

SEQ ID NO: 1766376 - RNA, 19 nt, Artificial Sequence
  Description of Artificial Sequence: Synthetic oligonucleotide
  Antisense strand to SEQ ID NO: 1766375
ucagcugagcgaaacccuc

SEQ ID NO: 1766377 - RNA, 19 nt, Artificial Sequence
  Description of Artificial Sequence: Synthetic oligonucleotide
  Sense strand starting at position 2152 of SEQ ID NO: 1562700
cuggauaucgcaggaccau

SEQ ID NO: 1766378 - RNA, 19 nt, Artificial Sequence
  Description of Artificial Sequence: Synthetic oligonucleotide
  Antisense strand to SEQ ID NO: 1766377
augguccugcgauauccag

SEQ ID NO: 1766379 - RNA, 19 nt, Artificial Sequence
  Description of Artificial Sequence: Synthetic oligonucleotide
  Sense strand starting at position 2923 of SEQ ID NO: 1562700
guggucuagcgguagugaa

SEQ ID NO: 1766380 - RNA, 19 nt, Artificial Sequence
  Description of Artificial Sequence: Synthetic oligonucleotide
  Antisense strand to SEQ ID NO: 1766379
uucacuaccgcuagaccac

SEQ ID NO: 1766381 - RNA, 19 nt, Artificial Sequence
  Description of Artificial Sequence: Synthetic oligonucleotide
  Sense strand starting at position 2924 of SEQ ID NO: 1562700
uggucuagcgguagugaaa

SEQ ID NO: 1766382 - RNA, 19 nt, Artificial Sequence
  Description of Artificial Sequence: Synthetic oligonucleotide
  Antisense strand to SEQ ID NO: 1766381
uuucacuaccgcuagacca

SEQ ID NO: 1766383 - RNA, 19 nt, Artificial Sequence
  Description of Artificial Sequence: Synthetic oligonucleotide
  Sense strand starting at position 3125 of SEQ ID NO: 1562700
cuccuagucugccuuuauu

SEQ ID NO: 1766384 - RNA, 19 nt, Artificial Sequence
  Description of Artificial Sequence: Synthetic oligonucleotide
  Antisense strand to SEQ ID NO: 1766383
aauaaaggcagacuaggag

SEQ ID NO: 1766385 - RNA, 19 nt, Artificial Sequence
  Description of Artificial Sequence: Synthetic oligonucleotide
  Sense strand starting at position 3136 of SEQ ID NO: 1562700
ccuuuauuaugccuaguca

SEQ ID NO: 1766386 - RNA, 19 nt, Artificial Sequence
  Description of Artificial Sequence: Synthetic oligonucleotide
  Antisense strand to SEQ ID NO: 1766385
ugacuaggcauaauaaagg

SEQ ID NO: 1766387 - RNA, 19 nt, Artificial Sequence
  Description of Artificial Sequence: Synthetic oligonucleotide
  Sense strand starting at position 3137 of SEQ ID NO: 1562700
cuuuauuaugccuagucau

SEQ ID NO: 1766388 - RNA, 19 nt, Artificial Sequence
  Description of Artificial Sequence: Synthetic oligonucleotide
  Antisense strand to SEQ ID NO: 1766387
augacuaggcauaauaaag

SEQ ID NO: 1766389 - RNA, 19 nt, Artificial Sequence
  Description of Artificial Sequence: Synthetic oligonucleotide
  Sense strand starting at position 3148 of SEQ ID NO: 1562700
cuagucauccuguacaccu

SEQ ID NO: 1766390 - RNA, 19 nt, Artificial Sequence
  Description of Artificial Sequence: Synthetic oligonucleotide
  Antisense strand to SEQ ID NO: 1766389
agguguacaggaugacuag

SEQ ID NO: 1766391 - RNA, 19 nt, Artificial Sequence
  Description of Artificial Sequence: Synthetic oligonucleotide
  Sense strand starting at position 3332 of SEQ ID NO: 1562700
ccuugccuaucauuggaga

SEQ ID NO: 1766392 - RNA, 19 nt, Artificial Sequence
  Description of Artificial Sequence: Synthetic oligonucleotide
  Antisense strand to SEQ ID NO: 1766391
ucuccaaugauaggcaagg

SEQ ID NO: 1766393 - RNA, 19 nt, Artificial Sequence
  Description of Artificial Sequence: Synthetic oligonucleotide
  Sense strand starting at position 3333 of SEQ ID NO: 1562700
cuugccuaucauuggagau

SEQ ID NO: 1766394 - RNA, 19 nt, Artificial Sequence
  Description of Artificial Sequence: Synthetic oligonucleotide
  Antisense strand to SEQ ID NO: 1766393
aucuccaaugauaggcaag

SEQ ID NO: 1766395 - RNA, 19 nt, Artificial Sequence
  Description of Artificial Sequence: Synthetic oligonucleotide
  Sense strand starting at position 3334 of SEQ ID NO: 1562700
uugccuaucauuggagaug

SEQ ID NO: 1766396 - RNA, 19 nt, Artificial Sequence
  Description of Artificial Sequence: Synthetic oligonucleotide
  Antisense strand to SEQ ID NO: 1766395
caucuccaaugauaggcaa

SEQ ID NO: 1766397 - RNA, 19 nt, Artificial Sequence
  Description of Artificial Sequence: Synthetic oligonucleotide
  Sense strand starting at position 3868 of SEQ ID NO: 1562700
gugagaugacccugcuuug

SEQ ID NO: 1766398 - RNA, 19 nt, Artificial Sequence
  Description of Artificial Sequence: Synthetic oligonucleotide
  Antisense strand to SEQ ID NO: 1766397
caaagcagggucaucucac

SEQ ID NO: 1766399 - RNA, 19 nt, Artificial Sequence
  Description of Artificial Sequence: Synthetic oligonucleotide
  Sense strand starting at position 3894 of SEQ ID NO: 1562700
uaggaauuaugacugguuu

SEQ ID NO: 1766400 - RNA, 19 nt, Artificial Sequence
  Description of Artificial Sequence: Synthetic oligonucleotide
  Antisense strand to SEQ ID NO: 1766399
aaaccagucauaauuccua

SEQ ID NO: 1766401 - RNA, 19 nt, Artificial Sequence
  Description of Artificial Sequence: Synthetic oligonucleotide
  Sense strand starting at position 3895 of SEQ ID NO: 1562700
aggaauuaugacugguuuc

SEQ ID NO: 1766402 - RNA, 19 nt, Artificial Sequence
  Description of Artificial Sequence: Synthetic oligonucleotide
  Antisense strand to SEQ ID NO: 1766401
gaaaccagucauaauuccu

SEQ ID NO: 1766403 - RNA, 19 nt, Artificial Sequence
  Description of Artificial Sequence: Synthetic oligonucleotide
  Sense strand starting at position 3901 of SEQ ID NO: 1562700
uaugacugguuuccagaga

SEQ ID NO: 1766404 - RNA, 19 nt, Artificial Sequence
  Description of Artificial Sequence: Synthetic oligonucleotide
  Antisense strand to SEQ ID NO: 1766403
ucucuggaaaccagucaua

SEQ ID NO: 1766405 - RNA, 19 nt, Artificial Sequence
  Description of Artificial Sequence: Synthetic oligonucleotide
  Sense strand starting at position 3916 of SEQ ID NO: 1562700
gagagaacauugguuagca

SEQ ID NO: 1766406 - RNA, 19 nt, Artificial Sequence
  Description of Artificial Sequence: Synthetic oligonucleotide
  Antisense strand to SEQ ID NO: 1766405
ugcuaaccaauguucucuc

SEQ ID NO: 1766407 - RNA, 19 nt, Artificial Sequence
  Description of Artificial Sequence: Synthetic oligonucleotide
  Sense strand starting at position 3918 of SEQ ID NO: 1562700
gagaacauugguuagcagu

SEQ ID NO: 1766408 - RNA, 19 nt, Artificial Sequence
  Description of Artificial Sequence: Synthetic oligonucleotide
  Antisense strand to SEQ ID NO: 1766407
acugcuaaccaauguucuc

SEQ ID NO: 1766409 - RNA, 19 nt, Artificial Sequence
  Description of Artificial Sequence: Synthetic oligonucleotide
  Sense strand starting at position 267 of SEQ ID NO: 1562701
aguggagaagcagguuaaa

SEQ ID NO: 1766410 - RNA, 19 nt, Artificial Sequence
  Description of Artificial Sequence: Synthetic oligonucleotide
  Antisense strand to SEQ ID NO: 1766409
uuuaaccugcuucuccacu

SEQ ID NO: 1766411 - RNA, 19 nt, Artificial Sequence
  Description of Artificial Sequence: Synthetic oligonucleotide
  Sense strand starting at position 298 of SEQ ID NO: 1562701
cauuucgucugauagauca

SEQ ID NO: 1766412 - RNA, 19 nt, Artificial Sequence
  Description of Artificial Sequence: Synthetic oligonucleotide
  Antisense strand to SEQ ID NO: 1766411
ugaucuaucagacgaaaug

SEQ ID NO: 1766413 - RNA, 19 nt, Artificial Sequence
  Description of Artificial Sequence: Synthetic oligonucleotide
  Sense strand starting at position 300 of SEQ ID NO: 1562701
uuucgucugauagaucaag

SEQ ID NO: 1766414 - RNA, 19 nt, Artificial Sequence
  Description of Artificial Sequence: Synthetic oligonucleotide
  Antisense strand to SEQ ID NO: 1766413
cuugaucuaucagacgaaa

SEQ ID NO: 1766415 - RNA, 19 nt, Artificial Sequence
  Description of Artificial Sequence: Synthetic oligonucleotide
  Sense strand starting at position 440 of SEQ ID NO: 1562701
uggacuggauccuuacuua

SEQ ID NO: 1766416 - RNA, 19 nt, Artificial Sequence
  Description of Artificial Sequence: Synthetic oligonucleotide
  Antisense strand to SEQ ID NO: 1766415
uaaguaaggauccagucca

SEQ ID NO: 1766417 - RNA, 19 nt, Artificial Sequence
  Description of Artificial Sequence: Synthetic oligonucleotide
  Sense strand starting at position 630 of SEQ ID NO: 1562701
ccagguugucuggaggcau

SEQ ID NO: 1766418 - RNA, 19 nt, Artificial Sequence
  Description of Artificial Sequence: Synthetic oligonucleotide
  Antisense strand to SEQ ID NO: 1766417
augccuccagacaaccugg

SEQ ID NO: 1766419 - RNA, 19 nt, Artificial Sequence
  Description of Artificial Sequence: Synthetic oligonucleotide
  Sense strand starting at position 740 of SEQ ID NO: 1562701
cagcauggcuggguugaaa

SEQ ID NO: 1766420 - RNA, 19 nt, Artificial Sequence
  Description of Artificial Sequence: Synthetic oligonucleotide
  Antisense strand to SEQ ID NO: 1766419
uuucaacccagccaugcug

SEQ ID NO: 1766421 - RNA, 19 nt, Artificial Sequence
  Description of Artificial Sequence: Synthetic oligonucleotide
  Sense strand starting at position 779 of SEQ ID NO: 1562701
ugaagacucuuggugaaug

SEQ ID NO: 1766422 - RNA, 19 nt, Artificial Sequence
  Description of Artificial Sequence: Synthetic oligonucleotide
  Antisense strand to SEQ ID NO: 1766421
cauucaccaagagucuuca

SEQ ID NO: 1766423 - RNA, 19 nt, Artificial Sequence
  Description of Artificial Sequence: Synthetic oligonucleotide
  Sense strand starting at position 854 of SEQ ID NO: 1562701
uauugaacuuuagugaaga

SEQ ID NO: 1766424 - RNA, 19 nt, Artificial Sequence
  Description of Artificial Sequence: Synthetic oligonucleotide
  Antisense strand to SEQ ID NO: 1766423
ucuucacuaaaguucaaua

SEQ ID NO: 1766425 - RNA, 19 nt, Artificial Sequence
  Description of Artificial Sequence: Synthetic oligonucleotide
  Sense strand starting at position 877 of SEQ ID NO: 1562701
aagcguaugcacuauacua

SEQ ID NO: 1766426 - RNA, 19 nt, Artificial Sequence
  Description of Artificial Sequence: Synthetic oligonucleotide
  Antisense strand to SEQ ID NO: 1766425
uaguauagugcauacgcuu

SEQ ID NO: 1766427 - RNA, 19 nt, Artificial Sequence
  Description of Artificial Sequence: Synthetic oligonucleotide
  Sense strand starting at position 979 of SEQ ID NO: 1562701
ggaccugcccuauauaauu

SEQ ID NO: 1766428 - RNA, 19 nt, Artificial Sequence
  Description of Artificial Sequence: Synthetic oligonucleotide
  Antisense strand to SEQ ID NO: 1766427
aauuauauagggcaggucc

SEQ ID NO: 1766429 - RNA, 19 nt, Artificial Sequence
  Description of Artificial Sequence: Synthetic oligonucleotide
  Sense strand starting at position 988 of SEQ ID NO: 1562701
cuauauaauuugcaggaaa

SEQ ID NO: 1766430 - RNA, 19 nt, Artificial Sequence
  Description of Artificial Sequence: Synthetic oligonucleotide
  Antisense strand to SEQ ID NO: 1766429
uuuccugcaaauuauauag

SEQ ID NO: 1766431 - RNA, 19 nt, Artificial Sequence
  Description of Artificial Sequence: Synthetic oligonucleotide
  Sense strand starting at position 1042 of SEQ ID NO: 1562701
ugggaagcucuucggguuu

SEQ ID NO: 1766432 - RNA, 19 nt, Artificial Sequence
  Description of Artificial Sequence: Synthetic oligonucleotide
  Antisense strand to SEQ ID NO: 1766431
aaacccgaagagcuuccca

SEQ ID NO: 1766433 - RNA, 19 nt, Artificial Sequence
  Description of Artificial Sequence: Synthetic oligonucleotide
  Sense strand starting at position 1074 of SEQ ID NO: 1562701
aggagacagugcuuaggaa

SEQ ID NO: 1766434 - RNA, 19 nt, Artificial Sequence
  Description of Artificial Sequence: Synthetic oligonucleotide
  Antisense strand to SEQ ID NO: 1766433
uuccuaagcacugucuccu

SEQ ID NO: 1766435 - RNA, 19 nt, Artificial Sequence
  Description of Artificial Sequence: Synthetic oligonucleotide
  Sense strand starting at position 1304 of SEQ ID NO: 1562701
cagggaguuucugcuaaga

SEQ ID NO: 1766436 - RNA, 19 nt, Artificial Sequence
  Description of Artificial Sequence: Synthetic oligonucleotide
  Antisense strand to SEQ ID NO: 1766435
ucuuagcagaaacucccug

SEQ ID NO: 1766437 - RNA, 19 nt, Artificial Sequence
  Description of Artificial Sequence: Synthetic oligonucleotide
  Sense strand starting at position 1452 of SEQ ID NO: 1562701
agcugaucugcacagauac

SEQ ID NO: 1766438 - RNA, 19 nt, Artificial Sequence
  Description of Artificial Sequence: Synthetic oligonucleotide
  Antisense strand to SEQ ID NO: 1766437
guaucugugcagaucagcu

SEQ ID NO: 1766439 - RNA, 19 nt, Artificial Sequence
  Description of Artificial Sequence: Synthetic oligonucleotide
  Sense strand starting at position 2153 of SEQ ID NO: 1562701
cgacauuaaaggcgagacu

SEQ ID NO: 1766440 - RNA, 19 nt, Artificial Sequence
  Description of Artificial Sequence: Synthetic oligonucleotide
  Antisense strand to SEQ ID NO: 1766439
agucucgccuuuaaugucg

SEQ ID NO: 1766441 - RNA, 19 nt, Artificial Sequence
  Description of Artificial Sequence: Synthetic oligonucleotide
  Sense strand starting at position 2845 of SEQ ID NO: 1562701
gugagaugacccugcuuug

SEQ ID NO: 1766442 - RNA, 19 nt, Artificial Sequence
  Description of Artificial Sequence: Synthetic oligonucleotide
  Antisense strand to SEQ ID NO: 1766441
caaagcagggucaucucac

SEQ ID NO: 1766443 - RNA, 19 nt, Artificial Sequence
  Description of Artificial Sequence: Synthetic oligonucleotide
  Sense strand starting at position 2871 of SEQ ID NO: 1562701
uaggaauuaugacugguuu

SEQ ID NO: 1766444 - RNA, 19 nt, Artificial Sequence
  Description of Artificial Sequence: Synthetic oligonucleotide
  Antisense strand to SEQ ID NO: 1766443
aaaccagucauaauuccua

SEQ ID NO: 1766445 - RNA, 19 nt, Artificial Sequence
  Description of Artificial Sequence: Synthetic oligonucleotide
  Sense strand starting at position 2872 of SEQ ID NO: 1562701
aggaauuaugacugguuuc

SEQ ID NO: 1766446 - RNA, 19 nt, Artificial Sequence
  Description of Artificial Sequence: Synthetic oligonucleotide
  Antisense strand to SEQ ID NO: 1766445
gaaaccagucauaauuccu

SEQ ID NO: 1766447 - RNA, 19 nt, Artificial Sequence
  Description of Artificial Sequence: Synthetic oligonucleotide
  Sense strand starting at position 2878 of SEQ ID NO: 1562701
uaugacugguuuccagaga

SEQ ID NO: 1766448 - RNA, 19 nt, Artificial Sequence
  Description of Artificial Sequence: Synthetic oligonucleotide
  Antisense strand to SEQ ID NO: 1766447
ucucuggaaaccagucaua

SEQ ID NO: 1766449 - RNA, 19 nt, Artificial Sequence
  Description of Artificial Sequence: Synthetic oligonucleotide
  Sense strand starting at position 2893 of SEQ ID NO: 1562701
gagagaacauugguuagua

SEQ ID NO: 1766450 - RNA, 19 nt, Artificial Sequence
  Description of Artificial Sequence: Synthetic oligonucleotide
  Antisense strand to SEQ ID NO: 1766449
uacuaaccaauguucucuc

SEQ ID NO: 1766451 - RNA, 19 nt, Artificial Sequence
  Description of Artificial Sequence: Synthetic oligonucleotide
  Sense strand starting at position 2894 of SEQ ID NO: 1562701
agagaacauugguuaguaa

SEQ ID NO: 1766452 - RNA, 19 nt, Artificial Sequence
  Description of Artificial Sequence: Synthetic oligonucleotide
  Antisense strand to SEQ ID NO: 1766451
uuacuaaccaauguucucu

SEQ ID NO: 1766453 - RNA, 19 nt, Artificial Sequence
  Description of Artificial Sequence: Synthetic oligonucleotide
  Sense strand starting at position 2897 of SEQ ID NO: 1562701
gaacauugguuaguaauug

SEQ ID NO: 1766454 - RNA, 19 nt, Artificial Sequence
  Description of Artificial Sequence: Synthetic oligonucleotide
  Antisense strand to SEQ ID NO: 1766453
caauuacuaaccaauguuc

SEQ ID NO: 1766455 - RNA, 19 nt, Artificial Sequence
  Description of Artificial Sequence: Synthetic oligonucleotide
  Sense strand starting at position 2901 of SEQ ID NO: 1562701
auugguuaguaauuggcua

SEQ ID NO: 1766456 - RNA, 19 nt, Artificial Sequence
  Description of Artificial Sequence: Synthetic oligonucleotide
  Antisense strand to SEQ ID NO: 1766455
uagccaauuacuaaccaau

SEQ ID NO: 1766457 - RNA, 19 nt, Artificial Sequence
  Description of Artificial Sequence: Synthetic oligonucleotide
  Sense strand starting at position 2902 of SEQ ID NO: 1562701
uugguuaguaauuggcuau

SEQ ID NO: 1766458 - RNA, 19 nt, Artificial Sequence
  Description of Artificial Sequence: Synthetic oligonucleotide
  Antisense strand to SEQ ID NO: 1766457
auagccaauuacuaaccaa

SEQ ID NO: 1766459 - RNA, 19 nt, Artificial Sequence
  Description of Artificial Sequence: Synthetic oligonucleotide
  Sense strand starting at position 3192 of SEQ ID NO: 1562701
ggaggugggacucgagauu

SEQ ID NO: 1766460 - RNA, 19 nt, Artificial Sequence
  Description of Artificial Sequence: Synthetic oligonucleotide
  Antisense strand to SEQ ID NO: 1766459
aaucucgagucccaccucc

SEQ ID NO: 1766461 - RNA, 19 nt, Artificial Sequence
  Description of Artificial Sequence: Synthetic oligonucleotide
  Sense strand starting at position 3214 of SEQ ID NO: 1562701
ggagcugagucuguaguga

SEQ ID NO: 1766462 - RNA, 19 nt, Artificial Sequence
  Description of Artificial Sequence: Synthetic oligonucleotide
  Antisense strand to SEQ ID NO: 1766461
ucacuacagacucagcucc

SEQ ID NO: 1766463 - RNA, 19 nt, Artificial Sequence
  Description of Artificial Sequence: Synthetic oligonucleotide
  Sense strand starting at position 3286 of SEQ ID NO: 1562701
uggugagugggaugauuag

SEQ ID NO: 1766464 - RNA, 19 nt, Artificial Sequence
  Description of Artificial Sequence: Synthetic oligonucleotide
  Antisense strand to SEQ ID NO: 1766463
cuaaucaucccacucacca

SEQ ID NO: 1766465 - RNA, 19 nt, Artificial Sequence
  Description of Artificial Sequence: Synthetic oligonucleotide
  Sense strand starting at position 3295 of SEQ ID NO: 1562701
ggaugauuagcugggugaa

SEQ ID NO: 1766466 - RNA, 19 nt, Artificial Sequence
  Description of Artificial Sequence: Synthetic oligonucleotide
  Antisense strand to SEQ ID NO: 1766465
uucacccagcuaaucaucc

SEQ ID NO: 1766467 - RNA, 19 nt, Artificial Sequence
  Description of Artificial Sequence: Synthetic oligonucleotide
  Sense strand starting at position 3296 of SEQ ID NO: 1562701
gaugauuagcugggugaag

SEQ ID NO: 1766468 - RNA, 19 nt, Artificial Sequence
  Description of Artificial Sequence: Synthetic oligonucleotide
  Antisense strand to SEQ ID NO: 1766467
cuucacccagcuaaucauc

SEQ ID NO: 1766469 - RNA, 19 nt, Artificial Sequence
  Description of Artificial Sequence: Synthetic oligonucleotide
  Sense strand starting at position 3297 of SEQ ID NO: 1562701
augauuagcugggugaaga

SEQ ID NO: 1766470 - RNA, 19 nt, Artificial Sequence
  Description of Artificial Sequence: Synthetic oligonucleotide
  Antisense strand to SEQ ID NO: 1766469
ucuucacccagcuaaucau

SEQ ID NO: 1766471 - RNA, 19 nt, Artificial Sequence
  Description of Artificial Sequence: Synthetic oligonucleotide
  Sense strand starting at position 3362 of SEQ ID NO: 1562701
ugaagagugucugugugga

SEQ ID NO: 1766472 - RNA, 19 nt, Artificial Sequence
  Description of Artificial Sequence: Synthetic oligonucleotide
  Antisense strand to SEQ ID NO: 1766471
uccacacagacacucuuca

SEQ ID NO: 1766473 - RNA, 19 nt, Artificial Sequence
  Description of Artificial Sequence: Synthetic oligonucleotide
  Sense strand starting at position 3364 of SEQ ID NO: 1562701
aagagugucuguguggaga

SEQ ID NO: 1766474 - RNA, 19 nt, Artificial Sequence
  Description of Artificial Sequence: Synthetic oligonucleotide
  Antisense strand to SEQ ID NO: 1766473
ucuccacacagacacucuu

SEQ ID NO: 1766475 - RNA, 19 nt, Artificial Sequence
  Description of Artificial Sequence: Synthetic oligonucleotide
  Sense strand starting at position 3410 of SEQ ID NO: 1562701
gaugauaugucuguggcca

SEQ ID NO: 1766476 - RNA, 19 nt, Artificial Sequence
  Description of Artificial Sequence: Synthetic oligonucleotide
  Antisense strand to SEQ ID NO: 1766475
uggccacagacauaucauc

SEQ ID NO: 1766477 - RNA, 19 nt, Artificial Sequence
  Description of Artificial Sequence: Synthetic oligonucleotide
  Sense strand starting at position 3625 of SEQ ID NO: 1562701
cccuaauguggaugucaac

SEQ ID NO: 1766478 - RNA, 19 nt, Artificial Sequence
  Description of Artificial Sequence: Synthetic oligonucleotide
  Antisense strand to SEQ ID NO: 1766477
guugacauccacauuaggg

SEQ ID NO: 1766479 - RNA, 19 nt, Artificial Sequence
  Description of Artificial Sequence: Synthetic oligonucleotide
  Sense strand starting at position 3677 of SEQ ID NO: 1562701
agaguuugucugggccaag

SEQ ID NO: 1766480 - RNA, 19 nt, Artificial Sequence
  Description of Artificial Sequence: Synthetic oligonucleotide
  Antisense strand to SEQ ID NO: 1766479
cuuggcccagacaaacucu

SEQ ID NO: 1766481 - RNA, 19 nt, Artificial Sequence
  Description of Artificial Sequence: Synthetic oligonucleotide
  Sense strand starting at position 3785 of SEQ ID NO: 1562701
caaggagugggcugauaug

SEQ ID NO: 1766482 - RNA, 19 nt, Artificial Sequence
  Description of Artificial Sequence: Synthetic oligonucleotide
  Antisense strand to SEQ ID NO: 1766481
cauaucagcccacuccuug

SEQ ID NO: 1766483 - RNA, 19 nt, Artificial Sequence
  Description of Artificial Sequence: Synthetic oligonucleotide
  Sense strand starting at position 3818 of SEQ ID NO: 1562701
ucugacugcuuuccagaga

SEQ ID NO: 1766484 - RNA, 19 nt, Artificial Sequence
  Description of Artificial Sequence: Synthetic oligonucleotide
  Antisense strand to SEQ ID NO: 1766483
ucucuggaaagcagucaga

SEQ ID NO: 1766485 - RNA, 19 nt, Artificial Sequence
  Description of Artificial Sequence: Synthetic oligonucleotide
  Sense strand starting at position 3863 of SEQ ID NO: 1562701
guuggacuacuggguaaga

SEQ ID NO: 1766486 - RNA, 19 nt, Artificial Sequence
  Description of Artificial Sequence: Synthetic oligonucleotide
  Antisense strand to SEQ ID NO: 1766485
ucuuacccaguaguccaac

SEQ ID NO: 1766487 - RNA, 19 nt, Artificial Sequence
  Description of Artificial Sequence: Synthetic oligonucleotide
  Sense strand starting at position 3952 of SEQ ID NO: 1562701
ucaagaggucguuagcuca

SEQ ID NO: 1766488 - RNA, 19 nt, Artificial Sequence
  Description of Artificial Sequence: Synthetic oligonucleotide
  Antisense strand to SEQ ID NO: 1766487
ugagcuaacgaccucuuga

SEQ ID NO: 1766489 - RNA, 19 nt, Artificial Sequence
  Description of Artificial Sequence: Synthetic oligonucleotide
  Sense strand starting at position 193 of SEQ ID NO: 1562702
gaaucacucuguguccaga

SEQ ID NO: 1766490 - RNA, 19 nt, Artificial Sequence
  Description of Artificial Sequence: Synthetic oligonucleotide
  Antisense strand to SEQ ID NO: 1766489
ucuggacacagagugauuc

SEQ ID NO: 1766491 - RNA, 19 nt, Artificial Sequence
  Description of Artificial Sequence: Synthetic oligonucleotide
  Sense strand starting at position 195 of SEQ ID NO: 1562702
aucacucuguguccagaaa

SEQ ID NO: 1766492 - RNA, 19 nt, Artificial Sequence
  Description of Artificial Sequence: Synthetic oligonucleotide
  Antisense strand to SEQ ID NO: 1766491
uuucuggacacagagugau

SEQ ID NO: 1766493 - RNA, 19 nt, Artificial Sequence
  Description of Artificial Sequence: Synthetic oligonucleotide
  Sense strand starting at position 241 of SEQ ID NO: 1562702
gaccuaaggugacaguaaa

SEQ ID NO: 1766494 - RNA, 19 nt, Artificial Sequence
  Description of Artificial Sequence: Synthetic oligonucleotide
  Antisense strand to SEQ ID NO: 1766493
uuuacugucaccuuagguc

SEQ ID NO: 1766495 - RNA, 19 nt, Artificial Sequence
  Description of Artificial Sequence: Synthetic oligonucleotide
  Sense strand starting at position 290 of SEQ ID NO: 1562702
ccaggauguuaacuugaag

SEQ ID NO: 1766496 - RNA, 19 nt, Artificial Sequence
  Description of Artificial Sequence: Synthetic oligonucleotide
  Antisense strand to SEQ ID NO: 1766495
cuucaaguuaacauccugg

SEQ ID NO: 1766497 - RNA, 19 nt, Artificial Sequence
  Description of Artificial Sequence: Synthetic oligonucleotide
  Sense strand starting at position 313 of SEQ ID NO: 1562702
ugagaaauggucugugcuu

SEQ ID NO: 1766498 - RNA, 19 nt, Artificial Sequence
  Description of Artificial Sequence: Synthetic oligonucleotide
  Antisense strand to SEQ ID NO: 1766497
aagcacagaccauuucuca

SEQ ID NO: 1766499 - RNA, 19 nt, Artificial Sequence
  Description of Artificial Sequence: Synthetic oligonucleotide
  Sense strand starting at position 314 of SEQ ID NO: 1562702
gagaaauggucugugcuua

SEQ ID NO: 1766500 - RNA, 19 nt, Artificial Sequence
  Description of Artificial Sequence: Synthetic oligonucleotide
  Antisense strand to SEQ ID NO: 1766499
uaagcacagaccauuucuc

SEQ ID NO: 1766501 - RNA, 19 nt, Artificial Sequence
  Description of Artificial Sequence: Synthetic oligonucleotide
  Sense strand starting at position 315 of SEQ ID NO: 1562702
agaaauggucugugcuuag

SEQ ID NO: 1766502 - RNA, 19 nt, Artificial Sequence
  Description of Artificial Sequence: Synthetic oligonucleotide
  Antisense strand to SEQ ID NO: 1766501
cuaagcacagaccauuucu

SEQ ID NO: 1766503 - RNA, 19 nt, Artificial Sequence
  Description of Artificial Sequence: Synthetic oligonucleotide
  Sense strand starting at position 318 of SEQ ID NO: 1562702
aauggucugugcuuagaaa

SEQ ID NO: 1766504 - RNA, 19 nt, Artificial Sequence
  Description of Artificial Sequence: Synthetic oligonucleotide
  Antisense strand to SEQ ID NO: 1766503
uuucuaagcacagaccauu

SEQ ID NO: 1766505 - RNA, 19 nt, Artificial Sequence
  Description of Artificial Sequence: Synthetic oligonucleotide
  Sense strand starting at position 319 of SEQ ID NO: 1562702
auggucugugcuuagaaau

SEQ ID NO: 1766506 - RNA, 19 nt, Artificial Sequence
  Description of Artificial Sequence: Synthetic oligonucleotide
  Antisense strand to SEQ ID NO: 1766505
auuucuaagcacagaccau

SEQ ID NO: 1766507 - RNA, 19 nt, Artificial Sequence
  Description of Artificial Sequence: Synthetic oligonucleotide
  Sense strand starting at position 325 of SEQ ID NO: 1562702
ugugcuuagaaauagguga

SEQ ID NO: 1766508 - RNA, 19 nt, Artificial Sequence
  Description of Artificial Sequence: Synthetic oligonucleotide
  Antisense strand to SEQ ID NO: 1766507
ucaccuauuucuaagcaca

SEQ ID NO: 1766509 - RNA, 19 nt, Artificial Sequence
  Description of Artificial Sequence: Synthetic oligonucleotide
  Sense strand starting at position 364 of SEQ ID NO: 1562702
acugcaugaagguguaaga

SEQ ID NO: 1766510 - RNA, 19 nt, Artificial Sequence
  Description of Artificial Sequence: Synthetic oligonucleotide
  Antisense strand to SEQ ID NO: 1766509
ucuuacaccuucaugcagu

SEQ ID NO: 1766511 - RNA, 19 nt, Artificial Sequence
  Description of Artificial Sequence: Synthetic oligonucleotide
  Sense strand starting at position 424 of SEQ ID NO: 1562702
uuuggcaugggugaagauu

SEQ ID NO: 1766512 - RNA, 19 nt, Artificial Sequence
  Description of Artificial Sequence: Synthetic oligonucleotide
  Antisense strand to SEQ ID NO: 1766511
aaucuucacccaugccaaa

SEQ ID NO: 1766513 - RNA, 19 nt, Artificial Sequence
  Description of Artificial Sequence: Synthetic oligonucleotide
  Sense strand starting at position 442 of SEQ ID NO: 1562702
uugaguuugguuuggauau

SEQ ID NO: 1766514 - RNA, 19 nt, Artificial Sequence
  Description of Artificial Sequence: Synthetic oligonucleotide
  Antisense strand to SEQ ID NO: 1766513
auauccaaaccaaacucaa

SEQ ID NO: 1766515 - RNA, 19 nt, Artificial Sequence
  Description of Artificial Sequence: Synthetic oligonucleotide
  Sense strand starting at position 462 of SEQ ID NO: 1562702
gcuacuuggcgccaaagua

SEQ ID NO: 1766516 - RNA, 19 nt, Artificial Sequence
  Description of Artificial Sequence: Synthetic oligonucleotide
  Antisense strand to SEQ ID NO: 1766515
uacuuuggcgccaaguagc

SEQ ID NO: 1766517 - RNA, 19 nt, Artificial Sequence
  Description of Artificial Sequence: Synthetic oligonucleotide
  Sense strand starting at position 551 of SEQ ID NO: 1562702
cugugaagaugucaaggaa

SEQ ID NO: 1766518 - RNA, 19 nt, Artificial Sequence
  Description of Artificial Sequence: Synthetic oligonucleotide
  Antisense strand to SEQ ID NO: 1766517
uuccuugacaucuucacag

SEQ ID NO: 1766519 - RNA, 19 nt, Artificial Sequence
  Description of Artificial Sequence: Synthetic oligonucleotide
  Sense strand starting at position 564 of SEQ ID NO: 1562702
aaggaaagcuggcauuaaa

SEQ ID NO: 1766520 - RNA, 19 nt, Artificial Sequence
  Description of Artificial Sequence: Synthetic oligonucleotide
  Antisense strand to SEQ ID NO: 1766519
uuuaaugccagcuuuccuu

SEQ ID NO: 1766521 - RNA, 19 nt, Artificial Sequence
  Description of Artificial Sequence: Synthetic oligonucleotide
  Sense strand starting at position 921 of SEQ ID NO: 1562702
ugcuguguuggcuaacaga

SEQ ID NO: 1766522 - RNA, 19 nt, Artificial Sequence
  Description of Artificial Sequence: Synthetic oligonucleotide
  Antisense strand to SEQ ID NO: 1766521
ucuguuagccaacacagca

SEQ ID NO: 1766523 - RNA, 19 nt, Artificial Sequence
  Description of Artificial Sequence: Synthetic oligonucleotide
  Sense strand starting at position 1035 of SEQ ID NO: 1562702
gcaguaugaccucauccgu

SEQ ID NO: 1766524 - RNA, 19 nt, Artificial Sequence
  Description of Artificial Sequence: Synthetic oligonucleotide
  Antisense strand to SEQ ID NO: 1766523
acggaugaggucauacugc

SEQ ID NO: 1766525 - RNA, 19 nt, Artificial Sequence
  Description of Artificial Sequence: Synthetic oligonucleotide
  Sense strand starting at position 1184 of SEQ ID NO: 1562702
agucuagucuggccaggaa

SEQ ID NO: 1766526 - RNA, 19 nt, Artificial Sequence
  Description of Artificial Sequence: Synthetic oligonucleotide
  Antisense strand to SEQ ID NO: 1766525
uuccuggccagacuagacu

SEQ ID NO: 1766527 - RNA, 19 nt, Artificial Sequence
  Description of Artificial Sequence: Synthetic oligonucleotide
  Sense strand starting at position 1187 of SEQ ID NO: 1562702
cuagucuggccaggaaaca

SEQ ID NO: 1766528 - RNA, 19 nt, Artificial Sequence
  Description of Artificial Sequence: Synthetic oligonucleotide
  Antisense strand to SEQ ID NO: 1766527
uguuuccuggccagacuag

SEQ ID NO: 1766529 - RNA, 19 nt, Artificial Sequence
  Description of Artificial Sequence: Synthetic oligonucleotide
  Sense strand starting at position 1221 of SEQ ID NO: 1562702
gugguuggccucgaacagu

SEQ ID NO: 1766530 - RNA, 19 nt, Artificial Sequence
  Description of Artificial Sequence: Synthetic oligonucleotide
  Antisense strand to SEQ ID NO: 1766529
acuguucgaggccaaccac

SEQ ID NO: 1766531 - RNA, 19 nt, Artificial Sequence
  Description of Artificial Sequence: Synthetic oligonucleotide
  Sense strand starting at position 1325 of SEQ ID NO: 1562702
ccaaguccaucgguugaca

SEQ ID NO: 1766532 - RNA, 19 nt, Artificial Sequence
  Description of Artificial Sequence: Synthetic oligonucleotide
  Antisense strand to SEQ ID NO: 1766531
ugucaaccgauggacuugg

SEQ ID NO: 1766533 - RNA, 19 nt, Artificial Sequence
  Description of Artificial Sequence: Synthetic oligonucleotide
  Sense strand starting at position 1390 of SEQ ID NO: 1562702
cgccaugcucauuguuaca

SEQ ID NO: 1766534 - RNA, 19 nt, Artificial Sequence
  Description of Artificial Sequence: Synthetic oligonucleotide
  Antisense strand to SEQ ID NO: 1766533
uguaacaaugagcauggcg

SEQ ID NO: 1766535 - RNA, 19 nt, Artificial Sequence
  Description of Artificial Sequence: Synthetic oligonucleotide
  Sense strand starting at position 1421 of SEQ ID NO: 1562702
cccaauuaucuacgugaca

SEQ ID NO: 1766536 - RNA, 19 nt, Artificial Sequence
  Description of Artificial Sequence: Synthetic oligonucleotide
  Antisense strand to SEQ ID NO: 1766535
ugucacguagauaauuggg

SEQ ID NO: 1766537 - RNA, 19 nt, Artificial Sequence
  Description of Artificial Sequence: Synthetic oligonucleotide
  Sense strand starting at position 1422 of SEQ ID NO: 1562702
ccaauuaucuacgugacac

SEQ ID NO: 1766538 - RNA, 19 nt, Artificial Sequence
  Description of Artificial Sequence: Synthetic oligonucleotide
  Antisense strand to SEQ ID NO: 1766537
gugucacguagauaauugg

SEQ ID NO: 1766539 - RNA, 19 nt, Artificial Sequence
  Description of Artificial Sequence: Synthetic oligonucleotide
  Sense strand starting at position 1437 of SEQ ID NO: 1562702
acacucaacccgugagcau

SEQ ID NO: 1766540 - RNA, 19 nt, Artificial Sequence
  Description of Artificial Sequence: Synthetic oligonucleotide
  Antisense strand to SEQ ID NO: 1766539
augcucacggguugagugu

SEQ ID NO: 1766541 - RNA, 19 nt, Artificial Sequence
  Description of Artificial Sequence: Synthetic oligonucleotide
  Sense strand starting at position 1438 of SEQ ID NO: 1562702
cacucaacccgugagcauu

SEQ ID NO: 1766542 - RNA, 19 nt, Artificial Sequence
  Description of Artificial Sequence: Synthetic oligonucleotide
  Antisense strand to SEQ ID NO: 1766541
aaugcucacggguugagug

SEQ ID NO: 1766543 - RNA, 19 nt, Artificial Sequence
  Description of Artificial Sequence: Synthetic oligonucleotide
  Sense strand starting at position 1448 of SEQ ID NO: 1562702
gugagcauucuguggacaa

SEQ ID NO: 1766544 - RNA, 19 nt, Artificial Sequence
  Description of Artificial Sequence: Synthetic oligonucleotide
  Antisense strand to SEQ ID NO: 1766543
uuguccacagaaugcucac

SEQ ID NO: 1766545 - RNA, 19 nt, Artificial Sequence
  Description of Artificial Sequence: Synthetic oligonucleotide
  Sense strand starting at position 1473 of SEQ ID NO: 1562702
uuaggcgacuucuuggauu

SEQ ID NO: 1766546 - RNA, 19 nt, Artificial Sequence
  Description of Artificial Sequence: Synthetic oligonucleotide
  Antisense strand to SEQ ID NO: 1766545
aauccaagaagucgccuaa

SEQ ID NO: 1766547 - RNA, 19 nt, Artificial Sequence
  Description of Artificial Sequence: Synthetic oligonucleotide
  Sense strand starting at position 1490 of SEQ ID NO: 1562702
uuucccaaacuguguuaaa

SEQ ID NO: 1766548 - RNA, 19 nt, Artificial Sequence
  Description of Artificial Sequence: Synthetic oligonucleotide
  Antisense strand to SEQ ID NO: 1766547
uuuaacacaguuugggaaa

SEQ ID NO: 1766549 - RNA, 19 nt, Artificial Sequence
  Description of Artificial Sequence: Synthetic oligonucleotide
  Sense strand starting at position 1491 of SEQ ID NO: 1562702
uucccaaacuguguuaaag

SEQ ID NO: 1766550 - RNA, 19 nt, Artificial Sequence
  Description of Artificial Sequence: Synthetic oligonucleotide
  Antisense strand to SEQ ID NO: 1766549
cuuuaacacaguuugggaa

SEQ ID NO: 1766551 - RNA, 19 nt, Artificial Sequence
  Description of Artificial Sequence: Synthetic oligonucleotide
  Sense strand starting at position 1699 of SEQ ID NO: 1562702
cggccauguugccucacaa

SEQ ID NO: 1766552 - RNA, 19 nt, Artificial Sequence
  Description of Artificial Sequence: Synthetic oligonucleotide
  Antisense strand to SEQ ID NO: 1766551
uugugaggcaacauggccg

SEQ ID NO: 1766553 - RNA, 19 nt, Artificial Sequence
  Description of Artificial Sequence: Synthetic oligonucleotide
  Sense strand starting at position 2385 of SEQ ID NO: 1562702
guuacacaacccuguuaaa

SEQ ID NO: 1766554 - RNA, 19 nt, Artificial Sequence
  Description of Artificial Sequence: Synthetic oligonucleotide
  Antisense strand to SEQ ID NO: 1766553
uuuaacaggguuguguaac

SEQ ID NO: 1766555 - RNA, 19 nt, Artificial Sequence
  Description of Artificial Sequence: Synthetic oligonucleotide
  Sense strand starting at position 2407 of SEQ ID NO: 1562702
aucacuguaucagacauca

SEQ ID NO: 1766556 - RNA, 19 nt, Artificial Sequence
  Description of Artificial Sequence: Synthetic oligonucleotide
  Antisense strand to SEQ ID NO: 1766555
ugaugucugauacagugau

SEQ ID NO: 1766557 - RNA, 19 nt, Artificial Sequence
  Description of Artificial Sequence: Synthetic oligonucleotide
  Sense strand starting at position 2543 of SEQ ID NO: 1562702
gcgccuguaaucccagagu

SEQ ID NO: 1766558 - RNA, 19 nt, Artificial Sequence
  Description of Artificial Sequence: Synthetic oligonucleotide
  Antisense strand to SEQ ID NO: 1766557
acucugggauuacaggcgc

SEQ ID NO: 1766559 - RNA, 19 nt, Artificial Sequence
  Description of Artificial Sequence: Synthetic oligonucleotide
  Sense strand starting at position 3145 of SEQ ID NO: 1562702
cgagggucugaguaaguga

SEQ ID NO: 1766560 - RNA, 19 nt, Artificial Sequence
  Description of Artificial Sequence: Synthetic oligonucleotide
  Antisense strand to SEQ ID NO: 1766559
ucacuuacucagacccucg

SEQ ID NO: 1766561 - RNA, 19 nt, Artificial Sequence
  Description of Artificial Sequence: Synthetic oligonucleotide
  Sense strand starting at position 3181 of SEQ ID NO: 1562702
agacuagcuuuccugucaa

SEQ ID NO: 1766562 - RNA, 19 nt, Artificial Sequence
  Description of Artificial Sequence: Synthetic oligonucleotide
  Antisense strand to SEQ ID NO: 1766561
uugacaggaaagcuagucu

SEQ ID NO: 1766563 - RNA, 19 nt, Artificial Sequence
  Description of Artificial Sequence: Synthetic oligonucleotide
  Sense strand starting at position 3188 of SEQ ID NO: 1562702
cuuuccugucaauaaaugu

SEQ ID NO: 1766564 - RNA, 19 nt, Artificial Sequence
  Description of Artificial Sequence: Synthetic oligonucleotide
  Antisense strand to SEQ ID NO: 1766563
acauuuauugacaggaaag

SEQ ID NO: 1766565 - RNA, 19 nt, Artificial Sequence
  Description of Artificial Sequence: Synthetic oligonucleotide
  Sense strand starting at position 3195 of SEQ ID NO: 1562702
gucaauaaauguggaagga

SEQ ID NO: 1766566 - RNA, 19 nt, Artificial Sequence
  Description of Artificial Sequence: Synthetic oligonucleotide
  Antisense strand to SEQ ID NO: 1766565
uccuuccacauuuauugac

SEQ ID NO: 1766567 - RNA, 19 nt, Artificial Sequence
  Description of Artificial Sequence: Synthetic oligonucleotide
  Sense strand starting at position 3566 of SEQ ID NO: 1562702
acgagaccgucuccagaaa

SEQ ID NO: 1766568 - RNA, 19 nt, Artificial Sequence
  Description of Artificial Sequence: Synthetic oligonucleotide
  Antisense strand to SEQ ID NO: 1766567
uuucuggagacggucucgu

SEQ ID NO: 1766569 - RNA, 19 nt, Artificial Sequence
  Description of Artificial Sequence: Synthetic oligonucleotide
  Sense strand starting at position 80 of SEQ ID NO: 1562703
ggaacucaguucccacaau

SEQ ID NO: 1766570 - RNA, 19 nt, Artificial Sequence
  Description of Artificial Sequence: Synthetic oligonucleotide
  Antisense strand to SEQ ID NO: 1766569
auugugggaacugaguucc

SEQ ID NO: 1766571 - RNA, 19 nt, Artificial Sequence
  Description of Artificial Sequence: Synthetic oligonucleotide
  Sense strand starting at position 223 of SEQ ID NO: 1562703
uucugagaguccuuugaca

SEQ ID NO: 1766572 - RNA, 19 nt, Artificial Sequence
  Description of Artificial Sequence: Synthetic oligonucleotide
  Antisense strand to SEQ ID NO: 1766571
ugucaaaggacucucagaa

SEQ ID NO: 1766573 - RNA, 19 nt, Artificial Sequence
  Description of Artificial Sequence: Synthetic oligonucleotide
  Sense strand starting at position 225 of SEQ ID NO: 1562703
cugagaguccuuugacauu

SEQ ID NO: 1766574 - RNA, 19 nt, Artificial Sequence
  Description of Artificial Sequence: Synthetic oligonucleotide
  Antisense strand to SEQ ID NO: 1766573
aaugucaaaggacucucag

SEQ ID NO: 1766575 - RNA, 19 nt, Artificial Sequence
  Description of Artificial Sequence: Synthetic oligonucleotide
  Sense strand starting at position 259 of SEQ ID NO: 1562703
uguugucaucuguauaccu

SEQ ID NO: 1766576 - RNA, 19 nt, Artificial Sequence
  Description of Artificial Sequence: Synthetic oligonucleotide
  Antisense strand to SEQ ID NO: 1766575
agguauacagaugacaaca

SEQ ID NO: 1766577 - RNA, 19 nt, Artificial Sequence
  Description of Artificial Sequence: Synthetic oligonucleotide
  Sense strand starting at position 261 of SEQ ID NO: 1562703
uugucaucuguauaccuuu

SEQ ID NO: 1766578 - RNA, 19 nt, Artificial Sequence
  Description of Artificial Sequence: Synthetic oligonucleotide
  Antisense strand to SEQ ID NO: 1766577
aaagguauacagaugacaa

SEQ ID NO: 1766579 - RNA, 19 nt, Artificial Sequence
  Description of Artificial Sequence: Synthetic oligonucleotide
  Sense strand starting at position 267 of SEQ ID NO: 1562703
ucuguauaccuuugauggu

SEQ ID NO: 1766580 - RNA, 19 nt, Artificial Sequence
  Description of Artificial Sequence: Synthetic oligonucleotide
  Antisense strand to SEQ ID NO: 1766579
accaucaaagguauacaga

SEQ ID NO: 1766581 - RNA, 19 nt, Artificial Sequence
  Description of Artificial Sequence: Synthetic oligonucleotide
  Sense strand starting at position 319 of SEQ ID NO: 1562703
agccacguucuguaaauua

SEQ ID NO: 1766582 - RNA, 19 nt, Artificial Sequence
  Description of Artificial Sequence: Synthetic oligonucleotide
  Antisense strand to SEQ ID NO: 1766581
uaauuuacagaacguggcu

SEQ ID NO: 1766583 - RNA, 19 nt, Artificial Sequence
  Description of Artificial Sequence: Synthetic oligonucleotide
  Sense strand starting at position 470 of SEQ ID NO: 1562703
guagccaaauguucuggaa

SEQ ID NO: 1766584 - RNA, 19 nt, Artificial Sequence
  Description of Artificial Sequence: Synthetic oligonucleotide
  Antisense strand to SEQ ID NO: 1766583
uuccagaacauuuggcuac

SEQ ID NO: 1766585 - RNA, 19 nt, Artificial Sequence
  Description of Artificial Sequence: Synthetic oligonucleotide
  Sense strand starting at position 482 of SEQ ID NO: 1562703
ucuggaaauaucugaguag

SEQ ID NO: 1766586 - RNA, 19 nt, Artificial Sequence
  Description of Artificial Sequence: Synthetic oligonucleotide
  Antisense strand to SEQ ID NO: 1766585
cuacucagauauuuccaga

SEQ ID NO: 1766587 - RNA, 19 nt, Artificial Sequence
  Description of Artificial Sequence: Synthetic oligonucleotide
  Sense strand starting at position 547 of SEQ ID NO: 1562703
ccaagaauguuagugagac

SEQ ID NO: 1766588 - RNA, 19 nt, Artificial Sequence
  Description of Artificial Sequence: Synthetic oligonucleotide
  Antisense strand to SEQ ID NO: 1766587
gucucacuaacauucuugg

SEQ ID NO: 1766589 - RNA, 19 nt, Artificial Sequence
  Description of Artificial Sequence: Synthetic oligonucleotide
  Sense strand starting at position 562 of SEQ ID NO: 1562703
agaccauggcaauguaaca

SEQ ID NO: 1766590 - RNA, 19 nt, Artificial Sequence
  Description of Artificial Sequence: Synthetic oligonucleotide
  Antisense strand to SEQ ID NO: 1766589
uguuacauugccauggucu

SEQ ID NO: 1766591 - RNA, 19 nt, Artificial Sequence
  Description of Artificial Sequence: Synthetic oligonucleotide
  Sense strand starting at position 823 of SEQ ID NO: 1562703
agauaaugucagcacaguu

SEQ ID NO: 1766592 - RNA, 19 nt, Artificial Sequence
  Description of Artificial Sequence: Synthetic oligonucleotide
  Antisense strand to SEQ ID NO: 1766591
aacugugcugacauuaucu

SEQ ID NO: 1766593 - RNA, 19 nt, Artificial Sequence
  Description of Artificial Sequence: Synthetic oligonucleotide
  Sense strand starting at position 892 of SEQ ID NO: 1562703
cuggauuucugccaacauc

SEQ ID NO: 1766594 - RNA, 19 nt, Artificial Sequence
  Description of Artificial Sequence: Synthetic oligonucleotide
  Antisense strand to SEQ ID NO: 1766593
gauguuggcagaaauccag

SEQ ID NO: 1766595 - RNA, 19 nt, Artificial Sequence
  Description of Artificial Sequence: Synthetic oligonucleotide
  Sense strand starting at position 920 of SEQ ID NO: 1562703
agucgccugacauauagaa

SEQ ID NO: 1766596 - RNA, 19 nt, Artificial Sequence
  Description of Artificial Sequence: Synthetic oligonucleotide
  Antisense strand to SEQ ID NO: 1766595
uucuauaugucaggcgacu

SEQ ID NO: 1766597 - RNA, 19 nt, Artificial Sequence
  Description of Artificial Sequence: Synthetic oligonucleotide
  Sense strand starting at position 1100 of SEQ ID NO: 1562703
cccaaauguccauaagguu

SEQ ID NO: 1766598 - RNA, 19 nt, Artificial Sequence
  Description of Artificial Sequence: Synthetic oligonucleotide
  Antisense strand to SEQ ID NO: 1766597
aaccuuauggacauuuggg

SEQ ID NO: 1766599 - RNA, 19 nt, Artificial Sequence
  Description of Artificial Sequence: Synthetic oligonucleotide
  Sense strand starting at position 1172 of SEQ ID NO: 1562703
acaauuccauguuucugua

SEQ ID NO: 1766600 - RNA, 19 nt, Artificial Sequence
  Description of Artificial Sequence: Synthetic oligonucleotide
  Antisense strand to SEQ ID NO: 1766599
uacagaaacauggaauugu

SEQ ID NO: 1766601 - RNA, 19 nt, Artificial Sequence
  Description of Artificial Sequence: Synthetic oligonucleotide
  Sense strand starting at position 1329 of SEQ ID NO: 1562703
uccgcuucucuagagauug

SEQ ID NO: 1766602 - RNA, 19 nt, Artificial Sequence
  Description of Artificial Sequence: Synthetic oligonucleotide
  Antisense strand to SEQ ID NO: 1766601
caaucucuagagaagcgga

SEQ ID NO: 1766603 - RNA, 19 nt, Artificial Sequence
  Description of Artificial Sequence: Synthetic oligonucleotide
  Sense strand starting at position 1465 of SEQ ID NO: 1562703
ggaacaacauuugaacuau

SEQ ID NO: 1766604 - RNA, 19 nt, Artificial Sequence
  Description of Artificial Sequence: Synthetic oligonucleotide
  Antisense strand to SEQ ID NO: 1766603
auaguucaaauguuguucc

SEQ ID NO: 1766605 - RNA, 19 nt, Artificial Sequence
  Description of Artificial Sequence: Synthetic oligonucleotide
  Sense strand starting at position 1589 of SEQ ID NO: 1562703
accagcuguuaagucauua

SEQ ID NO: 1766606 - RNA, 19 nt, Artificial Sequence
  Description of Artificial Sequence: Synthetic oligonucleotide
  Antisense strand to SEQ ID NO: 1766605
uaaugacuuaacagcuggu

SEQ ID NO: 1766607 - RNA, 19 nt, Artificial Sequence
  Description of Artificial Sequence: Synthetic oligonucleotide
  Sense strand starting at position 1654 of SEQ ID NO: 1562703
ccaaacaaguuguuacaua

SEQ ID NO: 1766608 - RNA, 19 nt, Artificial Sequence
  Description of Artificial Sequence: Synthetic oligonucleotide
  Antisense strand to SEQ ID NO: 1766607
uauguaacaacuuguuugg

SEQ ID NO: 1766609 - RNA, 19 nt, Artificial Sequence
  Description of Artificial Sequence: Synthetic oligonucleotide
  Sense strand starting at position 1662 of SEQ ID NO: 1562703
guuguuacauauuugcaau

SEQ ID NO: 1766610 - RNA, 19 nt, Artificial Sequence
  Description of Artificial Sequence: Synthetic oligonucleotide
  Antisense strand to SEQ ID NO: 1766609
auugcaaauauguaacaac

SEQ ID NO: 1766611 - RNA, 19 nt, Artificial Sequence
  Description of Artificial Sequence: Synthetic oligonucleotide
  Sense strand starting at position 1756 of SEQ ID NO: 1562703
augaucgaaugucuauaua

SEQ ID NO: 1766612 - RNA, 19 nt, Artificial Sequence
  Description of Artificial Sequence: Synthetic oligonucleotide
  Antisense strand to SEQ ID NO: 1766611
uauauagacauucgaucau

SEQ ID NO: 1766613 - RNA, 19 nt, Artificial Sequence
  Description of Artificial Sequence: Synthetic oligonucleotide
  Sense strand starting at position 1759 of SEQ ID NO: 1562703
aucgaaugucuauauaucu

SEQ ID NO: 1766614 - RNA, 19 nt, Artificial Sequence
  Description of Artificial Sequence: Synthetic oligonucleotide
  Antisense strand to SEQ ID NO: 1766613
agauauauagacauucgau

SEQ ID NO: 1766615 - RNA, 19 nt, Artificial Sequence
  Description of Artificial Sequence: Synthetic oligonucleotide
  Sense strand starting at position 1907 of SEQ ID NO: 1562703
gaaguaguccuuuguccag

SEQ ID NO: 1766616 - RNA, 19 nt, Artificial Sequence
  Description of Artificial Sequence: Synthetic oligonucleotide
  Antisense strand to SEQ ID NO: 1766615
cuggacaaaggacuacuuc

SEQ ID NO: 1766617 - RNA, 19 nt, Artificial Sequence
  Description of Artificial Sequence: Synthetic oligonucleotide
  Sense strand starting at position 1979 of SEQ ID NO: 1562703
gcauuuagcuuggaaagau

SEQ ID NO: 1766618 - RNA, 19 nt, Artificial Sequence
  Description of Artificial Sequence: Synthetic oligonucleotide
  Antisense strand to SEQ ID NO: 1766617
aucuuuccaagcuaaaugc

SEQ ID NO: 1766619 - RNA, 19 nt, Artificial Sequence
  Description of Artificial Sequence: Synthetic oligonucleotide
  Sense strand starting at position 2009 of SEQ ID NO: 1562703
aucuucuuucugcgagaca

SEQ ID NO: 1766620 - RNA, 19 nt, Artificial Sequence
  Description of Artificial Sequence: Synthetic oligonucleotide
  Antisense strand to SEQ ID NO: 1766619
ugucucgcagaaagaagau

SEQ ID NO: 1766621 - RNA, 19 nt, Artificial Sequence
  Description of Artificial Sequence: Synthetic oligonucleotide
  Sense strand starting at position 2012 of SEQ ID NO: 1562703
uucuuucugcgagacaugu

SEQ ID NO: 1766622 - RNA, 19 nt, Artificial Sequence
  Description of Artificial Sequence: Synthetic oligonucleotide
  Antisense strand to SEQ ID NO: 1766621
acaugucucgcagaaagaa

SEQ ID NO: 1766623 - RNA, 19 nt, Artificial Sequence
  Description of Artificial Sequence: Synthetic oligonucleotide
  Sense strand starting at position 2018 of SEQ ID NO: 1562703
cugcgagacaugugacauu

SEQ ID NO: 1766624 - RNA, 19 nt, Artificial Sequence
  Description of Artificial Sequence: Synthetic oligonucleotide
  Antisense strand to SEQ ID NO: 1766623
aaugucacaugucucgcag

SEQ ID NO: 1766625 - RNA, 19 nt, Artificial Sequence
  Description of Artificial Sequence: Synthetic oligonucleotide
  Sense strand starting at position 2029 of SEQ ID NO: 1562703
gugacauuauuucuugugu

SEQ ID NO: 1766626 - RNA, 19 nt, Artificial Sequence
  Description of Artificial Sequence: Synthetic oligonucleotide
  Antisense strand to SEQ ID NO: 1766625
acacaagaaauaaugucac

SEQ ID NO: 1766627 - RNA, 19 nt, Artificial Sequence
  Description of Artificial Sequence: Synthetic oligonucleotide
  Sense strand starting at position 2158 of SEQ ID NO: 1562703
cuuaucaucugguuuccau

SEQ ID NO: 1766628 - RNA, 19 nt, Artificial Sequence
  Description of Artificial Sequence: Synthetic oligonucleotide
  Antisense strand to SEQ ID NO: 1766627
auggaaaccagaugauaag

SEQ ID NO: 1766629 - RNA, 19 nt, Artificial Sequence
  Description of Artificial Sequence: Synthetic oligonucleotide
  Sense strand starting at position 2196 of SEQ ID NO: 1562703
uuauuacugccuugaaugu

SEQ ID NO: 1766630 - RNA, 19 nt, Artificial Sequence
  Description of Artificial Sequence: Synthetic oligonucleotide
  Antisense strand to SEQ ID NO: 1766629
acauucaaggcaguaauaa

SEQ ID NO: 1766631 - RNA, 19 nt, Artificial Sequence
  Description of Artificial Sequence: Synthetic oligonucleotide
  Sense strand starting at position 2217 of SEQ ID NO: 1562703
uuuagaauugcauauugcu

SEQ ID NO: 1766632 - RNA, 19 nt, Artificial Sequence
  Description of Artificial Sequence: Synthetic oligonucleotide
  Antisense strand to SEQ ID NO: 1766631
agcaauaugcaauucuaaa

SEQ ID NO: 1766633 - RNA, 19 nt, Artificial Sequence
  Description of Artificial Sequence: Synthetic oligonucleotide
  Sense strand starting at position 2246 of SEQ ID NO: 1562703
cuuguuuauguuuaacaac

SEQ ID NO: 1766634 - RNA, 19 nt, Artificial Sequence
  Description of Artificial Sequence: Synthetic oligonucleotide
  Antisense strand to SEQ ID NO: 1766633
guuguuaaacauaaacaag

SEQ ID NO: 1766635 - RNA, 19 nt, Artificial Sequence
  Description of Artificial Sequence: Synthetic oligonucleotide
  Sense strand starting at position 2376 of SEQ ID NO: 1562703
ccugccugcugauuaugaa

SEQ ID NO: 1766636 - RNA, 19 nt, Artificial Sequence
  Description of Artificial Sequence: Synthetic oligonucleotide
  Antisense strand to SEQ ID NO: 1766635
uucauaaucagcaggcagg

SEQ ID NO: 1766637 - RNA, 19 nt, Artificial Sequence
  Description of Artificial Sequence: Synthetic oligonucleotide
  Sense strand starting at position 2377 of SEQ ID NO: 1562703
cugccugcugauuaugaau

SEQ ID NO: 1766638 - RNA, 19 nt, Artificial Sequence
  Description of Artificial Sequence: Synthetic oligonucleotide
  Antisense strand to SEQ ID NO: 1766637
auucauaaucagcaggcag

SEQ ID NO: 1766639 - RNA, 19 nt, Artificial Sequence
  Description of Artificial Sequence: Synthetic oligonucleotide
  Sense strand starting at position 2395 of SEQ ID NO: 1562703
uggguacuccuguaacauc

SEQ ID NO: 1766640 - RNA, 19 nt, Artificial Sequence
  Description of Artificial Sequence: Synthetic oligonucleotide
  Antisense strand to SEQ ID NO: 1766639
gauguuacaggaguaccca

SEQ ID NO: 1766641 - RNA, 19 nt, Artificial Sequence
  Description of Artificial Sequence: Synthetic oligonucleotide
  Sense strand starting at position 2881 of SEQ ID NO: 1562703
gcgugauuguguuuauuua

SEQ ID NO: 1766642 - RNA, 19 nt, Artificial Sequence
  Description of Artificial Sequence: Synthetic oligonucleotide
  Antisense strand to SEQ ID NO: 1766641
uaaauaaacacaaucacgc

SEQ ID NO: 1766643 - RNA, 19 nt, Artificial Sequence
  Description of Artificial Sequence: Synthetic oligonucleotide
  Sense strand starting at position 2882 of SEQ ID NO: 1562703
cgugauuguguuuauuuau

SEQ ID NO: 1766644 - RNA, 19 nt, Artificial Sequence
  Description of Artificial Sequence: Synthetic oligonucleotide
  Antisense strand to SEQ ID NO: 1766643
auaaauaaacacaaucacg

SEQ ID NO: 1766645 - RNA, 19 nt, Artificial Sequence
  Description of Artificial Sequence: Synthetic oligonucleotide
  Sense strand starting at position 3237 of SEQ ID NO: 1562703
gacugaaccguuggauuga

SEQ ID NO: 1766646 - RNA, 19 nt, Artificial Sequence
  Description of Artificial Sequence: Synthetic oligonucleotide
  Antisense strand to SEQ ID NO: 1766645
ucaauccaacgguucaguc

SEQ ID NO: 1766647 - RNA, 19 nt, Artificial Sequence
  Description of Artificial Sequence: Synthetic oligonucleotide
  Sense strand starting at position 3566 of SEQ ID NO: 1562703
ggaagcgcgccuucucaaa

SEQ ID NO: 1766648 - RNA, 19 nt, Artificial Sequence
  Description of Artificial Sequence: Synthetic oligonucleotide
  Antisense strand to SEQ ID NO: 1766647
uuugagaaggcgcgcuucc

SEQ ID NO: 1766649 - RNA, 19 nt, Artificial Sequence
  Description of Artificial Sequence: Synthetic oligonucleotide
  Sense strand starting at position 192 of SEQ ID NO: 1562704
gcauuuagcuuggaaagau

SEQ ID NO: 1766650 - RNA, 19 nt, Artificial Sequence
  Description of Artificial Sequence: Synthetic oligonucleotide
  Antisense strand to SEQ ID NO: 1766649
aucuuuccaagcuaaaugc

SEQ ID NO: 1766651 - RNA, 19 nt, Artificial Sequence
  Description of Artificial Sequence: Synthetic oligonucleotide
  Sense strand starting at position 225 of SEQ ID NO: 1562704
uucuuucugcgagacaugu

SEQ ID NO: 1766652 - RNA, 19 nt, Artificial Sequence
  Description of Artificial Sequence: Synthetic oligonucleotide
  Antisense strand to SEQ ID NO: 1766651
acaugucucgcagaaagaa

SEQ ID NO: 1766653 - RNA, 19 nt, Artificial Sequence
  Description of Artificial Sequence: Synthetic oligonucleotide
  Sense strand starting at position 231 of SEQ ID NO: 1562704
cugcgagacaugugacauu

SEQ ID NO: 1766654 - RNA, 19 nt, Artificial Sequence
  Description of Artificial Sequence: Synthetic oligonucleotide
  Antisense strand to SEQ ID NO: 1766653
aaugucacaugucucgcag

SEQ ID NO: 1766655 - RNA, 19 nt, Artificial Sequence
  Description of Artificial Sequence: Synthetic oligonucleotide
  Sense strand starting at position 242 of SEQ ID NO: 1562704
gugacauuauuucuugugu

SEQ ID NO: 1766656 - RNA, 19 nt, Artificial Sequence
  Description of Artificial Sequence: Synthetic oligonucleotide
  Antisense strand to SEQ ID NO: 1766655
acacaagaaauaaugucac

SEQ ID NO: 1766657 - RNA, 19 nt, Artificial Sequence
  Description of Artificial Sequence: Synthetic oligonucleotide
  Sense strand starting at position 371 of SEQ ID NO: 1562704
cuuaucaucugguuuccau

SEQ ID NO: 1766658 - RNA, 19 nt, Artificial Sequence
  Description of Artificial Sequence: Synthetic oligonucleotide
  Antisense strand to SEQ ID NO: 1766657
auggaaaccagaugauaag

SEQ ID NO: 1766659 - RNA, 19 nt, Artificial Sequence
  Description of Artificial Sequence: Synthetic oligonucleotide
  Sense strand starting at position 430 of SEQ ID NO: 1562704
uuuagaauugcauauugcu

SEQ ID NO: 1766660 - RNA, 19 nt, Artificial Sequence
  Description of Artificial Sequence: Synthetic oligonucleotide
  Antisense strand to SEQ ID NO: 1766659
agcaauaugcaauucuaaa

SEQ ID NO: 1766661 - RNA, 19 nt, Artificial Sequence
  Description of Artificial Sequence: Synthetic oligonucleotide
  Sense strand starting at position 459 of SEQ ID NO: 1562704
cuuguuuauguuuaacaac

SEQ ID NO: 1766662 - RNA, 19 nt, Artificial Sequence
  Description of Artificial Sequence: Synthetic oligonucleotide
  Antisense strand to SEQ ID NO: 1766661
guuguuaaacauaaacaag

SEQ ID NO: 1766663 - RNA, 19 nt, Artificial Sequence
  Description of Artificial Sequence: Synthetic oligonucleotide
  Sense strand starting at position 590 of SEQ ID NO: 1562704
cugccugcugauuaugaau

SEQ ID NO: 1766664 - RNA, 19 nt, Artificial Sequence
  Description of Artificial Sequence: Synthetic oligonucleotide
  Antisense strand to SEQ ID NO: 1766663
auucauaaucagcaggcag

SEQ ID NO: 1766665 - RNA, 19 nt, Artificial Sequence
  Description of Artificial Sequence: Synthetic oligonucleotide
  Sense strand starting at position 608 of SEQ ID NO: 1562704
uggguacuccuguaacauc

SEQ ID NO: 1766666 - RNA, 19 nt, Artificial Sequence
  Description of Artificial Sequence: Synthetic oligonucleotide
  Antisense strand to SEQ ID NO: 1766665
gauguuacaggaguaccca

SEQ ID NO: 1766667 - RNA, 19 nt, Artificial Sequence
  Description of Artificial Sequence: Synthetic oligonucleotide
  Sense strand starting at position 1094 of SEQ ID NO: 1562704
gcgugauuguguuuauuua

SEQ ID NO: 1766668 - RNA, 19 nt, Artificial Sequence
  Description of Artificial Sequence: Synthetic oligonucleotide
  Antisense strand to SEQ ID NO: 1766667
uaaauaaacacaaucacgc

SEQ ID NO: 1766669 - RNA, 19 nt, Artificial Sequence
  Description of Artificial Sequence: Synthetic oligonucleotide
  Sense strand starting at position 1095 of SEQ ID NO: 1562704
cgugauuguguuuauuuau

SEQ ID NO: 1766670 - RNA, 19 nt, Artificial Sequence
  Description of Artificial Sequence: Synthetic oligonucleotide
  Antisense strand to SEQ ID NO: 1766669
auaaauaaacacaaucacg

SEQ ID NO: 1766671 - RNA, 19 nt, Artificial Sequence
  Description of Artificial Sequence: Synthetic oligonucleotide
  Sense strand starting at position 1450 of SEQ ID NO: 1562704
gacugaaccguuggauuga

SEQ ID NO: 1766672 - RNA, 19 nt, Artificial Sequence
  Description of Artificial Sequence: Synthetic oligonucleotide
  Antisense strand to SEQ ID NO: 1766671
ucaauccaacgguucaguc

SEQ ID NO: 1766673 - RNA, 19 nt, Artificial Sequence
  Description of Artificial Sequence: Synthetic oligonucleotide
  Sense strand starting at position 1779 of SEQ ID NO: 1562704
ggaagcgcgccuucucaaa

SEQ ID NO: 1766674 - RNA, 19 nt, Artificial Sequence
  Description of Artificial Sequence: Synthetic oligonucleotide
  Antisense strand to SEQ ID NO: 1766673
uuugagaaggcgcgcuucc

SEQ ID NO: 1766675 - RNA, 19 nt, Artificial Sequence
  Description of Artificial Sequence: Synthetic oligonucleotide
  Sense strand starting at position 2357 of SEQ ID NO: 1562704
gcuaaaguccgggagaaga

SEQ ID NO: 1766676 - RNA, 19 nt, Artificial Sequence
  Description of Artificial Sequence: Synthetic oligonucleotide
  Antisense strand to SEQ ID NO: 1766675
ucuucucccggacuuuagc

SEQ ID NO: 1766677 - RNA, 19 nt, Artificial Sequence
  Description of Artificial Sequence: Synthetic oligonucleotide
  Sense strand starting at position 2439 of SEQ ID NO: 1562704
ugacuuuggcgauaggucu

SEQ ID NO: 1766678 - RNA, 19 nt, Artificial Sequence
  Description of Artificial Sequence: Synthetic oligonucleotide
  Antisense strand to SEQ ID NO: 1766677
agaccuaucgccaaaguca

SEQ ID NO: 1766679 - RNA, 19 nt, Artificial Sequence
  Description of Artificial Sequence: Synthetic oligonucleotide
  Sense strand starting at position 2475 of SEQ ID NO: 1562704
gauggagccuuggcuuaga

SEQ ID NO: 1766680 - RNA, 19 nt, Artificial Sequence
  Description of Artificial Sequence: Synthetic oligonucleotide
  Antisense strand to SEQ ID NO: 1766679
ucuaagccaaggcuccauc

SEQ ID NO: 1766681 - RNA, 19 nt, Artificial Sequence
  Description of Artificial Sequence: Synthetic oligonucleotide
  Sense strand starting at position 2590 of SEQ ID NO: 1562704
cccucagcguuccuaauuu

SEQ ID NO: 1766682 - RNA, 19 nt, Artificial Sequence
  Description of Artificial Sequence: Synthetic oligonucleotide
  Antisense strand to SEQ ID NO: 1766681
aaauuaggaacgcugaggg

SEQ ID NO: 1766683 - RNA, 19 nt, Artificial Sequence
  Description of Artificial Sequence: Synthetic oligonucleotide
  Sense strand starting at position 2635 of SEQ ID NO: 1562704
cacucuugucugugauuga

SEQ ID NO: 1766684 - RNA, 19 nt, Artificial Sequence
  Description of Artificial Sequence: Synthetic oligonucleotide
  Antisense strand to SEQ ID NO: 1766683
ucaaucacagacaagagug

SEQ ID NO: 1766685 - RNA, 19 nt, Artificial Sequence
  Description of Artificial Sequence: Synthetic oligonucleotide
  Sense strand starting at position 2638 of SEQ ID NO: 1562704
ucuugucugugauugagac

SEQ ID NO: 1766686 - RNA, 19 nt, Artificial Sequence
  Description of Artificial Sequence: Synthetic oligonucleotide
  Antisense strand to SEQ ID NO: 1766685
gucucaaucacagacaaga

SEQ ID NO: 1766687 - RNA, 19 nt, Artificial Sequence
  Description of Artificial Sequence: Synthetic oligonucleotide
  Sense strand starting at position 2639 of SEQ ID NO: 1562704
cuugucugugauugagaca

SEQ ID NO: 1766688 - RNA, 19 nt, Artificial Sequence
  Description of Artificial Sequence: Synthetic oligonucleotide
  Antisense strand to SEQ ID NO: 1766687
ugucucaaucacagacaag

SEQ ID NO: 1766689 - RNA, 19 nt, Artificial Sequence
  Description of Artificial Sequence: Synthetic oligonucleotide
  Sense strand starting at position 2694 of SEQ ID NO: 1562704
cugucuuaacuugaaguuu

SEQ ID NO: 1766690 - RNA, 19 nt, Artificial Sequence
  Description of Artificial Sequence: Synthetic oligonucleotide
  Antisense strand to SEQ ID NO: 1766689
aaacuucaaguuaagacag

SEQ ID NO: 1766691 - RNA, 19 nt, Artificial Sequence
  Description of Artificial Sequence: Synthetic oligonucleotide
  Sense strand starting at position 2850 of SEQ ID NO: 1562704
ggaaacauuugagagagca

SEQ ID NO: 1766692 - RNA, 19 nt, Artificial Sequence
  Description of Artificial Sequence: Synthetic oligonucleotide
  Antisense strand to SEQ ID NO: 1766691
ugcucucucaaauguuucc

SEQ ID NO: 1766693 - RNA, 19 nt, Artificial Sequence
  Description of Artificial Sequence: Synthetic oligonucleotide
  Sense strand starting at position 2890 of SEQ ID NO: 1562704
auguaucuuggaugaaucu

SEQ ID NO: 1766694 - RNA, 19 nt, Artificial Sequence
  Description of Artificial Sequence: Synthetic oligonucleotide
  Antisense strand to SEQ ID NO: 1766693
agauucauccaagauacau

SEQ ID NO: 1766695 - RNA, 19 nt, Artificial Sequence
  Description of Artificial Sequence: Synthetic oligonucleotide
  Sense strand starting at position 2899 of SEQ ID NO: 1562704
ggaugaaucucugugcaaa

SEQ ID NO: 1766696 - RNA, 19 nt, Artificial Sequence
  Description of Artificial Sequence: Synthetic oligonucleotide
  Antisense strand to SEQ ID NO: 1766695
uuugcacagagauucaucc

SEQ ID NO: 1766697 - RNA, 19 nt, Artificial Sequence
  Description of Artificial Sequence: Synthetic oligonucleotide
  Sense strand starting at position 2900 of SEQ ID NO: 1562704
gaugaaucucugugcaaac

SEQ ID NO: 1766698 - RNA, 19 nt, Artificial Sequence
  Description of Artificial Sequence: Synthetic oligonucleotide
  Antisense strand to SEQ ID NO: 1766697
guuugcacagagauucauc

SEQ ID NO: 1766699 - RNA, 19 nt, Artificial Sequence
  Description of Artificial Sequence: Synthetic oligonucleotide
  Sense strand starting at position 2901 of SEQ ID NO: 1562704
augaaucucugugcaaaca

SEQ ID NO: 1766700 - RNA, 19 nt, Artificial Sequence
  Description of Artificial Sequence: Synthetic oligonucleotide
  Antisense strand to SEQ ID NO: 1766699
uguuugcacagagauucau

SEQ ID NO: 1766701 - RNA, 19 nt, Artificial Sequence
  Description of Artificial Sequence: Synthetic oligonucleotide
  Sense strand starting at position 3126 of SEQ ID NO: 1562704
guccuuguuauauggagau

SEQ ID NO: 1766702 - RNA, 19 nt, Artificial Sequence
  Description of Artificial Sequence: Synthetic oligonucleotide
  Antisense strand to SEQ ID NO: 1766701
aucuccauauaacaaggac

SEQ ID NO: 1766703 - RNA, 19 nt, Artificial Sequence
  Description of Artificial Sequence: Synthetic oligonucleotide
  Sense strand starting at position 3226 of SEQ ID NO: 1562704
ugagcaacucguuagguga

SEQ ID NO: 1766704 - RNA, 19 nt, Artificial Sequence
  Description of Artificial Sequence: Synthetic oligonucleotide
  Antisense strand to SEQ ID NO: 1766703
ucaccuaacgaguugcuca

SEQ ID NO: 1766705 - RNA, 19 nt, Artificial Sequence
  Description of Artificial Sequence: Synthetic oligonucleotide
  Sense strand starting at position 3229 of SEQ ID NO: 1562704
gcaacucguuaggugaaga

SEQ ID NO: 1766706 - RNA, 19 nt, Artificial Sequence
  Description of Artificial Sequence: Synthetic oligonucleotide
  Antisense strand to SEQ ID NO: 1766705
ucuucaccuaacgaguugc

SEQ ID NO: 1766707 - RNA, 19 nt, Artificial Sequence
  Description of Artificial Sequence: Synthetic oligonucleotide
  Sense strand starting at position 3284 of SEQ ID NO: 1562704
caagaugauuuagggaaau

SEQ ID NO: 1766708 - RNA, 19 nt, Artificial Sequence
  Description of Artificial Sequence: Synthetic oligonucleotide
  Antisense strand to SEQ ID NO: 1766707
auuucccuaaaucaucuug

SEQ ID NO: 1766709 - RNA, 19 nt, Artificial Sequence
  Description of Artificial Sequence: Synthetic oligonucleotide
  Sense strand starting at position 3360 of SEQ ID NO: 1562704
gaagguugugugcaguaca

SEQ ID NO: 1766710 - RNA, 19 nt, Artificial Sequence
  Description of Artificial Sequence: Synthetic oligonucleotide
  Antisense strand to SEQ ID NO: 1766709
uguacugcacacaaccuuc

SEQ ID NO: 1766711 - RNA, 19 nt, Artificial Sequence
  Description of Artificial Sequence: Synthetic oligonucleotide
  Sense strand starting at position 3434 of SEQ ID NO: 1562704
aucuuaucuggguaucaua

SEQ ID NO: 1766712 - RNA, 19 nt, Artificial Sequence
  Description of Artificial Sequence: Synthetic oligonucleotide
  Antisense strand to SEQ ID NO: 1766711
uaugauacccagauaagau

SEQ ID NO: 1766713 - RNA, 19 nt, Artificial Sequence
  Description of Artificial Sequence: Synthetic oligonucleotide
  Sense strand starting at position 3443 of SEQ ID NO: 1562704
ggguaucauaucgaugguu

SEQ ID NO: 1766714 - RNA, 19 nt, Artificial Sequence
  Description of Artificial Sequence: Synthetic oligonucleotide
  Antisense strand to SEQ ID NO: 1766713
aaccaucgauaugauaccc

SEQ ID NO: 1766715 - RNA, 19 nt, Artificial Sequence
  Description of Artificial Sequence: Synthetic oligonucleotide
  Sense strand starting at position 3445 of SEQ ID NO: 1562704
guaucauaucgaugguuag

SEQ ID NO: 1766716 - RNA, 19 nt, Artificial Sequence
  Description of Artificial Sequence: Synthetic oligonucleotide
  Antisense strand to SEQ ID NO: 1766715
cuaaccaucgauaugauac

SEQ ID NO: 1766717 - RNA, 19 nt, Artificial Sequence
  Description of Artificial Sequence: Synthetic oligonucleotide
  Sense strand starting at position 3446 of SEQ ID NO: 1562704
uaucauaucgaugguuaga

SEQ ID NO: 1766718 - RNA, 19 nt, Artificial Sequence
  Description of Artificial Sequence: Synthetic oligonucleotide
  Antisense strand to SEQ ID NO: 1766717
ucuaaccaucgauaugaua

SEQ ID NO: 1766719 - RNA, 19 nt, Artificial Sequence
  Description of Artificial Sequence: Synthetic oligonucleotide
  Sense strand starting at position 3448 of SEQ ID NO: 1562704
ucauaucgaugguuagaga

SEQ ID NO: 1766720 - RNA, 19 nt, Artificial Sequence
  Description of Artificial Sequence: Synthetic oligonucleotide
  Antisense strand to SEQ ID NO: 1766719
ucucuaaccaucgauauga

SEQ ID NO: 1766721 - RNA, 19 nt, Artificial Sequence
  Description of Artificial Sequence: Synthetic oligonucleotide
  Sense strand starting at position 3586 of SEQ ID NO: 1562704
auaucaugaagguggcauu

SEQ ID NO: 1766722 - RNA, 19 nt, Artificial Sequence
  Description of Artificial Sequence: Synthetic oligonucleotide
  Antisense strand to SEQ ID NO: 1766721
aaugccaccuucaugauau

SEQ ID NO: 1766723 - RNA, 19 nt, Artificial Sequence
  Description of Artificial Sequence: Synthetic oligonucleotide
  Sense strand starting at position 3843 of SEQ ID NO: 1562704
caugaaagauuguuaagua

SEQ ID NO: 1766724 - RNA, 19 nt, Artificial Sequence
  Description of Artificial Sequence: Synthetic oligonucleotide
  Antisense strand to SEQ ID NO: 1766723
uacuuaacaaucuuucaug

SEQ ID NO: 1766725 - RNA, 19 nt, Artificial Sequence
  Description of Artificial Sequence: Synthetic oligonucleotide
  Sense strand starting at position 3879 of SEQ ID NO: 1562704
auauauccugcauggcaaa

SEQ ID NO: 1766726 - RNA, 19 nt, Artificial Sequence
  Description of Artificial Sequence: Synthetic oligonucleotide
  Antisense strand to SEQ ID NO: 1766725
uuugccaugcaggauauau

SEQ ID NO: 1766727 - RNA, 19 nt, Artificial Sequence
  Description of Artificial Sequence: Synthetic oligonucleotide
  Sense strand starting at position 3948 of SEQ ID NO: 1562704
gucaauuauuaacuggaua

SEQ ID NO: 1766728 - RNA, 19 nt, Artificial Sequence
  Description of Artificial Sequence: Synthetic oligonucleotide
  Antisense strand to SEQ ID NO: 1766727
uauccaguuaauaauugac

SEQ ID NO: 1766729 - RNA, 19 nt, Artificial Sequence
  Description of Artificial Sequence: Synthetic oligonucleotide
  Sense strand starting at position 10 of SEQ ID NO: 1562705
gcaagaucauagcucccua

SEQ ID NO: 1766730 - RNA, 19 nt, Artificial Sequence
  Description of Artificial Sequence: Synthetic oligonucleotide
  Antisense strand to SEQ ID NO: 1766729
uagggagcuaugaucuugc

SEQ ID NO: 1766731 - RNA, 19 nt, Artificial Sequence
  Description of Artificial Sequence: Synthetic oligonucleotide
  Sense strand starting at position 152 of SEQ ID NO: 1562705
ucauuauguuacccggacu

SEQ ID NO: 1766732 - RNA, 19 nt, Artificial Sequence
  Description of Artificial Sequence: Synthetic oligonucleotide
  Antisense strand to SEQ ID NO: 1766731
aguccggguaacauaauga

SEQ ID NO: 1766733 - RNA, 19 nt, Artificial Sequence
  Description of Artificial Sequence: Synthetic oligonucleotide
  Sense strand starting at position 164 of SEQ ID NO: 1562705
ccggacugucgugaaauuc

SEQ ID NO: 1766734 - RNA, 19 nt, Artificial Sequence
  Description of Artificial Sequence: Synthetic oligonucleotide
  Antisense strand to SEQ ID NO: 1766733
gaauuucacgacaguccgg

SEQ ID NO: 1766735 - RNA, 19 nt, Artificial Sequence
  Description of Artificial Sequence: Synthetic oligonucleotide
  Sense strand starting at position 358 of SEQ ID NO: 1562705
augaauaauuguguagucu

SEQ ID NO: 1766736 - RNA, 19 nt, Artificial Sequence
  Description of Artificial Sequence: Synthetic oligonucleotide
  Antisense strand to SEQ ID NO: 1766735
agacuacacaauuauucau

SEQ ID NO: 1766737 - RNA, 19 nt, Artificial Sequence
  Description of Artificial Sequence: Synthetic oligonucleotide
  Sense strand starting at position 359 of SEQ ID NO: 1562705
ugaauaauuguguagucug

SEQ ID NO: 1766738 - RNA, 19 nt, Artificial Sequence
  Description of Artificial Sequence: Synthetic oligonucleotide
  Antisense strand to SEQ ID NO: 1766737
cagacuacacaauuauuca

SEQ ID NO: 1766739 - RNA, 19 nt, Artificial Sequence
  Description of Artificial Sequence: Synthetic oligonucleotide
  Sense strand starting at position 362 of SEQ ID NO: 1562705
auaauuguguagucugaac

SEQ ID NO: 1766740 - RNA, 19 nt, Artificial Sequence
  Description of Artificial Sequence: Synthetic oligonucleotide
  Antisense strand to SEQ ID NO: 1766739
guucagacuacacaauuau

SEQ ID NO: 1766741 - RNA, 19 nt, Artificial Sequence
  Description of Artificial Sequence: Synthetic oligonucleotide
  Sense strand starting at position 389 of SEQ ID NO: 1562705
cuugauacauucuugucuu

SEQ ID NO: 1766742 - RNA, 19 nt, Artificial Sequence
  Description of Artificial Sequence: Synthetic oligonucleotide
  Antisense strand to SEQ ID NO: 1766741
aagacaagaauguaucaag

SEQ ID NO: 1766743 - RNA, 19 nt, Artificial Sequence
  Description of Artificial Sequence: Synthetic oligonucleotide
  Sense strand starting at position 411 of SEQ ID NO: 1562705
augcuaugcauguuucgua

SEQ ID NO: 1766744 - RNA, 19 nt, Artificial Sequence
  Description of Artificial Sequence: Synthetic oligonucleotide
  Antisense strand to SEQ ID NO: 1766743
uacgaaacaugcauagcau

SEQ ID NO: 1766745 - RNA, 19 nt, Artificial Sequence
  Description of Artificial Sequence: Synthetic oligonucleotide
  Sense strand starting at position 735 of SEQ ID NO: 1562705
ggcaaauucuuauuagcac

SEQ ID NO: 1766746 - RNA, 19 nt, Artificial Sequence
  Description of Artificial Sequence: Synthetic oligonucleotide
  Antisense strand to SEQ ID NO: 1766745
gugcuaauaagaauuugcc

SEQ ID NO: 1766747 - RNA, 19 nt, Artificial Sequence
  Description of Artificial Sequence: Synthetic oligonucleotide
  Sense strand starting at position 1067 of SEQ ID NO: 1562705
ccucaucauuguccacgaa

SEQ ID NO: 1766748 - RNA, 19 nt, Artificial Sequence
  Description of Artificial Sequence: Synthetic oligonucleotide
  Antisense strand to SEQ ID NO: 1766747
uucguggacaaugaugagg

SEQ ID NO: 1766749 - RNA, 19 nt, Artificial Sequence
  Description of Artificial Sequence: Synthetic oligonucleotide
  Sense strand starting at position 1068 of SEQ ID NO: 1562705
cucaucauuguccacgaaa

SEQ ID NO: 1766750 - RNA, 19 nt, Artificial Sequence
  Description of Artificial Sequence: Synthetic oligonucleotide
  Antisense strand to SEQ ID NO: 1766749
uuucguggacaaugaugag

SEQ ID NO: 1766751 - RNA, 19 nt, Artificial Sequence
  Description of Artificial Sequence: Synthetic oligonucleotide
  Sense strand starting at position 1070 of SEQ ID NO: 1562705
caucauuguccacgaaagu

SEQ ID NO: 1766752 - RNA, 19 nt, Artificial Sequence
  Description of Artificial Sequence: Synthetic oligonucleotide
  Antisense strand to SEQ ID NO: 1766751
acuuucguggacaaugaug

SEQ ID NO: 1766753 - RNA, 19 nt, Artificial Sequence
  Description of Artificial Sequence: Synthetic oligonucleotide
  Sense strand starting at position 1071 of SEQ ID NO: 1562705
aucauuguccacgaaagua

SEQ ID NO: 1766754 - RNA, 19 nt, Artificial Sequence
  Description of Artificial Sequence: Synthetic oligonucleotide
  Antisense strand to SEQ ID NO: 1766753
uacuuucguggacaaugau

SEQ ID NO: 1766755 - RNA, 19 nt, Artificial Sequence
  Description of Artificial Sequence: Synthetic oligonucleotide
  Sense strand starting at position 1123 of SEQ ID NO: 1562705
ggugaauaguuguugaaug

SEQ ID NO: 1766756 - RNA, 19 nt, Artificial Sequence
  Description of Artificial Sequence: Synthetic oligonucleotide
  Antisense strand to SEQ ID NO: 1766755
cauucaacaacuauucacc

SEQ ID NO: 1766757 - RNA, 19 nt, Artificial Sequence
  Description of Artificial Sequence: Synthetic oligonucleotide
  Sense strand starting at position 1137 of SEQ ID NO: 1562705
gaaugacuguguucuccag

SEQ ID NO: 1766758 - RNA, 19 nt, Artificial Sequence
  Description of Artificial Sequence: Synthetic oligonucleotide
  Antisense strand to SEQ ID NO: 1766757
cuggagaacacagucauuc

SEQ ID NO: 1766759 - RNA, 19 nt, Artificial Sequence
  Description of Artificial Sequence: Synthetic oligonucleotide
  Sense strand starting at position 1143 of SEQ ID NO: 1562705
cuguguucuccagcugcau

SEQ ID NO: 1766760 - RNA, 19 nt, Artificial Sequence
  Description of Artificial Sequence: Synthetic oligonucleotide
  Antisense strand to SEQ ID NO: 1766759
augcagcuggagaacacag

SEQ ID NO: 1766761 - RNA, 19 nt, Artificial Sequence
  Description of Artificial Sequence: Synthetic oligonucleotide
  Sense strand starting at position 1144 of SEQ ID NO: 1562705
uguguucuccagcugcauu

SEQ ID NO: 1766762 - RNA, 19 nt, Artificial Sequence
  Description of Artificial Sequence: Synthetic oligonucleotide
  Antisense strand to SEQ ID NO: 1766761
aaugcagcuggagaacaca

SEQ ID NO: 1766763 - RNA, 19 nt, Artificial Sequence
  Description of Artificial Sequence: Synthetic oligonucleotide
  Sense strand starting at position 1304 of SEQ ID NO: 1562705
uuguaacagauauguaguu

SEQ ID NO: 1766764 - RNA, 19 nt, Artificial Sequence
  Description of Artificial Sequence: Synthetic oligonucleotide
  Antisense strand to SEQ ID NO: 1766763
aacuacauaucuguuacaa

SEQ ID NO: 1766765 - RNA, 19 nt, Artificial Sequence
  Description of Artificial Sequence: Synthetic oligonucleotide
  Sense strand starting at position 1306 of SEQ ID NO: 1562705
guaacagauauguaguugu

SEQ ID NO: 1766766 - RNA, 19 nt, Artificial Sequence
  Description of Artificial Sequence: Synthetic oligonucleotide
  Antisense strand to SEQ ID NO: 1766765
acaacuacauaucuguuac

SEQ ID NO: 1766767 - RNA, 19 nt, Artificial Sequence
  Description of Artificial Sequence: Synthetic oligonucleotide
  Sense strand starting at position 1309 of SEQ ID NO: 1562705
acagauauguaguugucca

SEQ ID NO: 1766768 - RNA, 19 nt, Artificial Sequence
  Description of Artificial Sequence: Synthetic oligonucleotide
  Antisense strand to SEQ ID NO: 1766767
uggacaacuacauaucugu

SEQ ID NO: 1766769 - RNA, 19 nt, Artificial Sequence
  Description of Artificial Sequence: Synthetic oligonucleotide
  Sense strand starting at position 1378 of SEQ ID NO: 1562705
cccaaugaacccugugaug

SEQ ID NO: 1766770 - RNA, 19 nt, Artificial Sequence
  Description of Artificial Sequence: Synthetic oligonucleotide
  Antisense strand to SEQ ID NO: 1766769
caucacaggguucauuggg

SEQ ID NO: 1766771 - RNA, 19 nt, Artificial Sequence
  Description of Artificial Sequence: Synthetic oligonucleotide
  Sense strand starting at position 1380 of SEQ ID NO: 1562705
caaugaacccugugaugua

SEQ ID NO: 1766772 - RNA, 19 nt, Artificial Sequence
  Description of Artificial Sequence: Synthetic oligonucleotide
  Antisense strand to SEQ ID NO: 1766771
uacaucacaggguucauug

SEQ ID NO: 1766773 - RNA, 19 nt, Artificial Sequence
  Description of Artificial Sequence: Synthetic oligonucleotide
  Sense strand starting at position 1394 of SEQ ID NO: 1562705
auguauauccuguaucaua

SEQ ID NO: 1766774 - RNA, 19 nt, Artificial Sequence
  Description of Artificial Sequence: Synthetic oligonucleotide
  Antisense strand to SEQ ID NO: 1766773
uaugauacaggauauacau

SEQ ID NO: 1766775 - RNA, 19 nt, Artificial Sequence
  Description of Artificial Sequence: Synthetic oligonucleotide
  Sense strand starting at position 2700 of SEQ ID NO: 1562705
uggugauagcaguauugaa

SEQ ID NO: 1766776 - RNA, 19 nt, Artificial Sequence
  Description of Artificial Sequence: Synthetic oligonucleotide
  Antisense strand to SEQ ID NO: 1766775
uucaauacugcuaucacca

SEQ ID NO: 1766777 - RNA, 19 nt, Artificial Sequence
  Description of Artificial Sequence: Synthetic oligonucleotide
  Sense strand starting at position 2738 of SEQ ID NO: 1562705
uggugcuugcauuauaaua

SEQ ID NO: 1766778 - RNA, 19 nt, Artificial Sequence
  Description of Artificial Sequence: Synthetic oligonucleotide
  Antisense strand to SEQ ID NO: 1766777
uauuauaaugcaagcacca

SEQ ID NO: 1766779 - RNA, 19 nt, Artificial Sequence
  Description of Artificial Sequence: Synthetic oligonucleotide
  Sense strand starting at position 2880 of SEQ ID NO: 1562705
gacauuauugcugagaccu

SEQ ID NO: 1766780 - RNA, 19 nt, Artificial Sequence
  Description of Artificial Sequence: Synthetic oligonucleotide
  Antisense strand to SEQ ID NO: 1766779
aggucucagcaauaauguc

SEQ ID NO: 1766781 - RNA, 19 nt, Artificial Sequence
  Description of Artificial Sequence: Synthetic oligonucleotide
  Sense strand starting at position 2911 of SEQ ID NO: 1562705
gccacauagugaucuaaua

SEQ ID NO: 1766782 - RNA, 19 nt, Artificial Sequence
  Description of Artificial Sequence: Synthetic oligonucleotide
  Antisense strand to SEQ ID NO: 1766781
uauuagaucacuauguggc

SEQ ID NO: 1766783 - RNA, 19 nt, Artificial Sequence
  Description of Artificial Sequence: Synthetic oligonucleotide
  Sense strand starting at position 2941 of SEQ ID NO: 1562705
ggccauguugauggacauu

SEQ ID NO: 1766784 - RNA, 19 nt, Artificial Sequence
  Description of Artificial Sequence: Synthetic oligonucleotide
  Antisense strand to SEQ ID NO: 1766783
aauguccaucaacauggcc

SEQ ID NO: 1766785 - RNA, 19 nt, Artificial Sequence
  Description of Artificial Sequence: Synthetic oligonucleotide
  Sense strand starting at position 2978 of SEQ ID NO: 1562705
ggcuguuggacauaaagcu

SEQ ID NO: 1766786 - RNA, 19 nt, Artificial Sequence
  Description of Artificial Sequence: Synthetic oligonucleotide
  Antisense strand to SEQ ID NO: 1766785
agcuuuauguccaacagcc

SEQ ID NO: 1766787 - RNA, 19 nt, Artificial Sequence
  Description of Artificial Sequence: Synthetic oligonucleotide
  Sense strand starting at position 3057 of SEQ ID NO: 1562705
ugaugugauuuacauuugu

SEQ ID NO: 1766788 - RNA, 19 nt, Artificial Sequence
  Description of Artificial Sequence: Synthetic oligonucleotide
  Antisense strand to SEQ ID NO: 1766787
acaaauguaaaucacauca

SEQ ID NO: 1766789 - RNA, 19 nt, Artificial Sequence
  Description of Artificial Sequence: Synthetic oligonucleotide
  Sense strand starting at position 3073 of SEQ ID NO: 1562705
uguaauggaucaguggcua

SEQ ID NO: 1766790 - RNA, 19 nt, Artificial Sequence
  Description of Artificial Sequence: Synthetic oligonucleotide
  Antisense strand to SEQ ID NO: 1766789
uagccacugauccauuaca

SEQ ID NO: 1766791 - RNA, 19 nt, Artificial Sequence
  Description of Artificial Sequence: Synthetic oligonucleotide
  Sense strand starting at position 3105 of SEQ ID NO: 1562705
cagucauguaugggaaagu

SEQ ID NO: 1766792 - RNA, 19 nt, Artificial Sequence
  Description of Artificial Sequence: Synthetic oligonucleotide
  Antisense strand to SEQ ID NO: 1766791
acuuucccauacaugacug

SEQ ID NO: 1766793 - RNA, 19 nt, Artificial Sequence
  Description of Artificial Sequence: Synthetic oligonucleotide
  Sense strand starting at position 3121 of SEQ ID NO: 1562705
aguagaauucgagagccaa

SEQ ID NO: 1766794 - RNA, 19 nt, Artificial Sequence
  Description of Artificial Sequence: Synthetic oligonucleotide
  Antisense strand to SEQ ID NO: 1766793
uuggcucucgaauucuacu

SEQ ID NO: 1766795 - RNA, 19 nt, Artificial Sequence
  Description of Artificial Sequence: Synthetic oligonucleotide
  Sense strand starting at position 3322 of SEQ ID NO: 1562705
guuaaaugauacgcuaaug

SEQ ID NO: 1766796 - RNA, 19 nt, Artificial Sequence
  Description of Artificial Sequence: Synthetic oligonucleotide
  Antisense strand to SEQ ID NO: 1766795
cauuagcguaucauuuaac

SEQ ID NO: 1766797 - RNA, 19 nt, Artificial Sequence
  Description of Artificial Sequence: Synthetic oligonucleotide
  Sense strand starting at position 3440 of SEQ ID NO: 1562705
gguauugugaaaugcuuaa

SEQ ID NO: 1766798 - RNA, 19 nt, Artificial Sequence
  Description of Artificial Sequence: Synthetic oligonucleotide
  Antisense strand to SEQ ID NO: 1766797
uuaagcauuucacaauacc

SEQ ID NO: 1766799 - RNA, 19 nt, Artificial Sequence
  Description of Artificial Sequence: Synthetic oligonucleotide
  Sense strand starting at position 3467 of SEQ ID NO: 1562705
uuaaauucucuccagugua

SEQ ID NO: 1766800 - RNA, 19 nt, Artificial Sequence
  Description of Artificial Sequence: Synthetic oligonucleotide
  Antisense strand to SEQ ID NO: 1766799
uacacuggagagaauuuaa

SEQ ID NO: 1766801 - RNA, 19 nt, Artificial Sequence
  Description of Artificial Sequence: Synthetic oligonucleotide
  Sense strand starting at position 3508 of SEQ ID NO: 1562705
uggcuuacccaugauuaua

SEQ ID NO: 1766802 - RNA, 19 nt, Artificial Sequence
  Description of Artificial Sequence: Synthetic oligonucleotide
  Antisense strand to SEQ ID NO: 1766801
uauaaucauggguaagcca

SEQ ID NO: 1766803 - RNA, 19 nt, Artificial Sequence
  Description of Artificial Sequence: Synthetic oligonucleotide
  Sense strand starting at position 3528 of SEQ ID NO: 1562705
uuugccuaccacuggaaau

SEQ ID NO: 1766804 - RNA, 19 nt, Artificial Sequence
  Description of Artificial Sequence: Synthetic oligonucleotide
  Antisense strand to SEQ ID NO: 1766803
auuuccagugguaggcaaa

SEQ ID NO: 1766805 - RNA, 19 nt, Artificial Sequence
  Description of Artificial Sequence: Synthetic oligonucleotide
  Sense strand starting at position 3572 of SEQ ID NO: 1562705
uugaguacccucugaguca

SEQ ID NO: 1766806 - RNA, 19 nt, Artificial Sequence
  Description of Artificial Sequence: Synthetic oligonucleotide
  Antisense strand to SEQ ID NO: 1766805
ugacucagaggguacucaa

SEQ ID NO: 1766807 - RNA, 19 nt, Artificial Sequence
  Description of Artificial Sequence: Synthetic oligonucleotide
  Sense strand starting at position 3594 of SEQ ID NO: 1562705
uguagcaagugcucauuua

SEQ ID NO: 1766808 - RNA, 19 nt, Artificial Sequence
  Description of Artificial Sequence: Synthetic oligonucleotide
  Antisense strand to SEQ ID NO: 1766807
uaaaugagcacuugcuaca

SEQ ID NO: 1766809 - RNA, 19 nt, Artificial Sequence
  Description of Artificial Sequence: Synthetic oligonucleotide
  Sense strand starting at position 770 of SEQ ID NO: 1562706
ugauguccuguacacaauu

SEQ ID NO: 1766810 - RNA, 19 nt, Artificial Sequence
  Description of Artificial Sequence: Synthetic oligonucleotide
  Antisense strand to SEQ ID NO: 1766809
aauuguguacaggacauca

SEQ ID NO: 1766811 - RNA, 19 nt, Artificial Sequence
  Description of Artificial Sequence: Synthetic oligonucleotide
  Sense strand starting at position 868 of SEQ ID NO: 1562706
uugcuuugacauuacgaua

SEQ ID NO: 1766812 - RNA, 19 nt, Artificial Sequence
  Description of Artificial Sequence: Synthetic oligonucleotide
  Antisense strand to SEQ ID NO: 1766811
uaucguaaugucaaagcaa

SEQ ID NO: 1766813 - RNA, 19 nt, Artificial Sequence
  Description of Artificial Sequence: Synthetic oligonucleotide
  Sense strand starting at position 873 of SEQ ID NO: 1562706
uugacauuacgauagcuau

SEQ ID NO: 1766814 - RNA, 19 nt, Artificial Sequence
  Description of Artificial Sequence: Synthetic oligonucleotide
  Antisense strand to SEQ ID NO: 1766813
auagcuaucguaaugucaa

SEQ ID NO: 1766815 - RNA, 19 nt, Artificial Sequence
  Description of Artificial Sequence: Synthetic oligonucleotide
  Sense strand starting at position 920 of SEQ ID NO: 1562706
ccauuauaaccuuagggca

SEQ ID NO: 1766816 - RNA, 19 nt, Artificial Sequence
  Description of Artificial Sequence: Synthetic oligonucleotide
  Antisense strand to SEQ ID NO: 1766815
ugcccuaagguuauaaugg

SEQ ID NO: 1766817 - RNA, 19 nt, Artificial Sequence
  Description of Artificial Sequence: Synthetic oligonucleotide
  Sense strand starting at position 953 of SEQ ID NO: 1562706
guggucuuucuugaccaaa

SEQ ID NO: 1766818 - RNA, 19 nt, Artificial Sequence
  Description of Artificial Sequence: Synthetic oligonucleotide
  Antisense strand to SEQ ID NO: 1766817
uuuggucaagaaagaccac

SEQ ID NO: 1766819 - RNA, 19 nt, Artificial Sequence
  Description of Artificial Sequence: Synthetic oligonucleotide
  Sense strand starting at position 1225 of SEQ ID NO: 1562706
aggagaugcaccgacguau

SEQ ID NO: 1766820 - RNA, 19 nt, Artificial Sequence
  Description of Artificial Sequence: Synthetic oligonucleotide
  Antisense strand to SEQ ID NO: 1766819
auacgucggugcaucuccu

SEQ ID NO: 1766821 - RNA, 19 nt, Artificial Sequence
  Description of Artificial Sequence: Synthetic oligonucleotide
  Sense strand starting at position 1285 of SEQ ID NO: 1562706
aggucuugagacugggaau

SEQ ID NO: 1766822 - RNA, 19 nt, Artificial Sequence
  Description of Artificial Sequence: Synthetic oligonucleotide
  Antisense strand to SEQ ID NO: 1766821
auucccagucucaagaccu

SEQ ID NO: 1766823 - RNA, 19 nt, Artificial Sequence
  Description of Artificial Sequence: Synthetic oligonucleotide
  Sense strand starting at position 1286 of SEQ ID NO: 1562706
ggucuugagacugggaauc

SEQ ID NO: 1766824 - RNA, 19 nt, Artificial Sequence
  Description of Artificial Sequence: Synthetic oligonucleotide
  Antisense strand to SEQ ID NO: 1766823
gauucccagucucaagacc

SEQ ID NO: 1766825 - RNA, 19 nt, Artificial Sequence
  Description of Artificial Sequence: Synthetic oligonucleotide
  Sense strand starting at position 1575 of SEQ ID NO: 1562706
agggaauuacuccgcgaaa

SEQ ID NO: 1766826 - RNA, 19 nt, Artificial Sequence
  Description of Artificial Sequence: Synthetic oligonucleotide
  Antisense strand to SEQ ID NO: 1766825
uuucgcggaguaauucccu

SEQ ID NO: 1766827 - RNA, 19 nt, Artificial Sequence
  Description of Artificial Sequence: Synthetic oligonucleotide
  Sense strand starting at position 1576 of SEQ ID NO: 1562706
gggaauuacuccgcgaaag

SEQ ID NO: 1766828 - RNA, 19 nt, Artificial Sequence
  Description of Artificial Sequence: Synthetic oligonucleotide
  Antisense strand to SEQ ID NO: 1766827
cuuucgcggaguaauuccc

SEQ ID NO: 1766829 - RNA, 19 nt, Artificial Sequence
  Description of Artificial Sequence: Synthetic oligonucleotide
  Sense strand starting at position 1577 of SEQ ID NO: 1562706
ggaauuacuccgcgaaagg

SEQ ID NO: 1766830 - RNA, 19 nt, Artificial Sequence
  Description of Artificial Sequence: Synthetic oligonucleotide
  Antisense strand to SEQ ID NO: 1766829
ccuuucgcggaguaauucc

SEQ ID NO: 1766831 - RNA, 19 nt, Artificial Sequence
  Description of Artificial Sequence: Synthetic oligonucleotide
  Sense strand starting at position 1578 of SEQ ID NO: 1562706
gaauuacuccgcgaaaggu

SEQ ID NO: 1766832 - RNA, 19 nt, Artificial Sequence
  Description of Artificial Sequence: Synthetic oligonucleotide
  Antisense strand to SEQ ID NO: 1766831
accuuucgcggaguaauuc

SEQ ID NO: 1766833 - RNA, 19 nt, Artificial Sequence
  Description of Artificial Sequence: Synthetic oligonucleotide
  Sense strand starting at position 1961 of SEQ ID NO: 1562706
aggguugucaaggagcgaa

SEQ ID NO: 1766834 - RNA, 19 nt, Artificial Sequence
  Description of Artificial Sequence: Synthetic oligonucleotide
  Antisense strand to SEQ ID NO: 1766833
uucgcuccuugacaacccu

SEQ ID NO: 1766835 - RNA, 19 nt, Artificial Sequence
  Description of Artificial Sequence: Synthetic oligonucleotide
  Sense strand starting at position 1978 of SEQ ID NO: 1562706
aaacaagagugucuuagca

SEQ ID NO: 1766836 - RNA, 19 nt, Artificial Sequence
  Description of Artificial Sequence: Synthetic oligonucleotide
  Antisense strand to SEQ ID NO: 1766835
ugcuaagacacucuuguuu

SEQ ID NO: 1766837 - RNA, 19 nt, Artificial Sequence
  Description of Artificial Sequence: Synthetic oligonucleotide
  Sense strand starting at position 1982 of SEQ ID NO: 1562706
aagagugucuuagcaacca

SEQ ID NO: 1766838 - RNA, 19 nt, Artificial Sequence
  Description of Artificial Sequence: Synthetic oligonucleotide
  Antisense strand to SEQ ID NO: 1766837
ugguugcuaagacacucuu

SEQ ID NO: 1766839 - RNA, 19 nt, Artificial Sequence
  Description of Artificial Sequence: Synthetic oligonucleotide
  Sense strand starting at position 2023 of SEQ ID NO: 1562706
ccggacguugacgagaauu

SEQ ID NO: 1766840 - RNA, 19 nt, Artificial Sequence
  Description of Artificial Sequence: Synthetic oligonucleotide
  Antisense strand to SEQ ID NO: 1766839
aauucucgucaacguccgg

SEQ ID NO: 1766841 - RNA, 19 nt, Artificial Sequence
  Description of Artificial Sequence: Synthetic oligonucleotide
  Sense strand starting at position 2043 of SEQ ID NO: 1562706
cacuuauuauugguggaua

SEQ ID NO: 1766842 - RNA, 19 nt, Artificial Sequence
  Description of Artificial Sequence: Synthetic oligonucleotide
  Antisense strand to SEQ ID NO: 1766841
uauccaccaauaauaagug

SEQ ID NO: 1766843 - RNA, 19 nt, Artificial Sequence
  Description of Artificial Sequence: Synthetic oligonucleotide
  Sense strand starting at position 2045 of SEQ ID NO: 1562706
cuuauuauugguggauaaa

SEQ ID NO: 1766844 - RNA, 19 nt, Artificial Sequence
  Description of Artificial Sequence: Synthetic oligonucleotide
  Antisense strand to SEQ ID NO: 1766843
uuuauccaccaauaauaag

SEQ ID NO: 1766845 - RNA, 19 nt, Artificial Sequence
  Description of Artificial Sequence: Synthetic oligonucleotide
  Sense strand starting at position 2077 of SEQ ID NO: 1562706
gugaaaggcccuuauaagu

SEQ ID NO: 1766846 - RNA, 19 nt, Artificial Sequence
  Description of Artificial Sequence: Synthetic oligonucleotide
  Antisense strand to SEQ ID NO: 1766845
acuuauaagggccuuucac

SEQ ID NO: 1766847 - RNA, 19 nt, Artificial Sequence
  Description of Artificial Sequence: Synthetic oligonucleotide
  Sense strand starting at position 2299 of SEQ ID NO: 1562706
gccacuacuuuauugggau

SEQ ID NO: 1766848 - RNA, 19 nt, Artificial Sequence
  Description of Artificial Sequence: Synthetic oligonucleotide
  Antisense strand to SEQ ID NO: 1766847
aucccaauaaaguaguggc

SEQ ID NO: 1766849 - RNA, 19 nt, Artificial Sequence
  Description of Artificial Sequence: Synthetic oligonucleotide
  Sense strand starting at position 2325 of SEQ ID NO: 1562706
gccugauaauaacuagcau

SEQ ID NO: 1766850 - RNA, 19 nt, Artificial Sequence
  Description of Artificial Sequence: Synthetic oligonucleotide
  Antisense strand to SEQ ID NO: 1766849
augcuaguuauuaucaggc

SEQ ID NO: 1766851 - RNA, 19 nt, Artificial Sequence
  Description of Artificial Sequence: Synthetic oligonucleotide
  Sense strand starting at position 2345 of SEQ ID NO: 1562706
uuuguagggcuguacaauu

SEQ ID NO: 1766852 - RNA, 19 nt, Artificial Sequence
  Description of Artificial Sequence: Synthetic oligonucleotide
  Antisense strand to SEQ ID NO: 1766851
aauuguacagcccuacaaa

SEQ ID NO: 1766853 - RNA, 19 nt, Artificial Sequence
  Description of Artificial Sequence: Synthetic oligonucleotide
  Sense strand starting at position 2372 of SEQ ID NO: 1562706
acuugauucucauuacagu

SEQ ID NO: 1766854 - RNA, 19 nt, Artificial Sequence
  Description of Artificial Sequence: Synthetic oligonucleotide
  Antisense strand to SEQ ID NO: 1766853
acuguaaugagaaucaagu

SEQ ID NO: 1766855 - RNA, 19 nt, Artificial Sequence
  Description of Artificial Sequence: Synthetic oligonucleotide
  Sense strand starting at position 2373 of SEQ ID NO: 1562706
cuugauucucauuacagua

SEQ ID NO: 1766856 - RNA, 19 nt, Artificial Sequence
  Description of Artificial Sequence: Synthetic oligonucleotide
  Antisense strand to SEQ ID NO: 1766855
uacuguaaugagaaucaag

SEQ ID NO: 1766857 - RNA, 19 nt, Artificial Sequence
  Description of Artificial Sequence: Synthetic oligonucleotide
  Sense strand starting at position 2440 of SEQ ID NO: 1562706
gguuaaguaacuugguaaa

SEQ ID NO: 1766858 - RNA, 19 nt, Artificial Sequence
  Description of Artificial Sequence: Synthetic oligonucleotide
  Antisense strand to SEQ ID NO: 1766857
uuuaccaaguuacuuaacc

SEQ ID NO: 1766859 - RNA, 19 nt, Artificial Sequence
  Description of Artificial Sequence: Synthetic oligonucleotide
  Sense strand starting at position 2453 of SEQ ID NO: 1562706
gguaaaggauggagguaau

SEQ ID NO: 1766860 - RNA, 19 nt, Artificial Sequence
  Description of Artificial Sequence: Synthetic oligonucleotide
  Antisense strand to SEQ ID NO: 1766859
auuaccuccauccuuuacc

SEQ ID NO: 1766861 - RNA, 19 nt, Artificial Sequence
  Description of Artificial Sequence: Synthetic oligonucleotide
  Sense strand starting at position 2464 of SEQ ID NO: 1562706
gagguaaucucccuggaga

SEQ ID NO: 1766862 - RNA, 19 nt, Artificial Sequence
  Description of Artificial Sequence: Synthetic oligonucleotide
  Antisense strand to SEQ ID NO: 1766861
ucuccagggagauuaccuc

SEQ ID NO: 1766863 - RNA, 19 nt, Artificial Sequence
  Description of Artificial Sequence: Synthetic oligonucleotide
  Sense strand starting at position 2465 of SEQ ID NO: 1562706
agguaaucucccuggagaa

SEQ ID NO: 1766864 - RNA, 19 nt, Artificial Sequence
  Description of Artificial Sequence: Synthetic oligonucleotide
  Antisense strand to SEQ ID NO: 1766863
uucuccagggagauuaccu

SEQ ID NO: 1766865 - RNA, 19 nt, Artificial Sequence
  Description of Artificial Sequence: Synthetic oligonucleotide
  Sense strand starting at position 2466 of SEQ ID NO: 1562706
gguaaucucccuggagaag

SEQ ID NO: 1766866 - RNA, 19 nt, Artificial Sequence
  Description of Artificial Sequence: Synthetic oligonucleotide
  Antisense strand to SEQ ID NO: 1766865
cuucuccagggagauuacc

SEQ ID NO: 1766867 - RNA, 19 nt, Artificial Sequence
  Description of Artificial Sequence: Synthetic oligonucleotide
  Sense strand starting at position 2532 of SEQ ID NO: 1562706
agcucuagucacuaggaga

SEQ ID NO: 1766868 - RNA, 19 nt, Artificial Sequence
  Description of Artificial Sequence: Synthetic oligonucleotide
  Antisense strand to SEQ ID NO: 1766867
ucuccuagugacuagagcu

SEQ ID NO: 1766869 - RNA, 19 nt, Artificial Sequence
  Description of Artificial Sequence: Synthetic oligonucleotide
  Sense strand starting at position 2655 of SEQ ID NO: 1562706
ggaagaacuggcggauucu

SEQ ID NO: 1766870 - RNA, 19 nt, Artificial Sequence
  Description of Artificial Sequence: Synthetic oligonucleotide
  Antisense strand to SEQ ID NO: 1766869
agaauccgccaguucuucc

SEQ ID NO: 1766871 - RNA, 19 nt, Artificial Sequence
  Description of Artificial Sequence: Synthetic oligonucleotide
  Sense strand starting at position 2685 of SEQ ID NO: 1562706
gguagaucaaagggucagu

SEQ ID NO: 1766872 - RNA, 19 nt, Artificial Sequence
  Description of Artificial Sequence: Synthetic oligonucleotide
  Antisense strand to SEQ ID NO: 1766871
acugacccuuugaucuacc

SEQ ID NO: 1766873 - RNA, 19 nt, Artificial Sequence
  Description of Artificial Sequence: Synthetic oligonucleotide
  Sense strand starting at position 2728 of SEQ ID NO: 1562706
uauuauugugaugaguacu

SEQ ID NO: 1766874 - RNA, 19 nt, Artificial Sequence
  Description of Artificial Sequence: Synthetic oligonucleotide
  Antisense strand to SEQ ID NO: 1766873
aguacucaucacaauaaua

SEQ ID NO: 1766875 - RNA, 19 nt, Artificial Sequence
  Description of Artificial Sequence: Synthetic oligonucleotide
  Sense strand starting at position 2866 of SEQ ID NO: 1562706
gccuuuaagcugucuuugu

SEQ ID NO: 1766876 - RNA, 19 nt, Artificial Sequence
  Description of Artificial Sequence: Synthetic oligonucleotide
  Antisense strand to SEQ ID NO: 1766875
acaaagacagcuuaaaggc

SEQ ID NO: 1766877 - RNA, 19 nt, Artificial Sequence
  Description of Artificial Sequence: Synthetic oligonucleotide
  Sense strand starting at position 3202 of SEQ ID NO: 1562706
aguaauguggcucaaacag

SEQ ID NO: 1766878 - RNA, 19 nt, Artificial Sequence
  Description of Artificial Sequence: Synthetic oligonucleotide
  Antisense strand to SEQ ID NO: 1766877
cuguuugagccacauuacu

SEQ ID NO: 1766879 - RNA, 19 nt, Artificial Sequence
  Description of Artificial Sequence: Synthetic oligonucleotide
  Sense strand starting at position 3398 of SEQ ID NO: 1562706
ccaugugcaccagaauguu

SEQ ID NO: 1766880 - RNA, 19 nt, Artificial Sequence
  Description of Artificial Sequence: Synthetic oligonucleotide
  Antisense strand to SEQ ID NO: 1766879
aacauucuggugcacaugg

SEQ ID NO: 1766881 - RNA, 19 nt, Artificial Sequence
  Description of Artificial Sequence: Synthetic oligonucleotide
  Sense strand starting at position 3404 of SEQ ID NO: 1562706
gcaccagaauguuccacaa

SEQ ID NO: 1766882 - RNA, 19 nt, Artificial Sequence
  Description of Artificial Sequence: Synthetic oligonucleotide
  Antisense strand to SEQ ID NO: 1766881
uuguggaacauucuggugc

SEQ ID NO: 1766883 - RNA, 19 nt, Artificial Sequence
  Description of Artificial Sequence: Synthetic oligonucleotide
  Sense strand starting at position 3745 of SEQ ID NO: 1562706
uccucuguaccauagucaa

SEQ ID NO: 1766884 - RNA, 19 nt, Artificial Sequence
  Description of Artificial Sequence: Synthetic oligonucleotide
  Antisense strand to SEQ ID NO: 1766883
uugacuaugguacagagga

SEQ ID NO: 1766885 - RNA, 19 nt, Artificial Sequence
  Description of Artificial Sequence: Synthetic oligonucleotide
  Sense strand starting at position 3748 of SEQ ID NO: 1562706
ucuguaccauagucaacau

SEQ ID NO: 1766886 - RNA, 19 nt, Artificial Sequence
  Description of Artificial Sequence: Synthetic oligonucleotide
  Antisense strand to SEQ ID NO: 1766885
auguugacuaugguacaga

SEQ ID NO: 1766887 - RNA, 19 nt, Artificial Sequence
  Description of Artificial Sequence: Synthetic oligonucleotide
  Sense strand starting at position 3800 of SEQ ID NO: 1562706
uccucuguuugaguaauuu

SEQ ID NO: 1766888 - RNA, 19 nt, Artificial Sequence
  Description of Artificial Sequence: Synthetic oligonucleotide
  Antisense strand to SEQ ID NO: 1766887
aaauuacucaaacagagga

SEQ ID NO: 1766889 - RNA, 19 nt, Artificial Sequence
  Description of Artificial Sequence: Synthetic oligonucleotide
  Sense strand starting at position 433 of SEQ ID NO: 1562707
uguaucagugcaggauaua

SEQ ID NO: 1766890 - RNA, 19 nt, Artificial Sequence
  Description of Artificial Sequence: Synthetic oligonucleotide
  Antisense strand to SEQ ID NO: 1766889
uauauccugcacugauaca

SEQ ID NO: 1766891 - RNA, 19 nt, Artificial Sequence
  Description of Artificial Sequence: Synthetic oligonucleotide
  Sense strand starting at position 434 of SEQ ID NO: 1562707
guaucagugcaggauauaa

SEQ ID NO: 1766892 - RNA, 19 nt, Artificial Sequence
  Description of Artificial Sequence: Synthetic oligonucleotide
  Antisense strand to SEQ ID NO: 1766891
uuauauccugcacugauac

SEQ ID NO: 1766893 - RNA, 19 nt, Artificial Sequence
  Description of Artificial Sequence: Synthetic oligonucleotide
  Sense strand starting at position 489 of SEQ ID NO: 1562707
cucugaaaccggcagaaua

SEQ ID NO: 1766894 - RNA, 19 nt, Artificial Sequence
  Description of Artificial Sequence: Synthetic oligonucleotide
  Antisense strand to SEQ ID NO: 1766893
uauucugccgguuucagag

SEQ ID NO: 1766895 - RNA, 19 nt, Artificial Sequence
  Description of Artificial Sequence: Synthetic oligonucleotide
  Sense strand starting at position 558 of SEQ ID NO: 1562707
aguagaacaucuuuaguua

SEQ ID NO: 1766896 - RNA, 19 nt, Artificial Sequence
  Description of Artificial Sequence: Synthetic oligonucleotide
  Antisense strand to SEQ ID NO: 1766895
uaacuaaagauguucuacu

SEQ ID NO: 1766897 - RNA, 19 nt, Artificial Sequence
  Description of Artificial Sequence: Synthetic oligonucleotide
  Sense strand starting at position 559 of SEQ ID NO: 1562707
guagaacaucuuuaguuau

SEQ ID NO: 1766898 - RNA, 19 nt, Artificial Sequence
  Description of Artificial Sequence: Synthetic oligonucleotide
  Antisense strand to SEQ ID NO: 1766897
auaacuaaagauguucuac

SEQ ID NO: 1766899 - RNA, 19 nt, Artificial Sequence
  Description of Artificial Sequence: Synthetic oligonucleotide
  Sense strand starting at position 718 of SEQ ID NO: 1562707
cugggccaucuuuaguuau

SEQ ID NO: 1766900 - RNA, 19 nt, Artificial Sequence
  Description of Artificial Sequence: Synthetic oligonucleotide
  Antisense strand to SEQ ID NO: 1766899
auaacuaaagauggcccag

SEQ ID NO: 1766901 - RNA, 19 nt, Artificial Sequence
  Description of Artificial Sequence: Synthetic oligonucleotide
  Sense strand starting at position 720 of SEQ ID NO: 1562707
gggccaucuuuaguuauuu

SEQ ID NO: 1766902 - RNA, 19 nt, Artificial Sequence
  Description of Artificial Sequence: Synthetic oligonucleotide
  Antisense strand to SEQ ID NO: 1766901
aaauaacuaaagauggccc

SEQ ID NO: 1766903 - RNA, 19 nt, Artificial Sequence
  Description of Artificial Sequence: Synthetic oligonucleotide
  Sense strand starting at position 920 of SEQ ID NO: 1562707
uugaguccgagccaucuaa

SEQ ID NO: 1766904 - RNA, 19 nt, Artificial Sequence
  Description of Artificial Sequence: Synthetic oligonucleotide
  Antisense strand to SEQ ID NO: 1766903
uuagauggcucggacucaa

SEQ ID NO: 1766905 - RNA, 19 nt, Artificial Sequence
  Description of Artificial Sequence: Synthetic oligonucleotide
  Sense strand starting at position 984 of SEQ ID NO: 1562707
ccagcuuugagaggauaau

SEQ ID NO: 1766906 - RNA, 19 nt, Artificial Sequence
  Description of Artificial Sequence: Synthetic oligonucleotide
  Antisense strand to SEQ ID NO: 1766905
auuauccucucaaagcugg

SEQ ID NO: 1766907 - RNA, 19 nt, Artificial Sequence
  Description of Artificial Sequence: Synthetic oligonucleotide
  Sense strand starting at position 1130 of SEQ ID NO: 1562707
gacgauuaaggucauucca

SEQ ID NO: 1766908 - RNA, 19 nt, Artificial Sequence
  Description of Artificial Sequence: Synthetic oligonucleotide
  Antisense strand to SEQ ID NO: 1766907
uggaaugaccuuaaucguc

SEQ ID NO: 1766909 - RNA, 19 nt, Artificial Sequence
  Description of Artificial Sequence: Synthetic oligonucleotide
  Sense strand starting at position 1132 of SEQ ID NO: 1562707
cgauuaaggucauuccaau

SEQ ID NO: 1766910 - RNA, 19 nt, Artificial Sequence
  Description of Artificial Sequence: Synthetic oligonucleotide
  Antisense strand to SEQ ID NO: 1766909
auuggaaugaccuuaaucg

SEQ ID NO: 1766911 - RNA, 19 nt, Artificial Sequence
  Description of Artificial Sequence: Synthetic oligonucleotide
  Sense strand starting at position 1286 of SEQ ID NO: 1562707
acacuauccaggcggaaua

SEQ ID NO: 1766912 - RNA, 19 nt, Artificial Sequence
  Description of Artificial Sequence: Synthetic oligonucleotide
  Antisense strand to SEQ ID NO: 1766911
uauuccgccuggauagugu

SEQ ID NO: 1766913 - RNA, 19 nt, Artificial Sequence
  Description of Artificial Sequence: Synthetic oligonucleotide
  Sense strand starting at position 1339 of SEQ ID NO: 1562707
auccgauuaccgggagcaa

SEQ ID NO: 1766914 - RNA, 19 nt, Artificial Sequence
  Description of Artificial Sequence: Synthetic oligonucleotide
  Antisense strand to SEQ ID NO: 1766913
uugcucccgguaaucggau

SEQ ID NO: 1766915 - RNA, 19 nt, Artificial Sequence
  Description of Artificial Sequence: Synthetic oligonucleotide
  Sense strand starting at position 1340 of SEQ ID NO: 1562707
uccgauuaccgggagcaaa

SEQ ID NO: 1766916 - RNA, 19 nt, Artificial Sequence
  Description of Artificial Sequence: Synthetic oligonucleotide
  Antisense strand to SEQ ID NO: 1766915
uuugcucccgguaaucgga

SEQ ID NO: 1766917 - RNA, 19 nt, Artificial Sequence
  Description of Artificial Sequence: Synthetic oligonucleotide
  Sense strand starting at position 1350 of SEQ ID NO: 1562707
gggagcaaauacucugaau

SEQ ID NO: 1766918 - RNA, 19 nt, Artificial Sequence
  Description of Artificial Sequence: Synthetic oligonucleotide
  Antisense strand to SEQ ID NO: 1766917
auucagaguauuugcuccc

SEQ ID NO: 1766919 - RNA, 19 nt, Artificial Sequence
  Description of Artificial Sequence: Synthetic oligonucleotide
  Sense strand starting at position 1422 of SEQ ID NO: 1562707
gaaggaugaugaggaaaga

SEQ ID NO: 1766920 - RNA, 19 nt, Artificial Sequence
  Description of Artificial Sequence: Synthetic oligonucleotide
  Antisense strand to SEQ ID NO: 1766919
ucuuuccucaucauccuuc

SEQ ID NO: 1766921 - RNA, 19 nt, Artificial Sequence
  Description of Artificial Sequence: Synthetic oligonucleotide
  Sense strand starting at position 1444 of SEQ ID NO: 1562707
ugaacuaucugaccaaguc

SEQ ID NO: 1766922 - RNA, 19 nt, Artificial Sequence
  Description of Artificial Sequence: Synthetic oligonucleotide
  Antisense strand to SEQ ID NO: 1766921
gacuuggucagauaguuca

SEQ ID NO: 1766923 - RNA, 19 nt, Artificial Sequence
  Description of Artificial Sequence: Synthetic oligonucleotide
  Sense strand starting at position 1710 of SEQ ID NO: 1562707
gagagaagucgcggaaucu

SEQ ID NO: 1766924 - RNA, 19 nt, Artificial Sequence
  Description of Artificial Sequence: Synthetic oligonucleotide
  Antisense strand to SEQ ID NO: 1766923
agauuccgcgacuucucuc

SEQ ID NO: 1766925 - RNA, 19 nt, Artificial Sequence
  Description of Artificial Sequence: Synthetic oligonucleotide
  Sense strand starting at position 1711 of SEQ ID NO: 1562707
agagaagucgcggaaucua

SEQ ID NO: 1766926 - RNA, 19 nt, Artificial Sequence
  Description of Artificial Sequence: Synthetic oligonucleotide
  Antisense strand to SEQ ID NO: 1766925
uagauuccgcgacuucucu

SEQ ID NO: 1766927 - RNA, 19 nt, Artificial Sequence
  Description of Artificial Sequence: Synthetic oligonucleotide
  Sense strand starting at position 2337 of SEQ ID NO: 1562707
cauggucuuggagggagua

SEQ ID NO: 1766928 - RNA, 19 nt, Artificial Sequence
  Description of Artificial Sequence: Synthetic oligonucleotide
  Antisense strand to SEQ ID NO: 1766927
uacucccuccaagaccaug

SEQ ID NO: 1766929 - RNA, 19 nt, Artificial Sequence
  Description of Artificial Sequence: Synthetic oligonucleotide
  Sense strand starting at position 2487 of SEQ ID NO: 1562707
ugcauacuugaauggauaa

SEQ ID NO: 1766930 - RNA, 19 nt, Artificial Sequence
  Description of Artificial Sequence: Synthetic oligonucleotide
  Antisense strand to SEQ ID NO: 1766929
uuauccauucaaguaugca

SEQ ID NO: 1766931 - RNA, 19 nt, Artificial Sequence
  Description of Artificial Sequence: Synthetic oligonucleotide
  Sense strand starting at position 2498 of SEQ ID NO: 1562707
auggauaauucccagagaa

SEQ ID NO: 1766932 - RNA, 19 nt, Artificial Sequence
  Description of Artificial Sequence: Synthetic oligonucleotide
  Antisense strand to SEQ ID NO: 1766931
uucucugggaauuauccau

SEQ ID NO: 1766933 - RNA, 19 nt, Artificial Sequence
  Description of Artificial Sequence: Synthetic oligonucleotide
  Sense strand starting at position 2513 of SEQ ID NO: 1562707
agaacugcugcuugcaaca

SEQ ID NO: 1766934 - RNA, 19 nt, Artificial Sequence
  Description of Artificial Sequence: Synthetic oligonucleotide
  Antisense strand to SEQ ID NO: 1766933
uguugcaagcagcaguucu

SEQ ID NO: 1766935 - RNA, 19 nt, Artificial Sequence
  Description of Artificial Sequence: Synthetic oligonucleotide
  Sense strand starting at position 2523 of SEQ ID NO: 1562707
cuugcaacauaguuuguaa

SEQ ID NO: 1766936 - RNA, 19 nt, Artificial Sequence
  Description of Artificial Sequence: Synthetic oligonucleotide
  Antisense strand to SEQ ID NO: 1766935
uuacaaacuauguugcaag

SEQ ID NO: 1766937 - RNA, 19 nt, Artificial Sequence
  Description of Artificial Sequence: Synthetic oligonucleotide
  Sense strand starting at position 2525 of SEQ ID NO: 1562707
ugcaacauaguuuguaaua

SEQ ID NO: 1766938 - RNA, 19 nt, Artificial Sequence
  Description of Artificial Sequence: Synthetic oligonucleotide
  Antisense strand to SEQ ID NO: 1766937
uauuacaaacuauguugca

SEQ ID NO: 1766939 - RNA, 19 nt, Artificial Sequence
  Description of Artificial Sequence: Synthetic oligonucleotide
  Sense strand starting at position 2526 of SEQ ID NO: 1562707
gcaacauaguuuguaauac

SEQ ID NO: 1766940 - RNA, 19 nt, Artificial Sequence
  Description of Artificial Sequence: Synthetic oligonucleotide
  Antisense strand to SEQ ID NO: 1766939
guauuacaaacuauguugc

SEQ ID NO: 1766941 - RNA, 19 nt, Artificial Sequence
  Description of Artificial Sequence: Synthetic oligonucleotide
  Sense strand starting at position 2644 of SEQ ID NO: 1562707
guagaucuguggucugacu

SEQ ID NO: 1766942 - RNA, 19 nt, Artificial Sequence
  Description of Artificial Sequence: Synthetic oligonucleotide
  Antisense strand to SEQ ID NO: 1766941
agucagaccacagaucuac

SEQ ID NO: 1766943 - RNA, 19 nt, Artificial Sequence
  Description of Artificial Sequence: Synthetic oligonucleotide
  Sense strand starting at position 2770 of SEQ ID NO: 1562707
guguaugaacgugcaguuu

SEQ ID NO: 1766944 - RNA, 19 nt, Artificial Sequence
  Description of Artificial Sequence: Synthetic oligonucleotide
  Antisense strand to SEQ ID NO: 1766943
aaacugcacguucauacac

SEQ ID NO: 1766945 - RNA, 19 nt, Artificial Sequence
  Description of Artificial Sequence: Synthetic oligonucleotide
  Sense strand starting at position 2817 of SEQ ID NO: 1562707
agcucuuaacugugggaug

SEQ ID NO: 1766946 - RNA, 19 nt, Artificial Sequence
  Description of Artificial Sequence: Synthetic oligonucleotide
  Antisense strand to SEQ ID NO: 1766945
caucccacaguuaagagcu

SEQ ID NO: 1766947 - RNA, 19 nt, Artificial Sequence
  Description of Artificial Sequence: Synthetic oligonucleotide
  Sense strand starting at position 2897 of SEQ ID NO: 1562707
agacgaauguauccaugua

SEQ ID NO: 1766948 - RNA, 19 nt, Artificial Sequence
  Description of Artificial Sequence: Synthetic oligonucleotide
  Antisense strand to SEQ ID NO: 1766947
uacauggauacauucgucu

SEQ ID NO: 1766949 - RNA, 19 nt, Artificial Sequence
  Description of Artificial Sequence: Synthetic oligonucleotide
  Sense strand starting at position 3054 of SEQ ID NO: 1562707
ugauuauuccagcgggagu

SEQ ID NO: 1766950 - RNA, 19 nt, Artificial Sequence
  Description of Artificial Sequence: Synthetic oligonucleotide
  Antisense strand to SEQ ID NO: 1766949
acucccgcuggaauaauca

SEQ ID NO: 1766951 - RNA, 19 nt, Artificial Sequence
  Description of Artificial Sequence: Synthetic oligonucleotide
  Sense strand starting at position 3055 of SEQ ID NO: 1562707
gauuauuccagcgggaguc

SEQ ID NO: 1766952 - RNA, 19 nt, Artificial Sequence
  Description of Artificial Sequence: Synthetic oligonucleotide
  Antisense strand to SEQ ID NO: 1766951
gacucccgcuggaauaauc

SEQ ID NO: 1766953 - RNA, 19 nt, Artificial Sequence
  Description of Artificial Sequence: Synthetic oligonucleotide
  Sense strand starting at position 3360 of SEQ ID NO: 1562707
cacuauuagcaauggagga

SEQ ID NO: 1766954 - RNA, 19 nt, Artificial Sequence
  Description of Artificial Sequence: Synthetic oligonucleotide
  Antisense strand to SEQ ID NO: 1766953
uccuccauugcuaauagug

SEQ ID NO: 1766955 - RNA, 19 nt, Artificial Sequence
  Description of Artificial Sequence: Synthetic oligonucleotide
  Sense strand starting at position 3456 of SEQ ID NO: 1562707
ggccuauccuaacuugaag

SEQ ID NO: 1766956 - RNA, 19 nt, Artificial Sequence
  Description of Artificial Sequence: Synthetic oligonucleotide
  Antisense strand to SEQ ID NO: 1766955
cuucaaguuaggauaggcc

SEQ ID NO: 1766957 - RNA, 19 nt, Artificial Sequence
  Description of Artificial Sequence: Synthetic oligonucleotide
  Sense strand starting at position 3481 of SEQ ID NO: 1562707
aggaauuaauuggcugaca

SEQ ID NO: 1766958 - RNA, 19 nt, Artificial Sequence
  Description of Artificial Sequence: Synthetic oligonucleotide
  Antisense strand to SEQ ID NO: 1766957
ugucagccaauuaauuccu

SEQ ID NO: 1766959 - RNA, 19 nt, Artificial Sequence
  Description of Artificial Sequence: Synthetic oligonucleotide
  Sense strand starting at position 3482 of SEQ ID NO: 1562707
ggaauuaauuggcugacaa

SEQ ID NO: 1766960 - RNA, 19 nt, Artificial Sequence
  Description of Artificial Sequence: Synthetic oligonucleotide
  Antisense strand to SEQ ID NO: 1766959
uugucagccaauuaauucc

SEQ ID NO: 1766961 - RNA, 19 nt, Artificial Sequence
  Description of Artificial Sequence: Synthetic oligonucleotide
  Sense strand starting at position 3526 of SEQ ID NO: 1562707
guaggugcuccuuagcaaa

SEQ ID NO: 1766962 - RNA, 19 nt, Artificial Sequence
  Description of Artificial Sequence: Synthetic oligonucleotide
  Antisense strand to SEQ ID NO: 1766961
uuugcuaaggagcaccuac

SEQ ID NO: 1766963 - RNA, 19 nt, Artificial Sequence
  Description of Artificial Sequence: Synthetic oligonucleotide
  Sense strand starting at position 3549 of SEQ ID NO: 1562707
uuauaugaggccugcagau

SEQ ID NO: 1766964 - RNA, 19 nt, Artificial Sequence
  Description of Artificial Sequence: Synthetic oligonucleotide
  Antisense strand to SEQ ID NO: 1766963
aucugcaggccucauauaa

SEQ ID NO: 1766965 - RNA, 19 nt, Artificial Sequence
  Description of Artificial Sequence: Synthetic oligonucleotide
  Sense strand starting at position 3551 of SEQ ID NO: 1562707
auaugaggccugcagauaa

SEQ ID NO: 1766966 - RNA, 19 nt, Artificial Sequence
  Description of Artificial Sequence: Synthetic oligonucleotide
  Antisense strand to SEQ ID NO: 1766965
uuaucugcaggccucauau

SEQ ID NO: 1766967 - RNA, 19 nt, Artificial Sequence
  Description of Artificial Sequence: Synthetic oligonucleotide
  Sense strand starting at position 3756 of SEQ ID NO: 1562707
ucagauauguuccugcaca

SEQ ID NO: 1766968 - RNA, 19 nt, Artificial Sequence
  Description of Artificial Sequence: Synthetic oligonucleotide
  Antisense strand to SEQ ID NO: 1766967
ugugcaggaacauaucuga

SEQ ID NO: 1766969 - RNA, 19 nt, Artificial Sequence
  Description of Artificial Sequence: Synthetic oligonucleotide
  Sense strand starting at position 136 of SEQ ID NO: 1562708
guacacuguguugagugaa

SEQ ID NO: 1766970 - RNA, 19 nt, Artificial Sequence
  Description of Artificial Sequence: Synthetic oligonucleotide
  Antisense strand to SEQ ID NO: 1766969
uucacucaacacaguguac

SEQ ID NO: 1766971 - RNA, 19 nt, Artificial Sequence
  Description of Artificial Sequence: Synthetic oligonucleotide
  Sense strand starting at position 157 of SEQ ID NO: 1562708
agaggucauuuauguaaag

SEQ ID NO: 1766972 - RNA, 19 nt, Artificial Sequence
  Description of Artificial Sequence: Synthetic oligonucleotide
  Antisense strand to SEQ ID NO: 1766971
cuuuacauaaaugaccucu

SEQ ID NO: 1766973 - RNA, 19 nt, Artificial Sequence
  Description of Artificial Sequence: Synthetic oligonucleotide
  Sense strand starting at position 414 of SEQ ID NO: 1562708
ggcuguuuccagggacucu

SEQ ID NO: 1766974 - RNA, 19 nt, Artificial Sequence
  Description of Artificial Sequence: Synthetic oligonucleotide
  Antisense strand to SEQ ID NO: 1766973
agagucccuggaaacagcc

SEQ ID NO: 1766975 - RNA, 19 nt, Artificial Sequence
  Description of Artificial Sequence: Synthetic oligonucleotide
  Sense strand starting at position 415 of SEQ ID NO: 1562708
gcuguuuccagggacucua

SEQ ID NO: 1766976 - RNA, 19 nt, Artificial Sequence
  Description of Artificial Sequence: Synthetic oligonucleotide
  Antisense strand to SEQ ID NO: 1766975
uagagucccuggaaacagc

SEQ ID NO: 1766977 - RNA, 19 nt, Artificial Sequence
  Description of Artificial Sequence: Synthetic oligonucleotide
  Sense strand starting at position 518 of SEQ ID NO: 1562708
gcaggcucuccagacagaa

SEQ ID NO: 1766978 - RNA, 19 nt, Artificial Sequence
  Description of Artificial Sequence: Synthetic oligonucleotide
  Antisense strand to SEQ ID NO: 1766977
uucugucuggagagccugc

SEQ ID NO: 1766979 - RNA, 19 nt, Artificial Sequence
  Description of Artificial Sequence: Synthetic oligonucleotide
  Sense strand starting at position 555 of SEQ ID NO: 1562708
ugcgaaccaucacuuagau

SEQ ID NO: 1766980 - RNA, 19 nt, Artificial Sequence
  Description of Artificial Sequence: Synthetic oligonucleotide
  Antisense strand to SEQ ID NO: 1766979
aucuaagugaugguucgca

SEQ ID NO: 1766981 - RNA, 19 nt, Artificial Sequence
  Description of Artificial Sequence: Synthetic oligonucleotide
  Sense strand starting at position 581 of SEQ ID NO: 1562708
cagcaaaggaguggucuua

SEQ ID NO: 1766982 - RNA, 19 nt, Artificial Sequence
  Description of Artificial Sequence: Synthetic oligonucleotide
  Antisense strand to SEQ ID NO: 1766981
uaagaccacuccuuugcug

SEQ ID NO: 1766983 - RNA, 19 nt, Artificial Sequence
  Description of Artificial Sequence: Synthetic oligonucleotide
  Sense strand starting at position 600 of SEQ ID NO: 1562708
gaauacguacgguguuaga

SEQ ID NO: 1766984 - RNA, 19 nt, Artificial Sequence
  Description of Artificial Sequence: Synthetic oligonucleotide
  Antisense strand to SEQ ID NO: 1766983
ucuaacaccguacguauuc

SEQ ID NO: 1766985 - RNA, 19 nt, Artificial Sequence
  Description of Artificial Sequence: Synthetic oligonucleotide
  Sense strand starting at position 610 of SEQ ID NO: 1562708
gguguuagacagggaauga

SEQ ID NO: 1766986 - RNA, 19 nt, Artificial Sequence
  Description of Artificial Sequence: Synthetic oligonucleotide
  Antisense strand to SEQ ID NO: 1766985
ucauucccugucuaacacc

SEQ ID NO: 1766987 - RNA, 19 nt, Artificial Sequence
  Description of Artificial Sequence: Synthetic oligonucleotide
  Sense strand starting at position 661 of SEQ ID NO: 1562708
gggagagaauauggauaaa

SEQ ID NO: 1766988 - RNA, 19 nt, Artificial Sequence
  Description of Artificial Sequence: Synthetic oligonucleotide
  Antisense strand to SEQ ID NO: 1766987
uuuauccauauucucuccc

SEQ ID NO: 1766989 - RNA, 19 nt, Artificial Sequence
  Description of Artificial Sequence: Synthetic oligonucleotide
  Sense strand starting at position 1453 of SEQ ID NO: 1562708
agaggugugccagagggua

SEQ ID NO: 1766990 - RNA, 19 nt, Artificial Sequence
  Description of Artificial Sequence: Synthetic oligonucleotide
  Antisense strand to SEQ ID NO: 1766989
uacccucuggcacaccucu

SEQ ID NO: 1766991 - RNA, 19 nt, Artificial Sequence
  Description of Artificial Sequence: Synthetic oligonucleotide
  Sense strand starting at position 1455 of SEQ ID NO: 1562708
aggugugccagaggguaaa

SEQ ID NO: 1766992 - RNA, 19 nt, Artificial Sequence
  Description of Artificial Sequence: Synthetic oligonucleotide
  Antisense strand to SEQ ID NO: 1766991
uuuacccucuggcacaccu

SEQ ID NO: 1766993 - RNA, 19 nt, Artificial Sequence
  Description of Artificial Sequence: Synthetic oligonucleotide
  Sense strand starting at position 1663 of SEQ ID NO: 1562708
cacagugggaguugauaca

SEQ ID NO: 1766994 - RNA, 19 nt, Artificial Sequence
  Description of Artificial Sequence: Synthetic oligonucleotide
  Antisense strand to SEQ ID NO: 1766993
uguaucaacucccacugug

SEQ ID NO: 1766995 - RNA, 19 nt, Artificial Sequence
  Description of Artificial Sequence: Synthetic oligonucleotide
  Sense strand starting at position 1861 of SEQ ID NO: 1562708
caaacuagcuggucuauga

SEQ ID NO: 1766996 - RNA, 19 nt, Artificial Sequence
  Description of Artificial Sequence: Synthetic oligonucleotide
  Antisense strand to SEQ ID NO: 1766995
ucauagaccagcuaguuug

SEQ ID NO: 1766997 - RNA, 19 nt, Artificial Sequence
  Description of Artificial Sequence: Synthetic oligonucleotide
  Sense strand starting at position 1889 of SEQ ID NO: 1562708
ccugcugucuucuuugaaa

SEQ ID NO: 1766998 - RNA, 19 nt, Artificial Sequence
  Description of Artificial Sequence: Synthetic oligonucleotide
  Antisense strand to SEQ ID NO: 1766997
uuucaaagaagacagcagg

SEQ ID NO: 1766999 - RNA, 19 nt, Artificial Sequence
  Description of Artificial Sequence: Synthetic oligonucleotide
  Sense strand starting at position 2079 of SEQ ID NO: 1562708
aggcuagugacucacaaug

SEQ ID NO: 1767000 - RNA, 19 nt, Artificial Sequence
  Description of Artificial Sequence: Synthetic oligonucleotide
  Antisense strand to SEQ ID NO: 1766999
cauugugagucacuagccu

SEQ ID NO: 1767001 - RNA, 19 nt, Artificial Sequence
  Description of Artificial Sequence: Synthetic oligonucleotide
  Sense strand starting at position 2223 of SEQ ID NO: 1562708
cuuuccaguccugagcuaa

SEQ ID NO: 1767002 - RNA, 19 nt, Artificial Sequence
  Description of Artificial Sequence: Synthetic oligonucleotide
  Antisense strand to SEQ ID NO: 1767001
uuagcucaggacuggaaag

SEQ ID NO: 1767003 - RNA, 19 nt, Artificial Sequence
  Description of Artificial Sequence: Synthetic oligonucleotide
  Sense strand starting at position 2263 of SEQ ID NO: 1562708
cgagucacccuuggcaaga

SEQ ID NO: 1767004 - RNA, 19 nt, Artificial Sequence
  Description of Artificial Sequence: Synthetic oligonucleotide
  Antisense strand to SEQ ID NO: 1767003
ucuugccaagggugacucg

SEQ ID NO: 1767005 - RNA, 19 nt, Artificial Sequence
  Description of Artificial Sequence: Synthetic oligonucleotide
  Sense strand starting at position 2264 of SEQ ID NO: 1562708
gagucacccuuggcaagaa

SEQ ID NO: 1767006 - RNA, 19 nt, Artificial Sequence
  Description of Artificial Sequence: Synthetic oligonucleotide
  Antisense strand to SEQ ID NO: 1767005
uucuugccaagggugacuc

SEQ ID NO: 1767007 - RNA, 19 nt, Artificial Sequence
  Description of Artificial Sequence: Synthetic oligonucleotide
  Sense strand starting at position 2578 of SEQ ID NO: 1562708
aggugcaacugucuuuaaa

SEQ ID NO: 1767008 - RNA, 19 nt, Artificial Sequence
  Description of Artificial Sequence: Synthetic oligonucleotide
  Antisense strand to SEQ ID NO: 1767007
uuuaaagacaguugcaccu

SEQ ID NO: 1767009 - RNA, 19 nt, Artificial Sequence
  Description of Artificial Sequence: Synthetic oligonucleotide
  Sense strand starting at position 2764 of SEQ ID NO: 1562708
guguuaguucuugucugca

SEQ ID NO: 1767010 - RNA, 19 nt, Artificial Sequence
  Description of Artificial Sequence: Synthetic oligonucleotide
  Antisense strand to SEQ ID NO: 1767009
ugcagacaagaacuaacac

SEQ ID NO: 1767011 - RNA, 19 nt, Artificial Sequence
  Description of Artificial Sequence: Synthetic oligonucleotide
  Sense strand starting at position 2821 of SEQ ID NO: 1562708
ucaauagagaguuauggcu

SEQ ID NO: 1767012 - RNA, 19 nt, Artificial Sequence
  Description of Artificial Sequence: Synthetic oligonucleotide
  Antisense strand to SEQ ID NO: 1767011
agccauaacucucuauuga

SEQ ID NO: 1767013 - RNA, 19 nt, Artificial Sequence
  Description of Artificial Sequence: Synthetic oligonucleotide
  Sense strand starting at position 2827 of SEQ ID NO: 1562708
gagaguuauggcuguguau

SEQ ID NO: 1767014 - RNA, 19 nt, Artificial Sequence
  Description of Artificial Sequence: Synthetic oligonucleotide
  Antisense strand to SEQ ID NO: 1767013
auacacagccauaacucuc

SEQ ID NO: 1767015 - RNA, 19 nt, Artificial Sequence
  Description of Artificial Sequence: Synthetic oligonucleotide
  Sense strand starting at position 2839 of SEQ ID NO: 1562708
uguguauccucagugaaac

SEQ ID NO: 1767016 - RNA, 19 nt, Artificial Sequence
  Description of Artificial Sequence: Synthetic oligonucleotide
  Antisense strand to SEQ ID NO: 1767015
guuucacugaggauacaca

SEQ ID NO: 1767017 - RNA, 19 nt, Artificial Sequence
  Description of Artificial Sequence: Synthetic oligonucleotide
  Sense strand starting at position 2840 of SEQ ID NO: 1562708
guguauccucagugaaacc

SEQ ID NO: 1767018 - RNA, 19 nt, Artificial Sequence
  Description of Artificial Sequence: Synthetic oligonucleotide
  Antisense strand to SEQ ID NO: 1767017
gguuucacugaggauacac

SEQ ID NO: 1767019 - RNA, 19 nt, Artificial Sequence
  Description of Artificial Sequence: Synthetic oligonucleotide
  Sense strand starting at position 2913 of SEQ ID NO: 1562708
uucccaguucuguaaugcu

SEQ ID NO: 1767020 - RNA, 19 nt, Artificial Sequence
  Description of Artificial Sequence: Synthetic oligonucleotide
  Antisense strand to SEQ ID NO: 1767019
agcauuacagaacugggaa

SEQ ID NO: 1767021 - RNA, 19 nt, Artificial Sequence
  Description of Artificial Sequence: Synthetic oligonucleotide
  Sense strand starting at position 2921 of SEQ ID NO: 1562708
ucuguaaugcuacgaccua

SEQ ID NO: 1767022 - RNA, 19 nt, Artificial Sequence
  Description of Artificial Sequence: Synthetic oligonucleotide
  Antisense strand to SEQ ID NO: 1767021
uaggucguagcauuacaga

SEQ ID NO: 1767023 - RNA, 19 nt, Artificial Sequence
  Description of Artificial Sequence: Synthetic oligonucleotide
  Sense strand starting at position 3030 of SEQ ID NO: 1562708
ggacuauugcucugucgac

SEQ ID NO: 1767024 - RNA, 19 nt, Artificial Sequence
  Description of Artificial Sequence: Synthetic oligonucleotide
  Antisense strand to SEQ ID NO: 1767023
gucgacagagcaauagucc

SEQ ID NO: 1767025 - RNA, 19 nt, Artificial Sequence
  Description of Artificial Sequence: Synthetic oligonucleotide
  Sense strand starting at position 3374 of SEQ ID NO: 1562708
ggguaccauuguccucaua

SEQ ID NO: 1767026 - RNA, 19 nt, Artificial Sequence
  Description of Artificial Sequence: Synthetic oligonucleotide
  Antisense strand to SEQ ID NO: 1767025
uaugaggacaaugguaccc

SEQ ID NO: 1767027 - RNA, 19 nt, Artificial Sequence
  Description of Artificial Sequence: Synthetic oligonucleotide
  Sense strand starting at position 3432 of SEQ ID NO: 1562708
gccugacaguguuccaacu

SEQ ID NO: 1767028 - RNA, 19 nt, Artificial Sequence
  Description of Artificial Sequence: Synthetic oligonucleotide
  Antisense strand to SEQ ID NO: 1767027
aguuggaacacugucaggc

SEQ ID NO: 1767029 - RNA, 19 nt, Artificial Sequence
  Description of Artificial Sequence: Synthetic oligonucleotide
  Sense strand starting at position 3445 of SEQ ID NO: 1562708
ccaacuguggcauacuaau

SEQ ID NO: 1767030 - RNA, 19 nt, Artificial Sequence
  Description of Artificial Sequence: Synthetic oligonucleotide
  Antisense strand to SEQ ID NO: 1767029
auuaguaugccacaguugg

SEQ ID NO: 1767031 - RNA, 19 nt, Artificial Sequence
  Description of Artificial Sequence: Synthetic oligonucleotide
  Sense strand starting at position 3545 of SEQ ID NO: 1562708
cacaacugcucagugaguu

SEQ ID NO: 1767032 - RNA, 19 nt, Artificial Sequence
  Description of Artificial Sequence: Synthetic oligonucleotide
  Antisense strand to SEQ ID NO: 1767031
aacucacugagcaguugug

SEQ ID NO: 1767033 - RNA, 19 nt, Artificial Sequence
  Description of Artificial Sequence: Synthetic oligonucleotide
  Sense strand starting at position 3667 of SEQ ID NO: 1562708
agaguugaaguagaguuua

SEQ ID NO: 1767034 - RNA, 19 nt, Artificial Sequence
  Description of Artificial Sequence: Synthetic oligonucleotide
  Antisense strand to SEQ ID NO: 1767033
uaaacucuacuucaacucu

SEQ ID NO: 1767035 - RNA, 19 nt, Artificial Sequence
  Description of Artificial Sequence: Synthetic oligonucleotide
  Sense strand starting at position 3672 of SEQ ID NO: 1562708
ugaaguagaguuuaaguuu

SEQ ID NO: 1767036 - RNA, 19 nt, Artificial Sequence
  Description of Artificial Sequence: Synthetic oligonucleotide
  Antisense strand to SEQ ID NO: 1767035
aaacuuaaacucuacuuca

SEQ ID NO: 1767037 - RNA, 19 nt, Artificial Sequence
  Description of Artificial Sequence: Synthetic oligonucleotide
  Sense strand starting at position 3735 of SEQ ID NO: 1562708
gucucuaucagauguguuu

SEQ ID NO: 1767038 - RNA, 19 nt, Artificial Sequence
  Description of Artificial Sequence: Synthetic oligonucleotide
  Antisense strand to SEQ ID NO: 1767037
aaacacaucugauagagac

SEQ ID NO: 1767039 - RNA, 19 nt, Artificial Sequence
  Description of Artificial Sequence: Synthetic oligonucleotide
  Sense strand starting at position 3742 of SEQ ID NO: 1562708
ucagauguguuugcaguga

SEQ ID NO: 1767040 - RNA, 19 nt, Artificial Sequence
  Description of Artificial Sequence: Synthetic oligonucleotide
  Antisense strand to SEQ ID NO: 1767039
ucacugcaaacacaucuga

SEQ ID NO: 1767041 - RNA, 19 nt, Artificial Sequence
  Description of Artificial Sequence: Synthetic oligonucleotide
  Sense strand starting at position 3758 of SEQ ID NO: 1562708
ugaggucucucugcacaau

SEQ ID NO: 1767042 - RNA, 19 nt, Artificial Sequence
  Description of Artificial Sequence: Synthetic oligonucleotide
  Antisense strand to SEQ ID NO: 1767041
auugugcagagagaccuca

SEQ ID NO: 1767043 - RNA, 19 nt, Artificial Sequence
  Description of Artificial Sequence: Synthetic oligonucleotide
  Sense strand starting at position 3759 of SEQ ID NO: 1562708
gaggucucucugcacaaua

SEQ ID NO: 1767044 - RNA, 19 nt, Artificial Sequence
  Description of Artificial Sequence: Synthetic oligonucleotide
  Antisense strand to SEQ ID NO: 1767043
uauugugcagagagaccuc

SEQ ID NO: 1767045 - RNA, 19 nt, Artificial Sequence
  Description of Artificial Sequence: Synthetic oligonucleotide
  Sense strand starting at position 3761 of SEQ ID NO: 1562708
ggucucucugcacaauaga

SEQ ID NO: 1767046 - RNA, 19 nt, Artificial Sequence
  Description of Artificial Sequence: Synthetic oligonucleotide
  Antisense strand to SEQ ID NO: 1767045
ucuauugugcagagagacc

SEQ ID NO: 1767047 - RNA, 19 nt, Artificial Sequence
  Description of Artificial Sequence: Synthetic oligonucleotide
  Sense strand starting at position 3800 of SEQ ID NO: 1562708
gggaccaauuaagagacau

SEQ ID NO: 1767048 - RNA, 19 nt, Artificial Sequence
  Description of Artificial Sequence: Synthetic oligonucleotide
  Antisense strand to SEQ ID NO: 1767047
augucucuuaauugguccc

SEQ ID NO: 1767049 - RNA, 19 nt, Artificial Sequence
  Description of Artificial Sequence: Synthetic oligonucleotide
  Sense strand starting at position 6 of SEQ ID NO: 1562709
aagaaugaguucucuggca

SEQ ID NO: 1767050 - RNA, 19 nt, Artificial Sequence
  Description of Artificial Sequence: Synthetic oligonucleotide
  Antisense strand to SEQ ID NO: 1767049
ugccagagaacucauucuu

SEQ ID NO: 1767051 - RNA, 19 nt, Artificial Sequence
  Description of Artificial Sequence: Synthetic oligonucleotide
  Sense strand starting at position 8 of SEQ ID NO: 1562709
gaaugaguucucuggcagc

SEQ ID NO: 1767052 - RNA, 19 nt, Artificial Sequence
  Description of Artificial Sequence: Synthetic oligonucleotide
  Antisense strand to SEQ ID NO: 1767051
gcugccagagaacucauuc

SEQ ID NO: 1767053 - RNA, 19 nt, Artificial Sequence
  Description of Artificial Sequence: Synthetic oligonucleotide
  Sense strand starting at position 10 of SEQ ID NO: 1562709
augaguucucuggcagcgu

SEQ ID NO: 1767054 - RNA, 19 nt, Artificial Sequence
  Description of Artificial Sequence: Synthetic oligonucleotide
  Antisense strand to SEQ ID NO: 1767053
acgcugccagagaacucau

SEQ ID NO: 1767055 - RNA, 19 nt, Artificial Sequence
  Description of Artificial Sequence: Synthetic oligonucleotide
  Sense strand starting at position 21 of SEQ ID NO: 1562709
ggcagcgugucuccagaau

SEQ ID NO: 1767056 - RNA, 19 nt, Artificial Sequence
  Description of Artificial Sequence: Synthetic oligonucleotide
  Antisense strand to SEQ ID NO: 1767055
auucuggagacacgcugcc

SEQ ID NO: 1767057 - RNA, 19 nt, Artificial Sequence
  Description of Artificial Sequence: Synthetic oligonucleotide
  Sense strand starting at position 110 of SEQ ID NO: 1562709
ggcaaauccuaccugccaa

SEQ ID NO: 1767058 - RNA, 19 nt, Artificial Sequence
  Description of Artificial Sequence: Synthetic oligonucleotide
  Antisense strand to SEQ ID NO: 1767057
uuggcagguaggauuugcc

SEQ ID NO: 1767059 - RNA, 19 nt, Artificial Sequence
  Description of Artificial Sequence: Synthetic oligonucleotide
  Sense strand starting at position 150 of SEQ ID NO: 1562709
aggcucauucccggaagga

SEQ ID NO: 1767060 - RNA, 19 nt, Artificial Sequence
  Description of Artificial Sequence: Synthetic oligonucleotide
  Antisense strand to SEQ ID NO: 1767059
uccuuccgggaaugagccu

SEQ ID NO: 1767061 - RNA, 19 nt, Artificial Sequence
  Description of Artificial Sequence: Synthetic oligonucleotide
  Sense strand starting at position 151 of SEQ ID NO: 1562709
ggcucauucccggaaggac

SEQ ID NO: 1767062 - RNA, 19 nt, Artificial Sequence
  Description of Artificial Sequence: Synthetic oligonucleotide
  Antisense strand to SEQ ID NO: 1767061
guccuuccgggaaugagcc

SEQ ID NO: 1767063 - RNA, 19 nt, Artificial Sequence
  Description of Artificial Sequence: Synthetic oligonucleotide
  Sense strand starting at position 181 of SEQ ID NO: 1562709
gcuugcuacagaggugaua

SEQ ID NO: 1767064 - RNA, 19 nt, Artificial Sequence
  Description of Artificial Sequence: Synthetic oligonucleotide
  Antisense strand to SEQ ID NO: 1767063
uaucaccucuguagcaagc

SEQ ID NO: 1767065 - RNA, 19 nt, Artificial Sequence
  Description of Artificial Sequence: Synthetic oligonucleotide
  Sense strand starting at position 183 of SEQ ID NO: 1562709
uugcuacagaggugauaug

SEQ ID NO: 1767066 - RNA, 19 nt, Artificial Sequence
  Description of Artificial Sequence: Synthetic oligonucleotide
  Antisense strand to SEQ ID NO: 1767065
cauaucaccucuguagcaa

SEQ ID NO: 1767067 - RNA, 19 nt, Artificial Sequence
  Description of Artificial Sequence: Synthetic oligonucleotide
  Sense strand starting at position 249 of SEQ ID NO: 1562709
aaggaauguucuggauccu

SEQ ID NO: 1767068 - RNA, 19 nt, Artificial Sequence
  Description of Artificial Sequence: Synthetic oligonucleotide
  Antisense strand to SEQ ID NO: 1767067
aggauccagaacauuccuu

SEQ ID NO: 1767069 - RNA, 19 nt, Artificial Sequence
  Description of Artificial Sequence: Synthetic oligonucleotide
  Sense strand starting at position 259 of SEQ ID NO: 1562709
cuggauccucgucaucaga

SEQ ID NO: 1767070 - RNA, 19 nt, Artificial Sequence
  Description of Artificial Sequence: Synthetic oligonucleotide
  Antisense strand to SEQ ID NO: 1767069
ucugaugacgaggauccag

SEQ ID NO: 1767071 - RNA, 19 nt, Artificial Sequence
  Description of Artificial Sequence: Synthetic oligonucleotide
  Sense strand starting at position 261 of SEQ ID NO: 1562709
ggauccucgucaucagaaa

SEQ ID NO: 1767072 - RNA, 19 nt, Artificial Sequence
  Description of Artificial Sequence: Synthetic oligonucleotide
  Antisense strand to SEQ ID NO: 1767071
uuucugaugacgaggaucc

SEQ ID NO: 1767073 - RNA, 19 nt, Artificial Sequence
  Description of Artificial Sequence: Synthetic oligonucleotide
  Sense strand starting at position 405 of SEQ ID NO: 1562709
guagugaugcgaggaguca

SEQ ID NO: 1767074 - RNA, 19 nt, Artificial Sequence
  Description of Artificial Sequence: Synthetic oligonucleotide
  Antisense strand to SEQ ID NO: 1767073
ugacuccucgcaucacuac

SEQ ID NO: 1767075 - RNA, 19 nt, Artificial Sequence
  Description of Artificial Sequence: Synthetic oligonucleotide
  Sense strand starting at position 406 of SEQ ID NO: 1562709
uagugaugcgaggagucau

SEQ ID NO: 1767076 - RNA, 19 nt, Artificial Sequence
  Description of Artificial Sequence: Synthetic oligonucleotide
  Antisense strand to SEQ ID NO: 1767075
augacuccucgcaucacua

SEQ ID NO: 1767077 - RNA, 19 nt, Artificial Sequence
  Description of Artificial Sequence: Synthetic oligonucleotide
  Sense strand starting at position 439 of SEQ ID NO: 1562709
agaaauaucuaucagggcu

SEQ ID NO: 1767078 - RNA, 19 nt, Artificial Sequence
  Description of Artificial Sequence: Synthetic oligonucleotide
  Antisense strand to SEQ ID NO: 1767077
agcccugauagauauuucu

SEQ ID NO: 1767079 - RNA, 19 nt, Artificial Sequence
  Description of Artificial Sequence: Synthetic oligonucleotide
  Sense strand starting at position 768 of SEQ ID NO: 1562709
ucuaucaggcacuguauua

SEQ ID NO: 1767080 - RNA, 19 nt, Artificial Sequence
  Description of Artificial Sequence: Synthetic oligonucleotide
  Antisense strand to SEQ ID NO: 1767079
uaauacagugccugauaga

SEQ ID NO: 1767081 - RNA, 19 nt, Artificial Sequence
  Description of Artificial Sequence: Synthetic oligonucleotide
  Sense strand starting at position 926 of SEQ ID NO: 1562709
aaaggauguugugaaauua

SEQ ID NO: 1767082 - RNA, 19 nt, Artificial Sequence
  Description of Artificial Sequence: Synthetic oligonucleotide
  Antisense strand to SEQ ID NO: 1767081
uaauuucacaacauccuuu

SEQ ID NO: 1767083 - RNA, 19 nt, Artificial Sequence
  Description of Artificial Sequence: Synthetic oligonucleotide
  Sense strand starting at position 935 of SEQ ID NO: 1562709
ugugaaauuaaacgagaua

SEQ ID NO: 1767084 - RNA, 19 nt, Artificial Sequence
  Description of Artificial Sequence: Synthetic oligonucleotide
  Antisense strand to SEQ ID NO: 1767083
uaucucguuuaauuucaca

SEQ ID NO: 1767085 - RNA, 19 nt, Artificial Sequence
  Description of Artificial Sequence: Synthetic oligonucleotide
  Sense strand starting at position 947 of SEQ ID NO: 1562709
cgagauaauccacguaaag

SEQ ID NO: 1767086 - RNA, 19 nt, Artificial Sequence
  Description of Artificial Sequence: Synthetic oligonucleotide
  Antisense strand to SEQ ID NO: 1767085
cuuuacguggauuaucucg

SEQ ID NO: 1767087 - RNA, 19 nt, Artificial Sequence
  Description of Artificial Sequence: Synthetic oligonucleotide
  Sense strand starting at position 1021 of SEQ ID NO: 1562709
ucgcuucugauagggaagu

SEQ ID NO: 1767088 - RNA, 19 nt, Artificial Sequence
  Description of Artificial Sequence: Synthetic oligonucleotide
  Antisense strand to SEQ ID NO: 1767087
acuucccuaucagaagcga

SEQ ID NO: 1767089 - RNA, 19 nt, Artificial Sequence
  Description of Artificial Sequence: Synthetic oligonucleotide
  Sense strand starting at position 1023 of SEQ ID NO: 1562709
gcuucugauagggaaguua

SEQ ID NO: 1767090 - RNA, 19 nt, Artificial Sequence
  Description of Artificial Sequence: Synthetic oligonucleotide
  Antisense strand to SEQ ID NO: 1767089
uaacuucccuaucagaagc

SEQ ID NO: 1767091 - RNA, 19 nt, Artificial Sequence
  Description of Artificial Sequence: Synthetic oligonucleotide
  Sense strand starting at position 1043 of SEQ ID NO: 1562709
aaugcagggcucugugaaa

SEQ ID NO: 1767092 - RNA, 19 nt, Artificial Sequence
  Description of Artificial Sequence: Synthetic oligonucleotide
  Antisense strand to SEQ ID NO: 1767091
uuucacagagcccugcauu

SEQ ID NO: 1767093 - RNA, 19 nt, Artificial Sequence
  Description of Artificial Sequence: Synthetic oligonucleotide
  Sense strand starting at position 1141 of SEQ ID NO: 1562709
aagaacguuuagcuugaga

SEQ ID NO: 1767094 - RNA, 19 nt, Artificial Sequence
  Description of Artificial Sequence: Synthetic oligonucleotide
  Antisense strand to SEQ ID NO: 1767093
ucucaagcuaaacguucuu

SEQ ID NO: 1767095 - RNA, 19 nt, Artificial Sequence
  Description of Artificial Sequence: Synthetic oligonucleotide
  Sense strand starting at position 1143 of SEQ ID NO: 1562709
gaacguuuagcuugagagg

SEQ ID NO: 1767096 - RNA, 19 nt, Artificial Sequence
  Description of Artificial Sequence: Synthetic oligonucleotide
  Antisense strand to SEQ ID NO: 1767095
ccucucaagcuaaacguuc

SEQ ID NO: 1767097 - RNA, 19 nt, Artificial Sequence
  Description of Artificial Sequence: Synthetic oligonucleotide
  Sense strand starting at position 1145 of SEQ ID NO: 1562709
acguuuagcuugagaggga

SEQ ID NO: 1767098 - RNA, 19 nt, Artificial Sequence
  Description of Artificial Sequence: Synthetic oligonucleotide
  Antisense strand to SEQ ID NO: 1767097
ucccucucaagcuaaacgu

SEQ ID NO: 1767099 - RNA, 19 nt, Artificial Sequence
  Description of Artificial Sequence: Synthetic oligonucleotide
  Sense strand starting at position 1208 of SEQ ID NO: 1562709
cuuuacagccuaugaagua

SEQ ID NO: 1767100 - RNA, 19 nt, Artificial Sequence
  Description of Artificial Sequence: Synthetic oligonucleotide
  Antisense strand to SEQ ID NO: 1767099
uacuucauaggcuguaaag

SEQ ID NO: 1767101 - RNA, 19 nt, Artificial Sequence
  Description of Artificial Sequence: Synthetic oligonucleotide
  Sense strand starting at position 1209 of SEQ ID NO: 1562709
uuuacagccuaugaaguau

SEQ ID NO: 1767102 - RNA, 19 nt, Artificial Sequence
  Description of Artificial Sequence: Synthetic oligonucleotide
  Antisense strand to SEQ ID NO: 1767101
auacuucauaggcuguaaa

SEQ ID NO: 1767103 - RNA, 19 nt, Artificial Sequence
  Description of Artificial Sequence: Synthetic oligonucleotide
  Sense strand starting at position 1275 of SEQ ID NO: 1562709
ggcgucuagaguuaauauu

SEQ ID NO: 1767104 - RNA, 19 nt, Artificial Sequence
  Description of Artificial Sequence: Synthetic oligonucleotide
  Antisense strand to SEQ ID NO: 1767103
aauauuaacucuagacgcc

SEQ ID NO: 1767105 - RNA, 19 nt, Artificial Sequence
  Description of Artificial Sequence: Synthetic oligonucleotide
  Sense strand starting at position 1334 of SEQ ID NO: 1562709
aggacuuguucagaacgag

SEQ ID NO: 1767106 - RNA, 19 nt, Artificial Sequence
  Description of Artificial Sequence: Synthetic oligonucleotide
  Antisense strand to SEQ ID NO: 1767105
cucguucugaacaaguccu

SEQ ID NO: 1767107 - RNA, 19 nt, Artificial Sequence
  Description of Artificial Sequence: Synthetic oligonucleotide
  Sense strand starting at position 1344 of SEQ ID NO: 1562709
cagaacgagucauaaagca

SEQ ID NO: 1767108 - RNA, 19 nt, Artificial Sequence
  Description of Artificial Sequence: Synthetic oligonucleotide
  Antisense strand to SEQ ID NO: 1767107
ugcuuuaugacucguucug

SEQ ID NO: 1767109 - RNA, 19 nt, Artificial Sequence
  Description of Artificial Sequence: Synthetic oligonucleotide
  Sense strand starting at position 1370 of SEQ ID NO: 1562709
cgaccuuuaugguccauua

SEQ ID NO: 1767110 - RNA, 19 nt, Artificial Sequence
  Description of Artificial Sequence: Synthetic oligonucleotide
  Antisense strand to SEQ ID NO: 1767109
uaauggaccauaaaggucg

SEQ ID NO: 1767111 - RNA, 19 nt, Artificial Sequence
  Description of Artificial Sequence: Synthetic oligonucleotide
  Sense strand starting at position 1417 of SEQ ID NO: 1562709
gggcguucgugaaauacua

SEQ ID NO: 1767112 - RNA, 19 nt, Artificial Sequence
  Description of Artificial Sequence: Synthetic oligonucleotide
  Antisense strand to SEQ ID NO: 1767111
uaguauuucacgaacgccc

SEQ ID NO: 1767113 - RNA, 19 nt, Artificial Sequence
  Description of Artificial Sequence: Synthetic oligonucleotide
  Sense strand starting at position 1419 of SEQ ID NO: 1562709
gcguucgugaaauacuaag

SEQ ID NO: 1767114 - RNA, 19 nt, Artificial Sequence
  Description of Artificial Sequence: Synthetic oligonucleotide
  Antisense strand to SEQ ID NO: 1767113
cuuaguauuucacgaacgc

SEQ ID NO: 1767115 - RNA, 19 nt, Artificial Sequence
  Description of Artificial Sequence: Synthetic oligonucleotide
  Sense strand starting at position 1460 of SEQ ID NO: 1562709
aagaguuaacgagagcgaa

SEQ ID NO: 1767116 - RNA, 19 nt, Artificial Sequence
  Description of Artificial Sequence: Synthetic oligonucleotide
  Antisense strand to SEQ ID NO: 1767115
uucgcucucguuaacucuu

SEQ ID NO: 1767117 - RNA, 19 nt, Artificial Sequence
  Description of Artificial Sequence: Synthetic oligonucleotide
  Sense strand starting at position 1598 of SEQ ID NO: 1562709
gcggguucgcucaggaagu

SEQ ID NO: 1767118 - RNA, 19 nt, Artificial Sequence
  Description of Artificial Sequence: Synthetic oligonucleotide
  Antisense strand to SEQ ID NO: 1767117
acuuccugagcgaacccgc

SEQ ID NO: 1767119 - RNA, 19 nt, Artificial Sequence
  Description of Artificial Sequence: Synthetic oligonucleotide
  Sense strand starting at position 2207 of SEQ ID NO: 1562709
uccaacuguuucucgaaca

SEQ ID NO: 1767120 - RNA, 19 nt, Artificial Sequence
  Description of Artificial Sequence: Synthetic oligonucleotide
  Antisense strand to SEQ ID NO: 1767119
uguucgagaaacaguugga

SEQ ID NO: 1767121 - RNA, 19 nt, Artificial Sequence
  Description of Artificial Sequence: Synthetic oligonucleotide
  Sense strand starting at position 2212 of SEQ ID NO: 1562709
cuguuucucgaacagggaa

SEQ ID NO: 1767122 - RNA, 19 nt, Artificial Sequence
  Description of Artificial Sequence: Synthetic oligonucleotide
  Antisense strand to SEQ ID NO: 1767121
uucccuguucgagaaacag

SEQ ID NO: 1767123 - RNA, 19 nt, Artificial Sequence
  Description of Artificial Sequence: Synthetic oligonucleotide
  Sense strand starting at position 2732 of SEQ ID NO: 1562709
agcugugacucuccuuaga

SEQ ID NO: 1767124 - RNA, 19 nt, Artificial Sequence
  Description of Artificial Sequence: Synthetic oligonucleotide
  Antisense strand to SEQ ID NO: 1767123
ucuaaggagagucacagcu

SEQ ID NO: 1767125 - RNA, 19 nt, Artificial Sequence
  Description of Artificial Sequence: Synthetic oligonucleotide
  Sense strand starting at position 3236 of SEQ ID NO: 1562709
gauugagaaguuggauugu

SEQ ID NO: 1767126 - RNA, 19 nt, Artificial Sequence
  Description of Artificial Sequence: Synthetic oligonucleotide
  Antisense strand to SEQ ID NO: 1767125
acaauccaacuucucaauc

SEQ ID NO: 1767127 - RNA, 19 nt, Artificial Sequence
  Description of Artificial Sequence: Synthetic oligonucleotide
  Sense strand starting at position 3741 of SEQ ID NO: 1562709
uagggacaaucacuguuaa

SEQ ID NO: 1767128 - RNA, 19 nt, Artificial Sequence
  Description of Artificial Sequence: Synthetic oligonucleotide
  Antisense strand to SEQ ID NO: 1767127
uuaacagugauugucccua

SEQ ID NO: 1767129 - RNA, 19 nt, Artificial Sequence
  Description of Artificial Sequence: Synthetic oligonucleotide
  Sense strand starting at position 285 of SEQ ID NO: 1562710
gggugcuauagagaucucu

SEQ ID NO: 1767130 - RNA, 19 nt, Artificial Sequence
  Description of Artificial Sequence: Synthetic oligonucleotide
  Antisense strand to SEQ ID NO: 1767129
agagaucucuauagcaccc

SEQ ID NO: 1767131 - RNA, 19 nt, Artificial Sequence
  Description of Artificial Sequence: Synthetic oligonucleotide
  Sense strand starting at position 316 of SEQ ID NO: 1562710
gagguagauagcuggaaca

SEQ ID NO: 1767132 - RNA, 19 nt, Artificial Sequence
  Description of Artificial Sequence: Synthetic oligonucleotide
  Antisense strand to SEQ ID NO: 1767131
uguuccagcuaucuaccuc

SEQ ID NO: 1767133 - RNA, 19 nt, Artificial Sequence
  Description of Artificial Sequence: Synthetic oligonucleotide
  Sense strand starting at position 567 of SEQ ID NO: 1562710
cccagaacuuagccaagua

SEQ ID NO: 1767134 - RNA, 19 nt, Artificial Sequence
  Description of Artificial Sequence: Synthetic oligonucleotide
  Antisense strand to SEQ ID NO: 1767133
uacuuggcuaaguucuggg

SEQ ID NO: 1767135 - RNA, 19 nt, Artificial Sequence
  Description of Artificial Sequence: Synthetic oligonucleotide
  Sense strand starting at position 617 of SEQ ID NO: 1562710
agacaugaacuguagugua

SEQ ID NO: 1767136 - RNA, 19 nt, Artificial Sequence
  Description of Artificial Sequence: Synthetic oligonucleotide
  Antisense strand to SEQ ID NO: 1767135
uacacuacaguucaugucu

SEQ ID NO: 1767137 - RNA, 19 nt, Artificial Sequence
  Description of Artificial Sequence: Synthetic oligonucleotide
  Sense strand starting at position 622 of SEQ ID NO: 1562710
ugaacuguaguguaugaaa

SEQ ID NO: 1767138 - RNA, 19 nt, Artificial Sequence
  Description of Artificial Sequence: Synthetic oligonucleotide
  Antisense strand to SEQ ID NO: 1767137
uuucauacacuacaguuca

SEQ ID NO: 1767139 - RNA, 19 nt, Artificial Sequence
  Description of Artificial Sequence: Synthetic oligonucleotide
  Sense strand starting at position 624 of SEQ ID NO: 1562710
aacuguaguguaugaaagu

SEQ ID NO: 1767140 - RNA, 19 nt, Artificial Sequence
  Description of Artificial Sequence: Synthetic oligonucleotide
  Antisense strand to SEQ ID NO: 1767139
acuuucauacacuacaguu

SEQ ID NO: 1767141 - RNA, 19 nt, Artificial Sequence
  Description of Artificial Sequence: Synthetic oligonucleotide
  Sense strand starting at position 643 of SEQ ID NO: 1562710
agaauugauuuacagcauu

SEQ ID NO: 1767142 - RNA, 19 nt, Artificial Sequence
  Description of Artificial Sequence: Synthetic oligonucleotide
  Antisense strand to SEQ ID NO: 1767141
aaugcuguaaaucaauucu

SEQ ID NO: 1767143 - RNA, 19 nt, Artificial Sequence
  Description of Artificial Sequence: Synthetic oligonucleotide
  Sense strand starting at position 1122 of SEQ ID NO: 1562710
aggcaaagauuuggagaga

SEQ ID NO: 1767144 - RNA, 19 nt, Artificial Sequence
  Description of Artificial Sequence: Synthetic oligonucleotide
  Antisense strand to SEQ ID NO: 1767143
ucucuccaaaucuuugccu

SEQ ID NO: 1767145 - RNA, 19 nt, Artificial Sequence
  Description of Artificial Sequence: Synthetic oligonucleotide
  Sense strand starting at position 1123 of SEQ ID NO: 1562710
ggcaaagauuuggagagaa

SEQ ID NO: 1767146 - RNA, 19 nt, Artificial Sequence
  Description of Artificial Sequence: Synthetic oligonucleotide
  Antisense strand to SEQ ID NO: 1767145
uucucuccaaaucuuugcc

SEQ ID NO: 1767147 - RNA, 19 nt, Artificial Sequence
  Description of Artificial Sequence: Synthetic oligonucleotide
  Sense strand starting at position 1294 of SEQ ID NO: 1562710
uuugccgugauacagaaau

SEQ ID NO: 1767148 - RNA, 19 nt, Artificial Sequence
  Description of Artificial Sequence: Synthetic oligonucleotide
  Antisense strand to SEQ ID NO: 1767147
auuucuguaucacggcaaa

SEQ ID NO: 1767149 - RNA, 19 nt, Artificial Sequence
  Description of Artificial Sequence: Synthetic oligonucleotide
  Sense strand starting at position 1296 of SEQ ID NO: 1562710
ugccgugauacagaaauga

SEQ ID NO: 1767150 - RNA, 19 nt, Artificial Sequence
  Description of Artificial Sequence: Synthetic oligonucleotide
  Antisense strand to SEQ ID NO: 1767149
ucauuucuguaucacggca

SEQ ID NO: 1767151 - RNA, 19 nt, Artificial Sequence
  Description of Artificial Sequence: Synthetic oligonucleotide
  Sense strand starting at position 1306 of SEQ ID NO: 1562710
cagaaaugaguuugaauuc

SEQ ID NO: 1767152 - RNA, 19 nt, Artificial Sequence
  Description of Artificial Sequence: Synthetic oligonucleotide
  Antisense strand to SEQ ID NO: 1767151
gaauucaaacucauuucug

SEQ ID NO: 1767153 - RNA, 19 nt, Artificial Sequence
  Description of Artificial Sequence: Synthetic oligonucleotide
  Sense strand starting at position 1316 of SEQ ID NO: 1562710
uuugaauucuggcucagaa

SEQ ID NO: 1767154 - RNA, 19 nt, Artificial Sequence
  Description of Artificial Sequence: Synthetic oligonucleotide
  Antisense strand to SEQ ID NO: 1767153
uucugagccagaauucaaa

SEQ ID NO: 1767155 - RNA, 19 nt, Artificial Sequence
  Description of Artificial Sequence: Synthetic oligonucleotide
  Sense strand starting at position 1341 of SEQ ID NO: 1562710
uaagauaguugugugacuu

SEQ ID NO: 1767156 - RNA, 19 nt, Artificial Sequence
  Description of Artificial Sequence: Synthetic oligonucleotide
  Antisense strand to SEQ ID NO: 1767155
aagucacacaacuaucuua

SEQ ID NO: 1767157 - RNA, 19 nt, Artificial Sequence
  Description of Artificial Sequence: Synthetic oligonucleotide
  Sense strand starting at position 1435 of SEQ ID NO: 1562710
gacugcugugggcacaaau

SEQ ID NO: 1767158 - RNA, 19 nt, Artificial Sequence
  Description of Artificial Sequence: Synthetic oligonucleotide
  Antisense strand to SEQ ID NO: 1767157
auuugugcccacagcaguc

SEQ ID NO: 1767159 - RNA, 19 nt, Artificial Sequence
  Description of Artificial Sequence: Synthetic oligonucleotide
  Sense strand starting at position 1462 of SEQ ID NO: 1562710
gggcaugagacauguugua

SEQ ID NO: 1767160 - RNA, 19 nt, Artificial Sequence
  Description of Artificial Sequence: Synthetic oligonucleotide
  Antisense strand to SEQ ID NO: 1767159
uacaacaugucucaugccc

SEQ ID NO: 1767161 - RNA, 19 nt, Artificial Sequence
  Description of Artificial Sequence: Synthetic oligonucleotide
  Sense strand starting at position 1516 of SEQ ID NO: 1562710
cccagcugauucucacaga

SEQ ID NO: 1767162 - RNA, 19 nt, Artificial Sequence
  Description of Artificial Sequence: Synthetic oligonucleotide
  Antisense strand to SEQ ID NO: 1767161
ucugugagaaucagcuggg

SEQ ID NO: 1767163 - RNA, 19 nt, Artificial Sequence
  Description of Artificial Sequence: Synthetic oligonucleotide
  Sense strand starting at position 1574 of SEQ ID NO: 1562710
aucguucuucuccacauau

SEQ ID NO: 1767164 - RNA, 19 nt, Artificial Sequence
  Description of Artificial Sequence: Synthetic oligonucleotide
  Antisense strand to SEQ ID NO: 1767163
auauguggagaagaacgau

SEQ ID NO: 1767165 - RNA, 19 nt, Artificial Sequence
  Description of Artificial Sequence: Synthetic oligonucleotide
  Sense strand starting at position 1576 of SEQ ID NO: 1562710
cguucuucuccacauauca

SEQ ID NO: 1767166 - RNA, 19 nt, Artificial Sequence
  Description of Artificial Sequence: Synthetic oligonucleotide
  Antisense strand to SEQ ID NO: 1767165
ugauauguggagaagaacg

SEQ ID NO: 1767167 - RNA, 19 nt, Artificial Sequence
  Description of Artificial Sequence: Synthetic oligonucleotide
  Sense strand starting at position 2075 of SEQ ID NO: 1562710
agaaauuuccgccggaagu

SEQ ID NO: 1767168 - RNA, 19 nt, Artificial Sequence
  Description of Artificial Sequence: Synthetic oligonucleotide
  Antisense strand to SEQ ID NO: 1767167
acuuccggcggaaauuucu

SEQ ID NO: 1767169 - RNA, 19 nt, Artificial Sequence
  Description of Artificial Sequence: Synthetic oligonucleotide
  Sense strand starting at position 2076 of SEQ ID NO: 1562710
gaaauuuccgccggaaguc

SEQ ID NO: 1767170 - RNA, 19 nt, Artificial Sequence
  Description of Artificial Sequence: Synthetic oligonucleotide
  Antisense strand to SEQ ID NO: 1767169
gacuuccggcggaaauuuc

SEQ ID NO: 1767171 - RNA, 19 nt, Artificial Sequence
  Description of Artificial Sequence: Synthetic oligonucleotide
  Sense strand starting at position 2512 of SEQ ID NO: 1562710
auugauauucgcuaaauga

SEQ ID NO: 1767172 - RNA, 19 nt, Artificial Sequence
  Description of Artificial Sequence: Synthetic oligonucleotide
  Antisense strand to SEQ ID NO: 1767171
ucauuuagcgaauaucaau

SEQ ID NO: 1767173 - RNA, 19 nt, Artificial Sequence
  Description of Artificial Sequence: Synthetic oligonucleotide
  Sense strand starting at position 2520 of SEQ ID NO: 1562710
ucgcuaaaugagugaauua

SEQ ID NO: 1767174 - RNA, 19 nt, Artificial Sequence
  Description of Artificial Sequence: Synthetic oligonucleotide
  Antisense strand to SEQ ID NO: 1767173
uaauucacucauuuagcga

SEQ ID NO: 1767175 - RNA, 19 nt, Artificial Sequence
  Description of Artificial Sequence: Synthetic oligonucleotide
  Sense strand starting at position 2521 of SEQ ID NO: 1562710
cgcuaaaugagugaauuau

SEQ ID NO: 1767176 - RNA, 19 nt, Artificial Sequence
  Description of Artificial Sequence: Synthetic oligonucleotide
  Antisense strand to SEQ ID NO: 1767175
auaauucacucauuuagcg

SEQ ID NO: 1767177 - RNA, 19 nt, Artificial Sequence
  Description of Artificial Sequence: Synthetic oligonucleotide
  Sense strand starting at position 2559 of SEQ ID NO: 1562710
guggaagcgccauaaauca

SEQ ID NO: 1767178 - RNA, 19 nt, Artificial Sequence
  Description of Artificial Sequence: Synthetic oligonucleotide
  Antisense strand to SEQ ID NO: 1767177
ugauuuauggcgcuuccac

SEQ ID NO: 1767179 - RNA, 19 nt, Artificial Sequence
  Description of Artificial Sequence: Synthetic oligonucleotide
  Sense strand starting at position 2568 of SEQ ID NO: 1562710
ccauaaaucacgugaguga

SEQ ID NO: 1767180 - RNA, 19 nt, Artificial Sequence
  Description of Artificial Sequence: Synthetic oligonucleotide
  Antisense strand to SEQ ID NO: 1767179
ucacucacgugauuuaugg

SEQ ID NO: 1767181 - RNA, 19 nt, Artificial Sequence
  Description of Artificial Sequence: Synthetic oligonucleotide
  Sense strand starting at position 2569 of SEQ ID NO: 1562710
cauaaaucacgugagugaa

SEQ ID NO: 1767182 - RNA, 19 nt, Artificial Sequence
  Description of Artificial Sequence: Synthetic oligonucleotide
  Antisense strand to SEQ ID NO: 1767181
uucacucacgugauuuaug

SEQ ID NO: 1767183 - RNA, 19 nt, Artificial Sequence
  Description of Artificial Sequence: Synthetic oligonucleotide
  Sense strand starting at position 2644 of SEQ ID NO: 1562710
cuagguauguacuuuacau

SEQ ID NO: 1767184 - RNA, 19 nt, Artificial Sequence
  Description of Artificial Sequence: Synthetic oligonucleotide
  Antisense strand to SEQ ID NO: 1767183
auguaaaguacauaccuag

SEQ ID NO: 1767185 - RNA, 19 nt, Artificial Sequence
  Description of Artificial Sequence: Synthetic oligonucleotide
  Sense strand starting at position 2882 of SEQ ID NO: 1562710
cuuggaauuccuugcacac

SEQ ID NO: 1767186 - RNA, 19 nt, Artificial Sequence
  Description of Artificial Sequence: Synthetic oligonucleotide
  Antisense strand to SEQ ID NO: 1767185
gugugcaaggaauuccaag

SEQ ID NO: 1767187 - RNA, 19 nt, Artificial Sequence
  Description of Artificial Sequence: Synthetic oligonucleotide
  Sense strand starting at position 2937 of SEQ ID NO: 1562710
gcugcaaagauggauacua

SEQ ID NO: 1767188 - RNA, 19 nt, Artificial Sequence
  Description of Artificial Sequence: Synthetic oligonucleotide
  Antisense strand to SEQ ID NO: 1767187
uaguauccaucuuugcagc

SEQ ID NO: 1767189 - RNA, 19 nt, Artificial Sequence
  Description of Artificial Sequence: Synthetic oligonucleotide
  Sense strand starting at position 3076 of SEQ ID NO: 1562710
caaugaccaugggucuuau

SEQ ID NO: 1767190 - RNA, 19 nt, Artificial Sequence
  Description of Artificial Sequence: Synthetic oligonucleotide
  Antisense strand to SEQ ID NO: 1767189
auaagacccauggucauug

SEQ ID NO: 1767191 - RNA, 19 nt, Artificial Sequence
  Description of Artificial Sequence: Synthetic oligonucleotide
  Sense strand starting at position 3088 of SEQ ID NO: 1562710
gucuuaucccauugagaaa

SEQ ID NO: 1767192 - RNA, 19 nt, Artificial Sequence
  Description of Artificial Sequence: Synthetic oligonucleotide
  Antisense strand to SEQ ID NO: 1767191
uuucucaaugggauaagac

SEQ ID NO: 1767193 - RNA, 19 nt, Artificial Sequence
  Description of Artificial Sequence: Synthetic oligonucleotide
  Sense strand starting at position 3264 of SEQ ID NO: 1562710
cuaaguguggucugggaau

SEQ ID NO: 1767194 - RNA, 19 nt, Artificial Sequence
  Description of Artificial Sequence: Synthetic oligonucleotide
  Antisense strand to SEQ ID NO: 1767193
auucccagaccacacuuag

SEQ ID NO: 1767195 - RNA, 19 nt, Artificial Sequence
  Description of Artificial Sequence: Synthetic oligonucleotide
  Sense strand starting at position 3419 of SEQ ID NO: 1562710
gugauauugcaacaaauug

SEQ ID NO: 1767196 - RNA, 19 nt, Artificial Sequence
  Description of Artificial Sequence: Synthetic oligonucleotide
  Antisense strand to SEQ ID NO: 1767195
caauuuguugcaauaucac

SEQ ID NO: 1767197 - RNA, 19 nt, Artificial Sequence
  Description of Artificial Sequence: Synthetic oligonucleotide
  Sense strand starting at position 3470 of SEQ ID NO: 1562710
uguacuaagccagauguua

SEQ ID NO: 1767198 - RNA, 19 nt, Artificial Sequence
  Description of Artificial Sequence: Synthetic oligonucleotide
  Antisense strand to SEQ ID NO: 1767197
uaacaucuggcuuaguaca

SEQ ID NO: 1767199 - RNA, 19 nt, Artificial Sequence
  Description of Artificial Sequence: Synthetic oligonucleotide
  Sense strand starting at position 3717 of SEQ ID NO: 1562710
aaguuugguccugagauca

SEQ ID NO: 1767200 - RNA, 19 nt, Artificial Sequence
  Description of Artificial Sequence: Synthetic oligonucleotide
  Antisense strand to SEQ ID NO: 1767199
ugaucucaggaccaaacuu

SEQ ID NO: 1767201 - RNA, 19 nt, Artificial Sequence
  Description of Artificial Sequence: Synthetic oligonucleotide
  Sense strand starting at position 3747 of SEQ ID NO: 1562710
guuauucccucucucauga

SEQ ID NO: 1767202 - RNA, 19 nt, Artificial Sequence
  Description of Artificial Sequence: Synthetic oligonucleotide
  Antisense strand to SEQ ID NO: 1767201
ucaugagagagggaauaac

SEQ ID NO: 1767203 - RNA, 19 nt, Artificial Sequence
  Description of Artificial Sequence: Synthetic oligonucleotide
  Sense strand starting at position 3809 of SEQ ID NO: 1562710
cuuggaacaugcucuagua

SEQ ID NO: 1767204 - RNA, 19 nt, Artificial Sequence
  Description of Artificial Sequence: Synthetic oligonucleotide
  Antisense strand to SEQ ID NO: 1767203
uacuagagcauguuccaag

SEQ ID NO: 1767205 - RNA, 19 nt, Artificial Sequence
  Description of Artificial Sequence: Synthetic oligonucleotide
  Sense strand starting at position 3848 of SEQ ID NO: 1562710
aauagaugaucuucugguu

SEQ ID NO: 1767206 - RNA, 19 nt, Artificial Sequence
  Description of Artificial Sequence: Synthetic oligonucleotide
  Antisense strand to SEQ ID NO: 1767205
aaccagaagaucaucuauu

SEQ ID NO: 1767207 - RNA, 19 nt, Artificial Sequence
  Description of Artificial Sequence: Synthetic oligonucleotide
  Sense strand starting at position 3905 of SEQ ID NO: 1562710
aguagagcugucuauacau

SEQ ID NO: 1767208 - RNA, 19 nt, Artificial Sequence
  Description of Artificial Sequence: Synthetic oligonucleotide
  Antisense strand to SEQ ID NO: 1767207
auguauagacagcucuacu

SEQ ID NO: 1767209 - RNA, 19 nt, Artificial Sequence
  Description of Artificial Sequence: Synthetic oligonucleotide
  Sense strand starting at position 11 of SEQ ID NO: 1562711
ccaacaauccugugaggua

SEQ ID NO: 1767210 - RNA, 19 nt, Artificial Sequence
  Description of Artificial Sequence: Synthetic oligonucleotide
  Antisense strand to SEQ ID NO: 1767209
uaccucacaggauuguugg

SEQ ID NO: 1767211 - RNA, 19 nt, Artificial Sequence
  Description of Artificial Sequence: Synthetic oligonucleotide
  Sense strand starting at position 42 of SEQ ID NO: 1562711
auccgcacucuccagauaa

SEQ ID NO: 1767212 - RNA, 19 nt, Artificial Sequence
  Description of Artificial Sequence: Synthetic oligonucleotide
  Antisense strand to SEQ ID NO: 1767211
uuaucuggagagugcggau

SEQ ID NO: 1767213 - RNA, 19 nt, Artificial Sequence
  Description of Artificial Sequence: Synthetic oligonucleotide
  Sense strand starting at position 44 of SEQ ID NO: 1562711
ccgcacucuccagauaaga

SEQ ID NO: 1767214 - RNA, 19 nt, Artificial Sequence
  Description of Artificial Sequence: Synthetic oligonucleotide
  Antisense strand to SEQ ID NO: 1767213
ucuuaucuggagagugcgg

SEQ ID NO: 1767215 - RNA, 19 nt, Artificial Sequence
  Description of Artificial Sequence: Synthetic oligonucleotide
  Sense strand starting at position 101 of SEQ ID NO: 1562711
ugaaaugcuaguggaugaa

SEQ ID NO: 1767216 - RNA, 19 nt, Artificial Sequence
  Description of Artificial Sequence: Synthetic oligonucleotide
  Antisense strand to SEQ ID NO: 1767215
uucauccacuagcauuuca

SEQ ID NO: 1767217 - RNA, 19 nt, Artificial Sequence
  Description of Artificial Sequence: Synthetic oligonucleotide
  Sense strand starting at position 148 of SEQ ID NO: 1562711
gagucugcacucugcauaa

SEQ ID NO: 1767218 - RNA, 19 nt, Artificial Sequence
  Description of Artificial Sequence: Synthetic oligonucleotide
  Antisense strand to SEQ ID NO: 1767217
uuaugcagagugcagacuc

SEQ ID NO: 1767219 - RNA, 19 nt, Artificial Sequence
  Description of Artificial Sequence: Synthetic oligonucleotide
  Sense strand starting at position 694 of SEQ ID NO: 1562711
agaugacauuugggugaca

SEQ ID NO: 1767220 - RNA, 19 nt, Artificial Sequence
  Description of Artificial Sequence: Synthetic oligonucleotide
  Antisense strand to SEQ ID NO: 1767219
ugucacccaaaugucaucu

SEQ ID NO: 1767221 - RNA, 19 nt, Artificial Sequence
  Description of Artificial Sequence: Synthetic oligonucleotide
  Sense strand starting at position 832 of SEQ ID NO: 1562711
cguguuaggcccuauacca

SEQ ID NO: 1767222 - RNA, 19 nt, Artificial Sequence
  Description of Artificial Sequence: Synthetic oligonucleotide
  Antisense strand to SEQ ID NO: 1767221
ugguauagggccuaacacg

SEQ ID NO: 1767223 - RNA, 19 nt, Artificial Sequence
  Description of Artificial Sequence: Synthetic oligonucleotide
  Sense strand starting at position 839 of SEQ ID NO: 1562711
ggcccuauaccagauaauu

SEQ ID NO: 1767224 - RNA, 19 nt, Artificial Sequence
  Description of Artificial Sequence: Synthetic oligonucleotide
  Antisense strand to SEQ ID NO: 1767223
aauuaucugguauagggcc

SEQ ID NO: 1767225 - RNA, 19 nt, Artificial Sequence
  Description of Artificial Sequence: Synthetic oligonucleotide
  Sense strand starting at position 1165 of SEQ ID NO: 1562711
augagauacccuggcuuua

SEQ ID NO: 1767226 - RNA, 19 nt, Artificial Sequence
  Description of Artificial Sequence: Synthetic oligonucleotide
  Antisense strand to SEQ ID NO: 1767225
uaaagccaggguaucucau

SEQ ID NO: 1767227 - RNA, 19 nt, Artificial Sequence
  Description of Artificial Sequence: Synthetic oligonucleotide
  Sense strand starting at position 1249 of SEQ ID NO: 1562711
cgaaguaacagcuguacua

SEQ ID NO: 1767228 - RNA, 19 nt, Artificial Sequence
  Description of Artificial Sequence: Synthetic oligonucleotide
  Antisense strand to SEQ ID NO: 1767227
uaguacagcuguuacuucg

SEQ ID NO: 1767229 - RNA, 19 nt, Artificial Sequence
  Description of Artificial Sequence: Synthetic oligonucleotide
  Sense strand starting at position 1444 of SEQ ID NO: 1562711
accuaugcacugugaauuc

SEQ ID NO: 1767230 - RNA, 19 nt, Artificial Sequence
  Description of Artificial Sequence: Synthetic oligonucleotide
  Antisense strand to SEQ ID NO: 1767229
gaauucacagugcauaggu

SEQ ID NO: 1767231 - RNA, 19 nt, Artificial Sequence
  Description of Artificial Sequence: Synthetic oligonucleotide
  Sense strand starting at position 1455 of SEQ ID NO: 1562711
gugaauuccuaagaacagg

SEQ ID NO: 1767232 - RNA, 19 nt, Artificial Sequence
  Description of Artificial Sequence: Synthetic oligonucleotide
  Antisense strand to SEQ ID NO: 1767231
ccuguucuuaggaauucac

SEQ ID NO: 1767233 - RNA, 19 nt, Artificial Sequence
  Description of Artificial Sequence: Synthetic oligonucleotide
  Sense strand starting at position 1541 of SEQ ID NO: 1562711
ucagaaagacuuuguuguu

SEQ ID NO: 1767234 - RNA, 19 nt, Artificial Sequence
  Description of Artificial Sequence: Synthetic oligonucleotide
  Antisense strand to SEQ ID NO: 1767233
aacaacaaagucuuucuga

SEQ ID NO: 1767235 - RNA, 19 nt, Artificial Sequence
  Description of Artificial Sequence: Synthetic oligonucleotide
  Sense strand starting at position 1542 of SEQ ID NO: 1562711
cagaaagacuuuguuguua

SEQ ID NO: 1767236 - RNA, 19 nt, Artificial Sequence
  Description of Artificial Sequence: Synthetic oligonucleotide
  Antisense strand to SEQ ID NO: 1767235
uaacaacaaagucuuucug

SEQ ID NO: 1767237 - RNA, 19 nt, Artificial Sequence
  Description of Artificial Sequence: Synthetic oligonucleotide
  Sense strand starting at position 1567 of SEQ ID NO: 1562711
cgucuuaacccaggugagu

SEQ ID NO: 1767238 - RNA, 19 nt, Artificial Sequence
  Description of Artificial Sequence: Synthetic oligonucleotide
  Antisense strand to SEQ ID NO: 1767237
acucaccuggguuaagacg

SEQ ID NO: 1767239 - RNA, 19 nt, Artificial Sequence
  Description of Artificial Sequence: Synthetic oligonucleotide
  Sense strand starting at position 1578 of SEQ ID NO: 1562711
aggugaguuaagugacaau

SEQ ID NO: 1767240 - RNA, 19 nt, Artificial Sequence
  Description of Artificial Sequence: Synthetic oligonucleotide
  Antisense strand to SEQ ID NO: 1767239
auugucacuuaacucaccu

SEQ ID NO: 1767241 - RNA, 19 nt, Artificial Sequence
  Description of Artificial Sequence: Synthetic oligonucleotide
  Sense strand starting at position 1581 of SEQ ID NO: 1562711
ugaguuaagugacaaucaa

SEQ ID NO: 1767242 - RNA, 19 nt, Artificial Sequence
  Description of Artificial Sequence: Synthetic oligonucleotide
  Antisense strand to SEQ ID NO: 1767241
uugauugucacuuaacuca

SEQ ID NO: 1767243 - RNA, 19 nt, Artificial Sequence
  Description of Artificial Sequence: Synthetic oligonucleotide
  Sense strand starting at position 1658 of SEQ ID NO: 1562711
ucgugucccgcguucagua

SEQ ID NO: 1767244 - RNA, 19 nt, Artificial Sequence
  Description of Artificial Sequence: Synthetic oligonucleotide
  Antisense strand to SEQ ID NO: 1767243
uacugaacgcgggacacga

SEQ ID NO: 1767245 - RNA, 19 nt, Artificial Sequence
  Description of Artificial Sequence: Synthetic oligonucleotide
  Sense strand starting at position 1815 of SEQ ID NO: 1562711
gccgcaggaaccuaugaaa

SEQ ID NO: 1767246 - RNA, 19 nt, Artificial Sequence
  Description of Artificial Sequence: Synthetic oligonucleotide
  Antisense strand to SEQ ID NO: 1767245
uuucauagguuccugcggc

SEQ ID NO: 1767247 - RNA, 19 nt, Artificial Sequence
  Description of Artificial Sequence: Synthetic oligonucleotide
  Sense strand starting at position 2108 of SEQ ID NO: 1562711
agacgcgagaggugugauu

SEQ ID NO: 1767248 - RNA, 19 nt, Artificial Sequence
  Description of Artificial Sequence: Synthetic oligonucleotide
  Antisense strand to SEQ ID NO: 1767247
aaucacaccucucgcgucu

SEQ ID NO: 1767249 - RNA, 19 nt, Artificial Sequence
  Description of Artificial Sequence: Synthetic oligonucleotide
  Sense strand starting at position 2115 of SEQ ID NO: 1562711
agaggugugauuggcacua

SEQ ID NO: 1767250 - RNA, 19 nt, Artificial Sequence
  Description of Artificial Sequence: Synthetic oligonucleotide
  Antisense strand to SEQ ID NO: 1767249
uagugccaaucacaccucu

SEQ ID NO: 1767251 - RNA, 19 nt, Artificial Sequence
  Description of Artificial Sequence: Synthetic oligonucleotide
  Sense strand starting at position 2120 of SEQ ID NO: 1562711
ugugauuggcacuacguca

SEQ ID NO: 1767252 - RNA, 19 nt, Artificial Sequence
  Description of Artificial Sequence: Synthetic oligonucleotide
  Antisense strand to SEQ ID NO: 1767251
ugacguagugccaaucaca

SEQ ID NO: 1767253 - RNA, 19 nt, Artificial Sequence
  Description of Artificial Sequence: Synthetic oligonucleotide
  Sense strand starting at position 2164 of SEQ ID NO: 1562711
gggcguucaucacugaaac

SEQ ID NO: 1767254 - RNA, 19 nt, Artificial Sequence
  Description of Artificial Sequence: Synthetic oligonucleotide
  Antisense strand to SEQ ID NO: 1767253
guuucagugaugaacgccc

SEQ ID NO: 1767255 - RNA, 19 nt, Artificial Sequence
  Description of Artificial Sequence: Synthetic oligonucleotide
  Sense strand starting at position 2226 of SEQ ID NO: 1562711
gcccuucugugucccacaa

SEQ ID NO: 1767256 - RNA, 19 nt, Artificial Sequence
  Description of Artificial Sequence: Synthetic oligonucleotide
  Antisense strand to SEQ ID NO: 1767255
uugugggacacagaagggc

SEQ ID NO: 1767257 - RNA, 19 nt, Artificial Sequence
  Description of Artificial Sequence: Synthetic oligonucleotide
  Sense strand starting at position 2303 of SEQ ID NO: 1562711
guucuaccugccugcuuaa

SEQ ID NO: 1767258 - RNA, 19 nt, Artificial Sequence
  Description of Artificial Sequence: Synthetic oligonucleotide
  Antisense strand to SEQ ID NO: 1767257
uuaagcaggcagguagaac

SEQ ID NO: 1767259 - RNA, 19 nt, Artificial Sequence
  Description of Artificial Sequence: Synthetic oligonucleotide
  Sense strand starting at position 2352 of SEQ ID NO: 1562711
gugucuuaggcgguccuua

SEQ ID NO: 1767260 - RNA, 19 nt, Artificial Sequence
  Description of Artificial Sequence: Synthetic oligonucleotide
  Antisense strand to SEQ ID NO: 1767259
uaaggaccgccuaagacac

SEQ ID NO: 1767261 - RNA, 19 nt, Artificial Sequence
  Description of Artificial Sequence: Synthetic oligonucleotide
  Sense strand starting at position 2383 of SEQ ID NO: 1562711
cgccuuuauaguuguggaa

SEQ ID NO: 1767262 - RNA, 19 nt, Artificial Sequence
  Description of Artificial Sequence: Synthetic oligonucleotide
  Antisense strand to SEQ ID NO: 1767261
uuccacaacuauaaaggcg

SEQ ID NO: 1767263 - RNA, 19 nt, Artificial Sequence
  Description of Artificial Sequence: Synthetic oligonucleotide
  Sense strand starting at position 2421 of SEQ ID NO: 1562711
aagugaccugccuagauca

SEQ ID NO: 1767264 - RNA, 19 nt, Artificial Sequence
  Description of Artificial Sequence: Synthetic oligonucleotide
  Antisense strand to SEQ ID NO: 1767263
ugaucuaggcaggucacuu

SEQ ID NO: 1767265 - RNA, 19 nt, Artificial Sequence
  Description of Artificial Sequence: Synthetic oligonucleotide
  Sense strand starting at position 2423 of SEQ ID NO: 1562711
gugaccugccuagaucaga

SEQ ID NO: 1767266 - RNA, 19 nt, Artificial Sequence
  Description of Artificial Sequence: Synthetic oligonucleotide
  Antisense strand to SEQ ID NO: 1767265
ucugaucuaggcaggucac

SEQ ID NO: 1767267 - RNA, 19 nt, Artificial Sequence
  Description of Artificial Sequence: Synthetic oligonucleotide
  Sense strand starting at position 2431 of SEQ ID NO: 1562711
ccuagaucagacuguuagu

SEQ ID NO: 1767268 - RNA, 19 nt, Artificial Sequence
  Description of Artificial Sequence: Synthetic oligonucleotide
  Antisense strand to SEQ ID NO: 1767267
acuaacagucugaucuagg

SEQ ID NO: 1767269 - RNA, 19 nt, Artificial Sequence
  Description of Artificial Sequence: Synthetic oligonucleotide
  Sense strand starting at position 2454 of SEQ ID NO: 1562711
gguucuaaccgccagaguu

SEQ ID NO: 1767270 - RNA, 19 nt, Artificial Sequence
  Description of Artificial Sequence: Synthetic oligonucleotide
  Antisense strand to SEQ ID NO: 1767269
aacucuggcgguuagaacc

SEQ ID NO: 1767271 - RNA, 19 nt, Artificial Sequence
  Description of Artificial Sequence: Synthetic oligonucleotide
  Sense strand starting at position 2619 of SEQ ID NO: 1562711
acccucgacuucucaggua

SEQ ID NO: 1767272 - RNA, 19 nt, Artificial Sequence
  Description of Artificial Sequence: Synthetic oligonucleotide
  Antisense strand to SEQ ID NO: 1767271
uaccugagaagucgagggu

SEQ ID NO: 1767273 - RNA, 19 nt, Artificial Sequence
  Description of Artificial Sequence: Synthetic oligonucleotide
  Sense strand starting at position 3457 of SEQ ID NO: 1562711
uuugauagauuauacggau

SEQ ID NO: 1767274 - RNA, 19 nt, Artificial Sequence
  Description of Artificial Sequence: Synthetic oligonucleotide
  Antisense strand to SEQ ID NO: 1767273
auccguauaaucuaucaaa

SEQ ID NO: 1767275 - RNA, 19 nt, Artificial Sequence
  Description of Artificial Sequence: Synthetic oligonucleotide
  Sense strand starting at position 3463 of SEQ ID NO: 1562711
agauuauacggauauguuu

SEQ ID NO: 1767276 - RNA, 19 nt, Artificial Sequence
  Description of Artificial Sequence: Synthetic oligonucleotide
  Antisense strand to SEQ ID NO: 1767275
aaacauauccguauaaucu

SEQ ID NO: 1767277 - RNA, 19 nt, Artificial Sequence
  Description of Artificial Sequence: Synthetic oligonucleotide
  Sense strand starting at position 3537 of SEQ ID NO: 1562711
acugcuuuacuacaguaga

SEQ ID NO: 1767278 - RNA, 19 nt, Artificial Sequence
  Description of Artificial Sequence: Synthetic oligonucleotide
  Antisense strand to SEQ ID NO: 1767277
ucuacuguaguaaagcagu

SEQ ID NO: 1767279 - RNA, 19 nt, Artificial Sequence
  Description of Artificial Sequence: Synthetic oligonucleotide
  Sense strand starting at position 3540 of SEQ ID NO: 1562711
gcuuuacuacaguagauaa

SEQ ID NO: 1767280 - RNA, 19 nt, Artificial Sequence
  Description of Artificial Sequence: Synthetic oligonucleotide
  Antisense strand to SEQ ID NO: 1767279
uuaucuacuguaguaaagc

SEQ ID NO: 1767281 - RNA, 19 nt, Artificial Sequence
  Description of Artificial Sequence: Synthetic oligonucleotide
  Sense strand starting at position 3602 of SEQ ID NO: 1562711
uggugucuuucuuucggaa

SEQ ID NO: 1767282 - RNA, 19 nt, Artificial Sequence
  Description of Artificial Sequence: Synthetic oligonucleotide
  Antisense strand to SEQ ID NO: 1767281
uuccgaaagaaagacacca

SEQ ID NO: 1767283 - RNA, 19 nt, Artificial Sequence
  Description of Artificial Sequence: Synthetic oligonucleotide
  Sense strand starting at position 3633 of SEQ ID NO: 1562711
gaaagauaaucugagggca

SEQ ID NO: 1767284 - RNA, 19 nt, Artificial Sequence
  Description of Artificial Sequence: Synthetic oligonucleotide
  Antisense strand to SEQ ID NO: 1767283
ugcccucagauuaucuuuc

SEQ ID NO: 1767285 - RNA, 19 nt, Artificial Sequence
  Description of Artificial Sequence: Synthetic oligonucleotide
  Sense strand starting at position 3705 of SEQ ID NO: 1562711
ccuaguaugucuccuuuau

SEQ ID NO: 1767286 - RNA, 19 nt, Artificial Sequence
  Description of Artificial Sequence: Synthetic oligonucleotide
  Antisense strand to SEQ ID NO: 1767285
auaaaggagacauacuagg

SEQ ID NO: 1767287 - RNA, 19 nt, Artificial Sequence
  Description of Artificial Sequence: Synthetic oligonucleotide
  Sense strand starting at position 3709 of SEQ ID NO: 1562711
guaugucuccuuuauuaga

SEQ ID NO: 1767288 - RNA, 19 nt, Artificial Sequence
  Description of Artificial Sequence: Synthetic oligonucleotide
  Antisense strand to SEQ ID NO: 1767287
ucuaauaaaggagacauac

SEQ ID NO: 1767289 - RNA, 19 nt, Artificial Sequence
  Description of Artificial Sequence: Synthetic oligonucleotide
  Sense strand starting at position 84 of SEQ ID NO: 1562712
uuuggaucuccuggagguu

SEQ ID NO: 1767290 - RNA, 19 nt, Artificial Sequence
  Description of Artificial Sequence: Synthetic oligonucleotide
  Antisense strand to SEQ ID NO: 1767289
aaccuccaggagauccaaa

SEQ ID NO: 1767291 - RNA, 19 nt, Artificial Sequence
  Description of Artificial Sequence: Synthetic oligonucleotide
  Sense strand starting at position 177 of SEQ ID NO: 1562712
aaacucaggucugcguaaa

SEQ ID NO: 1767292 - RNA, 19 nt, Artificial Sequence
  Description of Artificial Sequence: Synthetic oligonucleotide
  Antisense strand to SEQ ID NO: 1767291
uuuacgcagaccugaguuu

SEQ ID NO: 1767293 - RNA, 19 nt, Artificial Sequence
  Description of Artificial Sequence: Synthetic oligonucleotide
  Sense strand starting at position 203 of SEQ ID NO: 1562712
uuugaauacucagagauac

SEQ ID NO: 1767294 - RNA, 19 nt, Artificial Sequence
  Description of Artificial Sequence: Synthetic oligonucleotide
  Antisense strand to SEQ ID NO: 1767293
guaucucugaguauucaaa

SEQ ID NO: 1767295 - RNA, 19 nt, Artificial Sequence
  Description of Artificial Sequence: Synthetic oligonucleotide
  Sense strand starting at position 338 of SEQ ID NO: 1562712
ucaggaaucucgucugucu

SEQ ID NO: 1767296 - RNA, 19 nt, Artificial Sequence
  Description of Artificial Sequence: Synthetic oligonucleotide
  Antisense strand to SEQ ID NO: 1767295
agacagacgagauuccuga

SEQ ID NO: 1767297 - RNA, 19 nt, Artificial Sequence
  Description of Artificial Sequence: Synthetic oligonucleotide
  Sense strand starting at position 350 of SEQ ID NO: 1562712
ucugucuuguacucagaca

SEQ ID NO: 1767298 - RNA, 19 nt, Artificial Sequence
  Description of Artificial Sequence: Synthetic oligonucleotide
  Antisense strand to SEQ ID NO: 1767297
ugucugaguacaagacaga

SEQ ID NO: 1767299 - RNA, 19 nt, Artificial Sequence
  Description of Artificial Sequence: Synthetic oligonucleotide
  Sense strand starting at position 419 of SEQ ID NO: 1562712
guuggaaaguaagugguaa

SEQ ID NO: 1767300 - RNA, 19 nt, Artificial Sequence
  Description of Artificial Sequence: Synthetic oligonucleotide
  Antisense strand to SEQ ID NO: 1767299
uuaccacuuacuuuccaac

SEQ ID NO: 1767301 - RNA, 19 nt, Artificial Sequence
  Description of Artificial Sequence: Synthetic oligonucleotide
  Sense strand starting at position 421 of SEQ ID NO: 1562712
uggaaaguaagugguaaca

SEQ ID NO: 1767302 - RNA, 19 nt, Artificial Sequence
  Description of Artificial Sequence: Synthetic oligonucleotide
  Antisense strand to SEQ ID NO: 1767301
uguuaccacuuacuuucca

SEQ ID NO: 1767303 - RNA, 19 nt, Artificial Sequence
  Description of Artificial Sequence: Synthetic oligonucleotide
  Sense strand starting at position 430 of SEQ ID NO: 1562712
agugguaacagguacuuaa

SEQ ID NO: 1767304 - RNA, 19 nt, Artificial Sequence
  Description of Artificial Sequence: Synthetic oligonucleotide
  Antisense strand to SEQ ID NO: 1767303
uuaaguaccuguuaccacu

SEQ ID NO: 1767305 - RNA, 19 nt, Artificial Sequence
  Description of Artificial Sequence: Synthetic oligonucleotide
  Sense strand starting at position 433 of SEQ ID NO: 1562712
gguaacagguacuuaauau

SEQ ID NO: 1767306 - RNA, 19 nt, Artificial Sequence
  Description of Artificial Sequence: Synthetic oligonucleotide
  Antisense strand to SEQ ID NO: 1767305
auauuaaguaccuguuacc

SEQ ID NO: 1767307 - RNA, 19 nt, Artificial Sequence
  Description of Artificial Sequence: Synthetic oligonucleotide
  Sense strand starting at position 481 of SEQ ID NO: 1562712
auauaugacugugccaagu

SEQ ID NO: 1767308 - RNA, 19 nt, Artificial Sequence
  Description of Artificial Sequence: Synthetic oligonucleotide
  Antisense strand to SEQ ID NO: 1767307
acuuggcacagucauauau

SEQ ID NO: 1767309 - RNA, 19 nt, Artificial Sequence
  Description of Artificial Sequence: Synthetic oligonucleotide
  Sense strand starting at position 683 of SEQ ID NO: 1562712
ucgggcuugguuugaauua

SEQ ID NO: 1767310 - RNA, 19 nt, Artificial Sequence
  Description of Artificial Sequence: Synthetic oligonucleotide
  Antisense strand to SEQ ID NO: 1767309
uaauucaaaccaagcccga

SEQ ID NO: 1767311 - RNA, 19 nt, Artificial Sequence
  Description of Artificial Sequence: Synthetic oligonucleotide
  Sense strand starting at position 928 of SEQ ID NO: 1562712
agaacuacugcuugaacga

SEQ ID NO: 1767312 - RNA, 19 nt, Artificial Sequence
  Description of Artificial Sequence: Synthetic oligonucleotide
  Antisense strand to SEQ ID NO: 1767311
ucguucaagcaguaguucu

SEQ ID NO: 1767313 - RNA, 19 nt, Artificial Sequence
  Description of Artificial Sequence: Synthetic oligonucleotide
  Sense strand starting at position 1064 of SEQ ID NO: 1562712
uggcuaauaguuuacacaa

SEQ ID NO: 1767314 - RNA, 19 nt, Artificial Sequence
  Description of Artificial Sequence: Synthetic oligonucleotide
  Antisense strand to SEQ ID NO: 1767313
uuguguaaacuauuagcca

SEQ ID NO: 1767315 - RNA, 19 nt, Artificial Sequence
  Description of Artificial Sequence: Synthetic oligonucleotide
  Sense strand starting at position 1085 of SEQ ID NO: 1562712
aaaccauagccagguaagu

SEQ ID NO: 1767316 - RNA, 19 nt, Artificial Sequence
  Description of Artificial Sequence: Synthetic oligonucleotide
  Antisense strand to SEQ ID NO: 1767315
acuuaccuggcuaugguuu

SEQ ID NO: 1767317 - RNA, 19 nt, Artificial Sequence
  Description of Artificial Sequence: Synthetic oligonucleotide
  Sense strand starting at position 1146 of SEQ ID NO: 1562712
cugguuuauuaggcuuuau

SEQ ID NO: 1767318 - RNA, 19 nt, Artificial Sequence
  Description of Artificial Sequence: Synthetic oligonucleotide
  Antisense strand to SEQ ID NO: 1767317
auaaagccuaauaaaccag

SEQ ID NO: 1767319 - RNA, 19 nt, Artificial Sequence
  Description of Artificial Sequence: Synthetic oligonucleotide
  Sense strand starting at position 1184 of SEQ ID NO: 1562712
gcuaaugacugacuccaaa

SEQ ID NO: 1767320 - RNA, 19 nt, Artificial Sequence
  Description of Artificial Sequence: Synthetic oligonucleotide
  Antisense strand to SEQ ID NO: 1767319
uuuggagucagucauuagc

SEQ ID NO: 1767321 - RNA, 19 nt, Artificial Sequence
  Description of Artificial Sequence: Synthetic oligonucleotide
  Sense strand starting at position 1232 of SEQ ID NO: 1562712
ccugucagagcugguucua

SEQ ID NO: 1767322 - RNA, 19 nt, Artificial Sequence
  Description of Artificial Sequence: Synthetic oligonucleotide
  Antisense strand to SEQ ID NO: 1767321
uagaaccagcucugacagg

SEQ ID NO: 1767323 - RNA, 19 nt, Artificial Sequence
  Description of Artificial Sequence: Synthetic oligonucleotide
  Sense strand starting at position 1263 of SEQ ID NO: 1562712
ggaacugaucccuacgagu

SEQ ID NO: 1767324 - RNA, 19 nt, Artificial Sequence
  Description of Artificial Sequence: Synthetic oligonucleotide
  Antisense strand to SEQ ID NO: 1767323
acucguagggaucaguucc

SEQ ID NO: 1767325 - RNA, 19 nt, Artificial Sequence
  Description of Artificial Sequence: Synthetic oligonucleotide
  Sense strand starting at position 1265 of SEQ ID NO: 1562712
aacugaucccuacgaguac

SEQ ID NO: 1767326 - RNA, 19 nt, Artificial Sequence
  Description of Artificial Sequence: Synthetic oligonucleotide
  Antisense strand to SEQ ID NO: 1767325
guacucguagggaucaguu

SEQ ID NO: 1767327 - RNA, 19 nt, Artificial Sequence
  Description of Artificial Sequence: Synthetic oligonucleotide
  Sense strand starting at position 1277 of SEQ ID NO: 1562712
cgaguacucagccagccua

SEQ ID NO: 1767328 - RNA, 19 nt, Artificial Sequence
  Description of Artificial Sequence: Synthetic oligonucleotide
  Antisense strand to SEQ ID NO: 1767327
uaggcuggcugaguacucg

SEQ ID NO: 1767329 - RNA, 19 nt, Artificial Sequence
  Description of Artificial Sequence: Synthetic oligonucleotide
  Sense strand starting at position 1389 of SEQ ID NO: 1562712
ccgccaagucgugaauuca

SEQ ID NO: 1767330 - RNA, 19 nt, Artificial Sequence
  Description of Artificial Sequence: Synthetic oligonucleotide
  Antisense strand to SEQ ID NO: 1767329
ugaauucacgacuuggcgg

SEQ ID NO: 1767331 - RNA, 19 nt, Artificial Sequence
  Description of Artificial Sequence: Synthetic oligonucleotide
  Sense strand starting at position 1410 of SEQ ID NO: 1562712
acgcucauccuagagucua

SEQ ID NO: 1767332 - RNA, 19 nt, Artificial Sequence
  Description of Artificial Sequence: Synthetic oligonucleotide
  Antisense strand to SEQ ID NO: 1767331
uagacucuaggaugagcgu

SEQ ID NO: 1767333 - RNA, 19 nt, Artificial Sequence
  Description of Artificial Sequence: Synthetic oligonucleotide
  Sense strand starting at position 1446 of SEQ ID NO: 1562712
uaaggauacagaggcgaau

SEQ ID NO: 1767334 - RNA, 19 nt, Artificial Sequence
  Description of Artificial Sequence: Synthetic oligonucleotide
  Antisense strand to SEQ ID NO: 1767333
auucgccucuguauccuua

SEQ ID NO: 1767335 - RNA, 19 nt, Artificial Sequence
  Description of Artificial Sequence: Synthetic oligonucleotide
  Sense strand starting at position 1490 of SEQ ID NO: 1562712
acucacacgccuuagagaa

SEQ ID NO: 1767336 - RNA, 19 nt, Artificial Sequence
  Description of Artificial Sequence: Synthetic oligonucleotide
  Antisense strand to SEQ ID NO: 1767335
uucucuaaggcgugugagu

SEQ ID NO: 1767337 - RNA, 19 nt, Artificial Sequence
  Description of Artificial Sequence: Synthetic oligonucleotide
  Sense strand starting at position 1537 of SEQ ID NO: 1562712
caacauuacgggugcaaug

SEQ ID NO: 1767338 - RNA, 19 nt, Artificial Sequence
  Description of Artificial Sequence: Synthetic oligonucleotide
  Antisense strand to SEQ ID NO: 1767337
cauugcacccguaauguug

SEQ ID NO: 1767339 - RNA, 19 nt, Artificial Sequence
  Description of Artificial Sequence: Synthetic oligonucleotide
  Sense strand starting at position 2384 of SEQ ID NO: 1562712
gguuacaaguagccugaau

SEQ ID NO: 1767340 - RNA, 19 nt, Artificial Sequence
  Description of Artificial Sequence: Synthetic oligonucleotide
  Antisense strand to SEQ ID NO: 1767339
auucaggcuacuuguaacc

SEQ ID NO: 1767341 - RNA, 19 nt, Artificial Sequence
  Description of Artificial Sequence: Synthetic oligonucleotide
  Sense strand starting at position 2445 of SEQ ID NO: 1562712
auaauagugguguagauuc

SEQ ID NO: 1767342 - RNA, 19 nt, Artificial Sequence
  Description of Artificial Sequence: Synthetic oligonucleotide
  Antisense strand to SEQ ID NO: 1767341
gaaucuacaccacuauuau

SEQ ID NO: 1767343 - RNA, 19 nt, Artificial Sequence
  Description of Artificial Sequence: Synthetic oligonucleotide
  Sense strand starting at position 2542 of SEQ ID NO: 1562712
ggcuucucgcgugaaggaa

SEQ ID NO: 1767344 - RNA, 19 nt, Artificial Sequence
  Description of Artificial Sequence: Synthetic oligonucleotide
  Antisense strand to SEQ ID NO: 1767343
uuccuucacgcgagaagcc

SEQ ID NO: 1767345 - RNA, 19 nt, Artificial Sequence
  Description of Artificial Sequence: Synthetic oligonucleotide
  Sense strand starting at position 2584 of SEQ ID NO: 1562712
gauuuaguuguaggcgguu

SEQ ID NO: 1767346 - RNA, 19 nt, Artificial Sequence
  Description of Artificial Sequence: Synthetic oligonucleotide
  Antisense strand to SEQ ID NO: 1767345
aaccgccuacaacuaaauc

SEQ ID NO: 1767347 - RNA, 19 nt, Artificial Sequence
  Description of Artificial Sequence: Synthetic oligonucleotide
  Sense strand starting at position 2604 of SEQ ID NO: 1562712
gccugcagcgaguaaauua

SEQ ID NO: 1767348 - RNA, 19 nt, Artificial Sequence
  Description of Artificial Sequence: Synthetic oligonucleotide
  Antisense strand to SEQ ID NO: 1767347
uaauuuacucgcugcaggc

SEQ ID NO: 1767349 - RNA, 19 nt, Artificial Sequence
  Description of Artificial Sequence: Synthetic oligonucleotide
  Sense strand starting at position 2729 of SEQ ID NO: 1562712
gcggguggaugaucugaga

SEQ ID NO: 1767350 - RNA, 19 nt, Artificial Sequence
  Description of Artificial Sequence: Synthetic oligonucleotide
  Antisense strand to SEQ ID NO: 1767349
ucucagaucauccacccgc

SEQ ID NO: 1767351 - RNA, 19 nt, Artificial Sequence
  Description of Artificial Sequence: Synthetic oligonucleotide
  Sense strand starting at position 2823 of SEQ ID NO: 1562712
gguagcguccgccuguaau

SEQ ID NO: 1767352 - RNA, 19 nt, Artificial Sequence
  Description of Artificial Sequence: Synthetic oligonucleotide
  Antisense strand to SEQ ID NO: 1767351
auuacaggcggacgcuacc

SEQ ID NO: 1767353 - RNA, 19 nt, Artificial Sequence
  Description of Artificial Sequence: Synthetic oligonucleotide
  Sense strand starting at position 2984 of SEQ ID NO: 1562712
gagauuuggucccaugcag

SEQ ID NO: 1767354 - RNA, 19 nt, Artificial Sequence
  Description of Artificial Sequence: Synthetic oligonucleotide
  Antisense strand to SEQ ID NO: 1767353
cugcaugggaccaaaucuc

SEQ ID NO: 1767355 - RNA, 19 nt, Artificial Sequence
  Description of Artificial Sequence: Synthetic oligonucleotide
  Sense strand starting at position 3038 of SEQ ID NO: 1562712
ggacauuaaaguuggagca

SEQ ID NO: 1767356 - RNA, 19 nt, Artificial Sequence
  Description of Artificial Sequence: Synthetic oligonucleotide
  Antisense strand to SEQ ID NO: 1767355
ugcuccaacuuuaaugucc

SEQ ID NO: 1767357 - RNA, 19 nt, Artificial Sequence
  Description of Artificial Sequence: Synthetic oligonucleotide
  Sense strand starting at position 3096 of SEQ ID NO: 1562712
ugggcagcucuugaguaca

SEQ ID NO: 1767358 - RNA, 19 nt, Artificial Sequence
  Description of Artificial Sequence: Synthetic oligonucleotide
  Antisense strand to SEQ ID NO: 1767357
uguacucaagagcugccca

SEQ ID NO: 1767359 - RNA, 19 nt, Artificial Sequence
  Description of Artificial Sequence: Synthetic oligonucleotide
  Sense strand starting at position 3182 of SEQ ID NO: 1562712
guguaugagucaaggagag

SEQ ID NO: 1767360 - RNA, 19 nt, Artificial Sequence
  Description of Artificial Sequence: Synthetic oligonucleotide
  Antisense strand to SEQ ID NO: 1767359
cucuccuugacucauacac

SEQ ID NO: 1767361 - RNA, 19 nt, Artificial Sequence
  Description of Artificial Sequence: Synthetic oligonucleotide
  Sense strand starting at position 3270 of SEQ ID NO: 1562712
cugauuugcugugugacca

SEQ ID NO: 1767362 - RNA, 19 nt, Artificial Sequence
  Description of Artificial Sequence: Synthetic oligonucleotide
  Antisense strand to SEQ ID NO: 1767361
uggucacacagcaaaucag

SEQ ID NO: 1767363 - RNA, 19 nt, Artificial Sequence
  Description of Artificial Sequence: Synthetic oligonucleotide
  Sense strand starting at position 3448 of SEQ ID NO: 1562712
ucaggugucugcucugaug

SEQ ID NO: 1767364 - RNA, 19 nt, Artificial Sequence
  Description of Artificial Sequence: Synthetic oligonucleotide
  Antisense strand to SEQ ID NO: 1767363
caucagagcagacaccuga

SEQ ID NO: 1767365 - RNA, 19 nt, Artificial Sequence
  Description of Artificial Sequence: Synthetic oligonucleotide
  Sense strand starting at position 3565 of SEQ ID NO: 1562712
ugacacaaauuuggaaaua

SEQ ID NO: 1767366 - RNA, 19 nt, Artificial Sequence
  Description of Artificial Sequence: Synthetic oligonucleotide
  Antisense strand to SEQ ID NO: 1767365
uauuuccaaauuuguguca

SEQ ID NO: 1767367 - RNA, 19 nt, Artificial Sequence
  Description of Artificial Sequence: Synthetic oligonucleotide
  Sense strand starting at position 3678 of SEQ ID NO: 1562712
ccaacaauguccucauggu

SEQ ID NO: 1767368 - RNA, 19 nt, Artificial Sequence
  Description of Artificial Sequence: Synthetic oligonucleotide
  Antisense strand to SEQ ID NO: 1767367
accaugaggacauuguugg

SEQ ID NO: 1767369 - RNA, 19 nt, Artificial Sequence
  Description of Artificial Sequence: Synthetic oligonucleotide
  Sense strand starting at position 277 of SEQ ID NO: 1562713
auggaugugugcccaacua

SEQ ID NO: 1767370 - RNA, 19 nt, Artificial Sequence
  Description of Artificial Sequence: Synthetic oligonucleotide
  Antisense strand to SEQ ID NO: 1767369
uaguugggcacacauccau

SEQ ID NO: 1767371 - RNA, 19 nt, Artificial Sequence
  Description of Artificial Sequence: Synthetic oligonucleotide
  Sense strand starting at position 503 of SEQ ID NO: 1562713
caguuaucuggacaagcag

SEQ ID NO: 1767372 - RNA, 19 nt, Artificial Sequence
  Description of Artificial Sequence: Synthetic oligonucleotide
  Antisense strand to SEQ ID NO: 1767371
cugcuuguccagauaacug

SEQ ID NO: 1767373 - RNA, 19 nt, Artificial Sequence
  Description of Artificial Sequence: Synthetic oligonucleotide
  Sense strand starting at position 512 of SEQ ID NO: 1562713
ggacaagcaguuuaagcau

SEQ ID NO: 1767374 - RNA, 19 nt, Artificial Sequence
  Description of Artificial Sequence: Synthetic oligonucleotide
  Antisense strand to SEQ ID NO: 1767373
augcuuaaacugcuugucc

SEQ ID NO: 1767375 - RNA, 19 nt, Artificial Sequence
  Description of Artificial Sequence: Synthetic oligonucleotide
  Sense strand starting at position 726 of SEQ ID NO: 1562713
gggcuuuaauccucacagu

SEQ ID NO: 1767376 - RNA, 19 nt, Artificial Sequence
  Description of Artificial Sequence: Synthetic oligonucleotide
  Antisense strand to SEQ ID NO: 1767375
acugugaggauuaaagccc

SEQ ID NO: 1767377 - RNA, 19 nt, Artificial Sequence
  Description of Artificial Sequence: Synthetic oligonucleotide
  Sense strand starting at position 727 of SEQ ID NO: 1562713
ggcuuuaauccucacagua

SEQ ID NO: 1767378 - RNA, 19 nt, Artificial Sequence
  Description of Artificial Sequence: Synthetic oligonucleotide
  Antisense strand to SEQ ID NO: 1767377
uacugugaggauuaaagcc

SEQ ID NO: 1767379 - RNA, 19 nt, Artificial Sequence
  Description of Artificial Sequence: Synthetic oligonucleotide
  Sense strand starting at position 797 of SEQ ID NO: 1562713
aaaguauacugauccgcaa

SEQ ID NO: 1767380 - RNA, 19 nt, Artificial Sequence
  Description of Artificial Sequence: Synthetic oligonucleotide
  Antisense strand to SEQ ID NO: 1767379
uugcggaucaguauacuuu

SEQ ID NO: 1767381 - RNA, 19 nt, Artificial Sequence
  Description of Artificial Sequence: Synthetic oligonucleotide
  Sense strand starting at position 800 of SEQ ID NO: 1562713
guauacugauccgcaauuu

SEQ ID NO: 1767382 - RNA, 19 nt, Artificial Sequence
  Description of Artificial Sequence: Synthetic oligonucleotide
  Antisense strand to SEQ ID NO: 1767381
aaauugcggaucaguauac

SEQ ID NO: 1767383 - RNA, 19 nt, Artificial Sequence
  Description of Artificial Sequence: Synthetic oligonucleotide
  Sense strand starting at position 937 of SEQ ID NO: 1562713
guuaauauuuaguccaugu

SEQ ID NO: 1767384 - RNA, 19 nt, Artificial Sequence
  Description of Artificial Sequence: Synthetic oligonucleotide
  Antisense strand to SEQ ID NO: 1767383
acauggacuaaauauuaac

SEQ ID NO: 1767385 - RNA, 19 nt, Artificial Sequence
  Description of Artificial Sequence: Synthetic oligonucleotide
  Sense strand starting at position 951 of SEQ ID NO: 1562713
cauguagugagucagaaug

SEQ ID NO: 1767386 - RNA, 19 nt, Artificial Sequence
  Description of Artificial Sequence: Synthetic oligonucleotide
  Antisense strand to SEQ ID NO: 1767385
cauucugacucacuacaug

SEQ ID NO: 1767387 - RNA, 19 nt, Artificial Sequence
  Description of Artificial Sequence: Synthetic oligonucleotide
  Sense strand starting at position 975 of SEQ ID NO: 1562713
accacuuaauaggaaugaa

SEQ ID NO: 1767388 - RNA, 19 nt, Artificial Sequence
  Description of Artificial Sequence: Synthetic oligonucleotide
  Antisense strand to SEQ ID NO: 1767387
uucauuccuauuaaguggu

SEQ ID NO: 1767389 - RNA, 19 nt, Artificial Sequence
  Description of Artificial Sequence: Synthetic oligonucleotide
  Sense strand starting at position 1111 of SEQ ID NO: 1562713
aggaaagcaucuccacuuu

SEQ ID NO: 1767390 - RNA, 19 nt, Artificial Sequence
  Description of Artificial Sequence: Synthetic oligonucleotide
  Antisense strand to SEQ ID NO: 1767389
aaaguggagaugcuuuccu

SEQ ID NO: 1767391 - RNA, 19 nt, Artificial Sequence
  Description of Artificial Sequence: Synthetic oligonucleotide
  Sense strand starting at position 1187 of SEQ ID NO: 1562713
ggaagauaaaucggcacaa

SEQ ID NO: 1767392 - RNA, 19 nt, Artificial Sequence
  Description of Artificial Sequence: Synthetic oligonucleotide
  Antisense strand to SEQ ID NO: 1767391
uugugccgauuuaucuucc

SEQ ID NO: 1767393 - RNA, 19 nt, Artificial Sequence
  Description of Artificial Sequence: Synthetic oligonucleotide
  Sense strand starting at position 1206 of SEQ ID NO: 1562713
aauugucaccgagaacagu

SEQ ID NO: 1767394 - RNA, 19 nt, Artificial Sequence
  Description of Artificial Sequence: Synthetic oligonucleotide
  Antisense strand to SEQ ID NO: 1767393
acuguucucggugacaauu

SEQ ID NO: 1767395 - RNA, 19 nt, Artificial Sequence
  Description of Artificial Sequence: Synthetic oligonucleotide
  Sense strand starting at position 1212 of SEQ ID NO: 1562713
caccgagaacaguaaguuu

SEQ ID NO: 1767396 - RNA, 19 nt, Artificial Sequence
  Description of Artificial Sequence: Synthetic oligonucleotide
  Antisense strand to SEQ ID NO: 1767395
aaacuuacuguucucggug

SEQ ID NO: 1767397 - RNA, 19 nt, Artificial Sequence
  Description of Artificial Sequence: Synthetic oligonucleotide
  Sense strand starting at position 1231 of SEQ ID NO: 1562713
ucagaaaucuuggcuguuu

SEQ ID NO: 1767398 - RNA, 19 nt, Artificial Sequence
  Description of Artificial Sequence: Synthetic oligonucleotide
  Antisense strand to SEQ ID NO: 1767397
aaacagccaagauuucuga

SEQ ID NO: 1767399 - RNA, 19 nt, Artificial Sequence
  Description of Artificial Sequence: Synthetic oligonucleotide
  Sense strand starting at position 1232 of SEQ ID NO: 1562713
cagaaaucuuggcuguuuc

SEQ ID NO: 1767400 - RNA, 19 nt, Artificial Sequence
  Description of Artificial Sequence: Synthetic oligonucleotide
  Antisense strand to SEQ ID NO: 1767399
gaaacagccaagauuucug

SEQ ID NO: 1767401 - RNA, 19 nt, Artificial Sequence
  Description of Artificial Sequence: Synthetic oligonucleotide
  Sense strand starting at position 1233 of SEQ ID NO: 1562713
agaaaucuuggcuguuucu

SEQ ID NO: 1767402 - RNA, 19 nt, Artificial Sequence
  Description of Artificial Sequence: Synthetic oligonucleotide
  Antisense strand to SEQ ID NO: 1767401
agaaacagccaagauuucu

SEQ ID NO: 1767403 - RNA, 19 nt, Artificial Sequence
  Description of Artificial Sequence: Synthetic oligonucleotide
  Sense strand starting at position 1342 of SEQ ID NO: 1562713
auagaaucauugguacuca

SEQ ID NO: 1767404 - RNA, 19 nt, Artificial Sequence
  Description of Artificial Sequence: Synthetic oligonucleotide
  Antisense strand to SEQ ID NO: 1767403
ugaguaccaaugauucuau

SEQ ID NO: 1767405 - RNA, 19 nt, Artificial Sequence
  Description of Artificial Sequence: Synthetic oligonucleotide
  Sense strand starting at position 1422 of SEQ ID NO: 1562713
guauauaaccuuuaagcag

SEQ ID NO: 1767406 - RNA, 19 nt, Artificial Sequence
  Description of Artificial Sequence: Synthetic oligonucleotide
  Antisense strand to SEQ ID NO: 1767405
cugcuuaaagguuauauac

SEQ ID NO: 1767407 - RNA, 19 nt, Artificial Sequence
  Description of Artificial Sequence: Synthetic oligonucleotide
  Sense strand starting at position 1528 of SEQ ID NO: 1562713
guagaagacugguuaggcu

SEQ ID NO: 1767408 - RNA, 19 nt, Artificial Sequence
  Description of Artificial Sequence: Synthetic oligonucleotide
  Antisense strand to SEQ ID NO: 1767407
agccuaaccagucuucuac

SEQ ID NO: 1767409 - RNA, 19 nt, Artificial Sequence
  Description of Artificial Sequence: Synthetic oligonucleotide
  Sense strand starting at position 2884 of SEQ ID NO: 1562713
ucuguaaaucuaugaggcu

SEQ ID NO: 1767410 - RNA, 19 nt, Artificial Sequence
  Description of Artificial Sequence: Synthetic oligonucleotide
  Antisense strand to SEQ ID NO: 1767409
agccucauagauuuacaga

SEQ ID NO: 1767411 - RNA, 19 nt, Artificial Sequence
  Description of Artificial Sequence: Synthetic oligonucleotide
  Sense strand starting at position 2931 of SEQ ID NO: 1562713
aagacaaacuugucacgau

SEQ ID NO: 1767412 - RNA, 19 nt, Artificial Sequence
  Description of Artificial Sequence: Synthetic oligonucleotide
  Antisense strand to SEQ ID NO: 1767411
aucgugacaaguuugucuu

SEQ ID NO: 1767413 - RNA, 19 nt, Artificial Sequence
  Description of Artificial Sequence: Synthetic oligonucleotide
  Sense strand starting at position 2951 of SEQ ID NO: 1562713
ggcuuugauagcgauaaag

SEQ ID NO: 1767414 - RNA, 19 nt, Artificial Sequence
  Description of Artificial Sequence: Synthetic oligonucleotide
  Antisense strand to SEQ ID NO: 1767413
cuuuaucgcuaucaaagcc

SEQ ID NO: 1767415 - RNA, 19 nt, Artificial Sequence
  Description of Artificial Sequence: Synthetic oligonucleotide
  Sense strand starting at position 2985 of SEQ ID NO: 1562713
auugaaauguuguuucccu

SEQ ID NO: 1767416 - RNA, 19 nt, Artificial Sequence
  Description of Artificial Sequence: Synthetic oligonucleotide
  Antisense strand to SEQ ID NO: 1767415
agggaaacaacauuucaau

SEQ ID NO: 1767417 - RNA, 19 nt, Artificial Sequence
  Description of Artificial Sequence: Synthetic oligonucleotide
  Sense strand starting at position 3020 of SEQ ID NO: 1562713
guccuuagccugcacagaa

SEQ ID NO: 1767418 - RNA, 19 nt, Artificial Sequence
  Description of Artificial Sequence: Synthetic oligonucleotide
  Antisense strand to SEQ ID NO: 1767417
uucugugcaggcuaaggac

SEQ ID NO: 1767419 - RNA, 19 nt, Artificial Sequence
  Description of Artificial Sequence: Synthetic oligonucleotide
  Sense strand starting at position 3061 of SEQ ID NO: 1562713
gggaaaugagacggcgaau

SEQ ID NO: 1767420 - RNA, 19 nt, Artificial Sequence
  Description of Artificial Sequence: Synthetic oligonucleotide
  Antisense strand to SEQ ID NO: 1767419
auucgccgucucauuuccc

SEQ ID NO: 1767421 - RNA, 19 nt, Artificial Sequence
  Description of Artificial Sequence: Synthetic oligonucleotide
  Sense strand starting at position 3170 of SEQ ID NO: 1562713
gaggaaguccuaugugcug

SEQ ID NO: 1767422 - RNA, 19 nt, Artificial Sequence
  Description of Artificial Sequence: Synthetic oligonucleotide
  Antisense strand to SEQ ID NO: 1767421
cagcacauaggacuuccuc

SEQ ID NO: 1767423 - RNA, 19 nt, Artificial Sequence
  Description of Artificial Sequence: Synthetic oligonucleotide
  Sense strand starting at position 3204 of SEQ ID NO: 1562713
ccauuucugcccuguggua

SEQ ID NO: 1767424 - RNA, 19 nt, Artificial Sequence
  Description of Artificial Sequence: Synthetic oligonucleotide
  Antisense strand to SEQ ID NO: 1767423
uaccacagggcagaaaugg

SEQ ID NO: 1767425 - RNA, 19 nt, Artificial Sequence
  Description of Artificial Sequence: Synthetic oligonucleotide
  Sense strand starting at position 3317 of SEQ ID NO: 1562713
gaggccuacuuuguuggaa

SEQ ID NO: 1767426 - RNA, 19 nt, Artificial Sequence
  Description of Artificial Sequence: Synthetic oligonucleotide
  Antisense strand to SEQ ID NO: 1767425
uuccaacaaaguaggccuc

SEQ ID NO: 1767427 - RNA, 19 nt, Artificial Sequence
  Description of Artificial Sequence: Synthetic oligonucleotide
  Sense strand starting at position 3370 of SEQ ID NO: 1562713
gugagugaccacuaacuca

SEQ ID NO: 1767428 - RNA, 19 nt, Artificial Sequence
  Description of Artificial Sequence: Synthetic oligonucleotide
  Antisense strand to SEQ ID NO: 1767427
ugaguuaguggucacucac

SEQ ID NO: 1767429 - RNA, 19 nt, Artificial Sequence
  Description of Artificial Sequence: Synthetic oligonucleotide
  Sense strand starting at position 3398 of SEQ ID NO: 1562713
uugugaaucuuggcaacag

SEQ ID NO: 1767430 - RNA, 19 nt, Artificial Sequence
  Description of Artificial Sequence: Synthetic oligonucleotide
  Antisense strand to SEQ ID NO: 1767429
cuguugccaagauucacaa

SEQ ID NO: 1767431 - RNA, 19 nt, Artificial Sequence
  Description of Artificial Sequence: Synthetic oligonucleotide
  Sense strand starting at position 3438 of SEQ ID NO: 1562713
ugaauaaaguguguuucuu

SEQ ID NO: 1767432 - RNA, 19 nt, Artificial Sequence
  Description of Artificial Sequence: Synthetic oligonucleotide
  Antisense strand to SEQ ID NO: 1767431
aagaaacacacuuuauuca

SEQ ID NO: 1767433 - RNA, 19 nt, Artificial Sequence
  Description of Artificial Sequence: Synthetic oligonucleotide
  Sense strand starting at position 3540 of SEQ ID NO: 1562713
cuacaagcuauggagaguu

SEQ ID NO: 1767434 - RNA, 19 nt, Artificial Sequence
  Description of Artificial Sequence: Synthetic oligonucleotide
  Antisense strand to SEQ ID NO: 1767433
aacucuccauagcuuguag

SEQ ID NO: 1767435 - RNA, 19 nt, Artificial Sequence
  Description of Artificial Sequence: Synthetic oligonucleotide
  Sense strand starting at position 3548 of SEQ ID NO: 1562713
uauggagaguuagucuauu

SEQ ID NO: 1767436 - RNA, 19 nt, Artificial Sequence
  Description of Artificial Sequence: Synthetic oligonucleotide
  Antisense strand to SEQ ID NO: 1767435
aauagacuaacucuccaua

SEQ ID NO: 1767437 - RNA, 19 nt, Artificial Sequence
  Description of Artificial Sequence: Synthetic oligonucleotide
  Sense strand starting at position 3704 of SEQ ID NO: 1562713
cacguugcaggugauaaua

SEQ ID NO: 1767438 - RNA, 19 nt, Artificial Sequence
  Description of Artificial Sequence: Synthetic oligonucleotide
  Antisense strand to SEQ ID NO: 1767437
uauuaucaccugcaacgug

SEQ ID NO: 1767439 - RNA, 19 nt, Artificial Sequence
  Description of Artificial Sequence: Synthetic oligonucleotide
  Sense strand starting at position 3770 of SEQ ID NO: 1562713
uuccuaaagcugugggaaa

SEQ ID NO: 1767440 - RNA, 19 nt, Artificial Sequence
  Description of Artificial Sequence: Synthetic oligonucleotide
  Antisense strand to SEQ ID NO: 1767439
uuucccacagcuuuaggaa

SEQ ID NO: 1767441 - RNA, 19 nt, Artificial Sequence
  Description of Artificial Sequence: Synthetic oligonucleotide
  Sense strand starting at position 3814 of SEQ ID NO: 1562713
ggagacucccuggaguagu

SEQ ID NO: 1767442 - RNA, 19 nt, Artificial Sequence
  Description of Artificial Sequence: Synthetic oligonucleotide
  Antisense strand to SEQ ID NO: 1767441
acuacuccagggagucucc

SEQ ID NO: 1767443 - RNA, 19 nt, Artificial Sequence
  Description of Artificial Sequence: Synthetic oligonucleotide
  Sense strand starting at position 3939 of SEQ ID NO: 1562713
aagggaucgcaguauaccu

SEQ ID NO: 1767444 - RNA, 19 nt, Artificial Sequence
  Description of Artificial Sequence: Synthetic oligonucleotide
  Antisense strand to SEQ ID NO: 1767443
agguauacugcgaucccuu

SEQ ID NO: 1767445 - RNA, 19 nt, Artificial Sequence
  Description of Artificial Sequence: Synthetic oligonucleotide
  Sense strand starting at position 3964 of SEQ ID NO: 1562713
uaggcuugcagagggaauu

SEQ ID NO: 1767446 - RNA, 19 nt, Artificial Sequence
  Description of Artificial Sequence: Synthetic oligonucleotide
  Antisense strand to SEQ ID NO: 1767445
aauucccucugcaagccua

SEQ ID NO: 1767447 - RNA, 19 nt, Artificial Sequence
  Description of Artificial Sequence: Synthetic oligonucleotide
  Sense strand starting at position 3965 of SEQ ID NO: 1562713
aggcuugcagagggaauua

SEQ ID NO: 1767448 - RNA, 19 nt, Artificial Sequence
  Description of Artificial Sequence: Synthetic oligonucleotide
  Antisense strand to SEQ ID NO: 1767447
uaauucccucugcaagccu

SEQ ID NO: 1767449 - RNA, 19 nt, Artificial Sequence
  Description of Artificial Sequence: Synthetic oligonucleotide
  Sense strand starting at position 176 of SEQ ID NO: 1562714
caguuaucuggacaagcag

SEQ ID NO: 1767450 - RNA, 19 nt, Artificial Sequence
  Description of Artificial Sequence: Synthetic oligonucleotide
  Antisense strand to SEQ ID NO: 1767449
cugcuuguccagauaacug

SEQ ID NO: 1767451 - RNA, 19 nt, Artificial Sequence
  Description of Artificial Sequence: Synthetic oligonucleotide
  Sense strand starting at position 185 of SEQ ID NO: 1562714
ggacaagcaguuuaagcau

SEQ ID NO: 1767452 - RNA, 19 nt, Artificial Sequence
  Description of Artificial Sequence: Synthetic oligonucleotide
  Antisense strand to SEQ ID NO: 1767451
augcuuaaacugcuugucc

SEQ ID NO: 1767453 - RNA, 19 nt, Artificial Sequence
  Description of Artificial Sequence: Synthetic oligonucleotide
  Sense strand starting at position 399 of SEQ ID NO: 1562714
gggcuuuaauccucacagu

SEQ ID NO: 1767454 - RNA, 19 nt, Artificial Sequence
  Description of Artificial Sequence: Synthetic oligonucleotide
  Antisense strand to SEQ ID NO: 1767453
acugugaggauuaaagccc

SEQ ID NO: 1767455 - RNA, 19 nt, Artificial Sequence
  Description of Artificial Sequence: Synthetic oligonucleotide
  Sense strand starting at position 400 of SEQ ID NO: 1562714
ggcuuuaauccucacagua

SEQ ID NO: 1767456 - RNA, 19 nt, Artificial Sequence
  Description of Artificial Sequence: Synthetic oligonucleotide
  Antisense strand to SEQ ID NO: 1767455
uacugugaggauuaaagcc

SEQ ID NO: 1767457 - RNA, 19 nt, Artificial Sequence
  Description of Artificial Sequence: Synthetic oligonucleotide
  Sense strand starting at position 470 of SEQ ID NO: 1562714
aaaguauacugauccgcaa

SEQ ID NO: 1767458 - RNA, 19 nt, Artificial Sequence
  Description of Artificial Sequence: Synthetic oligonucleotide
  Antisense strand to SEQ ID NO: 1767457
uugcggaucaguauacuuu

SEQ ID NO: 1767459 - RNA, 19 nt, Artificial Sequence
  Description of Artificial Sequence: Synthetic oligonucleotide
  Sense strand starting at position 473 of SEQ ID NO: 1562714
guauacugauccgcaauuu

SEQ ID NO: 1767460 - RNA, 19 nt, Artificial Sequence
  Description of Artificial Sequence: Synthetic oligonucleotide
  Antisense strand to SEQ ID NO: 1767459
aaauugcggaucaguauac

SEQ ID NO: 1767461 - RNA, 19 nt, Artificial Sequence
  Description of Artificial Sequence: Synthetic oligonucleotide
  Sense strand starting at position 610 of SEQ ID NO: 1562714
guuaauauuuaguccaugu

SEQ ID NO: 1767462 - RNA, 19 nt, Artificial Sequence
  Description of Artificial Sequence: Synthetic oligonucleotide
  Antisense strand to SEQ ID NO: 1767461
acauggacuaaauauuaac

SEQ ID NO: 1767463 - RNA, 19 nt, Artificial Sequence
  Description of Artificial Sequence: Synthetic oligonucleotide
  Sense strand starting at position 624 of SEQ ID NO: 1562714
cauguagugagucagaaug

SEQ ID NO: 1767464 - RNA, 19 nt, Artificial Sequence
  Description of Artificial Sequence: Synthetic oligonucleotide
  Antisense strand to SEQ ID NO: 1767463
cauucugacucacuacaug

SEQ ID NO: 1767465 - RNA, 19 nt, Artificial Sequence
  Description of Artificial Sequence: Synthetic oligonucleotide
  Sense strand starting at position 648 of SEQ ID NO: 1562714
accacuuaauaggaaugaa

SEQ ID NO: 1767466 - RNA, 19 nt, Artificial Sequence
  Description of Artificial Sequence: Synthetic oligonucleotide
  Antisense strand to SEQ ID NO: 1767465
uucauuccuauuaaguggu

SEQ ID NO: 1767467 - RNA, 19 nt, Artificial Sequence
  Description of Artificial Sequence: Synthetic oligonucleotide
  Sense strand starting at position 784 of SEQ ID NO: 1562714
aggaaagcaucuccacuuu

SEQ ID NO: 1767468 - RNA, 19 nt, Artificial Sequence
  Description of Artificial Sequence: Synthetic oligonucleotide
  Antisense strand to SEQ ID NO: 1767467
aaaguggagaugcuuuccu

SEQ ID NO: 1767469 - RNA, 19 nt, Artificial Sequence
  Description of Artificial Sequence: Synthetic oligonucleotide
  Sense strand starting at position 860 of SEQ ID NO: 1562714
ggaagauaaaucggcacaa

SEQ ID NO: 1767470 - RNA, 19 nt, Artificial Sequence
  Description of Artificial Sequence: Synthetic oligonucleotide
  Antisense strand to SEQ ID NO: 1767469
uugugccgauuuaucuucc

SEQ ID NO: 1767471 - RNA, 19 nt, Artificial Sequence
  Description of Artificial Sequence: Synthetic oligonucleotide
  Sense strand starting at position 879 of SEQ ID NO: 1562714
aauugucaccgagaacagu

SEQ ID NO: 1767472 - RNA, 19 nt, Artificial Sequence
  Description of Artificial Sequence: Synthetic oligonucleotide
  Antisense strand to SEQ ID NO: 1767471
acuguucucggugacaauu

SEQ ID NO: 1767473 - RNA, 19 nt, Artificial Sequence
  Description of Artificial Sequence: Synthetic oligonucleotide
  Sense strand starting at position 885 of SEQ ID NO: 1562714
caccgagaacaguaaguuu

SEQ ID NO: 1767474 - RNA, 19 nt, Artificial Sequence
  Description of Artificial Sequence: Synthetic oligonucleotide
  Antisense strand to SEQ ID NO: 1767473
aaacuuacuguucucggug

SEQ ID NO: 1767475 - RNA, 19 nt, Artificial Sequence
  Description of Artificial Sequence: Synthetic oligonucleotide
  Sense strand starting at position 904 of SEQ ID NO: 1562714
ucagaaaucuuggcuguuu

SEQ ID NO: 1767476 - RNA, 19 nt, Artificial Sequence
  Description of Artificial Sequence: Synthetic oligonucleotide
  Antisense strand to SEQ ID NO: 1767475
aaacagccaagauuucuga

SEQ ID NO: 1767477 - RNA, 19 nt, Artificial Sequence
  Description of Artificial Sequence: Synthetic oligonucleotide
  Sense strand starting at position 905 of SEQ ID NO: 1562714
cagaaaucuuggcuguuuc

SEQ ID NO: 1767478 - RNA, 19 nt, Artificial Sequence
  Description of Artificial Sequence: Synthetic oligonucleotide
  Antisense strand to SEQ ID NO: 1767477
gaaacagccaagauuucug

SEQ ID NO: 1767479 - RNA, 19 nt, Artificial Sequence
  Description of Artificial Sequence: Synthetic oligonucleotide
  Sense strand starting at position 906 of SEQ ID NO: 1562714
agaaaucuuggcuguuucu

SEQ ID NO: 1767480 - RNA, 19 nt, Artificial Sequence
  Description of Artificial Sequence: Synthetic oligonucleotide
  Antisense strand to SEQ ID NO: 1767479
agaaacagccaagauuucu

SEQ ID NO: 1767481 - RNA, 19 nt, Artificial Sequence
  Description of Artificial Sequence: Synthetic oligonucleotide
  Sense strand starting at position 1015 of SEQ ID NO: 1562714
auagaaucauugguacuca

SEQ ID NO: 1767482 - RNA, 19 nt, Artificial Sequence
  Description of Artificial Sequence: Synthetic oligonucleotide
  Antisense strand to SEQ ID NO: 1767481
ugaguaccaaugauucuau

SEQ ID NO: 1767483 - RNA, 19 nt, Artificial Sequence
  Description of Artificial Sequence: Synthetic oligonucleotide
  Sense strand starting at position 1095 of SEQ ID NO: 1562714
guauauaaccuuuaagcag

SEQ ID NO: 1767484 - RNA, 19 nt, Artificial Sequence
  Description of Artificial Sequence: Synthetic oligonucleotide
  Antisense strand to SEQ ID NO: 1767483
cugcuuaaagguuauauac

SEQ ID NO: 1767485 - RNA, 19 nt, Artificial Sequence
  Description of Artificial Sequence: Synthetic oligonucleotide
  Sense strand starting at position 1201 of SEQ ID NO: 1562714
guagaagacugguuaggcu

SEQ ID NO: 1767486 - RNA, 19 nt, Artificial Sequence
  Description of Artificial Sequence: Synthetic oligonucleotide
  Antisense strand to SEQ ID NO: 1767485
agccuaaccagucuucuac

SEQ ID NO: 1767487 - RNA, 19 nt, Artificial Sequence
  Description of Artificial Sequence: Synthetic oligonucleotide
  Sense strand starting at position 2557 of SEQ ID NO: 1562714
ucuguaaaucuaugaggcu

SEQ ID NO: 1767488 - RNA, 19 nt, Artificial Sequence
  Description of Artificial Sequence: Synthetic oligonucleotide
  Antisense strand to SEQ ID NO: 1767487
agccucauagauuuacaga

SEQ ID NO: 1767489 - RNA, 19 nt, Artificial Sequence
  Description of Artificial Sequence: Synthetic oligonucleotide
  Sense strand starting at position 2604 of SEQ ID NO: 1562714
aagacaaacuugucacgau

SEQ ID NO: 1767490 - RNA, 19 nt, Artificial Sequence
  Description of Artificial Sequence: Synthetic oligonucleotide
  Antisense strand to SEQ ID NO: 1767489
aucgugacaaguuugucuu

SEQ ID NO: 1767491 - RNA, 19 nt, Artificial Sequence
  Description of Artificial Sequence: Synthetic oligonucleotide
  Sense strand starting at position 2624 of SEQ ID NO: 1562714
ggcuuugauagcgauaaag

SEQ ID NO: 1767492 - RNA, 19 nt, Artificial Sequence
  Description of Artificial Sequence: Synthetic oligonucleotide
  Antisense strand to SEQ ID NO: 1767491
cuuuaucgcuaucaaagcc

SEQ ID NO: 1767493 - RNA, 19 nt, Artificial Sequence
  Description of Artificial Sequence: Synthetic oligonucleotide
  Sense strand starting at position 2658 of SEQ ID NO: 1562714
auugaaauguuguuucccu

SEQ ID NO: 1767494 - RNA, 19 nt, Artificial Sequence
  Description of Artificial Sequence: Synthetic oligonucleotide
  Antisense strand to SEQ ID NO: 1767493
agggaaacaacauuucaau

SEQ ID NO: 1767495 - RNA, 19 nt, Artificial Sequence
  Description of Artificial Sequence: Synthetic oligonucleotide
  Sense strand starting at position 2693 of SEQ ID NO: 1562714
guccuuagccugcacagaa

SEQ ID NO: 1767496 - RNA, 19 nt, Artificial Sequence
  Description of Artificial Sequence: Synthetic oligonucleotide
  Antisense strand to SEQ ID NO: 1767495
uucugugcaggcuaaggac

SEQ ID NO: 1767497 - RNA, 19 nt, Artificial Sequence
  Description of Artificial Sequence: Synthetic oligonucleotide
  Sense strand starting at position 2734 of SEQ ID NO: 1562714
gggaaaugagacggcgaau

SEQ ID NO: 1767498 - RNA, 19 nt, Artificial Sequence
  Description of Artificial Sequence: Synthetic oligonucleotide
  Antisense strand to SEQ ID NO: 1767497
auucgccgucucauuuccc

SEQ ID NO: 1767499 - RNA, 19 nt, Artificial Sequence
  Description of Artificial Sequence: Synthetic oligonucleotide
  Sense strand starting at position 2843 of SEQ ID NO: 1562714
gaggaaguccuaugugcug

SEQ ID NO: 1767500 - RNA, 19 nt, Artificial Sequence
  Description of Artificial Sequence: Synthetic oligonucleotide
  Antisense strand to SEQ ID NO: 1767499
cagcacauaggacuuccuc

SEQ ID NO: 1767501 - RNA, 19 nt, Artificial Sequence
  Description of Artificial Sequence: Synthetic oligonucleotide
  Sense strand starting at position 2877 of SEQ ID NO: 1562714
ccauuucugcccuguggua

SEQ ID NO: 1767502 - RNA, 19 nt, Artificial Sequence
  Description of Artificial Sequence: Synthetic oligonucleotide
  Antisense strand to SEQ ID NO: 1767501
uaccacagggcagaaaugg

SEQ ID NO: 1767503 - RNA, 19 nt, Artificial Sequence
  Description of Artificial Sequence: Synthetic oligonucleotide
  Sense strand starting at position 2990 of SEQ ID NO: 1562714
gaggccuacuuuguuggaa

SEQ ID NO: 1767504 - RNA, 19 nt, Artificial Sequence
  Description of Artificial Sequence: Synthetic oligonucleotide
  Antisense strand to SEQ ID NO: 1767503
uuccaacaaaguaggccuc

SEQ ID NO: 1767505 - RNA, 19 nt, Artificial Sequence
  Description of Artificial Sequence: Synthetic oligonucleotide
  Sense strand starting at position 3043 of SEQ ID NO: 1562714
gugagugaccacuaacuca

SEQ ID NO: 1767506 - RNA, 19 nt, Artificial Sequence
  Description of Artificial Sequence: Synthetic oligonucleotide
  Antisense strand to SEQ ID NO: 1767505
ugaguuaguggucacucac

SEQ ID NO: 1767507 - RNA, 19 nt, Artificial Sequence
  Description of Artificial Sequence: Synthetic oligonucleotide
  Sense strand starting at position 3071 of SEQ ID NO: 1562714
uugugaaucuuggcaacag

SEQ ID NO: 1767508 - RNA, 19 nt, Artificial Sequence
  Description of Artificial Sequence: Synthetic oligonucleotide
  Antisense strand to SEQ ID NO: 1767507
cuguugccaagauucacaa

SEQ ID NO: 1767509 - RNA, 19 nt, Artificial Sequence
  Description of Artificial Sequence: Synthetic oligonucleotide
  Sense strand starting at position 3110 of SEQ ID NO: 1562714
cugaauaaaguguguuucu

SEQ ID NO: 1767510 - RNA, 19 nt, Artificial Sequence
  Description of Artificial Sequence: Synthetic oligonucleotide
  Antisense strand to SEQ ID NO: 1767509
agaaacacacuuuauucag

SEQ ID NO: 1767511 - RNA, 19 nt, Artificial Sequence
  Description of Artificial Sequence: Synthetic oligonucleotide
  Sense strand starting at position 3111 of SEQ ID NO: 1562714
ugaauaaaguguguuucuu

SEQ ID NO: 1767512 - RNA, 19 nt, Artificial Sequence
  Description of Artificial Sequence: Synthetic oligonucleotide
  Antisense strand to SEQ ID NO: 1767511
aagaaacacacuuuauuca

SEQ ID NO: 1767513 - RNA, 19 nt, Artificial Sequence
  Description of Artificial Sequence: Synthetic oligonucleotide
  Sense strand starting at position 3213 of SEQ ID NO: 1562714
cuacaagcuauggagaguu

SEQ ID NO: 1767514 - RNA, 19 nt, Artificial Sequence
  Description of Artificial Sequence: Synthetic oligonucleotide
  Antisense strand to SEQ ID NO: 1767513
aacucuccauagcuuguag

SEQ ID NO: 1767515 - RNA, 19 nt, Artificial Sequence
  Description of Artificial Sequence: Synthetic oligonucleotide
  Sense strand starting at position 3221 of SEQ ID NO: 1562714
uauggagaguuagucuauu

SEQ ID NO: 1767516 - RNA, 19 nt, Artificial Sequence
  Description of Artificial Sequence: Synthetic oligonucleotide
  Antisense strand to SEQ ID NO: 1767515
aauagacuaacucuccaua

SEQ ID NO: 1767517 - RNA, 19 nt, Artificial Sequence
  Description of Artificial Sequence: Synthetic oligonucleotide
  Sense strand starting at position 3377 of SEQ ID NO: 1562714
cacguugcaggugauaaua

SEQ ID NO: 1767518 - RNA, 19 nt, Artificial Sequence
  Description of Artificial Sequence: Synthetic oligonucleotide
  Antisense strand to SEQ ID NO: 1767517
uauuaucaccugcaacgug

SEQ ID NO: 1767519 - RNA, 19 nt, Artificial Sequence
  Description of Artificial Sequence: Synthetic oligonucleotide
  Sense strand starting at position 3443 of SEQ ID NO: 1562714
uuccuaaagcugugggaaa

SEQ ID NO: 1767520 - RNA, 19 nt, Artificial Sequence
  Description of Artificial Sequence: Synthetic oligonucleotide
  Antisense strand to SEQ ID NO: 1767519
uuucccacagcuuuaggaa

SEQ ID NO: 1767521 - RNA, 19 nt, Artificial Sequence
  Description of Artificial Sequence: Synthetic oligonucleotide
  Sense strand starting at position 3487 of SEQ ID NO: 1562714
ggagacucccuggaguagu

SEQ ID NO: 1767522 - RNA, 19 nt, Artificial Sequence
  Description of Artificial Sequence: Synthetic oligonucleotide
  Antisense strand to SEQ ID NO: 1767521
acuacuccagggagucucc

SEQ ID NO: 1767523 - RNA, 19 nt, Artificial Sequence
  Description of Artificial Sequence: Synthetic oligonucleotide
  Sense strand starting at position 3612 of SEQ ID NO: 1562714
aagggaucgcaguauaccu

SEQ ID NO: 1767524 - RNA, 19 nt, Artificial Sequence
  Description of Artificial Sequence: Synthetic oligonucleotide
  Antisense strand to SEQ ID NO: 1767523
agguauacugcgaucccuu

SEQ ID NO: 1767525 - RNA, 19 nt, Artificial Sequence
  Description of Artificial Sequence: Synthetic oligonucleotide
  Sense strand starting at position 3637 of SEQ ID NO: 1562714
uaggcuugcagagggaauu

SEQ ID NO: 1767526 - RNA, 19 nt, Artificial Sequence
  Description of Artificial Sequence: Synthetic oligonucleotide
  Antisense strand to SEQ ID NO: 1767525
aauucccucugcaagccua

SEQ ID NO: 1767527 - RNA, 19 nt, Artificial Sequence
  Description of Artificial Sequence: Synthetic oligonucleotide
  Sense strand starting at position 3638 of SEQ ID NO: 1562714
aggcuugcagagggaauua

SEQ ID NO: 1767528 - RNA, 19 nt, Artificial Sequence
  Description of Artificial Sequence: Synthetic oligonucleotide
  Antisense strand to SEQ ID NO: 1767527
uaauucccucugcaagccu

SEQ ID NO: 1767529 - RNA, 19 nt, Artificial Sequence
  Description of Artificial Sequence: Synthetic oligonucleotide
  Sense strand starting at position 67 of SEQ ID NO: 1562715
gggagcaaccuccgacaaa

SEQ ID NO: 1767530 - RNA, 19 nt, Artificial Sequence
  Description of Artificial Sequence: Synthetic oligonucleotide
  Antisense strand to SEQ ID NO: 1767529
uuugucggagguugcuccc

SEQ ID NO: 1767531 - RNA, 19 nt, Artificial Sequence
  Description of Artificial Sequence: Synthetic oligonucleotide
  Sense strand starting at position 115 of SEQ ID NO: 1562715
gagcuuaugucacaccuga

SEQ ID NO: 1767532 - RNA, 19 nt, Artificial Sequence
  Description of Artificial Sequence: Synthetic oligonucleotide
  Antisense strand to SEQ ID NO: 1767531
ucaggugugacauaagcuc

SEQ ID NO: 1767533 - RNA, 19 nt, Artificial Sequence
  Description of Artificial Sequence: Synthetic oligonucleotide
  Sense strand starting at position 434 of SEQ ID NO: 1562715
gucccaucucaugaugcaa

SEQ ID NO: 1767534 - RNA, 19 nt, Artificial Sequence
  Description of Artificial Sequence: Synthetic oligonucleotide
  Antisense strand to SEQ ID NO: 1767533
uugcaucaugagaugggac

SEQ ID NO: 1767535 - RNA, 19 nt, Artificial Sequence
  Description of Artificial Sequence: Synthetic oligonucleotide
  Sense strand starting at position 445 of SEQ ID NO: 1562715
ugaugcaacuugcauauua

SEQ ID NO: 1767536 - RNA, 19 nt, Artificial Sequence
  Description of Artificial Sequence: Synthetic oligonucleotide
  Antisense strand to SEQ ID NO: 1767535
uaauaugcaaguugcauca

SEQ ID NO: 1767537 - RNA, 19 nt, Artificial Sequence
  Description of Artificial Sequence: Synthetic oligonucleotide
  Sense strand starting at position 918 of SEQ ID NO: 1562715
cuccaaacauuccgaggaa

SEQ ID NO: 1767538 - RNA, 19 nt, Artificial Sequence
  Description of Artificial Sequence: Synthetic oligonucleotide
  Antisense strand to SEQ ID NO: 1767537
uuccucggaauguuuggag

SEQ ID NO: 1767539 - RNA, 19 nt, Artificial Sequence
  Description of Artificial Sequence: Synthetic oligonucleotide
  Sense strand starting at position 919 of SEQ ID NO: 1562715
uccaaacauuccgaggaaa

SEQ ID NO: 1767540 - RNA, 19 nt, Artificial Sequence
  Description of Artificial Sequence: Synthetic oligonucleotide
  Antisense strand to SEQ ID NO: 1767539
uuuccucggaauguuugga

SEQ ID NO: 1767541 - RNA, 19 nt, Artificial Sequence
  Description of Artificial Sequence: Synthetic oligonucleotide
  Sense strand starting at position 1227 of SEQ ID NO: 1562715
gcugcagugucugcgauuu

SEQ ID NO: 1767542 - RNA, 19 nt, Artificial Sequence
  Description of Artificial Sequence: Synthetic oligonucleotide
  Antisense strand to SEQ ID NO: 1767541
aaaucgcagacacugcagc

SEQ ID NO: 1767543 - RNA, 19 nt, Artificial Sequence
  Description of Artificial Sequence: Synthetic oligonucleotide
  Sense strand starting at position 1803 of SEQ ID NO: 1562715
cucggauccagaggaauuc

SEQ ID NO: 1767544 - RNA, 19 nt, Artificial Sequence
  Description of Artificial Sequence: Synthetic oligonucleotide
  Antisense strand to SEQ ID NO: 1767543
gaauuccucuggauccgag

SEQ ID NO: 1767545 - RNA, 19 nt, Artificial Sequence
  Description of Artificial Sequence: Synthetic oligonucleotide
  Sense strand starting at position 2681 of SEQ ID NO: 1562715
gccuacagacaguauuaga

SEQ ID NO: 1767546 - RNA, 19 nt, Artificial Sequence
  Description of Artificial Sequence: Synthetic oligonucleotide
  Antisense strand to SEQ ID NO: 1767545
ucuaauacugucuguaggc

SEQ ID NO: 1767547 - RNA, 19 nt, Artificial Sequence
  Description of Artificial Sequence: Synthetic oligonucleotide
  Sense strand starting at position 2754 of SEQ ID NO: 1562715
aggaguagguccaagggau

SEQ ID NO: 1767548 - RNA, 19 nt, Artificial Sequence
  Description of Artificial Sequence: Synthetic oligonucleotide
  Antisense strand to SEQ ID NO: 1767547
aucccuuggaccuacuccu

SEQ ID NO: 1767549 - RNA, 19 nt, Artificial Sequence
  Description of Artificial Sequence: Synthetic oligonucleotide
  Sense strand starting at position 2778 of SEQ ID NO: 1562715
gcucaucuguagcuagaga

SEQ ID NO: 1767550 - RNA, 19 nt, Artificial Sequence
  Description of Artificial Sequence: Synthetic oligonucleotide
  Antisense strand to SEQ ID NO: 1767549
ucucuagcuacagaugagc

SEQ ID NO: 1767551 - RNA, 19 nt, Artificial Sequence
  Description of Artificial Sequence: Synthetic oligonucleotide
  Sense strand starting at position 2931 of SEQ ID NO: 1562715
ggccuauaacuuggugcuu

SEQ ID NO: 1767552 - RNA, 19 nt, Artificial Sequence
  Description of Artificial Sequence: Synthetic oligonucleotide
  Antisense strand to SEQ ID NO: 1767551
aagcaccaaguuauaggcc

SEQ ID NO: 1767553 - RNA, 19 nt, Artificial Sequence
  Description of Artificial Sequence: Synthetic oligonucleotide
  Sense strand starting at position 3058 of SEQ ID NO: 1562715
ccuguucucagguguugca

SEQ ID NO: 1767554 - RNA, 19 nt, Artificial Sequence
  Description of Artificial Sequence: Synthetic oligonucleotide
  Antisense strand to SEQ ID NO: 1767553
ugcaacaccugagaacagg

SEQ ID NO: 1767555 - RNA, 19 nt, Artificial Sequence
  Description of Artificial Sequence: Synthetic oligonucleotide
  Sense strand starting at position 3121 of SEQ ID NO: 1562715
ucaugcaggucuggaauaa

SEQ ID NO: 1767556 - RNA, 19 nt, Artificial Sequence
  Description of Artificial Sequence: Synthetic oligonucleotide
  Antisense strand to SEQ ID NO: 1767555
uuauuccagaccugcauga

SEQ ID NO: 1767557 - RNA, 19 nt, Artificial Sequence
  Description of Artificial Sequence: Synthetic oligonucleotide
  Sense strand starting at position 3167 of SEQ ID NO: 1562715
ugagcugaaucuugaugga

SEQ ID NO: 1767558 - RNA, 19 nt, Artificial Sequence
  Description of Artificial Sequence: Synthetic oligonucleotide
  Antisense strand to SEQ ID NO: 1767557
uccaucaagauucagcuca

SEQ ID NO: 1767559 - RNA, 19 nt, Artificial Sequence
  Description of Artificial Sequence: Synthetic oligonucleotide
  Sense strand starting at position 3170 of SEQ ID NO: 1562715
gcugaaucuugauggauga

SEQ ID NO: 1767560 - RNA, 19 nt, Artificial Sequence
  Description of Artificial Sequence: Synthetic oligonucleotide
  Antisense strand to SEQ ID NO: 1767559
ucauccaucaagauucagc

SEQ ID NO: 1767561 - RNA, 19 nt, Artificial Sequence
  Description of Artificial Sequence: Synthetic oligonucleotide
  Sense strand starting at position 3189 of SEQ ID NO: 1562715
guaggaguuggccagcuaa

SEQ ID NO: 1767562 - RNA, 19 nt, Artificial Sequence
  Description of Artificial Sequence: Synthetic oligonucleotide
  Antisense strand to SEQ ID NO: 1767561
uuagcuggccaacuccuac

SEQ ID NO: 1767563 - RNA, 19 nt, Artificial Sequence
  Description of Artificial Sequence: Synthetic oligonucleotide
  Sense strand starting at position 3268 of SEQ ID NO: 1562715
augaaacagcuuuguaugu

SEQ ID NO: 1767564 - RNA, 19 nt, Artificial Sequence
  Description of Artificial Sequence: Synthetic oligonucleotide
  Antisense strand to SEQ ID NO: 1767563
acauacaaagcuguuucau

SEQ ID NO: 1767565 - RNA, 19 nt, Artificial Sequence
  Description of Artificial Sequence: Synthetic oligonucleotide
  Sense strand starting at position 3273 of SEQ ID NO: 1562715
acagcuuuguaugugugua

SEQ ID NO: 1767566 - RNA, 19 nt, Artificial Sequence
  Description of Artificial Sequence: Synthetic oligonucleotide
  Antisense strand to SEQ ID NO: 1767565
uacacacauacaaagcugu

SEQ ID NO: 1767567 - RNA, 19 nt, Artificial Sequence
  Description of Artificial Sequence: Synthetic oligonucleotide
  Sense strand starting at position 3275 of SEQ ID NO: 1562715
agcuuuguauguguguaca

SEQ ID NO: 1767568 - RNA, 19 nt, Artificial Sequence
  Description of Artificial Sequence: Synthetic oligonucleotide
  Antisense strand to SEQ ID NO: 1767567
uguacacacauacaaagcu

SEQ ID NO: 1767569 - RNA, 19 nt, Artificial Sequence
  Description of Artificial Sequence: Synthetic oligonucleotide
  Sense strand starting at position 3292 of SEQ ID NO: 1562715
cagggaacuccacggaguu

SEQ ID NO: 1767570 - RNA, 19 nt, Artificial Sequence
  Description of Artificial Sequence: Synthetic oligonucleotide
  Antisense strand to SEQ ID NO: 1767569
aacuccguggaguucccug

SEQ ID NO: 1767571 - RNA, 19 nt, Artificial Sequence
  Description of Artificial Sequence: Synthetic oligonucleotide
  Sense strand starting at position 3302 of SEQ ID NO: 1562715
cacggaguuggguauuagu

SEQ ID NO: 1767572 - RNA, 19 nt, Artificial Sequence
  Description of Artificial Sequence: Synthetic oligonucleotide
  Antisense strand to SEQ ID NO: 1767571
acuaauacccaacuccgug

SEQ ID NO: 1767573 - RNA, 19 nt, Artificial Sequence
  Description of Artificial Sequence: Synthetic oligonucleotide
  Sense strand starting at position 3305 of SEQ ID NO: 1562715
ggaguuggguauuaguaga

SEQ ID NO: 1767574 - RNA, 19 nt, Artificial Sequence
  Description of Artificial Sequence: Synthetic oligonucleotide
  Antisense strand to SEQ ID NO: 1767573
ucuacuaauacccaacucc

SEQ ID NO: 1767575 - RNA, 19 nt, Artificial Sequence
  Description of Artificial Sequence: Synthetic oligonucleotide
  Sense strand starting at position 3310 of SEQ ID NO: 1562715
uggguauuaguagagcaga

SEQ ID NO: 1767576 - RNA, 19 nt, Artificial Sequence
  Description of Artificial Sequence: Synthetic oligonucleotide
  Antisense strand to SEQ ID NO: 1767575
ucugcucuacuaauaccca

SEQ ID NO: 1767577 - RNA, 19 nt, Artificial Sequence
  Description of Artificial Sequence: Synthetic oligonucleotide
  Sense strand starting at position 3327 of SEQ ID NO: 1562715
gaaagaacgucuguccaga

SEQ ID NO: 1767578 - RNA, 19 nt, Artificial Sequence
  Description of Artificial Sequence: Synthetic oligonucleotide
  Antisense strand to SEQ ID NO: 1767577
ucuggacagacguucuuuc

SEQ ID NO: 1767579 - RNA, 19 nt, Artificial Sequence
  Description of Artificial Sequence: Synthetic oligonucleotide
  Sense strand starting at position 3329 of SEQ ID NO: 1562715
aagaacgucuguccagaaa

SEQ ID NO: 1767580 - RNA, 19 nt, Artificial Sequence
  Description of Artificial Sequence: Synthetic oligonucleotide
  Antisense strand to SEQ ID NO: 1767579
uuucuggacagacguucuu

SEQ ID NO: 1767581 - RNA, 19 nt, Artificial Sequence
  Description of Artificial Sequence: Synthetic oligonucleotide
  Sense strand starting at position 3332 of SEQ ID NO: 1562715
aacgucuguccagaaauuc

SEQ ID NO: 1767582 - RNA, 19 nt, Artificial Sequence
  Description of Artificial Sequence: Synthetic oligonucleotide
  Antisense strand to SEQ ID NO: 1767581
gaauuucuggacagacguu

SEQ ID NO: 1767583 - RNA, 19 nt, Artificial Sequence
  Description of Artificial Sequence: Synthetic oligonucleotide
  Sense strand starting at position 3604 of SEQ ID NO: 1562715
ugguguguaucccugacaa

SEQ ID NO: 1767584 - RNA, 19 nt, Artificial Sequence
  Description of Artificial Sequence: Synthetic oligonucleotide
  Antisense strand to SEQ ID NO: 1767583
uugucagggauacacacca

SEQ ID NO: 1767585 - RNA, 19 nt, Artificial Sequence
  Description of Artificial Sequence: Synthetic oligonucleotide
  Sense strand starting at position 3606 of SEQ ID NO: 1562715
guguguaucccugacaagg

SEQ ID NO: 1767586 - RNA, 19 nt, Artificial Sequence
  Description of Artificial Sequence: Synthetic oligonucleotide
  Antisense strand to SEQ ID NO: 1767585
ccuugucagggauacacac

SEQ ID NO: 1767587 - RNA, 19 nt, Artificial Sequence
  Description of Artificial Sequence: Synthetic oligonucleotide
  Sense strand starting at position 3650 of SEQ ID NO: 1562715
ccaagaccuugcuggaaga

SEQ ID NO: 1767588 - RNA, 19 nt, Artificial Sequence
  Description of Artificial Sequence: Synthetic oligonucleotide
  Antisense strand to SEQ ID NO: 1767587
ucuuccagcaaggucuugg

SEQ ID NO: 1767589 - RNA, 19 nt, Artificial Sequence
  Description of Artificial Sequence: Synthetic oligonucleotide
  Sense strand starting at position 3706 of SEQ ID NO: 1562715
ggcggaucccucgagaaau

SEQ ID NO: 1767590 - RNA, 19 nt, Artificial Sequence
  Description of Artificial Sequence: Synthetic oligonucleotide
  Antisense strand to SEQ ID NO: 1767589
auuucucgagggauccgcc

SEQ ID NO: 1767591 - RNA, 19 nt, Artificial Sequence
  Description of Artificial Sequence: Synthetic oligonucleotide
  Sense strand starting at position 3708 of SEQ ID NO: 1562715
cggaucccucgagaaauua

SEQ ID NO: 1767592 - RNA, 19 nt, Artificial Sequence
  Description of Artificial Sequence: Synthetic oligonucleotide
  Antisense strand to SEQ ID NO: 1767591
uaauuucucgagggauccg

SEQ ID NO: 1767593 - RNA, 19 nt, Artificial Sequence
  Description of Artificial Sequence: Synthetic oligonucleotide
  Sense strand starting at position 3767 of SEQ ID NO: 1562715
cccagacacuuucugagau

SEQ ID NO: 1767594 - RNA, 19 nt, Artificial Sequence
  Description of Artificial Sequence: Synthetic oligonucleotide
  Antisense strand to SEQ ID NO: 1767593
aucucagaaagugucuggg

SEQ ID NO: 1767595 - RNA, 19 nt, Artificial Sequence
  Description of Artificial Sequence: Synthetic oligonucleotide
  Sense strand starting at position 3768 of SEQ ID NO: 1562715
ccagacacuuucugagaug

SEQ ID NO: 1767596 - RNA, 19 nt, Artificial Sequence
  Description of Artificial Sequence: Synthetic oligonucleotide
  Antisense strand to SEQ ID NO: 1767595
caucucagaaagugucugg

SEQ ID NO: 1767597 - RNA, 19 nt, Artificial Sequence
  Description of Artificial Sequence: Synthetic oligonucleotide
  Sense strand starting at position 3882 of SEQ ID NO: 1562715
ugcugcucuguuuccgaga

SEQ ID NO: 1767598 - RNA, 19 nt, Artificial Sequence
  Description of Artificial Sequence: Synthetic oligonucleotide
  Antisense strand to SEQ ID NO: 1767597
ucucggaaacagagcagca

SEQ ID NO: 1767599 - RNA, 19 nt, Artificial Sequence
  Description of Artificial Sequence: Synthetic oligonucleotide
  Sense strand starting at position 3887 of SEQ ID NO: 1562715
cucuguuuccgagacauuc

SEQ ID NO: 1767600 - RNA, 19 nt, Artificial Sequence
  Description of Artificial Sequence: Synthetic oligonucleotide
  Antisense strand to SEQ ID NO: 1767599
gaaugucucggaaacagag

SEQ ID NO: 1767601 - RNA, 19 nt, Artificial Sequence
  Description of Artificial Sequence: Synthetic oligonucleotide
  Sense strand starting at position 3895 of SEQ ID NO: 1562715
ccgagacauucccagucau

SEQ ID NO: 1767602 - RNA, 19 nt, Artificial Sequence
  Description of Artificial Sequence: Synthetic oligonucleotide
  Antisense strand to SEQ ID NO: 1767601
augacugggaaugucucgg

SEQ ID NO: 1767603 - RNA, 19 nt, Artificial Sequence
  Description of Artificial Sequence: Synthetic oligonucleotide
  Sense strand starting at position 3906 of SEQ ID NO: 1562715
ccagucaucuuccagagug

SEQ ID NO: 1767604 - RNA, 19 nt, Artificial Sequence
  Description of Artificial Sequence: Synthetic oligonucleotide
  Antisense strand to SEQ ID NO: 1767603
cacucuggaagaugacugg

SEQ ID NO: 1767605 - RNA, 19 nt, Artificial Sequence
  Description of Artificial Sequence: Synthetic oligonucleotide
  Sense strand starting at position 3908 of SEQ ID NO: 1562715
agucaucuuccagagugca

SEQ ID NO: 1767606 - RNA, 19 nt, Artificial Sequence
  Description of Artificial Sequence: Synthetic oligonucleotide
  Antisense strand to SEQ ID NO: 1767605
ugcacucuggaagaugacu

SEQ ID NO: 1767607 - RNA, 19 nt, Artificial Sequence
  Description of Artificial Sequence: Synthetic oligonucleotide
  Sense strand starting at position 3949 of SEQ ID NO: 1562715
guuuccuccuuugugaaag

SEQ ID NO: 1767608 - RNA, 19 nt, Artificial Sequence
  Description of Artificial Sequence: Synthetic oligonucleotide
  Antisense strand to SEQ ID NO: 1767607
cuuucacaaaggaggaaac

SEQ ID NO: 1767609 - RNA, 19 nt, Artificial Sequence
  Description of Artificial Sequence: Synthetic oligonucleotide
  Sense strand starting at position 160 of SEQ ID NO: 1562716
cuguacaaugggugcaaua

SEQ ID NO: 1767610 - RNA, 19 nt, Artificial Sequence
  Description of Artificial Sequence: Synthetic oligonucleotide
  Antisense strand to SEQ ID NO: 1767609
uauugcacccauuguacag

SEQ ID NO: 1767611 - RNA, 19 nt, Artificial Sequence
  Description of Artificial Sequence: Synthetic oligonucleotide
  Sense strand starting at position 162 of SEQ ID NO: 1562716
guacaaugggugcaauagu

SEQ ID NO: 1767612 - RNA, 19 nt, Artificial Sequence
  Description of Artificial Sequence: Synthetic oligonucleotide
  Antisense strand to SEQ ID NO: 1767611
acuauugcacccauuguac

SEQ ID NO: 1767613 - RNA, 19 nt, Artificial Sequence
  Description of Artificial Sequence: Synthetic oligonucleotide
  Sense strand starting at position 262 of SEQ ID NO: 1562716
ccagauaccugguuauagc

SEQ ID NO: 1767614 - RNA, 19 nt, Artificial Sequence
  Description of Artificial Sequence: Synthetic oligonucleotide
  Antisense strand to SEQ ID NO: 1767613
gcuauaaccagguaucugg

SEQ ID NO: 1767615 - RNA, 19 nt, Artificial Sequence
  Description of Artificial Sequence: Synthetic oligonucleotide
  Sense strand starting at position 560 of SEQ ID NO: 1562716
ggauucuggagcugaugaa

SEQ ID NO: 1767616 - RNA, 19 nt, Artificial Sequence
  Description of Artificial Sequence: Synthetic oligonucleotide
  Antisense strand to SEQ ID NO: 1767615
uucaucagcuccagaaucc

SEQ ID NO: 1767617 - RNA, 19 nt, Artificial Sequence
  Description of Artificial Sequence: Synthetic oligonucleotide
  Sense strand starting at position 623 of SEQ ID NO: 1562716
auaggugguggcuguaaca

SEQ ID NO: 1767618 - RNA, 19 nt, Artificial Sequence
  Description of Artificial Sequence: Synthetic oligonucleotide
  Antisense strand to SEQ ID NO: 1767617
uguuacagccaccaccuau

SEQ ID NO: 1767619 - RNA, 19 nt, Artificial Sequence
  Description of Artificial Sequence: Synthetic oligonucleotide
  Sense strand starting at position 837 of SEQ ID NO: 1562716
aggccuuugaaugggauga

SEQ ID NO: 1767620 - RNA, 19 nt, Artificial Sequence
  Description of Artificial Sequence: Synthetic oligonucleotide
  Antisense strand to SEQ ID NO: 1767619
ucaucccauucaaaggccu

SEQ ID NO: 1767621 - RNA, 19 nt, Artificial Sequence
  Description of Artificial Sequence: Synthetic oligonucleotide
  Sense strand starting at position 838 of SEQ ID NO: 1562716
ggccuuugaaugggaugaa

SEQ ID NO: 1767622 - RNA, 19 nt, Artificial Sequence
  Description of Artificial Sequence: Synthetic oligonucleotide
  Antisense strand to SEQ ID NO: 1767621
uucaucccauucaaaggcc

SEQ ID NO: 1767623 - RNA, 19 nt, Artificial Sequence
  Description of Artificial Sequence: Synthetic oligonucleotide
  Sense strand starting at position 884 of SEQ ID NO: 1562716
cauugucugccuuggacaa

SEQ ID NO: 1767624 - RNA, 19 nt, Artificial Sequence
  Description of Artificial Sequence: Synthetic oligonucleotide
  Antisense strand to SEQ ID NO: 1767623
uuguccaaggcagacaaug

SEQ ID NO: 1767625 - RNA, 19 nt, Artificial Sequence
  Description of Artificial Sequence: Synthetic oligonucleotide
  Sense strand starting at position 973 of SEQ ID NO: 1562716
cacugucaucaaggauaga

SEQ ID NO: 1767626 - RNA, 19 nt, Artificial Sequence
  Description of Artificial Sequence: Synthetic oligonucleotide
  Antisense strand to SEQ ID NO: 1767625
ucuauccuugaugacagug

SEQ ID NO: 1767627 - RNA, 19 nt, Artificial Sequence
  Description of Artificial Sequence: Synthetic oligonucleotide
  Sense strand starting at position 992 of SEQ ID NO: 1562716
agggcagauuugcaaccua

SEQ ID NO: 1767628 - RNA, 19 nt, Artificial Sequence
  Description of Artificial Sequence: Synthetic oligonucleotide
  Antisense strand to SEQ ID NO: 1767627
uagguugcaaaucugcccu

SEQ ID NO: 1767629 - RNA, 19 nt, Artificial Sequence
  Description of Artificial Sequence: Synthetic oligonucleotide
  Sense strand starting at position 1019 of SEQ ID NO: 1562716
gugaauagcccaugaggcu

SEQ ID NO: 1767630 - RNA, 19 nt, Artificial Sequence
  Description of Artificial Sequence: Synthetic oligonucleotide
  Antisense strand to SEQ ID NO: 1767629
agccucaugggcuauucac

SEQ ID NO: 1767631 - RNA, 19 nt, Artificial Sequence
  Description of Artificial Sequence: Synthetic oligonucleotide
  Sense strand starting at position 1339 of SEQ ID NO: 1562716
agauaaauagccuggguac

SEQ ID NO: 1767632 - RNA, 19 nt, Artificial Sequence
  Description of Artificial Sequence: Synthetic oligonucleotide
  Antisense strand to SEQ ID NO: 1767631
guacccaggcuauuuaucu

SEQ ID NO: 1767633 - RNA, 19 nt, Artificial Sequence
  Description of Artificial Sequence: Synthetic oligonucleotide
  Sense strand starting at position 1340 of SEQ ID NO: 1562716
gauaaauagccuggguaca

SEQ ID NO: 1767634 - RNA, 19 nt, Artificial Sequence
  Description of Artificial Sequence: Synthetic oligonucleotide
  Antisense strand to SEQ ID NO: 1767633
uguacccaggcuauuuauc

SEQ ID NO: 1767635 - RNA, 19 nt, Artificial Sequence
  Description of Artificial Sequence: Synthetic oligonucleotide
  Sense strand starting at position 1341 of SEQ ID NO: 1562716
auaaauagccuggguacaa

SEQ ID NO: 1767636 - RNA, 19 nt, Artificial Sequence
  Description of Artificial Sequence: Synthetic oligonucleotide
  Antisense strand to SEQ ID NO: 1767635
uuguacccaggcuauuuau

SEQ ID NO: 1767637 - RNA, 19 nt, Artificial Sequence
  Description of Artificial Sequence: Synthetic oligonucleotide
  Sense strand starting at position 1342 of SEQ ID NO: 1562716
uaaauagccuggguacaaa

SEQ ID NO: 1767638 - RNA, 19 nt, Artificial Sequence
  Description of Artificial Sequence: Synthetic oligonucleotide
  Antisense strand to SEQ ID NO: 1767637
uuuguacccaggcuauuua

SEQ ID NO: 1767639 - RNA, 19 nt, Artificial Sequence
  Description of Artificial Sequence: Synthetic oligonucleotide
  Sense strand starting at position 1542 of SEQ ID NO: 1562716
ucgagcuccuggguugaaa

SEQ ID NO: 1767640 - RNA, 19 nt, Artificial Sequence
  Description of Artificial Sequence: Synthetic oligonucleotide
  Antisense strand to SEQ ID NO: 1767639
uuucaacccaggagcucga

SEQ ID NO: 1767641 - RNA, 19 nt, Artificial Sequence
  Description of Artificial Sequence: Synthetic oligonucleotide
  Sense strand starting at position 2313 of SEQ ID NO: 1562716
gcgaaugauauccgggacu

SEQ ID NO: 1767642 - RNA, 19 nt, Artificial Sequence
  Description of Artificial Sequence: Synthetic oligonucleotide
  Antisense strand to SEQ ID NO: 1767641
agucccggauaucauucgc

SEQ ID NO: 1767643 - RNA, 19 nt, Artificial Sequence
  Description of Artificial Sequence: Synthetic oligonucleotide
  Sense strand starting at position 2315 of SEQ ID NO: 1562716
gaaugauauccgggacuca

SEQ ID NO: 1767644 - RNA, 19 nt, Artificial Sequence
  Description of Artificial Sequence: Synthetic oligonucleotide
  Antisense strand to SEQ ID NO: 1767643
ugagucccggauaucauuc

SEQ ID NO: 1767645 - RNA, 19 nt, Artificial Sequence
  Description of Artificial Sequence: Synthetic oligonucleotide
  Sense strand starting at position 2369 of SEQ ID NO: 1562716
aaggaaagcuuccugagca

SEQ ID NO: 1767646 - RNA, 19 nt, Artificial Sequence
  Description of Artificial Sequence: Synthetic oligonucleotide
  Antisense strand to SEQ ID NO: 1767645
ugcucaggaagcuuuccuu

SEQ ID NO: 1767647 - RNA, 19 nt, Artificial Sequence
  Description of Artificial Sequence: Synthetic oligonucleotide
  Sense strand starting at position 2608 of SEQ ID NO: 1562716
acagaaaggagcugucauu

SEQ ID NO: 1767648 - RNA, 19 nt, Artificial Sequence
  Description of Artificial Sequence: Synthetic oligonucleotide
  Antisense strand to SEQ ID NO: 1767647
aaugacagcuccuuucugu

SEQ ID NO: 1767649 - RNA, 19 nt, Artificial Sequence
  Description of Artificial Sequence: Synthetic oligonucleotide
  Sense strand starting at position 2720 of SEQ ID NO: 1562716
cggucuaugccuugauuuc

SEQ ID NO: 1767650 - RNA, 19 nt, Artificial Sequence
  Description of Artificial Sequence: Synthetic oligonucleotide
  Antisense strand to SEQ ID NO: 1767649
gaaaucaaggcauagaccg

SEQ ID NO: 1767651 - RNA, 19 nt, Artificial Sequence
  Description of Artificial Sequence: Synthetic oligonucleotide
  Sense strand starting at position 2881 of SEQ ID NO: 1562716
guguguaugauggaugugu

SEQ ID NO: 1767652 - RNA, 19 nt, Artificial Sequence
  Description of Artificial Sequence: Synthetic oligonucleotide
  Antisense strand to SEQ ID NO: 1767651
acacauccaucauacacac

SEQ ID NO: 1767653 - RNA, 19 nt, Artificial Sequence
  Description of Artificial Sequence: Synthetic oligonucleotide
  Sense strand starting at position 2902 of SEQ ID NO: 1562716
gcaugcuugauguggauuu

SEQ ID NO: 1767654 - RNA, 19 nt, Artificial Sequence
  Description of Artificial Sequence: Synthetic oligonucleotide
  Antisense strand to SEQ ID NO: 1767653
aaauccacaucaagcaugc

SEQ ID NO: 1767655 - RNA, 19 nt, Artificial Sequence
  Description of Artificial Sequence: Synthetic oligonucleotide
  Sense strand starting at position 2912 of SEQ ID NO: 1562716
uguggauuuaugugcaugu

SEQ ID NO: 1767656 - RNA, 19 nt, Artificial Sequence
  Description of Artificial Sequence: Synthetic oligonucleotide
  Antisense strand to SEQ ID NO: 1767655
acaugcacauaaauccaca

SEQ ID NO: 1767657 - RNA, 19 nt, Artificial Sequence
  Description of Artificial Sequence: Synthetic oligonucleotide
  Sense strand starting at position 2914 of SEQ ID NO: 1562716
uggauuuaugugcaugugu

SEQ ID NO: 1767658 - RNA, 19 nt, Artificial Sequence
  Description of Artificial Sequence: Synthetic oligonucleotide
  Antisense strand to SEQ ID NO: 1767657
acacaugcacauaaaucca

SEQ ID NO: 1767659 - RNA, 19 nt, Artificial Sequence
  Description of Artificial Sequence: Synthetic oligonucleotide
  Sense strand starting at position 2916 of SEQ ID NO: 1562716
gauuuaugugcaugugugu

SEQ ID NO: 1767660 - RNA, 19 nt, Artificial Sequence
  Description of Artificial Sequence: Synthetic oligonucleotide
  Antisense strand to SEQ ID NO: 1767659
acacacaugcacauaaauc

SEQ ID NO: 1767661 - RNA, 19 nt, Artificial Sequence
  Description of Artificial Sequence: Synthetic oligonucleotide
  Sense strand starting at position 3153 of SEQ ID NO: 1562716
ccagaaaggaucugccagu

SEQ ID NO: 1767662 - RNA, 19 nt, Artificial Sequence
  Description of Artificial Sequence: Synthetic oligonucleotide
  Antisense strand to SEQ ID NO: 1767661
acuggcagauccuuucugg

SEQ ID NO: 1767663 - RNA, 19 nt, Artificial Sequence
  Description of Artificial Sequence: Synthetic oligonucleotide
  Sense strand starting at position 3255 of SEQ ID NO: 1562716
ucaccaguguguccacaua

SEQ ID NO: 1767664 - RNA, 19 nt, Artificial Sequence
  Description of Artificial Sequence: Synthetic oligonucleotide
  Antisense strand to SEQ ID NO: 1767663
uauguggacacacugguga

SEQ ID NO: 1767665 - RNA, 19 nt, Artificial Sequence
  Description of Artificial Sequence: Synthetic oligonucleotide
  Sense strand starting at position 3412 of SEQ ID NO: 1562716
uuguacauucguuacagga

SEQ ID NO: 1767666 - RNA, 19 nt, Artificial Sequence
  Description of Artificial Sequence: Synthetic oligonucleotide
  Antisense strand to SEQ ID NO: 1767665
uccuguaacgaauguacaa

SEQ ID NO: 1767667 - RNA, 19 nt, Artificial Sequence
  Description of Artificial Sequence: Synthetic oligonucleotide
  Sense strand starting at position 3443 of SEQ ID NO: 1562716
uugagauaucaugguaaug

SEQ ID NO: 1767668 - RNA, 19 nt, Artificial Sequence
  Description of Artificial Sequence: Synthetic oligonucleotide
  Antisense strand to SEQ ID NO: 1767667
cauuaccaugauaucucaa

SEQ ID NO: 1767669 - RNA, 19 nt, Artificial Sequence
  Description of Artificial Sequence: Synthetic oligonucleotide
  Sense strand starting at position 3665 of SEQ ID NO: 1562716
acagcuagaucagugacuu

SEQ ID NO: 1767670 - RNA, 19 nt, Artificial Sequence
  Description of Artificial Sequence: Synthetic oligonucleotide
  Antisense strand to SEQ ID NO: 1767669
aagucacugaucuagcugu

SEQ ID NO: 1767671 - RNA, 19 nt, Artificial Sequence
  Description of Artificial Sequence: Synthetic oligonucleotide
  Sense strand starting at position 3666 of SEQ ID NO: 1562716
cagcuagaucagugacuua

SEQ ID NO: 1767672 - RNA, 19 nt, Artificial Sequence
  Description of Artificial Sequence: Synthetic oligonucleotide
  Antisense strand to SEQ ID NO: 1767671
uaagucacugaucuagcug

SEQ ID NO: 1767673 - RNA, 19 nt, Artificial Sequence
  Description of Artificial Sequence: Synthetic oligonucleotide
  Sense strand starting at position 3669 of SEQ ID NO: 1562716
cuagaucagugacuuaaca

SEQ ID NO: 1767674 - RNA, 19 nt, Artificial Sequence
  Description of Artificial Sequence: Synthetic oligonucleotide
  Antisense strand to SEQ ID NO: 1767673
uguuaagucacugaucuag

SEQ ID NO: 1767675 - RNA, 19 nt, Artificial Sequence
  Description of Artificial Sequence: Synthetic oligonucleotide
  Sense strand starting at position 3691 of SEQ ID NO: 1562716
uggauaauucgucacuccu

SEQ ID NO: 1767676 - RNA, 19 nt, Artificial Sequence
  Description of Artificial Sequence: Synthetic oligonucleotide
  Antisense strand to SEQ ID NO: 1767675
aggagugacgaauuaucca

SEQ ID NO: 1767677 - RNA, 19 nt, Artificial Sequence
  Description of Artificial Sequence: Synthetic oligonucleotide
  Sense strand starting at position 3693 of SEQ ID NO: 1562716
gauaauucgucacuccuga

SEQ ID NO: 1767678 - RNA, 19 nt, Artificial Sequence
  Description of Artificial Sequence: Synthetic oligonucleotide
  Antisense strand to SEQ ID NO: 1767677
ucaggagugacgaauuauc

SEQ ID NO: 1767679 - RNA, 19 nt, Artificial Sequence
  Description of Artificial Sequence: Synthetic oligonucleotide
  Sense strand starting at position 3795 of SEQ ID NO: 1562716
cuuugagcuguuuaggaag

SEQ ID NO: 1767680 - RNA, 19 nt, Artificial Sequence
  Description of Artificial Sequence: Synthetic oligonucleotide
  Antisense strand to SEQ ID NO: 1767679
cuuccuaaacagcucaaag

SEQ ID NO: 1767681 - RNA, 19 nt, Artificial Sequence
  Description of Artificial Sequence: Synthetic oligonucleotide
  Sense strand starting at position 3849 of SEQ ID NO: 1562716
ggauaaugccuuggaggga

SEQ ID NO: 1767682 - RNA, 19 nt, Artificial Sequence
  Description of Artificial Sequence: Synthetic oligonucleotide
  Antisense strand to SEQ ID NO: 1767681
ucccuccaaggcauuaucc

SEQ ID NO: 1767683 - RNA, 19 nt, Artificial Sequence
  Description of Artificial Sequence: Synthetic oligonucleotide
  Sense strand starting at position 3873 of SEQ ID NO: 1562716
aggugucuagggugucaga

SEQ ID NO: 1767684 - RNA, 19 nt, Artificial Sequence
  Description of Artificial Sequence: Synthetic oligonucleotide
  Antisense strand to SEQ ID NO: 1767683
ucugacacccuagacaccu

SEQ ID NO: 1767685 - RNA, 19 nt, Artificial Sequence
  Description of Artificial Sequence: Synthetic oligonucleotide
  Sense strand starting at position 3928 of SEQ ID NO: 1562716
uuugcaacaugucugagau

SEQ ID NO: 1767686 - RNA, 19 nt, Artificial Sequence
  Description of Artificial Sequence: Synthetic oligonucleotide
  Antisense strand to SEQ ID NO: 1767685
aucucagacauguugcaaa

SEQ ID NO: 1767687 - RNA, 19 nt, Artificial Sequence
  Description of Artificial Sequence: Synthetic oligonucleotide
  Sense strand starting at position 3929 of SEQ ID NO: 1562716
uugcaacaugucugagaug

SEQ ID NO: 1767688 - RNA, 19 nt, Artificial Sequence
  Description of Artificial Sequence: Synthetic oligonucleotide
  Antisense strand to SEQ ID NO: 1767687
caucucagacauguugcaa

SEQ ID NO: 1767689 - RNA, 19 nt, Artificial Sequence
  Description of Artificial Sequence: Synthetic oligonucleotide
  Sense strand starting at position 233 of SEQ ID NO: 1562717
cucucauaauugucaagua

SEQ ID NO: 1767690 - RNA, 19 nt, Artificial Sequence
  Description of Artificial Sequence: Synthetic oligonucleotide
  Antisense strand to SEQ ID NO: 1767689
uacuugacaauuaugagag

SEQ ID NO: 1767691 - RNA, 19 nt, Artificial Sequence
  Description of Artificial Sequence: Synthetic oligonucleotide
  Sense strand starting at position 319 of SEQ ID NO: 1562717
uauagcuuuguggagaaau

SEQ ID NO: 1767692 - RNA, 19 nt, Artificial Sequence
  Description of Artificial Sequence: Synthetic oligonucleotide
  Antisense strand to SEQ ID NO: 1767691
auuucuccacaaagcuaua

SEQ ID NO: 1767693 - RNA, 19 nt, Artificial Sequence
  Description of Artificial Sequence: Synthetic oligonucleotide
  Sense strand starting at position 321 of SEQ ID NO: 1562717
uagcuuuguggagaaauau

SEQ ID NO: 1767694 - RNA, 19 nt, Artificial Sequence
  Description of Artificial Sequence: Synthetic oligonucleotide
  Antisense strand to SEQ ID NO: 1767693
auauuucuccacaaagcua

SEQ ID NO: 1767695 - RNA, 19 nt, Artificial Sequence
  Description of Artificial Sequence: Synthetic oligonucleotide
  Sense strand starting at position 520 of SEQ ID NO: 1562717
aucagcuggcauuaaacua

SEQ ID NO: 1767696 - RNA, 19 nt, Artificial Sequence
  Description of Artificial Sequence: Synthetic oligonucleotide
  Antisense strand to SEQ ID NO: 1767695
uaguuuaaugccagcugau

SEQ ID NO: 1767697 - RNA, 19 nt, Artificial Sequence
  Description of Artificial Sequence: Synthetic oligonucleotide
  Sense strand starting at position 533 of SEQ ID NO: 1562717
aaacuauugguccacgauc

SEQ ID NO: 1767698 - RNA, 19 nt, Artificial Sequence
  Description of Artificial Sequence: Synthetic oligonucleotide
  Antisense strand to SEQ ID NO: 1767697
gaucguggaccaauaguuu

SEQ ID NO: 1767699 - RNA, 19 nt, Artificial Sequence
  Description of Artificial Sequence: Synthetic oligonucleotide
  Sense strand starting at position 682 of SEQ ID NO: 1562717
agcugcucugaacaauuaa

SEQ ID NO: 1767700 - RNA, 19 nt, Artificial Sequence
  Description of Artificial Sequence: Synthetic oligonucleotide
  Antisense strand to SEQ ID NO: 1767699
uuaauuguucagagcagcu

SEQ ID NO: 1767701 - RNA, 19 nt, Artificial Sequence
  Description of Artificial Sequence: Synthetic oligonucleotide
  Sense strand starting at position 983 of SEQ ID NO: 1562717
acagguucugccuauagac

SEQ ID NO: 1767702 - RNA, 19 nt, Artificial Sequence
  Description of Artificial Sequence: Synthetic oligonucleotide
  Antisense strand to SEQ ID NO: 1767701
gucuauaggcagaaccugu

SEQ ID NO: 1767703 - RNA, 19 nt, Artificial Sequence
  Description of Artificial Sequence: Synthetic oligonucleotide
  Sense strand starting at position 985 of SEQ ID NO: 1562717
agguucugccuauagacau

SEQ ID NO: 1767704 - RNA, 19 nt, Artificial Sequence
  Description of Artificial Sequence: Synthetic oligonucleotide
  Antisense strand to SEQ ID NO: 1767703
augucuauaggcagaaccu

SEQ ID NO: 1767705 - RNA, 19 nt, Artificial Sequence
  Description of Artificial Sequence: Synthetic oligonucleotide
  Sense strand starting at position 1019 of SEQ ID NO: 1562717
ggaaaugagcucuggccaa

SEQ ID NO: 1767706 - RNA, 19 nt, Artificial Sequence
  Description of Artificial Sequence: Synthetic oligonucleotide
  Antisense strand to SEQ ID NO: 1767705
uuggccagagcucauuucc

SEQ ID NO: 1767707 - RNA, 19 nt, Artificial Sequence
  Description of Artificial Sequence: Synthetic oligonucleotide
  Sense strand starting at position 1023 of SEQ ID NO: 1562717
augagcucuggccaagaau

SEQ ID NO: 1767708 - RNA, 19 nt, Artificial Sequence
  Description of Artificial Sequence: Synthetic oligonucleotide
  Antisense strand to SEQ ID NO: 1767707
auucuuggccagagcucau

SEQ ID NO: 1767709 - RNA, 19 nt, Artificial Sequence
  Description of Artificial Sequence: Synthetic oligonucleotide
  Sense strand starting at position 1034 of SEQ ID NO: 1562717
ccaagaaugcuacgggaaa

SEQ ID NO: 1767710 - RNA, 19 nt, Artificial Sequence
  Description of Artificial Sequence: Synthetic oligonucleotide
  Antisense strand to SEQ ID NO: 1767709
uuucccguagcauucuugg

SEQ ID NO: 1767711 - RNA, 19 nt, Artificial Sequence
  Description of Artificial Sequence: Synthetic oligonucleotide
  Sense strand starting at position 1203 of SEQ ID NO: 1562717
ggcuccauucuaggaaaug

SEQ ID NO: 1767712 - RNA, 19 nt, Artificial Sequence
  Description of Artificial Sequence: Synthetic oligonucleotide
  Antisense strand to SEQ ID NO: 1767711
cauuuccuagaauggagcc

SEQ ID NO: 1767713 - RNA, 19 nt, Artificial Sequence
  Description of Artificial Sequence: Synthetic oligonucleotide
  Sense strand starting at position 1653 of SEQ ID NO: 1562717
gcaauuacccuaggagaac

SEQ ID NO: 1767714 - RNA, 19 nt, Artificial Sequence
  Description of Artificial Sequence: Synthetic oligonucleotide
  Antisense strand to SEQ ID NO: 1767713
guucuccuaggguaauugc

SEQ ID NO: 1767715 - RNA, 19 nt, Artificial Sequence
  Description of Artificial Sequence: Synthetic oligonucleotide
  Sense strand starting at position 2050 of SEQ ID NO: 1562717
aagcaagaugguugcagau

SEQ ID NO: 1767716 - RNA, 19 nt, Artificial Sequence
  Description of Artificial Sequence: Synthetic oligonucleotide
  Antisense strand to SEQ ID NO: 1767715
aucugcaaccaucuugcuu

SEQ ID NO: 1767717 - RNA, 19 nt, Artificial Sequence
  Description of Artificial Sequence: Synthetic oligonucleotide
  Sense strand starting at position 2806 of SEQ ID NO: 1562717
auguaauaguagucuauga

SEQ ID NO: 1767718 - RNA, 19 nt, Artificial Sequence
  Description of Artificial Sequence: Synthetic oligonucleotide
  Antisense strand to SEQ ID NO: 1767717
ucauagacuacuauuacau

SEQ ID NO: 1767719 - RNA, 19 nt, Artificial Sequence
  Description of Artificial Sequence: Synthetic oligonucleotide
  Sense strand starting at position 2808 of SEQ ID NO: 1562717
guaauaguagucuaugaag

SEQ ID NO: 1767720 - RNA, 19 nt, Artificial Sequence
  Description of Artificial Sequence: Synthetic oligonucleotide
  Antisense strand to SEQ ID NO: 1767719
cuucauagacuacuauuac

SEQ ID NO: 1767721 - RNA, 19 nt, Artificial Sequence
  Description of Artificial Sequence: Synthetic oligonucleotide
  Sense strand starting at position 2810 of SEQ ID NO: 1562717
aauaguagucuaugaagag

SEQ ID NO: 1767722 - RNA, 19 nt, Artificial Sequence
  Description of Artificial Sequence: Synthetic oligonucleotide
  Antisense strand to SEQ ID NO: 1767721
cucuucauagacuacuauu

SEQ ID NO: 1767723 - RNA, 19 nt, Artificial Sequence
  Description of Artificial Sequence: Synthetic oligonucleotide
  Sense strand starting at position 2833 of SEQ ID NO: 1562717
gugugugauggacaaugau

SEQ ID NO: 1767724 - RNA, 19 nt, Artificial Sequence
  Description of Artificial Sequence: Synthetic oligonucleotide
  Antisense strand to SEQ ID NO: 1767723
aucauuguccaucacacac

SEQ ID NO: 1767725 - RNA, 19 nt, Artificial Sequence
  Description of Artificial Sequence: Synthetic oligonucleotide
  Sense strand starting at position 2854 of SEQ ID NO: 1562717
gguagcuccagugacugau

SEQ ID NO: 1767726 - RNA, 19 nt, Artificial Sequence
  Description of Artificial Sequence: Synthetic oligonucleotide
  Antisense strand to SEQ ID NO: 1767725
aucagucacuggagcuacc

SEQ ID NO: 1767727 - RNA, 19 nt, Artificial Sequence
  Description of Artificial Sequence: Synthetic oligonucleotide
  Sense strand starting at position 2933 of SEQ ID NO: 1562717
cacuuugugccagacagua

SEQ ID NO: 1767728 - RNA, 19 nt, Artificial Sequence
  Description of Artificial Sequence: Synthetic oligonucleotide
  Antisense strand to SEQ ID NO: 1767727
uacugucuggcacaaagug

SEQ ID NO: 1767729 - RNA, 19 nt, Artificial Sequence
  Description of Artificial Sequence: Synthetic oligonucleotide
  Sense strand starting at position 2946 of SEQ ID NO: 1562717
acaguaaggacucggagau

SEQ ID NO: 1767730 - RNA, 19 nt, Artificial Sequence
  Description of Artificial Sequence: Synthetic oligonucleotide
  Antisense strand to SEQ ID NO: 1767729
aucuccgaguccuuacugu

SEQ ID NO: 1767731 - RNA, 19 nt, Artificial Sequence
  Description of Artificial Sequence: Synthetic oligonucleotide
  Sense strand starting at position 2947 of SEQ ID NO: 1562717
caguaaggacucggagaua

SEQ ID NO: 1767732 - RNA, 19 nt, Artificial Sequence
  Description of Artificial Sequence: Synthetic oligonucleotide
  Antisense strand to SEQ ID NO: 1767731
uaucuccgaguccuuacug

SEQ ID NO: 1767733 - RNA, 19 nt, Artificial Sequence
  Description of Artificial Sequence: Synthetic oligonucleotide
  Sense strand starting at position 3013 of SEQ ID NO: 1562717
ggcaccgucagagaagauu

SEQ ID NO: 1767734 - RNA, 19 nt, Artificial Sequence
  Description of Artificial Sequence: Synthetic oligonucleotide
  Antisense strand to SEQ ID NO: 1767733
aaucuucucugacggugcc

SEQ ID NO: 1767735 - RNA, 19 nt, Artificial Sequence
  Description of Artificial Sequence: Synthetic oligonucleotide
  Sense strand starting at position 3019 of SEQ ID NO: 1562717
gucagagaagauuguaaca

SEQ ID NO: 1767736 - RNA, 19 nt, Artificial Sequence
  Description of Artificial Sequence: Synthetic oligonucleotide
  Antisense strand to SEQ ID NO: 1767735
uguuacaaucuucucugac

SEQ ID NO: 1767737 - RNA, 19 nt, Artificial Sequence
  Description of Artificial Sequence: Synthetic oligonucleotide
  Sense strand starting at position 3035 of SEQ ID NO: 1562717
acaagauauguauggcaua

SEQ ID NO: 1767738 - RNA, 19 nt, Artificial Sequence
  Description of Artificial Sequence: Synthetic oligonucleotide
  Antisense strand to SEQ ID NO: 1767737
uaugccauacauaucuugu

SEQ ID NO: 1767739 - RNA, 19 nt, Artificial Sequence
  Description of Artificial Sequence: Synthetic oligonucleotide
  Sense strand starting at position 3040 of SEQ ID NO: 1562717
auauguauggcauaguaag

SEQ ID NO: 1767740 - RNA, 19 nt, Artificial Sequence
  Description of Artificial Sequence: Synthetic oligonucleotide
  Antisense strand to SEQ ID NO: 1767739
cuuacuaugccauacauau

SEQ ID NO: 1767741 - RNA, 19 nt, Artificial Sequence
  Description of Artificial Sequence: Synthetic oligonucleotide
  Sense strand starting at position 3077 of SEQ ID NO: 1562717
uucugccacugaguauuua

SEQ ID NO: 1767742 - RNA, 19 nt, Artificial Sequence
  Description of Artificial Sequence: Synthetic oligonucleotide
  Antisense strand to SEQ ID NO: 1767741
uaaauacucaguggcagaa

SEQ ID NO: 1767743 - RNA, 19 nt, Artificial Sequence
  Description of Artificial Sequence: Synthetic oligonucleotide
  Sense strand starting at position 3195 of SEQ ID NO: 1562717
ggacacaucauguguaaag

SEQ ID NO: 1767744 - RNA, 19 nt, Artificial Sequence
  Description of Artificial Sequence: Synthetic oligonucleotide
  Antisense strand to SEQ ID NO: 1767743
cuuuacacaugaugugucc

SEQ ID NO: 1767745 - RNA, 19 nt, Artificial Sequence
  Description of Artificial Sequence: Synthetic oligonucleotide
  Sense strand starting at position 3228 of SEQ ID NO: 1562717
ccagccuauuaucuuggaa

SEQ ID NO: 1767746 - RNA, 19 nt, Artificial Sequence
  Description of Artificial Sequence: Synthetic oligonucleotide
  Antisense strand to SEQ ID NO: 1767745
uuccaagauaauaggcugg

SEQ ID NO: 1767747 - RNA, 19 nt, Artificial Sequence
  Description of Artificial Sequence: Synthetic oligonucleotide
  Sense strand starting at position 3349 of SEQ ID NO: 1562717
uccauacuacaaggugauu

SEQ ID NO: 1767748 - RNA, 19 nt, Artificial Sequence
  Description of Artificial Sequence: Synthetic oligonucleotide
  Antisense strand to SEQ ID NO: 1767747
aaucaccuuguaguaugga

SEQ ID NO: 1767749 - RNA, 19 nt, Artificial Sequence
  Description of Artificial Sequence: Synthetic oligonucleotide
  Sense strand starting at position 3597 of SEQ ID NO: 1562717
gugaguuuggaauauuauu

SEQ ID NO: 1767750 - RNA, 19 nt, Artificial Sequence
  Description of Artificial Sequence: Synthetic oligonucleotide
  Antisense strand to SEQ ID NO: 1767749
aauaauauuccaaacucac

SEQ ID NO: 1767751 - RNA, 19 nt, Artificial Sequence
  Description of Artificial Sequence: Synthetic oligonucleotide
  Sense strand starting at position 3614 of SEQ ID NO: 1562717
uuugacuggcuauaauaua

SEQ ID NO: 1767752 - RNA, 19 nt, Artificial Sequence
  Description of Artificial Sequence: Synthetic oligonucleotide
  Antisense strand to SEQ ID NO: 1767751
uauauuauagccagucaaa

SEQ ID NO: 1767753 - RNA, 19 nt, Artificial Sequence
  Description of Artificial Sequence: Synthetic oligonucleotide
  Sense strand starting at position 3698 of SEQ ID NO: 1562717
gaaugcuauguugagguau

SEQ ID NO: 1767754 - RNA, 19 nt, Artificial Sequence
  Description of Artificial Sequence: Synthetic oligonucleotide
  Antisense strand to SEQ ID NO: 1767753
auaccucaacauagcauuc

SEQ ID NO: 1767755 - RNA, 19 nt, Artificial Sequence
  Description of Artificial Sequence: Synthetic oligonucleotide
  Sense strand starting at position 3760 of SEQ ID NO: 1562717
uacauugagguauaguuua

SEQ ID NO: 1767756 - RNA, 19 nt, Artificial Sequence
  Description of Artificial Sequence: Synthetic oligonucleotide
  Antisense strand to SEQ ID NO: 1767755
uaaacuauaccucaaugua

SEQ ID NO: 1767757 - RNA, 19 nt, Artificial Sequence
  Description of Artificial Sequence: Synthetic oligonucleotide
  Sense strand starting at position 3855 of SEQ ID NO: 1562717
aggugagaaagcugaguuu

SEQ ID NO: 1767758 - RNA, 19 nt, Artificial Sequence
  Description of Artificial Sequence: Synthetic oligonucleotide
  Antisense strand to SEQ ID NO: 1767757
aaacucagcuuucucaccu

SEQ ID NO: 1767759 - RNA, 19 nt, Artificial Sequence
  Description of Artificial Sequence: Synthetic oligonucleotide
  Sense strand starting at position 3862 of SEQ ID NO: 1562717
aaagcugaguuuguggaau

SEQ ID NO: 1767760 - RNA, 19 nt, Artificial Sequence
  Description of Artificial Sequence: Synthetic oligonucleotide
  Antisense strand to SEQ ID NO: 1767759
auuccacaaacucagcuuu

SEQ ID NO: 1767761 - RNA, 19 nt, Artificial Sequence
  Description of Artificial Sequence: Synthetic oligonucleotide
  Sense strand starting at position 3868 of SEQ ID NO: 1562717
gaguuuguggaauaugcau

SEQ ID NO: 1767762 - RNA, 19 nt, Artificial Sequence
  Description of Artificial Sequence: Synthetic oligonucleotide
  Antisense strand to SEQ ID NO: 1767761
augcauauuccacaaacuc

SEQ ID NO: 1767763 - RNA, 19 nt, Artificial Sequence
  Description of Artificial Sequence: Synthetic oligonucleotide
  Sense strand starting at position 3874 of SEQ ID NO: 1562717
guggaauaugcauacauuc

SEQ ID NO: 1767764 - RNA, 19 nt, Artificial Sequence
  Description of Artificial Sequence: Synthetic oligonucleotide
  Antisense strand to SEQ ID NO: 1767763
gaauguaugcauauuccac

SEQ ID NO: 1767765 - RNA, 19 nt, Artificial Sequence
  Description of Artificial Sequence: Synthetic oligonucleotide
  Sense strand starting at position 3943 of SEQ ID NO: 1562717
cuagaaggaaguuguaguu

SEQ ID NO: 1767766 - RNA, 19 nt, Artificial Sequence
  Description of Artificial Sequence: Synthetic oligonucleotide
  Antisense strand to SEQ ID NO: 1767765
aacuacaacuuccuucuag

SEQ ID NO: 1767767 - RNA, 19 nt, Artificial Sequence
  Description of Artificial Sequence: Synthetic oligonucleotide
  Sense strand starting at position 3950 of SEQ ID NO: 1562717
gaaguuguaguuuaauacu

SEQ ID NO: 1767768 - RNA, 19 nt, Artificial Sequence
  Description of Artificial Sequence: Synthetic oligonucleotide
  Antisense strand to SEQ ID NO: 1767767
aguauuaaacuacaacuuc

SEQ ID NO: 1767769 - RNA, 19 nt, Artificial Sequence
  Description of Artificial Sequence: Synthetic oligonucleotide
  Sense strand starting at position 259 of SEQ ID NO: 1562718
uuagaaacaugcucucgaa

SEQ ID NO: 1767770 - RNA, 19 nt, Artificial Sequence
  Description of Artificial Sequence: Synthetic oligonucleotide
  Antisense strand to SEQ ID NO: 1767769
uucgagagcauguuucuaa

SEQ ID NO: 1767771 - RNA, 19 nt, Artificial Sequence
  Description of Artificial Sequence: Synthetic oligonucleotide
  Sense strand starting at position 271 of SEQ ID NO: 1562718
ucucgaaguucucuacaaa

SEQ ID NO: 1767772 - RNA, 19 nt, Artificial Sequence
  Description of Artificial Sequence: Synthetic oligonucleotide
  Antisense strand to SEQ ID NO: 1767771
uuuguagagaacuucgaga

SEQ ID NO: 1767773 - RNA, 19 nt, Artificial Sequence
  Description of Artificial Sequence: Synthetic oligonucleotide
  Sense strand starting at position 272 of SEQ ID NO: 1562718
cucgaaguucucuacaaac

SEQ ID NO: 1767774 - RNA, 19 nt, Artificial Sequence
  Description of Artificial Sequence: Synthetic oligonucleotide
  Antisense strand to SEQ ID NO: 1767773
guuuguagagaacuucgag

SEQ ID NO: 1767775 - RNA, 19 nt, Artificial Sequence
  Description of Artificial Sequence: Synthetic oligonucleotide
  Sense strand starting at position 274 of SEQ ID NO: 1562718
cgaaguucucuacaaacuc

SEQ ID NO: 1767776 - RNA, 19 nt, Artificial Sequence
  Description of Artificial Sequence: Synthetic oligonucleotide
  Antisense strand to SEQ ID NO: 1767775
gaguuuguagagaacuucg

SEQ ID NO: 1767777 - RNA, 19 nt, Artificial Sequence
  Description of Artificial Sequence: Synthetic oligonucleotide
  Sense strand starting at position 351 of SEQ ID NO: 1562718
gccugcucucagggaguua

SEQ ID NO: 1767778 - RNA, 19 nt, Artificial Sequence
  Description of Artificial Sequence: Synthetic oligonucleotide
  Antisense strand to SEQ ID NO: 1767777
uaacucccugagagcaggc

SEQ ID NO: 1767779 - RNA, 19 nt, Artificial Sequence
  Description of Artificial Sequence: Synthetic oligonucleotide
  Sense strand starting at position 352 of SEQ ID NO: 1562718
ccugcucucagggaguuaa

SEQ ID NO: 1767780 - RNA, 19 nt, Artificial Sequence
  Description of Artificial Sequence: Synthetic oligonucleotide
  Antisense strand to SEQ ID NO: 1767779
uuaacucccugagagcagg

SEQ ID NO: 1767781 - RNA, 19 nt, Artificial Sequence
  Description of Artificial Sequence: Synthetic oligonucleotide
  Sense strand starting at position 370 of SEQ ID NO: 1562718
aagagaugcuccguaguaa

SEQ ID NO: 1767782 - RNA, 19 nt, Artificial Sequence
  Description of Artificial Sequence: Synthetic oligonucleotide
  Antisense strand to SEQ ID NO: 1767781
uuacuacggagcaucucuu

SEQ ID NO: 1767783 - RNA, 19 nt, Artificial Sequence
  Description of Artificial Sequence: Synthetic oligonucleotide
  Sense strand starting at position 371 of SEQ ID NO: 1562718
agagaugcuccguaguaaa

SEQ ID NO: 1767784 - RNA, 19 nt, Artificial Sequence
  Description of Artificial Sequence: Synthetic oligonucleotide
  Antisense strand to SEQ ID NO: 1767783
uuuacuacggagcaucucu

SEQ ID NO: 1767785 - RNA, 19 nt, Artificial Sequence
  Description of Artificial Sequence: Synthetic oligonucleotide
  Sense strand starting at position 396 of SEQ ID NO: 1562718
caucuuguggacugucaga

SEQ ID NO: 1767786 - RNA, 19 nt, Artificial Sequence
  Description of Artificial Sequence: Synthetic oligonucleotide
  Antisense strand to SEQ ID NO: 1767785
ucugacaguccacaagaug

SEQ ID NO: 1767787 - RNA, 19 nt, Artificial Sequence
  Description of Artificial Sequence: Synthetic oligonucleotide
  Sense strand starting at position 457 of SEQ ID NO: 1562718
guccuuacccaucaggaua

SEQ ID NO: 1767788 - RNA, 19 nt, Artificial Sequence
  Description of Artificial Sequence: Synthetic oligonucleotide
  Antisense strand to SEQ ID NO: 1767787
uauccugauggguaaggac

SEQ ID NO: 1767789 - RNA, 19 nt, Artificial Sequence
  Description of Artificial Sequence: Synthetic oligonucleotide
  Sense strand starting at position 520 of SEQ ID NO: 1562718
agaagucucccugaacuuc

SEQ ID NO: 1767790 - RNA, 19 nt, Artificial Sequence
  Description of Artificial Sequence: Synthetic oligonucleotide
  Antisense strand to SEQ ID NO: 1767789
gaaguucagggagacuucu

SEQ ID NO: 1767791 - RNA, 19 nt, Artificial Sequence
  Description of Artificial Sequence: Synthetic oligonucleotide
  Sense strand starting at position 549 of SEQ ID NO: 1562718
ggagcuaguccacaacuga

SEQ ID NO: 1767792 - RNA, 19 nt, Artificial Sequence
  Description of Artificial Sequence: Synthetic oligonucleotide
  Antisense strand to SEQ ID NO: 1767791
ucaguuguggacuagcucc

SEQ ID NO: 1767793 - RNA, 19 nt, Artificial Sequence
  Description of Artificial Sequence: Synthetic oligonucleotide
  Sense strand starting at position 563 of SEQ ID NO: 1562718
acugaaugaacuggucgua

SEQ ID NO: 1767794 - RNA, 19 nt, Artificial Sequence
  Description of Artificial Sequence: Synthetic oligonucleotide
  Antisense strand to SEQ ID NO: 1767793
uacgaccaguucauucagu

SEQ ID NO: 1767795 - RNA, 19 nt, Artificial Sequence
  Description of Artificial Sequence: Synthetic oligonucleotide
  Sense strand starting at position 566 of SEQ ID NO: 1562718
gaaugaacuggucguaaag

SEQ ID NO: 1767796 - RNA, 19 nt, Artificial Sequence
  Description of Artificial Sequence: Synthetic oligonucleotide
  Antisense strand to SEQ ID NO: 1767795
cuuuacgaccaguucauuc

SEQ ID NO: 1767797 - RNA, 19 nt, Artificial Sequence
  Description of Artificial Sequence: Synthetic oligonucleotide
  Sense strand starting at position 604 of SEQ ID NO: 1562718
aucuccaaguauguuuaaa

SEQ ID NO: 1767798 - RNA, 19 nt, Artificial Sequence
  Description of Artificial Sequence: Synthetic oligonucleotide
  Antisense strand to SEQ ID NO: 1767797
uuuaaacauacuuggagau

SEQ ID NO: 1767799 - RNA, 19 nt, Artificial Sequence
  Description of Artificial Sequence: Synthetic oligonucleotide
  Sense strand starting at position 692 of SEQ ID NO: 1562718
ucacguuuguaguucauga

SEQ ID NO: 1767800 - RNA, 19 nt, Artificial Sequence
  Description of Artificial Sequence: Synthetic oligonucleotide
  Antisense strand to SEQ ID NO: 1767799
ucaugaacuacaaacguga

SEQ ID NO: 1767801 - RNA, 19 nt, Artificial Sequence
  Description of Artificial Sequence: Synthetic oligonucleotide
  Sense strand starting at position 694 of SEQ ID NO: 1562718
acguuuguaguucaugauu

SEQ ID NO: 1767802 - RNA, 19 nt, Artificial Sequence
  Description of Artificial Sequence: Synthetic oligonucleotide
  Antisense strand to SEQ ID NO: 1767801
aaucaugaacuacaaacgu

SEQ ID NO: 1767803 - RNA, 19 nt, Artificial Sequence
  Description of Artificial Sequence: Synthetic oligonucleotide
  Sense strand starting at position 733 of SEQ ID NO: 1562718
ccuugauuuccagguacgu

SEQ ID NO: 1767804 - RNA, 19 nt, Artificial Sequence
  Description of Artificial Sequence: Synthetic oligonucleotide
  Antisense strand to SEQ ID NO: 1767803
acguaccuggaaaucaagg

SEQ ID NO: 1767805 - RNA, 19 nt, Artificial Sequence
  Description of Artificial Sequence: Synthetic oligonucleotide
  Sense strand starting at position 787 of SEQ ID NO: 1562718
augagaaagugacugcaaa

SEQ ID NO: 1767806 - RNA, 19 nt, Artificial Sequence
  Description of Artificial Sequence: Synthetic oligonucleotide
  Antisense strand to SEQ ID NO: 1767805
uuugcagucacuuucucau

SEQ ID NO: 1767807 - RNA, 19 nt, Artificial Sequence
  Description of Artificial Sequence: Synthetic oligonucleotide
  Sense strand starting at position 1085 of SEQ ID NO: 1562718
uuucgaagaguggaaagua

SEQ ID NO: 1767808 - RNA, 19 nt, Artificial Sequence
  Description of Artificial Sequence: Synthetic oligonucleotide
  Antisense strand to SEQ ID NO: 1767807
uacuuuccacucuucgaaa

SEQ ID NO: 1767809 - RNA, 19 nt, Artificial Sequence
  Description of Artificial Sequence: Synthetic oligonucleotide
  Sense strand starting at position 1129 of SEQ ID NO: 1562718
gagaaaggauucgaaauuc

SEQ ID NO: 1767810 - RNA, 19 nt, Artificial Sequence
  Description of Artificial Sequence: Synthetic oligonucleotide
  Antisense strand to SEQ ID NO: 1767809
gaauuucgaauccuuucuc

SEQ ID NO: 1767811 - RNA, 19 nt, Artificial Sequence
  Description of Artificial Sequence: Synthetic oligonucleotide
  Sense strand starting at position 1198 of SEQ ID NO: 1562718
acacaaaugcauuggcauu

SEQ ID NO: 1767812 - RNA, 19 nt, Artificial Sequence
  Description of Artificial Sequence: Synthetic oligonucleotide
  Antisense strand to SEQ ID NO: 1767811
aaugccaaugcauuugugu

SEQ ID NO: 1767813 - RNA, 19 nt, Artificial Sequence
  Description of Artificial Sequence: Synthetic oligonucleotide
  Sense strand starting at position 1223 of SEQ ID NO: 1562718
auuaaauugcaugagagca

SEQ ID NO: 1767814 - RNA, 19 nt, Artificial Sequence
  Description of Artificial Sequence: Synthetic oligonucleotide
  Antisense strand to SEQ ID NO: 1767813
ugcucucaugcaauuuaau

SEQ ID NO: 1767815 - RNA, 19 nt, Artificial Sequence
  Description of Artificial Sequence: Synthetic oligonucleotide
  Sense strand starting at position 1228 of SEQ ID NO: 1562718
auugcaugagagcaacaau

SEQ ID NO: 1767816 - RNA, 19 nt, Artificial Sequence
  Description of Artificial Sequence: Synthetic oligonucleotide
  Antisense strand to SEQ ID NO: 1767815
auuguugcucucaugcaau

SEQ ID NO: 1767817 - RNA, 19 nt, Artificial Sequence
  Description of Artificial Sequence: Synthetic oligonucleotide
  Sense strand starting at position 1299 of SEQ ID NO: 1562718
accgauaugacauaguguu

SEQ ID NO: 1767818 - RNA, 19 nt, Artificial Sequence
  Description of Artificial Sequence: Synthetic oligonucleotide
  Antisense strand to SEQ ID NO: 1767817
aacacuaugucauaucggu

SEQ ID NO: 1767819 - RNA, 19 nt, Artificial Sequence
  Description of Artificial Sequence: Synthetic oligonucleotide
  Sense strand starting at position 1314 of SEQ ID NO: 1562718
uguugcaaucaauguauua

SEQ ID NO: 1767820 - RNA, 19 nt, Artificial Sequence
  Description of Artificial Sequence: Synthetic oligonucleotide
  Antisense strand to SEQ ID NO: 1767819
uaauacauugauugcaaca

SEQ ID NO: 1767821 - RNA, 19 nt, Artificial Sequence
  Description of Artificial Sequence: Synthetic oligonucleotide
  Sense strand starting at position 3037 of SEQ ID NO: 1562718
gcgguuagcgcuuccgcaa

SEQ ID NO: 1767822 - RNA, 19 nt, Artificial Sequence
  Description of Artificial Sequence: Synthetic oligonucleotide
  Antisense strand to SEQ ID NO: 1767821
uugcggaagcgcuaaccgc

SEQ ID NO: 1767823 - RNA, 19 nt, Artificial Sequence
  Description of Artificial Sequence: Synthetic oligonucleotide
  Sense strand starting at position 3038 of SEQ ID NO: 1562718
cgguuagcgcuuccgcaaa

SEQ ID NO: 1767824 - RNA, 19 nt, Artificial Sequence
  Description of Artificial Sequence: Synthetic oligonucleotide
  Antisense strand to SEQ ID NO: 1767823
uuugcggaagcgcuaaccg

SEQ ID NO: 1767825 - RNA, 19 nt, Artificial Sequence
  Description of Artificial Sequence: Synthetic oligonucleotide
  Sense strand starting at position 3071 of SEQ ID NO: 1562718
cccuguggcucccuuuaaa

SEQ ID NO: 1767826 - RNA, 19 nt, Artificial Sequence
  Description of Artificial Sequence: Synthetic oligonucleotide
  Antisense strand to SEQ ID NO: 1767825
uuuaaagggagccacaggg

SEQ ID NO: 1767827 - RNA, 19 nt, Artificial Sequence
  Description of Artificial Sequence: Synthetic oligonucleotide
  Sense strand starting at position 3167 of SEQ ID NO: 1562718
gauaguuacgagggaaggu

SEQ ID NO: 1767828 - RNA, 19 nt, Artificial Sequence
  Description of Artificial Sequence: Synthetic oligonucleotide
  Antisense strand to SEQ ID NO: 1767827
accuucccucguaacuauc

SEQ ID NO: 1767829 - RNA, 19 nt, Artificial Sequence
  Description of Artificial Sequence: Synthetic oligonucleotide
  Sense strand starting at position 3168 of SEQ ID NO: 1562718
auaguuacgagggaagguu

SEQ ID NO: 1767830 - RNA, 19 nt, Artificial Sequence
  Description of Artificial Sequence: Synthetic oligonucleotide
  Antisense strand to SEQ ID NO: 1767829
aaccuucccucguaacuau

SEQ ID NO: 1767831 - RNA, 19 nt, Artificial Sequence
  Description of Artificial Sequence: Synthetic oligonucleotide
  Sense strand starting at position 3194 of SEQ ID NO: 1562718
uuggucucugcguaaggga

SEQ ID NO: 1767832 - RNA, 19 nt, Artificial Sequence
  Description of Artificial Sequence: Synthetic oligonucleotide
  Antisense strand to SEQ ID NO: 1767831
ucccuuacgcagagaccaa

SEQ ID NO: 1767833 - RNA, 19 nt, Artificial Sequence
  Description of Artificial Sequence: Synthetic oligonucleotide
  Sense strand starting at position 3544 of SEQ ID NO: 1562718
gcauuauuacucugaccag

SEQ ID NO: 1767834 - RNA, 19 nt, Artificial Sequence
  Description of Artificial Sequence: Synthetic oligonucleotide
  Antisense strand to SEQ ID NO: 1767833
cuggucagaguaauaaugc

SEQ ID NO: 1767835 - RNA, 19 nt, Artificial Sequence
  Description of Artificial Sequence: Synthetic oligonucleotide
  Sense strand starting at position 3580 of SEQ ID NO: 1562718
guggaaagauguuucggca

SEQ ID NO: 1767836 - RNA, 19 nt, Artificial Sequence
  Description of Artificial Sequence: Synthetic oligonucleotide
  Antisense strand to SEQ ID NO: 1767835
ugccgaaacaucuuuccac

SEQ ID NO: 1767837 - RNA, 19 nt, Artificial Sequence
  Description of Artificial Sequence: Synthetic oligonucleotide
  Sense strand starting at position 3706 of SEQ ID NO: 1562718
ugaagacauuucuaggguu

SEQ ID NO: 1767838 - RNA, 19 nt, Artificial Sequence
  Description of Artificial Sequence: Synthetic oligonucleotide
  Antisense strand to SEQ ID NO: 1767837
aacccuagaaaugucuuca

SEQ ID NO: 1767839 - RNA, 19 nt, Artificial Sequence
  Description of Artificial Sequence: Synthetic oligonucleotide
  Sense strand starting at position 3744 of SEQ ID NO: 1562718
guccgcucccaauagaaca

SEQ ID NO: 1767840 - RNA, 19 nt, Artificial Sequence
  Description of Artificial Sequence: Synthetic oligonucleotide
  Antisense strand to SEQ ID NO: 1767839
uguucuauugggagcggac

SEQ ID NO: 1767841 - RNA, 19 nt, Artificial Sequence
  Description of Artificial Sequence: Synthetic oligonucleotide
  Sense strand starting at position 3785 of SEQ ID NO: 1562718
gccauugccuuaucuaaug

SEQ ID NO: 1767842 - RNA, 19 nt, Artificial Sequence
  Description of Artificial Sequence: Synthetic oligonucleotide
  Antisense strand to SEQ ID NO: 1767841
cauuagauaaggcaauggc

SEQ ID NO: 1767843 - RNA, 19 nt, Artificial Sequence
  Description of Artificial Sequence: Synthetic oligonucleotide
  Sense strand starting at position 3862 of SEQ ID NO: 1562718
auguaauggugagaggaaa

SEQ ID NO: 1767844 - RNA, 19 nt, Artificial Sequence
  Description of Artificial Sequence: Synthetic oligonucleotide
  Antisense strand to SEQ ID NO: 1767843
uuuccucucaccauuacau

SEQ ID NO: 1767845 - RNA, 19 nt, Artificial Sequence
  Description of Artificial Sequence: Synthetic oligonucleotide
  Sense strand starting at position 3967 of SEQ ID NO: 1562718
uguguuuggccauggguaa

SEQ ID NO: 1767846 - RNA, 19 nt, Artificial Sequence
  Description of Artificial Sequence: Synthetic oligonucleotide
  Antisense strand to SEQ ID NO: 1767845
uuacccauggccaaacaca

SEQ ID NO: 1767847 - RNA, 19 nt, Artificial Sequence
  Description of Artificial Sequence: Synthetic oligonucleotide
  Sense strand starting at position 3968 of SEQ ID NO: 1562718
guguuuggccauggguaaa

SEQ ID NO: 1767848 - RNA, 19 nt, Artificial Sequence
  Description of Artificial Sequence: Synthetic oligonucleotide
  Antisense strand to SEQ ID NO: 1767847
uuuacccauggccaaacac

SEQ ID NO: 1767849 - RNA, 19 nt, Artificial Sequence
  Description of Artificial Sequence: Synthetic oligonucleotide
  Sense strand starting at position 51 of SEQ ID NO: 1562719
uguuuacuuugugucaaca

SEQ ID NO: 1767850 - RNA, 19 nt, Artificial Sequence
  Description of Artificial Sequence: Synthetic oligonucleotide
  Antisense strand to SEQ ID NO: 1767849
uguugacacaaaguaaaca

SEQ ID NO: 1767851 - RNA, 19 nt, Artificial Sequence
  Description of Artificial Sequence: Synthetic oligonucleotide
  Sense strand starting at position 105 of SEQ ID NO: 1562719
augguaguuacuggugaac

SEQ ID NO: 1767852 - RNA, 19 nt, Artificial Sequence
  Description of Artificial Sequence: Synthetic oligonucleotide
  Antisense strand to SEQ ID NO: 1767851
guucaccaguaacuaccau

SEQ ID NO: 1767853 - RNA, 19 nt, Artificial Sequence
  Description of Artificial Sequence: Synthetic oligonucleotide
  Sense strand starting at position 118 of SEQ ID NO: 1562719
gugaacaagguuugaacaa

SEQ ID NO: 1767854 - RNA, 19 nt, Artificial Sequence
  Description of Artificial Sequence: Synthetic oligonucleotide
  Antisense strand to SEQ ID NO: 1767853
uuguucaaaccuuguucac

SEQ ID NO: 1767855 - RNA, 19 nt, Artificial Sequence
  Description of Artificial Sequence: Synthetic oligonucleotide
  Sense strand starting at position 119 of SEQ ID NO: 1562719
ugaacaagguuugaacaaa

SEQ ID NO: 1767856 - RNA, 19 nt, Artificial Sequence
  Description of Artificial Sequence: Synthetic oligonucleotide
  Antisense strand to SEQ ID NO: 1767855
uuuguucaaaccuuguuca

SEQ ID NO: 1767857 - RNA, 19 nt, Artificial Sequence
  Description of Artificial Sequence: Synthetic oligonucleotide
  Sense strand starting at position 304 of SEQ ID NO: 1562719
gguauccacucuuugguau

SEQ ID NO: 1767858 - RNA, 19 nt, Artificial Sequence
  Description of Artificial Sequence: Synthetic oligonucleotide
  Antisense strand to SEQ ID NO: 1767857
auaccaaagaguggauacc

SEQ ID NO: 1767859 - RNA, 19 nt, Artificial Sequence
  Description of Artificial Sequence: Synthetic oligonucleotide
  Sense strand starting at position 340 of SEQ ID NO: 1562719
acacuuaccuguuuauuga

SEQ ID NO: 1767860 - RNA, 19 nt, Artificial Sequence
  Description of Artificial Sequence: Synthetic oligonucleotide
  Antisense strand to SEQ ID NO: 1767859
ucaauaaacagguaagugu

SEQ ID NO: 1767861 - RNA, 19 nt, Artificial Sequence
  Description of Artificial Sequence: Synthetic oligonucleotide
  Sense strand starting at position 347 of SEQ ID NO: 1562719
ccuguuuauugaccacaga

SEQ ID NO: 1767862 - RNA, 19 nt, Artificial Sequence
  Description of Artificial Sequence: Synthetic oligonucleotide
  Antisense strand to SEQ ID NO: 1767861
ucuguggucaauaaacagg

SEQ ID NO: 1767863 - RNA, 19 nt, Artificial Sequence
  Description of Artificial Sequence: Synthetic oligonucleotide
  Sense strand starting at position 348 of SEQ ID NO: 1562719
cuguuuauugaccacagau

SEQ ID NO: 1767864 - RNA, 19 nt, Artificial Sequence
  Description of Artificial Sequence: Synthetic oligonucleotide
  Antisense strand to SEQ ID NO: 1767863
aucuguggucaauaaacag

SEQ ID NO: 1767865 - RNA, 19 nt, Artificial Sequence
  Description of Artificial Sequence: Synthetic oligonucleotide
  Sense strand starting at position 377 of SEQ ID NO: 1562719
cuuaaacuguccuuaaguu

SEQ ID NO: 1767866 - RNA, 19 nt, Artificial Sequence
  Description of Artificial Sequence: Synthetic oligonucleotide
  Antisense strand to SEQ ID NO: 1767865
aacuuaaggacaguuuaag

SEQ ID NO: 1767867 - RNA, 19 nt, Artificial Sequence
  Description of Artificial Sequence: Synthetic oligonucleotide
  Sense strand starting at position 541 of SEQ ID NO: 1562719
ggguuaguguacccacaga

SEQ ID NO: 1767868 - RNA, 19 nt, Artificial Sequence
  Description of Artificial Sequence: Synthetic oligonucleotide
  Antisense strand to SEQ ID NO: 1767867
ucuguggguacacuaaccc

SEQ ID NO: 1767869 - RNA, 19 nt, Artificial Sequence
  Description of Artificial Sequence: Synthetic oligonucleotide
  Sense strand starting at position 826 of SEQ ID NO: 1562719
ccagaaauaucuuucuggu

SEQ ID NO: 1767870 - RNA, 19 nt, Artificial Sequence
  Description of Artificial Sequence: Synthetic oligonucleotide
  Antisense strand to SEQ ID NO: 1767869
accagaaagauauuucugg

SEQ ID NO: 1767871 - RNA, 19 nt, Artificial Sequence
  Description of Artificial Sequence: Synthetic oligonucleotide
  Sense strand starting at position 828 of SEQ ID NO: 1562719
agaaauaucuuucugguag

SEQ ID NO: 1767872 - RNA, 19 nt, Artificial Sequence
  Description of Artificial Sequence: Synthetic oligonucleotide
  Antisense strand to SEQ ID NO: 1767871
cuaccagaaagauauuucu

SEQ ID NO: 1767873 - RNA, 19 nt, Artificial Sequence
  Description of Artificial Sequence: Synthetic oligonucleotide
  Sense strand starting at position 865 of SEQ ID NO: 1562719
ccaggcuggccuuauuaua

SEQ ID NO: 1767874 - RNA, 19 nt, Artificial Sequence
  Description of Artificial Sequence: Synthetic oligonucleotide
  Antisense strand to SEQ ID NO: 1767873
uauaauaaggccagccugg

SEQ ID NO: 1767875 - RNA, 19 nt, Artificial Sequence
  Description of Artificial Sequence: Synthetic oligonucleotide
  Sense strand starting at position 872 of SEQ ID NO: 1562719
ggccuuauuauacaacgga

SEQ ID NO: 1767876 - RNA, 19 nt, Artificial Sequence
  Description of Artificial Sequence: Synthetic oligonucleotide
  Antisense strand to SEQ ID NO: 1767875
uccguuguauaauaaggcc

SEQ ID NO: 1767877 - RNA, 19 nt, Artificial Sequence
  Description of Artificial Sequence: Synthetic oligonucleotide
  Sense strand starting at position 1172 of SEQ ID NO: 1562719
ccacaaauccacgguaucu

SEQ ID NO: 1767878 - RNA, 19 nt, Artificial Sequence
  Description of Artificial Sequence: Synthetic oligonucleotide
  Antisense strand to SEQ ID NO: 1767877
agauaccguggauuugugg

SEQ ID NO: 1767879 - RNA, 19 nt, Artificial Sequence
  Description of Artificial Sequence: Synthetic oligonucleotide
  Sense strand starting at position 2160 of SEQ ID NO: 1562719
gcggaauggauucaggguu

SEQ ID NO: 1767880 - RNA, 19 nt, Artificial Sequence
  Description of Artificial Sequence: Synthetic oligonucleotide
  Antisense strand to SEQ ID NO: 1767879
aacccugaauccauuccgc

SEQ ID NO: 1767881 - RNA, 19 nt, Artificial Sequence
  Description of Artificial Sequence: Synthetic oligonucleotide
  Sense strand starting at position 2251 of SEQ ID NO: 1562719
gcgcgcucugcagugagua

SEQ ID NO: 1767882 - RNA, 19 nt, Artificial Sequence
  Description of Artificial Sequence: Synthetic oligonucleotide
  Antisense strand to SEQ ID NO: 1767881
uacucacugcagagcgcgc

SEQ ID NO: 1767883 - RNA, 19 nt, Artificial Sequence
  Description of Artificial Sequence: Synthetic oligonucleotide
  Sense strand starting at position 2412 of SEQ ID NO: 1562719
ccgauauccuuguuucuac

SEQ ID NO: 1767884 - RNA, 19 nt, Artificial Sequence
  Description of Artificial Sequence: Synthetic oligonucleotide
  Antisense strand to SEQ ID NO: 1767883
guagaaacaaggauaucgg

SEQ ID NO: 1767885 - RNA, 19 nt, Artificial Sequence
  Description of Artificial Sequence: Synthetic oligonucleotide
  Sense strand starting at position 2413 of SEQ ID NO: 1562719
cgauauccuuguuucuaca

SEQ ID NO: 1767886 - RNA, 19 nt, Artificial Sequence
  Description of Artificial Sequence: Synthetic oligonucleotide
  Antisense strand to SEQ ID NO: 1767885
uguagaaacaaggauaucg

SEQ ID NO: 1767887 - RNA, 19 nt, Artificial Sequence
  Description of Artificial Sequence: Synthetic oligonucleotide
  Sense strand starting at position 2415 of SEQ ID NO: 1562719
auauccuuguuucuacaga

SEQ ID NO: 1767888 - RNA, 19 nt, Artificial Sequence
  Description of Artificial Sequence: Synthetic oligonucleotide
  Antisense strand to SEQ ID NO: 1767887
ucuguagaaacaaggauau

SEQ ID NO: 1767889 - RNA, 19 nt, Artificial Sequence
  Description of Artificial Sequence: Synthetic oligonucleotide
  Sense strand starting at position 2447 of SEQ ID NO: 1562719
gcccaaggaaauugaguau

SEQ ID NO: 1767890 - RNA, 19 nt, Artificial Sequence
  Description of Artificial Sequence: Synthetic oligonucleotide
  Antisense strand to SEQ ID NO: 1767889
auacucaauuuccuugggc

SEQ ID NO: 1767891 - RNA, 19 nt, Artificial Sequence
  Description of Artificial Sequence: Synthetic oligonucleotide
  Sense strand starting at position 2454 of SEQ ID NO: 1562719
gaaauugaguaucucugca

SEQ ID NO: 1767892 - RNA, 19 nt, Artificial Sequence
  Description of Artificial Sequence: Synthetic oligonucleotide
  Antisense strand to SEQ ID NO: 1767891
ugcagagauacucaauuuc

SEQ ID NO: 1767893 - RNA, 19 nt, Artificial Sequence
  Description of Artificial Sequence: Synthetic oligonucleotide
  Sense strand starting at position 2458 of SEQ ID NO: 1562719
uugaguaucucugcaaagu

SEQ ID NO: 1767894 - RNA, 19 nt, Artificial Sequence
  Description of Artificial Sequence: Synthetic oligonucleotide
  Antisense strand to SEQ ID NO: 1767893
acuuugcagagauacucaa

SEQ ID NO: 1767895 - RNA, 19 nt, Artificial Sequence
  Description of Artificial Sequence: Synthetic oligonucleotide
  Sense strand starting at position 2459 of SEQ ID NO: 1562719
ugaguaucucugcaaaguc

SEQ ID NO: 1767896 - RNA, 19 nt, Artificial Sequence
  Description of Artificial Sequence: Synthetic oligonucleotide
  Antisense strand to SEQ ID NO: 1767895
gacuuugcagagauacuca

SEQ ID NO: 1767897 - RNA, 19 nt, Artificial Sequence
  Description of Artificial Sequence: Synthetic oligonucleotide
  Sense strand starting at position 2532 of SEQ ID NO: 1562719
ggaagaaucuccguccuug

SEQ ID NO: 1767898 - RNA, 19 nt, Artificial Sequence
  Description of Artificial Sequence: Synthetic oligonucleotide
  Antisense strand to SEQ ID NO: 1767897
caaggacggagauucuucc

SEQ ID NO: 1767899 - RNA, 19 nt, Artificial Sequence
  Description of Artificial Sequence: Synthetic oligonucleotide
  Sense strand starting at position 2569 of SEQ ID NO: 1562719
ccggcuucccaguaaggua

SEQ ID NO: 1767900 - RNA, 19 nt, Artificial Sequence
  Description of Artificial Sequence: Synthetic oligonucleotide
  Antisense strand to SEQ ID NO: 1767899
uaccuuacugggaagccgg

SEQ ID NO: 1767901 - RNA, 19 nt, Artificial Sequence
  Description of Artificial Sequence: Synthetic oligonucleotide
  Sense strand starting at position 3030 of SEQ ID NO: 1562719
ugugcuccuaaggauaaga

SEQ ID NO: 1767902 - RNA, 19 nt, Artificial Sequence
  Description of Artificial Sequence: Synthetic oligonucleotide
  Antisense strand to SEQ ID NO: 1767901
ucuuauccuuaggagcaca

SEQ ID NO: 1767903 - RNA, 19 nt, Artificial Sequence
  Description of Artificial Sequence: Synthetic oligonucleotide
  Sense strand starting at position 3041 of SEQ ID NO: 1562719
ggauaagauccaugauguu

SEQ ID NO: 1767904 - RNA, 19 nt, Artificial Sequence
  Description of Artificial Sequence: Synthetic oligonucleotide
  Antisense strand to SEQ ID NO: 1767903
aacaucauggaucuuaucc

SEQ ID NO: 1767905 - RNA, 19 nt, Artificial Sequence
  Description of Artificial Sequence: Synthetic oligonucleotide
  Sense strand starting at position 3095 of SEQ ID NO: 1562719
ggcuuccaagggugaaaua

SEQ ID NO: 1767906 - RNA, 19 nt, Artificial Sequence
  Description of Artificial Sequence: Synthetic oligonucleotide
  Antisense strand to SEQ ID NO: 1767905
uauuucacccuuggaagcc

SEQ ID NO: 1767907 - RNA, 19 nt, Artificial Sequence
  Description of Artificial Sequence: Synthetic oligonucleotide
  Sense strand starting at position 3157 of SEQ ID NO: 1562719
agaggagcuuuccacauuu

SEQ ID NO: 1767908 - RNA, 19 nt, Artificial Sequence
  Description of Artificial Sequence: Synthetic oligonucleotide
  Antisense strand to SEQ ID NO: 1767907
aaauguggaaagcuccucu

SEQ ID NO: 1767909 - RNA, 19 nt, Artificial Sequence
  Description of Artificial Sequence: Synthetic oligonucleotide
  Sense strand starting at position 3236 of SEQ ID NO: 1562719
cuucuugucucucugggau

SEQ ID NO: 1767910 - RNA, 19 nt, Artificial Sequence
  Description of Artificial Sequence: Synthetic oligonucleotide
  Antisense strand to SEQ ID NO: 1767909
aucccagagagacaagaag

SEQ ID NO: 1767911 - RNA, 19 nt, Artificial Sequence
  Description of Artificial Sequence: Synthetic oligonucleotide
  Sense strand starting at position 3270 of SEQ ID NO: 1562719
gaaucagcucagugggagu

SEQ ID NO: 1767912 - RNA, 19 nt, Artificial Sequence
  Description of Artificial Sequence: Synthetic oligonucleotide
  Antisense strand to SEQ ID NO: 1767911
acucccacugagcugauuc

SEQ ID NO: 1767913 - RNA, 19 nt, Artificial Sequence
  Description of Artificial Sequence: Synthetic oligonucleotide
  Sense strand starting at position 3392 of SEQ ID NO: 1562719
agggaaaggccauguuuga

SEQ ID NO: 1767914 - RNA, 19 nt, Artificial Sequence
  Description of Artificial Sequence: Synthetic oligonucleotide
  Antisense strand to SEQ ID NO: 1767913
ucaaacauggccuuucccu

SEQ ID NO: 1767915 - RNA, 19 nt, Artificial Sequence
  Description of Artificial Sequence: Synthetic oligonucleotide
  Sense strand starting at position 3498 of SEQ ID NO: 1562719
ccaugauuagugcggauug

SEQ ID NO: 1767916 - RNA, 19 nt, Artificial Sequence
  Description of Artificial Sequence: Synthetic oligonucleotide
  Antisense strand to SEQ ID NO: 1767915
caauccgcacuaaucaugg

SEQ ID NO: 1767917 - RNA, 19 nt, Artificial Sequence
  Description of Artificial Sequence: Synthetic oligonucleotide
  Sense strand starting at position 3629 of SEQ ID NO: 1562719
aggagaggcucaucuguaa

SEQ ID NO: 1767918 - RNA, 19 nt, Artificial Sequence
  Description of Artificial Sequence: Synthetic oligonucleotide
  Antisense strand to SEQ ID NO: 1767917
uuacagaugagccucuccu

SEQ ID NO: 1767919 - RNA, 19 nt, Artificial Sequence
  Description of Artificial Sequence: Synthetic oligonucleotide
  Sense strand starting at position 3647 of SEQ ID NO: 1562719
aaaugaggcucaucuguaa

SEQ ID NO: 1767920 - RNA, 19 nt, Artificial Sequence
  Description of Artificial Sequence: Synthetic oligonucleotide
  Antisense strand to SEQ ID NO: 1767919
uuacagaugagccucauuu

SEQ ID NO: 1767921 - RNA, 19 nt, Artificial Sequence
  Description of Artificial Sequence: Synthetic oligonucleotide
  Sense strand starting at position 3725 of SEQ ID NO: 1562719
guacccuuccuguggaaag

SEQ ID NO: 1767922 - RNA, 19 nt, Artificial Sequence
  Description of Artificial Sequence: Synthetic oligonucleotide
  Antisense strand to SEQ ID NO: 1767921
cuuuccacaggaaggguac

SEQ ID NO: 1767923 - RNA, 19 nt, Artificial Sequence
  Description of Artificial Sequence: Synthetic oligonucleotide
  Sense strand starting at position 3839 of SEQ ID NO: 1562719
cucugaguauggcucaaga

SEQ ID NO: 1767924 - RNA, 19 nt, Artificial Sequence
  Description of Artificial Sequence: Synthetic oligonucleotide
  Antisense strand to SEQ ID NO: 1767923
ucuugagccauacucagag

SEQ ID NO: 1767925 - RNA, 19 nt, Artificial Sequence
  Description of Artificial Sequence: Synthetic oligonucleotide
  Sense strand starting at position 3841 of SEQ ID NO: 1562719
cugaguauggcucaagaug

SEQ ID NO: 1767926 - RNA, 19 nt, Artificial Sequence
  Description of Artificial Sequence: Synthetic oligonucleotide
  Antisense strand to SEQ ID NO: 1767925
caucuugagccauacucag

SEQ ID NO: 1767927 - RNA, 19 nt, Artificial Sequence
  Description of Artificial Sequence: Synthetic oligonucleotide
  Sense strand starting at position 3953 of SEQ ID NO: 1562719
agcauuaaggcugggaaca

SEQ ID NO: 1767928 - RNA, 19 nt, Artificial Sequence
  Description of Artificial Sequence: Synthetic oligonucleotide
  Antisense strand to SEQ ID NO: 1767927
uguucccagccuuaaugcu

SEQ ID NO: 1767929 - RNA, 19 nt, Artificial Sequence
  Description of Artificial Sequence: Synthetic oligonucleotide
  Sense strand starting at position 78 of SEQ ID NO: 1562720
gagguaauucuugauccuu

SEQ ID NO: 1767930 - RNA, 19 nt, Artificial Sequence
  Description of Artificial Sequence: Synthetic oligonucleotide
  Antisense strand to SEQ ID NO: 1767929
aaggaucaagaauuaccuc

SEQ ID NO: 1767931 - RNA, 19 nt, Artificial Sequence
  Description of Artificial Sequence: Synthetic oligonucleotide
  Sense strand starting at position 153 of SEQ ID NO: 1562720
ccucgaaccuuguuaccau

SEQ ID NO: 1767932 - RNA, 19 nt, Artificial Sequence
  Description of Artificial Sequence: Synthetic oligonucleotide
  Antisense strand to SEQ ID NO: 1767931
augguaacaagguucgagg

SEQ ID NO: 1767933 - RNA, 19 nt, Artificial Sequence
  Description of Artificial Sequence: Synthetic oligonucleotide
  Sense strand starting at position 224 of SEQ ID NO: 1562720
agagauaauucuuuagcuc

SEQ ID NO: 1767934 - RNA, 19 nt, Artificial Sequence
  Description of Artificial Sequence: Synthetic oligonucleotide
  Antisense strand to SEQ ID NO: 1767933
gagcuaaagaauuaucucu

SEQ ID NO: 1767935 - RNA, 19 nt, Artificial Sequence
  Description of Artificial Sequence: Synthetic oligonucleotide
  Sense strand starting at position 262 of SEQ ID NO: 1562720
acagcuguugcguuucagu

SEQ ID NO: 1767936 - RNA, 19 nt, Artificial Sequence
  Description of Artificial Sequence: Synthetic oligonucleotide
  Antisense strand to SEQ ID NO: 1767935
acugaaacgcaacagcugu

SEQ ID NO: 1767937 - RNA, 19 nt, Artificial Sequence
  Description of Artificial Sequence: Synthetic oligonucleotide
  Sense strand starting at position 264 of SEQ ID NO: 1562720
agcuguugcguuucaguau

SEQ ID NO: 1767938 - RNA, 19 nt, Artificial Sequence
  Description of Artificial Sequence: Synthetic oligonucleotide
  Antisense strand to SEQ ID NO: 1767937
auacugaaacgcaacagcu

SEQ ID NO: 1767939 - RNA, 19 nt, Artificial Sequence
  Description of Artificial Sequence: Synthetic oligonucleotide
  Sense strand starting at position 276 of SEQ ID NO: 1562720
ucaguaugucugggccuga

SEQ ID NO: 1767940 - RNA, 19 nt, Artificial Sequence
  Description of Artificial Sequence: Synthetic oligonucleotide
  Antisense strand to SEQ ID NO: 1767939
ucaggcccagacauacuga

SEQ ID NO: 1767941 - RNA, 19 nt, Artificial Sequence
  Description of Artificial Sequence: Synthetic oligonucleotide
  Sense strand starting at position 277 of SEQ ID NO: 1562720
caguaugucugggccugau

SEQ ID NO: 1767942 - RNA, 19 nt, Artificial Sequence
  Description of Artificial Sequence: Synthetic oligonucleotide
  Antisense strand to SEQ ID NO: 1767941
aucaggcccagacauacug

SEQ ID NO: 1767943 - RNA, 19 nt, Artificial Sequence
  Description of Artificial Sequence: Synthetic oligonucleotide
  Sense strand starting at position 280 of SEQ ID NO: 1562720
uaugucugggccugauuau

SEQ ID NO: 1767944 - RNA, 19 nt, Artificial Sequence
  Description of Artificial Sequence: Synthetic oligonucleotide
  Antisense strand to SEQ ID NO: 1767943
auaaucaggcccagacaua

SEQ ID NO: 1767945 - RNA, 19 nt, Artificial Sequence
  Description of Artificial Sequence: Synthetic oligonucleotide
  Sense strand starting at position 281 of SEQ ID NO: 1562720
augucugggccugauuauu

SEQ ID NO: 1767946 - RNA, 19 nt, Artificial Sequence
  Description of Artificial Sequence: Synthetic oligonucleotide
  Antisense strand to SEQ ID NO: 1767945
aauaaucaggcccagacau

SEQ ID NO: 1767947 - RNA, 19 nt, Artificial Sequence
  Description of Artificial Sequence: Synthetic oligonucleotide
  Sense strand starting at position 306 of SEQ ID NO: 1562720
ggcuccaauuccucagaua

SEQ ID NO: 1767948 - RNA, 19 nt, Artificial Sequence
  Description of Artificial Sequence: Synthetic oligonucleotide
  Antisense strand to SEQ ID NO: 1767947
uaucugaggaauuggagcc

SEQ ID NO: 1767949 - RNA, 19 nt, Artificial Sequence
  Description of Artificial Sequence: Synthetic oligonucleotide
  Sense strand starting at position 370 of SEQ ID NO: 1562720
gggagcuacucuguacaca

SEQ ID NO: 1767950 - RNA, 19 nt, Artificial Sequence
  Description of Artificial Sequence: Synthetic oligonucleotide
  Antisense strand to SEQ ID NO: 1767949
uguguacagaguagcuccc

SEQ ID NO: 1767951 - RNA, 19 nt, Artificial Sequence
  Description of Artificial Sequence: Synthetic oligonucleotide
  Sense strand starting at position 371 of SEQ ID NO: 1562720
ggagcuacucuguacacaa

SEQ ID NO: 1767952 - RNA, 19 nt, Artificial Sequence
  Description of Artificial Sequence: Synthetic oligonucleotide
  Antisense strand to SEQ ID NO: 1767951
uuguguacagaguagcucc

SEQ ID NO: 1767953 - RNA, 19 nt, Artificial Sequence
  Description of Artificial Sequence: Synthetic oligonucleotide
  Sense strand starting at position 478 of SEQ ID NO: 1562720
uccagcuguccuuacucau

SEQ ID NO: 1767954 - RNA, 19 nt, Artificial Sequence
  Description of Artificial Sequence: Synthetic oligonucleotide
  Antisense strand to SEQ ID NO: 1767953
augaguaaggacagcugga

SEQ ID NO: 1767955 - RNA, 19 nt, Artificial Sequence
  Description of Artificial Sequence: Synthetic oligonucleotide
  Sense strand starting at position 559 of SEQ ID NO: 1562720
agagcuucgucucccaaau

SEQ ID NO: 1767956 - RNA, 19 nt, Artificial Sequence
  Description of Artificial Sequence: Synthetic oligonucleotide
  Antisense strand to SEQ ID NO: 1767955
auuugggagacgaagcucu

SEQ ID NO: 1767957 - RNA, 19 nt, Artificial Sequence
  Description of Artificial Sequence: Synthetic oligonucleotide
  Sense strand starting at position 740 of SEQ ID NO: 1562720
accuucgaggccuaaugaa

SEQ ID NO: 1767958 - RNA, 19 nt, Artificial Sequence
  Description of Artificial Sequence: Synthetic oligonucleotide
  Antisense strand to SEQ ID NO: 1767957
uucauuaggccucgaaggu

SEQ ID NO: 1767959 - RNA, 19 nt, Artificial Sequence
  Description of Artificial Sequence: Synthetic oligonucleotide
  Sense strand starting at position 1105 of SEQ ID NO: 1562720
gaugucauauguguuuaca

SEQ ID NO: 1767960 - RNA, 19 nt, Artificial Sequence
  Description of Artificial Sequence: Synthetic oligonucleotide
  Antisense strand to SEQ ID NO: 1767959
uguaaacacauaugacauc

SEQ ID NO: 1767961 - RNA, 19 nt, Artificial Sequence
  Description of Artificial Sequence: Synthetic oligonucleotide
  Sense strand starting at position 1108 of SEQ ID NO: 1562720
gucauauguguuuacagca

SEQ ID NO: 1767962 - RNA, 19 nt, Artificial Sequence
  Description of Artificial Sequence: Synthetic oligonucleotide
  Antisense strand to SEQ ID NO: 1767961
ugcuguaaacacauaugac

SEQ ID NO: 1767963 - RNA, 19 nt, Artificial Sequence
  Description of Artificial Sequence: Synthetic oligonucleotide
  Sense strand starting at position 1219 of SEQ ID NO: 1562720
ucaggagggaucuguugaa

SEQ ID NO: 1767964 - RNA, 19 nt, Artificial Sequence
  Description of Artificial Sequence: Synthetic oligonucleotide
  Antisense strand to SEQ ID NO: 1767963
uucaacagaucccuccuga

SEQ ID NO: 1767965 - RNA, 19 nt, Artificial Sequence
  Description of Artificial Sequence: Synthetic oligonucleotide
  Sense strand starting at position 1375 of SEQ ID NO: 1562720
uaacauaaggaccgguaau

SEQ ID NO: 1767966 - RNA, 19 nt, Artificial Sequence
  Description of Artificial Sequence: Synthetic oligonucleotide
  Antisense strand to SEQ ID NO: 1767965
auuaccgguccuuauguua

SEQ ID NO: 1767967 - RNA, 19 nt, Artificial Sequence
  Description of Artificial Sequence: Synthetic oligonucleotide
  Sense strand starting at position 1480 of SEQ ID NO: 1562720
aucacagauguuugccaga

SEQ ID NO: 1767968 - RNA, 19 nt, Artificial Sequence
  Description of Artificial Sequence: Synthetic oligonucleotide
  Antisense strand to SEQ ID NO: 1767967
ucuggcaaacaucugugau

SEQ ID NO: 1767969 - RNA, 19 nt, Artificial Sequence
  Description of Artificial Sequence: Synthetic oligonucleotide
  Sense strand starting at position 1485 of SEQ ID NO: 1562720
agauguuugccagaggagu

SEQ ID NO: 1767970 - RNA, 19 nt, Artificial Sequence
  Description of Artificial Sequence: Synthetic oligonucleotide
  Antisense strand to SEQ ID NO: 1767969
acuccucuggcaaacaucu

SEQ ID NO: 1767971 - RNA, 19 nt, Artificial Sequence
  Description of Artificial Sequence: Synthetic oligonucleotide
  Sense strand starting at position 1753 of SEQ ID NO: 1562720
ccgguugucgcccuaaaca

SEQ ID NO: 1767972 - RNA, 19 nt, Artificial Sequence
  Description of Artificial Sequence: Synthetic oligonucleotide
  Antisense strand to SEQ ID NO: 1767971
uguuuagggcgacaaccgg

SEQ ID NO: 1767973 - RNA, 19 nt, Artificial Sequence
  Description of Artificial Sequence: Synthetic oligonucleotide
  Sense strand starting at position 2389 of SEQ ID NO: 1562720
gcugauuucugccucugga

SEQ ID NO: 1767974 - RNA, 19 nt, Artificial Sequence
  Description of Artificial Sequence: Synthetic oligonucleotide
  Antisense strand to SEQ ID NO: 1767973
uccagaggcagaaaucagc

SEQ ID NO: 1767975 - RNA, 19 nt, Artificial Sequence
  Description of Artificial Sequence: Synthetic oligonucleotide
  Sense strand starting at position 2693 of SEQ ID NO: 1562720
auuugagucucugcucagu

SEQ ID NO: 1767976 - RNA, 19 nt, Artificial Sequence
  Description of Artificial Sequence: Synthetic oligonucleotide
  Antisense strand to SEQ ID NO: 1767975
acugagcagagacucaaau

SEQ ID NO: 1767977 - RNA, 19 nt, Artificial Sequence
  Description of Artificial Sequence: Synthetic oligonucleotide
  Sense strand starting at position 2769 of SEQ ID NO: 1562720
ggguguuauuuccaucaga

SEQ ID NO: 1767978 - RNA, 19 nt, Artificial Sequence
  Description of Artificial Sequence: Synthetic oligonucleotide
  Antisense strand to SEQ ID NO: 1767977
ucugauggaaauaacaccc

SEQ ID NO: 1767979 - RNA, 19 nt, Artificial Sequence
  Description of Artificial Sequence: Synthetic oligonucleotide
  Sense strand starting at position 2784 of SEQ ID NO: 1562720
cagagcacucacugcuaga

SEQ ID NO: 1767980 - RNA, 19 nt, Artificial Sequence
  Description of Artificial Sequence: Synthetic oligonucleotide
  Antisense strand to SEQ ID NO: 1767979
ucuagcagugagugcucug

SEQ ID NO: 1767981 - RNA, 19 nt, Artificial Sequence
  Description of Artificial Sequence: Synthetic oligonucleotide
  Sense strand starting at position 2872 of SEQ ID NO: 1562720
guuaauacuguacaccaua

SEQ ID NO: 1767982 - RNA, 19 nt, Artificial Sequence
  Description of Artificial Sequence: Synthetic oligonucleotide
  Antisense strand to SEQ ID NO: 1767981
uaugguguacaguauuaac

SEQ ID NO: 1767983 - RNA, 19 nt, Artificial Sequence
  Description of Artificial Sequence: Synthetic oligonucleotide
  Sense strand starting at position 2966 of SEQ ID NO: 1562720
ggagguugcaauugcaaau

SEQ ID NO: 1767984 - RNA, 19 nt, Artificial Sequence
  Description of Artificial Sequence: Synthetic oligonucleotide
  Antisense strand to SEQ ID NO: 1767983
auuugcaauugcaaccucc

SEQ ID NO: 1767985 - RNA, 19 nt, Artificial Sequence
  Description of Artificial Sequence: Synthetic oligonucleotide
  Sense strand starting at position 2980 of SEQ ID NO: 1562720
caaauagaguggucagggu

SEQ ID NO: 1767986 - RNA, 19 nt, Artificial Sequence
  Description of Artificial Sequence: Synthetic oligonucleotide
  Antisense strand to SEQ ID NO: 1767985
acccugaccacucuauuug

SEQ ID NO: 1767987 - RNA, 19 nt, Artificial Sequence
  Description of Artificial Sequence: Synthetic oligonucleotide
  Sense strand starting at position 3333 of SEQ ID NO: 1562720
ccacuauccaggcgagaug

SEQ ID NO: 1767988 - RNA, 19 nt, Artificial Sequence
  Description of Artificial Sequence: Synthetic oligonucleotide
  Antisense strand to SEQ ID NO: 1767987
caucucgccuggauagugg

SEQ ID NO: 1767989 - RNA, 19 nt, Artificial Sequence
  Description of Artificial Sequence: Synthetic oligonucleotide
  Sense strand starting at position 3390 of SEQ ID NO: 1562720
gaauuagaauggcuguuga

SEQ ID NO: 1767990 - RNA, 19 nt, Artificial Sequence
  Description of Artificial Sequence: Synthetic oligonucleotide
  Antisense strand to SEQ ID NO: 1767989
ucaacagccauucuaauuc

SEQ ID NO: 1767991 - RNA, 19 nt, Artificial Sequence
  Description of Artificial Sequence: Synthetic oligonucleotide
  Sense strand starting at position 3400 of SEQ ID NO: 1562720
ggcuguugaagguagagaa

SEQ ID NO: 1767992 - RNA, 19 nt, Artificial Sequence
  Description of Artificial Sequence: Synthetic oligonucleotide
  Antisense strand to SEQ ID NO: 1767991
uucucuaccuucaacagcc

SEQ ID NO: 1767993 - RNA, 19 nt, Artificial Sequence
  Description of Artificial Sequence: Synthetic oligonucleotide
  Sense strand starting at position 3496 of SEQ ID NO: 1562720
cuaggagaguugucauuau

SEQ ID NO: 1767994 - RNA, 19 nt, Artificial Sequence
  Description of Artificial Sequence: Synthetic oligonucleotide
  Antisense strand to SEQ ID NO: 1767993
auaaugacaacucuccuag

SEQ ID NO: 1767995 - RNA, 19 nt, Artificial Sequence
  Description of Artificial Sequence: Synthetic oligonucleotide
  Sense strand starting at position 3500 of SEQ ID NO: 1562720
gagaguugucauuaucuga

SEQ ID NO: 1767996 - RNA, 19 nt, Artificial Sequence
  Description of Artificial Sequence: Synthetic oligonucleotide
  Antisense strand to SEQ ID NO: 1767995
ucagauaaugacaacucuc

SEQ ID NO: 1767997 - RNA, 19 nt, Artificial Sequence
  Description of Artificial Sequence: Synthetic oligonucleotide
  Sense strand starting at position 3503 of SEQ ID NO: 1562720
aguugucauuaucugagau

SEQ ID NO: 1767998 - RNA, 19 nt, Artificial Sequence
  Description of Artificial Sequence: Synthetic oligonucleotide
  Antisense strand to SEQ ID NO: 1767997
aucucagauaaugacaacu

SEQ ID NO: 1767999 - RNA, 19 nt, Artificial Sequence
  Description of Artificial Sequence: Synthetic oligonucleotide
  Sense strand starting at position 3504 of SEQ ID NO: 1562720
guugucauuaucugagaug

SEQ ID NO: 1768000 - RNA, 19 nt, Artificial Sequence
  Description of Artificial Sequence: Synthetic oligonucleotide
  Antisense strand to SEQ ID NO: 1767999
caucucagauaaugacaac

SEQ ID NO: 1768001 - RNA, 19 nt, Artificial Sequence
  Description of Artificial Sequence: Synthetic oligonucleotide
  Sense strand starting at position 3539 of SEQ ID NO: 1562720
cuuggucuggguuauguuu

SEQ ID NO: 1768002 - RNA, 19 nt, Artificial Sequence
  Description of Artificial Sequence: Synthetic oligonucleotide
  Antisense strand to SEQ ID NO: 1768001
aaacauaacccagaccaag

SEQ ID NO: 1768003 - RNA, 19 nt, Artificial Sequence
  Description of Artificial Sequence: Synthetic oligonucleotide
  Sense strand starting at position 3545 of SEQ ID NO: 1562720
cuggguuauguuugagaca

SEQ ID NO: 1768004 - RNA, 19 nt, Artificial Sequence
  Description of Artificial Sequence: Synthetic oligonucleotide
  Antisense strand to SEQ ID NO: 1768003
ugucucaaacauaacccag

SEQ ID NO: 1768005 - RNA, 19 nt, Artificial Sequence
  Description of Artificial Sequence: Synthetic oligonucleotide
  Sense strand starting at position 3569 of SEQ ID NO: 1562720
uggccaucugagugaaggu

SEQ ID NO: 1768006 - RNA, 19 nt, Artificial Sequence
  Description of Artificial Sequence: Synthetic oligonucleotide
  Antisense strand to SEQ ID NO: 1768005
accuucacucagauggcca

SEQ ID NO: 1768007 - RNA, 19 nt, Artificial Sequence
  Description of Artificial Sequence: Synthetic oligonucleotide
  Sense strand starting at position 3598 of SEQ ID NO: 1562720
cucagaaagcgaugccuaa

SEQ ID NO: 1768008 - RNA, 19 nt, Artificial Sequence
  Description of Artificial Sequence: Synthetic oligonucleotide
  Antisense strand to SEQ ID NO: 1768007
uuaggcaucgcuuucugag

SEQ ID NO: 1768009 - RNA, 19 nt, Artificial Sequence
  Description of Artificial Sequence: Synthetic oligonucleotide
  Sense strand starting at position 214 of SEQ ID NO: 1562721
gggaccgucucaucucuau

SEQ ID NO: 1768010 - RNA, 19 nt, Artificial Sequence
  Description of Artificial Sequence: Synthetic oligonucleotide
  Antisense strand to SEQ ID NO: 1768009
auagagaugagacgguccc

SEQ ID NO: 1768011 - RNA, 19 nt, Artificial Sequence
  Description of Artificial Sequence: Synthetic oligonucleotide
  Sense strand starting at position 227 of SEQ ID NO: 1562721
cucuauuuccagugucaau

SEQ ID NO: 1768012 - RNA, 19 nt, Artificial Sequence
  Description of Artificial Sequence: Synthetic oligonucleotide
  Antisense strand to SEQ ID NO: 1768011
auugacacuggaaauagag

SEQ ID NO: 1768013 - RNA, 19 nt, Artificial Sequence
  Description of Artificial Sequence: Synthetic oligonucleotide
  Sense strand starting at position 238 of SEQ ID NO: 1562721
gugucaauuccuggagccu

SEQ ID NO: 1768014 - RNA, 19 nt, Artificial Sequence
  Description of Artificial Sequence: Synthetic oligonucleotide
  Antisense strand to SEQ ID NO: 1768013
aggcuccaggaauugacac

SEQ ID NO: 1768015 - RNA, 19 nt, Artificial Sequence
  Description of Artificial Sequence: Synthetic oligonucleotide
  Sense strand starting at position 239 of SEQ ID NO: 1562721
ugucaauuccuggagccua

SEQ ID NO: 1768016 - RNA, 19 nt, Artificial Sequence
  Description of Artificial Sequence: Synthetic oligonucleotide
  Antisense strand to SEQ ID NO: 1768015
uaggcuccaggaauugaca

SEQ ID NO: 1768017 - RNA, 19 nt, Artificial Sequence
  Description of Artificial Sequence: Synthetic oligonucleotide
  Sense strand starting at position 276 of SEQ ID NO: 1562721
aauguuaguuccuugaaug

SEQ ID NO: 1768018 - RNA, 19 nt, Artificial Sequence
  Description of Artificial Sequence: Synthetic oligonucleotide
  Antisense strand to SEQ ID NO: 1768017
cauucaaggaacuaacauu

SEQ ID NO: 1768019 - RNA, 19 nt, Artificial Sequence
  Description of Artificial Sequence: Synthetic oligonucleotide
  Sense strand starting at position 277 of SEQ ID NO: 1562721
auguuaguuccuugaauga

SEQ ID NO: 1768020 - RNA, 19 nt, Artificial Sequence
  Description of Artificial Sequence: Synthetic oligonucleotide
  Antisense strand to SEQ ID NO: 1768019
ucauucaaggaacuaacau

SEQ ID NO: 1768021 - RNA, 19 nt, Artificial Sequence
  Description of Artificial Sequence: Synthetic oligonucleotide
  Sense strand starting at position 414 of SEQ ID NO: 1562721
accugagucucagcagaac

SEQ ID NO: 1768022 - RNA, 19 nt, Artificial Sequence
  Description of Artificial Sequence: Synthetic oligonucleotide
  Antisense strand to SEQ ID NO: 1768021
guucugcugagacucaggu

SEQ ID NO: 1768023 - RNA, 19 nt, Artificial Sequence
  Description of Artificial Sequence: Synthetic oligonucleotide
  Sense strand starting at position 417 of SEQ ID NO: 1562721
ugagucucagcagaacauu

SEQ ID NO: 1768024 - RNA, 19 nt, Artificial Sequence
  Description of Artificial Sequence: Synthetic oligonucleotide
  Antisense strand to SEQ ID NO: 1768023
aauguucugcugagacuca

SEQ ID NO: 1768025 - RNA, 19 nt, Artificial Sequence
  Description of Artificial Sequence: Synthetic oligonucleotide
  Sense strand starting at position 420 of SEQ ID NO: 1562721
gucucagcagaacauuaaa

SEQ ID NO: 1768026 - RNA, 19 nt, Artificial Sequence
  Description of Artificial Sequence: Synthetic oligonucleotide
  Antisense strand to SEQ ID NO: 1768025
uuuaauguucugcugagac

SEQ ID NO: 1768027 - RNA, 19 nt, Artificial Sequence
  Description of Artificial Sequence: Synthetic oligonucleotide
  Sense strand starting at position 500 of SEQ ID NO: 1562721
cgcgcuguuaccgucuuaa

SEQ ID NO: 1768028 - RNA, 19 nt, Artificial Sequence
  Description of Artificial Sequence: Synthetic oligonucleotide
  Antisense strand to SEQ ID NO: 1768027
uuaagacgguaacagcgcg

SEQ ID NO: 1768029 - RNA, 19 nt, Artificial Sequence
  Description of Artificial Sequence: Synthetic oligonucleotide
  Sense strand starting at position 502 of SEQ ID NO: 1562721
cgcuguuaccgucuuaagu

SEQ ID NO: 1768030 - RNA, 19 nt, Artificial Sequence
  Description of Artificial Sequence: Synthetic oligonucleotide
  Antisense strand to SEQ ID NO: 1768029
acuuaagacgguaacagcg

SEQ ID NO: 1768031 - RNA, 19 nt, Artificial Sequence
  Description of Artificial Sequence: Synthetic oligonucleotide
  Sense strand starting at position 503 of SEQ ID NO: 1562721
gcuguuaccgucuuaaguu

SEQ ID NO: 1768032 - RNA, 19 nt, Artificial Sequence
  Description of Artificial Sequence: Synthetic oligonucleotide
  Antisense strand to SEQ ID NO: 1768031
aacuuaagacgguaacagc

SEQ ID NO: 1768033 - RNA, 19 nt, Artificial Sequence
  Description of Artificial Sequence: Synthetic oligonucleotide
  Sense strand starting at position 512 of SEQ ID NO: 1562721
gucuuaaguuaucaccaga

SEQ ID NO: 1768034 - RNA, 19 nt, Artificial Sequence
  Description of Artificial Sequence: Synthetic oligonucleotide
  Antisense strand to SEQ ID NO: 1768033
ucuggugauaacuuaagac

SEQ ID NO: 1768035 - RNA, 19 nt, Artificial Sequence
  Description of Artificial Sequence: Synthetic oligonucleotide
  Sense strand starting at position 1300 of SEQ ID NO: 1562721
gugaacguuccgucccgaa

SEQ ID NO: 1768036 - RNA, 19 nt, Artificial Sequence
  Description of Artificial Sequence: Synthetic oligonucleotide
  Antisense strand to SEQ ID NO: 1768035
uucgggacggaacguucac

SEQ ID NO: 1768037 - RNA, 19 nt, Artificial Sequence
  Description of Artificial Sequence: Synthetic oligonucleotide
  Sense strand starting at position 2093 of SEQ ID NO: 1562721
cguaaagggugugauccua

SEQ ID NO: 1768038 - RNA, 19 nt, Artificial Sequence
  Description of Artificial Sequence: Synthetic oligonucleotide
  Antisense strand to SEQ ID NO: 1768037
uaggaucacacccuuuacg

SEQ ID NO: 1768039 - RNA, 19 nt, Artificial Sequence
  Description of Artificial Sequence: Synthetic oligonucleotide
  Sense strand starting at position 2124 of SEQ ID NO: 1562721
uggguauugcgaggacuga

SEQ ID NO: 1768040 - RNA, 19 nt, Artificial Sequence
  Description of Artificial Sequence: Synthetic oligonucleotide
  Antisense strand to SEQ ID NO: 1768039
ucaguccucgcaauaccca

SEQ ID NO: 1768041 - RNA, 19 nt, Artificial Sequence
  Description of Artificial Sequence: Synthetic oligonucleotide
  Sense strand starting at position 2128 of SEQ ID NO: 1562721
uauugcgaggacugagauu

SEQ ID NO: 1768042 - RNA, 19 nt, Artificial Sequence
  Description of Artificial Sequence: Synthetic oligonucleotide
  Antisense strand to SEQ ID NO: 1768041
aaucucaguccucgcaaua

SEQ ID NO: 1768043 - RNA, 19 nt, Artificial Sequence
  Description of Artificial Sequence: Synthetic oligonucleotide
  Sense strand starting at position 2194 of SEQ ID NO: 1562721
uccuuugucugccacugaa

SEQ ID NO: 1768044 - RNA, 19 nt, Artificial Sequence
  Description of Artificial Sequence: Synthetic oligonucleotide
  Antisense strand to SEQ ID NO: 1768043
uucaguggcagacaaagga

SEQ ID NO: 1768045 - RNA, 19 nt, Artificial Sequence
  Description of Artificial Sequence: Synthetic oligonucleotide
  Sense strand starting at position 2323 of SEQ ID NO: 1562721
uuuaaaguuggcuguuaau

SEQ ID NO: 1768046 - RNA, 19 nt, Artificial Sequence
  Description of Artificial Sequence: Synthetic oligonucleotide
  Antisense strand to SEQ ID NO: 1768045
auuaacagccaacuuuaaa

SEQ ID NO: 1768047 - RNA, 19 nt, Artificial Sequence
  Description of Artificial Sequence: Synthetic oligonucleotide
  Sense strand starting at position 2326 of SEQ ID NO: 1562721
aaaguuggcuguuaauauc

SEQ ID NO: 1768048 - RNA, 19 nt, Artificial Sequence
  Description of Artificial Sequence: Synthetic oligonucleotide
  Antisense strand to SEQ ID NO: 1768047
gauauuaacagccaacuuu

SEQ ID NO: 1768049 - RNA, 19 nt, Artificial Sequence
  Description of Artificial Sequence: Synthetic oligonucleotide
  Sense strand starting at position 2397 of SEQ ID NO: 1562721
uuguguuagcggccuguga

SEQ ID NO: 1768050 - RNA, 19 nt, Artificial Sequence
  Description of Artificial Sequence: Synthetic oligonucleotide
  Antisense strand to SEQ ID NO: 1768049
ucacaggccgcuaacacaa

SEQ ID NO: 1768051 - RNA, 19 nt, Artificial Sequence
  Description of Artificial Sequence: Synthetic oligonucleotide
  Sense strand starting at position 2398 of SEQ ID NO: 1562721
uguguuagcggccugugaa

SEQ ID NO: 1768052 - RNA, 19 nt, Artificial Sequence
  Description of Artificial Sequence: Synthetic oligonucleotide
  Antisense strand to SEQ ID NO: 1768051
uucacaggccgcuaacaca

SEQ ID NO: 1768053 - RNA, 19 nt, Artificial Sequence
  Description of Artificial Sequence: Synthetic oligonucleotide
  Sense strand starting at position 2399 of SEQ ID NO: 1562721
guguuagcggccugugaaa

SEQ ID NO: 1768054 - RNA, 19 nt, Artificial Sequence
  Description of Artificial Sequence: Synthetic oligonucleotide
  Antisense strand to SEQ ID NO: 1768053
uuucacaggccgcuaacac

SEQ ID NO: 1768055 - RNA, 19 nt, Artificial Sequence
  Description of Artificial Sequence: Synthetic oligonucleotide
  Sense strand starting at position 2401 of SEQ ID NO: 1562721
guuagcggccugugaaauu

SEQ ID NO: 1768056 - RNA, 19 nt, Artificial Sequence
  Description of Artificial Sequence: Synthetic oligonucleotide
  Antisense strand to SEQ ID NO: 1768055
aauuucacaggccgcuaac

SEQ ID NO: 1768057 - RNA, 19 nt, Artificial Sequence
  Description of Artificial Sequence: Synthetic oligonucleotide
  Sense strand starting at position 2452 of SEQ ID NO: 1562721
agcagugacucugggauga

SEQ ID NO: 1768058 - RNA, 19 nt, Artificial Sequence
  Description of Artificial Sequence: Synthetic oligonucleotide
  Antisense strand to SEQ ID NO: 1768057
ucaucccagagucacugcu

SEQ ID NO: 1768059 - RNA, 19 nt, Artificial Sequence
  Description of Artificial Sequence: Synthetic oligonucleotide
  Sense strand starting at position 2454 of SEQ ID NO: 1562721
cagugacucugggaugaag

SEQ ID NO: 1768060 - RNA, 19 nt, Artificial Sequence
  Description of Artificial Sequence: Synthetic oligonucleotide
  Antisense strand to SEQ ID NO: 1768059
cuucaucccagagucacug

SEQ ID NO: 1768061 - RNA, 19 nt, Artificial Sequence
  Description of Artificial Sequence: Synthetic oligonucleotide
  Sense strand starting at position 2526 of SEQ ID NO: 1562721
gcaugcguuccuucauggu

SEQ ID NO: 1768062 - RNA, 19 nt, Artificial Sequence
  Description of Artificial Sequence: Synthetic oligonucleotide
  Antisense strand to SEQ ID NO: 1768061
accaugaaggaacgcaugc

SEQ ID NO: 1768063 - RNA, 19 nt, Artificial Sequence
  Description of Artificial Sequence: Synthetic oligonucleotide
  Sense strand starting at position 2539 of SEQ ID NO: 1562721
caugguguucuuggaacaa

SEQ ID NO: 1768064 - RNA, 19 nt, Artificial Sequence
  Description of Artificial Sequence: Synthetic oligonucleotide
  Antisense strand to SEQ ID NO: 1768063
uuguuccaagaacaccaug

SEQ ID NO: 1768065 - RNA, 19 nt, Artificial Sequence
  Description of Artificial Sequence: Synthetic oligonucleotide
  Sense strand starting at position 2582 of SEQ ID NO: 1562721
guuauuccaguuuaacaag

SEQ ID NO: 1768066 - RNA, 19 nt, Artificial Sequence
  Description of Artificial Sequence: Synthetic oligonucleotide
  Antisense strand to SEQ ID NO: 1768065
cuuguuaaacuggaauaac

SEQ ID NO: 1768067 - RNA, 19 nt, Artificial Sequence
  Description of Artificial Sequence: Synthetic oligonucleotide
  Sense strand starting at position 2623 of SEQ ID NO: 1562721
uguguaguuccaugccuca

SEQ ID NO: 1768068 - RNA, 19 nt, Artificial Sequence
  Description of Artificial Sequence: Synthetic oligonucleotide
  Antisense strand to SEQ ID NO: 1768067
ugaggcauggaacuacaca

SEQ ID NO: 1768069 - RNA, 19 nt, Artificial Sequence
  Description of Artificial Sequence: Synthetic oligonucleotide
  Sense strand starting at position 3292 of SEQ ID NO: 1562721
gccagucagccuuacaaga

SEQ ID NO: 1768070 - RNA, 19 nt, Artificial Sequence
  Description of Artificial Sequence: Synthetic oligonucleotide
  Antisense strand to SEQ ID NO: 1768069
ucuuguaaggcugacuggc

SEQ ID NO: 1768071 - RNA, 19 nt, Artificial Sequence
  Description of Artificial Sequence: Synthetic oligonucleotide
  Sense strand starting at position 3430 of SEQ ID NO: 1562721
cuugaccauucugaguaga

SEQ ID NO: 1768072 - RNA, 19 nt, Artificial Sequence
  Description of Artificial Sequence: Synthetic oligonucleotide
  Antisense strand to SEQ ID NO: 1768071
ucuacucagaauggucaag

SEQ ID NO: 1768073 - RNA, 19 nt, Artificial Sequence
  Description of Artificial Sequence: Synthetic oligonucleotide
  Sense strand starting at position 3432 of SEQ ID NO: 1562721
ugaccauucugaguagaua

SEQ ID NO: 1768074 - RNA, 19 nt, Artificial Sequence
  Description of Artificial Sequence: Synthetic oligonucleotide
  Antisense strand to SEQ ID NO: 1768073
uaucuacucagaaugguca

SEQ ID NO: 1768075 - RNA, 19 nt, Artificial Sequence
  Description of Artificial Sequence: Synthetic oligonucleotide
  Sense strand starting at position 3499 of SEQ ID NO: 1562721
gugggugugacacaucacu

SEQ ID NO: 1768076 - RNA, 19 nt, Artificial Sequence
  Description of Artificial Sequence: Synthetic oligonucleotide
  Antisense strand to SEQ ID NO: 1768075
agugaugugucacacccac

SEQ ID NO: 1768077 - RNA, 19 nt, Artificial Sequence
  Description of Artificial Sequence: Synthetic oligonucleotide
  Sense strand starting at position 3573 of SEQ ID NO: 1562721
agcucacacuaaugaagau

SEQ ID NO: 1768078 - RNA, 19 nt, Artificial Sequence
  Description of Artificial Sequence: Synthetic oligonucleotide
  Antisense strand to SEQ ID NO: 1768077
aucuucauuagugugagcu

SEQ ID NO: 1768079 - RNA, 19 nt, Artificial Sequence
  Description of Artificial Sequence: Synthetic oligonucleotide
  Sense strand starting at position 3633 of SEQ ID NO: 1562721
agaccuaguccauaucuuu

SEQ ID NO: 1768080 - RNA, 19 nt, Artificial Sequence
  Description of Artificial Sequence: Synthetic oligonucleotide
  Antisense strand to SEQ ID NO: 1768079
aaagauauggacuaggucu

SEQ ID NO: 1768081 - RNA, 19 nt, Artificial Sequence
  Description of Artificial Sequence: Synthetic oligonucleotide
  Sense strand starting at position 3843 of SEQ ID NO: 1562721
cuauuuguguauugagggu

SEQ ID NO: 1768082 - RNA, 19 nt, Artificial Sequence
  Description of Artificial Sequence: Synthetic oligonucleotide
  Antisense strand to SEQ ID NO: 1768081
acccucaauacacaaauag

SEQ ID NO: 1768083 - RNA, 19 nt, Artificial Sequence
  Description of Artificial Sequence: Synthetic oligonucleotide
  Sense strand starting at position 3847 of SEQ ID NO: 1562721
uuguguauugaggguaucu

SEQ ID NO: 1768084 - RNA, 19 nt, Artificial Sequence
  Description of Artificial Sequence: Synthetic oligonucleotide
  Antisense strand to SEQ ID NO: 1768083
agauacccucaauacacaa

SEQ ID NO: 1768085 - RNA, 19 nt, Artificial Sequence
  Description of Artificial Sequence: Synthetic oligonucleotide
  Sense strand starting at position 3913 of SEQ ID NO: 1562721
auacacuacugugaauuga

SEQ ID NO: 1768086 - RNA, 19 nt, Artificial Sequence
  Description of Artificial Sequence: Synthetic oligonucleotide
  Antisense strand to SEQ ID NO: 1768085
ucaauucacaguaguguau

SEQ ID NO: 1768087 - RNA, 19 nt, Artificial Sequence
  Description of Artificial Sequence: Synthetic oligonucleotide
  Sense strand starting at position 3939 of SEQ ID NO: 1562721
cugugugucaggcgcuauu

SEQ ID NO: 1768088 - RNA, 19 nt, Artificial Sequence
  Description of Artificial Sequence: Synthetic oligonucleotide
  Antisense strand to SEQ ID NO: 1768087
aauagcgccugacacacag

SEQ ID NO: 1768089 - RNA, 19 nt, Artificial Sequence
  Description of Artificial Sequence: Synthetic oligonucleotide
  Sense strand starting at position 164 of SEQ ID NO: 1562722
gggucuugcuuccuccaaa

SEQ ID NO: 1768090 - RNA, 19 nt, Artificial Sequence
  Description of Artificial Sequence: Synthetic oligonucleotide
  Antisense strand to SEQ ID NO: 1768089
uuuggaggaagcaagaccc

SEQ ID NO: 1768091 - RNA, 19 nt, Artificial Sequence
  Description of Artificial Sequence: Synthetic oligonucleotide
  Sense strand starting at position 408 of SEQ ID NO: 1562722
ccaggucucuagcgagaca

SEQ ID NO: 1768092 - RNA, 19 nt, Artificial Sequence
  Description of Artificial Sequence: Synthetic oligonucleotide
  Antisense strand to SEQ ID NO: 1768091
ugucucgcuagagaccugg

SEQ ID NO: 1768093 - RNA, 19 nt, Artificial Sequence
  Description of Artificial Sequence: Synthetic oligonucleotide
  Sense strand starting at position 411 of SEQ ID NO: 1562722
ggucucuagcgagacacuu

SEQ ID NO: 1768094 - RNA, 19 nt, Artificial Sequence
  Description of Artificial Sequence: Synthetic oligonucleotide
  Antisense strand to SEQ ID NO: 1768093
aagugucucgcuagagacc

SEQ ID NO: 1768095 - RNA, 19 nt, Artificial Sequence
  Description of Artificial Sequence: Synthetic oligonucleotide
  Sense strand starting at position 419 of SEQ ID NO: 1562722
gcgagacacuucccucacu

SEQ ID NO: 1768096 - RNA, 19 nt, Artificial Sequence
  Description of Artificial Sequence: Synthetic oligonucleotide
  Antisense strand to SEQ ID NO: 1768095
agugagggaagugucucgc

SEQ ID NO: 1768097 - RNA, 19 nt, Artificial Sequence
  Description of Artificial Sequence: Synthetic oligonucleotide
  Sense strand starting at position 476 of SEQ ID NO: 1562722
uggaucauuucucaggaca

SEQ ID NO: 1768098 - RNA, 19 nt, Artificial Sequence
  Description of Artificial Sequence: Synthetic oligonucleotide
  Antisense strand to SEQ ID NO: 1768097
uguccugagaaaugaucca

SEQ ID NO: 1768099 - RNA, 19 nt, Artificial Sequence
  Description of Artificial Sequence: Synthetic oligonucleotide
  Sense strand starting at position 501 of SEQ ID NO: 1562722
ggugcagucguucaagaaa

SEQ ID NO: 1768100 - RNA, 19 nt, Artificial Sequence
  Description of Artificial Sequence: Synthetic oligonucleotide
  Antisense strand to SEQ ID NO: 1768099
uuucuugaacgacugcacc

SEQ ID NO: 1768101 - RNA, 19 nt, Artificial Sequence
  Description of Artificial Sequence: Synthetic oligonucleotide
  Sense strand starting at position 680 of SEQ ID NO: 1562722
cugaaacucugccuggaau

SEQ ID NO: 1768102 - RNA, 19 nt, Artificial Sequence
  Description of Artificial Sequence: Synthetic oligonucleotide
  Antisense strand to SEQ ID NO: 1768101
auuccaggcagaguuucag

SEQ ID NO: 1768103 - RNA, 19 nt, Artificial Sequence
  Description of Artificial Sequence: Synthetic oligonucleotide
  Sense strand starting at position 682 of SEQ ID NO: 1562722
gaaacucugccuggaauga

SEQ ID NO: 1768104 - RNA, 19 nt, Artificial Sequence
  Description of Artificial Sequence: Synthetic oligonucleotide
  Antisense strand to SEQ ID NO: 1768103
ucauuccaggcagaguuuc

SEQ ID NO: 1768105 - RNA, 19 nt, Artificial Sequence
  Description of Artificial Sequence: Synthetic oligonucleotide
  Sense strand starting at position 692 of SEQ ID NO: 1562722
cuggaaugacccuggcaaa

SEQ ID NO: 1768106 - RNA, 19 nt, Artificial Sequence
  Description of Artificial Sequence: Synthetic oligonucleotide
  Antisense strand to SEQ ID NO: 1768105
uuugccagggucauuccag

SEQ ID NO: 1768107 - RNA, 19 nt, Artificial Sequence
  Description of Artificial Sequence: Synthetic oligonucleotide
  Sense strand starting at position 918 of SEQ ID NO: 1562722
gggaccgucucaucucuau

SEQ ID NO: 1768108 - RNA, 19 nt, Artificial Sequence
  Description of Artificial Sequence: Synthetic oligonucleotide
  Antisense strand to SEQ ID NO: 1768107
auagagaugagacgguccc

SEQ ID NO: 1768109 - RNA, 19 nt, Artificial Sequence
  Description of Artificial Sequence: Synthetic oligonucleotide
  Sense strand starting at position 931 of SEQ ID NO: 1562722
cucuauuuccagugucaau

SEQ ID NO: 1768110 - RNA, 19 nt, Artificial Sequence
  Description of Artificial Sequence: Synthetic oligonucleotide
  Antisense strand to SEQ ID NO: 1768109
auugacacuggaaauagag

SEQ ID NO: 1768111 - RNA, 19 nt, Artificial Sequence
  Description of Artificial Sequence: Synthetic oligonucleotide
  Sense strand starting at position 942 of SEQ ID NO: 1562722
gugucaauuccuggagccu

SEQ ID NO: 1768112 - RNA, 19 nt, Artificial Sequence
  Description of Artificial Sequence: Synthetic oligonucleotide
  Antisense strand to SEQ ID NO: 1768111
aggcuccaggaauugacac

SEQ ID NO: 1768113 - RNA, 19 nt, Artificial Sequence
  Description of Artificial Sequence: Synthetic oligonucleotide
  Sense strand starting at position 943 of SEQ ID NO: 1562722
ugucaauuccuggagccua

SEQ ID NO: 1768114 - RNA, 19 nt, Artificial Sequence
  Description of Artificial Sequence: Synthetic oligonucleotide
  Antisense strand to SEQ ID NO: 1768113
uaggcuccaggaauugaca

SEQ ID NO: 1768115 - RNA, 19 nt, Artificial Sequence
  Description of Artificial Sequence: Synthetic oligonucleotide
  Sense strand starting at position 980 of SEQ ID NO: 1562722
aauguuaguuccuugaaug

SEQ ID NO: 1768116 - RNA, 19 nt, Artificial Sequence
  Description of Artificial Sequence: Synthetic oligonucleotide
  Antisense strand to SEQ ID NO: 1768115
cauucaaggaacuaacauu

SEQ ID NO: 1768117 - RNA, 19 nt, Artificial Sequence
  Description of Artificial Sequence: Synthetic oligonucleotide
  Sense strand starting at position 981 of SEQ ID NO: 1562722
auguuaguuccuugaauga

SEQ ID NO: 1768118 - RNA, 19 nt, Artificial Sequence
  Description of Artificial Sequence: Synthetic oligonucleotide
  Antisense strand to SEQ ID NO: 1768117
ucauucaaggaacuaacau

SEQ ID NO: 1768119 - RNA, 19 nt, Artificial Sequence
  Description of Artificial Sequence: Synthetic oligonucleotide
  Sense strand starting at position 1118 of SEQ ID NO: 1562722
accugagucucagcagaac

SEQ ID NO: 1768120 - RNA, 19 nt, Artificial Sequence
  Description of Artificial Sequence: Synthetic oligonucleotide
  Antisense strand to SEQ ID NO: 1768119
guucugcugagacucaggu

SEQ ID NO: 1768121 - RNA, 19 nt, Artificial Sequence
  Description of Artificial Sequence: Synthetic oligonucleotide
  Sense strand starting at position 1121 of SEQ ID NO: 1562722
ugagucucagcagaacauu

SEQ ID NO: 1768122 - RNA, 19 nt, Artificial Sequence
  Description of Artificial Sequence: Synthetic oligonucleotide
  Antisense strand to SEQ ID NO: 1768121
aauguucugcugagacuca

SEQ ID NO: 1768123 - RNA, 19 nt, Artificial Sequence
  Description of Artificial Sequence: Synthetic oligonucleotide
  Sense strand starting at position 1124 of SEQ ID NO: 1562722
gucucagcagaacauuaaa

SEQ ID NO: 1768124 - RNA, 19 nt, Artificial Sequence
  Description of Artificial Sequence: Synthetic oligonucleotide
  Antisense strand to SEQ ID NO: 1768123
uuuaauguucugcugagac

SEQ ID NO: 1768125 - RNA, 19 nt, Artificial Sequence
  Description of Artificial Sequence: Synthetic oligonucleotide
  Sense strand starting at position 1204 of SEQ ID NO: 1562722
cgcgcuguuaccgucuuaa

SEQ ID NO: 1768126 - RNA, 19 nt, Artificial Sequence
  Description of Artificial Sequence: Synthetic oligonucleotide
  Antisense strand to SEQ ID NO: 1768125
uuaagacgguaacagcgcg

SEQ ID NO: 1768127 - RNA, 19 nt, Artificial Sequence
  Description of Artificial Sequence: Synthetic oligonucleotide
  Sense strand starting at position 1206 of SEQ ID NO: 1562722
cgcuguuaccgucuuaagu

SEQ ID NO: 1768128 - RNA, 19 nt, Artificial Sequence
  Description of Artificial Sequence: Synthetic oligonucleotide
  Antisense strand to SEQ ID NO: 1768127
acuuaagacgguaacagcg

SEQ ID NO: 1768129 - RNA, 19 nt, Artificial Sequence
  Description of Artificial Sequence: Synthetic oligonucleotide
  Sense strand starting at position 1207 of SEQ ID NO: 1562722
gcuguuaccgucuuaaguu

SEQ ID NO: 1768130 - RNA, 19 nt, Artificial Sequence
  Description of Artificial Sequence: Synthetic oligonucleotide
  Antisense strand to SEQ ID NO: 1768129
aacuuaagacgguaacagc

SEQ ID NO: 1768131 - RNA, 19 nt, Artificial Sequence
  Description of Artificial Sequence: Synthetic oligonucleotide
  Sense strand starting at position 1216 of SEQ ID NO: 1562722
gucuuaaguuaucaccaga

SEQ ID NO: 1768132 - RNA, 19 nt, Artificial Sequence
  Description of Artificial Sequence: Synthetic oligonucleotide
  Antisense strand to SEQ ID NO: 1768131
ucuggugauaacuuaagac

SEQ ID NO: 1768133 - RNA, 19 nt, Artificial Sequence
  Description of Artificial Sequence: Synthetic oligonucleotide
  Sense strand starting at position 1453 of SEQ ID NO: 1562722
ucgagaguuuccggaacca

SEQ ID NO: 1768134 - RNA, 19 nt, Artificial Sequence
  Description of Artificial Sequence: Synthetic oligonucleotide
  Antisense strand to SEQ ID NO: 1768133
ugguuccggaaacucucga

SEQ ID NO: 1768135 - RNA, 19 nt, Artificial Sequence
  Description of Artificial Sequence: Synthetic oligonucleotide
  Sense strand starting at position 2004 of SEQ ID NO: 1562722
gugaacguuccgucccgaa

SEQ ID NO: 1768136 - RNA, 19 nt, Artificial Sequence
  Description of Artificial Sequence: Synthetic oligonucleotide
  Antisense strand to SEQ ID NO: 1768135
uucgggacggaacguucac

SEQ ID NO: 1768137 - RNA, 19 nt, Artificial Sequence
  Description of Artificial Sequence: Synthetic oligonucleotide
  Sense strand starting at position 2797 of SEQ ID NO: 1562722
cguaaagggugugauccua

SEQ ID NO: 1768138 - RNA, 19 nt, Artificial Sequence
  Description of Artificial Sequence: Synthetic oligonucleotide
  Antisense strand to SEQ ID NO: 1768137
uaggaucacacccuuuacg

SEQ ID NO: 1768139 - RNA, 19 nt, Artificial Sequence
  Description of Artificial Sequence: Synthetic oligonucleotide
  Sense strand starting at position 2828 of SEQ ID NO: 1562722
uggguauugcgaggacuga

SEQ ID NO: 1768140 - RNA, 19 nt, Artificial Sequence
  Description of Artificial Sequence: Synthetic oligonucleotide
  Antisense strand to SEQ ID NO: 1768139
ucaguccucgcaauaccca

SEQ ID NO: 1768141 - RNA, 19 nt, Artificial Sequence
  Description of Artificial Sequence: Synthetic oligonucleotide
  Sense strand starting at position 2832 of SEQ ID NO: 1562722
uauugcgaggacugagauu

SEQ ID NO: 1768142 - RNA, 19 nt, Artificial Sequence
  Description of Artificial Sequence: Synthetic oligonucleotide
  Antisense strand to SEQ ID NO: 1768141
aaucucaguccucgcaaua

SEQ ID NO: 1768143 - RNA, 19 nt, Artificial Sequence
  Description of Artificial Sequence: Synthetic oligonucleotide
  Sense strand starting at position 2898 of SEQ ID NO: 1562722
uccuuugucugccacugaa

SEQ ID NO: 1768144 - RNA, 19 nt, Artificial Sequence
  Description of Artificial Sequence: Synthetic oligonucleotide
  Antisense strand to SEQ ID NO: 1768143
uucaguggcagacaaagga

SEQ ID NO: 1768145 - RNA, 19 nt, Artificial Sequence
  Description of Artificial Sequence: Synthetic oligonucleotide
  Sense strand starting at position 3027 of SEQ ID NO: 1562722
uuuaaaguuggcuguuaau

SEQ ID NO: 1768146 - RNA, 19 nt, Artificial Sequence
  Description of Artificial Sequence: Synthetic oligonucleotide
  Antisense strand to SEQ ID NO: 1768145
auuaacagccaacuuuaaa

SEQ ID NO: 1768147 - RNA, 19 nt, Artificial Sequence
  Description of Artificial Sequence: Synthetic oligonucleotide
  Sense strand starting at position 3030 of SEQ ID NO: 1562722
aaaguuggcuguuaauauc

SEQ ID NO: 1768148 - RNA, 19 nt, Artificial Sequence
  Description of Artificial Sequence: Synthetic oligonucleotide
  Antisense strand to SEQ ID NO: 1768147
gauauuaacagccaacuuu

SEQ ID NO: 1768149 - RNA, 19 nt, Artificial Sequence
  Description of Artificial Sequence: Synthetic oligonucleotide
  Sense strand starting at position 3101 of SEQ ID NO: 1562722
uuguguuagcggccuguga

SEQ ID NO: 1768150 - RNA, 19 nt, Artificial Sequence
  Description of Artificial Sequence: Synthetic oligonucleotide
  Antisense strand to SEQ ID NO: 1768149
ucacaggccgcuaacacaa

SEQ ID NO: 1768151 - RNA, 19 nt, Artificial Sequence
  Description of Artificial Sequence: Synthetic oligonucleotide
  Sense strand starting at position 3102 of SEQ ID NO: 1562722
uguguuagcggccugugaa

SEQ ID NO: 1768152 - RNA, 19 nt, Artificial Sequence
  Description of Artificial Sequence: Synthetic oligonucleotide
  Antisense strand to SEQ ID NO: 1768151
uucacaggccgcuaacaca

SEQ ID NO: 1768153 - RNA, 19 nt, Artificial Sequence
  Description of Artificial Sequence: Synthetic oligonucleotide
  Sense strand starting at position 3103 of SEQ ID NO: 1562722
guguuagcggccugugaaa

SEQ ID NO: 1768154 - RNA, 19 nt, Artificial Sequence
  Description of Artificial Sequence: Synthetic oligonucleotide
  Antisense strand to SEQ ID NO: 1768153
uuucacaggccgcuaacac

SEQ ID NO: 1768155 - RNA, 19 nt, Artificial Sequence
  Description of Artificial Sequence: Synthetic oligonucleotide
  Sense strand starting at position 3105 of SEQ ID NO: 1562722
guuagcggccugugaaauu

SEQ ID NO: 1768156 - RNA, 19 nt, Artificial Sequence
  Description of Artificial Sequence: Synthetic oligonucleotide
  Antisense strand to SEQ ID NO: 1768155
aauuucacaggccgcuaac

SEQ ID NO: 1768157 - RNA, 19 nt, Artificial Sequence
  Description of Artificial Sequence: Synthetic oligonucleotide
  Sense strand starting at position 3156 of SEQ ID NO: 1562722
agcagugacucugggauga

SEQ ID NO: 1768158 - RNA, 19 nt, Artificial Sequence
  Description of Artificial Sequence: Synthetic oligonucleotide
  Antisense strand to SEQ ID NO: 1768157
ucaucccagagucacugcu

SEQ ID NO: 1768159 - RNA, 19 nt, Artificial Sequence
  Description of Artificial Sequence: Synthetic oligonucleotide
  Sense strand starting at position 3158 of SEQ ID NO: 1562722
cagugacucugggaugaag

SEQ ID NO: 1768160 - RNA, 19 nt, Artificial Sequence
  Description of Artificial Sequence: Synthetic oligonucleotide
  Antisense strand to SEQ ID NO: 1768159
cuucaucccagagucacug

SEQ ID NO: 1768161 - RNA, 19 nt, Artificial Sequence
  Description of Artificial Sequence: Synthetic oligonucleotide
  Sense strand starting at position 3230 of SEQ ID NO: 1562722
gcaugcguuccuucauggu

SEQ ID NO: 1768162 - RNA, 19 nt, Artificial Sequence
  Description of Artificial Sequence: Synthetic oligonucleotide
  Antisense strand to SEQ ID NO: 1768161
accaugaaggaacgcaugc

SEQ ID NO: 1768163 - RNA, 19 nt, Artificial Sequence
  Description of Artificial Sequence: Synthetic oligonucleotide
  Sense strand starting at position 3243 of SEQ ID NO: 1562722
caugguguucuuggaacaa

SEQ ID NO: 1768164 - RNA, 19 nt, Artificial Sequence
  Description of Artificial Sequence: Synthetic oligonucleotide
  Antisense strand to SEQ ID NO: 1768163
uuguuccaagaacaccaug

SEQ ID NO: 1768165 - RNA, 19 nt, Artificial Sequence
  Description of Artificial Sequence: Synthetic oligonucleotide
  Sense strand starting at position 3286 of SEQ ID NO: 1562722
guuauuccaguuuaacaag

SEQ ID NO: 1768166 - RNA, 19 nt, Artificial Sequence
  Description of Artificial Sequence: Synthetic oligonucleotide
  Antisense strand to SEQ ID NO: 1768165
cuuguuaaacuggaauaac

SEQ ID NO: 1768167 - RNA, 19 nt, Artificial Sequence
  Description of Artificial Sequence: Synthetic oligonucleotide
  Sense strand starting at position 3327 of SEQ ID NO: 1562722
uguguaguuccaugccuca

SEQ ID NO: 1768168 - RNA, 19 nt, Artificial Sequence
  Description of Artificial Sequence: Synthetic oligonucleotide
  Antisense strand to SEQ ID NO: 1768167
ugaggcauggaacuacaca

SEQ ID NO: 1768169 - RNA, 19 nt, Artificial Sequence
  Description of Artificial Sequence: Synthetic oligonucleotide
  Sense strand starting at position 259 of SEQ ID NO: 1562723
gcacaaaugucgcucaaac

SEQ ID NO: 1768170 - RNA, 19 nt, Artificial Sequence
  Description of Artificial Sequence: Synthetic oligonucleotide
  Antisense strand to SEQ ID NO: 1768169
guuugagcgacauuugugc

SEQ ID NO: 1768171 - RNA, 19 nt, Artificial Sequence
  Description of Artificial Sequence: Synthetic oligonucleotide
  Sense strand starting at position 412 of SEQ ID NO: 1562723
cagcauuucuagggaaaug

SEQ ID NO: 1768172 - RNA, 19 nt, Artificial Sequence
  Description of Artificial Sequence: Synthetic oligonucleotide
  Antisense strand to SEQ ID NO: 1768171
cauuucccuagaaaugcug

SEQ ID NO: 1768173 - RNA, 19 nt, Artificial Sequence
  Description of Artificial Sequence: Synthetic oligonucleotide
  Sense strand starting at position 554 of SEQ ID NO: 1562723
gggccacugugcucucauu

SEQ ID NO: 1768174 - RNA, 19 nt, Artificial Sequence
  Description of Artificial Sequence: Synthetic oligonucleotide
  Antisense strand to SEQ ID NO: 1768173
aaugagagcacaguggccc

SEQ ID NO: 1768175 - RNA, 19 nt, Artificial Sequence
  Description of Artificial Sequence: Synthetic oligonucleotide
  Sense strand starting at position 720 of SEQ ID NO: 1562723
auggcaauucuccaugaca

SEQ ID NO: 1768176 - RNA, 19 nt, Artificial Sequence
  Description of Artificial Sequence: Synthetic oligonucleotide
  Antisense strand to SEQ ID NO: 1768175
ugucauggagaauugccau

SEQ ID NO: 1768177 - RNA, 19 nt, Artificial Sequence
  Description of Artificial Sequence: Synthetic oligonucleotide
  Sense strand starting at position 722 of SEQ ID NO: 1562723
ggcaauucuccaugacagg

SEQ ID NO: 1768178 - RNA, 19 nt, Artificial Sequence
  Description of Artificial Sequence: Synthetic oligonucleotide
  Antisense strand to SEQ ID NO: 1768177
ccugucauggagaauugcc

SEQ ID NO: 1768179 - RNA, 19 nt, Artificial Sequence
  Description of Artificial Sequence: Synthetic oligonucleotide
  Sense strand starting at position 723 of SEQ ID NO: 1562723
gcaauucuccaugacaggu

SEQ ID NO: 1768180 - RNA, 19 nt, Artificial Sequence
  Description of Artificial Sequence: Synthetic oligonucleotide
  Antisense strand to SEQ ID NO: 1768179
accugucauggagaauugc

SEQ ID NO: 1768181 - RNA, 19 nt, Artificial Sequence
  Description of Artificial Sequence: Synthetic oligonucleotide
  Sense strand starting at position 756 of SEQ ID NO: 1562723
guccuauucucccgcugaa

SEQ ID NO: 1768182 - RNA, 19 nt, Artificial Sequence
  Description of Artificial Sequence: Synthetic oligonucleotide
  Antisense strand to SEQ ID NO: 1768181
uucagcgggagaauaggac

SEQ ID NO: 1768183 - RNA, 19 nt, Artificial Sequence
  Description of Artificial Sequence: Synthetic oligonucleotide
  Sense strand starting at position 1200 of SEQ ID NO: 1562723
cuucgcuucucuuuccaga

SEQ ID NO: 1768184 - RNA, 19 nt, Artificial Sequence
  Description of Artificial Sequence: Synthetic oligonucleotide
  Antisense strand to SEQ ID NO: 1768183
ucuggaaagagaagcgaag

SEQ ID NO: 1768185 - RNA, 19 nt, Artificial Sequence
  Description of Artificial Sequence: Synthetic oligonucleotide
  Sense strand starting at position 1230 of SEQ ID NO: 1562723
gagcccguuucccgggaaa

SEQ ID NO: 1768186 - RNA, 19 nt, Artificial Sequence
  Description of Artificial Sequence: Synthetic oligonucleotide
  Antisense strand to SEQ ID NO: 1768185
uuucccgggaaacgggcuc

SEQ ID NO: 1768187 - RNA, 19 nt, Artificial Sequence
  Description of Artificial Sequence: Synthetic oligonucleotide
  Sense strand starting at position 1745 of SEQ ID NO: 1562723
cgcgguacucacugcagua

SEQ ID NO: 1768188 - RNA, 19 nt, Artificial Sequence
  Description of Artificial Sequence: Synthetic oligonucleotide
  Antisense strand to SEQ ID NO: 1768187
uacugcagugaguaccgcg

SEQ ID NO: 1768189 - RNA, 19 nt, Artificial Sequence
  Description of Artificial Sequence: Synthetic oligonucleotide
  Sense strand starting at position 2300 of SEQ ID NO: 1562723
aggugaaguucgcgcacuu

SEQ ID NO: 1768190 - RNA, 19 nt, Artificial Sequence
  Description of Artificial Sequence: Synthetic oligonucleotide
  Antisense strand to SEQ ID NO: 1768189
aagugcgcgaacuucaccu

SEQ ID NO: 1768191 - RNA, 19 nt, Artificial Sequence
  Description of Artificial Sequence: Synthetic oligonucleotide
  Sense strand starting at position 2408 of SEQ ID NO: 1562723
ggacuuggauccggaguuu

SEQ ID NO: 1768192 - RNA, 19 nt, Artificial Sequence
  Description of Artificial Sequence: Synthetic oligonucleotide
  Antisense strand to SEQ ID NO: 1768191
aaacuccggauccaagucc

SEQ ID NO: 1768193 - RNA, 19 nt, Artificial Sequence
  Description of Artificial Sequence: Synthetic oligonucleotide
  Sense strand starting at position 2419 of SEQ ID NO: 1562723
cggaguuuauuccaaggag

SEQ ID NO: 1768194 - RNA, 19 nt, Artificial Sequence
  Description of Artificial Sequence: Synthetic oligonucleotide
  Antisense strand to SEQ ID NO: 1768193
cuccuuggaauaaacuccg

SEQ ID NO: 1768195 - RNA, 19 nt, Artificial Sequence
  Description of Artificial Sequence: Synthetic oligonucleotide
  Sense strand starting at position 2769 of SEQ ID NO: 1562723
guccuauccagguggguuu

SEQ ID NO: 1768196 - RNA, 19 nt, Artificial Sequence
  Description of Artificial Sequence: Synthetic oligonucleotide
  Antisense strand to SEQ ID NO: 1768195
aaacccaccuggauaggac

SEQ ID NO: 1768197 - RNA, 19 nt, Artificial Sequence
  Description of Artificial Sequence: Synthetic oligonucleotide
  Sense strand starting at position 2796 of SEQ ID NO: 1562723
ggaugacaaugaucgcaau

SEQ ID NO: 1768198 - RNA, 19 nt, Artificial Sequence
  Description of Artificial Sequence: Synthetic oligonucleotide
  Antisense strand to SEQ ID NO: 1768197
auugcgaucauugucaucc

SEQ ID NO: 1768199 - RNA, 19 nt, Artificial Sequence
  Description of Artificial Sequence: Synthetic oligonucleotide
  Sense strand starting at position 2799 of SEQ ID NO: 1562723
ugacaaugaucgcaaucua

SEQ ID NO: 1768200 - RNA, 19 nt, Artificial Sequence
  Description of Artificial Sequence: Synthetic oligonucleotide
  Antisense strand to SEQ ID NO: 1768199
uagauugcgaucauuguca

SEQ ID NO: 1768201 - RNA, 19 nt, Artificial Sequence
  Description of Artificial Sequence: Synthetic oligonucleotide
  Sense strand starting at position 2824 of SEQ ID NO: 1562723
cugcauagucaacgaucau

SEQ ID NO: 1768202 - RNA, 19 nt, Artificial Sequence
  Description of Artificial Sequence: Synthetic oligonucleotide
  Antisense strand to SEQ ID NO: 1768201
augaucguugacuaugcag

SEQ ID NO: 1768203 - RNA, 19 nt, Artificial Sequence
  Description of Artificial Sequence: Synthetic oligonucleotide
  Sense strand starting at position 2887 of SEQ ID NO: 1562723
aaaugagccuuguaaggac

SEQ ID NO: 1768204 - RNA, 19 nt, Artificial Sequence
  Description of Artificial Sequence: Synthetic oligonucleotide
  Antisense strand to SEQ ID NO: 1768203
guccuuacaaggcucauuu

SEQ ID NO: 1768205 - RNA, 19 nt, Artificial Sequence
  Description of Artificial Sequence: Synthetic oligonucleotide
  Sense strand starting at position 3082 of SEQ ID NO: 1562723
guucgugcacacgacuaau

SEQ ID NO: 1768206 - RNA, 19 nt, Artificial Sequence
  Description of Artificial Sequence: Synthetic oligonucleotide
  Antisense strand to SEQ ID NO: 1768205
auuagucgugugcacgaac

SEQ ID NO: 1768207 - RNA, 19 nt, Artificial Sequence
  Description of Artificial Sequence: Synthetic oligonucleotide
  Sense strand starting at position 3085 of SEQ ID NO: 1562723
cgugcacacgacuaauaga

SEQ ID NO: 1768208 - RNA, 19 nt, Artificial Sequence
  Description of Artificial Sequence: Synthetic oligonucleotide
  Antisense strand to SEQ ID NO: 1768207
ucuauuagucgugugcacg

SEQ ID NO: 1768209 - RNA, 19 nt, Artificial Sequence
  Description of Artificial Sequence: Synthetic oligonucleotide
  Sense strand starting at position 3535 of SEQ ID NO: 1562723
gugguuguugugcacugaa

SEQ ID NO: 1768210 - RNA, 19 nt, Artificial Sequence
  Description of Artificial Sequence: Synthetic oligonucleotide
  Antisense strand to SEQ ID NO: 1768209
uucagugcacaacaaccac

SEQ ID NO: 1768211 - RNA, 19 nt, Artificial Sequence
  Description of Artificial Sequence: Synthetic oligonucleotide
  Sense strand starting at position 3575 of SEQ ID NO: 1562723
acgggauucuuguguuaau

SEQ ID NO: 1768212 - RNA, 19 nt, Artificial Sequence
  Description of Artificial Sequence: Synthetic oligonucleotide
  Antisense strand to SEQ ID NO: 1768211
auuaacacaagaaucccgu

SEQ ID NO: 1768213 - RNA, 19 nt, Artificial Sequence
  Description of Artificial Sequence: Synthetic oligonucleotide
  Sense strand starting at position 3576 of SEQ ID NO: 1562723
cgggauucuuguguuaaua

SEQ ID NO: 1768214 - RNA, 19 nt, Artificial Sequence
  Description of Artificial Sequence: Synthetic oligonucleotide
  Antisense strand to SEQ ID NO: 1768213
uauuaacacaagaaucccg

SEQ ID NO: 1768215 - RNA, 19 nt, Artificial Sequence
  Description of Artificial Sequence: Synthetic oligonucleotide
  Sense strand starting at position 3578 of SEQ ID NO: 1562723
ggauucuuguguuaauaug

SEQ ID NO: 1768216 - RNA, 19 nt, Artificial Sequence
  Description of Artificial Sequence: Synthetic oligonucleotide
  Antisense strand to SEQ ID NO: 1768215
cauauuaacacaagaaucc

SEQ ID NO: 1768217 - RNA, 19 nt, Artificial Sequence
  Description of Artificial Sequence: Synthetic oligonucleotide
  Sense strand starting at position 3586 of SEQ ID NO: 1562723
guguuaauaugauuguguc

SEQ ID NO: 1768218 - RNA, 19 nt, Artificial Sequence
  Description of Artificial Sequence: Synthetic oligonucleotide
  Antisense strand to SEQ ID NO: 1768217
gacacaaucauauuaacac

SEQ ID NO: 1768219 - RNA, 19 nt, Artificial Sequence
  Description of Artificial Sequence: Synthetic oligonucleotide
  Sense strand starting at position 3589 of SEQ ID NO: 1562723
uuaauaugauuguguccau

SEQ ID NO: 1768220 - RNA, 19 nt, Artificial Sequence
  Description of Artificial Sequence: Synthetic oligonucleotide
  Antisense strand to SEQ ID NO: 1768219
auggacacaaucauauuaa

SEQ ID NO: 1768221 - RNA, 19 nt, Artificial Sequence
  Description of Artificial Sequence: Synthetic oligonucleotide
  Sense strand starting at position 3592 of SEQ ID NO: 1562723
auaugauuguguccaugcu

SEQ ID NO: 1768222 - RNA, 19 nt, Artificial Sequence
  Description of Artificial Sequence: Synthetic oligonucleotide
  Antisense strand to SEQ ID NO: 1768221
agcauggacacaaucauau

SEQ ID NO: 1768223 - RNA, 19 nt, Artificial Sequence
  Description of Artificial Sequence: Synthetic oligonucleotide
  Sense strand starting at position 3593 of SEQ ID NO: 1562723
uaugauuguguccaugcuu

SEQ ID NO: 1768224 - RNA, 19 nt, Artificial Sequence
  Description of Artificial Sequence: Synthetic oligonucleotide
  Antisense strand to SEQ ID NO: 1768223
aagcauggacacaaucaua

SEQ ID NO: 1768225 - RNA, 19 nt, Artificial Sequence
  Description of Artificial Sequence: Synthetic oligonucleotide
  Sense strand starting at position 3650 of SEQ ID NO: 1562723
cgcugacuuuccuguuuag

SEQ ID NO: 1768226 - RNA, 19 nt, Artificial Sequence
  Description of Artificial Sequence: Synthetic oligonucleotide
  Antisense strand to SEQ ID NO: 1768225
cuaaacaggaaagucagcg

SEQ ID NO: 1768227 - RNA, 19 nt, Artificial Sequence
  Description of Artificial Sequence: Synthetic oligonucleotide
  Sense strand starting at position 3653 of SEQ ID NO: 1562723
ugacuuuccuguuuaguau

SEQ ID NO: 1768228 - RNA, 19 nt, Artificial Sequence
  Description of Artificial Sequence: Synthetic oligonucleotide
  Antisense strand to SEQ ID NO: 1768227
auacuaaacaggaaaguca

SEQ ID NO: 1768229 - RNA, 19 nt, Artificial Sequence
  Description of Artificial Sequence: Synthetic oligonucleotide
  Sense strand starting at position 3662 of SEQ ID NO: 1562723
uguuuaguaucuucucaac

SEQ ID NO: 1768230 - RNA, 19 nt, Artificial Sequence
  Description of Artificial Sequence: Synthetic oligonucleotide
  Antisense strand to SEQ ID NO: 1768229
guugagaagauacuaaaca

SEQ ID NO: 1768231 - RNA, 19 nt, Artificial Sequence
  Description of Artificial Sequence: Synthetic oligonucleotide
  Sense strand starting at position 3712 of SEQ ID NO: 1562723
ggaggugauucugcagaag

SEQ ID NO: 1768232 - RNA, 19 nt, Artificial Sequence
  Description of Artificial Sequence: Synthetic oligonucleotide
  Antisense strand to SEQ ID NO: 1768231
cuucugcagaaucaccucc

SEQ ID NO: 1768233 - RNA, 19 nt, Artificial Sequence
  Description of Artificial Sequence: Synthetic oligonucleotide
  Sense strand starting at position 3715 of SEQ ID NO: 1562723
ggugauucugcagaaguug

SEQ ID NO: 1768234 - RNA, 19 nt, Artificial Sequence
  Description of Artificial Sequence: Synthetic oligonucleotide
  Antisense strand to SEQ ID NO: 1768233
caacuucugcagaaucacc

SEQ ID NO: 1768235 - RNA, 19 nt, Artificial Sequence
  Description of Artificial Sequence: Synthetic oligonucleotide
  Sense strand starting at position 3820 of SEQ ID NO: 1562723
gggcucccucaaugggauu

SEQ ID NO: 1768236 - RNA, 19 nt, Artificial Sequence
  Description of Artificial Sequence: Synthetic oligonucleotide
  Antisense strand to SEQ ID NO: 1768235
aaucccauugagggagccc

SEQ ID NO: 1768237 - RNA, 19 nt, Artificial Sequence
  Description of Artificial Sequence: Synthetic oligonucleotide
  Sense strand starting at position 3831 of SEQ ID NO: 1562723
augggauucuguggaguca

SEQ ID NO: 1768238 - RNA, 19 nt, Artificial Sequence
  Description of Artificial Sequence: Synthetic oligonucleotide
  Antisense strand to SEQ ID NO: 1768237
ugacuccacagaaucccau

SEQ ID NO: 1768239 - RNA, 19 nt, Artificial Sequence
  Description of Artificial Sequence: Synthetic oligonucleotide
  Sense strand starting at position 3840 of SEQ ID NO: 1562723
uguggagucagccauugau

SEQ ID NO: 1768240 - RNA, 19 nt, Artificial Sequence
  Description of Artificial Sequence: Synthetic oligonucleotide
  Antisense strand to SEQ ID NO: 1768239
aucaauggcugacuccaca

SEQ ID NO: 1768241 - RNA, 19 nt, Artificial Sequence
  Description of Artificial Sequence: Synthetic oligonucleotide
  Sense strand starting at position 20 of SEQ ID NO: 1562724
ccaggagcuucucccguua

SEQ ID NO: 1768242 - RNA, 19 nt, Artificial Sequence
  Description of Artificial Sequence: Synthetic oligonucleotide
  Antisense strand to SEQ ID NO: 1768241
uaacgggagaagcuccugg

SEQ ID NO: 1768243 - RNA, 19 nt, Artificial Sequence
  Description of Artificial Sequence: Synthetic oligonucleotide
  Sense strand starting at position 22 of SEQ ID NO: 1562724
aggagcuucucccguuacu

SEQ ID NO: 1768244 - RNA, 19 nt, Artificial Sequence
  Description of Artificial Sequence: Synthetic oligonucleotide
  Antisense strand to SEQ ID NO: 1768243
aguaacgggagaagcuccu

SEQ ID NO: 1768245 - RNA, 19 nt, Artificial Sequence
  Description of Artificial Sequence: Synthetic oligonucleotide
  Sense strand starting at position 164 of SEQ ID NO: 1562724
cccagagacuucgagauca

SEQ ID NO: 1768246 - RNA, 19 nt, Artificial Sequence
  Description of Artificial Sequence: Synthetic oligonucleotide
  Antisense strand to SEQ ID NO: 1768245
ugaucucgaagucucuggg

SEQ ID NO: 1768247 - RNA, 19 nt, Artificial Sequence
  Description of Artificial Sequence: Synthetic oligonucleotide
  Sense strand starting at position 653 of SEQ ID NO: 1562724
uccggcggcucauuaauua

SEQ ID NO: 1768248 - RNA, 19 nt, Artificial Sequence
  Description of Artificial Sequence: Synthetic oligonucleotide
  Antisense strand to SEQ ID NO: 1768247
uaauuaaugagccgccgga

SEQ ID NO: 1768249 - RNA, 19 nt, Artificial Sequence
  Description of Artificial Sequence: Synthetic oligonucleotide
  Sense strand starting at position 657 of SEQ ID NO: 1562724
gcggcucauuaauuaguca

SEQ ID NO: 1768250 - RNA, 19 nt, Artificial Sequence
  Description of Artificial Sequence: Synthetic oligonucleotide
  Antisense strand to SEQ ID NO: 1768249
ugacuaauuaaugagccgc

SEQ ID NO: 1768251 - RNA, 19 nt, Artificial Sequence
  Description of Artificial Sequence: Synthetic oligonucleotide
  Sense strand starting at position 660 of SEQ ID NO: 1562724
gcucauuaauuagucagga

SEQ ID NO: 1768252 - RNA, 19 nt, Artificial Sequence
  Description of Artificial Sequence: Synthetic oligonucleotide
  Antisense strand to SEQ ID NO: 1768251
uccugacuaauuaaugagc

SEQ ID NO: 1768253 - RNA, 19 nt, Artificial Sequence
  Description of Artificial Sequence: Synthetic oligonucleotide
  Sense strand starting at position 661 of SEQ ID NO: 1562724
cucauuaauuagucaggaa

SEQ ID NO: 1768254 - RNA, 19 nt, Artificial Sequence
  Description of Artificial Sequence: Synthetic oligonucleotide
  Antisense strand to SEQ ID NO: 1768253
uuccugacuaauuaaugag

SEQ ID NO: 1768255 - RNA, 19 nt, Artificial Sequence
  Description of Artificial Sequence: Synthetic oligonucleotide
  Sense strand starting at position 664 of SEQ ID NO: 1562724
auuaauuagucaggaaagc

SEQ ID NO: 1768256 - RNA, 19 nt, Artificial Sequence
  Description of Artificial Sequence: Synthetic oligonucleotide
  Antisense strand to SEQ ID NO: 1768255
gcuuuccugacuaauuaau

SEQ ID NO: 1768257 - RNA, 19 nt, Artificial Sequence
  Description of Artificial Sequence: Synthetic oligonucleotide
  Sense strand starting at position 960 of SEQ ID NO: 1562724
ccaggaaguuuccaggagu

SEQ ID NO: 1768258 - RNA, 19 nt, Artificial Sequence
  Description of Artificial Sequence: Synthetic oligonucleotide
  Antisense strand to SEQ ID NO: 1768257
acuccuggaaacuuccugg

SEQ ID NO: 1768259 - RNA, 19 nt, Artificial Sequence
  Description of Artificial Sequence: Synthetic oligonucleotide
  Sense strand starting at position 963 of SEQ ID NO: 1562724
ggaaguuuccaggagugug

SEQ ID NO: 1768260 - RNA, 19 nt, Artificial Sequence
  Description of Artificial Sequence: Synthetic oligonucleotide
  Antisense strand to SEQ ID NO: 1768259
cacacuccuggaaacuucc

SEQ ID NO: 1768261 - RNA, 19 nt, Artificial Sequence
  Description of Artificial Sequence: Synthetic oligonucleotide
  Sense strand starting at position 1046 of SEQ ID NO: 1562724
guaagaugcuucccaguac

SEQ ID NO: 1768262 - RNA, 19 nt, Artificial Sequence
  Description of Artificial Sequence: Synthetic oligonucleotide
  Antisense strand to SEQ ID NO: 1768261
guacugggaagcaucuuac

SEQ ID NO: 1768263 - RNA, 19 nt, Artificial Sequence
  Description of Artificial Sequence: Synthetic oligonucleotide
  Sense strand starting at position 1050 of SEQ ID NO: 1562724
gaugcuucccaguacaaag

SEQ ID NO: 1768264 - RNA, 19 nt, Artificial Sequence
  Description of Artificial Sequence: Synthetic oligonucleotide
  Antisense strand to SEQ ID NO: 1768263
cuuuguacugggaagcauc

SEQ ID NO: 1768265 - RNA, 19 nt, Artificial Sequence
  Description of Artificial Sequence: Synthetic oligonucleotide
  Sense strand starting at position 3260 of SEQ ID NO: 1562724
cggcacaucugccuggaaa

SEQ ID NO: 1768266 - RNA, 19 nt, Artificial Sequence
  Description of Artificial Sequence: Synthetic oligonucleotide
  Antisense strand to SEQ ID NO: 1768265
uuuccaggcagaugugccg

SEQ ID NO: 1768267 - RNA, 19 nt, Artificial Sequence
  Description of Artificial Sequence: Synthetic oligonucleotide
  Sense strand starting at position 3261 of SEQ ID NO: 1562724
ggcacaucugccuggaaac

SEQ ID NO: 1768268 - RNA, 19 nt, Artificial Sequence
  Description of Artificial Sequence: Synthetic oligonucleotide
  Antisense strand to SEQ ID NO: 1768267
guuuccaggcagaugugcc

SEQ ID NO: 1768269 - RNA, 19 nt, Artificial Sequence
  Description of Artificial Sequence: Synthetic oligonucleotide
  Sense strand starting at position 3262 of SEQ ID NO: 1562724
gcacaucugccuggaaaca

SEQ ID NO: 1768270 - RNA, 19 nt, Artificial Sequence
  Description of Artificial Sequence: Synthetic oligonucleotide
  Antisense strand to SEQ ID NO: 1768269
uguuuccaggcagaugugc

SEQ ID NO: 1768271 - RNA, 19 nt, Artificial Sequence
  Description of Artificial Sequence: Synthetic oligonucleotide
  Sense strand starting at position 3348 of SEQ ID NO: 1562724
gcgugggcgcacuguuaau

SEQ ID NO: 1768272 - RNA, 19 nt, Artificial Sequence
  Description of Artificial Sequence: Synthetic oligonucleotide
  Antisense strand to SEQ ID NO: 1768271
auuaacagugcgcccacgc

SEQ ID NO: 1768273 - RNA, 19 nt, Artificial Sequence
  Description of Artificial Sequence: Synthetic oligonucleotide
  Sense strand starting at position 3372 of SEQ ID NO: 1562724
cguuccguuccagaggaaa

SEQ ID NO: 1768274 - RNA, 19 nt, Artificial Sequence
  Description of Artificial Sequence: Synthetic oligonucleotide
  Antisense strand to SEQ ID NO: 1768273
uuuccucuggaacggaacg

SEQ ID NO: 1768275 - RNA, 19 nt, Artificial Sequence
  Description of Artificial Sequence: Synthetic oligonucleotide
  Sense strand starting at position 3374 of SEQ ID NO: 1562724
uuccguuccagaggaaaca

SEQ ID NO: 1768276 - RNA, 19 nt, Artificial Sequence
  Description of Artificial Sequence: Synthetic oligonucleotide
  Antisense strand to SEQ ID NO: 1768275
uguuuccucuggaacggaa

SEQ ID NO: 1768277 - RNA, 19 nt, Artificial Sequence
  Description of Artificial Sequence: Synthetic oligonucleotide
  Sense strand starting at position 3702 of SEQ ID NO: 1562724
gugcaugugguucacauga

SEQ ID NO: 1768278 - RNA, 19 nt, Artificial Sequence
  Description of Artificial Sequence: Synthetic oligonucleotide
  Antisense strand to SEQ ID NO: 1768277
ucaugugaaccacaugcac

SEQ ID NO: 1768279 - RNA, 19 nt, Artificial Sequence
  Description of Artificial Sequence: Synthetic oligonucleotide
  Sense strand starting at position 3704 of SEQ ID NO: 1562724
gcaugugguucacaugaag

SEQ ID NO: 1768280 - RNA, 19 nt, Artificial Sequence
  Description of Artificial Sequence: Synthetic oligonucleotide
  Antisense strand to SEQ ID NO: 1768279
cuucaugugaaccacaugc

SEQ ID NO: 1768281 - RNA, 19 nt, Artificial Sequence
  Description of Artificial Sequence: Synthetic oligonucleotide
  Sense strand starting at position 3806 of SEQ ID NO: 1562724
caaggcaaucaguaugcau

SEQ ID NO: 1768282 - RNA, 19 nt, Artificial Sequence
  Description of Artificial Sequence: Synthetic oligonucleotide
  Antisense strand to SEQ ID NO: 1768281
augcauacugauugccuug

SEQ ID NO: 1768283 - RNA, 19 nt, Artificial Sequence
  Description of Artificial Sequence: Synthetic oligonucleotide
  Sense strand starting at position 3850 of SEQ ID NO: 1562724
cauggugacuggucuaaca

SEQ ID NO: 1768284 - RNA, 19 nt, Artificial Sequence
  Description of Artificial Sequence: Synthetic oligonucleotide
  Antisense strand to SEQ ID NO: 1768283
uguuagaccagucaccaug

SEQ ID NO: 1768285 - RNA, 19 nt, Artificial Sequence
  Description of Artificial Sequence: Synthetic oligonucleotide
  Sense strand starting at position 3852 of SEQ ID NO: 1562724
uggugacuggucuaacauc

SEQ ID NO: 1768286 - RNA, 19 nt, Artificial Sequence
  Description of Artificial Sequence: Synthetic oligonucleotide
  Antisense strand to SEQ ID NO: 1768285
gauguuagaccagucacca

SEQ ID NO: 1768287 - RNA, 19 nt, Artificial Sequence
  Description of Artificial Sequence: Synthetic oligonucleotide
  Sense strand starting at position 1090 of SEQ ID NO: 1562725
gcacaaugcuaagccagau

SEQ ID NO: 1768288 - RNA, 19 nt, Artificial Sequence
  Description of Artificial Sequence: Synthetic oligonucleotide
  Antisense strand to SEQ ID NO: 1768287
aucuggcuuagcauugugc

SEQ ID NO: 1768289 - RNA, 19 nt, Artificial Sequence
  Description of Artificial Sequence: Synthetic oligonucleotide
  Sense strand starting at position 1121 of SEQ ID NO: 1562725
aguucuaggacauggaagu

SEQ ID NO: 1768290 - RNA, 19 nt, Artificial Sequence
  Description of Artificial Sequence: Synthetic oligonucleotide
  Antisense strand to SEQ ID NO: 1768289
acuuccauguccuagaacu

SEQ ID NO: 1768291 - RNA, 19 nt, Artificial Sequence
  Description of Artificial Sequence: Synthetic oligonucleotide
  Sense strand starting at position 1161 of SEQ ID NO: 1562725
ugguguaguuggaagagaa

SEQ ID NO: 1768292 - RNA, 19 nt, Artificial Sequence
  Description of Artificial Sequence: Synthetic oligonucleotide
  Antisense strand to SEQ ID NO: 1768291
uucucuuccaacuacacca

SEQ ID NO: 1768293 - RNA, 19 nt, Artificial Sequence
  Description of Artificial Sequence: Synthetic oligonucleotide
  Sense strand starting at position 1258 of SEQ ID NO: 1562725
ccuugaacggccuaaguuu

SEQ ID NO: 1768294 - RNA, 19 nt, Artificial Sequence
  Description of Artificial Sequence: Synthetic oligonucleotide
  Antisense strand to SEQ ID NO: 1768293
aaacuuaggccguucaagg

SEQ ID NO: 1768295 - RNA, 19 nt, Artificial Sequence
  Description of Artificial Sequence: Synthetic oligonucleotide
  Sense strand starting at position 1330 of SEQ ID NO: 1562725
uggaguugauucuccagua

SEQ ID NO: 1768296 - RNA, 19 nt, Artificial Sequence
  Description of Artificial Sequence: Synthetic oligonucleotide
  Antisense strand to SEQ ID NO: 1768295
uacuggagaaucaacucca

SEQ ID NO: 1768297 - RNA, 19 nt, Artificial Sequence
  Description of Artificial Sequence: Synthetic oligonucleotide
  Sense strand starting at position 1331 of SEQ ID NO: 1562725
ggaguugauucuccaguag

SEQ ID NO: 1768298 - RNA, 19 nt, Artificial Sequence
  Description of Artificial Sequence: Synthetic oligonucleotide
  Antisense strand to SEQ ID NO: 1768297
cuacuggagaaucaacucc

SEQ ID NO: 1768299 - RNA, 19 nt, Artificial Sequence
  Description of Artificial Sequence: Synthetic oligonucleotide
  Sense strand starting at position 1335 of SEQ ID NO: 1562725
uugauucuccaguaguucu

SEQ ID NO: 1768300 - RNA, 19 nt, Artificial Sequence
  Description of Artificial Sequence: Synthetic oligonucleotide
  Antisense strand to SEQ ID NO: 1768299
agaacuacuggagaaucaa

SEQ ID NO: 1768301 - RNA, 19 nt, Artificial Sequence
  Description of Artificial Sequence: Synthetic oligonucleotide
  Sense strand starting at position 1481 of SEQ ID NO: 1562725
uccgucuuaccugaaagca

SEQ ID NO: 1768302 - RNA, 19 nt, Artificial Sequence
  Description of Artificial Sequence: Synthetic oligonucleotide
  Antisense strand to SEQ ID NO: 1768301
ugcuuucagguaagacgga

SEQ ID NO: 1768303 - RNA, 19 nt, Artificial Sequence
  Description of Artificial Sequence: Synthetic oligonucleotide
  Sense strand starting at position 1491 of SEQ ID NO: 1562725
cugaaagcaucggcggaau

SEQ ID NO: 1768304 - RNA, 19 nt, Artificial Sequence
  Description of Artificial Sequence: Synthetic oligonucleotide
  Antisense strand to SEQ ID NO: 1768303
auuccgccgaugcuuucag

SEQ ID NO: 1768305 - RNA, 19 nt, Artificial Sequence
  Description of Artificial Sequence: Synthetic oligonucleotide
  Sense strand starting at position 1493 of SEQ ID NO: 1562725
gaaagcaucggcggaauuu

SEQ ID NO: 1768306 - RNA, 19 nt, Artificial Sequence
  Description of Artificial Sequence: Synthetic oligonucleotide
  Antisense strand to SEQ ID NO: 1768305
aaauuccgccgaugcuuuc

SEQ ID NO: 1768307 - RNA, 19 nt, Artificial Sequence
  Description of Artificial Sequence: Synthetic oligonucleotide
  Sense strand starting at position 1718 of SEQ ID NO: 1562725
ucccguuuagcauaacaau

SEQ ID NO: 1768308 - RNA, 19 nt, Artificial Sequence
  Description of Artificial Sequence: Synthetic oligonucleotide
  Antisense strand to SEQ ID NO: 1768307
auuguuaugcuaaacggga

SEQ ID NO: 1768309 - RNA, 19 nt, Artificial Sequence
  Description of Artificial Sequence: Synthetic oligonucleotide
  Sense strand starting at position 1763 of SEQ ID NO: 1562725
ccgcgagaugccguuucua

SEQ ID NO: 1768310 - RNA, 19 nt, Artificial Sequence
  Description of Artificial Sequence: Synthetic oligonucleotide
  Antisense strand to SEQ ID NO: 1768309
uagaaacggcaucucgcgg

SEQ ID NO: 1768311 - RNA, 19 nt, Artificial Sequence
  Description of Artificial Sequence: Synthetic oligonucleotide
  Sense strand starting at position 1765 of SEQ ID NO: 1562725
gcgagaugccguuucuaug

SEQ ID NO: 1768312 - RNA, 19 nt, Artificial Sequence
  Description of Artificial Sequence: Synthetic oligonucleotide
  Antisense strand to SEQ ID NO: 1768311
cauagaaacggcaucucgc

SEQ ID NO: 1768313 - RNA, 19 nt, Artificial Sequence
  Description of Artificial Sequence: Synthetic oligonucleotide
  Sense strand starting at position 1808 of SEQ ID NO: 1562725
accaaugugucaguggaga

SEQ ID NO: 1768314 - RNA, 19 nt, Artificial Sequence
  Description of Artificial Sequence: Synthetic oligonucleotide
  Antisense strand to SEQ ID NO: 1768313
ucuccacugacacauuggu

SEQ ID NO: 1768315 - RNA, 19 nt, Artificial Sequence
  Description of Artificial Sequence: Synthetic oligonucleotide
  Sense strand starting at position 1870 of SEQ ID NO: 1562725
agaagacacugccuuugua

SEQ ID NO: 1768316 - RNA, 19 nt, Artificial Sequence
  Description of Artificial Sequence: Synthetic oligonucleotide
  Antisense strand to SEQ ID NO: 1768315
uacaaaggcagugucuucu

SEQ ID NO: 1768317 - RNA, 19 nt, Artificial Sequence
  Description of Artificial Sequence: Synthetic oligonucleotide
  Sense strand starting at position 1873 of SEQ ID NO: 1562725
agacacugccuuuguauaa

SEQ ID NO: 1768318 - RNA, 19 nt, Artificial Sequence
  Description of Artificial Sequence: Synthetic oligonucleotide
  Antisense strand to SEQ ID NO: 1768317
uuauacaaaggcagugucu

SEQ ID NO: 1768319 - RNA, 19 nt, Artificial Sequence
  Description of Artificial Sequence: Synthetic oligonucleotide
  Sense strand starting at position 1895 of SEQ ID NO: 1562725
guuugcuaucccgagguga

SEQ ID NO: 1768320 - RNA, 19 nt, Artificial Sequence
  Description of Artificial Sequence: Synthetic oligonucleotide
  Antisense strand to SEQ ID NO: 1768319
ucaccucgggauagcaaac

SEQ ID NO: 1768321 - RNA, 19 nt, Artificial Sequence
  Description of Artificial Sequence: Synthetic oligonucleotide
  Sense strand starting at position 2283 of SEQ ID NO: 1562725
gugucuccgcgguugugaa

SEQ ID NO: 1768322 - RNA, 19 nt, Artificial Sequence
  Description of Artificial Sequence: Synthetic oligonucleotide
  Antisense strand to SEQ ID NO: 1768321
uucacaaccgcggagacac

SEQ ID NO: 1768323 - RNA, 19 nt, Artificial Sequence
  Description of Artificial Sequence: Synthetic oligonucleotide
  Sense strand starting at position 2332 of SEQ ID NO: 1562725
cgugaagaugauugcauga

SEQ ID NO: 1768324 - RNA, 19 nt, Artificial Sequence
  Description of Artificial Sequence: Synthetic oligonucleotide
  Antisense strand to SEQ ID NO: 1768323
ucaugcaaucaucuucacg

SEQ ID NO: 1768325 - RNA, 19 nt, Artificial Sequence
  Description of Artificial Sequence: Synthetic oligonucleotide
  Sense strand starting at position 2355 of SEQ ID NO: 1562725
gugcgugugaacguuuguu

SEQ ID NO: 1768326 - RNA, 19 nt, Artificial Sequence
  Description of Artificial Sequence: Synthetic oligonucleotide
  Antisense strand to SEQ ID NO: 1768325
aacaaacguucacacgcac

SEQ ID NO: 1768327 - RNA, 19 nt, Artificial Sequence
  Description of Artificial Sequence: Synthetic oligonucleotide
  Sense strand starting at position 2357 of SEQ ID NO: 1562725
gcgugugaacguuuguuga

SEQ ID NO: 1768328 - RNA, 19 nt, Artificial Sequence
  Description of Artificial Sequence: Synthetic oligonucleotide
  Antisense strand to SEQ ID NO: 1768327
ucaacaaacguucacacgc

SEQ ID NO: 1768329 - RNA, 19 nt, Artificial Sequence
  Description of Artificial Sequence: Synthetic oligonucleotide
  Sense strand starting at position 2451 of SEQ ID NO: 1562725
acacguauaucuuugagaa

SEQ ID NO: 1768330 - RNA, 19 nt, Artificial Sequence
  Description of Artificial Sequence: Synthetic oligonucleotide
  Antisense strand to SEQ ID NO: 1768329
uucucaaagauauacgugu

SEQ ID NO: 1768331 - RNA, 19 nt, Artificial Sequence
  Description of Artificial Sequence: Synthetic oligonucleotide
  Sense strand starting at position 2452 of SEQ ID NO: 1562725
cacguauaucuuugagaau

SEQ ID NO: 1768332 - RNA, 19 nt, Artificial Sequence
  Description of Artificial Sequence: Synthetic oligonucleotide
  Antisense strand to SEQ ID NO: 1768331
auucucaaagauauacgug

SEQ ID NO: 1768333 - RNA, 19 nt, Artificial Sequence
  Description of Artificial Sequence: Synthetic oligonucleotide
  Sense strand starting at position 2564 of SEQ ID NO: 1562725
augauuagugauuaguauc

SEQ ID NO: 1768334 - RNA, 19 nt, Artificial Sequence
  Description of Artificial Sequence: Synthetic oligonucleotide
  Antisense strand to SEQ ID NO: 1768333
gauacuaaucacuaaucau

SEQ ID NO: 1768335 - RNA, 19 nt, Artificial Sequence
  Description of Artificial Sequence: Synthetic oligonucleotide
  Sense strand starting at position 2578 of SEQ ID NO: 1562725
guaucaguaucuguggacu

SEQ ID NO: 1768336 - RNA, 19 nt, Artificial Sequence
  Description of Artificial Sequence: Synthetic oligonucleotide
  Antisense strand to SEQ ID NO: 1768335
aguccacagauacugauac

SEQ ID NO: 1768337 - RNA, 19 nt, Artificial Sequence
  Description of Artificial Sequence: Synthetic oligonucleotide
  Sense strand starting at position 2648 of SEQ ID NO: 1562725
gugcacagcuuccuauaaa

SEQ ID NO: 1768338 - RNA, 19 nt, Artificial Sequence
  Description of Artificial Sequence: Synthetic oligonucleotide
  Antisense strand to SEQ ID NO: 1768337
uuuauaggaagcugugcac

SEQ ID NO: 1768339 - RNA, 19 nt, Artificial Sequence
  Description of Artificial Sequence: Synthetic oligonucleotide
  Sense strand starting at position 2685 of SEQ ID NO: 1562725
ucuugugagccagguacua

SEQ ID NO: 1768340 - RNA, 19 nt, Artificial Sequence
  Description of Artificial Sequence: Synthetic oligonucleotide
  Antisense strand to SEQ ID NO: 1768339
uaguaccuggcucacaaga

SEQ ID NO: 1768341 - RNA, 19 nt, Artificial Sequence
  Description of Artificial Sequence: Synthetic oligonucleotide
  Sense strand starting at position 2703 of SEQ ID NO: 1562725
auuauuauuccucagugca

SEQ ID NO: 1768342 - RNA, 19 nt, Artificial Sequence
  Description of Artificial Sequence: Synthetic oligonucleotide
  Antisense strand to SEQ ID NO: 1768341
ugcacugaggaauaauaau

SEQ ID NO: 1768343 - RNA, 19 nt, Artificial Sequence
  Description of Artificial Sequence: Synthetic oligonucleotide
  Sense strand starting at position 2706 of SEQ ID NO: 1562725
auuauuccucagugcaaag

SEQ ID NO: 1768344 - RNA, 19 nt, Artificial Sequence
  Description of Artificial Sequence: Synthetic oligonucleotide
  Antisense strand to SEQ ID NO: 1768343
cuuugcacugaggaauaau

SEQ ID NO: 1768345 - RNA, 19 nt, Artificial Sequence
  Description of Artificial Sequence: Synthetic oligonucleotide
  Sense strand starting at position 2770 of SEQ ID NO: 1562725
gggugagccgcagagugau

SEQ ID NO: 1768346 - RNA, 19 nt, Artificial Sequence
  Description of Artificial Sequence: Synthetic oligonucleotide
  Antisense strand to SEQ ID NO: 1768345
aucacucugcggcucaccc

SEQ ID NO: 1768347 - RNA, 19 nt, Artificial Sequence
  Description of Artificial Sequence: Synthetic oligonucleotide
  Sense strand starting at position 2780 of SEQ ID NO: 1562725
cagagugaucauuggaagc

SEQ ID NO: 1768348 - RNA, 19 nt, Artificial Sequence
  Description of Artificial Sequence: Synthetic oligonucleotide
  Antisense strand to SEQ ID NO: 1768347
gcuuccaaugaucacucug

SEQ ID NO: 1768349 - RNA, 19 nt, Artificial Sequence
  Description of Artificial Sequence: Synthetic oligonucleotide
  Sense strand starting at position 2883 of SEQ ID NO: 1562725
gacagcuuguaucucaagu

SEQ ID NO: 1768350 - RNA, 19 nt, Artificial Sequence
  Description of Artificial Sequence: Synthetic oligonucleotide
  Antisense strand to SEQ ID NO: 1768349
acuugagauacaagcuguc

SEQ ID NO: 1768351 - RNA, 19 nt, Artificial Sequence
  Description of Artificial Sequence: Synthetic oligonucleotide
  Sense strand starting at position 2940 of SEQ ID NO: 1562725
cuguuuguggauuauuaga

SEQ ID NO: 1768352 - RNA, 19 nt, Artificial Sequence
  Description of Artificial Sequence: Synthetic oligonucleotide
  Antisense strand to SEQ ID NO: 1768351
ucuaauaauccacaaacag

SEQ ID NO: 1768353 - RNA, 19 nt, Artificial Sequence
  Description of Artificial Sequence: Synthetic oligonucleotide
  Sense strand starting at position 2942 of SEQ ID NO: 1562725
guuuguggauuauuagauc

SEQ ID NO: 1768354 - RNA, 19 nt, Artificial Sequence
  Description of Artificial Sequence: Synthetic oligonucleotide
  Antisense strand to SEQ ID NO: 1768353
gaucuaauaauccacaaac

SEQ ID NO: 1768355 - RNA, 19 nt, Artificial Sequence
  Description of Artificial Sequence: Synthetic oligonucleotide
  Sense strand starting at position 3053 of SEQ ID NO: 1562725
ugaguaaggugcccaguua

SEQ ID NO: 1768356 - RNA, 19 nt, Artificial Sequence
  Description of Artificial Sequence: Synthetic oligonucleotide
  Antisense strand to SEQ ID NO: 1768355
uaacugggcaccuuacuca

SEQ ID NO: 1768357 - RNA, 19 nt, Artificial Sequence
  Description of Artificial Sequence: Synthetic oligonucleotide
  Sense strand starting at position 3054 of SEQ ID NO: 1562725
gaguaaggugcccaguuaa

SEQ ID NO: 1768358 - RNA, 19 nt, Artificial Sequence
  Description of Artificial Sequence: Synthetic oligonucleotide
  Antisense strand to SEQ ID NO: 1768357
uuaacugggcaccuuacuc

SEQ ID NO: 1768359 - RNA, 19 nt, Artificial Sequence
  Description of Artificial Sequence: Synthetic oligonucleotide
  Sense strand starting at position 3066 of SEQ ID NO: 1562725
caguuaaagcccgagaagu

SEQ ID NO: 1768360 - RNA, 19 nt, Artificial Sequence
  Description of Artificial Sequence: Synthetic oligonucleotide
  Antisense strand to SEQ ID NO: 1768359
acuucucgggcuuuaacug

SEQ ID NO: 1768361 - RNA, 19 nt, Artificial Sequence
  Description of Artificial Sequence: Synthetic oligonucleotide
  Sense strand starting at position 3068 of SEQ ID NO: 1562725
guuaaagcccgagaaguaa

SEQ ID NO: 1768362 - RNA, 19 nt, Artificial Sequence
  Description of Artificial Sequence: Synthetic oligonucleotide
  Antisense strand to SEQ ID NO: 1768361
uuacuucucgggcuuuaac

SEQ ID NO: 1768363 - RNA, 19 nt, Artificial Sequence
  Description of Artificial Sequence: Synthetic oligonucleotide
  Sense strand starting at position 3317 of SEQ ID NO: 1562725
ucauuaaaucucgaguaua

SEQ ID NO: 1768364 - RNA, 19 nt, Artificial Sequence
  Description of Artificial Sequence: Synthetic oligonucleotide
  Antisense strand to SEQ ID NO: 1768363
uauacucgagauuuaauga

SEQ ID NO: 1768365 - RNA, 19 nt, Artificial Sequence
  Description of Artificial Sequence: Synthetic oligonucleotide
  Sense strand starting at position 3414 of SEQ ID NO: 1562725
ucaagucagucauccuauu

SEQ ID NO: 1768366 - RNA, 19 nt, Artificial Sequence
  Description of Artificial Sequence: Synthetic oligonucleotide
  Antisense strand to SEQ ID NO: 1768365
aauaggaugacugacuuga

SEQ ID NO: 1768367 - RNA, 19 nt, Artificial Sequence
  Description of Artificial Sequence: Synthetic oligonucleotide
  Sense strand starting at position 30 of SEQ ID NO: 1562726
gccuguauugccgccuaca

SEQ ID NO: 1768368 - RNA, 19 nt, Artificial Sequence
  Description of Artificial Sequence: Synthetic oligonucleotide
  Antisense strand to SEQ ID NO: 1768367
uguaggcggcaauacaggc

SEQ ID NO: 1768369 - RNA, 19 nt, Artificial Sequence
  Description of Artificial Sequence: Synthetic oligonucleotide
  Sense strand starting at position 31 of SEQ ID NO: 1562726
ccuguauugccgccuacau

SEQ ID NO: 1768370 - RNA, 19 nt, Artificial Sequence
  Description of Artificial Sequence: Synthetic oligonucleotide
  Antisense strand to SEQ ID NO: 1768369
auguaggcggcaauacagg

SEQ ID NO: 1768371 - RNA, 19 nt, Artificial Sequence
  Description of Artificial Sequence: Synthetic oligonucleotide
  Sense strand starting at position 331 of SEQ ID NO: 1562726
ucacucacugaguggaauu

SEQ ID NO: 1768372 - RNA, 19 nt, Artificial Sequence
  Description of Artificial Sequence: Synthetic oligonucleotide
  Antisense strand to SEQ ID NO: 1768371
aauuccacucagugaguga

SEQ ID NO: 1768373 - RNA, 19 nt, Artificial Sequence
  Description of Artificial Sequence: Synthetic oligonucleotide
  Sense strand starting at position 372 of SEQ ID NO: 1562726
ccuguuguauuauucugaa

SEQ ID NO: 1768374 - RNA, 19 nt, Artificial Sequence
  Description of Artificial Sequence: Synthetic oligonucleotide
  Antisense strand to SEQ ID NO: 1768373
uucagaauaauacaacagg

SEQ ID NO: 1768375 - RNA, 19 nt, Artificial Sequence
  Description of Artificial Sequence: Synthetic oligonucleotide
  Sense strand starting at position 439 of SEQ ID NO: 1562726
cagccagaguuagcaaaua

SEQ ID NO: 1768376 - RNA, 19 nt, Artificial Sequence
  Description of Artificial Sequence: Synthetic oligonucleotide
  Antisense strand to SEQ ID NO: 1768375
uauuugcuaacucuggcug

SEQ ID NO: 1768377 - RNA, 19 nt, Artificial Sequence
  Description of Artificial Sequence: Synthetic oligonucleotide
  Sense strand starting at position 522 of SEQ ID NO: 1562726
guacgucucaugucauguu

SEQ ID NO: 1768378 - RNA, 19 nt, Artificial Sequence
  Description of Artificial Sequence: Synthetic oligonucleotide
  Antisense strand to SEQ ID NO: 1768377
aacaugacaugagacguac

SEQ ID NO: 1768379 - RNA, 19 nt, Artificial Sequence
  Description of Artificial Sequence: Synthetic oligonucleotide
  Sense strand starting at position 529 of SEQ ID NO: 1562726
ucaugucauguuugggaua

SEQ ID NO: 1768380 - RNA, 19 nt, Artificial Sequence
  Description of Artificial Sequence: Synthetic oligonucleotide
  Antisense strand to SEQ ID NO: 1768379
uaucccaaacaugacauga

SEQ ID NO: 1768381 - RNA, 19 nt, Artificial Sequence
  Description of Artificial Sequence: Synthetic oligonucleotide
  Sense strand starting at position 542 of SEQ ID NO: 1562726
gggauaagcugauacuaaa

SEQ ID NO: 1768382 - RNA, 19 nt, Artificial Sequence
  Description of Artificial Sequence: Synthetic oligonucleotide
  Antisense strand to SEQ ID NO: 1768381
uuuaguaucagcuuauccc

SEQ ID NO: 1768383 - RNA, 19 nt, Artificial Sequence
  Description of Artificial Sequence: Synthetic oligonucleotide
  Sense strand starting at position 566 of SEQ ID NO: 1562726
auguguuguuuauugaaag

SEQ ID NO: 1768384 - RNA, 19 nt, Artificial Sequence
  Description of Artificial Sequence: Synthetic oligonucleotide
  Antisense strand to SEQ ID NO: 1768383
cuuucaauaaacaacacau

SEQ ID NO: 1768385 - RNA, 19 nt, Artificial Sequence
  Description of Artificial Sequence: Synthetic oligonucleotide
  Sense strand starting at position 822 of SEQ ID NO: 1562726
acaguagguccucaauaua

SEQ ID NO: 1768386 - RNA, 19 nt, Artificial Sequence
  Description of Artificial Sequence: Synthetic oligonucleotide
  Antisense strand to SEQ ID NO: 1768385
uauauugaggaccuacugu

SEQ ID NO: 1768387 - RNA, 19 nt, Artificial Sequence
  Description of Artificial Sequence: Synthetic oligonucleotide
  Sense strand starting at position 913 of SEQ ID NO: 1562726
ccagcucagcuuugacuau

SEQ ID NO: 1768388 - RNA, 19 nt, Artificial Sequence
  Description of Artificial Sequence: Synthetic oligonucleotide
  Antisense strand to SEQ ID NO: 1768387
auagucaaagcugagcugg

SEQ ID NO: 1768389 - RNA, 19 nt, Artificial Sequence
  Description of Artificial Sequence: Synthetic oligonucleotide
  Sense strand starting at position 917 of SEQ ID NO: 1562726
cucagcuuugacuauggga

SEQ ID NO: 1768390 - RNA, 19 nt, Artificial Sequence
  Description of Artificial Sequence: Synthetic oligonucleotide
  Antisense strand to SEQ ID NO: 1768389
ucccauagucaaagcugag

SEQ ID NO: 1768391 - RNA, 19 nt, Artificial Sequence
  Description of Artificial Sequence: Synthetic oligonucleotide
  Sense strand starting at position 1026 of SEQ ID NO: 1562726
gagaaagcggcucgggaua

SEQ ID NO: 1768392 - RNA, 19 nt, Artificial Sequence
  Description of Artificial Sequence: Synthetic oligonucleotide
  Antisense strand to SEQ ID NO: 1768391
uaucccgagccgcuuucuc

SEQ ID NO: 1768393 - RNA, 19 nt, Artificial Sequence
  Description of Artificial Sequence: Synthetic oligonucleotide
  Sense strand starting at position 1040 of SEQ ID NO: 1562726
ggauauguucugggcagca

SEQ ID NO: 1768394 - RNA, 19 nt, Artificial Sequence
  Description of Artificial Sequence: Synthetic oligonucleotide
  Antisense strand to SEQ ID NO: 1768393
ugcugcccagaacauaucc

SEQ ID NO: 1768395 - RNA, 19 nt, Artificial Sequence
  Description of Artificial Sequence: Synthetic oligonucleotide
  Sense strand starting at position 1056 of SEQ ID NO: 1562726
gcacguagguuaucaucaa

SEQ ID NO: 1768396 - RNA, 19 nt, Artificial Sequence
  Description of Artificial Sequence: Synthetic oligonucleotide
  Antisense strand to SEQ ID NO: 1768395
uugaugauaaccuacgugc

SEQ ID NO: 1768397 - RNA, 19 nt, Artificial Sequence
  Description of Artificial Sequence: Synthetic oligonucleotide
  Sense strand starting at position 1060 of SEQ ID NO: 1562726
guagguuaucaucaagacc

SEQ ID NO: 1768398 - RNA, 19 nt, Artificial Sequence
  Description of Artificial Sequence: Synthetic oligonucleotide
  Antisense strand to SEQ ID NO: 1768397
ggucuugaugauaaccuac

SEQ ID NO: 1768399 - RNA, 19 nt, Artificial Sequence
  Description of Artificial Sequence: Synthetic oligonucleotide
  Sense strand starting at position 1063 of SEQ ID NO: 1562726
gguuaucaucaagaccuuu

SEQ ID NO: 1768400 - RNA, 19 nt, Artificial Sequence
  Description of Artificial Sequence: Synthetic oligonucleotide
  Antisense strand to SEQ ID NO: 1768399
aaaggucuugaugauaacc

SEQ ID NO: 1768401 - RNA, 19 nt, Artificial Sequence
  Description of Artificial Sequence: Synthetic oligonucleotide
  Sense strand starting at position 1074 of SEQ ID NO: 1562726
agaccuuugaguggugcau

SEQ ID NO: 1768402 - RNA, 19 nt, Artificial Sequence
  Description of Artificial Sequence: Synthetic oligonucleotide
  Antisense strand to SEQ ID NO: 1768401
augcaccacucaaaggucu

SEQ ID NO: 1768403 - RNA, 19 nt, Artificial Sequence
  Description of Artificial Sequence: Synthetic oligonucleotide
  Sense strand starting at position 1177 of SEQ ID NO: 1562726
gccucugaacgcuggaaua

SEQ ID NO: 1768404 - RNA, 19 nt, Artificial Sequence
  Description of Artificial Sequence: Synthetic oligonucleotide
  Antisense strand to SEQ ID NO: 1768403
uauuccagcguucagaggc

SEQ ID NO: 1768405 - RNA, 19 nt, Artificial Sequence
  Description of Artificial Sequence: Synthetic oligonucleotide
  Sense strand starting at position 2710 of SEQ ID NO: 1562726
ggcugccagagacaugauu

SEQ ID NO: 1768406 - RNA, 19 nt, Artificial Sequence
  Description of Artificial Sequence: Synthetic oligonucleotide
  Antisense strand to SEQ ID NO: 1768405
aaucaugucucuggcagcc

SEQ ID NO: 1768407 - RNA, 19 nt, Artificial Sequence
  Description of Artificial Sequence: Synthetic oligonucleotide
  Sense strand starting at position 2748 of SEQ ID NO: 1562726
auguauguuugagcucaag

SEQ ID NO: 1768408 - RNA, 19 nt, Artificial Sequence
  Description of Artificial Sequence: Synthetic oligonucleotide
  Antisense strand to SEQ ID NO: 1768407
cuugagcucaaacauacau

SEQ ID NO: 1768409 - RNA, 19 nt, Artificial Sequence
  Description of Artificial Sequence: Synthetic oligonucleotide
  Sense strand starting at position 2751 of SEQ ID NO: 1562726
uauguuugagcucaaggaa

SEQ ID NO: 1768410 - RNA, 19 nt, Artificial Sequence
  Description of Artificial Sequence: Synthetic oligonucleotide
  Antisense strand to SEQ ID NO: 1768409
uuccuugagcucaaacaua

SEQ ID NO: 1768411 - RNA, 19 nt, Artificial Sequence
  Description of Artificial Sequence: Synthetic oligonucleotide
  Sense strand starting at position 2855 of SEQ ID NO: 1562726
acaaucgucuuagucauua

SEQ ID NO: 1768412 - RNA, 19 nt, Artificial Sequence
  Description of Artificial Sequence: Synthetic oligonucleotide
  Antisense strand to SEQ ID NO: 1768411
uaaugacuaagacgauugu

SEQ ID NO: 1768413 - RNA, 19 nt, Artificial Sequence
  Description of Artificial Sequence: Synthetic oligonucleotide
  Sense strand starting at position 2859 of SEQ ID NO: 1562726
ucgucuuagucauuaacau

SEQ ID NO: 1768414 - RNA, 19 nt, Artificial Sequence
  Description of Artificial Sequence: Synthetic oligonucleotide
  Antisense strand to SEQ ID NO: 1768413
auguuaaugacuaagacga

SEQ ID NO: 1768415 - RNA, 19 nt, Artificial Sequence
  Description of Artificial Sequence: Synthetic oligonucleotide
  Sense strand starting at position 2860 of SEQ ID NO: 1562726
cgucuuagucauuaacaua

SEQ ID NO: 1768416 - RNA, 19 nt, Artificial Sequence
  Description of Artificial Sequence: Synthetic oligonucleotide
  Antisense strand to SEQ ID NO: 1768415
uauguuaaugacuaagacg

SEQ ID NO: 1768417 - RNA, 19 nt, Artificial Sequence
  Description of Artificial Sequence: Synthetic oligonucleotide
  Sense strand starting at position 3040 of SEQ ID NO: 1562726
gaaauugaggccuagcaac

SEQ ID NO: 1768418 - RNA, 19 nt, Artificial Sequence
  Description of Artificial Sequence: Synthetic oligonucleotide
  Antisense strand to SEQ ID NO: 1768417
guugcuaggccucaauuuc

SEQ ID NO: 1768419 - RNA, 19 nt, Artificial Sequence
  Description of Artificial Sequence: Synthetic oligonucleotide
  Sense strand starting at position 3070 of SEQ ID NO: 1562726
ccaggucucccgugaaaga

SEQ ID NO: 1768420 - RNA, 19 nt, Artificial Sequence
  Description of Artificial Sequence: Synthetic oligonucleotide
  Antisense strand to SEQ ID NO: 1768419
ucuuucacgggagaccugg

SEQ ID NO: 1768421 - RNA, 19 nt, Artificial Sequence
  Description of Artificial Sequence: Synthetic oligonucleotide
  Sense strand starting at position 3123 of SEQ ID NO: 1562726
ggaggucuuucgcugacau

SEQ ID NO: 1768422 - RNA, 19 nt, Artificial Sequence
  Description of Artificial Sequence: Synthetic oligonucleotide
  Antisense strand to SEQ ID NO: 1768421
augucagcgaaagaccucc

SEQ ID NO: 1768423 - RNA, 19 nt, Artificial Sequence
  Description of Artificial Sequence: Synthetic oligonucleotide
  Sense strand starting at position 3124 of SEQ ID NO: 1562726
gaggucuuucgcugacauc

SEQ ID NO: 1768424 - RNA, 19 nt, Artificial Sequence
  Description of Artificial Sequence: Synthetic oligonucleotide
  Antisense strand to SEQ ID NO: 1768423
gaugucagcgaaagaccuc

SEQ ID NO: 1768425 - RNA, 19 nt, Artificial Sequence
  Description of Artificial Sequence: Synthetic oligonucleotide
  Sense strand starting at position 3125 of SEQ ID NO: 1562726
aggucuuucgcugacauca

SEQ ID NO: 1768426 - RNA, 19 nt, Artificial Sequence
  Description of Artificial Sequence: Synthetic oligonucleotide
  Antisense strand to SEQ ID NO: 1768425
ugaugucagcgaaagaccu

SEQ ID NO: 1768427 - RNA, 19 nt, Artificial Sequence
  Description of Artificial Sequence: Synthetic oligonucleotide
  Sense strand starting at position 3172 of SEQ ID NO: 1562726
ugugaaacgacagguuauu

SEQ ID NO: 1768428 - RNA, 19 nt, Artificial Sequence
  Description of Artificial Sequence: Synthetic oligonucleotide
  Antisense strand to SEQ ID NO: 1768427
aauaaccugucguuucaca

SEQ ID NO: 1768429 - RNA, 19 nt, Artificial Sequence
  Description of Artificial Sequence: Synthetic oligonucleotide
  Sense strand starting at position 3439 of SEQ ID NO: 1562726
cugguaaugcuccacucuu

SEQ ID NO: 1768430 - RNA, 19 nt, Artificial Sequence
  Description of Artificial Sequence: Synthetic oligonucleotide
  Antisense strand to SEQ ID NO: 1768429
aagaguggagcauuaccag

SEQ ID NO: 1768431 - RNA, 19 nt, Artificial Sequence
  Description of Artificial Sequence: Synthetic oligonucleotide
  Sense strand starting at position 3467 of SEQ ID NO: 1562726
uagacagauuguguccuua

SEQ ID NO: 1768432 - RNA, 19 nt, Artificial Sequence
  Description of Artificial Sequence: Synthetic oligonucleotide
  Antisense strand to SEQ ID NO: 1768431
uaaggacacaaucugucua

SEQ ID NO: 1768433 - RNA, 19 nt, Artificial Sequence
  Description of Artificial Sequence: Synthetic oligonucleotide
  Sense strand starting at position 3469 of SEQ ID NO: 1562726
gacagauuguguccuuaga

SEQ ID NO: 1768434 - RNA, 19 nt, Artificial Sequence
  Description of Artificial Sequence: Synthetic oligonucleotide
  Antisense strand to SEQ ID NO: 1768433
ucuaaggacacaaucuguc

SEQ ID NO: 1768435 - RNA, 19 nt, Artificial Sequence
  Description of Artificial Sequence: Synthetic oligonucleotide
  Sense strand starting at position 3471 of SEQ ID NO: 1562726
cagauuguguccuuagaug

SEQ ID NO: 1768436 - RNA, 19 nt, Artificial Sequence
  Description of Artificial Sequence: Synthetic oligonucleotide
  Antisense strand to SEQ ID NO: 1768435
caucuaaggacacaaucug

SEQ ID NO: 1768437 - RNA, 19 nt, Artificial Sequence
  Description of Artificial Sequence: Synthetic oligonucleotide
  Sense strand starting at position 3491 of SEQ ID NO: 1562726
gagagcacuuaguuuauua

SEQ ID NO: 1768438 - RNA, 19 nt, Artificial Sequence
  Description of Artificial Sequence: Synthetic oligonucleotide
  Antisense strand to SEQ ID NO: 1768437
uaauaaacuaagugcucuc

SEQ ID NO: 1768439 - RNA, 19 nt, Artificial Sequence
  Description of Artificial Sequence: Synthetic oligonucleotide
  Sense strand starting at position 3535 of SEQ ID NO: 1562726
gacucaauagucuggagac

SEQ ID NO: 1768440 - RNA, 19 nt, Artificial Sequence
  Description of Artificial Sequence: Synthetic oligonucleotide
  Antisense strand to SEQ ID NO: 1768439
gucuccagacuauugaguc

SEQ ID NO: 1768441 - RNA, 19 nt, Artificial Sequence
  Description of Artificial Sequence: Synthetic oligonucleotide
  Sense strand starting at position 3593 of SEQ ID NO: 1562726
agaagaggauaggaguaau

SEQ ID NO: 1768442 - RNA, 19 nt, Artificial Sequence
  Description of Artificial Sequence: Synthetic oligonucleotide
  Antisense strand to SEQ ID NO: 1768441
auuacuccuauccucuucu

SEQ ID NO: 1768443 - RNA, 19 nt, Artificial Sequence
  Description of Artificial Sequence: Synthetic oligonucleotide
  Sense strand starting at position 3605 of SEQ ID NO: 1562726
gaguaaugagagugguuuc

SEQ ID NO: 1768444 - RNA, 19 nt, Artificial Sequence
  Description of Artificial Sequence: Synthetic oligonucleotide
  Antisense strand to SEQ ID NO: 1768443
gaaaccacucucauuacuc

SEQ ID NO: 1768445 - RNA, 19 nt, Artificial Sequence
  Description of Artificial Sequence: Synthetic oligonucleotide
  Sense strand starting at position 3608 of SEQ ID NO: 1562726
uaaugagagugguuucuuu

SEQ ID NO: 1768446 - RNA, 19 nt, Artificial Sequence
  Description of Artificial Sequence: Synthetic oligonucleotide
  Antisense strand to SEQ ID NO: 1768445
aaagaaaccacucucauua

SEQ ID NO: 1768447 - RNA, 19 nt, Artificial Sequence
  Description of Artificial Sequence: Synthetic oligonucleotide
  Sense strand starting at position 3 of SEQ ID NO: 1562727
uuuaucgaagugugcaauu

SEQ ID NO: 1768448 - RNA, 19 nt, Artificial Sequence
  Description of Artificial Sequence: Synthetic oligonucleotide
  Antisense strand to SEQ ID NO: 1768447
aauugcacacuucgauaaa

SEQ ID NO: 1768449 - RNA, 19 nt, Artificial Sequence
  Description of Artificial Sequence: Synthetic oligonucleotide
  Sense strand starting at position 127 of SEQ ID NO: 1562727
gggagaaauuguucgcaaa

SEQ ID NO: 1768450 - RNA, 19 nt, Artificial Sequence
  Description of Artificial Sequence: Synthetic oligonucleotide
  Antisense strand to SEQ ID NO: 1768449
uuugcgaacaauuucuccc

SEQ ID NO: 1768451 - RNA, 19 nt, Artificial Sequence
  Description of Artificial Sequence: Synthetic oligonucleotide
  Sense strand starting at position 128 of SEQ ID NO: 1562727
ggagaaauuguucgcaaac

SEQ ID NO: 1768452 - RNA, 19 nt, Artificial Sequence
  Description of Artificial Sequence: Synthetic oligonucleotide
  Antisense strand to SEQ ID NO: 1768451
guuugcgaacaauuucucc

SEQ ID NO: 1768453 - RNA, 19 nt, Artificial Sequence
  Description of Artificial Sequence: Synthetic oligonucleotide
  Sense strand starting at position 129 of SEQ ID NO: 1562727
gagaaauuguucgcaaacc

SEQ ID NO: 1768454 - RNA, 19 nt, Artificial Sequence
  Description of Artificial Sequence: Synthetic oligonucleotide
  Antisense strand to SEQ ID NO: 1768453
gguuugcgaacaauuucuc

SEQ ID NO: 1768455 - RNA, 19 nt, Artificial Sequence
  Description of Artificial Sequence: Synthetic oligonucleotide
  Sense strand starting at position 575 of SEQ ID NO: 1562727
ucaagaaagcucuguagag

SEQ ID NO: 1768456 - RNA, 19 nt, Artificial Sequence
  Description of Artificial Sequence: Synthetic oligonucleotide
  Antisense strand to SEQ ID NO: 1768455
cucuacagagcuuucuuga

SEQ ID NO: 1768457 - RNA, 19 nt, Artificial Sequence
  Description of Artificial Sequence: Synthetic oligonucleotide
  Sense strand starting at position 577 of SEQ ID NO: 1562727
aagaaagcucuguagagcu

SEQ ID NO: 1768458 - RNA, 19 nt, Artificial Sequence
  Description of Artificial Sequence: Synthetic oligonucleotide
  Antisense strand to SEQ ID NO: 1768457
agcucuacagagcuuucuu

SEQ ID NO: 1768459 - RNA, 19 nt, Artificial Sequence
  Description of Artificial Sequence: Synthetic oligonucleotide
  Sense strand starting at position 655 of SEQ ID NO: 1562727
gugagcauuaguugggaca

SEQ ID NO: 1768460 - RNA, 19 nt, Artificial Sequence
  Description of Artificial Sequence: Synthetic oligonucleotide
  Antisense strand to SEQ ID NO: 1768459
ugucccaacuaaugcucac

SEQ ID NO: 1768461 - RNA, 19 nt, Artificial Sequence
  Description of Artificial Sequence: Synthetic oligonucleotide
  Sense strand starting at position 656 of SEQ ID NO: 1562727
ugagcauuaguugggacaa

SEQ ID NO: 1768462 - RNA, 19 nt, Artificial Sequence
  Description of Artificial Sequence: Synthetic oligonucleotide
  Antisense strand to SEQ ID NO: 1768461
uugucccaacuaaugcuca

SEQ ID NO: 1768463 - RNA, 19 nt, Artificial Sequence
  Description of Artificial Sequence: Synthetic oligonucleotide
  Sense strand starting at position 696 of SEQ ID NO: 1562727
gcggucaccagagguuaaa

SEQ ID NO: 1768464 - RNA, 19 nt, Artificial Sequence
  Description of Artificial Sequence: Synthetic oligonucleotide
  Antisense strand to SEQ ID NO: 1768463
uuuaaccucuggugaccgc

SEQ ID NO: 1768465 - RNA, 19 nt, Artificial Sequence
  Description of Artificial Sequence: Synthetic oligonucleotide
  Sense strand starting at position 733 of SEQ ID NO: 1562727
gggauuaagacucggauuc

SEQ ID NO: 1768466 - RNA, 19 nt, Artificial Sequence
  Description of Artificial Sequence: Synthetic oligonucleotide
  Antisense strand to SEQ ID NO: 1768465
gaauccgagucuuaauccc

SEQ ID NO: 1768467 - RNA, 19 nt, Artificial Sequence
  Description of Artificial Sequence: Synthetic oligonucleotide
  Sense strand starting at position 734 of SEQ ID NO: 1562727
ggauuaagacucggauucu

SEQ ID NO: 1768468 - RNA, 19 nt, Artificial Sequence
  Description of Artificial Sequence: Synthetic oligonucleotide
  Antisense strand to SEQ ID NO: 1768467
agaauccgagucuuaaucc

SEQ ID NO: 1768469 - RNA, 19 nt, Artificial Sequence
  Description of Artificial Sequence: Synthetic oligonucleotide
  Sense strand starting at position 735 of SEQ ID NO: 1562727
gauuaagacucggauucug

SEQ ID NO: 1768470 - RNA, 19 nt, Artificial Sequence
  Description of Artificial Sequence: Synthetic oligonucleotide
  Antisense strand to SEQ ID NO: 1768469
cagaauccgagucuuaauc

SEQ ID NO: 1768471 - RNA, 19 nt, Artificial Sequence
  Description of Artificial Sequence: Synthetic oligonucleotide
  Sense strand starting at position 746 of SEQ ID NO: 1562727
ggauucugaggguggucua

SEQ ID NO: 1768472 - RNA, 19 nt, Artificial Sequence
  Description of Artificial Sequence: Synthetic oligonucleotide
  Antisense strand to SEQ ID NO: 1768471
uagaccacccucagaaucc

SEQ ID NO: 1768473 - RNA, 19 nt, Artificial Sequence
  Description of Artificial Sequence: Synthetic oligonucleotide
  Sense strand starting at position 2578 of SEQ ID NO: 1562727
gggagccucuuguauagga

SEQ ID NO: 1768474 - RNA, 19 nt, Artificial Sequence
  Description of Artificial Sequence: Synthetic oligonucleotide
  Antisense strand to SEQ ID NO: 1768473
uccuauacaagaggcuccc

SEQ ID NO: 1768475 - RNA, 19 nt, Artificial Sequence
  Description of Artificial Sequence: Synthetic oligonucleotide
  Sense strand starting at position 2580 of SEQ ID NO: 1562727
gagccucuuguauaggaau

SEQ ID NO: 1768476 - RNA, 19 nt, Artificial Sequence
  Description of Artificial Sequence: Synthetic oligonucleotide
  Antisense strand to SEQ ID NO: 1768475
auuccuauacaagaggcuc

SEQ ID NO: 1768477 - RNA, 19 nt, Artificial Sequence
  Description of Artificial Sequence: Synthetic oligonucleotide
  Sense strand starting at position 2612 of SEQ ID NO: 1562727
gguuacugaggaugaguua

SEQ ID NO: 1768478 - RNA, 19 nt, Artificial Sequence
  Description of Artificial Sequence: Synthetic oligonucleotide
  Antisense strand to SEQ ID NO: 1768477
uaacucauccucaguaacc

SEQ ID NO: 1768479 - RNA, 19 nt, Artificial Sequence
  Description of Artificial Sequence: Synthetic oligonucleotide
  Sense strand starting at position 2742 of SEQ ID NO: 1562727
agcgguguuccugugaguu

SEQ ID NO: 1768480 - RNA, 19 nt, Artificial Sequence
  Description of Artificial Sequence: Synthetic oligonucleotide
  Antisense strand to SEQ ID NO: 1768479
aacucacaggaacaccgcu

SEQ ID NO: 1768481 - RNA, 19 nt, Artificial Sequence
  Description of Artificial Sequence: Synthetic oligonucleotide
  Sense strand starting at position 2797 of SEQ ID NO: 1562727
gccuuacacucagcagaaa

SEQ ID NO: 1768482 - RNA, 19 nt, Artificial Sequence
  Description of Artificial Sequence: Synthetic oligonucleotide
  Antisense strand to SEQ ID NO: 1768481
uuucugcugaguguaaggc

SEQ ID NO: 1768483 - RNA, 19 nt, Artificial Sequence
  Description of Artificial Sequence: Synthetic oligonucleotide
  Sense strand starting at position 2889 of SEQ ID NO: 1562727
uagcgucaucaaggcagau

SEQ ID NO: 1768484 - RNA, 19 nt, Artificial Sequence
  Description of Artificial Sequence: Synthetic oligonucleotide
  Antisense strand to SEQ ID NO: 1768483
aucugccuugaugacgcua

SEQ ID NO: 1768485 - RNA, 19 nt, Artificial Sequence
  Description of Artificial Sequence: Synthetic oligonucleotide
  Sense strand starting at position 2891 of SEQ ID NO: 1562727
gcgucaucaaggcagauga

SEQ ID NO: 1768486 - RNA, 19 nt, Artificial Sequence
  Description of Artificial Sequence: Synthetic oligonucleotide
  Antisense strand to SEQ ID NO: 1768485
ucaucugccuugaugacgc

SEQ ID NO: 1768487 - RNA, 19 nt, Artificial Sequence
  Description of Artificial Sequence: Synthetic oligonucleotide
  Sense strand starting at position 2905 of SEQ ID NO: 1562727
gaugaauaucguggaguau

SEQ ID NO: 1768488 - RNA, 19 nt, Artificial Sequence
  Description of Artificial Sequence: Synthetic oligonucleotide
  Antisense strand to SEQ ID NO: 1768487
auacuccacgauauucauc

SEQ ID NO: 1768489 - RNA, 19 nt, Artificial Sequence
  Description of Artificial Sequence: Synthetic oligonucleotide
  Sense strand starting at position 2906 of SEQ ID NO: 1562727
augaauaucguggaguauu

SEQ ID NO: 1768490 - RNA, 19 nt, Artificial Sequence
  Description of Artificial Sequence: Synthetic oligonucleotide
  Antisense strand to SEQ ID NO: 1768489
aauacuccacgauauucau

SEQ ID NO: 1768491 - RNA, 19 nt, Artificial Sequence
  Description of Artificial Sequence: Synthetic oligonucleotide
  Sense strand starting at position 2952 of SEQ ID NO: 1562727
aggagugaaugauccgcaa

SEQ ID NO: 1768492 - RNA, 19 nt, Artificial Sequence
  Description of Artificial Sequence: Synthetic oligonucleotide
  Antisense strand to SEQ ID NO: 1768491
uugcggaucauucacuccu

SEQ ID NO: 1768493 - RNA, 19 nt, Artificial Sequence
  Description of Artificial Sequence: Synthetic oligonucleotide
  Sense strand starting at position 2955 of SEQ ID NO: 1562727
agugaaugauccgcaacuc

SEQ ID NO: 1768494 - RNA, 19 nt, Artificial Sequence
  Description of Artificial Sequence: Synthetic oligonucleotide
  Antisense strand to SEQ ID NO: 1768493
gaguugcggaucauucacu

SEQ ID NO: 1768495 - RNA, 19 nt, Artificial Sequence
  Description of Artificial Sequence: Synthetic oligonucleotide
  Sense strand starting at position 2956 of SEQ ID NO: 1562727
gugaaugauccgcaacuca

SEQ ID NO: 1768496 - RNA, 19 nt, Artificial Sequence
  Description of Artificial Sequence: Synthetic oligonucleotide
  Antisense strand to SEQ ID NO: 1768495
ugaguugcggaucauucac

SEQ ID NO: 1768497 - RNA, 19 nt, Artificial Sequence
  Description of Artificial Sequence: Synthetic oligonucleotide
  Sense strand starting at position 2972 of SEQ ID NO: 1562727
ucacauaacggguaaaucu

SEQ ID NO: 1768498 - RNA, 19 nt, Artificial Sequence
  Description of Artificial Sequence: Synthetic oligonucleotide
  Antisense strand to SEQ ID NO: 1768497
agauuuacccguuauguga

SEQ ID NO: 1768499 - RNA, 19 nt, Artificial Sequence
  Description of Artificial Sequence: Synthetic oligonucleotide
  Sense strand starting at position 2994 of SEQ ID NO: 1562727
agacguaagucagaguaau

SEQ ID NO: 1768500 - RNA, 19 nt, Artificial Sequence
  Description of Artificial Sequence: Synthetic oligonucleotide
  Antisense strand to SEQ ID NO: 1768499
auuacucugacuuacgucu

SEQ ID NO: 1768501 - RNA, 19 nt, Artificial Sequence
  Description of Artificial Sequence: Synthetic oligonucleotide
  Sense strand starting at position 3008 of SEQ ID NO: 1562727
guaauagagucagccacaa

SEQ ID NO: 1768502 - RNA, 19 nt, Artificial Sequence
  Description of Artificial Sequence: Synthetic oligonucleotide
  Antisense strand to SEQ ID NO: 1768501
uuguggcugacucuauuac

SEQ ID NO: 1768503 - RNA, 19 nt, Artificial Sequence
  Description of Artificial Sequence: Synthetic oligonucleotide
  Sense strand starting at position 3029 of SEQ ID NO: 1562727
gaacacucgcugcaugauu

SEQ ID NO: 1768504 - RNA, 19 nt, Artificial Sequence
  Description of Artificial Sequence: Synthetic oligonucleotide
  Antisense strand to SEQ ID NO: 1768503
aaucaugcagcgaguguuc

SEQ ID NO: 1768505 - RNA, 19 nt, Artificial Sequence
  Description of Artificial Sequence: Synthetic oligonucleotide
  Sense strand starting at position 3388 of SEQ ID NO: 1562727
gcaagaacaguucagaggu

SEQ ID NO: 1768506 - RNA, 19 nt, Artificial Sequence
  Description of Artificial Sequence: Synthetic oligonucleotide
  Antisense strand to SEQ ID NO: 1768505
accucugaacuguucuugc

SEQ ID NO: 1768507 - RNA, 19 nt, Artificial Sequence
  Description of Artificial Sequence: Synthetic oligonucleotide
  Sense strand starting at position 3415 of SEQ ID NO: 1562727
uggugauccuggaguggga

SEQ ID NO: 1768508 - RNA, 19 nt, Artificial Sequence
  Description of Artificial Sequence: Synthetic oligonucleotide
  Antisense strand to SEQ ID NO: 1768507
ucccacuccaggaucacca

SEQ ID NO: 1768509 - RNA, 19 nt, Artificial Sequence
  Description of Artificial Sequence: Synthetic oligonucleotide
  Sense strand starting at position 3467 of SEQ ID NO: 1562727
gcuuucuuacucuggguau

SEQ ID NO: 1768510 - RNA, 19 nt, Artificial Sequence
  Description of Artificial Sequence: Synthetic oligonucleotide
  Antisense strand to SEQ ID NO: 1768509
auacccagaguaagaaagc

SEQ ID NO: 1768511 - RNA, 19 nt, Artificial Sequence
  Description of Artificial Sequence: Synthetic oligonucleotide
  Sense strand starting at position 3497 of SEQ ID NO: 1562727
uugggcucaguuugugaga

SEQ ID NO: 1768512 - RNA, 19 nt, Artificial Sequence
  Description of Artificial Sequence: Synthetic oligonucleotide
  Antisense strand to SEQ ID NO: 1768511
ucucacaaacugagcccaa

SEQ ID NO: 1768513 - RNA, 19 nt, Artificial Sequence
  Description of Artificial Sequence: Synthetic oligonucleotide
  Sense strand starting at position 3498 of SEQ ID NO: 1562727
ugggcucaguuugugagaa

SEQ ID NO: 1768514 - RNA, 19 nt, Artificial Sequence
  Description of Artificial Sequence: Synthetic oligonucleotide
  Antisense strand to SEQ ID NO: 1768513
uucucacaaacugagccca

SEQ ID NO: 1768515 - RNA, 19 nt, Artificial Sequence
  Description of Artificial Sequence: Synthetic oligonucleotide
  Sense strand starting at position 3502 of SEQ ID NO: 1562727
cucaguuugugagaauuua

SEQ ID NO: 1768516 - RNA, 19 nt, Artificial Sequence
  Description of Artificial Sequence: Synthetic oligonucleotide
  Antisense strand to SEQ ID NO: 1768515
uaaauucucacaaacugag

SEQ ID NO: 1768517 - RNA, 19 nt, Artificial Sequence
  Description of Artificial Sequence: Synthetic oligonucleotide
  Sense strand starting at position 3510 of SEQ ID NO: 1562727
gugagaauuuauugagcug

SEQ ID NO: 1768518 - RNA, 19 nt, Artificial Sequence
  Description of Artificial Sequence: Synthetic oligonucleotide
  Antisense strand to SEQ ID NO: 1768517
cagcucaauaaauucucac

SEQ ID NO: 1768519 - RNA, 19 nt, Artificial Sequence
  Description of Artificial Sequence: Synthetic oligonucleotide
  Sense strand starting at position 3860 of SEQ ID NO: 1562727
ccggucacauguuaaauuu

SEQ ID NO: 1768520 - RNA, 19 nt, Artificial Sequence
  Description of Artificial Sequence: Synthetic oligonucleotide
  Antisense strand to SEQ ID NO: 1768519
aaauuuaacaugugaccgg

SEQ ID NO: 1768521 - RNA, 19 nt, Artificial Sequence
  Description of Artificial Sequence: Synthetic oligonucleotide
  Sense strand starting at position 3913 of SEQ ID NO: 1562727
cccacagggugucuuauaa

SEQ ID NO: 1768522 - RNA, 19 nt, Artificial Sequence
  Description of Artificial Sequence: Synthetic oligonucleotide
  Antisense strand to SEQ ID NO: 1768521
uuauaagacacccuguggg

SEQ ID NO: 1768523 - RNA, 19 nt, Artificial Sequence
  Description of Artificial Sequence: Synthetic oligonucleotide
  Sense strand starting at position 3920 of SEQ ID NO: 1562727
ggugucuuauaaguuugaa

SEQ ID NO: 1768524 - RNA, 19 nt, Artificial Sequence
  Description of Artificial Sequence: Synthetic oligonucleotide
  Antisense strand to SEQ ID NO: 1768523
uucaaacuuauaagacacc

SEQ ID NO: 1768525 - RNA, 19 nt, Artificial Sequence
  Description of Artificial Sequence: Synthetic oligonucleotide
  Sense strand starting at position 3923 of SEQ ID NO: 1562727
gucuuauaaguuugaaguu

SEQ ID NO: 1768526 - RNA, 19 nt, Artificial Sequence
  Description of Artificial Sequence: Synthetic oligonucleotide
  Antisense strand to SEQ ID NO: 1768525
aacuucaaacuuauaagac

SEQ ID NO: 1768527 - RNA, 19 nt, Artificial Sequence
  Description of Artificial Sequence: Synthetic oligonucleotide
  Sense strand starting at position 15 of SEQ ID NO: 1562728
auugaaguguccuugguag

SEQ ID NO: 1768528 - RNA, 19 nt, Artificial Sequence
  Description of Artificial Sequence: Synthetic oligonucleotide
  Antisense strand to SEQ ID NO: 1768527
cuaccaaggacacuucaau

SEQ ID NO: 1768529 - RNA, 19 nt, Artificial Sequence
  Description of Artificial Sequence: Synthetic oligonucleotide
  Sense strand starting at position 17 of SEQ ID NO: 1562728
ugaaguguccuugguagag

SEQ ID NO: 1768530 - RNA, 19 nt, Artificial Sequence
  Description of Artificial Sequence: Synthetic oligonucleotide
  Antisense strand to SEQ ID NO: 1768529
cucuaccaaggacacuuca

SEQ ID NO: 1768531 - RNA, 19 nt, Artificial Sequence
  Description of Artificial Sequence: Synthetic oligonucleotide
  Sense strand starting at position 21 of SEQ ID NO: 1562728
guguccuugguagagaaau

SEQ ID NO: 1768532 - RNA, 19 nt, Artificial Sequence
  Description of Artificial Sequence: Synthetic oligonucleotide
  Antisense strand to SEQ ID NO: 1768531
auuucucuaccaaggacac

SEQ ID NO: 1768533 - RNA, 19 nt, Artificial Sequence
  Description of Artificial Sequence: Synthetic oligonucleotide
  Sense strand starting at position 191 of SEQ ID NO: 1562728
ucaaaugaacuauguguuu

SEQ ID NO: 1768534 - RNA, 19 nt, Artificial Sequence
  Description of Artificial Sequence: Synthetic oligonucleotide
  Antisense strand to SEQ ID NO: 1768533
aaacacauaguucauuuga

SEQ ID NO: 1768535 - RNA, 19 nt, Artificial Sequence
  Description of Artificial Sequence: Synthetic oligonucleotide
  Sense strand starting at position 194 of SEQ ID NO: 1562728
aaugaacuauguguuuaug

SEQ ID NO: 1768536 - RNA, 19 nt, Artificial Sequence
  Description of Artificial Sequence: Synthetic oligonucleotide
  Antisense strand to SEQ ID NO: 1768535
cauaaacacauaguucauu

SEQ ID NO: 1768537 - RNA, 19 nt, Artificial Sequence
  Description of Artificial Sequence: Synthetic oligonucleotide
  Sense strand starting at position 197 of SEQ ID NO: 1562728
gaacuauguguuuaugggu

SEQ ID NO: 1768538 - RNA, 19 nt, Artificial Sequence
  Description of Artificial Sequence: Synthetic oligonucleotide
  Antisense strand to SEQ ID NO: 1768537
acccauaaacacauaguuc

SEQ ID NO: 1768539 - RNA, 19 nt, Artificial Sequence
  Description of Artificial Sequence: Synthetic oligonucleotide
  Sense strand starting at position 202 of SEQ ID NO: 1562728
auguguuuaugggucauuu

SEQ ID NO: 1768540 - RNA, 19 nt, Artificial Sequence
  Description of Artificial Sequence: Synthetic oligonucleotide
  Antisense strand to SEQ ID NO: 1768539
aaaugacccauaaacacau

SEQ ID NO: 1768541 - RNA, 19 nt, Artificial Sequence
  Description of Artificial Sequence: Synthetic oligonucleotide
  Sense strand starting at position 204 of SEQ ID NO: 1562728
guguuuaugggucauuugu

SEQ ID NO: 1768542 - RNA, 19 nt, Artificial Sequence
  Description of Artificial Sequence: Synthetic oligonucleotide
  Antisense strand to SEQ ID NO: 1768541
acaaaugacccauaaacac

SEQ ID NO: 1768543 - RNA, 19 nt, Artificial Sequence
  Description of Artificial Sequence: Synthetic oligonucleotide
  Sense strand starting at position 206 of SEQ ID NO: 1562728
guuuaugggucauuuguca

SEQ ID NO: 1768544 - RNA, 19 nt, Artificial Sequence
  Description of Artificial Sequence: Synthetic oligonucleotide
  Antisense strand to SEQ ID NO: 1768543
ugacaaaugacccauaaac

SEQ ID NO: 1768545 - RNA, 19 nt, Artificial Sequence
  Description of Artificial Sequence: Synthetic oligonucleotide
  Sense strand starting at position 271 of SEQ ID NO: 1562728
caaguaucuguuugcagaa

SEQ ID NO: 1768546 - RNA, 19 nt, Artificial Sequence
  Description of Artificial Sequence: Synthetic oligonucleotide
  Antisense strand to SEQ ID NO: 1768545
uucugcaaacagauacuug

SEQ ID NO: 1768547 - RNA, 19 nt, Artificial Sequence
  Description of Artificial Sequence: Synthetic oligonucleotide
  Sense strand starting at position 272 of SEQ ID NO: 1562728
aaguaucuguuugcagaaa

SEQ ID NO: 1768548 - RNA, 19 nt, Artificial Sequence
  Description of Artificial Sequence: Synthetic oligonucleotide
  Antisense strand to SEQ ID NO: 1768547
uuucugcaaacagauacuu

SEQ ID NO: 1768549 - RNA, 19 nt, Artificial Sequence
  Description of Artificial Sequence: Synthetic oligonucleotide
  Sense strand starting at position 378 of SEQ ID NO: 1562728
ccaggauucuaccucugaa

SEQ ID NO: 1768550 - RNA, 19 nt, Artificial Sequence
  Description of Artificial Sequence: Synthetic oligonucleotide
  Antisense strand to SEQ ID NO: 1768549
uucagagguagaauccugg

SEQ ID NO: 1768551 - RNA, 19 nt, Artificial Sequence
  Description of Artificial Sequence: Synthetic oligonucleotide
  Sense strand starting at position 381 of SEQ ID NO: 1562728
ggauucuaccucugaaauu

SEQ ID NO: 1768552 - RNA, 19 nt, Artificial Sequence
  Description of Artificial Sequence: Synthetic oligonucleotide
  Antisense strand to SEQ ID NO: 1768551
aauuucagagguagaaucc

SEQ ID NO: 1768553 - RNA, 19 nt, Artificial Sequence
  Description of Artificial Sequence: Synthetic oligonucleotide
  Sense strand starting at position 401 of SEQ ID NO: 1562728
gggcguuaagaggaguauu

SEQ ID NO: 1768554 - RNA, 19 nt, Artificial Sequence
  Description of Artificial Sequence: Synthetic oligonucleotide
  Antisense strand to SEQ ID NO: 1768553
aauacuccucuuaacgccc

SEQ ID NO: 1768555 - RNA, 19 nt, Artificial Sequence
  Description of Artificial Sequence: Synthetic oligonucleotide
  Sense strand starting at position 446 of SEQ ID NO: 1562728
acuccagccuucuuagaag

SEQ ID NO: 1768556 - RNA, 19 nt, Artificial Sequence
  Description of Artificial Sequence: Synthetic oligonucleotide
  Antisense strand to SEQ ID NO: 1768555
cuucuaagaaggcuggagu

SEQ ID NO: 1768557 - RNA, 19 nt, Artificial Sequence
  Description of Artificial Sequence: Synthetic oligonucleotide
  Sense strand starting at position 592 of SEQ ID NO: 1562728
gcuccacuugcucaguaaa

SEQ ID NO: 1768558 - RNA, 19 nt, Artificial Sequence
  Description of Artificial Sequence: Synthetic oligonucleotide
  Antisense strand to SEQ ID NO: 1768557
uuuacugagcaaguggagc

SEQ ID NO: 1768559 - RNA, 19 nt, Artificial Sequence
  Description of Artificial Sequence: Synthetic oligonucleotide
  Sense strand starting at position 594 of SEQ ID NO: 1562728
uccacuugcucaguaaaga

SEQ ID NO: 1768560 - RNA, 19 nt, Artificial Sequence
  Description of Artificial Sequence: Synthetic oligonucleotide
  Antisense strand to SEQ ID NO: 1768559
ucuuuacugagcaagugga

SEQ ID NO: 1768561 - RNA, 19 nt, Artificial Sequence
  Description of Artificial Sequence: Synthetic oligonucleotide
  Sense strand starting at position 595 of SEQ ID NO: 1562728
ccacuugcucaguaaagau

SEQ ID NO: 1768562 - RNA, 19 nt, Artificial Sequence
  Description of Artificial Sequence: Synthetic oligonucleotide
  Antisense strand to SEQ ID NO: 1768561
aucuuuacugagcaagugg

SEQ ID NO: 1768563 - RNA, 19 nt, Artificial Sequence
  Description of Artificial Sequence: Synthetic oligonucleotide
  Sense strand starting at position 714 of SEQ ID NO: 1562728
cuuaaauucuguccaggua

SEQ ID NO: 1768564 - RNA, 19 nt, Artificial Sequence
  Description of Artificial Sequence: Synthetic oligonucleotide
  Antisense strand to SEQ ID NO: 1768563
uaccuggacagaauuuaag

SEQ ID NO: 1768565 - RNA, 19 nt, Artificial Sequence
  Description of Artificial Sequence: Synthetic oligonucleotide
  Sense strand starting at position 715 of SEQ ID NO: 1562728
uuaaauucuguccagguaa

SEQ ID NO: 1768566 - RNA, 19 nt, Artificial Sequence
  Description of Artificial Sequence: Synthetic oligonucleotide
  Antisense strand to SEQ ID NO: 1768565
uuaccuggacagaauuuaa

SEQ ID NO: 1768567 - RNA, 19 nt, Artificial Sequence
  Description of Artificial Sequence: Synthetic oligonucleotide
  Sense strand starting at position 917 of SEQ ID NO: 1562728
uaacgaugccaguauguaa

SEQ ID NO: 1768568 - RNA, 19 nt, Artificial Sequence
  Description of Artificial Sequence: Synthetic oligonucleotide
  Antisense strand to SEQ ID NO: 1768567
uuacauacuggcaucguua

SEQ ID NO: 1768569 - RNA, 19 nt, Artificial Sequence
  Description of Artificial Sequence: Synthetic oligonucleotide
  Sense strand starting at position 973 of SEQ ID NO: 1562728
ugucacuuacuauaauguu

SEQ ID NO: 1768570 - RNA, 19 nt, Artificial Sequence
  Description of Artificial Sequence: Synthetic oligonucleotide
  Antisense strand to SEQ ID NO: 1768569
aacauuauaguaagugaca

SEQ ID NO: 1768571 - RNA, 19 nt, Artificial Sequence
  Description of Artificial Sequence: Synthetic oligonucleotide
  Sense strand starting at position 998 of SEQ ID NO: 1562728
gaguuaugucaguaucuua

SEQ ID NO: 1768572 - RNA, 19 nt, Artificial Sequence
  Description of Artificial Sequence: Synthetic oligonucleotide
  Antisense strand to SEQ ID NO: 1768571
uaagauacugacauaacuc

SEQ ID NO: 1768573 - RNA, 19 nt, Artificial Sequence
  Description of Artificial Sequence: Synthetic oligonucleotide
  Sense strand starting at position 1093 of SEQ ID NO: 1562728
gggcgagaaguucagaaua

SEQ ID NO: 1768574 - RNA, 19 nt, Artificial Sequence
  Description of Artificial Sequence: Synthetic oligonucleotide
  Antisense strand to SEQ ID NO: 1768573
uauucugaacuucucgccc

SEQ ID NO: 1768575 - RNA, 19 nt, Artificial Sequence
  Description of Artificial Sequence: Synthetic oligonucleotide
  Sense strand starting at position 1756 of SEQ ID NO: 1562728
cuugaaaucuaaccaguug

SEQ ID NO: 1768576 - RNA, 19 nt, Artificial Sequence
  Description of Artificial Sequence: Synthetic oligonucleotide
  Antisense strand to SEQ ID NO: 1768575
caacugguuagauuucaag

SEQ ID NO: 1768577 - RNA, 19 nt, Artificial Sequence
  Description of Artificial Sequence: Synthetic oligonucleotide
  Sense strand starting at position 2783 of SEQ ID NO: 1562728
uuagguuaauccuuagguu

SEQ ID NO: 1768578 - RNA, 19 nt, Artificial Sequence
  Description of Artificial Sequence: Synthetic oligonucleotide
  Antisense strand to SEQ ID NO: 1768577
aaccuaaggauuaaccuaa

SEQ ID NO: 1768579 - RNA, 19 nt, Artificial Sequence
  Description of Artificial Sequence: Synthetic oligonucleotide
  Sense strand starting at position 2784 of SEQ ID NO: 1562728
uagguuaauccuuagguug

SEQ ID NO: 1768580 - RNA, 19 nt, Artificial Sequence
  Description of Artificial Sequence: Synthetic oligonucleotide
  Antisense strand to SEQ ID NO: 1768579
caaccuaaggauuaaccua

SEQ ID NO: 1768581 - RNA, 19 nt, Artificial Sequence
  Description of Artificial Sequence: Synthetic oligonucleotide
  Sense strand starting at position 3119 of SEQ ID NO: 1562728
aucuauguccgacaguuua

SEQ ID NO: 1768582 - RNA, 19 nt, Artificial Sequence
  Description of Artificial Sequence: Synthetic oligonucleotide
  Antisense strand to SEQ ID NO: 1768581
uaaacugucggacauagau

SEQ ID NO: 1768583 - RNA, 19 nt, Artificial Sequence
  Description of Artificial Sequence: Synthetic oligonucleotide
  Sense strand starting at position 3172 of SEQ ID NO: 1562728
aguuuaacgcaauaaacau

SEQ ID NO: 1768584 - RNA, 19 nt, Artificial Sequence
  Description of Artificial Sequence: Synthetic oligonucleotide
  Antisense strand to SEQ ID NO: 1768583
auguuuauugcguuaaacu

SEQ ID NO: 1768585 - RNA, 19 nt, Artificial Sequence
  Description of Artificial Sequence: Synthetic oligonucleotide
  Sense strand starting at position 3254 of SEQ ID NO: 1562728
ccaggucucccaugagauu

SEQ ID NO: 1768586 - RNA, 19 nt, Artificial Sequence
  Description of Artificial Sequence: Synthetic oligonucleotide
  Antisense strand to SEQ ID NO: 1768585
aaucucaugggagaccugg

SEQ ID NO: 1768587 - RNA, 19 nt, Artificial Sequence
  Description of Artificial Sequence: Synthetic oligonucleotide
  Sense strand starting at position 3293 of SEQ ID NO: 1562728
gcaguuauugacuagggcu

SEQ ID NO: 1768588 - RNA, 19 nt, Artificial Sequence
  Description of Artificial Sequence: Synthetic oligonucleotide
  Antisense strand to SEQ ID NO: 1768587
agcccuagucaauaacugc

SEQ ID NO: 1768589 - RNA, 19 nt, Artificial Sequence
  Description of Artificial Sequence: Synthetic oligonucleotide
  Sense strand starting at position 3340 of SEQ ID NO: 1562728
caugacuguuggccagaga

SEQ ID NO: 1768590 - RNA, 19 nt, Artificial Sequence
  Description of Artificial Sequence: Synthetic oligonucleotide
  Antisense strand to SEQ ID NO: 1768589
ucucuggccaacagucaug

SEQ ID NO: 1768591 - RNA, 19 nt, Artificial Sequence
  Description of Artificial Sequence: Synthetic oligonucleotide
  Sense strand starting at position 3653 of SEQ ID NO: 1562728
ucaaguuucguccuugugu

SEQ ID NO: 1768592 - RNA, 19 nt, Artificial Sequence
  Description of Artificial Sequence: Synthetic oligonucleotide
  Antisense strand to SEQ ID NO: 1768591
acacaaggacgaaacuuga

SEQ ID NO: 1768593 - RNA, 19 nt, Artificial Sequence
  Description of Artificial Sequence: Synthetic oligonucleotide
  Sense strand starting at position 3656 of SEQ ID NO: 1562728
aguuucguccuugugugau

SEQ ID NO: 1768594 - RNA, 19 nt, Artificial Sequence
  Description of Artificial Sequence: Synthetic oligonucleotide
  Antisense strand to SEQ ID NO: 1768593
aucacacaaggacgaaacu

SEQ ID NO: 1768595 - RNA, 19 nt, Artificial Sequence
  Description of Artificial Sequence: Synthetic oligonucleotide
  Sense strand starting at position 3666 of SEQ ID NO: 1562728
uugugugauaaccauaguc

SEQ ID NO: 1768596 - RNA, 19 nt, Artificial Sequence
  Description of Artificial Sequence: Synthetic oligonucleotide
  Antisense strand to SEQ ID NO: 1768595
gacuaugguuaucacacaa

SEQ ID NO: 1768597 - RNA, 19 nt, Artificial Sequence
  Description of Artificial Sequence: Synthetic oligonucleotide
  Sense strand starting at position 3668 of SEQ ID NO: 1562728
gugugauaaccauagucca

SEQ ID NO: 1768598 - RNA, 19 nt, Artificial Sequence
  Description of Artificial Sequence: Synthetic oligonucleotide
  Antisense strand to SEQ ID NO: 1768597
uggacuaugguuaucacac

SEQ ID NO: 1768599 - RNA, 19 nt, Artificial Sequence
  Description of Artificial Sequence: Synthetic oligonucleotide
  Sense strand starting at position 3681 of SEQ ID NO: 1562728
aguccaaauccuuagaguc

SEQ ID NO: 1768600 - RNA, 19 nt, Artificial Sequence
  Description of Artificial Sequence: Synthetic oligonucleotide
  Antisense strand to SEQ ID NO: 1768599
gacucuaaggauuuggacu

SEQ ID NO: 1768601 - RNA, 19 nt, Artificial Sequence
  Description of Artificial Sequence: Synthetic oligonucleotide
  Sense strand starting at position 3848 of SEQ ID NO: 1562728
aaguuuacaguugagugaa

SEQ ID NO: 1768602 - RNA, 19 nt, Artificial Sequence
  Description of Artificial Sequence: Synthetic oligonucleotide
  Antisense strand to SEQ ID NO: 1768601
uucacucaacuguaaacuu

SEQ ID NO: 1768603 - RNA, 19 nt, Artificial Sequence
  Description of Artificial Sequence: Synthetic oligonucleotide
  Sense strand starting at position 3851 of SEQ ID NO: 1562728
uuuacaguugagugaauca

SEQ ID NO: 1768604 - RNA, 19 nt, Artificial Sequence
  Description of Artificial Sequence: Synthetic oligonucleotide
  Antisense strand to SEQ ID NO: 1768603
ugauucacucaacuguaaa

SEQ ID NO: 1768605 - RNA, 19 nt, Artificial Sequence
  Description of Artificial Sequence: Synthetic oligonucleotide
  Sense strand starting at position 3858 of SEQ ID NO: 1562728
uugagugaaucagcucuuu

SEQ ID NO: 1768606 - RNA, 19 nt, Artificial Sequence
  Description of Artificial Sequence: Synthetic oligonucleotide
  Antisense strand to SEQ ID NO: 1768605
aaagagcugauucacucaa

SEQ ID NO: 1768607 - RNA, 19 nt, Artificial Sequence
  Description of Artificial Sequence: Synthetic oligonucleotide
  Sense strand starting at position 75 of SEQ ID NO: 1562729
gcuccacuugcucaguaaa

SEQ ID NO: 1768608 - RNA, 19 nt, Artificial Sequence
  Description of Artificial Sequence: Synthetic oligonucleotide
  Antisense strand to SEQ ID NO: 1768607
uuuacugagcaaguggagc

SEQ ID NO: 1768609 - RNA, 19 nt, Artificial Sequence
  Description of Artificial Sequence: Synthetic oligonucleotide
  Sense strand starting at position 77 of SEQ ID NO: 1562729
uccacuugcucaguaaaga

SEQ ID NO: 1768610 - RNA, 19 nt, Artificial Sequence
  Description of Artificial Sequence: Synthetic oligonucleotide
  Antisense strand to SEQ ID NO: 1768609
ucuuuacugagcaagugga

SEQ ID NO: 1768611 - RNA, 19 nt, Artificial Sequence
  Description of Artificial Sequence: Synthetic oligonucleotide
  Sense strand starting at position 78 of SEQ ID NO: 1562729
ccacuugcucaguaaagau

SEQ ID NO: 1768612 - RNA, 19 nt, Artificial Sequence
  Description of Artificial Sequence: Synthetic oligonucleotide
  Antisense strand to SEQ ID NO: 1768611
aucuuuacugagcaagugg

SEQ ID NO: 1768613 - RNA, 19 nt, Artificial Sequence
  Description of Artificial Sequence: Synthetic oligonucleotide
  Sense strand starting at position 197 of SEQ ID NO: 1562729
cuuaaauucuguccaggua

SEQ ID NO: 1768614 - RNA, 19 nt, Artificial Sequence
  Description of Artificial Sequence: Synthetic oligonucleotide
  Antisense strand to SEQ ID NO: 1768613
uaccuggacagaauuuaag

SEQ ID NO: 1768615 - RNA, 19 nt, Artificial Sequence
  Description of Artificial Sequence: Synthetic oligonucleotide
  Sense strand starting at position 198 of SEQ ID NO: 1562729
uuaaauucuguccagguaa

SEQ ID NO: 1768616 - RNA, 19 nt, Artificial Sequence
  Description of Artificial Sequence: Synthetic oligonucleotide
  Antisense strand to SEQ ID NO: 1768615
uuaccuggacagaauuuaa

SEQ ID NO: 1768617 - RNA, 19 nt, Artificial Sequence
  Description of Artificial Sequence: Synthetic oligonucleotide
  Sense strand starting at position 400 of SEQ ID NO: 1562729
uaacgaugccaguauguaa

SEQ ID NO: 1768618 - RNA, 19 nt, Artificial Sequence
  Description of Artificial Sequence: Synthetic oligonucleotide
  Antisense strand to SEQ ID NO: 1768617
uuacauacuggcaucguua

SEQ ID NO: 1768619 - RNA, 19 nt, Artificial Sequence
  Description of Artificial Sequence: Synthetic oligonucleotide
  Sense strand starting at position 449 of SEQ ID NO: 1562729
guaggcaugucacuuacua

SEQ ID NO: 1768620 - RNA, 19 nt, Artificial Sequence
  Description of Artificial Sequence: Synthetic oligonucleotide
  Antisense strand to SEQ ID NO: 1768619
uaguaagugacaugccuac

SEQ ID NO: 1768621 - RNA, 19 nt, Artificial Sequence
  Description of Artificial Sequence: Synthetic oligonucleotide
  Sense strand starting at position 456 of SEQ ID NO: 1562729
ugucacuuacuauaauguu

SEQ ID NO: 1768622 - RNA, 19 nt, Artificial Sequence
  Description of Artificial Sequence: Synthetic oligonucleotide
  Antisense strand to SEQ ID NO: 1768621
aacauuauaguaagugaca

SEQ ID NO: 1768623 - RNA, 19 nt, Artificial Sequence
  Description of Artificial Sequence: Synthetic oligonucleotide
  Sense strand starting at position 480 of SEQ ID NO: 1562729
ggaguuaugucaguaucuu

SEQ ID NO: 1768624 - RNA, 19 nt, Artificial Sequence
  Description of Artificial Sequence: Synthetic oligonucleotide
  Antisense strand to SEQ ID NO: 1768623
aagauacugacauaacucc

SEQ ID NO: 1768625 - RNA, 19 nt, Artificial Sequence
  Description of Artificial Sequence: Synthetic oligonucleotide
  Sense strand starting at position 481 of SEQ ID NO: 1562729
gaguuaugucaguaucuua

SEQ ID NO: 1768626 - RNA, 19 nt, Artificial Sequence
  Description of Artificial Sequence: Synthetic oligonucleotide
  Antisense strand to SEQ ID NO: 1768625
uaagauacugacauaacuc

SEQ ID NO: 1768627 - RNA, 19 nt, Artificial Sequence
  Description of Artificial Sequence: Synthetic oligonucleotide
  Sense strand starting at position 486 of SEQ ID NO: 1562729
augucaguaucuuauuuag

SEQ ID NO: 1768628 - RNA, 19 nt, Artificial Sequence
  Description of Artificial Sequence: Synthetic oligonucleotide
  Antisense strand to SEQ ID NO: 1768627
cuaaauaagauacugacau

SEQ ID NO: 1768629 - RNA, 19 nt, Artificial Sequence
  Description of Artificial Sequence: Synthetic oligonucleotide
  Sense strand starting at position 576 of SEQ ID NO: 1562729
gggcgagaaguucagaaua

SEQ ID NO: 1768630 - RNA, 19 nt, Artificial Sequence
  Description of Artificial Sequence: Synthetic oligonucleotide
  Antisense strand to SEQ ID NO: 1768629
uauucugaacuucucgccc

SEQ ID NO: 1768631 - RNA, 19 nt, Artificial Sequence
  Description of Artificial Sequence: Synthetic oligonucleotide
  Sense strand starting at position 954 of SEQ ID NO: 1562729
augaaauggucugaaacac

SEQ ID NO: 1768632 - RNA, 19 nt, Artificial Sequence
  Description of Artificial Sequence: Synthetic oligonucleotide
  Antisense strand to SEQ ID NO: 1768631
guguuucagaccauuucau

SEQ ID NO: 1768633 - RNA, 19 nt, Artificial Sequence
  Description of Artificial Sequence: Synthetic oligonucleotide
  Sense strand starting at position 1239 of SEQ ID NO: 1562729
cuugaaaucuaaccaguug

SEQ ID NO: 1768634 - RNA, 19 nt, Artificial Sequence
  Description of Artificial Sequence: Synthetic oligonucleotide
  Antisense strand to SEQ ID NO: 1768633
caacugguuagauuucaag

SEQ ID NO: 1768635 - RNA, 19 nt, Artificial Sequence
  Description of Artificial Sequence: Synthetic oligonucleotide
  Sense strand starting at position 2245 of SEQ ID NO: 1562729
cggcaucugcucugagaag

SEQ ID NO: 1768636 - RNA, 19 nt, Artificial Sequence
  Description of Artificial Sequence: Synthetic oligonucleotide
  Antisense strand to SEQ ID NO: 1768635
cuucucagagcagaugccg

SEQ ID NO: 1768637 - RNA, 19 nt, Artificial Sequence
  Description of Artificial Sequence: Synthetic oligonucleotide
  Sense strand starting at position 2266 of SEQ ID NO: 1562729
uuagguuaauccuuagguu

SEQ ID NO: 1768638 - RNA, 19 nt, Artificial Sequence
  Description of Artificial Sequence: Synthetic oligonucleotide
  Antisense strand to SEQ ID NO: 1768637
aaccuaaggauuaaccuaa

SEQ ID NO: 1768639 - RNA, 19 nt, Artificial Sequence
  Description of Artificial Sequence: Synthetic oligonucleotide
  Sense strand starting at position 2267 of SEQ ID NO: 1562729
uagguuaauccuuagguug

SEQ ID NO: 1768640 - RNA, 19 nt, Artificial Sequence
  Description of Artificial Sequence: Synthetic oligonucleotide
  Antisense strand to SEQ ID NO: 1768639
caaccuaaggauuaaccua

SEQ ID NO: 1768641 - RNA, 19 nt, Artificial Sequence
  Description of Artificial Sequence: Synthetic oligonucleotide
  Sense strand starting at position 2596 of SEQ ID NO: 1562729
ccaguaaucuauguccgac

SEQ ID NO: 1768642 - RNA, 19 nt, Artificial Sequence
  Description of Artificial Sequence: Synthetic oligonucleotide
  Antisense strand to SEQ ID NO: 1768641
gucggacauagauuacugg

SEQ ID NO: 1768643 - RNA, 19 nt, Artificial Sequence
  Description of Artificial Sequence: Synthetic oligonucleotide
  Sense strand starting at position 2599 of SEQ ID NO: 1562729
guaaucuauguccgacagu

SEQ ID NO: 1768644 - RNA, 19 nt, Artificial Sequence
  Description of Artificial Sequence: Synthetic oligonucleotide
  Antisense strand to SEQ ID NO: 1768643
acugucggacauagauuac

SEQ ID NO: 1768645 - RNA, 19 nt, Artificial Sequence
  Description of Artificial Sequence: Synthetic oligonucleotide
  Sense strand starting at position 2602 of SEQ ID NO: 1562729
aucuauguccgacaguuua

SEQ ID NO: 1768646 - RNA, 19 nt, Artificial Sequence
  Description of Artificial Sequence: Synthetic oligonucleotide
  Antisense strand to SEQ ID NO: 1768645
uaaacugucggacauagau

SEQ ID NO: 1768647 - RNA, 19 nt, Artificial Sequence
  Description of Artificial Sequence: Synthetic oligonucleotide
  Sense strand starting at position 2618 of SEQ ID NO: 1562729
uuauuagaacucuguggcu

SEQ ID NO: 1768648 - RNA, 19 nt, Artificial Sequence
  Description of Artificial Sequence: Synthetic oligonucleotide
  Antisense strand to SEQ ID NO: 1768647
agccacagaguucuaauaa

SEQ ID NO: 1768649 - RNA, 19 nt, Artificial Sequence
  Description of Artificial Sequence: Synthetic oligonucleotide
  Sense strand starting at position 2623 of SEQ ID NO: 1562729
agaacucuguggcugcaua

SEQ ID NO: 1768650 - RNA, 19 nt, Artificial Sequence
  Description of Artificial Sequence: Synthetic oligonucleotide
  Antisense strand to SEQ ID NO: 1768649
uaugcagccacagaguucu

SEQ ID NO: 1768651 - RNA, 19 nt, Artificial Sequence
  Description of Artificial Sequence: Synthetic oligonucleotide
  Sense strand starting at position 2624 of SEQ ID NO: 1562729
gaacucuguggcugcauaa

SEQ ID NO: 1768652 - RNA, 19 nt, Artificial Sequence
  Description of Artificial Sequence: Synthetic oligonucleotide
  Antisense strand to SEQ ID NO: 1768651
uuaugcagccacagaguuc

SEQ ID NO: 1768653 - RNA, 19 nt, Artificial Sequence
  Description of Artificial Sequence: Synthetic oligonucleotide
  Sense strand starting at position 2655 of SEQ ID NO: 1562729
aguuuaacgcaauaaacau

SEQ ID NO: 1768654 - RNA, 19 nt, Artificial Sequence
  Description of Artificial Sequence: Synthetic oligonucleotide
  Antisense strand to SEQ ID NO: 1768653
auguuuauugcguuaaacu

SEQ ID NO: 1768655 - RNA, 19 nt, Artificial Sequence
  Description of Artificial Sequence: Synthetic oligonucleotide
  Sense strand starting at position 2673 of SEQ ID NO: 1562729
uuuguugucccacagguuu

SEQ ID NO: 1768656 - RNA, 19 nt, Artificial Sequence
  Description of Artificial Sequence: Synthetic oligonucleotide
  Antisense strand to SEQ ID NO: 1768655
aaaccugugggacaacaaa

SEQ ID NO: 1768657 - RNA, 19 nt, Artificial Sequence
  Description of Artificial Sequence: Synthetic oligonucleotide
  Sense strand starting at position 2737 of SEQ ID NO: 1562729
ccaggucucccaugagauu

SEQ ID NO: 1768658 - RNA, 19 nt, Artificial Sequence
  Description of Artificial Sequence: Synthetic oligonucleotide
  Antisense strand to SEQ ID NO: 1768657
aaucucaugggagaccugg

SEQ ID NO: 1768659 - RNA, 19 nt, Artificial Sequence
  Description of Artificial Sequence: Synthetic oligonucleotide
  Sense strand starting at position 2776 of SEQ ID NO: 1562729
gcaguuauugacuagggcu

SEQ ID NO: 1768660 - RNA, 19 nt, Artificial Sequence
  Description of Artificial Sequence: Synthetic oligonucleotide
  Antisense strand to SEQ ID NO: 1768659
agcccuagucaauaacugc

SEQ ID NO: 1768661 - RNA, 19 nt, Artificial Sequence
  Description of Artificial Sequence: Synthetic oligonucleotide
  Sense strand starting at position 2823 of SEQ ID NO: 1562729
caugacuguuggccagaga

SEQ ID NO: 1768662 - RNA, 19 nt, Artificial Sequence
  Description of Artificial Sequence: Synthetic oligonucleotide
  Antisense strand to SEQ ID NO: 1768661
ucucuggccaacagucaug

SEQ ID NO: 1768663 - RNA, 19 nt, Artificial Sequence
  Description of Artificial Sequence: Synthetic oligonucleotide
  Sense strand starting at position 3136 of SEQ ID NO: 1562729
ucaaguuucguccuugugu

SEQ ID NO: 1768664 - RNA, 19 nt, Artificial Sequence
  Description of Artificial Sequence: Synthetic oligonucleotide
  Antisense strand to SEQ ID NO: 1768663
acacaaggacgaaacuuga

SEQ ID NO: 1768665 - RNA, 19 nt, Artificial Sequence
  Description of Artificial Sequence: Synthetic oligonucleotide
  Sense strand starting at position 3139 of SEQ ID NO: 1562729
aguuucguccuugugugau

SEQ ID NO: 1768666 - RNA, 19 nt, Artificial Sequence
  Description of Artificial Sequence: Synthetic oligonucleotide
  Antisense strand to SEQ ID NO: 1768665
aucacacaaggacgaaacu

SEQ ID NO: 1768667 - RNA, 19 nt, Artificial Sequence
  Description of Artificial Sequence: Synthetic oligonucleotide
  Sense strand starting at position 3149 of SEQ ID NO: 1562729
uugugugauaaccauaguc

SEQ ID NO: 1768668 - RNA, 19 nt, Artificial Sequence
  Description of Artificial Sequence: Synthetic oligonucleotide
  Antisense strand to SEQ ID NO: 1768667
gacuaugguuaucacacaa

SEQ ID NO: 1768669 - RNA, 19 nt, Artificial Sequence
  Description of Artificial Sequence: Synthetic oligonucleotide
  Sense strand starting at position 3151 of SEQ ID NO: 1562729
gugugauaaccauagucca

SEQ ID NO: 1768670 - RNA, 19 nt, Artificial Sequence
  Description of Artificial Sequence: Synthetic oligonucleotide
  Antisense strand to SEQ ID NO: 1768669
uggacuaugguuaucacac

SEQ ID NO: 1768671 - RNA, 19 nt, Artificial Sequence
  Description of Artificial Sequence: Synthetic oligonucleotide
  Sense strand starting at position 3164 of SEQ ID NO: 1562729
aguccaaauccuuagaguc

SEQ ID NO: 1768672 - RNA, 19 nt, Artificial Sequence
  Description of Artificial Sequence: Synthetic oligonucleotide
  Antisense strand to SEQ ID NO: 1768671
gacucuaaggauuuggacu

SEQ ID NO: 1768673 - RNA, 19 nt, Artificial Sequence
  Description of Artificial Sequence: Synthetic oligonucleotide
  Sense strand starting at position 3227 of SEQ ID NO: 1562729
gcccuugauucugcaaaua

SEQ ID NO: 1768674 - RNA, 19 nt, Artificial Sequence
  Description of Artificial Sequence: Synthetic oligonucleotide
  Antisense strand to SEQ ID NO: 1768673
uauuugcagaaucaagggc

SEQ ID NO: 1768675 - RNA, 19 nt, Artificial Sequence
  Description of Artificial Sequence: Synthetic oligonucleotide
  Sense strand starting at position 3250 of SEQ ID NO: 1562729
uguauugauugccuacuuu

SEQ ID NO: 1768676 - RNA, 19 nt, Artificial Sequence
  Description of Artificial Sequence: Synthetic oligonucleotide
  Antisense strand to SEQ ID NO: 1768675
aaaguaggcaaucaauaca

SEQ ID NO: 1768677 - RNA, 19 nt, Artificial Sequence
  Description of Artificial Sequence: Synthetic oligonucleotide
  Sense strand starting at position 3256 of SEQ ID NO: 1562729
gauugccuacuuugugaca

SEQ ID NO: 1768678 - RNA, 19 nt, Artificial Sequence
  Description of Artificial Sequence: Synthetic oligonucleotide
  Antisense strand to SEQ ID NO: 1768677
ugucacaaaguaggcaauc

SEQ ID NO: 1768679 - RNA, 19 nt, Artificial Sequence
  Description of Artificial Sequence: Synthetic oligonucleotide
  Sense strand starting at position 3331 of SEQ ID NO: 1562729
aaguuuacaguugagugaa

SEQ ID NO: 1768680 - RNA, 19 nt, Artificial Sequence
  Description of Artificial Sequence: Synthetic oligonucleotide
  Antisense strand to SEQ ID NO: 1768679
uucacucaacuguaaacuu

SEQ ID NO: 1768681 - RNA, 19 nt, Artificial Sequence
  Description of Artificial Sequence: Synthetic oligonucleotide
  Sense strand starting at position 3334 of SEQ ID NO: 1562729
uuuacaguugagugaauca

SEQ ID NO: 1768682 - RNA, 19 nt, Artificial Sequence
  Description of Artificial Sequence: Synthetic oligonucleotide
  Antisense strand to SEQ ID NO: 1768681
ugauucacucaacuguaaa

SEQ ID NO: 1768683 - RNA, 19 nt, Artificial Sequence
  Description of Artificial Sequence: Synthetic oligonucleotide
  Sense strand starting at position 3341 of SEQ ID NO: 1562729
uugagugaaucagcucuuu

SEQ ID NO: 1768684 - RNA, 19 nt, Artificial Sequence
  Description of Artificial Sequence: Synthetic oligonucleotide
  Antisense strand to SEQ ID NO: 1768683
aaagagcugauucacucaa

SEQ ID NO: 1768685 - RNA, 19 nt, Artificial Sequence
  Description of Artificial Sequence: Synthetic oligonucleotide
  Sense strand starting at position 3580 of SEQ ID NO: 1562729
accugauguguccacuuua

SEQ ID NO: 1768686 - RNA, 19 nt, Artificial Sequence
  Description of Artificial Sequence: Synthetic oligonucleotide
  Antisense strand to SEQ ID NO: 1768685
uaaaguggacacaucaggu

SEQ ID NO: 1768687 - RNA, 19 nt, Artificial Sequence
  Description of Artificial Sequence: Synthetic oligonucleotide
  Sense strand starting at position 42 of SEQ ID NO: 1562730
cuuucugaguccucugaca

SEQ ID NO: 1768688 - RNA, 19 nt, Artificial Sequence
  Description of Artificial Sequence: Synthetic oligonucleotide
  Antisense strand to SEQ ID NO: 1768687
ugucagaggacucagaaag

SEQ ID NO: 1768689 - RNA, 19 nt, Artificial Sequence
  Description of Artificial Sequence: Synthetic oligonucleotide
  Sense strand starting at position 44 of SEQ ID NO: 1562730
uucugaguccucugacaga

SEQ ID NO: 1768690 - RNA, 19 nt, Artificial Sequence
  Description of Artificial Sequence: Synthetic oligonucleotide
  Antisense strand to SEQ ID NO: 1768689
ucugucagaggacucagaa

SEQ ID NO: 1768691 - RNA, 19 nt, Artificial Sequence
  Description of Artificial Sequence: Synthetic oligonucleotide
  Sense strand starting at position 68 of SEQ ID NO: 1562730
cuauccacugagcaguaau

SEQ ID NO: 1768692 - RNA, 19 nt, Artificial Sequence
  Description of Artificial Sequence: Synthetic oligonucleotide
  Antisense strand to SEQ ID NO: 1768691
auuacugcucaguggauag

SEQ ID NO: 1768693 - RNA, 19 nt, Artificial Sequence
  Description of Artificial Sequence: Synthetic oligonucleotide
  Sense strand starting at position 79 of SEQ ID NO: 1562730
gcaguaauucuguaccagg

SEQ ID NO: 1768694 - RNA, 19 nt, Artificial Sequence
  Description of Artificial Sequence: Synthetic oligonucleotide
  Antisense strand to SEQ ID NO: 1768693
ccugguacagaauuacugc

SEQ ID NO: 1768695 - RNA, 19 nt, Artificial Sequence
  Description of Artificial Sequence: Synthetic oligonucleotide
  Sense strand starting at position 339 of SEQ ID NO: 1562730
gcagaagaaugcuuugauc

SEQ ID NO: 1768696 - RNA, 19 nt, Artificial Sequence
  Description of Artificial Sequence: Synthetic oligonucleotide
  Antisense strand to SEQ ID NO: 1768695
gaucaaagcauucuucugc

SEQ ID NO: 1768697 - RNA, 19 nt, Artificial Sequence
  Description of Artificial Sequence: Synthetic oligonucleotide
  Sense strand starting at position 341 of SEQ ID NO: 1562730
agaagaaugcuuugaucac

SEQ ID NO: 1768698 - RNA, 19 nt, Artificial Sequence
  Description of Artificial Sequence: Synthetic oligonucleotide
  Antisense strand to SEQ ID NO: 1768697
gugaucaaagcauucuucu

SEQ ID NO: 1768699 - RNA, 19 nt, Artificial Sequence
  Description of Artificial Sequence: Synthetic oligonucleotide
  Sense strand starting at position 486 of SEQ ID NO: 1562730
cgugaaaucucaucuccac

SEQ ID NO: 1768700 - RNA, 19 nt, Artificial Sequence
  Description of Artificial Sequence: Synthetic oligonucleotide
  Antisense strand to SEQ ID NO: 1768699
guggagaugagauuucacg

SEQ ID NO: 1768701 - RNA, 19 nt, Artificial Sequence
  Description of Artificial Sequence: Synthetic oligonucleotide
  Sense strand starting at position 829 of SEQ ID NO: 1562730
ggaugaaguaguggccauu

SEQ ID NO: 1768702 - RNA, 19 nt, Artificial Sequence
  Description of Artificial Sequence: Synthetic oligonucleotide
  Antisense strand to SEQ ID NO: 1768701
aauggccacuacuucaucc

SEQ ID NO: 1768703 - RNA, 19 nt, Artificial Sequence
  Description of Artificial Sequence: Synthetic oligonucleotide
  Sense strand starting at position 1403 of SEQ ID NO: 1562730
cgggaacucucacugcaau

SEQ ID NO: 1768704 - RNA, 19 nt, Artificial Sequence
  Description of Artificial Sequence: Synthetic oligonucleotide
  Antisense strand to SEQ ID NO: 1768703
auugcagugagaguucccg

SEQ ID NO: 1768705 - RNA, 19 nt, Artificial Sequence
  Description of Artificial Sequence: Synthetic oligonucleotide
  Sense strand starting at position 1404 of SEQ ID NO: 1562730
gggaacucucacugcaauc

SEQ ID NO: 1768706 - RNA, 19 nt, Artificial Sequence
  Description of Artificial Sequence: Synthetic oligonucleotide
  Antisense strand to SEQ ID NO: 1768705
gauugcagugagaguuccc

SEQ ID NO: 1768707 - RNA, 19 nt, Artificial Sequence
  Description of Artificial Sequence: Synthetic oligonucleotide
  Sense strand starting at position 2152 of SEQ ID NO: 1562730
ggguggaaggucuggagau

SEQ ID NO: 1768708 - RNA, 19 nt, Artificial Sequence
  Description of Artificial Sequence: Synthetic oligonucleotide
  Antisense strand to SEQ ID NO: 1768707
aucuccagaccuuccaccc

SEQ ID NO: 1768709 - RNA, 19 nt, Artificial Sequence
  Description of Artificial Sequence: Synthetic oligonucleotide
  Sense strand starting at position 2372 of SEQ ID NO: 1562730
gcuacagugacucagugua

SEQ ID NO: 1768710 - RNA, 19 nt, Artificial Sequence
  Description of Artificial Sequence: Synthetic oligonucleotide
  Antisense strand to SEQ ID NO: 1768709
uacacugagucacuguagc

SEQ ID NO: 1768711 - RNA, 19 nt, Artificial Sequence
  Description of Artificial Sequence: Synthetic oligonucleotide
  Sense strand starting at position 2450 of SEQ ID NO: 1562730
aaggcauuguuuccgacau

SEQ ID NO: 1768712 - RNA, 19 nt, Artificial Sequence
  Description of Artificial Sequence: Synthetic oligonucleotide
  Antisense strand to SEQ ID NO: 1768711
augucggaaacaaugccuu

SEQ ID NO: 1768713 - RNA, 19 nt, Artificial Sequence
  Description of Artificial Sequence: Synthetic oligonucleotide
  Sense strand starting at position 2472 of SEQ ID NO: 1562730
guagcugacuggucaaaug

SEQ ID NO: 1768714 - RNA, 19 nt, Artificial Sequence
  Description of Artificial Sequence: Synthetic oligonucleotide
  Antisense strand to SEQ ID NO: 1768713
cauuugaccagucagcuac

SEQ ID NO: 1768715 - RNA, 19 nt, Artificial Sequence
  Description of Artificial Sequence: Synthetic oligonucleotide
  Sense strand starting at position 2527 of SEQ ID NO: 1562730
ggaaguggagccuggaauu

SEQ ID NO: 1768716 - RNA, 19 nt, Artificial Sequence
  Description of Artificial Sequence: Synthetic oligonucleotide
  Antisense strand to SEQ ID NO: 1768715
aauuccaggcuccacuucc

SEQ ID NO: 1768717 - RNA, 19 nt, Artificial Sequence
  Description of Artificial Sequence: Synthetic oligonucleotide
  Sense strand starting at position 2586 of SEQ ID NO: 1562730
acgugaacuggaugaugaa

SEQ ID NO: 1768718 - RNA, 19 nt, Artificial Sequence
  Description of Artificial Sequence: Synthetic oligonucleotide
  Antisense strand to SEQ ID NO: 1768717
uucaucauccaguucacgu

SEQ ID NO: 1768719 - RNA, 19 nt, Artificial Sequence
  Description of Artificial Sequence: Synthetic oligonucleotide
  Sense strand starting at position 2657 of SEQ ID NO: 1562730
gaaauacgaagucagugua

SEQ ID NO: 1768720 - RNA, 19 nt, Artificial Sequence
  Description of Artificial Sequence: Synthetic oligonucleotide
  Antisense strand to SEQ ID NO: 1768719
uacacugacuucguauuuc

SEQ ID NO: 1768721 - RNA, 19 nt, Artificial Sequence
  Description of Artificial Sequence: Synthetic oligonucleotide
  Sense strand starting at position 2660 of SEQ ID NO: 1562730
auacgaagucaguguagga

SEQ ID NO: 1768722 - RNA, 19 nt, Artificial Sequence
  Description of Artificial Sequence: Synthetic oligonucleotide
  Antisense strand to SEQ ID NO: 1768721
uccuacacugacuucguau

SEQ ID NO: 1768723 - RNA, 19 nt, Artificial Sequence
  Description of Artificial Sequence: Synthetic oligonucleotide
  Sense strand starting at position 2749 of SEQ ID NO: 1562730
gcagauuugcauggcugga

SEQ ID NO: 1768724 - RNA, 19 nt, Artificial Sequence
  Description of Artificial Sequence: Synthetic oligonucleotide
  Antisense strand to SEQ ID NO: 1768723
uccagccaugcaaaucugc

SEQ ID NO: 1768725 - RNA, 19 nt, Artificial Sequence
  Description of Artificial Sequence: Synthetic oligonucleotide
  Sense strand starting at position 2762 of SEQ ID NO: 1562730
gcuggagauucuuugaauu

SEQ ID NO: 1768726 - RNA, 19 nt, Artificial Sequence
  Description of Artificial Sequence: Synthetic oligonucleotide
  Antisense strand to SEQ ID NO: 1768725
aauucaaagaaucuccagc

SEQ ID NO: 1768727 - RNA, 19 nt, Artificial Sequence
  Description of Artificial Sequence: Synthetic oligonucleotide
  Sense strand starting at position 3161 of SEQ ID NO: 1562730
ggccgaaugucauuuacuu

SEQ ID NO: 1768728 - RNA, 19 nt, Artificial Sequence
  Description of Artificial Sequence: Synthetic oligonucleotide
  Antisense strand to SEQ ID NO: 1768727
aaguaaaugacauucggcc

SEQ ID NO: 1768729 - RNA, 19 nt, Artificial Sequence
  Description of Artificial Sequence: Synthetic oligonucleotide
  Sense strand starting at position 3209 of SEQ ID NO: 1562730
gcucccucagagcagaaau

SEQ ID NO: 1768730 - RNA, 19 nt, Artificial Sequence
  Description of Artificial Sequence: Synthetic oligonucleotide
  Antisense strand to SEQ ID NO: 1768729
auuucugcucugagggagc

SEQ ID NO: 1768731 - RNA, 19 nt, Artificial Sequence
  Description of Artificial Sequence: Synthetic oligonucleotide
  Sense strand starting at position 3220 of SEQ ID NO: 1562730
gcagaaauuguccaguauc

SEQ ID NO: 1768732 - RNA, 19 nt, Artificial Sequence
  Description of Artificial Sequence: Synthetic oligonucleotide
  Antisense strand to SEQ ID NO: 1768731
gauacuggacaauuucugc

SEQ ID NO: 1768733 - RNA, 19 nt, Artificial Sequence
  Description of Artificial Sequence: Synthetic oligonucleotide
  Sense strand starting at position 3223 of SEQ ID NO: 1562730
gaaauuguccaguaucuga

SEQ ID NO: 1768734 - RNA, 19 nt, Artificial Sequence
  Description of Artificial Sequence: Synthetic oligonucleotide
  Antisense strand to SEQ ID NO: 1768733
ucagauacuggacaauuuc

SEQ ID NO: 1768735 - RNA, 19 nt, Artificial Sequence
  Description of Artificial Sequence: Synthetic oligonucleotide
  Sense strand starting at position 3234 of SEQ ID NO: 1562730
guaucugacauacggaagu

SEQ ID NO: 1768736 - RNA, 19 nt, Artificial Sequence
  Description of Artificial Sequence: Synthetic oligonucleotide
  Antisense strand to SEQ ID NO: 1768735
acuuccguaugucagauac

SEQ ID NO: 1768737 - RNA, 19 nt, Artificial Sequence
  Description of Artificial Sequence: Synthetic oligonucleotide
  Sense strand starting at position 3236 of SEQ ID NO: 1562730
aucugacauacggaaguuu

SEQ ID NO: 1768738 - RNA, 19 nt, Artificial Sequence
  Description of Artificial Sequence: Synthetic oligonucleotide
  Antisense strand to SEQ ID NO: 1768737
aaacuuccguaugucagau

SEQ ID NO: 1768739 - RNA, 19 nt, Artificial Sequence
  Description of Artificial Sequence: Synthetic oligonucleotide
  Sense strand starting at position 3293 of SEQ ID NO: 1562730
ggcagaauacuuugccaaa

SEQ ID NO: 1768740 - RNA, 19 nt, Artificial Sequence
  Description of Artificial Sequence: Synthetic oligonucleotide
  Antisense strand to SEQ ID NO: 1768739
uuuggcaaaguauucugcc

SEQ ID NO: 1768741 - RNA, 19 nt, Artificial Sequence
  Description of Artificial Sequence: Synthetic oligonucleotide
  Sense strand starting at position 3448 of SEQ ID NO: 1562730
agugcuagggauuacaagu

SEQ ID NO: 1768742 - RNA, 19 nt, Artificial Sequence
  Description of Artificial Sequence: Synthetic oligonucleotide
  Antisense strand to SEQ ID NO: 1768741
acuuguaaucccuagcacu

SEQ ID NO: 1768743 - RNA, 19 nt, Artificial Sequence
  Description of Artificial Sequence: Synthetic oligonucleotide
  Sense strand starting at position 3583 of SEQ ID NO: 1562730
agugguugugaagauuaug

SEQ ID NO: 1768744 - RNA, 19 nt, Artificial Sequence
  Description of Artificial Sequence: Synthetic oligonucleotide
  Antisense strand to SEQ ID NO: 1768743
cauaaucuucacaaccacu

SEQ ID NO: 1768745 - RNA, 19 nt, Artificial Sequence
  Description of Artificial Sequence: Synthetic oligonucleotide
  Sense strand starting at position 3631 of SEQ ID NO: 1562730
aauaauugcuggucuuaug

SEQ ID NO: 1768746 - RNA, 19 nt, Artificial Sequence
  Description of Artificial Sequence: Synthetic oligonucleotide
  Antisense strand to SEQ ID NO: 1768745
cauaagaccagcaauuauu

SEQ ID NO: 1768747 - RNA, 19 nt, Artificial Sequence
  Description of Artificial Sequence: Synthetic oligonucleotide
  Sense strand starting at position 3642 of SEQ ID NO: 1562730
gucuuauguggugaauaca

SEQ ID NO: 1768748 - RNA, 19 nt, Artificial Sequence
  Description of Artificial Sequence: Synthetic oligonucleotide
  Antisense strand to SEQ ID NO: 1768747
uguauucaccacauaagac

SEQ ID NO: 1768749 - RNA, 19 nt, Artificial Sequence
  Description of Artificial Sequence: Synthetic oligonucleotide
  Sense strand starting at position 3645 of SEQ ID NO: 1562730
uuauguggugaauacagua

SEQ ID NO: 1768750 - RNA, 19 nt, Artificial Sequence
  Description of Artificial Sequence: Synthetic oligonucleotide
  Antisense strand to SEQ ID NO: 1768749
uacuguauucaccacauaa

SEQ ID NO: 1768751 - RNA, 19 nt, Artificial Sequence
  Description of Artificial Sequence: Synthetic oligonucleotide
  Sense strand starting at position 3655 of SEQ ID NO: 1562730
aauacaguagugggaaauu

SEQ ID NO: 1768752 - RNA, 19 nt, Artificial Sequence
  Description of Artificial Sequence: Synthetic oligonucleotide
  Antisense strand to SEQ ID NO: 1768751
aauuucccacuacuguauu

SEQ ID NO: 1768753 - RNA, 19 nt, Artificial Sequence
  Description of Artificial Sequence: Synthetic oligonucleotide
  Sense strand starting at position 3673 of SEQ ID NO: 1562730
uaaacagaauucgucaagu

SEQ ID NO: 1768754 - RNA, 19 nt, Artificial Sequence
  Description of Artificial Sequence: Synthetic oligonucleotide
  Antisense strand to SEQ ID NO: 1768753
acuugacgaauucuguuua

SEQ ID NO: 1768755 - RNA, 19 nt, Artificial Sequence
  Description of Artificial Sequence: Synthetic oligonucleotide
  Sense strand starting at position 3675 of SEQ ID NO: 1562730
aacagaauucgucaaguau

SEQ ID NO: 1768756 - RNA, 19 nt, Artificial Sequence
  Description of Artificial Sequence: Synthetic oligonucleotide
  Antisense strand to SEQ ID NO: 1768755
auacuugacgaauucuguu

SEQ ID NO: 1768757 - RNA, 19 nt, Artificial Sequence
  Description of Artificial Sequence: Synthetic oligonucleotide
  Sense strand starting at position 3679 of SEQ ID NO: 1562730
gaauucgucaaguauggua

SEQ ID NO: 1768758 - RNA, 19 nt, Artificial Sequence
  Description of Artificial Sequence: Synthetic oligonucleotide
  Antisense strand to SEQ ID NO: 1768757
uaccauacuugacgaauuc

SEQ ID NO: 1768759 - RNA, 19 nt, Artificial Sequence
  Description of Artificial Sequence: Synthetic oligonucleotide
  Sense strand starting at position 3748 of SEQ ID NO: 1562730
ggaguuucugaauguagga

SEQ ID NO: 1768760 - RNA, 19 nt, Artificial Sequence
  Description of Artificial Sequence: Synthetic oligonucleotide
  Antisense strand to SEQ ID NO: 1768759
uccuacauucagaaacucc

SEQ ID NO: 1768761 - RNA, 19 nt, Artificial Sequence
  Description of Artificial Sequence: Synthetic oligonucleotide
  Sense strand starting at position 3750 of SEQ ID NO: 1562730
aguuucugaauguaggauu

SEQ ID NO: 1768762 - RNA, 19 nt, Artificial Sequence
  Description of Artificial Sequence: Synthetic oligonucleotide
  Antisense strand to SEQ ID NO: 1768761
aauccuacauucagaaacu

SEQ ID NO: 1768763 - RNA, 19 nt, Artificial Sequence
  Description of Artificial Sequence: Synthetic oligonucleotide
  Sense strand starting at position 3761 of SEQ ID NO: 1562730
guaggauuacugcagcagu

SEQ ID NO: 1768764 - RNA, 19 nt, Artificial Sequence
  Description of Artificial Sequence: Synthetic oligonucleotide
  Antisense strand to SEQ ID NO: 1768763
acugcugcaguaauccuac

SEQ ID NO: 1768765 - RNA, 19 nt, Artificial Sequence
  Description of Artificial Sequence: Synthetic oligonucleotide
  Sense strand starting at position 3764 of SEQ ID NO: 1562730
ggauuacugcagcagucaa

SEQ ID NO: 1768766 - RNA, 19 nt, Artificial Sequence
  Description of Artificial Sequence: Synthetic oligonucleotide
  Antisense strand to SEQ ID NO: 1768765
uugacugcugcaguaaucc

SEQ ID NO: 1768767 - RNA, 19 nt, Artificial Sequence
  Description of Artificial Sequence: Synthetic oligonucleotide
  Sense strand starting at position 42 of SEQ ID NO: 1562731
gcagucagaccagguauga

SEQ ID NO: 1768768 - RNA, 19 nt, Artificial Sequence
  Description of Artificial Sequence: Synthetic oligonucleotide
  Antisense strand to SEQ ID NO: 1768767
ucauaccuggucugacugc

SEQ ID NO: 1768769 - RNA, 19 nt, Artificial Sequence
  Description of Artificial Sequence: Synthetic oligonucleotide
  Sense strand starting at position 100 of SEQ ID NO: 1562731
cuuucugaguccucugaca

SEQ ID NO: 1768770 - RNA, 19 nt, Artificial Sequence
  Description of Artificial Sequence: Synthetic oligonucleotide
  Antisense strand to SEQ ID NO: 1768769
ugucagaggacucagaaag

SEQ ID NO: 1768771 - RNA, 19 nt, Artificial Sequence
  Description of Artificial Sequence: Synthetic oligonucleotide
  Sense strand starting at position 102 of SEQ ID NO: 1562731
uucugaguccucugacaga

SEQ ID NO: 1768772 - RNA, 19 nt, Artificial Sequence
  Description of Artificial Sequence: Synthetic oligonucleotide
  Antisense strand to SEQ ID NO: 1768771
ucugucagaggacucagaa

SEQ ID NO: 1768773 - RNA, 19 nt, Artificial Sequence
  Description of Artificial Sequence: Synthetic oligonucleotide
  Sense strand starting at position 126 of SEQ ID NO: 1562731
cuauccacugagcaguaau

SEQ ID NO: 1768774 - RNA, 19 nt, Artificial Sequence
  Description of Artificial Sequence: Synthetic oligonucleotide
  Antisense strand to SEQ ID NO: 1768773
auuacugcucaguggauag

SEQ ID NO: 1768775 - RNA, 19 nt, Artificial Sequence
  Description of Artificial Sequence: Synthetic oligonucleotide
  Sense strand starting at position 137 of SEQ ID NO: 1562731
gcaguaauucuguaccagg

SEQ ID NO: 1768776 - RNA, 19 nt, Artificial Sequence
  Description of Artificial Sequence: Synthetic oligonucleotide
  Antisense strand to SEQ ID NO: 1768775
ccugguacagaauuacugc

SEQ ID NO: 1768777 - RNA, 19 nt, Artificial Sequence
  Description of Artificial Sequence: Synthetic oligonucleotide
  Sense strand starting at position 397 of SEQ ID NO: 1562731
gcagaagaaugcuuugauc

SEQ ID NO: 1768778 - RNA, 19 nt, Artificial Sequence
  Description of Artificial Sequence: Synthetic oligonucleotide
  Antisense strand to SEQ ID NO: 1768777
gaucaaagcauucuucugc

SEQ ID NO: 1768779 - RNA, 19 nt, Artificial Sequence
  Description of Artificial Sequence: Synthetic oligonucleotide
  Sense strand starting at position 399 of SEQ ID NO: 1562731
agaagaaugcuuugaucac

SEQ ID NO: 1768780 - RNA, 19 nt, Artificial Sequence
  Description of Artificial Sequence: Synthetic oligonucleotide
  Antisense strand to SEQ ID NO: 1768779
gugaucaaagcauucuucu

SEQ ID NO: 1768781 - RNA, 19 nt, Artificial Sequence
  Description of Artificial Sequence: Synthetic oligonucleotide
  Sense strand starting at position 544 of SEQ ID NO: 1562731
cgugaaaucucaucuccac

SEQ ID NO: 1768782 - RNA, 19 nt, Artificial Sequence
  Description of Artificial Sequence: Synthetic oligonucleotide
  Antisense strand to SEQ ID NO: 1768781
guggagaugagauuucacg

SEQ ID NO: 1768783 - RNA, 19 nt, Artificial Sequence
  Description of Artificial Sequence: Synthetic oligonucleotide
  Sense strand starting at position 887 of SEQ ID NO: 1562731
ggaugaaguaguggccauu

SEQ ID NO: 1768784 - RNA, 19 nt, Artificial Sequence
  Description of Artificial Sequence: Synthetic oligonucleotide
  Antisense strand to SEQ ID NO: 1768783
aauggccacuacuucaucc

SEQ ID NO: 1768785 - RNA, 19 nt, Artificial Sequence
  Description of Artificial Sequence: Synthetic oligonucleotide
  Sense strand starting at position 1461 of SEQ ID NO: 1562731
cgggaacucucacugcaau

SEQ ID NO: 1768786 - RNA, 19 nt, Artificial Sequence
  Description of Artificial Sequence: Synthetic oligonucleotide
  Antisense strand to SEQ ID NO: 1768785
auugcagugagaguucccg

SEQ ID NO: 1768787 - RNA, 19 nt, Artificial Sequence
  Description of Artificial Sequence: Synthetic oligonucleotide
  Sense strand starting at position 1462 of SEQ ID NO: 1562731
gggaacucucacugcaauc

SEQ ID NO: 1768788 - RNA, 19 nt, Artificial Sequence
  Description of Artificial Sequence: Synthetic oligonucleotide
  Antisense strand to SEQ ID NO: 1768787
gauugcagugagaguuccc

SEQ ID NO: 1768789 - RNA, 19 nt, Artificial Sequence
  Description of Artificial Sequence: Synthetic oligonucleotide
  Sense strand starting at position 2210 of SEQ ID NO: 1562731
ggguggaaggucuggagau

SEQ ID NO: 1768790 - RNA, 19 nt, Artificial Sequence
  Description of Artificial Sequence: Synthetic oligonucleotide
  Antisense strand to SEQ ID NO: 1768789
aucuccagaccuuccaccc

SEQ ID NO: 1768791 - RNA, 19 nt, Artificial Sequence
  Description of Artificial Sequence: Synthetic oligonucleotide
  Sense strand starting at position 2430 of SEQ ID NO: 1562731
gcuacagugacucagugua

SEQ ID NO: 1768792 - RNA, 19 nt, Artificial Sequence
  Description of Artificial Sequence: Synthetic oligonucleotide
  Antisense strand to SEQ ID NO: 1768791
uacacugagucacuguagc

SEQ ID NO: 1768793 - RNA, 19 nt, Artificial Sequence
  Description of Artificial Sequence: Synthetic oligonucleotide
  Sense strand starting at position 2530 of SEQ ID NO: 1562731
guagcugacuggucaaaug

SEQ ID NO: 1768794 - RNA, 19 nt, Artificial Sequence
  Description of Artificial Sequence: Synthetic oligonucleotide
  Antisense strand to SEQ ID NO: 1768793
cauuugaccagucagcuac

SEQ ID NO: 1768795 - RNA, 19 nt, Artificial Sequence
  Description of Artificial Sequence: Synthetic oligonucleotide
  Sense strand starting at position 2585 of SEQ ID NO: 1562731
ggaaguggagccuggaauu

SEQ ID NO: 1768796 - RNA, 19 nt, Artificial Sequence
  Description of Artificial Sequence: Synthetic oligonucleotide
  Antisense strand to SEQ ID NO: 1768795
aauuccaggcuccacuucc

SEQ ID NO: 1768797 - RNA, 19 nt, Artificial Sequence
  Description of Artificial Sequence: Synthetic oligonucleotide
  Sense strand starting at position 2644 of SEQ ID NO: 1562731
acgugaacuggaugaugaa

SEQ ID NO: 1768798 - RNA, 19 nt, Artificial Sequence
  Description of Artificial Sequence: Synthetic oligonucleotide
  Antisense strand to SEQ ID NO: 1768797
uucaucauccaguucacgu

SEQ ID NO: 1768799 - RNA, 19 nt, Artificial Sequence
  Description of Artificial Sequence: Synthetic oligonucleotide
  Sense strand starting at position 2715 of SEQ ID NO: 1562731
gaaauacgaagucagugua

SEQ ID NO: 1768800 - RNA, 19 nt, Artificial Sequence
  Description of Artificial Sequence: Synthetic oligonucleotide
  Antisense strand to SEQ ID NO: 1768799
uacacugacuucguauuuc

SEQ ID NO: 1768801 - RNA, 19 nt, Artificial Sequence
  Description of Artificial Sequence: Synthetic oligonucleotide
  Sense strand starting at position 2718 of SEQ ID NO: 1562731
auacgaagucaguguagga

SEQ ID NO: 1768802 - RNA, 19 nt, Artificial Sequence
  Description of Artificial Sequence: Synthetic oligonucleotide
  Antisense strand to SEQ ID NO: 1768801
uccuacacugacuucguau

SEQ ID NO: 1768803 - RNA, 19 nt, Artificial Sequence
  Description of Artificial Sequence: Synthetic oligonucleotide
  Sense strand starting at position 2807 of SEQ ID NO: 1562731
gcagauuugcauggcugga

SEQ ID NO: 1768804 - RNA, 19 nt, Artificial Sequence
  Description of Artificial Sequence: Synthetic oligonucleotide
  Antisense strand to SEQ ID NO: 1768803
uccagccaugcaaaucugc

SEQ ID NO: 1768805 - RNA, 19 nt, Artificial Sequence
  Description of Artificial Sequence: Synthetic oligonucleotide
  Sense strand starting at position 2820 of SEQ ID NO: 1562731
gcuggagauucuuugaauu

SEQ ID NO: 1768806 - RNA, 19 nt, Artificial Sequence
  Description of Artificial Sequence: Synthetic oligonucleotide
  Antisense strand to SEQ ID NO: 1768805
aauucaaagaaucuccagc

SEQ ID NO: 1768807 - RNA, 19 nt, Artificial Sequence
  Description of Artificial Sequence: Synthetic oligonucleotide
  Sense strand starting at position 3219 of SEQ ID NO: 1562731
ggccgaaugucauuuacuu

SEQ ID NO: 1768808 - RNA, 19 nt, Artificial Sequence
  Description of Artificial Sequence: Synthetic oligonucleotide
  Antisense strand to SEQ ID NO: 1768807
aaguaaaugacauucggcc

SEQ ID NO: 1768809 - RNA, 19 nt, Artificial Sequence
  Description of Artificial Sequence: Synthetic oligonucleotide
  Sense strand starting at position 3267 of SEQ ID NO: 1562731
gcucccucagagcagaaau

SEQ ID NO: 1768810 - RNA, 19 nt, Artificial Sequence
  Description of Artificial Sequence: Synthetic oligonucleotide
  Antisense strand to SEQ ID NO: 1768809
auuucugcucugagggagc

SEQ ID NO: 1768811 - RNA, 19 nt, Artificial Sequence
  Description of Artificial Sequence: Synthetic oligonucleotide
  Sense strand starting at position 3278 of SEQ ID NO: 1562731
gcagaaauuguccaguauc

SEQ ID NO: 1768812 - RNA, 19 nt, Artificial Sequence
  Description of Artificial Sequence: Synthetic oligonucleotide
  Antisense strand to SEQ ID NO: 1768811
gauacuggacaauuucugc

SEQ ID NO: 1768813 - RNA, 19 nt, Artificial Sequence
  Description of Artificial Sequence: Synthetic oligonucleotide
  Sense strand starting at position 3281 of SEQ ID NO: 1562731
gaaauuguccaguaucuga

SEQ ID NO: 1768814 - RNA, 19 nt, Artificial Sequence
  Description of Artificial Sequence: Synthetic oligonucleotide
  Antisense strand to SEQ ID NO: 1768813
ucagauacuggacaauuuc

SEQ ID NO: 1768815 - RNA, 19 nt, Artificial Sequence
  Description of Artificial Sequence: Synthetic oligonucleotide
  Sense strand starting at position 3292 of SEQ ID NO: 1562731
guaucugacauacggaagu

SEQ ID NO: 1768816 - RNA, 19 nt, Artificial Sequence
  Description of Artificial Sequence: Synthetic oligonucleotide
  Antisense strand to SEQ ID NO: 1768815
acuuccguaugucagauac

SEQ ID NO: 1768817 - RNA, 19 nt, Artificial Sequence
  Description of Artificial Sequence: Synthetic oligonucleotide
  Sense strand starting at position 3294 of SEQ ID NO: 1562731
aucugacauacggaaguuu

SEQ ID NO: 1768818 - RNA, 19 nt, Artificial Sequence
  Description of Artificial Sequence: Synthetic oligonucleotide
  Antisense strand to SEQ ID NO: 1768817
aaacuuccguaugucagau

SEQ ID NO: 1768819 - RNA, 19 nt, Artificial Sequence
  Description of Artificial Sequence: Synthetic oligonucleotide
  Sense strand starting at position 3351 of SEQ ID NO: 1562731
ggcagaauacuuugccaaa

SEQ ID NO: 1768820 - RNA, 19 nt, Artificial Sequence
  Description of Artificial Sequence: Synthetic oligonucleotide
  Antisense strand to SEQ ID NO: 1768819
uuuggcaaaguauucugcc

SEQ ID NO: 1768821 - RNA, 19 nt, Artificial Sequence
  Description of Artificial Sequence: Synthetic oligonucleotide
  Sense strand starting at position 3506 of SEQ ID NO: 1562731
agugcuagggauuacaagu

SEQ ID NO: 1768822 - RNA, 19 nt, Artificial Sequence
  Description of Artificial Sequence: Synthetic oligonucleotide
  Antisense strand to SEQ ID NO: 1768821
acuuguaaucccuagcacu

SEQ ID NO: 1768823 - RNA, 19 nt, Artificial Sequence
  Description of Artificial Sequence: Synthetic oligonucleotide
  Sense strand starting at position 3641 of SEQ ID NO: 1562731
agugguugugaagauuaug

SEQ ID NO: 1768824 - RNA, 19 nt, Artificial Sequence
  Description of Artificial Sequence: Synthetic oligonucleotide
  Antisense strand to SEQ ID NO: 1768823
cauaaucuucacaaccacu

SEQ ID NO: 1768825 - RNA, 19 nt, Artificial Sequence
  Description of Artificial Sequence: Synthetic oligonucleotide
  Sense strand starting at position 3689 of SEQ ID NO: 1562731
aauaauugcuggucuuaug

SEQ ID NO: 1768826 - RNA, 19 nt, Artificial Sequence
  Description of Artificial Sequence: Synthetic oligonucleotide
  Antisense strand to SEQ ID NO: 1768825
cauaagaccagcaauuauu

SEQ ID NO: 1768827 - RNA, 19 nt, Artificial Sequence
  Description of Artificial Sequence: Synthetic oligonucleotide
  Sense strand starting at position 3700 of SEQ ID NO: 1562731
gucuuauguggugaauaca

SEQ ID NO: 1768828 - RNA, 19 nt, Artificial Sequence
  Description of Artificial Sequence: Synthetic oligonucleotide
  Antisense strand to SEQ ID NO: 1768827
uguauucaccacauaagac

SEQ ID NO: 1768829 - RNA, 19 nt, Artificial Sequence
  Description of Artificial Sequence: Synthetic oligonucleotide
  Sense strand starting at position 3703 of SEQ ID NO: 1562731
uuauguggugaauacagua

SEQ ID NO: 1768830 - RNA, 19 nt, Artificial Sequence
  Description of Artificial Sequence: Synthetic oligonucleotide
  Antisense strand to SEQ ID NO: 1768829
uacuguauucaccacauaa

SEQ ID NO: 1768831 - RNA, 19 nt, Artificial Sequence
  Description of Artificial Sequence: Synthetic oligonucleotide
  Sense strand starting at position 3713 of SEQ ID NO: 1562731
aauacaguagugggaaauu

SEQ ID NO: 1768832 - RNA, 19 nt, Artificial Sequence
  Description of Artificial Sequence: Synthetic oligonucleotide
  Antisense strand to SEQ ID NO: 1768831
aauuucccacuacuguauu

SEQ ID NO: 1768833 - RNA, 19 nt, Artificial Sequence
  Description of Artificial Sequence: Synthetic oligonucleotide
  Sense strand starting at position 3731 of SEQ ID NO: 1562731
uaaacagaauucgucaagu

SEQ ID NO: 1768834 - RNA, 19 nt, Artificial Sequence
  Description of Artificial Sequence: Synthetic oligonucleotide
  Antisense strand to SEQ ID NO: 1768833
acuugacgaauucuguuua

SEQ ID NO: 1768835 - RNA, 19 nt, Artificial Sequence
  Description of Artificial Sequence: Synthetic oligonucleotide
  Sense strand starting at position 3733 of SEQ ID NO: 1562731
aacagaauucgucaaguau

SEQ ID NO: 1768836 - RNA, 19 nt, Artificial Sequence
  Description of Artificial Sequence: Synthetic oligonucleotide
  Antisense strand to SEQ ID NO: 1768835
auacuugacgaauucuguu

SEQ ID NO: 1768837 - RNA, 19 nt, Artificial Sequence
  Description of Artificial Sequence: Synthetic oligonucleotide
  Sense strand starting at position 3737 of SEQ ID NO: 1562731
gaauucgucaaguauggua

SEQ ID NO: 1768838 - RNA, 19 nt, Artificial Sequence
  Description of Artificial Sequence: Synthetic oligonucleotide
  Antisense strand to SEQ ID NO: 1768837
uaccauacuugacgaauuc

SEQ ID NO: 1768839 - RNA, 19 nt, Artificial Sequence
  Description of Artificial Sequence: Synthetic oligonucleotide
  Sense strand starting at position 3806 of SEQ ID NO: 1562731
ggaguuucugaauguagga

SEQ ID NO: 1768840 - RNA, 19 nt, Artificial Sequence
  Description of Artificial Sequence: Synthetic oligonucleotide
  Antisense strand to SEQ ID NO: 1768839
uccuacauucagaaacucc

SEQ ID NO: 1768841 - RNA, 19 nt, Artificial Sequence
  Description of Artificial Sequence: Synthetic oligonucleotide
  Sense strand starting at position 3808 of SEQ ID NO: 1562731
aguuucugaauguaggauu

SEQ ID NO: 1768842 - RNA, 19 nt, Artificial Sequence
  Description of Artificial Sequence: Synthetic oligonucleotide
  Antisense strand to SEQ ID NO: 1768841
aauccuacauucagaaacu

SEQ ID NO: 1768843 - RNA, 19 nt, Artificial Sequence
  Description of Artificial Sequence: Synthetic oligonucleotide
  Sense strand starting at position 3819 of SEQ ID NO: 1562731
guaggauuacugcagcagu

SEQ ID NO: 1768844 - RNA, 19 nt, Artificial Sequence
  Description of Artificial Sequence: Synthetic oligonucleotide
  Antisense strand to SEQ ID NO: 1768843
acugcugcaguaauccuac

SEQ ID NO: 1768845 - RNA, 19 nt, Artificial Sequence
  Description of Artificial Sequence: Synthetic oligonucleotide
  Sense strand starting at position 3822 of SEQ ID NO: 1562731
ggauuacugcagcagucaa

SEQ ID NO: 1768846 - RNA, 19 nt, Artificial Sequence
  Description of Artificial Sequence: Synthetic oligonucleotide
  Antisense strand to SEQ ID NO: 1768845
uugacugcugcaguaaucc

SEQ ID NO: 1768847 - RNA, 19 nt, Artificial Sequence
  Description of Artificial Sequence: Synthetic oligonucleotide
  Sense strand starting at position 225 of SEQ ID NO: 1562732
gcgacuccucaaggaucaa

SEQ ID NO: 1768848 - RNA, 19 nt, Artificial Sequence
  Description of Artificial Sequence: Synthetic oligonucleotide
  Antisense strand to SEQ ID NO: 1768847
uugauccuugaggagucgc

SEQ ID NO: 1768849 - RNA, 19 nt, Artificial Sequence
  Description of Artificial Sequence: Synthetic oligonucleotide
  Sense strand starting at position 713 of SEQ ID NO: 1562732
ccaugacacguguauaugu

SEQ ID NO: 1768850 - RNA, 19 nt, Artificial Sequence
  Description of Artificial Sequence: Synthetic oligonucleotide
  Antisense strand to SEQ ID NO: 1768849
acauauacacgugucaugg

SEQ ID NO: 1768851 - RNA, 19 nt, Artificial Sequence
  Description of Artificial Sequence: Synthetic oligonucleotide
  Sense strand starting at position 871 of SEQ ID NO: 1562732
acuauaggaucagcuuauu

SEQ ID NO: 1768852 - RNA, 19 nt, Artificial Sequence
  Description of Artificial Sequence: Synthetic oligonucleotide
  Antisense strand to SEQ ID NO: 1768851
aauaagcugauccuauagu

SEQ ID NO: 1768853 - RNA, 19 nt, Artificial Sequence
  Description of Artificial Sequence: Synthetic oligonucleotide
  Sense strand starting at position 877 of SEQ ID NO: 1562732
ggaucagcuuauucuggaa

SEQ ID NO: 1768854 - RNA, 19 nt, Artificial Sequence
  Description of Artificial Sequence: Synthetic oligonucleotide
  Antisense strand to SEQ ID NO: 1768853
uuccagaauaagcugaucc

SEQ ID NO: 1768855 - RNA, 19 nt, Artificial Sequence
  Description of Artificial Sequence: Synthetic oligonucleotide
  Sense strand starting at position 892 of SEQ ID NO: 1562732
ggaauagauucuugaaggg

SEQ ID NO: 1768856 - RNA, 19 nt, Artificial Sequence
  Description of Artificial Sequence: Synthetic oligonucleotide
  Antisense strand to SEQ ID NO: 1768855
cccuucaagaaucuauucc

SEQ ID NO: 1768857 - RNA, 19 nt, Artificial Sequence
  Description of Artificial Sequence: Synthetic oligonucleotide
  Sense strand starting at position 946 of SEQ ID NO: 1562732
ucuucuauguaccuuggua

SEQ ID NO: 1768858 - RNA, 19 nt, Artificial Sequence
  Description of Artificial Sequence: Synthetic oligonucleotide
  Antisense strand to SEQ ID NO: 1768857
uaccaagguacauagaaga

SEQ ID NO: 1768859 - RNA, 19 nt, Artificial Sequence
  Description of Artificial Sequence: Synthetic oligonucleotide
  Sense strand starting at position 948 of SEQ ID NO: 1562732
uucuauguaccuugguaua

SEQ ID NO: 1768860 - RNA, 19 nt, Artificial Sequence
  Description of Artificial Sequence: Synthetic oligonucleotide
  Antisense strand to SEQ ID NO: 1768859
uauaccaagguacauagaa

SEQ ID NO: 1768861 - RNA, 19 nt, Artificial Sequence
  Description of Artificial Sequence: Synthetic oligonucleotide
  Sense strand starting at position 950 of SEQ ID NO: 1562732
cuauguaccuugguauaau

SEQ ID NO: 1768862 - RNA, 19 nt, Artificial Sequence
  Description of Artificial Sequence: Synthetic oligonucleotide
  Antisense strand to SEQ ID NO: 1768861
auuauaccaagguacauag

SEQ ID NO: 1768863 - RNA, 19 nt, Artificial Sequence
  Description of Artificial Sequence: Synthetic oligonucleotide
  Sense strand starting at position 953 of SEQ ID NO: 1562732
uguaccuugguauaaucau

SEQ ID NO: 1768864 - RNA, 19 nt, Artificial Sequence
  Description of Artificial Sequence: Synthetic oligonucleotide
  Antisense strand to SEQ ID NO: 1768863
augauuauaccaagguaca

SEQ ID NO: 1768865 - RNA, 19 nt, Artificial Sequence
  Description of Artificial Sequence: Synthetic oligonucleotide
  Sense strand starting at position 986 of SEQ ID NO: 1562732
auuaccgcuuccucaguaa

SEQ ID NO: 1768866 - RNA, 19 nt, Artificial Sequence
  Description of Artificial Sequence: Synthetic oligonucleotide
  Antisense strand to SEQ ID NO: 1768865
uuacugaggaagcgguaau

SEQ ID NO: 1768867 - RNA, 19 nt, Artificial Sequence
  Description of Artificial Sequence: Synthetic oligonucleotide
  Sense strand starting at position 1008 of SEQ ID NO: 1562732
uguugaaauuuagaacaac

SEQ ID NO: 1768868 - RNA, 19 nt, Artificial Sequence
  Description of Artificial Sequence: Synthetic oligonucleotide
  Antisense strand to SEQ ID NO: 1768867
guuguucuaaauuucaaca

SEQ ID NO: 1768869 - RNA, 19 nt, Artificial Sequence
  Description of Artificial Sequence: Synthetic oligonucleotide
  Sense strand starting at position 1080 of SEQ ID NO: 1562732
aucguuuaaccacaugaau

SEQ ID NO: 1768870 - RNA, 19 nt, Artificial Sequence
  Description of Artificial Sequence: Synthetic oligonucleotide
  Antisense strand to SEQ ID NO: 1768869
auucaugugguuaaacgau

SEQ ID NO: 1768871 - RNA, 19 nt, Artificial Sequence
  Description of Artificial Sequence: Synthetic oligonucleotide
  Sense strand starting at position 1958 of SEQ ID NO: 1562732
ugagggacggcuugcgaua

SEQ ID NO: 1768872 - RNA, 19 nt, Artificial Sequence
  Description of Artificial Sequence: Synthetic oligonucleotide
  Antisense strand to SEQ ID NO: 1768871
uaucgcaagccgucccuca

SEQ ID NO: 1768873 - RNA, 19 nt, Artificial Sequence
  Description of Artificial Sequence: Synthetic oligonucleotide
  Sense strand starting at position 2152 of SEQ ID NO: 1562732
gguggaguuugggauuaaa

SEQ ID NO: 1768874 - RNA, 19 nt, Artificial Sequence
  Description of Artificial Sequence: Synthetic oligonucleotide
  Antisense strand to SEQ ID NO: 1768873
uuuaaucccaaacuccacc

SEQ ID NO: 1768875 - RNA, 19 nt, Artificial Sequence
  Description of Artificial Sequence: Synthetic oligonucleotide
  Sense strand starting at position 2445 of SEQ ID NO: 1562732
ugaguuccaguucgggauu

SEQ ID NO: 1768876 - RNA, 19 nt, Artificial Sequence
  Description of Artificial Sequence: Synthetic oligonucleotide
  Antisense strand to SEQ ID NO: 1768875
aaucccgaacuggaacuca

SEQ ID NO: 1768877 - RNA, 19 nt, Artificial Sequence
  Description of Artificial Sequence: Synthetic oligonucleotide
  Sense strand starting at position 2459 of SEQ ID NO: 1562732
ggauucggcccaugguuua

SEQ ID NO: 1768878 - RNA, 19 nt, Artificial Sequence
  Description of Artificial Sequence: Synthetic oligonucleotide
  Antisense strand to SEQ ID NO: 1768877
uaaaccaugggccgaaucc

SEQ ID NO: 1768879 - RNA, 19 nt, Artificial Sequence
  Description of Artificial Sequence: Synthetic oligonucleotide
  Sense strand starting at position 2522 of SEQ ID NO: 1562732
acuugaguuccggguugca

SEQ ID NO: 1768880 - RNA, 19 nt, Artificial Sequence
  Description of Artificial Sequence: Synthetic oligonucleotide
  Antisense strand to SEQ ID NO: 1768879
ugcaacccggaacucaagu

SEQ ID NO: 1768881 - RNA, 19 nt, Artificial Sequence
  Description of Artificial Sequence: Synthetic oligonucleotide
  Sense strand starting at position 2556 of SEQ ID NO: 1562732
uagguuucagagugagggu

SEQ ID NO: 1768882 - RNA, 19 nt, Artificial Sequence
  Description of Artificial Sequence: Synthetic oligonucleotide
  Antisense strand to SEQ ID NO: 1768881
acccucacucugaaaccua

SEQ ID NO: 1768883 - RNA, 19 nt, Artificial Sequence
  Description of Artificial Sequence: Synthetic oligonucleotide
  Sense strand starting at position 2557 of SEQ ID NO: 1562732
agguuucagagugaggguu

SEQ ID NO: 1768884 - RNA, 19 nt, Artificial Sequence
  Description of Artificial Sequence: Synthetic oligonucleotide
  Antisense strand to SEQ ID NO: 1768883
aacccucacucugaaaccu

SEQ ID NO: 1768885 - RNA, 19 nt, Artificial Sequence
  Description of Artificial Sequence: Synthetic oligonucleotide
  Sense strand starting at position 2590 of SEQ ID NO: 1562732
uuguguauguuugugaaug

SEQ ID NO: 1768886 - RNA, 19 nt, Artificial Sequence
  Description of Artificial Sequence: Synthetic oligonucleotide
  Antisense strand to SEQ ID NO: 1768885
cauucacaaacauacacaa

SEQ ID NO: 1768887 - RNA, 19 nt, Artificial Sequence
  Description of Artificial Sequence: Synthetic oligonucleotide
  Sense strand starting at position 2595 of SEQ ID NO: 1562732
uauguuugugaauguauug

SEQ ID NO: 1768888 - RNA, 19 nt, Artificial Sequence
  Description of Artificial Sequence: Synthetic oligonucleotide
  Antisense strand to SEQ ID NO: 1768887
caauacauucacaaacaua

SEQ ID NO: 1768889 - RNA, 19 nt, Artificial Sequence
  Description of Artificial Sequence: Synthetic oligonucleotide
  Sense strand starting at position 2601 of SEQ ID NO: 1562732
ugugaauguauugggaugu

SEQ ID NO: 1768890 - RNA, 19 nt, Artificial Sequence
  Description of Artificial Sequence: Synthetic oligonucleotide
  Antisense strand to SEQ ID NO: 1768889
acaucccaauacauucaca

SEQ ID NO: 1768891 - RNA, 19 nt, Artificial Sequence
  Description of Artificial Sequence: Synthetic oligonucleotide
  Sense strand starting at position 2665 of SEQ ID NO: 1562732
augugugaguguucauuga

SEQ ID NO: 1768892 - RNA, 19 nt, Artificial Sequence
  Description of Artificial Sequence: Synthetic oligonucleotide
  Antisense strand to SEQ ID NO: 1768891
ucaaugaacacucacacau

SEQ ID NO: 1768893 - RNA, 19 nt, Artificial Sequence
  Description of Artificial Sequence: Synthetic oligonucleotide
  Sense strand starting at position 2669 of SEQ ID NO: 1562732
gugaguguucauugagugu

SEQ ID NO: 1768894 - RNA, 19 nt, Artificial Sequence
  Description of Artificial Sequence: Synthetic oligonucleotide
  Antisense strand to SEQ ID NO: 1768893
acacucaaugaacacucac

SEQ ID NO: 1768895 - RNA, 19 nt, Artificial Sequence
  Description of Artificial Sequence: Synthetic oligonucleotide
  Sense strand starting at position 2907 of SEQ ID NO: 1562732
ggaggagcuugguuugcuu

SEQ ID NO: 1768896 - RNA, 19 nt, Artificial Sequence
  Description of Artificial Sequence: Synthetic oligonucleotide
  Antisense strand to SEQ ID NO: 1768895
aagcaaaccaagcuccucc

SEQ ID NO: 1768897 - RNA, 19 nt, Artificial Sequence
  Description of Artificial Sequence: Synthetic oligonucleotide
  Sense strand starting at position 3192 of SEQ ID NO: 1562732
agugcugaagagugugaaa

SEQ ID NO: 1768898 - RNA, 19 nt, Artificial Sequence
  Description of Artificial Sequence: Synthetic oligonucleotide
  Antisense strand to SEQ ID NO: 1768897
uuucacacucuucagcacu

SEQ ID NO: 1768899 - RNA, 19 nt, Artificial Sequence
  Description of Artificial Sequence: Synthetic oligonucleotide
  Sense strand starting at position 3194 of SEQ ID NO: 1562732
ugcugaagagugugaaacu

SEQ ID NO: 1768900 - RNA, 19 nt, Artificial Sequence
  Description of Artificial Sequence: Synthetic oligonucleotide
  Antisense strand to SEQ ID NO: 1768899
aguuucacacucuucagca

SEQ ID NO: 1768901 - RNA, 19 nt, Artificial Sequence
  Description of Artificial Sequence: Synthetic oligonucleotide
  Sense strand starting at position 3203 of SEQ ID NO: 1562732
gugugaaacugugugacau

SEQ ID NO: 1768902 - RNA, 19 nt, Artificial Sequence
  Description of Artificial Sequence: Synthetic oligonucleotide
  Antisense strand to SEQ ID NO: 1768901
augucacacaguuucacac

SEQ ID NO: 1768903 - RNA, 19 nt, Artificial Sequence
  Description of Artificial Sequence: Synthetic oligonucleotide
  Sense strand starting at position 3204 of SEQ ID NO: 1562732
ugugaaacugugugacaug

SEQ ID NO: 1768904 - RNA, 19 nt, Artificial Sequence
  Description of Artificial Sequence: Synthetic oligonucleotide
  Antisense strand to SEQ ID NO: 1768903
caugucacacaguuucaca

SEQ ID NO: 1768905 - RNA, 19 nt, Artificial Sequence
  Description of Artificial Sequence: Synthetic oligonucleotide
  Sense strand starting at position 3215 of SEQ ID NO: 1562732
gugacauguuaugcuuuau

SEQ ID NO: 1768906 - RNA, 19 nt, Artificial Sequence
  Description of Artificial Sequence: Synthetic oligonucleotide
  Antisense strand to SEQ ID NO: 1768905
auaaagcauaacaugucac

SEQ ID NO: 1768907 - RNA, 19 nt, Artificial Sequence
  Description of Artificial Sequence: Synthetic oligonucleotide
  Sense strand starting at position 3282 of SEQ ID NO: 1562732
gggccaaugggauguccau

SEQ ID NO: 1768908 - RNA, 19 nt, Artificial Sequence
  Description of Artificial Sequence: Synthetic oligonucleotide
  Antisense strand to SEQ ID NO: 1768907
auggacaucccauuggccc

SEQ ID NO: 1768909 - RNA, 19 nt, Artificial Sequence
  Description of Artificial Sequence: Synthetic oligonucleotide
  Sense strand starting at position 3302 of SEQ ID NO: 1562732
gagauaagauuuggcuuga

SEQ ID NO: 1768910 - RNA, 19 nt, Artificial Sequence
  Description of Artificial Sequence: Synthetic oligonucleotide
  Antisense strand to SEQ ID NO: 1768909
ucaagccaaaucuuaucuc

SEQ ID NO: 1768911 - RNA, 19 nt, Artificial Sequence
  Description of Artificial Sequence: Synthetic oligonucleotide
  Sense strand starting at position 3381 of SEQ ID NO: 1562732
gagacauguggguggauga

SEQ ID NO: 1768912 - RNA, 19 nt, Artificial Sequence
  Description of Artificial Sequence: Synthetic oligonucleotide
  Antisense strand to SEQ ID NO: 1768911
ucauccacccacaugucuc

SEQ ID NO: 1768913 - RNA, 19 nt, Artificial Sequence
  Description of Artificial Sequence: Synthetic oligonucleotide
  Sense strand starting at position 3392 of SEQ ID NO: 1562732
guggaugagauaugaguag

SEQ ID NO: 1768914 - RNA, 19 nt, Artificial Sequence
  Description of Artificial Sequence: Synthetic oligonucleotide
  Antisense strand to SEQ ID NO: 1768913
cuacucauaucucauccac

SEQ ID NO: 1768915 - RNA, 19 nt, Artificial Sequence
  Description of Artificial Sequence: Synthetic oligonucleotide
  Sense strand starting at position 3462 of SEQ ID NO: 1562732
ugagguguauuuggaccua

SEQ ID NO: 1768916 - RNA, 19 nt, Artificial Sequence
  Description of Artificial Sequence: Synthetic oligonucleotide
  Antisense strand to SEQ ID NO: 1768915
uagguccaaauacaccuca

SEQ ID NO: 1768917 - RNA, 19 nt, Artificial Sequence
  Description of Artificial Sequence: Synthetic oligonucleotide
  Sense strand starting at position 3638 of SEQ ID NO: 1562732
ugcagucauggcgagucaa

SEQ ID NO: 1768918 - RNA, 19 nt, Artificial Sequence
  Description of Artificial Sequence: Synthetic oligonucleotide
  Antisense strand to SEQ ID NO: 1768917
uugacucgccaugacugca

SEQ ID NO: 1768919 - RNA, 19 nt, Artificial Sequence
  Description of Artificial Sequence: Synthetic oligonucleotide
  Sense strand starting at position 3742 of SEQ ID NO: 1562732
guuggauccugcccugaga

SEQ ID NO: 1768920 - RNA, 19 nt, Artificial Sequence
  Description of Artificial Sequence: Synthetic oligonucleotide
  Antisense strand to SEQ ID NO: 1768919
ucucagggcaggauccaac

SEQ ID NO: 1768921 - RNA, 19 nt, Artificial Sequence
  Description of Artificial Sequence: Synthetic oligonucleotide
  Sense strand starting at position 3745 of SEQ ID NO: 1562732
ggauccugcccugagauga

SEQ ID NO: 1768922 - RNA, 19 nt, Artificial Sequence
  Description of Artificial Sequence: Synthetic oligonucleotide
  Antisense strand to SEQ ID NO: 1768921
ucaucucagggcaggaucc

SEQ ID NO: 1768923 - RNA, 19 nt, Artificial Sequence
  Description of Artificial Sequence: Synthetic oligonucleotide
  Sense strand starting at position 3815 of SEQ ID NO: 1562732
cagauaaggucuuccugga

SEQ ID NO: 1768924 - RNA, 19 nt, Artificial Sequence
  Description of Artificial Sequence: Synthetic oligonucleotide
  Antisense strand to SEQ ID NO: 1768923
uccaggaagaccuuaucug

SEQ ID NO: 1768925 - RNA, 19 nt, Artificial Sequence
  Description of Artificial Sequence: Synthetic oligonucleotide
  Sense strand starting at position 3819 of SEQ ID NO: 1562732
uaaggucuuccuggaugga

SEQ ID NO: 1768926 - RNA, 19 nt, Artificial Sequence
  Description of Artificial Sequence: Synthetic oligonucleotide
  Antisense strand to SEQ ID NO: 1768925
uccauccaggaagaccuua

SEQ ID NO: 1768927 - RNA, 19 nt, Artificial Sequence
  Description of Artificial Sequence: Synthetic oligonucleotide
  Sense strand starting at position 300 of SEQ ID NO: 1562733
uuugaaugccuacaugaca

SEQ ID NO: 1768928 - RNA, 19 nt, Artificial Sequence
  Description of Artificial Sequence: Synthetic oligonucleotide
  Antisense strand to SEQ ID NO: 1768927
ugucauguaggcauucaaa

SEQ ID NO: 1768929 - RNA, 19 nt, Artificial Sequence
  Description of Artificial Sequence: Synthetic oligonucleotide
  Sense strand starting at position 363 of SEQ ID NO: 1562733
agucaaagcgcagguuuau

SEQ ID NO: 1768930 - RNA, 19 nt, Artificial Sequence
  Description of Artificial Sequence: Synthetic oligonucleotide
  Antisense strand to SEQ ID NO: 1768929
auaaaccugcgcuuugacu

SEQ ID NO: 1768931 - RNA, 19 nt, Artificial Sequence
  Description of Artificial Sequence: Synthetic oligonucleotide
  Sense strand starting at position 414 of SEQ ID NO: 1562733
ugaggcuauguguauaaga

SEQ ID NO: 1768932 - RNA, 19 nt, Artificial Sequence
  Description of Artificial Sequence: Synthetic oligonucleotide
  Antisense strand to SEQ ID NO: 1768931
ucuuauacacauagccuca

SEQ ID NO: 1768933 - RNA, 19 nt, Artificial Sequence
  Description of Artificial Sequence: Synthetic oligonucleotide
  Sense strand starting at position 419 of SEQ ID NO: 1562733
cuauguguauaagaaacau

SEQ ID NO: 1768934 - RNA, 19 nt, Artificial Sequence
  Description of Artificial Sequence: Synthetic oligonucleotide
  Antisense strand to SEQ ID NO: 1768933
auguuucuuauacacauag

SEQ ID NO: 1768935 - RNA, 19 nt, Artificial Sequence
  Description of Artificial Sequence: Synthetic oligonucleotide
  Sense strand starting at position 472 of SEQ ID NO: 1562733
auuccagcacuuugaaaga

SEQ ID NO: 1768936 - RNA, 19 nt, Artificial Sequence
  Description of Artificial Sequence: Synthetic oligonucleotide
  Antisense strand to SEQ ID NO: 1768935
ucuuucaaagugcuggaau

SEQ ID NO: 1768937 - RNA, 19 nt, Artificial Sequence
  Description of Artificial Sequence: Synthetic oligonucleotide
  Sense strand starting at position 631 of SEQ ID NO: 1562733
gcggaaguaucaccugaac

SEQ ID NO: 1768938 - RNA, 19 nt, Artificial Sequence
  Description of Artificial Sequence: Synthetic oligonucleotide
  Antisense strand to SEQ ID NO: 1768937
guucaggugauacuuccgc

SEQ ID NO: 1768939 - RNA, 19 nt, Artificial Sequence
  Description of Artificial Sequence: Synthetic oligonucleotide
  Sense strand starting at position 1108 of SEQ ID NO: 1562733
uggguuccaucuccaagau

SEQ ID NO: 1768940 - RNA, 19 nt, Artificial Sequence
  Description of Artificial Sequence: Synthetic oligonucleotide
  Antisense strand to SEQ ID NO: 1768939
aucuuggagauggaaccca

SEQ ID NO: 1768941 - RNA, 19 nt, Artificial Sequence
  Description of Artificial Sequence: Synthetic oligonucleotide
  Sense strand starting at position 1264 of SEQ ID NO: 1562733
cugcauuccacagggaaag

SEQ ID NO: 1768942 - RNA, 19 nt, Artificial Sequence
  Description of Artificial Sequence: Synthetic oligonucleotide
  Antisense strand to SEQ ID NO: 1768941
cuuucccuguggaaugcag

SEQ ID NO: 1768943 - RNA, 19 nt, Artificial Sequence
  Description of Artificial Sequence: Synthetic oligonucleotide
  Sense strand starting at position 1329 of SEQ ID NO: 1562733
cugccaucauuguuaucau

SEQ ID NO: 1768944 - RNA, 19 nt, Artificial Sequence
  Description of Artificial Sequence: Synthetic oligonucleotide
  Antisense strand to SEQ ID NO: 1768943
augauaacaaugauggcag

SEQ ID NO: 1768945 - RNA, 19 nt, Artificial Sequence
  Description of Artificial Sequence: Synthetic oligonucleotide
  Sense strand starting at position 1347 of SEQ ID NO: 1562733
ucauuaucaucauuacguu

SEQ ID NO: 1768946 - RNA, 19 nt, Artificial Sequence
  Description of Artificial Sequence: Synthetic oligonucleotide
  Antisense strand to SEQ ID NO: 1768945
aacguaaugaugauaauga

SEQ ID NO: 1768947 - RNA, 19 nt, Artificial Sequence
  Description of Artificial Sequence: Synthetic oligonucleotide
  Sense strand starting at position 1432 of SEQ ID NO: 1562733
agccaaguccagggaugau

SEQ ID NO: 1768948 - RNA, 19 nt, Artificial Sequence
  Description of Artificial Sequence: Synthetic oligonucleotide
  Antisense strand to SEQ ID NO: 1768947
aucaucccuggacuuggcu

SEQ ID NO: 1768949 - RNA, 19 nt, Artificial Sequence
  Description of Artificial Sequence: Synthetic oligonucleotide
  Sense strand starting at position 1441 of SEQ ID NO: 1562733
cagggaugaucucaaugua

SEQ ID NO: 1768950 - RNA, 19 nt, Artificial Sequence
  Description of Artificial Sequence: Synthetic oligonucleotide
  Antisense strand to SEQ ID NO: 1768949
uacauugagaucaucccug

SEQ ID NO: 1768951 - RNA, 19 nt, Artificial Sequence
  Description of Artificial Sequence: Synthetic oligonucleotide
  Sense strand starting at position 1677 of SEQ ID NO: 1562733
cuagauuacgcccaucaca

SEQ ID NO: 1768952 - RNA, 19 nt, Artificial Sequence
  Description of Artificial Sequence: Synthetic oligonucleotide
  Antisense strand to SEQ ID NO: 1768951
ugugaugggcguaaucuag

SEQ ID NO: 1768953 - RNA, 19 nt, Artificial Sequence
  Description of Artificial Sequence: Synthetic oligonucleotide
  Sense strand starting at position 1746 of SEQ ID NO: 1562733
uccuguuuagcugaacuga

SEQ ID NO: 1768954 - RNA, 19 nt, Artificial Sequence
  Description of Artificial Sequence: Synthetic oligonucleotide
  Antisense strand to SEQ ID NO: 1768953
ucaguucagcuaaacagga

SEQ ID NO: 1768955 - RNA, 19 nt, Artificial Sequence
  Description of Artificial Sequence: Synthetic oligonucleotide
  Sense strand starting at position 2002 of SEQ ID NO: 1562733
cugcgaucacugggagaca

SEQ ID NO: 1768956 - RNA, 19 nt, Artificial Sequence
  Description of Artificial Sequence: Synthetic oligonucleotide
  Antisense strand to SEQ ID NO: 1768955
ugucucccagugaucgcag

SEQ ID NO: 1768957 - RNA, 19 nt, Artificial Sequence
  Description of Artificial Sequence: Synthetic oligonucleotide
  Sense strand starting at position 2067 of SEQ ID NO: 1562733
acuccaguggugugaauau

SEQ ID NO: 1768958 - RNA, 19 nt, Artificial Sequence
  Description of Artificial Sequence: Synthetic oligonucleotide
  Antisense strand to SEQ ID NO: 1768957
auauucacaccacuggagu

SEQ ID NO: 1768959 - RNA, 19 nt, Artificial Sequence
  Description of Artificial Sequence: Synthetic oligonucleotide
  Sense strand starting at position 2074 of SEQ ID NO: 1562733
uggugugaauauucaugag

SEQ ID NO: 1768960 - RNA, 19 nt, Artificial Sequence
  Description of Artificial Sequence: Synthetic oligonucleotide
  Antisense strand to SEQ ID NO: 1768959
cucaugaauauucacacca

SEQ ID NO: 1768961 - RNA, 19 nt, Artificial Sequence
  Description of Artificial Sequence: Synthetic oligonucleotide
  Sense strand starting at position 2233 of SEQ ID NO: 1562733
acagaaagauuccagguau

SEQ ID NO: 1768962 - RNA, 19 nt, Artificial Sequence
  Description of Artificial Sequence: Synthetic oligonucleotide
  Antisense strand to SEQ ID NO: 1768961
auaccuggaaucuuucugu

SEQ ID NO: 1768963 - RNA, 19 nt, Artificial Sequence
  Description of Artificial Sequence: Synthetic oligonucleotide
  Sense strand starting at position 2244 of SEQ ID NO: 1562733
ccagguauccuugggccaa

SEQ ID NO: 1768964 - RNA, 19 nt, Artificial Sequence
  Description of Artificial Sequence: Synthetic oligonucleotide
  Antisense strand to SEQ ID NO: 1768963
uuggcccaaggauaccugg

SEQ ID NO: 1768965 - RNA, 19 nt, Artificial Sequence
  Description of Artificial Sequence: Synthetic oligonucleotide
  Sense strand starting at position 2384 of SEQ ID NO: 1562733
auuuaagucucacagcuga

SEQ ID NO: 1768966 - RNA, 19 nt, Artificial Sequence
  Description of Artificial Sequence: Synthetic oligonucleotide
  Antisense strand to SEQ ID NO: 1768965
ucagcugugagacuuaaau

SEQ ID NO: 1768967 - RNA, 19 nt, Artificial Sequence
  Description of Artificial Sequence: Synthetic oligonucleotide
  Sense strand starting at position 2425 of SEQ ID NO: 1562733
cuacccuccugguaaagaa

SEQ ID NO: 1768968 - RNA, 19 nt, Artificial Sequence
  Description of Artificial Sequence: Synthetic oligonucleotide
  Antisense strand to SEQ ID NO: 1768967
uucuuuaccaggaggguag

SEQ ID NO: 1768969 - RNA, 19 nt, Artificial Sequence
  Description of Artificial Sequence: Synthetic oligonucleotide
  Sense strand starting at position 2510 of SEQ ID NO: 1562733
ggaguacauacgcagacuu

SEQ ID NO: 1768970 - RNA, 19 nt, Artificial Sequence
  Description of Artificial Sequence: Synthetic oligonucleotide
  Antisense strand to SEQ ID NO: 1768969
aagucugcguauguacucc

SEQ ID NO: 1768971 - RNA, 19 nt, Artificial Sequence
  Description of Artificial Sequence: Synthetic oligonucleotide
  Sense strand starting at position 2665 of SEQ ID NO: 1562733
agaagaugagucuggcaag

SEQ ID NO: 1768972 - RNA, 19 nt, Artificial Sequence
  Description of Artificial Sequence: Synthetic oligonucleotide
  Antisense strand to SEQ ID NO: 1768971
cuugccagacucaucuucu

SEQ ID NO: 1768973 - RNA, 19 nt, Artificial Sequence
  Description of Artificial Sequence: Synthetic oligonucleotide
  Sense strand starting at position 2668 of SEQ ID NO: 1562733
agaugagucuggcaagauu

SEQ ID NO: 1768974 - RNA, 19 nt, Artificial Sequence
  Description of Artificial Sequence: Synthetic oligonucleotide
  Antisense strand to SEQ ID NO: 1768973
aaucuugccagacucaucu

SEQ ID NO: 1768975 - RNA, 19 nt, Artificial Sequence
  Description of Artificial Sequence: Synthetic oligonucleotide
  Sense strand starting at position 2728 of SEQ ID NO: 1562733
ugccucuaucccuggguga

SEQ ID NO: 1768976 - RNA, 19 nt, Artificial Sequence
  Description of Artificial Sequence: Synthetic oligonucleotide
  Antisense strand to SEQ ID NO: 1768975
ucacccagggauagaggca

SEQ ID NO: 1768977 - RNA, 19 nt, Artificial Sequence
  Description of Artificial Sequence: Synthetic oligonucleotide
  Sense strand starting at position 2769 of SEQ ID NO: 1562733
cgaccagcucugcaggauu

SEQ ID NO: 1768978 - RNA, 19 nt, Artificial Sequence
  Description of Artificial Sequence: Synthetic oligonucleotide
  Antisense strand to SEQ ID NO: 1768977
aauccugcagagcuggucg

SEQ ID NO: 1768979 - RNA, 19 nt, Artificial Sequence
  Description of Artificial Sequence: Synthetic oligonucleotide
  Sense strand starting at position 2791 of SEQ ID NO: 1562733
gcugauuggagaugcagau

SEQ ID NO: 1768980 - RNA, 19 nt, Artificial Sequence
  Description of Artificial Sequence: Synthetic oligonucleotide
  Antisense strand to SEQ ID NO: 1768979
aucugcaucuccaaucagc

SEQ ID NO: 1768981 - RNA, 19 nt, Artificial Sequence
  Description of Artificial Sequence: Synthetic oligonucleotide
  Sense strand starting at position 2942 of SEQ ID NO: 1562733
gucuccuugugcccagaaa

SEQ ID NO: 1768982 - RNA, 19 nt, Artificial Sequence
  Description of Artificial Sequence: Synthetic oligonucleotide
  Antisense strand to SEQ ID NO: 1768981
uuucugggcacaaggagac

SEQ ID NO: 1768983 - RNA, 19 nt, Artificial Sequence
  Description of Artificial Sequence: Synthetic oligonucleotide
  Sense strand starting at position 2943 of SEQ ID NO: 1562733
ucuccuugugcccagaaau

SEQ ID NO: 1768984 - RNA, 19 nt, Artificial Sequence
  Description of Artificial Sequence: Synthetic oligonucleotide
  Antisense strand to SEQ ID NO: 1768983
auuucugggcacaaggaga

SEQ ID NO: 1768985 - RNA, 19 nt, Artificial Sequence
  Description of Artificial Sequence: Synthetic oligonucleotide
  Sense strand starting at position 3281 of SEQ ID NO: 1562733
ccagguuugggacauggua

SEQ ID NO: 1768986 - RNA, 19 nt, Artificial Sequence
  Description of Artificial Sequence: Synthetic oligonucleotide
  Antisense strand to SEQ ID NO: 1768985
uaccaugucccaaaccugg

SEQ ID NO: 1768987 - RNA, 19 nt, Artificial Sequence
  Description of Artificial Sequence: Synthetic oligonucleotide
  Sense strand starting at position 3367 of SEQ ID NO: 1562733
cagcuuucugacggugagu

SEQ ID NO: 1768988 - RNA, 19 nt, Artificial Sequence
  Description of Artificial Sequence: Synthetic oligonucleotide
  Antisense strand to SEQ ID NO: 1768987
acucaccgucagaaagcug

SEQ ID NO: 1768989 - RNA, 19 nt, Artificial Sequence
  Description of Artificial Sequence: Synthetic oligonucleotide
  Sense strand starting at position 3369 of SEQ ID NO: 1562733
gcuuucugacggugaguca

SEQ ID NO: 1768990 - RNA, 19 nt, Artificial Sequence
  Description of Artificial Sequence: Synthetic oligonucleotide
  Antisense strand to SEQ ID NO: 1768989
ugacucaccgucagaaagc

SEQ ID NO: 1768991 - RNA, 19 nt, Artificial Sequence
  Description of Artificial Sequence: Synthetic oligonucleotide
  Sense strand starting at position 3421 of SEQ ID NO: 1562733
guuuauuagcguggacucu

SEQ ID NO: 1768992 - RNA, 19 nt, Artificial Sequence
  Description of Artificial Sequence: Synthetic oligonucleotide
  Antisense strand to SEQ ID NO: 1768991
agaguccacgcuaauaaac

SEQ ID NO: 1768993 - RNA, 19 nt, Artificial Sequence
  Description of Artificial Sequence: Synthetic oligonucleotide
  Sense strand starting at position 3469 of SEQ ID NO: 1562733
ggaccugucaugcaucaug

SEQ ID NO: 1768994 - RNA, 19 nt, Artificial Sequence
  Description of Artificial Sequence: Synthetic oligonucleotide
  Antisense strand to SEQ ID NO: 1768993
caugaugcaugacaggucc

SEQ ID NO: 1768995 - RNA, 19 nt, Artificial Sequence
  Description of Artificial Sequence: Synthetic oligonucleotide
  Sense strand starting at position 3552 of SEQ ID NO: 1562733
ucaucuaggugagagugaa

SEQ ID NO: 1768996 - RNA, 19 nt, Artificial Sequence
  Description of Artificial Sequence: Synthetic oligonucleotide
  Antisense strand to SEQ ID NO: 1768995
uucacucucaccuagauga

SEQ ID NO: 1768997 - RNA, 19 nt, Artificial Sequence
  Description of Artificial Sequence: Synthetic oligonucleotide
  Sense strand starting at position 3592 of SEQ ID NO: 1562733
gugagaucguggcugagga

SEQ ID NO: 1768998 - RNA, 19 nt, Artificial Sequence
  Description of Artificial Sequence: Synthetic oligonucleotide
  Antisense strand to SEQ ID NO: 1768997
uccucagccacgaucucac

SEQ ID NO: 1768999 - RNA, 19 nt, Artificial Sequence
  Description of Artificial Sequence: Synthetic oligonucleotide
  Sense strand starting at position 3632 of SEQ ID NO: 1562733
agcaaagauuuccagagua

SEQ ID NO: 1769000 - RNA, 19 nt, Artificial Sequence
  Description of Artificial Sequence: Synthetic oligonucleotide
  Antisense strand to SEQ ID NO: 1768999
uacucuggaaaucuuugcu

SEQ ID NO: 1769001 - RNA, 19 nt, Artificial Sequence
  Description of Artificial Sequence: Synthetic oligonucleotide
  Sense strand starting at position 3694 of SEQ ID NO: 1562733
ggucucuuuccagaguauu

SEQ ID NO: 1769002 - RNA, 19 nt, Artificial Sequence
  Description of Artificial Sequence: Synthetic oligonucleotide
  Antisense strand to SEQ ID NO: 1769001
aauacucuggaaagagacc

SEQ ID NO: 1769003 - RNA, 19 nt, Artificial Sequence
  Description of Artificial Sequence: Synthetic oligonucleotide
  Sense strand starting at position 3697 of SEQ ID NO: 1562733
cucuuuccagaguauugau

SEQ ID NO: 1769004 - RNA, 19 nt, Artificial Sequence
  Description of Artificial Sequence: Synthetic oligonucleotide
  Antisense strand to SEQ ID NO: 1769003
aucaauacucuggaaagag

SEQ ID NO: 1769005 - RNA, 19 nt, Artificial Sequence
  Description of Artificial Sequence: Synthetic oligonucleotide
  Sense strand starting at position 3706 of SEQ ID NO: 1562733
gaguauugaugauaacauc

SEQ ID NO: 1769006 - RNA, 19 nt, Artificial Sequence
  Description of Artificial Sequence: Synthetic oligonucleotide
  Antisense strand to SEQ ID NO: 1769005
gauguuaucaucaauacuc

SEQ ID NO: 1769007 - RNA, 19 nt, Artificial Sequence
  Description of Artificial Sequence: Synthetic oligonucleotide
  Sense strand starting at position 846 of SEQ ID NO: 1562734
acuuguuauuucuaggauu

SEQ ID NO: 1769008 - RNA, 19 nt, Artificial Sequence
  Description of Artificial Sequence: Synthetic oligonucleotide
  Antisense strand to SEQ ID NO: 1769007
aauccuagaaauaacaagu

SEQ ID NO: 1769009 - RNA, 19 nt, Artificial Sequence
  Description of Artificial Sequence: Synthetic oligonucleotide
  Sense strand starting at position 912 of SEQ ID NO: 1562734
gggucaucagcuggaguga

SEQ ID NO: 1769010 - RNA, 19 nt, Artificial Sequence
  Description of Artificial Sequence: Synthetic oligonucleotide
  Antisense strand to SEQ ID NO: 1769009
ucacuccagcugaugaccc

SEQ ID NO: 1769011 - RNA, 19 nt, Artificial Sequence
  Description of Artificial Sequence: Synthetic oligonucleotide
  Sense strand starting at position 1291 of SEQ ID NO: 1562734
acgcauucgugagcuucuu

SEQ ID NO: 1769012 - RNA, 19 nt, Artificial Sequence
  Description of Artificial Sequence: Synthetic oligonucleotide
  Antisense strand to SEQ ID NO: 1769011
aagaagcucacgaaugcgu

SEQ ID NO: 1769013 - RNA, 19 nt, Artificial Sequence
  Description of Artificial Sequence: Synthetic oligonucleotide
  Sense strand starting at position 1292 of SEQ ID NO: 1562734
cgcauucgugagcuucuuu

SEQ ID NO: 1769014 - RNA, 19 nt, Artificial Sequence
  Description of Artificial Sequence: Synthetic oligonucleotide
  Antisense strand to SEQ ID NO: 1769013
aaagaagcucacgaaugcg

SEQ ID NO: 1769015 - RNA, 19 nt, Artificial Sequence
  Description of Artificial Sequence: Synthetic oligonucleotide
  Sense strand starting at position 1312 of SEQ ID NO: 1562734
gcgauucauuucgcgcuua

SEQ ID NO: 1769016 - RNA, 19 nt, Artificial Sequence
  Description of Artificial Sequence: Synthetic oligonucleotide
  Antisense strand to SEQ ID NO: 1769015
uaagcgcgaaaugaaucgc

SEQ ID NO: 1769017 - RNA, 19 nt, Artificial Sequence
  Description of Artificial Sequence: Synthetic oligonucleotide
  Sense strand starting at position 1377 of SEQ ID NO: 1562734
agaggcguccucuggaagu

SEQ ID NO: 1769018 - RNA, 19 nt, Artificial Sequence
  Description of Artificial Sequence: Synthetic oligonucleotide
  Antisense strand to SEQ ID NO: 1769017
acuuccagaggacgccucu

SEQ ID NO: 1769019 - RNA, 19 nt, Artificial Sequence
  Description of Artificial Sequence: Synthetic oligonucleotide
  Sense strand starting at position 1390 of SEQ ID NO: 1562734
ggaaguucacaguggagga

SEQ ID NO: 1769020 - RNA, 19 nt, Artificial Sequence
  Description of Artificial Sequence: Synthetic oligonucleotide
  Antisense strand to SEQ ID NO: 1769019
uccuccacugugaacuucc

SEQ ID NO: 1769021 - RNA, 19 nt, Artificial Sequence
  Description of Artificial Sequence: Synthetic oligonucleotide
  Sense strand starting at position 1530 of SEQ ID NO: 1562734
uccuaaggccagugaggau

SEQ ID NO: 1769022 - RNA, 19 nt, Artificial Sequence
  Description of Artificial Sequence: Synthetic oligonucleotide
  Antisense strand to SEQ ID NO: 1769021
auccucacuggccuuagga

SEQ ID NO: 1769023 - RNA, 19 nt, Artificial Sequence
  Description of Artificial Sequence: Synthetic oligonucleotide
  Sense strand starting at position 2009 of SEQ ID NO: 1562734
cuggaauccucaggcaaga

SEQ ID NO: 1769024 - RNA, 19 nt, Artificial Sequence
  Description of Artificial Sequence: Synthetic oligonucleotide
  Antisense strand to SEQ ID NO: 1769023
ucuugccugaggauuccag

SEQ ID NO: 1769025 - RNA, 19 nt, Artificial Sequence
  Description of Artificial Sequence: Synthetic oligonucleotide
  Sense strand starting at position 2031 of SEQ ID NO: 1562734
cccaguucugguugcuuga

SEQ ID NO: 1769026 - RNA, 19 nt, Artificial Sequence
  Description of Artificial Sequence: Synthetic oligonucleotide
  Antisense strand to SEQ ID NO: 1769025
ucaagcaaccagaacuggg

SEQ ID NO: 1769027 - RNA, 19 nt, Artificial Sequence
  Description of Artificial Sequence: Synthetic oligonucleotide
  Sense strand starting at position 2096 of SEQ ID NO: 1562734
gcuggaagcucgugggaga

SEQ ID NO: 1769028 - RNA, 19 nt, Artificial Sequence
  Description of Artificial Sequence: Synthetic oligonucleotide
  Antisense strand to SEQ ID NO: 1769027
ucucccacgagcuuccagc

SEQ ID NO: 1769029 - RNA, 19 nt, Artificial Sequence
  Description of Artificial Sequence: Synthetic oligonucleotide
  Sense strand starting at position 2132 of SEQ ID NO: 1562734
gagccaaagucaucgcuga

SEQ ID NO: 1769030 - RNA, 19 nt, Artificial Sequence
  Description of Artificial Sequence: Synthetic oligonucleotide
  Antisense strand to SEQ ID NO: 1769029
ucagcgaugacuuuggcuc

SEQ ID NO: 1769031 - RNA, 19 nt, Artificial Sequence
  Description of Artificial Sequence: Synthetic oligonucleotide
  Sense strand starting at position 2136 of SEQ ID NO: 1562734
caaagucaucgcugagugu

SEQ ID NO: 1769032 - RNA, 19 nt, Artificial Sequence
  Description of Artificial Sequence: Synthetic oligonucleotide
  Antisense strand to SEQ ID NO: 1769031
acacucagcgaugacuuug

SEQ ID NO: 1769033 - RNA, 19 nt, Artificial Sequence
  Description of Artificial Sequence: Synthetic oligonucleotide
  Sense strand starting at position 2162 of SEQ ID NO: 1562734
ugagcaagcucgugguguu

SEQ ID NO: 1769034 - RNA, 19 nt, Artificial Sequence
  Description of Artificial Sequence: Synthetic oligonucleotide
  Antisense strand to SEQ ID NO: 1769033
aacaccacgagcuugcuca

SEQ ID NO: 1769035 - RNA, 19 nt, Artificial Sequence
  Description of Artificial Sequence: Synthetic oligonucleotide
  Sense strand starting at position 2165 of SEQ ID NO: 1562734
gcaagcucgugguguucaa

SEQ ID NO: 1769036 - RNA, 19 nt, Artificial Sequence
  Description of Artificial Sequence: Synthetic oligonucleotide
  Antisense strand to SEQ ID NO: 1769035
uugaacaccacgagcuugc

SEQ ID NO: 1769037 - RNA, 19 nt, Artificial Sequence
  Description of Artificial Sequence: Synthetic oligonucleotide
  Sense strand starting at position 2185 of SEQ ID NO: 1562734
gggugagaguuccucaguu

SEQ ID NO: 1769038 - RNA, 19 nt, Artificial Sequence
  Description of Artificial Sequence: Synthetic oligonucleotide
  Antisense strand to SEQ ID NO: 1769037
aacugaggaacucucaccc

SEQ ID NO: 1769039 - RNA, 19 nt, Artificial Sequence
  Description of Artificial Sequence: Synthetic oligonucleotide
  Sense strand starting at position 2187 of SEQ ID NO: 1562734
gugagaguuccucaguuuc

SEQ ID NO: 1769040 - RNA, 19 nt, Artificial Sequence
  Description of Artificial Sequence: Synthetic oligonucleotide
  Antisense strand to SEQ ID NO: 1769039
gaaacugaggaacucucac

SEQ ID NO: 1769041 - RNA, 19 nt, Artificial Sequence
  Description of Artificial Sequence: Synthetic oligonucleotide
  Sense strand starting at position 2195 of SEQ ID NO: 1562734
uccucaguuuccuaaggaa

SEQ ID NO: 1769042 - RNA, 19 nt, Artificial Sequence
  Description of Artificial Sequence: Synthetic oligonucleotide
  Antisense strand to SEQ ID NO: 1769041
uuccuuaggaaacugagga

SEQ ID NO: 1769043 - RNA, 19 nt, Artificial Sequence
  Description of Artificial Sequence: Synthetic oligonucleotide
  Sense strand starting at position 2220 of SEQ ID NO: 1562734
uggaguccugccuggagga

SEQ ID NO: 1769044 - RNA, 19 nt, Artificial Sequence
  Description of Artificial Sequence: Synthetic oligonucleotide
  Antisense strand to SEQ ID NO: 1769043
uccuccaggcaggacucca

SEQ ID NO: 1769045 - RNA, 19 nt, Artificial Sequence
  Description of Artificial Sequence: Synthetic oligonucleotide
  Sense strand starting at position 2291 of SEQ ID NO: 1562734
agcgaaguaggaugaagau

SEQ ID NO: 1769046 - RNA, 19 nt, Artificial Sequence
  Description of Artificial Sequence: Synthetic oligonucleotide
  Antisense strand to SEQ ID NO: 1769045
aucuucauccuacuucgcu

SEQ ID NO: 1769047 - RNA, 19 nt, Artificial Sequence
  Description of Artificial Sequence: Synthetic oligonucleotide
  Sense strand starting at position 2334 of SEQ ID NO: 1562734
cccagaaacugguauguuu

SEQ ID NO: 1769048 - RNA, 19 nt, Artificial Sequence
  Description of Artificial Sequence: Synthetic oligonucleotide
  Antisense strand to SEQ ID NO: 1769047
aaacauaccaguuucuggg

SEQ ID NO: 1769049 - RNA, 19 nt, Artificial Sequence
  Description of Artificial Sequence: Synthetic oligonucleotide
  Sense strand starting at position 2406 of SEQ ID NO: 1562734
ggcuuucucuggcuacaag

SEQ ID NO: 1769050 - RNA, 19 nt, Artificial Sequence
  Description of Artificial Sequence: Synthetic oligonucleotide
  Antisense strand to SEQ ID NO: 1769049
cuuguagccagagaaagcc

SEQ ID NO: 1769051 - RNA, 19 nt, Artificial Sequence
  Description of Artificial Sequence: Synthetic oligonucleotide
  Sense strand starting at position 2445 of SEQ ID NO: 1562734
ggguaacaucccugaguca

SEQ ID NO: 1769052 - RNA, 19 nt, Artificial Sequence
  Description of Artificial Sequence: Synthetic oligonucleotide
  Antisense strand to SEQ ID NO: 1769051
ugacucagggauguuaccc

SEQ ID NO: 1769053 - RNA, 19 nt, Artificial Sequence
  Description of Artificial Sequence: Synthetic oligonucleotide
  Sense strand starting at position 2446 of SEQ ID NO: 1562734
gguaacaucccugagucau

SEQ ID NO: 1769054 - RNA, 19 nt, Artificial Sequence
  Description of Artificial Sequence: Synthetic oligonucleotide
  Antisense strand to SEQ ID NO: 1769053
augacucagggauguuacc

SEQ ID NO: 1769055 - RNA, 19 nt, Artificial Sequence
  Description of Artificial Sequence: Synthetic oligonucleotide
  Sense strand starting at position 2454 of SEQ ID NO: 1562734
cccugagucauuggagggu

SEQ ID NO: 1769056 - RNA, 19 nt, Artificial Sequence
  Description of Artificial Sequence: Synthetic oligonucleotide
  Antisense strand to SEQ ID NO: 1769055
acccuccaaugacucaggg

SEQ ID NO: 1769057 - RNA, 19 nt, Artificial Sequence
  Description of Artificial Sequence: Synthetic oligonucleotide
  Sense strand starting at position 2470 of SEQ ID NO: 1562734
gguccaguauagugagauc

SEQ ID NO: 1769058 - RNA, 19 nt, Artificial Sequence
  Description of Artificial Sequence: Synthetic oligonucleotide
  Antisense strand to SEQ ID NO: 1769057
gaucucacuauacuggacc

SEQ ID NO: 1769059 - RNA, 19 nt, Artificial Sequence
  Description of Artificial Sequence: Synthetic oligonucleotide
  Sense strand starting at position 2473 of SEQ ID NO: 1562734
ccaguauagugagaucauc

SEQ ID NO: 1769060 - RNA, 19 nt, Artificial Sequence
  Description of Artificial Sequence: Synthetic oligonucleotide
  Antisense strand to SEQ ID NO: 1769059
gaugaucucacuauacugg

SEQ ID NO: 1769061 - RNA, 19 nt, Artificial Sequence
  Description of Artificial Sequence: Synthetic oligonucleotide
  Sense strand starting at position 2576 of SEQ ID NO: 1562734
aggauaauaucacacucga

SEQ ID NO: 1769062 - RNA, 19 nt, Artificial Sequence
  Description of Artificial Sequence: Synthetic oligonucleotide
  Antisense strand to SEQ ID NO: 1769061
ucgagugugauauuauccu

SEQ ID NO: 1769063 - RNA, 19 nt, Artificial Sequence
  Description of Artificial Sequence: Synthetic oligonucleotide
  Sense strand starting at position 2671 of SEQ ID NO: 1562734
gguggugccucugacaacu

SEQ ID NO: 1769064 - RNA, 19 nt, Artificial Sequence
  Description of Artificial Sequence: Synthetic oligonucleotide
  Antisense strand to SEQ ID NO: 1769063
aguugucagaggcaccacc

SEQ ID NO: 1769065 - RNA, 19 nt, Artificial Sequence
  Description of Artificial Sequence: Synthetic oligonucleotide
  Sense strand starting at position 2928 of SEQ ID NO: 1562734
gggcuugauccugggugga

SEQ ID NO: 1769066 - RNA, 19 nt, Artificial Sequence
  Description of Artificial Sequence: Synthetic oligonucleotide
  Antisense strand to SEQ ID NO: 1769065
uccacccaggaucaagccc

SEQ ID NO: 1769067 - RNA, 19 nt, Artificial Sequence
  Description of Artificial Sequence: Synthetic oligonucleotide
  Sense strand starting at position 2930 of SEQ ID NO: 1562734
gcuugauccuggguggaau

SEQ ID NO: 1769068 - RNA, 19 nt, Artificial Sequence
  Description of Artificial Sequence: Synthetic oligonucleotide
  Antisense strand to SEQ ID NO: 1769067
auuccacccaggaucaagc

SEQ ID NO: 1769069 - RNA, 19 nt, Artificial Sequence
  Description of Artificial Sequence: Synthetic oligonucleotide
  Sense strand starting at position 3084 of SEQ ID NO: 1562734
gggcacucccucuggagua

SEQ ID NO: 1769070 - RNA, 19 nt, Artificial Sequence
  Description of Artificial Sequence: Synthetic oligonucleotide
  Antisense strand to SEQ ID NO: 1769069
uacuccagagggagugccc

SEQ ID NO: 1769071 - RNA, 19 nt, Artificial Sequence
  Description of Artificial Sequence: Synthetic oligonucleotide
  Sense strand starting at position 3224 of SEQ ID NO: 1562734
ugaucucgcucucugugau

SEQ ID NO: 1769072 - RNA, 19 nt, Artificial Sequence
  Description of Artificial Sequence: Synthetic oligonucleotide
  Antisense strand to SEQ ID NO: 1769071
aucacagagagcgagauca

SEQ ID NO: 1769073 - RNA, 19 nt, Artificial Sequence
  Description of Artificial Sequence: Synthetic oligonucleotide
  Sense strand starting at position 3225 of SEQ ID NO: 1562734
gaucucgcucucugugauu

SEQ ID NO: 1769074 - RNA, 19 nt, Artificial Sequence
  Description of Artificial Sequence: Synthetic oligonucleotide
  Antisense strand to SEQ ID NO: 1769073
aaucacagagagcgagauc

SEQ ID NO: 1769075 - RNA, 19 nt, Artificial Sequence
  Description of Artificial Sequence: Synthetic oligonucleotide
  Sense strand starting at position 3234 of SEQ ID NO: 1562734
cucugugauuugcuuugua

SEQ ID NO: 1769076 - RNA, 19 nt, Artificial Sequence
  Description of Artificial Sequence: Synthetic oligonucleotide
  Antisense strand to SEQ ID NO: 1769075
uacaaagcaaaucacagag

SEQ ID NO: 1769077 - RNA, 19 nt, Artificial Sequence
  Description of Artificial Sequence: Synthetic oligonucleotide
  Sense strand starting at position 3237 of SEQ ID NO: 1562734
ugugauuugcuuuguaguu

SEQ ID NO: 1769078 - RNA, 19 nt, Artificial Sequence
  Description of Artificial Sequence: Synthetic oligonucleotide
  Antisense strand to SEQ ID NO: 1769077
aacuacaaagcaaaucaca

SEQ ID NO: 1769079 - RNA, 19 nt, Artificial Sequence
  Description of Artificial Sequence: Synthetic oligonucleotide
  Sense strand starting at position 3238 of SEQ ID NO: 1562734
gugauuugcuuuguaguua

SEQ ID NO: 1769080 - RNA, 19 nt, Artificial Sequence
  Description of Artificial Sequence: Synthetic oligonucleotide
  Antisense strand to SEQ ID NO: 1769079
uaacuacaaagcaaaucac

SEQ ID NO: 1769081 - RNA, 19 nt, Artificial Sequence
  Description of Artificial Sequence: Synthetic oligonucleotide
  Sense strand starting at position 103 of SEQ ID NO: 1562735
gguauacauuccucgguuu

SEQ ID NO: 1769082 - RNA, 19 nt, Artificial Sequence
  Description of Artificial Sequence: Synthetic oligonucleotide
  Antisense strand to SEQ ID NO: 1769081
aaaccgaggaauguauacc

SEQ ID NO: 1769083 - RNA, 19 nt, Artificial Sequence
  Description of Artificial Sequence: Synthetic oligonucleotide
  Sense strand starting at position 115 of SEQ ID NO: 1562735
ucgguuuggugcucaacau

SEQ ID NO: 1769084 - RNA, 19 nt, Artificial Sequence
  Description of Artificial Sequence: Synthetic oligonucleotide
  Antisense strand to SEQ ID NO: 1769083
auguugagcaccaaaccga

SEQ ID NO: 1769085 - RNA, 19 nt, Artificial Sequence
  Description of Artificial Sequence: Synthetic oligonucleotide
  Sense strand starting at position 151 of SEQ ID NO: 1562735
ggcagacuguucugcagau

SEQ ID NO: 1769086 - RNA, 19 nt, Artificial Sequence
  Description of Artificial Sequence: Synthetic oligonucleotide
  Antisense strand to SEQ ID NO: 1769085
aucugcagaacagucugcc

SEQ ID NO: 1769087 - RNA, 19 nt, Artificial Sequence
  Description of Artificial Sequence: Synthetic oligonucleotide
  Sense strand starting at position 152 of SEQ ID NO: 1562735
gcagacuguucugcagaua

SEQ ID NO: 1769088 - RNA, 19 nt, Artificial Sequence
  Description of Artificial Sequence: Synthetic oligonucleotide
  Antisense strand to SEQ ID NO: 1769087
uaucugcagaacagucugc

SEQ ID NO: 1769089 - RNA, 19 nt, Artificial Sequence
  Description of Artificial Sequence: Synthetic oligonucleotide
  Sense strand starting at position 153 of SEQ ID NO: 1562735
cagacuguucugcagauag

SEQ ID NO: 1769090 - RNA, 19 nt, Artificial Sequence
  Description of Artificial Sequence: Synthetic oligonucleotide
  Antisense strand to SEQ ID NO: 1769089
cuaucugcagaacagucug

SEQ ID NO: 1769091 - RNA, 19 nt, Artificial Sequence
  Description of Artificial Sequence: Synthetic oligonucleotide
  Sense strand starting at position 155 of SEQ ID NO: 1562735
gacuguucugcagauagca

SEQ ID NO: 1769092 - RNA, 19 nt, Artificial Sequence
  Description of Artificial Sequence: Synthetic oligonucleotide
  Antisense strand to SEQ ID NO: 1769091
ugcuaucugcagaacaguc

SEQ ID NO: 1769093 - RNA, 19 nt, Artificial Sequence
  Description of Artificial Sequence: Synthetic oligonucleotide
  Sense strand starting at position 948 of SEQ ID NO: 1562735
ccaguaagcgcucaguaca

SEQ ID NO: 1769094 - RNA, 19 nt, Artificial Sequence
  Description of Artificial Sequence: Synthetic oligonucleotide
  Antisense strand to SEQ ID NO: 1769093
uguacugagcgcuuacugg

SEQ ID NO: 1769095 - RNA, 19 nt, Artificial Sequence
  Description of Artificial Sequence: Synthetic oligonucleotide
  Sense strand starting at position 951 of SEQ ID NO: 1562735
guaagcgcucaguacaaau

SEQ ID NO: 1769096 - RNA, 19 nt, Artificial Sequence
  Description of Artificial Sequence: Synthetic oligonucleotide
  Antisense strand to SEQ ID NO: 1769095
auuuguacugagcgcuuac

SEQ ID NO: 1769097 - RNA, 19 nt, Artificial Sequence
  Description of Artificial Sequence: Synthetic oligonucleotide
  Sense strand starting at position 953 of SEQ ID NO: 1562735
aagcgcucaguacaaauua

SEQ ID NO: 1769098 - RNA, 19 nt, Artificial Sequence
  Description of Artificial Sequence: Synthetic oligonucleotide
  Antisense strand to SEQ ID NO: 1769097
uaauuuguacugagcgcuu

SEQ ID NO: 1769099 - RNA, 19 nt, Artificial Sequence
  Description of Artificial Sequence: Synthetic oligonucleotide
  Sense strand starting at position 993 of SEQ ID NO: 1562735
gucugucacucaggccaaa

SEQ ID NO: 1769100 - RNA, 19 nt, Artificial Sequence
  Description of Artificial Sequence: Synthetic oligonucleotide
  Antisense strand to SEQ ID NO: 1769099
uuuggccugagugacagac

SEQ ID NO: 1769101 - RNA, 19 nt, Artificial Sequence
  Description of Artificial Sequence: Synthetic oligonucleotide
  Sense strand starting at position 1004 of SEQ ID NO: 1562735
aggccaaaugccugguuua

SEQ ID NO: 1769102 - RNA, 19 nt, Artificial Sequence
  Description of Artificial Sequence: Synthetic oligonucleotide
  Antisense strand to SEQ ID NO: 1769101
uaaaccaggcauuuggccu

SEQ ID NO: 1769103 - RNA, 19 nt, Artificial Sequence
  Description of Artificial Sequence: Synthetic oligonucleotide
  Sense strand starting at position 1005 of SEQ ID NO: 1562735
ggccaaaugccugguuuac

SEQ ID NO: 1769104 - RNA, 19 nt, Artificial Sequence
  Description of Artificial Sequence: Synthetic oligonucleotide
  Antisense strand to SEQ ID NO: 1769103
guaaaccaggcauuuggcc

SEQ ID NO: 1769105 - RNA, 19 nt, Artificial Sequence
  Description of Artificial Sequence: Synthetic oligonucleotide
  Sense strand starting at position 1007 of SEQ ID NO: 1562735
ccaaaugccugguuuacau

SEQ ID NO: 1769106 - RNA, 19 nt, Artificial Sequence
  Description of Artificial Sequence: Synthetic oligonucleotide
  Antisense strand to SEQ ID NO: 1769105
auguaaaccaggcauuugg

SEQ ID NO: 1769107 - RNA, 19 nt, Artificial Sequence
  Description of Artificial Sequence: Synthetic oligonucleotide
  Sense strand starting at position 1022 of SEQ ID NO: 1562735
acauguuggcucugggaaa

SEQ ID NO: 1769108 - RNA, 19 nt, Artificial Sequence
  Description of Artificial Sequence: Synthetic oligonucleotide
  Antisense strand to SEQ ID NO: 1769107
uuucccagagccaacaugu

SEQ ID NO: 1769109 - RNA, 19 nt, Artificial Sequence
  Description of Artificial Sequence: Synthetic oligonucleotide
  Sense strand starting at position 1023 of SEQ ID NO: 1562735
cauguuggcucugggaaau

SEQ ID NO: 1769110 - RNA, 19 nt, Artificial Sequence
  Description of Artificial Sequence: Synthetic oligonucleotide
  Antisense strand to SEQ ID NO: 1769109
auuucccagagccaacaug

SEQ ID NO: 1769111 - RNA, 19 nt, Artificial Sequence
  Description of Artificial Sequence: Synthetic oligonucleotide
  Sense strand starting at position 1052 of SEQ ID NO: 1562735
caaguuuccucaucugcga

SEQ ID NO: 1769112 - RNA, 19 nt, Artificial Sequence
  Description of Artificial Sequence: Synthetic oligonucleotide
  Antisense strand to SEQ ID NO: 1769111
ucgcagaugaggaaacuug

SEQ ID NO: 1769113 - RNA, 19 nt, Artificial Sequence
  Description of Artificial Sequence: Synthetic oligonucleotide
  Sense strand starting at position 1065 of SEQ ID NO: 1562735
cugcgaaauggguacagua

SEQ ID NO: 1769114 - RNA, 19 nt, Artificial Sequence
  Description of Artificial Sequence: Synthetic oligonucleotide
  Antisense strand to SEQ ID NO: 1769113
uacuguacccauuucgcag

SEQ ID NO: 1769115 - RNA, 19 nt, Artificial Sequence
  Description of Artificial Sequence: Synthetic oligonucleotide
  Sense strand starting at position 1098 of SEQ ID NO: 1562735
auaggacucuaugggauaa

SEQ ID NO: 1769116 - RNA, 19 nt, Artificial Sequence
  Description of Artificial Sequence: Synthetic oligonucleotide
  Antisense strand to SEQ ID NO: 1769115
uuaucccauagaguccuau

SEQ ID NO: 1769117 - RNA, 19 nt, Artificial Sequence
  Description of Artificial Sequence: Synthetic oligonucleotide
  Sense strand starting at position 1100 of SEQ ID NO: 1562735
aggacucuaugggauaauu

SEQ ID NO: 1769118 - RNA, 19 nt, Artificial Sequence
  Description of Artificial Sequence: Synthetic oligonucleotide
  Antisense strand to SEQ ID NO: 1769117
aauuaucccauagaguccu

SEQ ID NO: 1769119 - RNA, 19 nt, Artificial Sequence
  Description of Artificial Sequence: Synthetic oligonucleotide
  Sense strand starting at position 1120 of SEQ ID NO: 1562735
uuauaaauuuaggguccau

SEQ ID NO: 1769120 - RNA, 19 nt, Artificial Sequence
  Description of Artificial Sequence: Synthetic oligonucleotide
  Antisense strand to SEQ ID NO: 1769119
auggacccuaaauuuauaa

SEQ ID NO: 1769121 - RNA, 19 nt, Artificial Sequence
  Description of Artificial Sequence: Synthetic oligonucleotide
  Sense strand starting at position 1306 of SEQ ID NO: 1562735
ggguuaugugcauggcuua

SEQ ID NO: 1769122 - RNA, 19 nt, Artificial Sequence
  Description of Artificial Sequence: Synthetic oligonucleotide
  Antisense strand to SEQ ID NO: 1769121
uaagccaugcacauaaccc

SEQ ID NO: 1769123 - RNA, 19 nt, Artificial Sequence
  Description of Artificial Sequence: Synthetic oligonucleotide
  Sense strand starting at position 1399 of SEQ ID NO: 1562735
cgucauuaacgacauagca

SEQ ID NO: 1769124 - RNA, 19 nt, Artificial Sequence
  Description of Artificial Sequence: Synthetic oligonucleotide
  Antisense strand to SEQ ID NO: 1769123
ugcuaugucguuaaugacg

SEQ ID NO: 1769125 - RNA, 19 nt, Artificial Sequence
  Description of Artificial Sequence: Synthetic oligonucleotide
  Sense strand starting at position 2098 of SEQ ID NO: 1562735
ccgcgaucgggccaggaau

SEQ ID NO: 1769126 - RNA, 19 nt, Artificial Sequence
  Description of Artificial Sequence: Synthetic oligonucleotide
  Antisense strand to SEQ ID NO: 1769125
auuccuggcccgaucgcgg

SEQ ID NO: 1769127 - RNA, 19 nt, Artificial Sequence
  Description of Artificial Sequence: Synthetic oligonucleotide
  Sense strand starting at position 2313 of SEQ ID NO: 1562735
gccuguucccaagaugaag

SEQ ID NO: 1769128 - RNA, 19 nt, Artificial Sequence
  Description of Artificial Sequence: Synthetic oligonucleotide
  Antisense strand to SEQ ID NO: 1769127
cuucaucuugggaacaggc

SEQ ID NO: 1769129 - RNA, 19 nt, Artificial Sequence
  Description of Artificial Sequence: Synthetic oligonucleotide
  Sense strand starting at position 2445 of SEQ ID NO: 1562735
ggcuccuugugcucacuga

SEQ ID NO: 1769130 - RNA, 19 nt, Artificial Sequence
  Description of Artificial Sequence: Synthetic oligonucleotide
  Antisense strand to SEQ ID NO: 1769129
ucagugagcacaaggagcc

SEQ ID NO: 1769131 - RNA, 19 nt, Artificial Sequence
  Description of Artificial Sequence: Synthetic oligonucleotide
  Sense strand starting at position 2446 of SEQ ID NO: 1562735
gcuccuugugcucacugaa

SEQ ID NO: 1769132 - RNA, 19 nt, Artificial Sequence
  Description of Artificial Sequence: Synthetic oligonucleotide
  Antisense strand to SEQ ID NO: 1769131
uucagugagcacaaggagc

SEQ ID NO: 1769133 - RNA, 19 nt, Artificial Sequence
  Description of Artificial Sequence: Synthetic oligonucleotide
  Sense strand starting at position 2548 of SEQ ID NO: 1562735
gccggaguuccgcacagaa

SEQ ID NO: 1769134 - RNA, 19 nt, Artificial Sequence
  Description of Artificial Sequence: Synthetic oligonucleotide
  Antisense strand to SEQ ID NO: 1769133
uucugugcggaacuccggc

SEQ ID NO: 1769135 - RNA, 19 nt, Artificial Sequence
  Description of Artificial Sequence: Synthetic oligonucleotide
  Sense strand starting at position 2550 of SEQ ID NO: 1562735
cggaguuccgcacagaaca

SEQ ID NO: 1769136 - RNA, 19 nt, Artificial Sequence
  Description of Artificial Sequence: Synthetic oligonucleotide
  Antisense strand to SEQ ID NO: 1769135
uguucugugcggaacuccg

SEQ ID NO: 1769137 - RNA, 19 nt, Artificial Sequence
  Description of Artificial Sequence: Synthetic oligonucleotide
  Sense strand starting at position 2780 of SEQ ID NO: 1562735
ggcucagagcuccaauaaa

SEQ ID NO: 1769138 - RNA, 19 nt, Artificial Sequence
  Description of Artificial Sequence: Synthetic oligonucleotide
  Antisense strand to SEQ ID NO: 1769137
uuuauuggagcucugagcc

SEQ ID NO: 1769139 - RNA, 19 nt, Artificial Sequence
  Description of Artificial Sequence: Synthetic oligonucleotide
  Sense strand starting at position 2829 of SEQ ID NO: 1562735
gcgcccuugaccugaauga

SEQ ID NO: 1769140 - RNA, 19 nt, Artificial Sequence
  Description of Artificial Sequence: Synthetic oligonucleotide
  Antisense strand to SEQ ID NO: 1769139
ucauucaggucaagggcgc

SEQ ID NO: 1769141 - RNA, 19 nt, Artificial Sequence
  Description of Artificial Sequence: Synthetic oligonucleotide
  Sense strand starting at position 2830 of SEQ ID NO: 1562735
cgcccuugaccugaaugaa

SEQ ID NO: 1769142 - RNA, 19 nt, Artificial Sequence
  Description of Artificial Sequence: Synthetic oligonucleotide
  Antisense strand to SEQ ID NO: 1769141
uucauucaggucaagggcg

SEQ ID NO: 1769143 - RNA, 19 nt, Artificial Sequence
  Description of Artificial Sequence: Synthetic oligonucleotide
  Sense strand starting at position 2852 of SEQ ID NO: 1562735
gugugucaccucugugaag

SEQ ID NO: 1769144 - RNA, 19 nt, Artificial Sequence
  Description of Artificial Sequence: Synthetic oligonucleotide
  Antisense strand to SEQ ID NO: 1769143
cuucacagaggugacacac

SEQ ID NO: 1769145 - RNA, 19 nt, Artificial Sequence
  Description of Artificial Sequence: Synthetic oligonucleotide
  Sense strand starting at position 2854 of SEQ ID NO: 1562735
gugucaccucugugaagga

SEQ ID NO: 1769146 - RNA, 19 nt, Artificial Sequence
  Description of Artificial Sequence: Synthetic oligonucleotide
  Antisense strand to SEQ ID NO: 1769145
uccuucacagaggugacac

SEQ ID NO: 1769147 - RNA, 19 nt, Artificial Sequence
  Description of Artificial Sequence: Synthetic oligonucleotide
  Sense strand starting at position 2923 of SEQ ID NO: 1562735
auuugaacaugacgauuau

SEQ ID NO: 1769148 - RNA, 19 nt, Artificial Sequence
  Description of Artificial Sequence: Synthetic oligonucleotide
  Antisense strand to SEQ ID NO: 1769147
auaaucgucauguucaaau

SEQ ID NO: 1769149 - RNA, 19 nt, Artificial Sequence
  Description of Artificial Sequence: Synthetic oligonucleotide
  Sense strand starting at position 3024 of SEQ ID NO: 1562735
cccagagaguccuugugac

SEQ ID NO: 1769150 - RNA, 19 nt, Artificial Sequence
  Description of Artificial Sequence: Synthetic oligonucleotide
  Antisense strand to SEQ ID NO: 1769149
gucacaaggacucucuggg

SEQ ID NO: 1769151 - RNA, 19 nt, Artificial Sequence
  Description of Artificial Sequence: Synthetic oligonucleotide
  Sense strand starting at position 3028 of SEQ ID NO: 1562735
gagaguccuugugaccuuu

SEQ ID NO: 1769152 - RNA, 19 nt, Artificial Sequence
  Description of Artificial Sequence: Synthetic oligonucleotide
  Antisense strand to SEQ ID NO: 1769151
aaaggucacaaggacucuc

SEQ ID NO: 1769153 - RNA, 19 nt, Artificial Sequence
  Description of Artificial Sequence: Synthetic oligonucleotide
  Sense strand starting at position 3403 of SEQ ID NO: 1562735
cacuuccuccagugaggaa

SEQ ID NO: 1769154 - RNA, 19 nt, Artificial Sequence
  Description of Artificial Sequence: Synthetic oligonucleotide
  Antisense strand to SEQ ID NO: 1769153
uuccucacuggaggaagug

SEQ ID NO: 1769155 - RNA, 19 nt, Artificial Sequence
  Description of Artificial Sequence: Synthetic oligonucleotide
  Sense strand starting at position 3480 of SEQ ID NO: 1562735
cucuuugggcacuggaaau

SEQ ID NO: 1769156 - RNA, 19 nt, Artificial Sequence
  Description of Artificial Sequence: Synthetic oligonucleotide
  Antisense strand to SEQ ID NO: 1769155
auuuccagugcccaaagag

SEQ ID NO: 1769157 - RNA, 19 nt, Artificial Sequence
  Description of Artificial Sequence: Synthetic oligonucleotide
  Sense strand starting at position 3755 of SEQ ID NO: 1562735
cggcgugcucaagaagacu

SEQ ID NO: 1769158 - RNA, 19 nt, Artificial Sequence
  Description of Artificial Sequence: Synthetic oligonucleotide
  Antisense strand to SEQ ID NO: 1769157
agucuucuugagcacgccg

SEQ ID NO: 1769159 - RNA, 19 nt, Artificial Sequence
  Description of Artificial Sequence: Synthetic oligonucleotide
  Sense strand starting at position 3925 of SEQ ID NO: 1562735
uggcuuaggucuuaacauu

SEQ ID NO: 1769160 - RNA, 19 nt, Artificial Sequence
  Description of Artificial Sequence: Synthetic oligonucleotide
  Antisense strand to SEQ ID NO: 1769159
aauguuaagaccuaagcca

SEQ ID NO: 1769161 - RNA, 19 nt, Artificial Sequence
  Description of Artificial Sequence: Synthetic oligonucleotide
  Sense strand starting at position 60 of SEQ ID NO: 1562736
uccugaagucccuaugugu

SEQ ID NO: 1769162 - RNA, 19 nt, Artificial Sequence
  Description of Artificial Sequence: Synthetic oligonucleotide
  Antisense strand to SEQ ID NO: 1769161
acacauagggacuucagga

SEQ ID NO: 1769163 - RNA, 19 nt, Artificial Sequence
  Description of Artificial Sequence: Synthetic oligonucleotide
  Sense strand starting at position 67 of SEQ ID NO: 1562736
gucccuaugugugcaaaga

SEQ ID NO: 1769164 - RNA, 19 nt, Artificial Sequence
  Description of Artificial Sequence: Synthetic oligonucleotide
  Antisense strand to SEQ ID NO: 1769163
ucuuugcacacauagggac

SEQ ID NO: 1769165 - RNA, 19 nt, Artificial Sequence
  Description of Artificial Sequence: Synthetic oligonucleotide
  Sense strand starting at position 75 of SEQ ID NO: 1562736
gugugcaaagacugagaaa

SEQ ID NO: 1769166 - RNA, 19 nt, Artificial Sequence
  Description of Artificial Sequence: Synthetic oligonucleotide
  Antisense strand to SEQ ID NO: 1769165
uuucucagucuuugcacac

SEQ ID NO: 1769167 - RNA, 19 nt, Artificial Sequence
  Description of Artificial Sequence: Synthetic oligonucleotide
  Sense strand starting at position 109 of SEQ ID NO: 1562736
ccugguggcauugaaacuu

SEQ ID NO: 1769168 - RNA, 19 nt, Artificial Sequence
  Description of Artificial Sequence: Synthetic oligonucleotide
  Antisense strand to SEQ ID NO: 1769167
aaguuucaaugccaccagg

SEQ ID NO: 1769169 - RNA, 19 nt, Artificial Sequence
  Description of Artificial Sequence: Synthetic oligonucleotide
  Sense strand starting at position 184 of SEQ ID NO: 1562736
guuaauuugucuuaugacc

SEQ ID NO: 1769170 - RNA, 19 nt, Artificial Sequence
  Description of Artificial Sequence: Synthetic oligonucleotide
  Antisense strand to SEQ ID NO: 1769169
ggucauaagacaaauuaac

SEQ ID NO: 1769171 - RNA, 19 nt, Artificial Sequence
  Description of Artificial Sequence: Synthetic oligonucleotide
  Sense strand starting at position 269 of SEQ ID NO: 1562736
cggugucuucuguggguua

SEQ ID NO: 1769172 - RNA, 19 nt, Artificial Sequence
  Description of Artificial Sequence: Synthetic oligonucleotide
  Antisense strand to SEQ ID NO: 1769171
uaacccacagaagacaccg

SEQ ID NO: 1769173 - RNA, 19 nt, Artificial Sequence
  Description of Artificial Sequence: Synthetic oligonucleotide
  Sense strand starting at position 274 of SEQ ID NO: 1562736
ucuucuguggguuagcaga

SEQ ID NO: 1769174 - RNA, 19 nt, Artificial Sequence
  Description of Artificial Sequence: Synthetic oligonucleotide
  Antisense strand to SEQ ID NO: 1769173
ucugcuaacccacagaaga

SEQ ID NO: 1769175 - RNA, 19 nt, Artificial Sequence
  Description of Artificial Sequence: Synthetic oligonucleotide
  Sense strand starting at position 288 of SEQ ID NO: 1562736
gcagaagcuuuguaccaca

SEQ ID NO: 1769176 - RNA, 19 nt, Artificial Sequence
  Description of Artificial Sequence: Synthetic oligonucleotide
  Antisense strand to SEQ ID NO: 1769175
ugugguacaaagcuucugc

SEQ ID NO: 1769177 - RNA, 19 nt, Artificial Sequence
  Description of Artificial Sequence: Synthetic oligonucleotide
  Sense strand starting at position 368 of SEQ ID NO: 1562736
gacccagacuucugaagua

SEQ ID NO: 1769178 - RNA, 19 nt, Artificial Sequence
  Description of Artificial Sequence: Synthetic oligonucleotide
  Antisense strand to SEQ ID NO: 1769177
uacuucagaagucuggguc

SEQ ID NO: 1769179 - RNA, 19 nt, Artificial Sequence
  Description of Artificial Sequence: Synthetic oligonucleotide
  Sense strand starting at position 454 of SEQ ID NO: 1562736
acuccaagccugugaggau

SEQ ID NO: 1769180 - RNA, 19 nt, Artificial Sequence
  Description of Artificial Sequence: Synthetic oligonucleotide
  Antisense strand to SEQ ID NO: 1769179
auccucacaggcuuggagu

SEQ ID NO: 1769181 - RNA, 19 nt, Artificial Sequence
  Description of Artificial Sequence: Synthetic oligonucleotide
  Sense strand starting at position 650 of SEQ ID NO: 1562736
cccucagacuccuggaguu

SEQ ID NO: 1769182 - RNA, 19 nt, Artificial Sequence
  Description of Artificial Sequence: Synthetic oligonucleotide
  Antisense strand to SEQ ID NO: 1769181
aacuccaggagucugaggg

SEQ ID NO: 1769183 - RNA, 19 nt, Artificial Sequence
  Description of Artificial Sequence: Synthetic oligonucleotide
  Sense strand starting at position 933 of SEQ ID NO: 1562736
ggagugguggaguaggauu

SEQ ID NO: 1769184 - RNA, 19 nt, Artificial Sequence
  Description of Artificial Sequence: Synthetic oligonucleotide
  Antisense strand to SEQ ID NO: 1769183
aauccuacuccaccacucc

SEQ ID NO: 1769185 - RNA, 19 nt, Artificial Sequence
  Description of Artificial Sequence: Synthetic oligonucleotide
  Sense strand starting at position 1097 of SEQ ID NO: 1562736
ccaccauaagcguguaauc

SEQ ID NO: 1769186 - RNA, 19 nt, Artificial Sequence
  Description of Artificial Sequence: Synthetic oligonucleotide
  Antisense strand to SEQ ID NO: 1769185
gauuacacgcuuauggugg

SEQ ID NO: 1769187 - RNA, 19 nt, Artificial Sequence
  Description of Artificial Sequence: Synthetic oligonucleotide
  Sense strand starting at position 1099 of SEQ ID NO: 1562736
accauaagcguguaauccu

SEQ ID NO: 1769188 - RNA, 19 nt, Artificial Sequence
  Description of Artificial Sequence: Synthetic oligonucleotide
  Antisense strand to SEQ ID NO: 1769187
aggauuacacgcuuauggu

SEQ ID NO: 1769189 - RNA, 19 nt, Artificial Sequence
  Description of Artificial Sequence: Synthetic oligonucleotide
  Sense strand starting at position 1172 of SEQ ID NO: 1562736
uucagcuugguguggagaa

SEQ ID NO: 1769190 - RNA, 19 nt, Artificial Sequence
  Description of Artificial Sequence: Synthetic oligonucleotide
  Antisense strand to SEQ ID NO: 1769189
uucuccacaccaagcugaa

SEQ ID NO: 1769191 - RNA, 19 nt, Artificial Sequence
  Description of Artificial Sequence: Synthetic oligonucleotide
  Sense strand starting at position 1510 of SEQ ID NO: 1562736
auuugacacuacugaguua

SEQ ID NO: 1769192 - RNA, 19 nt, Artificial Sequence
  Description of Artificial Sequence: Synthetic oligonucleotide
  Antisense strand to SEQ ID NO: 1769191
uaacucaguagugucaaau

SEQ ID NO: 1769193 - RNA, 19 nt, Artificial Sequence
  Description of Artificial Sequence: Synthetic oligonucleotide
  Sense strand starting at position 1522 of SEQ ID NO: 1562736
ugaguuaagcauugcccau

SEQ ID NO: 1769194 - RNA, 19 nt, Artificial Sequence
  Description of Artificial Sequence: Synthetic oligonucleotide
  Antisense strand to SEQ ID NO: 1769193
augggcaaugcuuaacuca

SEQ ID NO: 1769195 - RNA, 19 nt, Artificial Sequence
  Description of Artificial Sequence: Synthetic oligonucleotide
  Sense strand starting at position 2307 of SEQ ID NO: 1562736
acacguggguuucaugauu

SEQ ID NO: 1769196 - RNA, 19 nt, Artificial Sequence
  Description of Artificial Sequence: Synthetic oligonucleotide
  Antisense strand to SEQ ID NO: 1769195
aaucaugaaacccacgugu

SEQ ID NO: 1769197 - RNA, 19 nt, Artificial Sequence
  Description of Artificial Sequence: Synthetic oligonucleotide
  Sense strand starting at position 2313 of SEQ ID NO: 1562736
ggguuucaugauugaaguc

SEQ ID NO: 1769198 - RNA, 19 nt, Artificial Sequence
  Description of Artificial Sequence: Synthetic oligonucleotide
  Antisense strand to SEQ ID NO: 1769197
gacuucaaucaugaaaccc

SEQ ID NO: 1769199 - RNA, 19 nt, Artificial Sequence
  Description of Artificial Sequence: Synthetic oligonucleotide
  Sense strand starting at position 2322 of SEQ ID NO: 1562736
gauugaaguccuugagaca

SEQ ID NO: 1769200 - RNA, 19 nt, Artificial Sequence
  Description of Artificial Sequence: Synthetic oligonucleotide
  Antisense strand to SEQ ID NO: 1769199
ugucucaaggacuucaauc

SEQ ID NO: 1769201 - RNA, 19 nt, Artificial Sequence
  Description of Artificial Sequence: Synthetic oligonucleotide
  Sense strand starting at position 2325 of SEQ ID NO: 1562736
ugaaguccuugagacagaa

SEQ ID NO: 1769202 - RNA, 19 nt, Artificial Sequence
  Description of Artificial Sequence: Synthetic oligonucleotide
  Antisense strand to SEQ ID NO: 1769201
uucugucucaaggacuuca

SEQ ID NO: 1769203 - RNA, 19 nt, Artificial Sequence
  Description of Artificial Sequence: Synthetic oligonucleotide
  Sense strand starting at position 2647 of SEQ ID NO: 1562736
cugccugagcgacauacuu

SEQ ID NO: 1769204 - RNA, 19 nt, Artificial Sequence
  Description of Artificial Sequence: Synthetic oligonucleotide
  Antisense strand to SEQ ID NO: 1769203
aaguaugucgcucaggcag

SEQ ID NO: 1769205 - RNA, 19 nt, Artificial Sequence
  Description of Artificial Sequence: Synthetic oligonucleotide
  Sense strand starting at position 2654 of SEQ ID NO: 1562736
agcgacauacuuuggguua

SEQ ID NO: 1769206 - RNA, 19 nt, Artificial Sequence
  Description of Artificial Sequence: Synthetic oligonucleotide
  Antisense strand to SEQ ID NO: 1769205
uaacccaaaguaugucgcu

SEQ ID NO: 1769207 - RNA, 19 nt, Artificial Sequence
  Description of Artificial Sequence: Synthetic oligonucleotide
  Sense strand starting at position 2730 of SEQ ID NO: 1562736
ggaagugcuugagccagua

SEQ ID NO: 1769208 - RNA, 19 nt, Artificial Sequence
  Description of Artificial Sequence: Synthetic oligonucleotide
  Antisense strand to SEQ ID NO: 1769207
uacuggcucaagcacuucc

SEQ ID NO: 1769209 - RNA, 19 nt, Artificial Sequence
  Description of Artificial Sequence: Synthetic oligonucleotide
  Sense strand starting at position 2787 of SEQ ID NO: 1562736
agcugagguucagugagua

SEQ ID NO: 1769210 - RNA, 19 nt, Artificial Sequence
  Description of Artificial Sequence: Synthetic oligonucleotide
  Antisense strand to SEQ ID NO: 1769209
uacucacugaaccucagcu

SEQ ID NO: 1769211 - RNA, 19 nt, Artificial Sequence
  Description of Artificial Sequence: Synthetic oligonucleotide
  Sense strand starting at position 3196 of SEQ ID NO: 1562736
cuugacacauuccugugaa

SEQ ID NO: 1769212 - RNA, 19 nt, Artificial Sequence
  Description of Artificial Sequence: Synthetic oligonucleotide
  Antisense strand to SEQ ID NO: 1769211
uucacaggaaugugucaag

SEQ ID NO: 1769213 - RNA, 19 nt, Artificial Sequence
  Description of Artificial Sequence: Synthetic oligonucleotide
  Sense strand starting at position 3197 of SEQ ID NO: 1562736
uugacacauuccugugaaa

SEQ ID NO: 1769214 - RNA, 19 nt, Artificial Sequence
  Description of Artificial Sequence: Synthetic oligonucleotide
  Antisense strand to SEQ ID NO: 1769213
uuucacaggaaugugucaa

SEQ ID NO: 1769215 - RNA, 19 nt, Artificial Sequence
  Description of Artificial Sequence: Synthetic oligonucleotide
  Sense strand starting at position 3368 of SEQ ID NO: 1562736
cccugauagucucuugaaa

SEQ ID NO: 1769216 - RNA, 19 nt, Artificial Sequence
  Description of Artificial Sequence: Synthetic oligonucleotide
  Antisense strand to SEQ ID NO: 1769215
uuucaagagacuaucaggg

SEQ ID NO: 1769217 - RNA, 19 nt, Artificial Sequence
  Description of Artificial Sequence: Synthetic oligonucleotide
  Sense strand starting at position 3370 of SEQ ID NO: 1562736
cugauagucucuugaaacc

SEQ ID NO: 1769218 - RNA, 19 nt, Artificial Sequence
  Description of Artificial Sequence: Synthetic oligonucleotide
  Antisense strand to SEQ ID NO: 1769217
gguuucaagagacuaucag

SEQ ID NO: 1769219 - RNA, 19 nt, Artificial Sequence
  Description of Artificial Sequence: Synthetic oligonucleotide
  Sense strand starting at position 3527 of SEQ ID NO: 1562736
uuggucaucugccaggaau

SEQ ID NO: 1769220 - RNA, 19 nt, Artificial Sequence
  Description of Artificial Sequence: Synthetic oligonucleotide
  Antisense strand to SEQ ID NO: 1769219
auuccuggcagaugaccaa

SEQ ID NO: 1769221 - RNA, 19 nt, Artificial Sequence
  Description of Artificial Sequence: Synthetic oligonucleotide
  Sense strand starting at position 3529 of SEQ ID NO: 1562736
ggucaucugccaggaauag

SEQ ID NO: 1769222 - RNA, 19 nt, Artificial Sequence
  Description of Artificial Sequence: Synthetic oligonucleotide
  Antisense strand to SEQ ID NO: 1769221
cuauuccuggcagaugacc

SEQ ID NO: 1769223 - RNA, 19 nt, Artificial Sequence
  Description of Artificial Sequence: Synthetic oligonucleotide
  Sense strand starting at position 3539 of SEQ ID NO: 1562736
caggaauagcgcuauuguu

SEQ ID NO: 1769224 - RNA, 19 nt, Artificial Sequence
  Description of Artificial Sequence: Synthetic oligonucleotide
  Antisense strand to SEQ ID NO: 1769223
aacaauagcgcuauuccug

SEQ ID NO: 1769225 - RNA, 19 nt, Artificial Sequence
  Description of Artificial Sequence: Synthetic oligonucleotide
  Sense strand starting at position 3547 of SEQ ID NO: 1562736
gcgcuauuguuugacugga

SEQ ID NO: 1769226 - RNA, 19 nt, Artificial Sequence
  Description of Artificial Sequence: Synthetic oligonucleotide
  Antisense strand to SEQ ID NO: 1769225
uccagucaaacaauagcgc

SEQ ID NO: 1769227 - RNA, 19 nt, Artificial Sequence
  Description of Artificial Sequence: Synthetic oligonucleotide
  Sense strand starting at position 3549 of SEQ ID NO: 1562736
gcuauuguuugacuggaaa

SEQ ID NO: 1769228 - RNA, 19 nt, Artificial Sequence
  Description of Artificial Sequence: Synthetic oligonucleotide
  Antisense strand to SEQ ID NO: 1769227
uuuccagucaaacaauagc

SEQ ID NO: 1769229 - RNA, 19 nt, Artificial Sequence
  Description of Artificial Sequence: Synthetic oligonucleotide
  Sense strand starting at position 3569 of SEQ ID NO: 1562736
gcugcuuccucagcagaag

SEQ ID NO: 1769230 - RNA, 19 nt, Artificial Sequence
  Description of Artificial Sequence: Synthetic oligonucleotide
  Antisense strand to SEQ ID NO: 1769229
cuucugcugaggaagcagc

SEQ ID NO: 1769231 - RNA, 19 nt, Artificial Sequence
  Description of Artificial Sequence: Synthetic oligonucleotide
  Sense strand starting at position 3902 of SEQ ID NO: 1562736
ggacauucguggugcucca

SEQ ID NO: 1769232 - RNA, 19 nt, Artificial Sequence
  Description of Artificial Sequence: Synthetic oligonucleotide
  Antisense strand to SEQ ID NO: 1769231
uggagcaccacgaaugucc

SEQ ID NO: 1769233 - RNA, 19 nt, Artificial Sequence
  Description of Artificial Sequence: Synthetic oligonucleotide
  Sense strand starting at position 3949 of SEQ ID NO: 1562736
agaaucagcucucagaaac

SEQ ID NO: 1769234 - RNA, 19 nt, Artificial Sequence
  Description of Artificial Sequence: Synthetic oligonucleotide
  Antisense strand to SEQ ID NO: 1769233
guuucugagagcugauucu

SEQ ID NO: 1769235 - RNA, 19 nt, Artificial Sequence
  Description of Artificial Sequence: Synthetic oligonucleotide
  Sense strand starting at position 217 of SEQ ID NO: 1562737
gccaccaugcccgauuaaa

SEQ ID NO: 1769236 - RNA, 19 nt, Artificial Sequence
  Description of Artificial Sequence: Synthetic oligonucleotide
  Antisense strand to SEQ ID NO: 1769235
uuuaaucgggcaugguggc

SEQ ID NO: 1769237 - RNA, 19 nt, Artificial Sequence
  Description of Artificial Sequence: Synthetic oligonucleotide
  Sense strand starting at position 367 of SEQ ID NO: 1562737
ccuaaacucuggcuuugaa

SEQ ID NO: 1769238 - RNA, 19 nt, Artificial Sequence
  Description of Artificial Sequence: Synthetic oligonucleotide
  Antisense strand to SEQ ID NO: 1769237
uucaaagccagaguuuagg

SEQ ID NO: 1769239 - RNA, 19 nt, Artificial Sequence
  Description of Artificial Sequence: Synthetic oligonucleotide
  Sense strand starting at position 377 of SEQ ID NO: 1562737
ggcuuugaaucacauucua

SEQ ID NO: 1769240 - RNA, 19 nt, Artificial Sequence
  Description of Artificial Sequence: Synthetic oligonucleotide
  Antisense strand to SEQ ID NO: 1769239
uagaaugugauucaaagcc

SEQ ID NO: 1769241 - RNA, 19 nt, Artificial Sequence
  Description of Artificial Sequence: Synthetic oligonucleotide
  Sense strand starting at position 471 of SEQ ID NO: 1562737
cuugguuuccuugaggguu

SEQ ID NO: 1769242 - RNA, 19 nt, Artificial Sequence
  Description of Artificial Sequence: Synthetic oligonucleotide
  Antisense strand to SEQ ID NO: 1769241
aacccucaaggaaaccaag

SEQ ID NO: 1769243 - RNA, 19 nt, Artificial Sequence
  Description of Artificial Sequence: Synthetic oligonucleotide
  Sense strand starting at position 474 of SEQ ID NO: 1562737
gguuuccuugaggguuaaa

SEQ ID NO: 1769244 - RNA, 19 nt, Artificial Sequence
  Description of Artificial Sequence: Synthetic oligonucleotide
  Antisense strand to SEQ ID NO: 1769243
uuuaacccucaaggaaacc

SEQ ID NO: 1769245 - RNA, 19 nt, Artificial Sequence
  Description of Artificial Sequence: Synthetic oligonucleotide
  Sense strand starting at position 524 of SEQ ID NO: 1562737
ccuggaacuccacaguuua

SEQ ID NO: 1769246 - RNA, 19 nt, Artificial Sequence
  Description of Artificial Sequence: Synthetic oligonucleotide
  Antisense strand to SEQ ID NO: 1769245
uaaacuguggaguuccagg

SEQ ID NO: 1769247 - RNA, 19 nt, Artificial Sequence
  Description of Artificial Sequence: Synthetic oligonucleotide
  Sense strand starting at position 567 of SEQ ID NO: 1562737
aaagguaggugccugagau

SEQ ID NO: 1769248 - RNA, 19 nt, Artificial Sequence
  Description of Artificial Sequence: Synthetic oligonucleotide
  Antisense strand to SEQ ID NO: 1769247
aucucaggcaccuaccuuu

SEQ ID NO: 1769249 - RNA, 19 nt, Artificial Sequence
  Description of Artificial Sequence: Synthetic oligonucleotide
  Sense strand starting at position 568 of SEQ ID NO: 1562737
aagguaggugccugagaua

SEQ ID NO: 1769250 - RNA, 19 nt, Artificial Sequence
  Description of Artificial Sequence: Synthetic oligonucleotide
  Antisense strand to SEQ ID NO: 1769249
uaucucaggcaccuaccuu

SEQ ID NO: 1769251 - RNA, 19 nt, Artificial Sequence
  Description of Artificial Sequence: Synthetic oligonucleotide
  Sense strand starting at position 690 of SEQ ID NO: 1562737
gaacuugggucuccuaauu

SEQ ID NO: 1769252 - RNA, 19 nt, Artificial Sequence
  Description of Artificial Sequence: Synthetic oligonucleotide
  Antisense strand to SEQ ID NO: 1769251
aauuaggagacccaaguuc

SEQ ID NO: 1769253 - RNA, 19 nt, Artificial Sequence
  Description of Artificial Sequence: Synthetic oligonucleotide
  Sense strand starting at position 773 of SEQ ID NO: 1562737
uuuacaaaugagugcaaca

SEQ ID NO: 1769254 - RNA, 19 nt, Artificial Sequence
  Description of Artificial Sequence: Synthetic oligonucleotide
  Antisense strand to SEQ ID NO: 1769253
uguugcacucauuuguaaa

SEQ ID NO: 1769255 - RNA, 19 nt, Artificial Sequence
  Description of Artificial Sequence: Synthetic oligonucleotide
  Sense strand starting at position 807 of SEQ ID NO: 1562737
ugccuauuuccugggcaga

SEQ ID NO: 1769256 - RNA, 19 nt, Artificial Sequence
  Description of Artificial Sequence: Synthetic oligonucleotide
  Antisense strand to SEQ ID NO: 1769255
ucugcccaggaaauaggca

SEQ ID NO: 1769257 - RNA, 19 nt, Artificial Sequence
  Description of Artificial Sequence: Synthetic oligonucleotide
  Sense strand starting at position 843 of SEQ ID NO: 1562737
uguugaugauuaccacuca

SEQ ID NO: 1769258 - RNA, 19 nt, Artificial Sequence
  Description of Artificial Sequence: Synthetic oligonucleotide
  Antisense strand to SEQ ID NO: 1769257
ugagugguaaucaucaaca

SEQ ID NO: 1769259 - RNA, 19 nt, Artificial Sequence
  Description of Artificial Sequence: Synthetic oligonucleotide
  Sense strand starting at position 864 of SEQ ID NO: 1562737
ugaggccugacacgaauaa

SEQ ID NO: 1769260 - RNA, 19 nt, Artificial Sequence
  Description of Artificial Sequence: Synthetic oligonucleotide
  Antisense strand to SEQ ID NO: 1769259
uuauucgugucaggccuca

SEQ ID NO: 1769261 - RNA, 19 nt, Artificial Sequence
  Description of Artificial Sequence: Synthetic oligonucleotide
  Sense strand starting at position 868 of SEQ ID NO: 1562737
gccugacacgaauaaguca

SEQ ID NO: 1769262 - RNA, 19 nt, Artificial Sequence
  Description of Artificial Sequence: Synthetic oligonucleotide
  Antisense strand to SEQ ID NO: 1769261
ugacuuauucgugucaggc

SEQ ID NO: 1769263 - RNA, 19 nt, Artificial Sequence
  Description of Artificial Sequence: Synthetic oligonucleotide
  Sense strand starting at position 875 of SEQ ID NO: 1562737
acgaauaagucagguguaa

SEQ ID NO: 1769264 - RNA, 19 nt, Artificial Sequence
  Description of Artificial Sequence: Synthetic oligonucleotide
  Antisense strand to SEQ ID NO: 1769263
uuacaccugacuuauucgu

SEQ ID NO: 1769265 - RNA, 19 nt, Artificial Sequence
  Description of Artificial Sequence: Synthetic oligonucleotide
  Sense strand starting at position 887 of SEQ ID NO: 1562737
gguguaaccacugguuaga

SEQ ID NO: 1769266 - RNA, 19 nt, Artificial Sequence
  Description of Artificial Sequence: Synthetic oligonucleotide
  Antisense strand to SEQ ID NO: 1769265
ucuaaccagugguuacacc

SEQ ID NO: 1769267 - RNA, 19 nt, Artificial Sequence
  Description of Artificial Sequence: Synthetic oligonucleotide
  Sense strand starting at position 889 of SEQ ID NO: 1562737
uguaaccacugguuagagu

SEQ ID NO: 1769268 - RNA, 19 nt, Artificial Sequence
  Description of Artificial Sequence: Synthetic oligonucleotide
  Antisense strand to SEQ ID NO: 1769267
acucuaaccagugguuaca

SEQ ID NO: 1769269 - RNA, 19 nt, Artificial Sequence
  Description of Artificial Sequence: Synthetic oligonucleotide
  Sense strand starting at position 1248 of SEQ ID NO: 1562737
gggccaacucaucauguga

SEQ ID NO: 1769270 - RNA, 19 nt, Artificial Sequence
  Description of Artificial Sequence: Synthetic oligonucleotide
  Antisense strand to SEQ ID NO: 1769269
ucacaugaugaguuggccc

SEQ ID NO: 1769271 - RNA, 19 nt, Artificial Sequence
  Description of Artificial Sequence: Synthetic oligonucleotide
  Sense strand starting at position 1261 of SEQ ID NO: 1562737
augugauuucuguggcagc

SEQ ID NO: 1769272 - RNA, 19 nt, Artificial Sequence
  Description of Artificial Sequence: Synthetic oligonucleotide
  Antisense strand to SEQ ID NO: 1769271
gcugccacagaaaucacau

SEQ ID NO: 1769273 - RNA, 19 nt, Artificial Sequence
  Description of Artificial Sequence: Synthetic oligonucleotide
  Sense strand starting at position 1289 of SEQ ID NO: 1562737
ccuugcuugcuaugaguuu

SEQ ID NO: 1769274 - RNA, 19 nt, Artificial Sequence
  Description of Artificial Sequence: Synthetic oligonucleotide
  Antisense strand to SEQ ID NO: 1769273
aaacucauagcaagcaagg

SEQ ID NO: 1769275 - RNA, 19 nt, Artificial Sequence
  Description of Artificial Sequence: Synthetic oligonucleotide
  Sense strand starting at position 1298 of SEQ ID NO: 1562737
cuaugaguuuacccagcaa

SEQ ID NO: 1769276 - RNA, 19 nt, Artificial Sequence
  Description of Artificial Sequence: Synthetic oligonucleotide
  Antisense strand to SEQ ID NO: 1769275
uugcuggguaaacucauag

SEQ ID NO: 1769277 - RNA, 19 nt, Artificial Sequence
  Description of Artificial Sequence: Synthetic oligonucleotide
  Sense strand starting at position 1328 of SEQ ID NO: 1562737
uggccagucaggcaauguu

SEQ ID NO: 1769278 - RNA, 19 nt, Artificial Sequence
  Description of Artificial Sequence: Synthetic oligonucleotide
  Antisense strand to SEQ ID NO: 1769277
aacauugccugacuggcca

SEQ ID NO: 1769279 - RNA, 19 nt, Artificial Sequence
  Description of Artificial Sequence: Synthetic oligonucleotide
  Sense strand starting at position 1420 of SEQ ID NO: 1562737
ucagccucuucguuuguaa

SEQ ID NO: 1769280 - RNA, 19 nt, Artificial Sequence
  Description of Artificial Sequence: Synthetic oligonucleotide
  Antisense strand to SEQ ID NO: 1769279
uuacaaacgaagaggcuga

SEQ ID NO: 1769281 - RNA, 19 nt, Artificial Sequence
  Description of Artificial Sequence: Synthetic oligonucleotide
  Sense strand starting at position 1422 of SEQ ID NO: 1562737
agccucuucguuuguaaag

SEQ ID NO: 1769282 - RNA, 19 nt, Artificial Sequence
  Description of Artificial Sequence: Synthetic oligonucleotide
  Antisense strand to SEQ ID NO: 1769281
cuuuacaaacgaagaggcu

SEQ ID NO: 1769283 - RNA, 19 nt, Artificial Sequence
  Description of Artificial Sequence: Synthetic oligonucleotide
  Sense strand starting at position 1423 of SEQ ID NO: 1562737
gccucuucguuuguaaagu

SEQ ID NO: 1769284 - RNA, 19 nt, Artificial Sequence
  Description of Artificial Sequence: Synthetic oligonucleotide
  Antisense strand to SEQ ID NO: 1769283
acuuuacaaacgaagaggc

SEQ ID NO: 1769285 - RNA, 19 nt, Artificial Sequence
  Description of Artificial Sequence: Synthetic oligonucleotide
  Sense strand starting at position 1447 of SEQ ID NO: 1562737
uagucauuccugcgucuag

SEQ ID NO: 1769286 - RNA, 19 nt, Artificial Sequence
  Description of Artificial Sequence: Synthetic oligonucleotide
  Antisense strand to SEQ ID NO: 1769285
cuagacgcaggaaugacua

SEQ ID NO: 1769287 - RNA, 19 nt, Artificial Sequence
  Description of Artificial Sequence: Synthetic oligonucleotide
  Sense strand starting at position 1448 of SEQ ID NO: 1562737
agucauuccugcgucuaga

SEQ ID NO: 1769288 - RNA, 19 nt, Artificial Sequence
  Description of Artificial Sequence: Synthetic oligonucleotide
  Antisense strand to SEQ ID NO: 1769287
ucuagacgcaggaaugacu

SEQ ID NO: 1769289 - RNA, 19 nt, Artificial Sequence
  Description of Artificial Sequence: Synthetic oligonucleotide
  Sense strand starting at position 1451 of SEQ ID NO: 1562737
cauuccugcgucuagaagu

SEQ ID NO: 1769290 - RNA, 19 nt, Artificial Sequence
  Description of Artificial Sequence: Synthetic oligonucleotide
  Antisense strand to SEQ ID NO: 1769289
acuucuagacgcaggaaug

SEQ ID NO: 1769291 - RNA, 19 nt, Artificial Sequence
  Description of Artificial Sequence: Synthetic oligonucleotide
  Sense strand starting at position 1464 of SEQ ID NO: 1562737
agaaguuagcaggaguuca

SEQ ID NO: 1769292 - RNA, 19 nt, Artificial Sequence
  Description of Artificial Sequence: Synthetic oligonucleotide
  Antisense strand to SEQ ID NO: 1769291
ugaacuccugcuaacuucu

SEQ ID NO: 1769293 - RNA, 19 nt, Artificial Sequence
  Description of Artificial Sequence: Synthetic oligonucleotide
  Sense strand starting at position 1513 of SEQ ID NO: 1562737
aaaggagccgcucaagaaa

SEQ ID NO: 1769294 - RNA, 19 nt, Artificial Sequence
  Description of Artificial Sequence: Synthetic oligonucleotide
  Antisense strand to SEQ ID NO: 1769293
uuucuugagcggcuccuuu

SEQ ID NO: 1769295 - RNA, 19 nt, Artificial Sequence
  Description of Artificial Sequence: Synthetic oligonucleotide
  Sense strand starting at position 1573 of SEQ ID NO: 1562737
aggguuuaaccaggcaaga

SEQ ID NO: 1769296 - RNA, 19 nt, Artificial Sequence
  Description of Artificial Sequence: Synthetic oligonucleotide
  Antisense strand to SEQ ID NO: 1769295
ucuugccugguuaaacccu

SEQ ID NO: 1769297 - RNA, 19 nt, Artificial Sequence
  Description of Artificial Sequence: Synthetic oligonucleotide
  Sense strand starting at position 1575 of SEQ ID NO: 1562737
gguuuaaccaggcaagagu

SEQ ID NO: 1769298 - RNA, 19 nt, Artificial Sequence
  Description of Artificial Sequence: Synthetic oligonucleotide
  Antisense strand to SEQ ID NO: 1769297
acucuugccugguuaaacc

SEQ ID NO: 1769299 - RNA, 19 nt, Artificial Sequence
  Description of Artificial Sequence: Synthetic oligonucleotide
  Sense strand starting at position 1610 of SEQ ID NO: 1562737
uaaagucgcccugagagau

SEQ ID NO: 1769300 - RNA, 19 nt, Artificial Sequence
  Description of Artificial Sequence: Synthetic oligonucleotide
  Antisense strand to SEQ ID NO: 1769299
aucucucagggcgacuuua

SEQ ID NO: 1769301 - RNA, 19 nt, Artificial Sequence
  Description of Artificial Sequence: Synthetic oligonucleotide
  Sense strand starting at position 1635 of SEQ ID NO: 1562737
gggaacaguagcuaagagu

SEQ ID NO: 1769302 - RNA, 19 nt, Artificial Sequence
  Description of Artificial Sequence: Synthetic oligonucleotide
  Antisense strand to SEQ ID NO: 1769301
acucuuagcuacuguuccc

SEQ ID NO: 1769303 - RNA, 19 nt, Artificial Sequence
  Description of Artificial Sequence: Synthetic oligonucleotide
  Sense strand starting at position 1734 of SEQ ID NO: 1562737
gagcguuaccuccggagac

SEQ ID NO: 1769304 - RNA, 19 nt, Artificial Sequence
  Description of Artificial Sequence: Synthetic oligonucleotide
  Antisense strand to SEQ ID NO: 1769303
gucuccggagguaacgcuc

SEQ ID NO: 1769305 - RNA, 19 nt, Artificial Sequence
  Description of Artificial Sequence: Synthetic oligonucleotide
  Sense strand starting at position 2122 of SEQ ID NO: 1562737
agaggcuugacuuguaagu

SEQ ID NO: 1769306 - RNA, 19 nt, Artificial Sequence
  Description of Artificial Sequence: Synthetic oligonucleotide
  Antisense strand to SEQ ID NO: 1769305
acuuacaagucaagccucu

SEQ ID NO: 1769307 - RNA, 19 nt, Artificial Sequence
  Description of Artificial Sequence: Synthetic oligonucleotide
  Sense strand starting at position 2127 of SEQ ID NO: 1562737
cuugacuuguaaguugaga

SEQ ID NO: 1769308 - RNA, 19 nt, Artificial Sequence
  Description of Artificial Sequence: Synthetic oligonucleotide
  Antisense strand to SEQ ID NO: 1769307
ucucaacuuacaagucaag

SEQ ID NO: 1769309 - RNA, 19 nt, Artificial Sequence
  Description of Artificial Sequence: Synthetic oligonucleotide
  Sense strand starting at position 2129 of SEQ ID NO: 1562737
ugacuuguaaguugagacu

SEQ ID NO: 1769310 - RNA, 19 nt, Artificial Sequence
  Description of Artificial Sequence: Synthetic oligonucleotide
  Antisense strand to SEQ ID NO: 1769309
agucucaacuuacaaguca

SEQ ID NO: 1769311 - RNA, 19 nt, Artificial Sequence
  Description of Artificial Sequence: Synthetic oligonucleotide
  Sense strand starting at position 2135 of SEQ ID NO: 1562737
guaaguugagacugccgaa

SEQ ID NO: 1769312 - RNA, 19 nt, Artificial Sequence
  Description of Artificial Sequence: Synthetic oligonucleotide
  Antisense strand to SEQ ID NO: 1769311
uucggcagucucaacuuac

SEQ ID NO: 1769313 - RNA, 19 nt, Artificial Sequence
  Description of Artificial Sequence: Synthetic oligonucleotide
  Sense strand starting at position 2240 of SEQ ID NO: 1562737
ucaccucucggccggaaau

SEQ ID NO: 1769314 - RNA, 19 nt, Artificial Sequence
  Description of Artificial Sequence: Synthetic oligonucleotide
  Antisense strand to SEQ ID NO: 1769313
auuuccggccgagagguga

SEQ ID NO: 1769315 - RNA, 19 nt, Artificial Sequence
  Description of Artificial Sequence: Synthetic oligonucleotide
  Sense strand starting at position 125 of SEQ ID NO: 1562738
agaagaagcuauccuuuac

SEQ ID NO: 1769316 - RNA, 19 nt, Artificial Sequence
  Description of Artificial Sequence: Synthetic oligonucleotide
  Antisense strand to SEQ ID NO: 1769315
guaaaggauagcuucuucu

SEQ ID NO: 1769317 - RNA, 19 nt, Artificial Sequence
  Description of Artificial Sequence: Synthetic oligonucleotide
  Sense strand starting at position 177 of SEQ ID NO: 1562738
acaauucugcuaggacaca

SEQ ID NO: 1769318 - RNA, 19 nt, Artificial Sequence
  Description of Artificial Sequence: Synthetic oligonucleotide
  Antisense strand to SEQ ID NO: 1769317
uguguccuagcagaauugu

SEQ ID NO: 1769319 - RNA, 19 nt, Artificial Sequence
  Description of Artificial Sequence: Synthetic oligonucleotide
  Sense strand starting at position 313 of SEQ ID NO: 1562738
uucuaaaccugagaauguu

SEQ ID NO: 1769320 - RNA, 19 nt, Artificial Sequence
  Description of Artificial Sequence: Synthetic oligonucleotide
  Antisense strand to SEQ ID NO: 1769319
aacauucucagguuuagaa

SEQ ID NO: 1769321 - RNA, 19 nt, Artificial Sequence
  Description of Artificial Sequence: Synthetic oligonucleotide
  Sense strand starting at position 346 of SEQ ID NO: 1562738
gcucaagaccugugucuga

SEQ ID NO: 1769322 - RNA, 19 nt, Artificial Sequence
  Description of Artificial Sequence: Synthetic oligonucleotide
  Antisense strand to SEQ ID NO: 1769321
ucagacacaggucuugagc

SEQ ID NO: 1769323 - RNA, 19 nt, Artificial Sequence
  Description of Artificial Sequence: Synthetic oligonucleotide
  Sense strand starting at position 349 of SEQ ID NO: 1562738
caagaccugugucugagau

SEQ ID NO: 1769324 - RNA, 19 nt, Artificial Sequence
  Description of Artificial Sequence: Synthetic oligonucleotide
  Antisense strand to SEQ ID NO: 1769323
aucucagacacaggucuug

SEQ ID NO: 1769325 - RNA, 19 nt, Artificial Sequence
  Description of Artificial Sequence: Synthetic oligonucleotide
  Sense strand starting at position 673 of SEQ ID NO: 1562738
caguuaaagccuugggaga

SEQ ID NO: 1769326 - RNA, 19 nt, Artificial Sequence
  Description of Artificial Sequence: Synthetic oligonucleotide
  Antisense strand to SEQ ID NO: 1769325
ucucccaaggcuuuaacug

SEQ ID NO: 1769327 - RNA, 19 nt, Artificial Sequence
  Description of Artificial Sequence: Synthetic oligonucleotide
  Sense strand starting at position 872 of SEQ ID NO: 1562738
uguagaagccuuugaagga

SEQ ID NO: 1769328 - RNA, 19 nt, Artificial Sequence
  Description of Artificial Sequence: Synthetic oligonucleotide
  Antisense strand to SEQ ID NO: 1769327
uccuucaaaggcuucuaca

SEQ ID NO: 1769329 - RNA, 19 nt, Artificial Sequence
  Description of Artificial Sequence: Synthetic oligonucleotide
  Sense strand starting at position 873 of SEQ ID NO: 1562738
guagaagccuuugaaggaa

SEQ ID NO: 1769330 - RNA, 19 nt, Artificial Sequence
  Description of Artificial Sequence: Synthetic oligonucleotide
  Antisense strand to SEQ ID NO: 1769329
uuccuucaaaggcuucuac

SEQ ID NO: 1769331 - RNA, 19 nt, Artificial Sequence
  Description of Artificial Sequence: Synthetic oligonucleotide
  Sense strand starting at position 968 of SEQ ID NO: 1562738
uuaauacuucuggagucua

SEQ ID NO: 1769332 - RNA, 19 nt, Artificial Sequence
  Description of Artificial Sequence: Synthetic oligonucleotide
  Antisense strand to SEQ ID NO: 1769331
uagacuccagaaguauuaa

SEQ ID NO: 1769333 - RNA, 19 nt, Artificial Sequence
  Description of Artificial Sequence: Synthetic oligonucleotide
  Sense strand starting at position 1020 of SEQ ID NO: 1562738
cucacuauguggcuagaga

SEQ ID NO: 1769334 - RNA, 19 nt, Artificial Sequence
  Description of Artificial Sequence: Synthetic oligonucleotide
  Antisense strand to SEQ ID NO: 1769333
ucucuagccacauagugag

SEQ ID NO: 1769335 - RNA, 19 nt, Artificial Sequence
  Description of Artificial Sequence: Synthetic oligonucleotide
  Sense strand starting at position 1099 of SEQ ID NO: 1562738
gagcaaaugugacuacuug

SEQ ID NO: 1769336 - RNA, 19 nt, Artificial Sequence
  Description of Artificial Sequence: Synthetic oligonucleotide
  Antisense strand to SEQ ID NO: 1769335
caaguagucacauuugcuc

SEQ ID NO: 1769337 - RNA, 19 nt, Artificial Sequence
  Description of Artificial Sequence: Synthetic oligonucleotide
  Sense strand starting at position 2015 of SEQ ID NO: 1562738
gguacuuccgcuuagaguc

SEQ ID NO: 1769338 - RNA, 19 nt, Artificial Sequence
  Description of Artificial Sequence: Synthetic oligonucleotide
  Antisense strand to SEQ ID NO: 1769337
gacucuaagcggaaguacc

SEQ ID NO: 1769339 - RNA, 19 nt, Artificial Sequence
  Description of Artificial Sequence: Synthetic oligonucleotide
  Sense strand starting at position 2079 of SEQ ID NO: 1562738
guaccuuggccgcugugaa

SEQ ID NO: 1769340 - RNA, 19 nt, Artificial Sequence
  Description of Artificial Sequence: Synthetic oligonucleotide
  Antisense strand to SEQ ID NO: 1769339
uucacagcggccaagguac

SEQ ID NO: 1769341 - RNA, 19 nt, Artificial Sequence
  Description of Artificial Sequence: Synthetic oligonucleotide
  Sense strand starting at position 2080 of SEQ ID NO: 1562738
uaccuuggccgcugugaaa

SEQ ID NO: 1769342 - RNA, 19 nt, Artificial Sequence
  Description of Artificial Sequence: Synthetic oligonucleotide
  Antisense strand to SEQ ID NO: 1769341
uuucacagcggccaaggua

SEQ ID NO: 1769343 - RNA, 19 nt, Artificial Sequence
  Description of Artificial Sequence: Synthetic oligonucleotide
  Sense strand starting at position 2108 of SEQ ID NO: 1562738
auaaaucaguuucuugagu

SEQ ID NO: 1769344 - RNA, 19 nt, Artificial Sequence
  Description of Artificial Sequence: Synthetic oligonucleotide
  Antisense strand to SEQ ID NO: 1769343
acucaagaaacugauuuau

SEQ ID NO: 1769345 - RNA, 19 nt, Artificial Sequence
  Description of Artificial Sequence: Synthetic oligonucleotide
  Sense strand starting at position 2113 of SEQ ID NO: 1562738
ucaguuucuugagugcuua

SEQ ID NO: 1769346 - RNA, 19 nt, Artificial Sequence
  Description of Artificial Sequence: Synthetic oligonucleotide
  Antisense strand to SEQ ID NO: 1769345
uaagcacucaagaaacuga

SEQ ID NO: 1769347 - RNA, 19 nt, Artificial Sequence
  Description of Artificial Sequence: Synthetic oligonucleotide
  Sense strand starting at position 2117 of SEQ ID NO: 1562738
uuucuugagugcuuacagu

SEQ ID NO: 1769348 - RNA, 19 nt, Artificial Sequence
  Description of Artificial Sequence: Synthetic oligonucleotide
  Antisense strand to SEQ ID NO: 1769347
acuguaagcacucaagaaa

SEQ ID NO: 1769349 - RNA, 19 nt, Artificial Sequence
  Description of Artificial Sequence: Synthetic oligonucleotide
  Sense strand starting at position 2131 of SEQ ID NO: 1562738
acaguauucugggcauugu

SEQ ID NO: 1769350 - RNA, 19 nt, Artificial Sequence
  Description of Artificial Sequence: Synthetic oligonucleotide
  Antisense strand to SEQ ID NO: 1769349
acaaugcccagaauacugu

SEQ ID NO: 1769351 - RNA, 19 nt, Artificial Sequence
  Description of Artificial Sequence: Synthetic oligonucleotide
  Sense strand starting at position 2207 of SEQ ID NO: 1562738
agauaauuagucggccuga

SEQ ID NO: 1769352 - RNA, 19 nt, Artificial Sequence
  Description of Artificial Sequence: Synthetic oligonucleotide
  Antisense strand to SEQ ID NO: 1769351
ucaggccgacuaauuaucu

SEQ ID NO: 1769353 - RNA, 19 nt, Artificial Sequence
  Description of Artificial Sequence: Synthetic oligonucleotide
  Sense strand starting at position 2275 of SEQ ID NO: 1562738
ccagccaacguuuaaugaa

SEQ ID NO: 1769354 - RNA, 19 nt, Artificial Sequence
  Description of Artificial Sequence: Synthetic oligonucleotide
  Antisense strand to SEQ ID NO: 1769353
uucauuaaacguuggcugg

SEQ ID NO: 1769355 - RNA, 19 nt, Artificial Sequence
  Description of Artificial Sequence: Synthetic oligonucleotide
  Sense strand starting at position 2303 of SEQ ID NO: 1562738
uuugcuuugcucugugaug

SEQ ID NO: 1769356 - RNA, 19 nt, Artificial Sequence
  Description of Artificial Sequence: Synthetic oligonucleotide
  Antisense strand to SEQ ID NO: 1769355
caucacagagcaaagcaaa

SEQ ID NO: 1769357 - RNA, 19 nt, Artificial Sequence
  Description of Artificial Sequence: Synthetic oligonucleotide
  Sense strand starting at position 2312 of SEQ ID NO: 1562738
cucugugaugggcacagaa

SEQ ID NO: 1769358 - RNA, 19 nt, Artificial Sequence
  Description of Artificial Sequence: Synthetic oligonucleotide
  Antisense strand to SEQ ID NO: 1769357
uucugugcccaucacagag

SEQ ID NO: 1769359 - RNA, 19 nt, Artificial Sequence
  Description of Artificial Sequence: Synthetic oligonucleotide
  Sense strand starting at position 2345 of SEQ ID NO: 1562738
ccagauauuuauuacagug

SEQ ID NO: 1769360 - RNA, 19 nt, Artificial Sequence
  Description of Artificial Sequence: Synthetic oligonucleotide
  Antisense strand to SEQ ID NO: 1769359
cacuguaauaaauaucugg

SEQ ID NO: 1769361 - RNA, 19 nt, Artificial Sequence
  Description of Artificial Sequence: Synthetic oligonucleotide
  Sense strand starting at position 2493 of SEQ ID NO: 1562738
aagagaaagugauacugua

SEQ ID NO: 1769362 - RNA, 19 nt, Artificial Sequence
  Description of Artificial Sequence: Synthetic oligonucleotide
  Antisense strand to SEQ ID NO: 1769361
uacaguaucacuuucucuu

SEQ ID NO: 1769363 - RNA, 19 nt, Artificial Sequence
  Description of Artificial Sequence: Synthetic oligonucleotide
  Sense strand starting at position 2503 of SEQ ID NO: 1562738
gauacuguacuucgcucaa

SEQ ID NO: 1769364 - RNA, 19 nt, Artificial Sequence
  Description of Artificial Sequence: Synthetic oligonucleotide
  Antisense strand to SEQ ID NO: 1769363
uugagcgaaguacaguauc

SEQ ID NO: 1769365 - RNA, 19 nt, Artificial Sequence
  Description of Artificial Sequence: Synthetic oligonucleotide
  Sense strand starting at position 2519 of SEQ ID NO: 1562738
caaagacagucggauuucu

SEQ ID NO: 1769366 - RNA, 19 nt, Artificial Sequence
  Description of Artificial Sequence: Synthetic oligonucleotide
  Antisense strand to SEQ ID NO: 1769365
agaaauccgacugucuuug

SEQ ID NO: 1769367 - RNA, 19 nt, Artificial Sequence
  Description of Artificial Sequence: Synthetic oligonucleotide
  Sense strand starting at position 2527 of SEQ ID NO: 1562738
gucggauuucuccacguag

SEQ ID NO: 1769368 - RNA, 19 nt, Artificial Sequence
  Description of Artificial Sequence: Synthetic oligonucleotide
  Antisense strand to SEQ ID NO: 1769367
cuacguggagaaauccgac

SEQ ID NO: 1769369 - RNA, 19 nt, Artificial Sequence
  Description of Artificial Sequence: Synthetic oligonucleotide
  Sense strand starting at position 2529 of SEQ ID NO: 1562738
cggauuucuccacguagag

SEQ ID NO: 1769370 - RNA, 19 nt, Artificial Sequence
  Description of Artificial Sequence: Synthetic oligonucleotide
  Antisense strand to SEQ ID NO: 1769369
cucuacguggagaaauccg

SEQ ID NO: 1769371 - RNA, 19 nt, Artificial Sequence
  Description of Artificial Sequence: Synthetic oligonucleotide
  Sense strand starting at position 2843 of SEQ ID NO: 1562738
ggaugaguccagggaguug

SEQ ID NO: 1769372 - RNA, 19 nt, Artificial Sequence
  Description of Artificial Sequence: Synthetic oligonucleotide
  Antisense strand to SEQ ID NO: 1769371
caacucccuggacucaucc

SEQ ID NO: 1769373 - RNA, 19 nt, Artificial Sequence
  Description of Artificial Sequence: Synthetic oligonucleotide
  Sense strand starting at position 2878 of SEQ ID NO: 1562738
gcucccagauaucugcaaa

SEQ ID NO: 1769374 - RNA, 19 nt, Artificial Sequence
  Description of Artificial Sequence: Synthetic oligonucleotide
  Antisense strand to SEQ ID NO: 1769373
uuugcagauaucugggagc

SEQ ID NO: 1769375 - RNA, 19 nt, Artificial Sequence
  Description of Artificial Sequence: Synthetic oligonucleotide
  Sense strand starting at position 2899 of SEQ ID NO: 1562738
gauaucuauuugcaggaga

SEQ ID NO: 1769376 - RNA, 19 nt, Artificial Sequence
  Description of Artificial Sequence: Synthetic oligonucleotide
  Antisense strand to SEQ ID NO: 1769375
ucuccugcaaauagauauc

SEQ ID NO: 1769377 - RNA, 19 nt, Artificial Sequence
  Description of Artificial Sequence: Synthetic oligonucleotide
  Sense strand starting at position 2913 of SEQ ID NO: 1562738
ggagauaucuuggaauuag

SEQ ID NO: 1769378 - RNA, 19 nt, Artificial Sequence
  Description of Artificial Sequence: Synthetic oligonucleotide
  Antisense strand to SEQ ID NO: 1769377
cuaauuccaagauaucucc

SEQ ID NO: 1769379 - RNA, 19 nt, Artificial Sequence
  Description of Artificial Sequence: Synthetic oligonucleotide
  Sense strand starting at position 3116 of SEQ ID NO: 1562738
cgaacagacuuccuaagcu

SEQ ID NO: 1769380 - RNA, 19 nt, Artificial Sequence
  Description of Artificial Sequence: Synthetic oligonucleotide
  Antisense strand to SEQ ID NO: 1769379
agcuuaggaagucuguucg

SEQ ID NO: 1769381 - RNA, 19 nt, Artificial Sequence
  Description of Artificial Sequence: Synthetic oligonucleotide
  Sense strand starting at position 3390 of SEQ ID NO: 1562738
gcaguaaccucauccagga

SEQ ID NO: 1769382 - RNA, 19 nt, Artificial Sequence
  Description of Artificial Sequence: Synthetic oligonucleotide
  Antisense strand to SEQ ID NO: 1769381
uccuggaugagguuacugc

SEQ ID NO: 1769383 - RNA, 19 nt, Artificial Sequence
  Description of Artificial Sequence: Synthetic oligonucleotide
  Sense strand starting at position 3486 of SEQ ID NO: 1562738
cccaaaggccauugagauu

SEQ ID NO: 1769384 - RNA, 19 nt, Artificial Sequence
  Description of Artificial Sequence: Synthetic oligonucleotide
  Antisense strand to SEQ ID NO: 1769383
aaucucaauggccuuuggg

SEQ ID NO: 1769385 - RNA, 19 nt, Artificial Sequence
  Description of Artificial Sequence: Synthetic oligonucleotide
  Sense strand starting at position 3509 of SEQ ID NO: 1562738
agggaagugauauguaugu

SEQ ID NO: 1769386 - RNA, 19 nt, Artificial Sequence
  Description of Artificial Sequence: Synthetic oligonucleotide
  Antisense strand to SEQ ID NO: 1769385
acauacauaucacuucccu

SEQ ID NO: 1769387 - RNA, 19 nt, Artificial Sequence
  Description of Artificial Sequence: Synthetic oligonucleotide
  Sense strand starting at position 3511 of SEQ ID NO: 1562738
ggaagugauauguauguuu

SEQ ID NO: 1769388 - RNA, 19 nt, Artificial Sequence
  Description of Artificial Sequence: Synthetic oligonucleotide
  Antisense strand to SEQ ID NO: 1769387
aaacauacauaucacuucc

SEQ ID NO: 1769389 - RNA, 19 nt, Artificial Sequence
  Description of Artificial Sequence: Synthetic oligonucleotide
  Sense strand starting at position 3546 of SEQ ID NO: 1562738
aaagcuguaacguagugua

SEQ ID NO: 1769390 - RNA, 19 nt, Artificial Sequence
  Description of Artificial Sequence: Synthetic oligonucleotide
  Antisense strand to SEQ ID NO: 1769389
uacacuacguuacagcuuu

SEQ ID NO: 1769391 - RNA, 19 nt, Artificial Sequence
  Description of Artificial Sequence: Synthetic oligonucleotide
  Sense strand starting at position 3553 of SEQ ID NO: 1562738
uaacguaguguauacuuau

SEQ ID NO: 1769392 - RNA, 19 nt, Artificial Sequence
  Description of Artificial Sequence: Synthetic oligonucleotide
  Antisense strand to SEQ ID NO: 1769391
auaaguauacacuacguua

SEQ ID NO: 1769393 - RNA, 19 nt, Artificial Sequence
  Description of Artificial Sequence: Synthetic oligonucleotide
  Sense strand starting at position 3913 of SEQ ID NO: 1562738
gcgcccagccuauuauauu

SEQ ID NO: 1769394 - RNA, 19 nt, Artificial Sequence
  Description of Artificial Sequence: Synthetic oligonucleotide
  Antisense strand to SEQ ID NO: 1769393
aauauaauaggcugggcgc

SEQ ID NO: 1769395 - RNA, 19 nt, Artificial Sequence
  Description of Artificial Sequence: Synthetic oligonucleotide
  Sense strand starting at position 11 of SEQ ID NO: 1562739
gugucaaagacacgugagu

SEQ ID NO: 1769396 - RNA, 19 nt, Artificial Sequence
  Description of Artificial Sequence: Synthetic oligonucleotide
  Antisense strand to SEQ ID NO: 1769395
acucacgugucuuugacac

SEQ ID NO: 1769397 - RNA, 19 nt, Artificial Sequence
  Description of Artificial Sequence: Synthetic oligonucleotide
  Sense strand starting at position 13 of SEQ ID NO: 1562739
gucaaagacacgugaguug

SEQ ID NO: 1769398 - RNA, 19 nt, Artificial Sequence
  Description of Artificial Sequence: Synthetic oligonucleotide
  Antisense strand to SEQ ID NO: 1769397
caacucacgugucuuugac

SEQ ID NO: 1769399 - RNA, 19 nt, Artificial Sequence
  Description of Artificial Sequence: Synthetic oligonucleotide
  Sense strand starting at position 41 of SEQ ID NO: 1562739
cagagaagcugauucugga

SEQ ID NO: 1769400 - RNA, 19 nt, Artificial Sequence
  Description of Artificial Sequence: Synthetic oligonucleotide
  Antisense strand to SEQ ID NO: 1769399
uccagaaucagcuucucug

SEQ ID NO: 1769401 - RNA, 19 nt, Artificial Sequence
  Description of Artificial Sequence: Synthetic oligonucleotide
  Sense strand starting at position 90 of SEQ ID NO: 1562739
aagcgcuggcaucaugaga

SEQ ID NO: 1769402 - RNA, 19 nt, Artificial Sequence
  Description of Artificial Sequence: Synthetic oligonucleotide
  Antisense strand to SEQ ID NO: 1769401
ucucaugaugccagcgcuu

SEQ ID NO: 1769403 - RNA, 19 nt, Artificial Sequence
  Description of Artificial Sequence: Synthetic oligonucleotide
  Sense strand starting at position 95 of SEQ ID NO: 1562739
cuggcaucaugagacauca

SEQ ID NO: 1769404 - RNA, 19 nt, Artificial Sequence
  Description of Artificial Sequence: Synthetic oligonucleotide
  Antisense strand to SEQ ID NO: 1769403
ugaugucucaugaugccag

SEQ ID NO: 1769405 - RNA, 19 nt, Artificial Sequence
  Description of Artificial Sequence: Synthetic oligonucleotide
  Sense strand starting at position 277 of SEQ ID NO: 1562739
gguguuucacaacagggua

SEQ ID NO: 1769406 - RNA, 19 nt, Artificial Sequence
  Description of Artificial Sequence: Synthetic oligonucleotide
  Antisense strand to SEQ ID NO: 1769405
uacccuguugugaaacacc

SEQ ID NO: 1769407 - RNA, 19 nt, Artificial Sequence
  Description of Artificial Sequence: Synthetic oligonucleotide
  Sense strand starting at position 312 of SEQ ID NO: 1562739
cucuauagugcugacaaua

SEQ ID NO: 1769408 - RNA, 19 nt, Artificial Sequence
  Description of Artificial Sequence: Synthetic oligonucleotide
  Antisense strand to SEQ ID NO: 1769407
uauugucagcacuauagag

SEQ ID NO: 1769409 - RNA, 19 nt, Artificial Sequence
  Description of Artificial Sequence: Synthetic oligonucleotide
  Sense strand starting at position 691 of SEQ ID NO: 1562739
agaagaagcuauccuuuac

SEQ ID NO: 1769410 - RNA, 19 nt, Artificial Sequence
  Description of Artificial Sequence: Synthetic oligonucleotide
  Antisense strand to SEQ ID NO: 1769409
guaaaggauagcuucuucu

SEQ ID NO: 1769411 - RNA, 19 nt, Artificial Sequence
  Description of Artificial Sequence: Synthetic oligonucleotide
  Sense strand starting at position 743 of SEQ ID NO: 1562739
acaauucugcuaggacaca

SEQ ID NO: 1769412 - RNA, 19 nt, Artificial Sequence
  Description of Artificial Sequence: Synthetic oligonucleotide
  Antisense strand to SEQ ID NO: 1769411
uguguccuagcagaauugu

SEQ ID NO: 1769413 - RNA, 19 nt, Artificial Sequence
  Description of Artificial Sequence: Synthetic oligonucleotide
  Sense strand starting at position 879 of SEQ ID NO: 1562739
uucuaaaccugagaauguu

SEQ ID NO: 1769414 - RNA, 19 nt, Artificial Sequence
  Description of Artificial Sequence: Synthetic oligonucleotide
  Antisense strand to SEQ ID NO: 1769413
aacauucucagguuuagaa

SEQ ID NO: 1769415 - RNA, 19 nt, Artificial Sequence
  Description of Artificial Sequence: Synthetic oligonucleotide
  Sense strand starting at position 912 of SEQ ID NO: 1562739
gcucaagaccugugucuga

SEQ ID NO: 1769416 - RNA, 19 nt, Artificial Sequence
  Description of Artificial Sequence: Synthetic oligonucleotide
  Antisense strand to SEQ ID NO: 1769415
ucagacacaggucuugagc

SEQ ID NO: 1769417 - RNA, 19 nt, Artificial Sequence
  Description of Artificial Sequence: Synthetic oligonucleotide
  Sense strand starting at position 915 of SEQ ID NO: 1562739
caagaccugugucugagau

SEQ ID NO: 1769418 - RNA, 19 nt, Artificial Sequence
  Description of Artificial Sequence: Synthetic oligonucleotide
  Antisense strand to SEQ ID NO: 1769417
aucucagacacaggucuug

SEQ ID NO: 1769419 - RNA, 19 nt, Artificial Sequence
  Description of Artificial Sequence: Synthetic oligonucleotide
  Sense strand starting at position 1239 of SEQ ID NO: 1562739
caguuaaagccuugggaga

SEQ ID NO: 1769420 - RNA, 19 nt, Artificial Sequence
  Description of Artificial Sequence: Synthetic oligonucleotide
  Antisense strand to SEQ ID NO: 1769419
ucucccaaggcuuuaacug

SEQ ID NO: 1769421 - RNA, 19 nt, Artificial Sequence
  Description of Artificial Sequence: Synthetic oligonucleotide
  Sense strand starting at position 1438 of SEQ ID NO: 1562739
uguagaagccuuugaagga

SEQ ID NO: 1769422 - RNA, 19 nt, Artificial Sequence
  Description of Artificial Sequence: Synthetic oligonucleotide
  Antisense strand to SEQ ID NO: 1769421
uccuucaaaggcuucuaca

SEQ ID NO: 1769423 - RNA, 19 nt, Artificial Sequence
  Description of Artificial Sequence: Synthetic oligonucleotide
  Sense strand starting at position 1439 of SEQ ID NO: 1562739
guagaagccuuugaaggaa

SEQ ID NO: 1769424 - RNA, 19 nt, Artificial Sequence
  Description of Artificial Sequence: Synthetic oligonucleotide
  Antisense strand to SEQ ID NO: 1769423
uuccuucaaaggcuucuac

SEQ ID NO: 1769425 - RNA, 19 nt, Artificial Sequence
  Description of Artificial Sequence: Synthetic oligonucleotide
  Sense strand starting at position 1534 of SEQ ID NO: 1562739
uuaauacuucuggagucua

SEQ ID NO: 1769426 - RNA, 19 nt, Artificial Sequence
  Description of Artificial Sequence: Synthetic oligonucleotide
  Antisense strand to SEQ ID NO: 1769425
uagacuccagaaguauuaa

SEQ ID NO: 1769427 - RNA, 19 nt, Artificial Sequence
  Description of Artificial Sequence: Synthetic oligonucleotide
  Sense strand starting at position 1586 of SEQ ID NO: 1562739
cucacuauguggcuagaga

SEQ ID NO: 1769428 - RNA, 19 nt, Artificial Sequence
  Description of Artificial Sequence: Synthetic oligonucleotide
  Antisense strand to SEQ ID NO: 1769427
ucucuagccacauagugag

SEQ ID NO: 1769429 - RNA, 19 nt, Artificial Sequence
  Description of Artificial Sequence: Synthetic oligonucleotide
  Sense strand starting at position 1665 of SEQ ID NO: 1562739
gagcaaaugugacuacuug

SEQ ID NO: 1769430 - RNA, 19 nt, Artificial Sequence
  Description of Artificial Sequence: Synthetic oligonucleotide
  Antisense strand to SEQ ID NO: 1769429
caaguagucacauuugcuc

SEQ ID NO: 1769431 - RNA, 19 nt, Artificial Sequence
  Description of Artificial Sequence: Synthetic oligonucleotide
  Sense strand starting at position 2581 of SEQ ID NO: 1562739
gguacuuccgcuuagaguc

SEQ ID NO: 1769432 - RNA, 19 nt, Artificial Sequence
  Description of Artificial Sequence: Synthetic oligonucleotide
  Antisense strand to SEQ ID NO: 1769431
gacucuaagcggaaguacc

SEQ ID NO: 1769433 - RNA, 19 nt, Artificial Sequence
  Description of Artificial Sequence: Synthetic oligonucleotide
  Sense strand starting at position 2645 of SEQ ID NO: 1562739
guaccuuggccgcugugaa

SEQ ID NO: 1769434 - RNA, 19 nt, Artificial Sequence
  Description of Artificial Sequence: Synthetic oligonucleotide
  Antisense strand to SEQ ID NO: 1769433
uucacagcggccaagguac

SEQ ID NO: 1769435 - RNA, 19 nt, Artificial Sequence
  Description of Artificial Sequence: Synthetic oligonucleotide
  Sense strand starting at position 2646 of SEQ ID NO: 1562739
uaccuuggccgcugugaaa

SEQ ID NO: 1769436 - RNA, 19 nt, Artificial Sequence
  Description of Artificial Sequence: Synthetic oligonucleotide
  Antisense strand to SEQ ID NO: 1769435
uuucacagcggccaaggua

SEQ ID NO: 1769437 - RNA, 19 nt, Artificial Sequence
  Description of Artificial Sequence: Synthetic oligonucleotide
  Sense strand starting at position 2674 of SEQ ID NO: 1562739
auaaaucaguuucuugagu

SEQ ID NO: 1769438 - RNA, 19 nt, Artificial Sequence
  Description of Artificial Sequence: Synthetic oligonucleotide
  Antisense strand to SEQ ID NO: 1769437
acucaagaaacugauuuau

SEQ ID NO: 1769439 - RNA, 19 nt, Artificial Sequence
  Description of Artificial Sequence: Synthetic oligonucleotide
  Sense strand starting at position 2679 of SEQ ID NO: 1562739
ucaguuucuugagugcuua

SEQ ID NO: 1769440 - RNA, 19 nt, Artificial Sequence
  Description of Artificial Sequence: Synthetic oligonucleotide
  Antisense strand to SEQ ID NO: 1769439
uaagcacucaagaaacuga

SEQ ID NO: 1769441 - RNA, 19 nt, Artificial Sequence
  Description of Artificial Sequence: Synthetic oligonucleotide
  Sense strand starting at position 2683 of SEQ ID NO: 1562739
uuucuugagugcuuacagu

SEQ ID NO: 1769442 - RNA, 19 nt, Artificial Sequence
  Description of Artificial Sequence: Synthetic oligonucleotide
  Antisense strand to SEQ ID NO: 1769441
acuguaagcacucaagaaa

SEQ ID NO: 1769443 - RNA, 19 nt, Artificial Sequence
  Description of Artificial Sequence: Synthetic oligonucleotide
  Sense strand starting at position 2697 of SEQ ID NO: 1562739
acaguauucugggcauugu

SEQ ID NO: 1769444 - RNA, 19 nt, Artificial Sequence
  Description of Artificial Sequence: Synthetic oligonucleotide
  Antisense strand to SEQ ID NO: 1769443
acaaugcccagaauacugu

SEQ ID NO: 1769445 - RNA, 19 nt, Artificial Sequence
  Description of Artificial Sequence: Synthetic oligonucleotide
  Sense strand starting at position 2773 of SEQ ID NO: 1562739
agauaauuagucggccuga

SEQ ID NO: 1769446 - RNA, 19 nt, Artificial Sequence
  Description of Artificial Sequence: Synthetic oligonucleotide
  Antisense strand to SEQ ID NO: 1769445
ucaggccgacuaauuaucu

SEQ ID NO: 1769447 - RNA, 19 nt, Artificial Sequence
  Description of Artificial Sequence: Synthetic oligonucleotide
  Sense strand starting at position 2841 of SEQ ID NO: 1562739
ccagccaacguuuaaugaa

SEQ ID NO: 1769448 - RNA, 19 nt, Artificial Sequence
  Description of Artificial Sequence: Synthetic oligonucleotide
  Antisense strand to SEQ ID NO: 1769447
uucauuaaacguuggcugg

SEQ ID NO: 1769449 - RNA, 19 nt, Artificial Sequence
  Description of Artificial Sequence: Synthetic oligonucleotide
  Sense strand starting at position 2878 of SEQ ID NO: 1562739
cucugugaugggcacagaa

SEQ ID NO: 1769450 - RNA, 19 nt, Artificial Sequence
  Description of Artificial Sequence: Synthetic oligonucleotide
  Antisense strand to SEQ ID NO: 1769449
uucugugcccaucacagag

SEQ ID NO: 1769451 - RNA, 19 nt, Artificial Sequence
  Description of Artificial Sequence: Synthetic oligonucleotide
  Sense strand starting at position 2911 of SEQ ID NO: 1562739
ccagauauuuauuacagug

SEQ ID NO: 1769452 - RNA, 19 nt, Artificial Sequence
  Description of Artificial Sequence: Synthetic oligonucleotide
  Antisense strand to SEQ ID NO: 1769451
cacuguaauaaauaucugg

SEQ ID NO: 1769453 - RNA, 19 nt, Artificial Sequence
  Description of Artificial Sequence: Synthetic oligonucleotide
  Sense strand starting at position 3059 of SEQ ID NO: 1562739
aagagaaagugauacugua

SEQ ID NO: 1769454 - RNA, 19 nt, Artificial Sequence
  Description of Artificial Sequence: Synthetic oligonucleotide
  Antisense strand to SEQ ID NO: 1769453
uacaguaucacuuucucuu

SEQ ID NO: 1769455 - RNA, 19 nt, Artificial Sequence
  Description of Artificial Sequence: Synthetic oligonucleotide
  Sense strand starting at position 3069 of SEQ ID NO: 1562739
gauacuguacuucgcucaa

SEQ ID NO: 1769456 - RNA, 19 nt, Artificial Sequence
  Description of Artificial Sequence: Synthetic oligonucleotide
  Antisense strand to SEQ ID NO: 1769455
uugagcgaaguacaguauc

SEQ ID NO: 1769457 - RNA, 19 nt, Artificial Sequence
  Description of Artificial Sequence: Synthetic oligonucleotide
  Sense strand starting at position 3085 of SEQ ID NO: 1562739
caaagacagucggauuucu

SEQ ID NO: 1769458 - RNA, 19 nt, Artificial Sequence
  Description of Artificial Sequence: Synthetic oligonucleotide
  Antisense strand to SEQ ID NO: 1769457
agaaauccgacugucuuug

SEQ ID NO: 1769459 - RNA, 19 nt, Artificial Sequence
  Description of Artificial Sequence: Synthetic oligonucleotide
  Sense strand starting at position 3093 of SEQ ID NO: 1562739
gucggauuucuccacguag

SEQ ID NO: 1769460 - RNA, 19 nt, Artificial Sequence
  Description of Artificial Sequence: Synthetic oligonucleotide
  Antisense strand to SEQ ID NO: 1769459
cuacguggagaaauccgac

SEQ ID NO: 1769461 - RNA, 19 nt, Artificial Sequence
  Description of Artificial Sequence: Synthetic oligonucleotide
  Sense strand starting at position 3095 of SEQ ID NO: 1562739
cggauuucuccacguagag

SEQ ID NO: 1769462 - RNA, 19 nt, Artificial Sequence
  Description of Artificial Sequence: Synthetic oligonucleotide
  Antisense strand to SEQ ID NO: 1769461
cucuacguggagaaauccg

SEQ ID NO: 1769463 - RNA, 19 nt, Artificial Sequence
  Description of Artificial Sequence: Synthetic oligonucleotide
  Sense strand starting at position 3409 of SEQ ID NO: 1562739
ggaugaguccagggaguug

SEQ ID NO: 1769464 - RNA, 19 nt, Artificial Sequence
  Description of Artificial Sequence: Synthetic oligonucleotide
  Antisense strand to SEQ ID NO: 1769463
caacucccuggacucaucc

SEQ ID NO: 1769465 - RNA, 19 nt, Artificial Sequence
  Description of Artificial Sequence: Synthetic oligonucleotide
  Sense strand starting at position 3444 of SEQ ID NO: 1562739
gcucccagauaucugcaaa

SEQ ID NO: 1769466 - RNA, 19 nt, Artificial Sequence
  Description of Artificial Sequence: Synthetic oligonucleotide
  Antisense strand to SEQ ID NO: 1769465
uuugcagauaucugggagc

SEQ ID NO: 1769467 - RNA, 19 nt, Artificial Sequence
  Description of Artificial Sequence: Synthetic oligonucleotide
  Sense strand starting at position 3465 of SEQ ID NO: 1562739
gauaucuauuugcaggaga

SEQ ID NO: 1769468 - RNA, 19 nt, Artificial Sequence
  Description of Artificial Sequence: Synthetic oligonucleotide
  Antisense strand to SEQ ID NO: 1769467
ucuccugcaaauagauauc

SEQ ID NO: 1769469 - RNA, 19 nt, Artificial Sequence
  Description of Artificial Sequence: Synthetic oligonucleotide
  Sense strand starting at position 3479 of SEQ ID NO: 1562739
ggagauaucuuggaauuag

SEQ ID NO: 1769470 - RNA, 19 nt, Artificial Sequence
  Description of Artificial Sequence: Synthetic oligonucleotide
  Antisense strand to SEQ ID NO: 1769469
cuaauuccaagauaucucc

SEQ ID NO: 1769471 - RNA, 19 nt, Artificial Sequence
  Description of Artificial Sequence: Synthetic oligonucleotide
  Sense strand starting at position 3682 of SEQ ID NO: 1562739
cgaacagacuuccuaagcu

SEQ ID NO: 1769472 - RNA, 19 nt, Artificial Sequence
  Description of Artificial Sequence: Synthetic oligonucleotide
  Antisense strand to SEQ ID NO: 1769471
agcuuaggaagucuguucg

SEQ ID NO: 1769473 - RNA, 19 nt, Artificial Sequence
  Description of Artificial Sequence: Synthetic oligonucleotide
  Sense strand starting at position 3956 of SEQ ID NO: 1562739
gcaguaaccucauccagga

SEQ ID NO: 1769474 - RNA, 19 nt, Artificial Sequence
  Description of Artificial Sequence: Synthetic oligonucleotide
  Antisense strand to SEQ ID NO: 1769473
uccuggaugagguuacugc

SEQ ID NO: 1769475 - RNA, 19 nt, Artificial Sequence
  Description of Artificial Sequence: Synthetic oligonucleotide
  Sense strand starting at position 170 of SEQ ID NO: 1562740
gaaagucugagugggcaaa

SEQ ID NO: 1769476 - RNA, 19 nt, Artificial Sequence
  Description of Artificial Sequence: Synthetic oligonucleotide
  Antisense strand to SEQ ID NO: 1769475
uuugcccacucagacuuuc

SEQ ID NO: 1769477 - RNA, 19 nt, Artificial Sequence
  Description of Artificial Sequence: Synthetic oligonucleotide
  Sense strand starting at position 760 of SEQ ID NO: 1562740
gucugaaguuuccugguua

SEQ ID NO: 1769478 - RNA, 19 nt, Artificial Sequence
  Description of Artificial Sequence: Synthetic oligonucleotide
  Antisense strand to SEQ ID NO: 1769477
uaaccaggaaacuucagac

SEQ ID NO: 1769479 - RNA, 19 nt, Artificial Sequence
  Description of Artificial Sequence: Synthetic oligonucleotide
  Sense strand starting at position 761 of SEQ ID NO: 1562740
ucugaaguuuccugguuaa

SEQ ID NO: 1769480 - RNA, 19 nt, Artificial Sequence
  Description of Artificial Sequence: Synthetic oligonucleotide
  Antisense strand to SEQ ID NO: 1769479
uuaaccaggaaacuucaga

SEQ ID NO: 1769481 - RNA, 19 nt, Artificial Sequence
  Description of Artificial Sequence: Synthetic oligonucleotide
  Sense strand starting at position 764 of SEQ ID NO: 1562740
gaaguuuccugguuaaucc

SEQ ID NO: 1769482 - RNA, 19 nt, Artificial Sequence
  Description of Artificial Sequence: Synthetic oligonucleotide
  Antisense strand to SEQ ID NO: 1769481
ggauuaaccaggaaacuuc

SEQ ID NO: 1769483 - RNA, 19 nt, Artificial Sequence
  Description of Artificial Sequence: Synthetic oligonucleotide
  Sense strand starting at position 987 of SEQ ID NO: 1562740
gucgcuaucccucgauaug

SEQ ID NO: 1769484 - RNA, 19 nt, Artificial Sequence
  Description of Artificial Sequence: Synthetic oligonucleotide
  Antisense strand to SEQ ID NO: 1769483
cauaucgagggauagcgac

SEQ ID NO: 1769485 - RNA, 19 nt, Artificial Sequence
  Description of Artificial Sequence: Synthetic oligonucleotide
  Sense strand starting at position 988 of SEQ ID NO: 1562740
ucgcuaucccucgauauga

SEQ ID NO: 1769486 - RNA, 19 nt, Artificial Sequence
  Description of Artificial Sequence: Synthetic oligonucleotide
  Antisense strand to SEQ ID NO: 1769485
ucauaucgagggauagcga

SEQ ID NO: 1769487 - RNA, 19 nt, Artificial Sequence
  Description of Artificial Sequence: Synthetic oligonucleotide
  Sense strand starting at position 990 of SEQ ID NO: 1562740
gcuaucccucgauaugaga

SEQ ID NO: 1769488 - RNA, 19 nt, Artificial Sequence
  Description of Artificial Sequence: Synthetic oligonucleotide
  Antisense strand to SEQ ID NO: 1769487
ucucauaucgagggauagc

SEQ ID NO: 1769489 - RNA, 19 nt, Artificial Sequence
  Description of Artificial Sequence: Synthetic oligonucleotide
  Sense strand starting at position 2480 of SEQ ID NO: 1562740
ucacauaauccaggagggu

SEQ ID NO: 1769490 - RNA, 19 nt, Artificial Sequence
  Description of Artificial Sequence: Synthetic oligonucleotide
  Antisense strand to SEQ ID NO: 1769489
acccuccuggauuauguga

SEQ ID NO: 1769491 - RNA, 19 nt, Artificial Sequence
  Description of Artificial Sequence: Synthetic oligonucleotide
  Sense strand starting at position 2708 of SEQ ID NO: 1562740
ccaguauugucacucuuag

SEQ ID NO: 1769492 - RNA, 19 nt, Artificial Sequence
  Description of Artificial Sequence: Synthetic oligonucleotide
  Antisense strand to SEQ ID NO: 1769491
cuaagagugacaauacugg

SEQ ID NO: 1769493 - RNA, 19 nt, Artificial Sequence
  Description of Artificial Sequence: Synthetic oligonucleotide
  Sense strand starting at position 2794 of SEQ ID NO: 1562740
agauucuucucucaaggag

SEQ ID NO: 1769494 - RNA, 19 nt, Artificial Sequence
  Description of Artificial Sequence: Synthetic oligonucleotide
  Antisense strand to SEQ ID NO: 1769493
cuccuugagagaagaaucu

SEQ ID NO: 1769495 - RNA, 19 nt, Artificial Sequence
  Description of Artificial Sequence: Synthetic oligonucleotide
  Sense strand starting at position 3165 of SEQ ID NO: 1562740
cuggcucacucauuaagac

SEQ ID NO: 1769496 - RNA, 19 nt, Artificial Sequence
  Description of Artificial Sequence: Synthetic oligonucleotide
  Antisense strand to SEQ ID NO: 1769495
gucuuaaugagugagccag

SEQ ID NO: 1769497 - RNA, 19 nt, Artificial Sequence
  Description of Artificial Sequence: Synthetic oligonucleotide
  Sense strand starting at position 3305 of SEQ ID NO: 1562740
uguccuuguuccuugagga

SEQ ID NO: 1769498 - RNA, 19 nt, Artificial Sequence
  Description of Artificial Sequence: Synthetic oligonucleotide
  Antisense strand to SEQ ID NO: 1769497
uccucaaggaacaaggaca

SEQ ID NO: 1769499 - RNA, 19 nt, Artificial Sequence
  Description of Artificial Sequence: Synthetic oligonucleotide
  Sense strand starting at position 3306 of SEQ ID NO: 1562740
guccuuguuccuugaggag

SEQ ID NO: 1769500 - RNA, 19 nt, Artificial Sequence
  Description of Artificial Sequence: Synthetic oligonucleotide
  Antisense strand to SEQ ID NO: 1769499
cuccucaaggaacaaggac

SEQ ID NO: 1769501 - RNA, 19 nt, Artificial Sequence
  Description of Artificial Sequence: Synthetic oligonucleotide
  Sense strand starting at position 3391 of SEQ ID NO: 1562740
ccaccauccuagugacuuu

SEQ ID NO: 1769502 - RNA, 19 nt, Artificial Sequence
  Description of Artificial Sequence: Synthetic oligonucleotide
  Antisense strand to SEQ ID NO: 1769501
aaagucacuaggauggugg

SEQ ID NO: 1769503 - RNA, 19 nt, Artificial Sequence
  Description of Artificial Sequence: Synthetic oligonucleotide
  Sense strand starting at position 3915 of SEQ ID NO: 1562740
ucaugaggcucacaaugau

SEQ ID NO: 1769504 - RNA, 19 nt, Artificial Sequence
  Description of Artificial Sequence: Synthetic oligonucleotide
  Antisense strand to SEQ ID NO: 1769503
aucauugugagccucauga

SEQ ID NO: 1769505 - RNA, 19 nt, Artificial Sequence
  Description of Artificial Sequence: Synthetic oligonucleotide
  Sense strand starting at position 3921 of SEQ ID NO: 1562740
ggcucacaaugaucgaaca

SEQ ID NO: 1769506 - RNA, 19 nt, Artificial Sequence
  Description of Artificial Sequence: Synthetic oligonucleotide
  Antisense strand to SEQ ID NO: 1769505
uguucgaucauugugagcc

SEQ ID NO: 1769507 - RNA, 19 nt, Artificial Sequence
  Description of Artificial Sequence: Synthetic oligonucleotide
  Sense strand starting at position 3922 of SEQ ID NO: 1562740
gcucacaaugaucgaacaa

SEQ ID NO: 1769508 - RNA, 19 nt, Artificial Sequence
  Description of Artificial Sequence: Synthetic oligonucleotide
  Antisense strand to SEQ ID NO: 1769507
uuguucgaucauugugagc

SEQ ID NO: 1769509 - RNA, 19 nt, Artificial Sequence
  Description of Artificial Sequence: Synthetic oligonucleotide
  Sense strand starting at position 3943 of SEQ ID NO: 1562740
cggaucgguccagaugcaa

SEQ ID NO: 1769510 - RNA, 19 nt, Artificial Sequence
  Description of Artificial Sequence: Synthetic oligonucleotide
  Antisense strand to SEQ ID NO: 1769509
uugcaucuggaccgauccg

SEQ ID NO: 1769511 - RNA, 19 nt, Artificial Sequence
  Description of Artificial Sequence: Synthetic oligonucleotide
  Sense strand starting at position 186 of SEQ ID NO: 1562741
gguggcugugucuauccaa

SEQ ID NO: 1769512 - RNA, 19 nt, Artificial Sequence
  Description of Artificial Sequence: Synthetic oligonucleotide
  Antisense strand to SEQ ID NO: 1769511
uuggauagacacagccacc

SEQ ID NO: 1769513 - RNA, 19 nt, Artificial Sequence
  Description of Artificial Sequence: Synthetic oligonucleotide
  Sense strand starting at position 237 of SEQ ID NO: 1562741
ccaggugcucuuugggcaa

SEQ ID NO: 1769514 - RNA, 19 nt, Artificial Sequence
  Description of Artificial Sequence: Synthetic oligonucleotide
  Antisense strand to SEQ ID NO: 1769513
uugcccaaagagcaccugg

SEQ ID NO: 1769515 - RNA, 19 nt, Artificial Sequence
  Description of Artificial Sequence: Synthetic oligonucleotide
  Sense strand starting at position 662 of SEQ ID NO: 1562741
agacaaagugcuugugugu

SEQ ID NO: 1769516 - RNA, 19 nt, Artificial Sequence
  Description of Artificial Sequence: Synthetic oligonucleotide
  Antisense strand to SEQ ID NO: 1769515
acacacaagcacuuugucu

SEQ ID NO: 1769517 - RNA, 19 nt, Artificial Sequence
  Description of Artificial Sequence: Synthetic oligonucleotide
  Sense strand starting at position 988 of SEQ ID NO: 1562741
gaagucaugugcuaagcca

SEQ ID NO: 1769518 - RNA, 19 nt, Artificial Sequence
  Description of Artificial Sequence: Synthetic oligonucleotide
  Antisense strand to SEQ ID NO: 1769517
uggcuuagcacaugacuuc

SEQ ID NO: 1769519 - RNA, 19 nt, Artificial Sequence
  Description of Artificial Sequence: Synthetic oligonucleotide
  Sense strand starting at position 1359 of SEQ ID NO: 1562741
gcggacuucuuacccaaag

SEQ ID NO: 1769520 - RNA, 19 nt, Artificial Sequence
  Description of Artificial Sequence: Synthetic oligonucleotide
  Antisense strand to SEQ ID NO: 1769519
cuuuggguaagaaguccgc

SEQ ID NO: 1769521 - RNA, 19 nt, Artificial Sequence
  Description of Artificial Sequence: Synthetic oligonucleotide
  Sense strand starting at position 1586 of SEQ ID NO: 1562741
auagaaguguuucccuaug

SEQ ID NO: 1769522 - RNA, 19 nt, Artificial Sequence
  Description of Artificial Sequence: Synthetic oligonucleotide
  Antisense strand to SEQ ID NO: 1769521
cauagggaaacacuucuau

SEQ ID NO: 1769523 - RNA, 19 nt, Artificial Sequence
  Description of Artificial Sequence: Synthetic oligonucleotide
  Sense strand starting at position 1677 of SEQ ID NO: 1562741
cagagaggauuaugagaaa

SEQ ID NO: 1769524 - RNA, 19 nt, Artificial Sequence
  Description of Artificial Sequence: Synthetic oligonucleotide
  Antisense strand to SEQ ID NO: 1769523
uuucucauaauccucucug

SEQ ID NO: 1769525 - RNA, 19 nt, Artificial Sequence
  Description of Artificial Sequence: Synthetic oligonucleotide
  Sense strand starting at position 1680 of SEQ ID NO: 1562741
agaggauuaugagaaagug

SEQ ID NO: 1769526 - RNA, 19 nt, Artificial Sequence
  Description of Artificial Sequence: Synthetic oligonucleotide
  Antisense strand to SEQ ID NO: 1769525
cacuuucucauaauccucu

SEQ ID NO: 1769527 - RNA, 19 nt, Artificial Sequence
  Description of Artificial Sequence: Synthetic oligonucleotide
  Sense strand starting at position 1719 of SEQ ID NO: 1562741
uuuauucugugagcaaucu

SEQ ID NO: 1769528 - RNA, 19 nt, Artificial Sequence
  Description of Artificial Sequence: Synthetic oligonucleotide
  Antisense strand to SEQ ID NO: 1769527
agauugcucacagaauaaa

SEQ ID NO: 1769529 - RNA, 19 nt, Artificial Sequence
  Description of Artificial Sequence: Synthetic oligonucleotide
  Sense strand starting at position 1813 of SEQ ID NO: 1562741
cugagcucucccugaaacu

SEQ ID NO: 1769530 - RNA, 19 nt, Artificial Sequence
  Description of Artificial Sequence: Synthetic oligonucleotide
  Antisense strand to SEQ ID NO: 1769529
aguuucagggagagcucag

SEQ ID NO: 1769531 - RNA, 19 nt, Artificial Sequence
  Description of Artificial Sequence: Synthetic oligonucleotide
  Sense strand starting at position 1814 of SEQ ID NO: 1562741
ugagcucucccugaaacuc

SEQ ID NO: 1769532 - RNA, 19 nt, Artificial Sequence
  Description of Artificial Sequence: Synthetic oligonucleotide
  Antisense strand to SEQ ID NO: 1769531
gaguuucagggagagcuca

SEQ ID NO: 1769533 - RNA, 19 nt, Artificial Sequence
  Description of Artificial Sequence: Synthetic oligonucleotide
  Sense strand starting at position 1822 of SEQ ID NO: 1562741
cccugaaacuccuguugga

SEQ ID NO: 1769534 - RNA, 19 nt, Artificial Sequence
  Description of Artificial Sequence: Synthetic oligonucleotide
  Antisense strand to SEQ ID NO: 1769533
uccaacaggaguuucaggg

SEQ ID NO: 1769535 - RNA, 19 nt, Artificial Sequence
  Description of Artificial Sequence: Synthetic oligonucleotide
  Sense strand starting at position 1825 of SEQ ID NO: 1562741
ugaaacuccuguuggagaa

SEQ ID NO: 1769536 - RNA, 19 nt, Artificial Sequence
  Description of Artificial Sequence: Synthetic oligonucleotide
  Antisense strand to SEQ ID NO: 1769535
uucuccaacaggaguuuca

SEQ ID NO: 1769537 - RNA, 19 nt, Artificial Sequence
  Description of Artificial Sequence: Synthetic oligonucleotide
  Sense strand starting at position 1827 of SEQ ID NO: 1562741
aaacuccuguuggagaaau

SEQ ID NO: 1769538 - RNA, 19 nt, Artificial Sequence
  Description of Artificial Sequence: Synthetic oligonucleotide
  Antisense strand to SEQ ID NO: 1769537
auuucuccaacaggaguuu

SEQ ID NO: 1769539 - RNA, 19 nt, Artificial Sequence
  Description of Artificial Sequence: Synthetic oligonucleotide
  Sense strand starting at position 1916 of SEQ ID NO: 1562741
ucucaauugucacugagag

SEQ ID NO: 1769540 - RNA, 19 nt, Artificial Sequence
  Description of Artificial Sequence: Synthetic oligonucleotide
  Antisense strand to SEQ ID NO: 1769539
cucucagugacaauugaga

SEQ ID NO: 1769541 - RNA, 19 nt, Artificial Sequence
  Description of Artificial Sequence: Synthetic oligonucleotide
  Sense strand starting at position 1917 of SEQ ID NO: 1562741
cucaauugucacugagaga

SEQ ID NO: 1769542 - RNA, 19 nt, Artificial Sequence
  Description of Artificial Sequence: Synthetic oligonucleotide
  Antisense strand to SEQ ID NO: 1769541
ucucucagugacaauugag

SEQ ID NO: 1769543 - RNA, 19 nt, Artificial Sequence
  Description of Artificial Sequence: Synthetic oligonucleotide
  Sense strand starting at position 1920 of SEQ ID NO: 1562741
aauugucacugagagauuc

SEQ ID NO: 1769544 - RNA, 19 nt, Artificial Sequence
  Description of Artificial Sequence: Synthetic oligonucleotide
  Antisense strand to SEQ ID NO: 1769543
gaaucucucagugacaauu

SEQ ID NO: 1769545 - RNA, 19 nt, Artificial Sequence
  Description of Artificial Sequence: Synthetic oligonucleotide
  Sense strand starting at position 1928 of SEQ ID NO: 1562741
cugagagauuccuaccagg

SEQ ID NO: 1769546 - RNA, 19 nt, Artificial Sequence
  Description of Artificial Sequence: Synthetic oligonucleotide
  Antisense strand to SEQ ID NO: 1769545
ccugguaggaaucucucag

SEQ ID NO: 1769547 - RNA, 19 nt, Artificial Sequence
  Description of Artificial Sequence: Synthetic oligonucleotide
  Sense strand starting at position 1931 of SEQ ID NO: 1562741
agagauuccuaccaggaug

SEQ ID NO: 1769548 - RNA, 19 nt, Artificial Sequence
  Description of Artificial Sequence: Synthetic oligonucleotide
  Antisense strand to SEQ ID NO: 1769547
cauccugguaggaaucucu

SEQ ID NO: 1769549 - RNA, 19 nt, Artificial Sequence
  Description of Artificial Sequence: Synthetic oligonucleotide
  Sense strand starting at position 2077 of SEQ ID NO: 1562741
ggaucaagcggagaagguu

SEQ ID NO: 1769550 - RNA, 19 nt, Artificial Sequence
  Description of Artificial Sequence: Synthetic oligonucleotide
  Antisense strand to SEQ ID NO: 1769549
aaccuucuccgcuugaucc

SEQ ID NO: 1769551 - RNA, 19 nt, Artificial Sequence
  Description of Artificial Sequence: Synthetic oligonucleotide
  Sense strand starting at position 2086 of SEQ ID NO: 1562741
ggagaagguuggccucauu

SEQ ID NO: 1769552 - RNA, 19 nt, Artificial Sequence
  Description of Artificial Sequence: Synthetic oligonucleotide
  Antisense strand to SEQ ID NO: 1769551
aaugaggccaaccuucucc

SEQ ID NO: 1769553 - RNA, 19 nt, Artificial Sequence
  Description of Artificial Sequence: Synthetic oligonucleotide
  Sense strand starting at position 2373 of SEQ ID NO: 1562741
guucccucaucuugggaau

SEQ ID NO: 1769554 - RNA, 19 nt, Artificial Sequence
  Description of Artificial Sequence: Synthetic oligonucleotide
  Antisense strand to SEQ ID NO: 1769553
auucccaagaugagggaac

SEQ ID NO: 1769555 - RNA, 19 nt, Artificial Sequence
  Description of Artificial Sequence: Synthetic oligonucleotide
  Sense strand starting at position 2375 of SEQ ID NO: 1562741
ucccucaucuugggaauga

SEQ ID NO: 1769556 - RNA, 19 nt, Artificial Sequence
  Description of Artificial Sequence: Synthetic oligonucleotide
  Antisense strand to SEQ ID NO: 1769555
ucauucccaagaugaggga

SEQ ID NO: 1769557 - RNA, 19 nt, Artificial Sequence
  Description of Artificial Sequence: Synthetic oligonucleotide
  Sense strand starting at position 2379 of SEQ ID NO: 1562741
ucaucuugggaaugaggua

SEQ ID NO: 1769558 - RNA, 19 nt, Artificial Sequence
  Description of Artificial Sequence: Synthetic oligonucleotide
  Antisense strand to SEQ ID NO: 1769557
uaccucauucccaagauga

SEQ ID NO: 1769559 - RNA, 19 nt, Artificial Sequence
  Description of Artificial Sequence: Synthetic oligonucleotide
  Sense strand starting at position 2518 of SEQ ID NO: 1562741
gggcugucuggguggcaau

SEQ ID NO: 1769560 - RNA, 19 nt, Artificial Sequence
  Description of Artificial Sequence: Synthetic oligonucleotide
  Antisense strand to SEQ ID NO: 1769559
auugccacccagacagccc

SEQ ID NO: 1769561 - RNA, 19 nt, Artificial Sequence
  Description of Artificial Sequence: Synthetic oligonucleotide
  Sense strand starting at position 2626 of SEQ ID NO: 1562741
cuguucugauggccuuaua

SEQ ID NO: 1769562 - RNA, 19 nt, Artificial Sequence
  Description of Artificial Sequence: Synthetic oligonucleotide
  Antisense strand to SEQ ID NO: 1769561
uauaaggccaucagaacag

SEQ ID NO: 1769563 - RNA, 19 nt, Artificial Sequence
  Description of Artificial Sequence: Synthetic oligonucleotide
  Sense strand starting at position 2671 of SEQ ID NO: 1562741
ggagguaggugcucuguuu

SEQ ID NO: 1769564 - RNA, 19 nt, Artificial Sequence
  Description of Artificial Sequence: Synthetic oligonucleotide
  Antisense strand to SEQ ID NO: 1769563
aaacagagcaccuaccucc

SEQ ID NO: 1769565 - RNA, 19 nt, Artificial Sequence
  Description of Artificial Sequence: Synthetic oligonucleotide
  Sense strand starting at position 3035 of SEQ ID NO: 1562741
gggauuacuuguccaaguu

SEQ ID NO: 1769566 - RNA, 19 nt, Artificial Sequence
  Description of Artificial Sequence: Synthetic oligonucleotide
  Antisense strand to SEQ ID NO: 1769565
aacuuggacaaguaauccc

SEQ ID NO: 1769567 - RNA, 19 nt, Artificial Sequence
  Description of Artificial Sequence: Synthetic oligonucleotide
  Sense strand starting at position 3036 of SEQ ID NO: 1562741
ggauuacuuguccaaguuc

SEQ ID NO: 1769568 - RNA, 19 nt, Artificial Sequence
  Description of Artificial Sequence: Synthetic oligonucleotide
  Antisense strand to SEQ ID NO: 1769567
gaacuuggacaaguaaucc

SEQ ID NO: 1769569 - RNA, 19 nt, Artificial Sequence
  Description of Artificial Sequence: Synthetic oligonucleotide
  Sense strand starting at position 3147 of SEQ ID NO: 1562741
cagccaucccagggacuau

SEQ ID NO: 1769570 - RNA, 19 nt, Artificial Sequence
  Description of Artificial Sequence: Synthetic oligonucleotide
  Antisense strand to SEQ ID NO: 1769569
auagucccugggauggcug

SEQ ID NO: 1769571 - RNA, 19 nt, Artificial Sequence
  Description of Artificial Sequence: Synthetic oligonucleotide
  Sense strand starting at position 3277 of SEQ ID NO: 1562741
cucguugucccuggagcaa

SEQ ID NO: 1769572 - RNA, 19 nt, Artificial Sequence
  Description of Artificial Sequence: Synthetic oligonucleotide
  Antisense strand to SEQ ID NO: 1769571
uugcuccagggacaacgag

SEQ ID NO: 1769573 - RNA, 19 nt, Artificial Sequence
  Description of Artificial Sequence: Synthetic oligonucleotide
  Sense strand starting at position 3323 of SEQ ID NO: 1562741
guuuccugaucugcagcua

SEQ ID NO: 1769574 - RNA, 19 nt, Artificial Sequence
  Description of Artificial Sequence: Synthetic oligonucleotide
  Antisense strand to SEQ ID NO: 1769573
uagcugcagaucaggaaac

SEQ ID NO: 1769575 - RNA, 19 nt, Artificial Sequence
  Description of Artificial Sequence: Synthetic oligonucleotide
  Sense strand starting at position 3405 of SEQ ID NO: 1562741
aagaguggguuuggaagua

SEQ ID NO: 1769576 - RNA, 19 nt, Artificial Sequence
  Description of Artificial Sequence: Synthetic oligonucleotide
  Antisense strand to SEQ ID NO: 1769575
uacuuccaaacccacucuu

SEQ ID NO: 1769577 - RNA, 19 nt, Artificial Sequence
  Description of Artificial Sequence: Synthetic oligonucleotide
  Sense strand starting at position 3417 of SEQ ID NO: 1562741
ggaaguacuucccagacug

SEQ ID NO: 1769578 - RNA, 19 nt, Artificial Sequence
  Description of Artificial Sequence: Synthetic oligonucleotide
  Antisense strand to SEQ ID NO: 1769577
cagucugggaaguacuucc

SEQ ID NO: 1769579 - RNA, 19 nt, Artificial Sequence
  Description of Artificial Sequence: Synthetic oligonucleotide
  Sense strand starting at position 3544 of SEQ ID NO: 1562741
cagggaugcugagaacauc

SEQ ID NO: 1769580 - RNA, 19 nt, Artificial Sequence
  Description of Artificial Sequence: Synthetic oligonucleotide
  Antisense strand to SEQ ID NO: 1769579
gauguucucagcaucccug

SEQ ID NO: 1769581 - RNA, 19 nt, Artificial Sequence
  Description of Artificial Sequence: Synthetic oligonucleotide
  Sense strand starting at position 3554 of SEQ ID NO: 1562741
gagaacaucuugcagggau

SEQ ID NO: 1769582 - RNA, 19 nt, Artificial Sequence
  Description of Artificial Sequence: Synthetic oligonucleotide
  Antisense strand to SEQ ID NO: 1769581
aucccugcaagauguucuc

SEQ ID NO: 1769583 - RNA, 19 nt, Artificial Sequence
  Description of Artificial Sequence: Synthetic oligonucleotide
  Sense strand starting at position 3631 of SEQ ID NO: 1562741
gaccaagacucgggaacuu

SEQ ID NO: 1769584 - RNA, 19 nt, Artificial Sequence
  Description of Artificial Sequence: Synthetic oligonucleotide
  Antisense strand to SEQ ID NO: 1769583
aaguucccgagucuugguc

SEQ ID NO: 1769585 - RNA, 19 nt, Artificial Sequence
  Description of Artificial Sequence: Synthetic oligonucleotide
  Sense strand starting at position 3683 of SEQ ID NO: 1562741
caaauaaggugcuuuagga

SEQ ID NO: 1769586 - RNA, 19 nt, Artificial Sequence
  Description of Artificial Sequence: Synthetic oligonucleotide
  Antisense strand to SEQ ID NO: 1769585
uccuaaagcaccuuauuug

SEQ ID NO: 1769587 - RNA, 19 nt, Artificial Sequence
  Description of Artificial Sequence: Synthetic oligonucleotide
  Sense strand starting at position 3753 of SEQ ID NO: 1562741
uccagagucuugggcaacu

SEQ ID NO: 1769588 - RNA, 19 nt, Artificial Sequence
  Description of Artificial Sequence: Synthetic oligonucleotide
  Antisense strand to SEQ ID NO: 1769587
aguugcccaagacucugga

SEQ ID NO: 1769589 - RNA, 19 nt, Artificial Sequence
  Description of Artificial Sequence: Synthetic oligonucleotide
  Sense strand starting at position 3755 of SEQ ID NO: 1562741
cagagucuugggcaacuga

SEQ ID NO: 1769590 - RNA, 19 nt, Artificial Sequence
  Description of Artificial Sequence: Synthetic oligonucleotide
  Antisense strand to SEQ ID NO: 1769589
ucaguugcccaagacucug

SEQ ID NO: 1769591 - RNA, 19 nt, Artificial Sequence
  Description of Artificial Sequence: Synthetic oligonucleotide
  Sense strand starting at position 12 of SEQ ID NO: 1562742
gucucuggugccugagacu

SEQ ID NO: 1769592 - RNA, 19 nt, Artificial Sequence
  Description of Artificial Sequence: Synthetic oligonucleotide
  Antisense strand to SEQ ID NO: 1769591
agucucaggcaccagagac

SEQ ID NO: 1769593 - RNA, 19 nt, Artificial Sequence
  Description of Artificial Sequence: Synthetic oligonucleotide
  Sense strand starting at position 28 of SEQ ID NO: 1562742
acuccagucucauuugcau

SEQ ID NO: 1769594 - RNA, 19 nt, Artificial Sequence
  Description of Artificial Sequence: Synthetic oligonucleotide
  Antisense strand to SEQ ID NO: 1769593
augcaaaugagacuggagu

SEQ ID NO: 1769595 - RNA, 19 nt, Artificial Sequence
  Description of Artificial Sequence: Synthetic oligonucleotide
  Sense strand starting at position 83 of SEQ ID NO: 1562742
gaauguccuccugagcaga

SEQ ID NO: 1769596 - RNA, 19 nt, Artificial Sequence
  Description of Artificial Sequence: Synthetic oligonucleotide
  Antisense strand to SEQ ID NO: 1769595
ucugcucaggaggacauuc

SEQ ID NO: 1769597 - RNA, 19 nt, Artificial Sequence
  Description of Artificial Sequence: Synthetic oligonucleotide
  Sense strand starting at position 128 of SEQ ID NO: 1562742
uggcgucaaucccucaaau

SEQ ID NO: 1769598 - RNA, 19 nt, Artificial Sequence
  Description of Artificial Sequence: Synthetic oligonucleotide
  Antisense strand to SEQ ID NO: 1769597
auuugagggauugacgcca

SEQ ID NO: 1769599 - RNA, 19 nt, Artificial Sequence
  Description of Artificial Sequence: Synthetic oligonucleotide
  Sense strand starting at position 186 of SEQ ID NO: 1562742
ccgacuugucccugagcug

SEQ ID NO: 1769600 - RNA, 19 nt, Artificial Sequence
  Description of Artificial Sequence: Synthetic oligonucleotide
  Antisense strand to SEQ ID NO: 1769599
cagcucagggacaagucgg

SEQ ID NO: 1769601 - RNA, 19 nt, Artificial Sequence
  Description of Artificial Sequence: Synthetic oligonucleotide
  Sense strand starting at position 538 of SEQ ID NO: 1562742
guauguguccucugcagca

SEQ ID NO: 1769602 - RNA, 19 nt, Artificial Sequence
  Description of Artificial Sequence: Synthetic oligonucleotide
  Antisense strand to SEQ ID NO: 1769601
ugcugcagaggacacauac

SEQ ID NO: 1769603 - RNA, 19 nt, Artificial Sequence
  Description of Artificial Sequence: Synthetic oligonucleotide
  Sense strand starting at position 1411 of SEQ ID NO: 1562742
cguccaauauccgagcaga

SEQ ID NO: 1769604 - RNA, 19 nt, Artificial Sequence
  Description of Artificial Sequence: Synthetic oligonucleotide
  Antisense strand to SEQ ID NO: 1769603
ucugcucggauauuggacg

SEQ ID NO: 1769605 - RNA, 19 nt, Artificial Sequence
  Description of Artificial Sequence: Synthetic oligonucleotide
  Sense strand starting at position 2021 of SEQ ID NO: 1562742
uuuccuugccuagaggagu

SEQ ID NO: 1769606 - RNA, 19 nt, Artificial Sequence
  Description of Artificial Sequence: Synthetic oligonucleotide
  Antisense strand to SEQ ID NO: 1769605
acuccucuaggcaaggaaa

SEQ ID NO: 1769607 - RNA, 19 nt, Artificial Sequence
  Description of Artificial Sequence: Synthetic oligonucleotide
  Sense strand starting at position 2035 of SEQ ID NO: 1562742
ggagucagcugcuguguua

SEQ ID NO: 1769608 - RNA, 19 nt, Artificial Sequence
  Description of Artificial Sequence: Synthetic oligonucleotide
  Antisense strand to SEQ ID NO: 1769607
uaacacagcagcugacucc

SEQ ID NO: 1769609 - RNA, 19 nt, Artificial Sequence
  Description of Artificial Sequence: Synthetic oligonucleotide
  Sense strand starting at position 2607 of SEQ ID NO: 1562742
aggacuugcuguccuggaa

SEQ ID NO: 1769610 - RNA, 19 nt, Artificial Sequence
  Description of Artificial Sequence: Synthetic oligonucleotide
  Antisense strand to SEQ ID NO: 1769609
uuccaggacagcaaguccu

SEQ ID NO: 1769611 - RNA, 19 nt, Artificial Sequence
  Description of Artificial Sequence: Synthetic oligonucleotide
  Sense strand starting at position 2701 of SEQ ID NO: 1562742
cgggucugcuucccugaau

SEQ ID NO: 1769612 - RNA, 19 nt, Artificial Sequence
  Description of Artificial Sequence: Synthetic oligonucleotide
  Antisense strand to SEQ ID NO: 1769611
auucagggaagcagacccg

SEQ ID NO: 1769613 - RNA, 19 nt, Artificial Sequence
  Description of Artificial Sequence: Synthetic oligonucleotide
  Sense strand starting at position 2702 of SEQ ID NO: 1562742
gggucugcuucccugaauc

SEQ ID NO: 1769614 - RNA, 19 nt, Artificial Sequence
  Description of Artificial Sequence: Synthetic oligonucleotide
  Antisense strand to SEQ ID NO: 1769613
gauucagggaagcagaccc

SEQ ID NO: 1769615 - RNA, 19 nt, Artificial Sequence
  Description of Artificial Sequence: Synthetic oligonucleotide
  Sense strand starting at position 3087 of SEQ ID NO: 1562742
cuggaaugauuguuuagag

SEQ ID NO: 1769616 - RNA, 19 nt, Artificial Sequence
  Description of Artificial Sequence: Synthetic oligonucleotide
  Antisense strand to SEQ ID NO: 1769615
cucuaaacaaucauuccag

SEQ ID NO: 1769617 - RNA, 19 nt, Artificial Sequence
  Description of Artificial Sequence: Synthetic oligonucleotide
  Sense strand starting at position 3211 of SEQ ID NO: 1562742
aagugcauuccugggcuua

SEQ ID NO: 1769618 - RNA, 19 nt, Artificial Sequence
  Description of Artificial Sequence: Synthetic oligonucleotide
  Antisense strand to SEQ ID NO: 1769617
uaagcccaggaaugcacuu

SEQ ID NO: 1769619 - RNA, 19 nt, Artificial Sequence
  Description of Artificial Sequence: Synthetic oligonucleotide
  Sense strand starting at position 3431 of SEQ ID NO: 1562742
caggaaggucccugaaugu

SEQ ID NO: 1769620 - RNA, 19 nt, Artificial Sequence
  Description of Artificial Sequence: Synthetic oligonucleotide
  Antisense strand to SEQ ID NO: 1769619
acauucagggaccuuccug

SEQ ID NO: 1769621 - RNA, 19 nt, Artificial Sequence
  Description of Artificial Sequence: Synthetic oligonucleotide
  Sense strand starting at position 3693 of SEQ ID NO: 1562742
uuccucucaggccgaaaua

SEQ ID NO: 1769622 - RNA, 19 nt, Artificial Sequence
  Description of Artificial Sequence: Synthetic oligonucleotide
  Antisense strand to SEQ ID NO: 1769621
uauuucggccugagaggaa

SEQ ID NO: 1769623 - RNA, 19 nt, Artificial Sequence
  Description of Artificial Sequence: Synthetic oligonucleotide
  Sense strand starting at position 3694 of SEQ ID NO: 1562742
uccucucaggccgaaauaa

SEQ ID NO: 1769624 - RNA, 19 nt, Artificial Sequence
  Description of Artificial Sequence: Synthetic oligonucleotide
  Antisense strand to SEQ ID NO: 1769623
uuauuucggccugagagga

SEQ ID NO: 1769625 - RNA, 19 nt, Artificial Sequence
  Description of Artificial Sequence: Synthetic oligonucleotide
  Sense strand starting at position 3881 of SEQ ID NO: 1562742
ugaggagugacucguacau

SEQ ID NO: 1769626 - RNA, 19 nt, Artificial Sequence
  Description of Artificial Sequence: Synthetic oligonucleotide
  Antisense strand to SEQ ID NO: 1769625
auguacgagucacuccuca

SEQ ID NO: 1769627 - RNA, 19 nt, Artificial Sequence
  Description of Artificial Sequence: Synthetic oligonucleotide
  Sense strand starting at position 3883 of SEQ ID NO: 1562742
aggagugacucguacauca

SEQ ID NO: 1769628 - RNA, 19 nt, Artificial Sequence
  Description of Artificial Sequence: Synthetic oligonucleotide
  Antisense strand to SEQ ID NO: 1769627
ugauguacgagucacuccu

SEQ ID NO: 1769629 - RNA, 19 nt, Artificial Sequence
  Description of Artificial Sequence: Synthetic oligonucleotide
  Sense strand starting at position 3885 of SEQ ID NO: 1562742
gagugacucguacaucacu

SEQ ID NO: 1769630 - RNA, 19 nt, Artificial Sequence
  Description of Artificial Sequence: Synthetic oligonucleotide
  Antisense strand to SEQ ID NO: 1769629
agugauguacgagucacuc

SEQ ID NO: 1769631 - RNA, 19 nt, Artificial Sequence
  Description of Artificial Sequence: Synthetic oligonucleotide
  Sense strand starting at position 13 of SEQ ID NO: 1562745
gggagaaauuaugucuuau

SEQ ID NO: 1769632 - RNA, 19 nt, Artificial Sequence
  Description of Artificial Sequence: Synthetic oligonucleotide
  Antisense strand to SEQ ID NO: 1769631
auaagacauaauuucuccc

SEQ ID NO: 1769633 - RNA, 19 nt, Artificial Sequence
  Description of Artificial Sequence: Synthetic oligonucleotide
  Sense strand starting at position 118 of SEQ ID NO: 1562745
gagaaugaggcuugcucaa

SEQ ID NO: 1769634 - RNA, 19 nt, Artificial Sequence
  Description of Artificial Sequence: Synthetic oligonucleotide
  Antisense strand to SEQ ID NO: 1769633
uugagcaagccucauucuc

SEQ ID NO: 1769635 - RNA, 19 nt, Artificial Sequence
  Description of Artificial Sequence: Synthetic oligonucleotide
  Sense strand starting at position 347 of SEQ ID NO: 1562745
ggagaagugccuggaagca

SEQ ID NO: 1769636 - RNA, 19 nt, Artificial Sequence
  Description of Artificial Sequence: Synthetic oligonucleotide
  Antisense strand to SEQ ID NO: 1769635
ugcuuccaggcacuucucc

SEQ ID NO: 1769637 - RNA, 19 nt, Artificial Sequence
  Description of Artificial Sequence: Synthetic oligonucleotide
  Sense strand starting at position 472 of SEQ ID NO: 1562745
agccguggucuccaccaua

SEQ ID NO: 1769638 - RNA, 19 nt, Artificial Sequence
  Description of Artificial Sequence: Synthetic oligonucleotide
  Antisense strand to SEQ ID NO: 1769637
uaugguggagaccacggcu

SEQ ID NO: 1769639 - RNA, 19 nt, Artificial Sequence
  Description of Artificial Sequence: Synthetic oligonucleotide
  Sense strand starting at position 623 of SEQ ID NO: 1562745
ccaagugccucggucuauu

SEQ ID NO: 1769640 - RNA, 19 nt, Artificial Sequence
  Description of Artificial Sequence: Synthetic oligonucleotide
  Antisense strand to SEQ ID NO: 1769639
aauagaccgaggcacuugg

SEQ ID NO: 1769641 - RNA, 19 nt, Artificial Sequence
  Description of Artificial Sequence: Synthetic oligonucleotide
  Sense strand starting at position 944 of SEQ ID NO: 1562745
gagccuucuccagagagcu

SEQ ID NO: 1769642 - RNA, 19 nt, Artificial Sequence
  Description of Artificial Sequence: Synthetic oligonucleotide
  Antisense strand to SEQ ID NO: 1769641
agcucucuggagaaggcuc

SEQ ID NO: 1769643 - RNA, 19 nt, Artificial Sequence
  Description of Artificial Sequence: Synthetic oligonucleotide
  Sense strand starting at position 976 of SEQ ID NO: 1562745
agggaaaucacuugggcag

SEQ ID NO: 1769644 - RNA, 19 nt, Artificial Sequence
  Description of Artificial Sequence: Synthetic oligonucleotide
  Antisense strand to SEQ ID NO: 1769643
cugcccaagugauuucccu

SEQ ID NO: 1769645 - RNA, 19 nt, Artificial Sequence
  Description of Artificial Sequence: Synthetic oligonucleotide
  Sense strand starting at position 977 of SEQ ID NO: 1562745
gggaaaucacuugggcaga

SEQ ID NO: 1769646 - RNA, 19 nt, Artificial Sequence
  Description of Artificial Sequence: Synthetic oligonucleotide
  Antisense strand to SEQ ID NO: 1769645
ucugcccaagugauuuccc

SEQ ID NO: 1769647 - RNA, 19 nt, Artificial Sequence
  Description of Artificial Sequence: Synthetic oligonucleotide
  Sense strand starting at position 1109 of SEQ ID NO: 1562745
ccucuugucucaguuaaca

SEQ ID NO: 1769648 - RNA, 19 nt, Artificial Sequence
  Description of Artificial Sequence: Synthetic oligonucleotide
  Antisense strand to SEQ ID NO: 1769647
uguuaacugagacaagagg

SEQ ID NO: 1769649 - RNA, 19 nt, Artificial Sequence
  Description of Artificial Sequence: Synthetic oligonucleotide
  Sense strand starting at position 1322 of SEQ ID NO: 1562745
gcagcaggucgauacucau

SEQ ID NO: 1769650 - RNA, 19 nt, Artificial Sequence
  Description of Artificial Sequence: Synthetic oligonucleotide
  Antisense strand to SEQ ID NO: 1769649
augaguaucgaccugcugc

SEQ ID NO: 1769651 - RNA, 19 nt, Artificial Sequence
  Description of Artificial Sequence: Synthetic oligonucleotide
  Sense strand starting at position 1328 of SEQ ID NO: 1562745
ggucgauacucaucucuuc

SEQ ID NO: 1769652 - RNA, 19 nt, Artificial Sequence
  Description of Artificial Sequence: Synthetic oligonucleotide
  Antisense strand to SEQ ID NO: 1769651
gaagagaugaguaucgacc

SEQ ID NO: 1769653 - RNA, 19 nt, Artificial Sequence
  Description of Artificial Sequence: Synthetic oligonucleotide
  Sense strand starting at position 1348 of SEQ ID NO: 1562745
ucuaaaugccugugaggaa

SEQ ID NO: 1769654 - RNA, 19 nt, Artificial Sequence
  Description of Artificial Sequence: Synthetic oligonucleotide
  Antisense strand to SEQ ID NO: 1769653
uuccucacaggcauuuaga

SEQ ID NO: 1769655 - RNA, 19 nt, Artificial Sequence
  Description of Artificial Sequence: Synthetic oligonucleotide
  Sense strand starting at position 1364 of SEQ ID NO: 1562745
gaaccugcucgcugcaaga

SEQ ID NO: 1769656 - RNA, 19 nt, Artificial Sequence
  Description of Artificial Sequence: Synthetic oligonucleotide
  Antisense strand to SEQ ID NO: 1769655
ucuugcagcgagcagguuc

SEQ ID NO: 1769657 - RNA, 19 nt, Artificial Sequence
  Description of Artificial Sequence: Synthetic oligonucleotide
  Sense strand starting at position 2607 of SEQ ID NO: 1562745
agccuuucuguuugcaaag

SEQ ID NO: 1769658 - RNA, 19 nt, Artificial Sequence
  Description of Artificial Sequence: Synthetic oligonucleotide
  Antisense strand to SEQ ID NO: 1769657
cuuugcaaacagaaaggcu

SEQ ID NO: 1769659 - RNA, 19 nt, Artificial Sequence
  Description of Artificial Sequence: Synthetic oligonucleotide
  Sense strand starting at position 2637 of SEQ ID NO: 1562745
gcaccugcuuuccuggauu

SEQ ID NO: 1769660 - RNA, 19 nt, Artificial Sequence
  Description of Artificial Sequence: Synthetic oligonucleotide
  Antisense strand to SEQ ID NO: 1769659
aauccaggaaagcaggugc

SEQ ID NO: 1769661 - RNA, 19 nt, Artificial Sequence
  Description of Artificial Sequence: Synthetic oligonucleotide
  Sense strand starting at position 2677 of SEQ ID NO: 1562745
gugugaaaggccuaugcaa

SEQ ID NO: 1769662 - RNA, 19 nt, Artificial Sequence
  Description of Artificial Sequence: Synthetic oligonucleotide
  Antisense strand to SEQ ID NO: 1769661
uugcauaggccuuucacac

SEQ ID NO: 1769663 - RNA, 19 nt, Artificial Sequence
  Description of Artificial Sequence: Synthetic oligonucleotide
  Sense strand starting at position 2679 of SEQ ID NO: 1562745
gugaaaggccuaugcaaac

SEQ ID NO: 1769664 - RNA, 19 nt, Artificial Sequence
  Description of Artificial Sequence: Synthetic oligonucleotide
  Antisense strand to SEQ ID NO: 1769663
guuugcauaggccuuucac

SEQ ID NO: 1769665 - RNA, 19 nt, Artificial Sequence
  Description of Artificial Sequence: Synthetic oligonucleotide
  Sense strand starting at position 2691 of SEQ ID NO: 1562745
ugcaaacccuaacgauuua

SEQ ID NO: 1769666 - RNA, 19 nt, Artificial Sequence
  Description of Artificial Sequence: Synthetic oligonucleotide
  Antisense strand to SEQ ID NO: 1769665
uaaaucguuaggguuugca

SEQ ID NO: 1769667 - RNA, 19 nt, Artificial Sequence
  Description of Artificial Sequence: Synthetic oligonucleotide
  Sense strand starting at position 2715 of SEQ ID NO: 1562745
gugagguuugugcagcgau

SEQ ID NO: 1769668 - RNA, 19 nt, Artificial Sequence
  Description of Artificial Sequence: Synthetic oligonucleotide
  Antisense strand to SEQ ID NO: 1769667
aucgcugcacaaaccucac

SEQ ID NO: 1769669 - RNA, 19 nt, Artificial Sequence
  Description of Artificial Sequence: Synthetic oligonucleotide
  Sense strand starting at position 2738 of SEQ ID NO: 1562745
gggagcauuagucaucucu

SEQ ID NO: 1769670 - RNA, 19 nt, Artificial Sequence
  Description of Artificial Sequence: Synthetic oligonucleotide
  Antisense strand to SEQ ID NO: 1769669
agagaugacuaaugcuccc

SEQ ID NO: 1769671 - RNA, 19 nt, Artificial Sequence
  Description of Artificial Sequence: Synthetic oligonucleotide
  Sense strand starting at position 2951 of SEQ ID NO: 1562745
gcaucagacccucagcaaa

SEQ ID NO: 1769672 - RNA, 19 nt, Artificial Sequence
  Description of Artificial Sequence: Synthetic oligonucleotide
  Antisense strand to SEQ ID NO: 1769671
uuugcugagggucugaugc

SEQ ID NO: 1769673 - RNA, 19 nt, Artificial Sequence
  Description of Artificial Sequence: Synthetic oligonucleotide
  Sense strand starting at position 3127 of SEQ ID NO: 1562745
ugaagcuuuguguauccua

SEQ ID NO: 1769674 - RNA, 19 nt, Artificial Sequence
  Description of Artificial Sequence: Synthetic oligonucleotide
  Antisense strand to SEQ ID NO: 1769673
uaggauacacaaagcuuca

SEQ ID NO: 1769675 - RNA, 19 nt, Artificial Sequence
  Description of Artificial Sequence: Synthetic oligonucleotide
  Sense strand starting at position 3134 of SEQ ID NO: 1562745
uuguguauccuagagcauc

SEQ ID NO: 1769676 - RNA, 19 nt, Artificial Sequence
  Description of Artificial Sequence: Synthetic oligonucleotide
  Antisense strand to SEQ ID NO: 1769675
gaugcucuaggauacacaa

SEQ ID NO: 1769677 - RNA, 19 nt, Artificial Sequence
  Description of Artificial Sequence: Synthetic oligonucleotide
  Sense strand starting at position 3142 of SEQ ID NO: 1562745
ccuagagcaucccugacaa

SEQ ID NO: 1769678 - RNA, 19 nt, Artificial Sequence
  Description of Artificial Sequence: Synthetic oligonucleotide
  Antisense strand to SEQ ID NO: 1769677
uugucagggaugcucuagg

SEQ ID NO: 1769679 - RNA, 19 nt, Artificial Sequence
  Description of Artificial Sequence: Synthetic oligonucleotide
  Sense strand starting at position 3164 of SEQ ID NO: 1562745
gcaaaugccuucccagcua

SEQ ID NO: 1769680 - RNA, 19 nt, Artificial Sequence
  Description of Artificial Sequence: Synthetic oligonucleotide
  Antisense strand to SEQ ID NO: 1769679
uagcugggaaggcauuugc

SEQ ID NO: 1769681 - RNA, 19 nt, Artificial Sequence
  Description of Artificial Sequence: Synthetic oligonucleotide
  Sense strand starting at position 3176 of SEQ ID NO: 1562745
ccagcuaacgcguuccuua

SEQ ID NO: 1769682 - RNA, 19 nt, Artificial Sequence
  Description of Artificial Sequence: Synthetic oligonucleotide
  Antisense strand to SEQ ID NO: 1769681
uaaggaacgcguuagcugg

SEQ ID NO: 1769683 - RNA, 19 nt, Artificial Sequence
  Description of Artificial Sequence: Synthetic oligonucleotide
  Sense strand starting at position 3177 of SEQ ID NO: 1562745
cagcuaacgcguuccuuau

SEQ ID NO: 1769684 - RNA, 19 nt, Artificial Sequence
  Description of Artificial Sequence: Synthetic oligonucleotide
  Antisense strand to SEQ ID NO: 1769683
auaaggaacgcguuagcug

SEQ ID NO: 1769685 - RNA, 19 nt, Artificial Sequence
  Description of Artificial Sequence: Synthetic oligonucleotide
  Sense strand starting at position 3204 of SEQ ID NO: 1562745
accuuuguaagguguggau

SEQ ID NO: 1769686 - RNA, 19 nt, Artificial Sequence
  Description of Artificial Sequence: Synthetic oligonucleotide
  Antisense strand to SEQ ID NO: 1769685
auccacaccuuacaaaggu

SEQ ID NO: 1769687 - RNA, 19 nt, Artificial Sequence
  Description of Artificial Sequence: Synthetic oligonucleotide
  Sense strand starting at position 3206 of SEQ ID NO: 1562745
cuuuguaagguguggauca

SEQ ID NO: 1769688 - RNA, 19 nt, Artificial Sequence
  Description of Artificial Sequence: Synthetic oligonucleotide
  Antisense strand to SEQ ID NO: 1769687
ugauccacaccuuacaaag

SEQ ID NO: 1769689 - RNA, 19 nt, Artificial Sequence
  Description of Artificial Sequence: Synthetic oligonucleotide
  Sense strand starting at position 3345 of SEQ ID NO: 1562745
uguggcaucucagcaucau

SEQ ID NO: 1769690 - RNA, 19 nt, Artificial Sequence
  Description of Artificial Sequence: Synthetic oligonucleotide
  Antisense strand to SEQ ID NO: 1769689
augaugcugagaugccaca

SEQ ID NO: 1769691 - RNA, 19 nt, Artificial Sequence
  Description of Artificial Sequence: Synthetic oligonucleotide
  Sense strand starting at position 3400 of SEQ ID NO: 1562745
gauggagaccauugcguua

SEQ ID NO: 1769692 - RNA, 19 nt, Artificial Sequence
  Description of Artificial Sequence: Synthetic oligonucleotide
  Antisense strand to SEQ ID NO: 1769691
uaacgcaauggucuccauc

SEQ ID NO: 1769693 - RNA, 19 nt, Artificial Sequence
  Description of Artificial Sequence: Synthetic oligonucleotide
  Sense strand starting at position 3507 of SEQ ID NO: 1562745
gaacuuagugcucacugga

SEQ ID NO: 1769694 - RNA, 19 nt, Artificial Sequence
  Description of Artificial Sequence: Synthetic oligonucleotide
  Antisense strand to SEQ ID NO: 1769693
uccagugagcacuaaguuc

SEQ ID NO: 1769695 - RNA, 19 nt, Artificial Sequence
  Description of Artificial Sequence: Synthetic oligonucleotide
  Sense strand starting at position 3523 of SEQ ID NO: 1562745
ggagguguccagugaggac

SEQ ID NO: 1769696 - RNA, 19 nt, Artificial Sequence
  Description of Artificial Sequence: Synthetic oligonucleotide
  Antisense strand to SEQ ID NO: 1769695
guccucacuggacaccucc

SEQ ID NO: 1769697 - RNA, 19 nt, Artificial Sequence
  Description of Artificial Sequence: Synthetic oligonucleotide
  Sense strand starting at position 3724 of SEQ ID NO: 1562745
gguggcucugaggguuaau

SEQ ID NO: 1769698 - RNA, 19 nt, Artificial Sequence
  Description of Artificial Sequence: Synthetic oligonucleotide
  Antisense strand to SEQ ID NO: 1769697
auuaacccucagagccacc

SEQ ID NO: 1769699 - RNA, 19 nt, Artificial Sequence
  Description of Artificial Sequence: Synthetic oligonucleotide
  Sense strand starting at position 3727 of SEQ ID NO: 1562745
ggcucugaggguuaauguu

SEQ ID NO: 1769700 - RNA, 19 nt, Artificial Sequence
  Description of Artificial Sequence: Synthetic oligonucleotide
  Antisense strand to SEQ ID NO: 1769699
aacauuaacccucagagcc

SEQ ID NO: 1769701 - RNA, 19 nt, Artificial Sequence
  Description of Artificial Sequence: Synthetic oligonucleotide
  Sense strand starting at position 3736 of SEQ ID NO: 1562745
gguuaauguuuauaggaaa

SEQ ID NO: 1769702 - RNA, 19 nt, Artificial Sequence
  Description of Artificial Sequence: Synthetic oligonucleotide
  Antisense strand to SEQ ID NO: 1769701
uuuccuauaaacauuaacc

SEQ ID NO: 1769703 - RNA, 19 nt, Artificial Sequence
  Description of Artificial Sequence: Synthetic oligonucleotide
  Sense strand starting at position 3761 of SEQ ID NO: 1562745
uuagcaugucuugggauag

SEQ ID NO: 1769704 - RNA, 19 nt, Artificial Sequence
  Description of Artificial Sequence: Synthetic oligonucleotide
  Antisense strand to SEQ ID NO: 1769703
cuaucccaagacaugcuaa

SEQ ID NO: 1769705 - RNA, 19 nt, Artificial Sequence
  Description of Artificial Sequence: Synthetic oligonucleotide
  Sense strand starting at position 3785 of SEQ ID NO: 1562745
ggcuguuuccacugcagag

SEQ ID NO: 1769706 - RNA, 19 nt, Artificial Sequence
  Description of Artificial Sequence: Synthetic oligonucleotide
  Antisense strand to SEQ ID NO: 1769705
cucugcaguggaaacagcc

SEQ ID NO: 1769707 - RNA, 19 nt, Artificial Sequence
  Description of Artificial Sequence: Synthetic oligonucleotide
  Sense strand starting at position 3816 of SEQ ID NO: 1562745
aguugaauuguuugcagag

SEQ ID NO: 1769708 - RNA, 19 nt, Artificial Sequence
  Description of Artificial Sequence: Synthetic oligonucleotide
  Antisense strand to SEQ ID NO: 1769707
cucugcaaacaauucaacu

SEQ ID NO: 1769709 - RNA, 19 nt, Artificial Sequence
  Description of Artificial Sequence: Synthetic oligonucleotide
  Sense strand starting at position 3867 of SEQ ID NO: 1562745
uccagugguccagagcaga

SEQ ID NO: 1769710 - RNA, 19 nt, Artificial Sequence
  Description of Artificial Sequence: Synthetic oligonucleotide
  Antisense strand to SEQ ID NO: 1769709
ucugcucuggaccacugga

SEQ ID NO: 1769711 - RNA, 19 nt, Artificial Sequence
  Description of Artificial Sequence: Synthetic oligonucleotide
  Sense strand starting at position 5 of SEQ ID NO: 1562746
cuacauuugucugcugagu

SEQ ID NO: 1769712 - RNA, 19 nt, Artificial Sequence
  Description of Artificial Sequence: Synthetic oligonucleotide
  Antisense strand to SEQ ID NO: 1769711
acucagcagacaaauguag

SEQ ID NO: 1769713 - RNA, 19 nt, Artificial Sequence
  Description of Artificial Sequence: Synthetic oligonucleotide
  Sense strand starting at position 7 of SEQ ID NO: 1562746
acauuugucugcugaguag

SEQ ID NO: 1769714 - RNA, 19 nt, Artificial Sequence
  Description of Artificial Sequence: Synthetic oligonucleotide
  Antisense strand to SEQ ID NO: 1769713
cuacucagcagacaaaugu

SEQ ID NO: 1769715 - RNA, 19 nt, Artificial Sequence
  Description of Artificial Sequence: Synthetic oligonucleotide
  Sense strand starting at position 443 of SEQ ID NO: 1562746
guucuauuccagugcaagg

SEQ ID NO: 1769716 - RNA, 19 nt, Artificial Sequence
  Description of Artificial Sequence: Synthetic oligonucleotide
  Antisense strand to SEQ ID NO: 1769715
ccuugcacuggaauagaac

SEQ ID NO: 1769717 - RNA, 19 nt, Artificial Sequence
  Description of Artificial Sequence: Synthetic oligonucleotide
  Sense strand starting at position 828 of SEQ ID NO: 1562746
accuuacugcaggauuaua

SEQ ID NO: 1769718 - RNA, 19 nt, Artificial Sequence
  Description of Artificial Sequence: Synthetic oligonucleotide
  Antisense strand to SEQ ID NO: 1769717
uauaauccugcaguaaggu

SEQ ID NO: 1769719 - RNA, 19 nt, Artificial Sequence
  Description of Artificial Sequence: Synthetic oligonucleotide
  Sense strand starting at position 997 of SEQ ID NO: 1562746
gugugcuacccagaucucu

SEQ ID NO: 1769720 - RNA, 19 nt, Artificial Sequence
  Description of Artificial Sequence: Synthetic oligonucleotide
  Antisense strand to SEQ ID NO: 1769719
agagaucuggguagcacac

SEQ ID NO: 1769721 - RNA, 19 nt, Artificial Sequence
  Description of Artificial Sequence: Synthetic oligonucleotide
  Sense strand starting at position 1669 of SEQ ID NO: 1562746
gcgagaacggcccaaaugu

SEQ ID NO: 1769722 - RNA, 19 nt, Artificial Sequence
  Description of Artificial Sequence: Synthetic oligonucleotide
  Antisense strand to SEQ ID NO: 1769721
acauuugggccguucucgc

SEQ ID NO: 1769723 - RNA, 19 nt, Artificial Sequence
  Description of Artificial Sequence: Synthetic oligonucleotide
  Sense strand starting at position 1927 of SEQ ID NO: 1562746
cguccagagaccgauuaca

SEQ ID NO: 1769724 - RNA, 19 nt, Artificial Sequence
  Description of Artificial Sequence: Synthetic oligonucleotide
  Antisense strand to SEQ ID NO: 1769723
uguaaucggucucuggacg

SEQ ID NO: 1769725 - RNA, 19 nt, Artificial Sequence
  Description of Artificial Sequence: Synthetic oligonucleotide
  Sense strand starting at position 2245 of SEQ ID NO: 1562746
gucccucagauccgggaaa

SEQ ID NO: 1769726 - RNA, 19 nt, Artificial Sequence
  Description of Artificial Sequence: Synthetic oligonucleotide
  Antisense strand to SEQ ID NO: 1769725
uuucccggaucugagggac

SEQ ID NO: 1769727 - RNA, 19 nt, Artificial Sequence
  Description of Artificial Sequence: Synthetic oligonucleotide
  Sense strand starting at position 2246 of SEQ ID NO: 1562746
ucccucagauccgggaaau

SEQ ID NO: 1769728 - RNA, 19 nt, Artificial Sequence
  Description of Artificial Sequence: Synthetic oligonucleotide
  Antisense strand to SEQ ID NO: 1769727
auuucccggaucugaggga

SEQ ID NO: 1769729 - RNA, 19 nt, Artificial Sequence
  Description of Artificial Sequence: Synthetic oligonucleotide
  Sense strand starting at position 2247 of SEQ ID NO: 1562746
cccucagauccgggaaauc

SEQ ID NO: 1769730 - RNA, 19 nt, Artificial Sequence
  Description of Artificial Sequence: Synthetic oligonucleotide
  Antisense strand to SEQ ID NO: 1769729
gauuucccggaucugaggg

SEQ ID NO: 1769731 - RNA, 19 nt, Artificial Sequence
  Description of Artificial Sequence: Synthetic oligonucleotide
  Sense strand starting at position 2472 of SEQ ID NO: 1562746
cggagugccucucaucacu

SEQ ID NO: 1769732 - RNA, 19 nt, Artificial Sequence
  Description of Artificial Sequence: Synthetic oligonucleotide
  Antisense strand to SEQ ID NO: 1769731
agugaugagaggcacuccg

SEQ ID NO: 1769733 - RNA, 19 nt, Artificial Sequence
  Description of Artificial Sequence: Synthetic oligonucleotide
  Sense strand starting at position 2622 of SEQ ID NO: 1562746
gccuccuuguuguggauau

SEQ ID NO: 1769734 - RNA, 19 nt, Artificial Sequence
  Description of Artificial Sequence: Synthetic oligonucleotide
  Antisense strand to SEQ ID NO: 1769733
auauccacaacaaggaggc

SEQ ID NO: 1769735 - RNA, 19 nt, Artificial Sequence
  Description of Artificial Sequence: Synthetic oligonucleotide
  Sense strand starting at position 2623 of SEQ ID NO: 1562746
ccuccuuguuguggauaua

SEQ ID NO: 1769736 - RNA, 19 nt, Artificial Sequence
  Description of Artificial Sequence: Synthetic oligonucleotide
  Antisense strand to SEQ ID NO: 1769735
uauauccacaacaaggagg

SEQ ID NO: 1769737 - RNA, 19 nt, Artificial Sequence
  Description of Artificial Sequence: Synthetic oligonucleotide
  Sense strand starting at position 2624 of SEQ ID NO: 1562746
cuccuuguuguggauauaa

SEQ ID NO: 1769738 - RNA, 19 nt, Artificial Sequence
  Description of Artificial Sequence: Synthetic oligonucleotide
  Antisense strand to SEQ ID NO: 1769737
uuauauccacaacaaggag

SEQ ID NO: 1769739 - RNA, 19 nt, Artificial Sequence
  Description of Artificial Sequence: Synthetic oligonucleotide
  Sense strand starting at position 2626 of SEQ ID NO: 1562746
ccuuguuguggauauaauu

SEQ ID NO: 1769740 - RNA, 19 nt, Artificial Sequence
  Description of Artificial Sequence: Synthetic oligonucleotide
  Antisense strand to SEQ ID NO: 1769739
aauuauauccacaacaagg

SEQ ID NO: 1769741 - RNA, 19 nt, Artificial Sequence
  Description of Artificial Sequence: Synthetic oligonucleotide
  Sense strand starting at position 2634 of SEQ ID NO: 1562746
uggauauaauugugugcuu

SEQ ID NO: 1769742 - RNA, 19 nt, Artificial Sequence
  Description of Artificial Sequence: Synthetic oligonucleotide
  Antisense strand to SEQ ID NO: 1769741
aagcacacaauuauaucca

SEQ ID NO: 1769743 - RNA, 19 nt, Artificial Sequence
  Description of Artificial Sequence: Synthetic oligonucleotide
  Sense strand starting at position 2639 of SEQ ID NO: 1562746
auaauugugugcuucccga

SEQ ID NO: 1769744 - RNA, 19 nt, Artificial Sequence
  Description of Artificial Sequence: Synthetic oligonucleotide
  Antisense strand to SEQ ID NO: 1769743
ucgggaagcacacaauuau

SEQ ID NO: 1769745 - RNA, 19 nt, Artificial Sequence
  Description of Artificial Sequence: Synthetic oligonucleotide
  Sense strand starting at position 2643 of SEQ ID NO: 1562746
uugugugcuucccgacuca

SEQ ID NO: 1769746 - RNA, 19 nt, Artificial Sequence
  Description of Artificial Sequence: Synthetic oligonucleotide
  Antisense strand to SEQ ID NO: 1769745
ugagucgggaagcacacaa

SEQ ID NO: 1769747 - RNA, 19 nt, Artificial Sequence
  Description of Artificial Sequence: Synthetic oligonucleotide
  Sense strand starting at position 2752 of SEQ ID NO: 1562746
cccagauccugggacaaga

SEQ ID NO: 1769748 - RNA, 19 nt, Artificial Sequence
  Description of Artificial Sequence: Synthetic oligonucleotide
  Antisense strand to SEQ ID NO: 1769747
ucuugucccaggaucuggg

SEQ ID NO: 1769749 - RNA, 19 nt, Artificial Sequence
  Description of Artificial Sequence: Synthetic oligonucleotide
  Sense strand starting at position 2766 of SEQ ID NO: 1562746
caagauaggugaggaugaa

SEQ ID NO: 1769750 - RNA, 19 nt, Artificial Sequence
  Description of Artificial Sequence: Synthetic oligonucleotide
  Antisense strand to SEQ ID NO: 1769749
uucauccucaccuaucuug

SEQ ID NO: 1769751 - RNA, 19 nt, Artificial Sequence
  Description of Artificial Sequence: Synthetic oligonucleotide
  Sense strand starting at position 3053 of SEQ ID NO: 1562746
ucugaaauguuaucugcau

SEQ ID NO: 1769752 - RNA, 19 nt, Artificial Sequence
  Description of Artificial Sequence: Synthetic oligonucleotide
  Antisense strand to SEQ ID NO: 1769751
augcagauaacauuucaga

SEQ ID NO: 1769753 - RNA, 19 nt, Artificial Sequence
  Description of Artificial Sequence: Synthetic oligonucleotide
  Sense strand starting at position 3054 of SEQ ID NO: 1562746
cugaaauguuaucugcauu

SEQ ID NO: 1769754 - RNA, 19 nt, Artificial Sequence
  Description of Artificial Sequence: Synthetic oligonucleotide
  Antisense strand to SEQ ID NO: 1769753
aaugcagauaacauuucag

SEQ ID NO: 1769755 - RNA, 19 nt, Artificial Sequence
  Description of Artificial Sequence: Synthetic oligonucleotide
  Sense strand starting at position 3105 of SEQ ID NO: 1562746
acgcgaaucaaaggucaca

SEQ ID NO: 1769756 - RNA, 19 nt, Artificial Sequence
  Description of Artificial Sequence: Synthetic oligonucleotide
  Antisense strand to SEQ ID NO: 1769755
ugugaccuuugauucgcgu

SEQ ID NO: 1769757 - RNA, 19 nt, Artificial Sequence
  Description of Artificial Sequence: Synthetic oligonucleotide
  Sense strand starting at position 3194 of SEQ ID NO: 1562746
ggaaacgccuccuugaagu

SEQ ID NO: 1769758 - RNA, 19 nt, Artificial Sequence
  Description of Artificial Sequence: Synthetic oligonucleotide
  Antisense strand to SEQ ID NO: 1769757
acuucaaggaggcguuucc

SEQ ID NO: 1769759 - RNA, 19 nt, Artificial Sequence
  Description of Artificial Sequence: Synthetic oligonucleotide
  Sense strand starting at position 3200 of SEQ ID NO: 1562746
gccuccuugaagugggaau

SEQ ID NO: 1769760 - RNA, 19 nt, Artificial Sequence
  Description of Artificial Sequence: Synthetic oligonucleotide
  Antisense strand to SEQ ID NO: 1769759
auucccacuucaaggaggc

SEQ ID NO: 1769761 - RNA, 19 nt, Artificial Sequence
  Description of Artificial Sequence: Synthetic oligonucleotide
  Sense strand starting at position 3235 of SEQ ID NO: 1562746
ucgguuguaucuuuccuaa

SEQ ID NO: 1769762 - RNA, 19 nt, Artificial Sequence
  Description of Artificial Sequence: Synthetic oligonucleotide
  Antisense strand to SEQ ID NO: 1769761
uuaggaaagauacaaccga

SEQ ID NO: 1769763 - RNA, 19 nt, Artificial Sequence
  Description of Artificial Sequence: Synthetic oligonucleotide
  Sense strand starting at position 3237 of SEQ ID NO: 1562746
gguuguaucuuuccuaauu

SEQ ID NO: 1769764 - RNA, 19 nt, Artificial Sequence
  Description of Artificial Sequence: Synthetic oligonucleotide
  Antisense strand to SEQ ID NO: 1769763
aauuaggaaagauacaacc

SEQ ID NO: 1769765 - RNA, 19 nt, Artificial Sequence
  Description of Artificial Sequence: Synthetic oligonucleotide
  Sense strand starting at position 3238 of SEQ ID NO: 1562746
guuguaucuuuccuaauug

SEQ ID NO: 1769766 - RNA, 19 nt, Artificial Sequence
  Description of Artificial Sequence: Synthetic oligonucleotide
  Antisense strand to SEQ ID NO: 1769765
caauuaggaaagauacaac

SEQ ID NO: 1769767 - RNA, 19 nt, Artificial Sequence
  Description of Artificial Sequence: Synthetic oligonucleotide
  Sense strand starting at position 3373 of SEQ ID NO: 1562746
gugggccuguggaagaaau

SEQ ID NO: 1769768 - RNA, 19 nt, Artificial Sequence
  Description of Artificial Sequence: Synthetic oligonucleotide
  Antisense strand to SEQ ID NO: 1769767
auuucuuccacaggcccac

SEQ ID NO: 1769769 - RNA, 19 nt, Artificial Sequence
  Description of Artificial Sequence: Synthetic oligonucleotide
  Sense strand starting at position 3458 of SEQ ID NO: 1562746
guguauaacugucaugcac

SEQ ID NO: 1769770 - RNA, 19 nt, Artificial Sequence
  Description of Artificial Sequence: Synthetic oligonucleotide
  Antisense strand to SEQ ID NO: 1769769
gugcaugacaguuauacac

SEQ ID NO: 1769771 - RNA, 19 nt, Artificial Sequence
  Description of Artificial Sequence: Synthetic oligonucleotide
  Sense strand starting at position 3510 of SEQ ID NO: 1562746
auauguaacuggucaucca

SEQ ID NO: 1769772 - RNA, 19 nt, Artificial Sequence
  Description of Artificial Sequence: Synthetic oligonucleotide
  Antisense strand to SEQ ID NO: 1769771
uggaugaccaguuacauau

SEQ ID NO: 1769773 - RNA, 19 nt, Artificial Sequence
  Description of Artificial Sequence: Synthetic oligonucleotide
  Sense strand starting at position 3513 of SEQ ID NO: 1562746
uguaacuggucauccagua

SEQ ID NO: 1769774 - RNA, 19 nt, Artificial Sequence
  Description of Artificial Sequence: Synthetic oligonucleotide
  Antisense strand to SEQ ID NO: 1769773
uacuggaugaccaguuaca

SEQ ID NO: 1769775 - RNA, 19 nt, Artificial Sequence
  Description of Artificial Sequence: Synthetic oligonucleotide
  Sense strand starting at position 3525 of SEQ ID NO: 1562746
uccaguaagcuauaguuau

SEQ ID NO: 1769776 - RNA, 19 nt, Artificial Sequence
  Description of Artificial Sequence: Synthetic oligonucleotide
  Antisense strand to SEQ ID NO: 1769775
auaacuauagcuuacugga

SEQ ID NO: 1769777 - RNA, 19 nt, Artificial Sequence
  Description of Artificial Sequence: Synthetic oligonucleotide
  Sense strand starting at position 3873 of SEQ ID NO: 1562746
guuuaauauaaguguguug

SEQ ID NO: 1769778 - RNA, 19 nt, Artificial Sequence
  Description of Artificial Sequence: Synthetic oligonucleotide
  Antisense strand to SEQ ID NO: 1769777
caacacacuuauauuaaac

SEQ ID NO: 1769779 - RNA, 19 nt, Artificial Sequence
  Description of Artificial Sequence: Synthetic oligonucleotide
  Sense strand starting at position 3875 of SEQ ID NO: 1562746
uuaauauaaguguguugca

SEQ ID NO: 1769780 - RNA, 19 nt, Artificial Sequence
  Description of Artificial Sequence: Synthetic oligonucleotide
  Antisense strand to SEQ ID NO: 1769779
ugcaacacacuuauauuaa

SEQ ID NO: 1769781 - RNA, 19 nt, Artificial Sequence
  Description of Artificial Sequence: Synthetic oligonucleotide
  Sense strand starting at position 3880 of SEQ ID NO: 1562746
auaaguguguugcagccua

SEQ ID NO: 1769782 - RNA, 19 nt, Artificial Sequence
  Description of Artificial Sequence: Synthetic oligonucleotide
  Antisense strand to SEQ ID NO: 1769781
uaggcugcaacacacuuau

SEQ ID NO: 1769783 - RNA, 19 nt, Artificial Sequence
  Description of Artificial Sequence: Synthetic oligonucleotide
  Sense strand starting at position 121 of SEQ ID NO: 1562747
cccacagagucuucgccau

SEQ ID NO: 1769784 - RNA, 19 nt, Artificial Sequence
  Description of Artificial Sequence: Synthetic oligonucleotide
  Antisense strand to SEQ ID NO: 1769783
auggcgaagacucuguggg

SEQ ID NO: 1769785 - RNA, 19 nt, Artificial Sequence
  Description of Artificial Sequence: Synthetic oligonucleotide
  Sense strand starting at position 249 of SEQ ID NO: 1562747
cggauagcguccucaccau

SEQ ID NO: 1769786 - RNA, 19 nt, Artificial Sequence
  Description of Artificial Sequence: Synthetic oligonucleotide
  Antisense strand to SEQ ID NO: 1769785
auggugaggacgcuauccg

SEQ ID NO: 1769787 - RNA, 19 nt, Artificial Sequence
  Description of Artificial Sequence: Synthetic oligonucleotide
  Sense strand starting at position 752 of SEQ ID NO: 1562747
aggucagucgugcagagaa

SEQ ID NO: 1769788 - RNA, 19 nt, Artificial Sequence
  Description of Artificial Sequence: Synthetic oligonucleotide
  Antisense strand to SEQ ID NO: 1769787
uucucugcacgacugaccu

SEQ ID NO: 1769789 - RNA, 19 nt, Artificial Sequence
  Description of Artificial Sequence: Synthetic oligonucleotide
  Sense strand starting at position 754 of SEQ ID NO: 1562747
gucagucgugcagagaaga

SEQ ID NO: 1769790 - RNA, 19 nt, Artificial Sequence
  Description of Artificial Sequence: Synthetic oligonucleotide
  Antisense strand to SEQ ID NO: 1769789
ucuucucugcacgacugac

SEQ ID NO: 1769791 - RNA, 19 nt, Artificial Sequence
  Description of Artificial Sequence: Synthetic oligonucleotide
  Sense strand starting at position 1736 of SEQ ID NO: 1562747
gggcgacaucucugaguac

SEQ ID NO: 1769792 - RNA, 19 nt, Artificial Sequence
  Description of Artificial Sequence: Synthetic oligonucleotide
  Antisense strand to SEQ ID NO: 1769791
guacucagagaugucgccc

SEQ ID NO: 1769793 - RNA, 19 nt, Artificial Sequence
  Description of Artificial Sequence: Synthetic oligonucleotide
  Sense strand starting at position 1739 of SEQ ID NO: 1562747
cgacaucucugaguaccca

SEQ ID NO: 1769794 - RNA, 19 nt, Artificial Sequence
  Description of Artificial Sequence: Synthetic oligonucleotide
  Antisense strand to SEQ ID NO: 1769793
uggguacucagagaugucg

SEQ ID NO: 1769795 - RNA, 19 nt, Artificial Sequence
  Description of Artificial Sequence: Synthetic oligonucleotide
  Sense strand starting at position 3430 of SEQ ID NO: 1562747
ggacuugguucuagggaga

SEQ ID NO: 1769796 - RNA, 19 nt, Artificial Sequence
  Description of Artificial Sequence: Synthetic oligonucleotide
  Antisense strand to SEQ ID NO: 1769795
ucucccuagaaccaagucc

SEQ ID NO: 1769797 - RNA, 19 nt, Artificial Sequence
  Description of Artificial Sequence: Synthetic oligonucleotide
  Sense strand starting at position 3475 of SEQ ID NO: 1562747
uagggaauggugcaaaguu

SEQ ID NO: 1769798 - RNA, 19 nt, Artificial Sequence
  Description of Artificial Sequence: Synthetic oligonucleotide
  Antisense strand to SEQ ID NO: 1769797
aacuuugcaccauucccua

SEQ ID NO: 1769799 - RNA, 19 nt, Artificial Sequence
  Description of Artificial Sequence: Synthetic oligonucleotide
  Sense strand starting at position 3941 of SEQ ID NO: 1562747
gcguaauugcacgguuacu

SEQ ID NO: 1769800 - RNA, 19 nt, Artificial Sequence
  Description of Artificial Sequence: Synthetic oligonucleotide
  Antisense strand to SEQ ID NO: 1769799
aguaaccgugcaauuacgc

SEQ ID NO: 1769801 - RNA, 19 nt, Artificial Sequence
  Description of Artificial Sequence: Synthetic oligonucleotide
  Sense strand starting at position 3950 of SEQ ID NO: 1562747
cacgguuacugaugggaaa

SEQ ID NO: 1769802 - RNA, 19 nt, Artificial Sequence
  Description of Artificial Sequence: Synthetic oligonucleotide
  Antisense strand to SEQ ID NO: 1769801
uuucccaucaguaaccgug

SEQ ID NO: 1769803 - RNA, 19 nt, Artificial Sequence
  Description of Artificial Sequence: Synthetic oligonucleotide
  Sense strand starting at position 15 of SEQ ID NO: 1562748
ggugaagacucccaugauc

SEQ ID NO: 1769804 - RNA, 19 nt, Artificial Sequence
  Description of Artificial Sequence: Synthetic oligonucleotide
  Antisense strand to SEQ ID NO: 1769803
gaucaugggagucuucacc

SEQ ID NO: 1769805 - RNA, 19 nt, Artificial Sequence
  Description of Artificial Sequence: Synthetic oligonucleotide
  Sense strand starting at position 591 of SEQ ID NO: 1562748
ccuguugaaccauguaugu

SEQ ID NO: 1769806 - RNA, 19 nt, Artificial Sequence
  Description of Artificial Sequence: Synthetic oligonucleotide
  Antisense strand to SEQ ID NO: 1769805
acauacaugguucaacagg

SEQ ID NO: 1769807 - RNA, 19 nt, Artificial Sequence
  Description of Artificial Sequence: Synthetic oligonucleotide
  Sense strand starting at position 593 of SEQ ID NO: 1562748
uguugaaccauguaugugu

SEQ ID NO: 1769808 - RNA, 19 nt, Artificial Sequence
  Description of Artificial Sequence: Synthetic oligonucleotide
  Antisense strand to SEQ ID NO: 1769807
acacauacaugguucaaca

SEQ ID NO: 1769809 - RNA, 19 nt, Artificial Sequence
  Description of Artificial Sequence: Synthetic oligonucleotide
  Sense strand starting at position 602 of SEQ ID NO: 1562748
auguaugugucgggaggga

SEQ ID NO: 1769810 - RNA, 19 nt, Artificial Sequence
  Description of Artificial Sequence: Synthetic oligonucleotide
  Antisense strand to SEQ ID NO: 1769809
ucccucccgacacauacau

SEQ ID NO: 1769811 - RNA, 19 nt, Artificial Sequence
  Description of Artificial Sequence: Synthetic oligonucleotide
  Sense strand starting at position 866 of SEQ ID NO: 1562748
cucuguggucuguagugau

SEQ ID NO: 1769812 - RNA, 19 nt, Artificial Sequence
  Description of Artificial Sequence: Synthetic oligonucleotide
  Antisense strand to SEQ ID NO: 1769811
aucacuacagaccacagag

SEQ ID NO: 1769813 - RNA, 19 nt, Artificial Sequence
  Description of Artificial Sequence: Synthetic oligonucleotide
  Sense strand starting at position 955 of SEQ ID NO: 1562748
auuaauuccugcugaaagc

SEQ ID NO: 1769814 - RNA, 19 nt, Artificial Sequence
  Description of Artificial Sequence: Synthetic oligonucleotide
  Antisense strand to SEQ ID NO: 1769813
gcuuucagcaggaauuaau

SEQ ID NO: 1769815 - RNA, 19 nt, Artificial Sequence
  Description of Artificial Sequence: Synthetic oligonucleotide
  Sense strand starting at position 956 of SEQ ID NO: 1562748
uuaauuccugcugaaagca

SEQ ID NO: 1769816 - RNA, 19 nt, Artificial Sequence
  Description of Artificial Sequence: Synthetic oligonucleotide
  Antisense strand to SEQ ID NO: 1769815
ugcuuucagcaggaauuaa

SEQ ID NO: 1769817 - RNA, 19 nt, Artificial Sequence
  Description of Artificial Sequence: Synthetic oligonucleotide
  Sense strand starting at position 978 of SEQ ID NO: 1562748
cacagucacuguccuguua

SEQ ID NO: 1769818 - RNA, 19 nt, Artificial Sequence
  Description of Artificial Sequence: Synthetic oligonucleotide
  Antisense strand to SEQ ID NO: 1769817
uaacaggacagugacugug

SEQ ID NO: 1769819 - RNA, 19 nt, Artificial Sequence
  Description of Artificial Sequence: Synthetic oligonucleotide
  Sense strand starting at position 993 of SEQ ID NO: 1562748
guuauaaagcauuagcaac

SEQ ID NO: 1769820 - RNA, 19 nt, Artificial Sequence
  Description of Artificial Sequence: Synthetic oligonucleotide
  Antisense strand to SEQ ID NO: 1769819
guugcuaaugcuuuauaac

SEQ ID NO: 1769821 - RNA, 19 nt, Artificial Sequence
  Description of Artificial Sequence: Synthetic oligonucleotide
  Sense strand starting at position 1099 of SEQ ID NO: 1562748
ccaaauuuggugugugcau

SEQ ID NO: 1769822 - RNA, 19 nt, Artificial Sequence
  Description of Artificial Sequence: Synthetic oligonucleotide
  Antisense strand to SEQ ID NO: 1769821
augcacacaccaaauuugg

SEQ ID NO: 1769823 - RNA, 19 nt, Artificial Sequence
  Description of Artificial Sequence: Synthetic oligonucleotide
  Sense strand starting at position 1297 of SEQ ID NO: 1562748
ugaggugcuccguggguau

SEQ ID NO: 1769824 - RNA, 19 nt, Artificial Sequence
  Description of Artificial Sequence: Synthetic oligonucleotide
  Antisense strand to SEQ ID NO: 1769823
auacccacggagcaccuca

SEQ ID NO: 1769825 - RNA, 19 nt, Artificial Sequence
  Description of Artificial Sequence: Synthetic oligonucleotide
  Sense strand starting at position 1412 of SEQ ID NO: 1562748
gcaccuuggcuugaauaga

SEQ ID NO: 1769826 - RNA, 19 nt, Artificial Sequence
  Description of Artificial Sequence: Synthetic oligonucleotide
  Antisense strand to SEQ ID NO: 1769825
ucuauucaagccaaggugc

SEQ ID NO: 1769827 - RNA, 19 nt, Artificial Sequence
  Description of Artificial Sequence: Synthetic oligonucleotide
  Sense strand starting at position 1508 of SEQ ID NO: 1562748
cgaggcuuccgcgucacau

SEQ ID NO: 1769828 - RNA, 19 nt, Artificial Sequence
  Description of Artificial Sequence: Synthetic oligonucleotide
  Antisense strand to SEQ ID NO: 1769827
augugacgcggaagccucg

SEQ ID NO: 1769829 - RNA, 19 nt, Artificial Sequence
  Description of Artificial Sequence: Synthetic oligonucleotide
  Sense strand starting at position 1509 of SEQ ID NO: 1562748
gaggcuuccgcgucacaug

SEQ ID NO: 1769830 - RNA, 19 nt, Artificial Sequence
  Description of Artificial Sequence: Synthetic oligonucleotide
  Antisense strand to SEQ ID NO: 1769829
caugugacgcggaagccuc

SEQ ID NO: 1769831 - RNA, 19 nt, Artificial Sequence
  Description of Artificial Sequence: Synthetic oligonucleotide
  Sense strand starting at position 1518 of SEQ ID NO: 1562748
gcgucacaugugcgugaga

SEQ ID NO: 1769832 - RNA, 19 nt, Artificial Sequence
  Description of Artificial Sequence: Synthetic oligonucleotide
  Antisense strand to SEQ ID NO: 1769831
ucucacgcacaugugacgc

SEQ ID NO: 1769833 - RNA, 19 nt, Artificial Sequence
  Description of Artificial Sequence: Synthetic oligonucleotide
  Sense strand starting at position 1519 of SEQ ID NO: 1562748
cgucacaugugcgugagaa

SEQ ID NO: 1769834 - RNA, 19 nt, Artificial Sequence
  Description of Artificial Sequence: Synthetic oligonucleotide
  Antisense strand to SEQ ID NO: 1769833
uucucacgcacaugugacg

SEQ ID NO: 1769835 - RNA, 19 nt, Artificial Sequence
  Description of Artificial Sequence: Synthetic oligonucleotide
  Sense strand starting at position 1520 of SEQ ID NO: 1562748
gucacaugugcgugagaag

SEQ ID NO: 1769836 - RNA, 19 nt, Artificial Sequence
  Description of Artificial Sequence: Synthetic oligonucleotide
  Antisense strand to SEQ ID NO: 1769835
cuucucacgcacaugugac

SEQ ID NO: 1769837 - RNA, 19 nt, Artificial Sequence
  Description of Artificial Sequence: Synthetic oligonucleotide
  Sense strand starting at position 1521 of SEQ ID NO: 1562748
ucacaugugcgugagaagu

SEQ ID NO: 1769838 - RNA, 19 nt, Artificial Sequence
  Description of Artificial Sequence: Synthetic oligonucleotide
  Antisense strand to SEQ ID NO: 1769837
acuucucacgcacauguga

SEQ ID NO: 1769839 - RNA, 19 nt, Artificial Sequence
  Description of Artificial Sequence: Synthetic oligonucleotide
  Sense strand starting at position 2003 of SEQ ID NO: 1562748
ucggguucccugcaagaga

SEQ ID NO: 1769840 - RNA, 19 nt, Artificial Sequence
  Description of Artificial Sequence: Synthetic oligonucleotide
  Antisense strand to SEQ ID NO: 1769839
ucucuugcagggaacccga

SEQ ID NO: 1769841 - RNA, 19 nt, Artificial Sequence
  Description of Artificial Sequence: Synthetic oligonucleotide
  Sense strand starting at position 2091 of SEQ ID NO: 1562748
cgguccagcuuuccaaaga

SEQ ID NO: 1769842 - RNA, 19 nt, Artificial Sequence
  Description of Artificial Sequence: Synthetic oligonucleotide
  Antisense strand to SEQ ID NO: 1769841
ucuuuggaaagcuggaccg

SEQ ID NO: 1769843 - RNA, 19 nt, Artificial Sequence
  Description of Artificial Sequence: Synthetic oligonucleotide
  Sense strand starting at position 2092 of SEQ ID NO: 1562748
gguccagcuuuccaaagaa

SEQ ID NO: 1769844 - RNA, 19 nt, Artificial Sequence
  Description of Artificial Sequence: Synthetic oligonucleotide
  Antisense strand to SEQ ID NO: 1769843
uucuuuggaaagcuggacc

SEQ ID NO: 1769845 - RNA, 19 nt, Artificial Sequence
  Description of Artificial Sequence: Synthetic oligonucleotide
  Sense strand starting at position 2406 of SEQ ID NO: 1562748
gaagaaugcugcucuggca

SEQ ID NO: 1769846 - RNA, 19 nt, Artificial Sequence
  Description of Artificial Sequence: Synthetic oligonucleotide
  Antisense strand to SEQ ID NO: 1769845
ugccagagcagcauucuuc

SEQ ID NO: 1769847 - RNA, 19 nt, Artificial Sequence
  Description of Artificial Sequence: Synthetic oligonucleotide
  Sense strand starting at position 2467 of SEQ ID NO: 1562748
ccgucaagaacguggucaa

SEQ ID NO: 1769848 - RNA, 19 nt, Artificial Sequence
  Description of Artificial Sequence: Synthetic oligonucleotide
  Antisense strand to SEQ ID NO: 1769847
uugaccacguucuugacgg

SEQ ID NO: 1769849 - RNA, 19 nt, Artificial Sequence
  Description of Artificial Sequence: Synthetic oligonucleotide
  Sense strand starting at position 2531 of SEQ ID NO: 1562748
ccagcagaugcgugugcua

SEQ ID NO: 1769850 - RNA, 19 nt, Artificial Sequence
  Description of Artificial Sequence: Synthetic oligonucleotide
  Antisense strand to SEQ ID NO: 1769849
uagcacacgcaucugcugg

SEQ ID NO: 1769851 - RNA, 19 nt, Artificial Sequence
  Description of Artificial Sequence: Synthetic oligonucleotide
  Sense strand starting at position 2548 of SEQ ID NO: 1562748
uagggaugccucgguugau

SEQ ID NO: 1769852 - RNA, 19 nt, Artificial Sequence
  Description of Artificial Sequence: Synthetic oligonucleotide
  Antisense strand to SEQ ID NO: 1769851
aucaaccgaggcaucccua

SEQ ID NO: 1769853 - RNA, 19 nt, Artificial Sequence
  Description of Artificial Sequence: Synthetic oligonucleotide
  Sense strand starting at position 2549 of SEQ ID NO: 1562748
agggaugccucgguugauu

SEQ ID NO: 1769854 - RNA, 19 nt, Artificial Sequence
  Description of Artificial Sequence: Synthetic oligonucleotide
  Antisense strand to SEQ ID NO: 1769853
aaucaaccgaggcaucccu

SEQ ID NO: 1769855 - RNA, 19 nt, Artificial Sequence
  Description of Artificial Sequence: Synthetic oligonucleotide
  Sense strand starting at position 2560 of SEQ ID NO: 1562748
gguugauucucuccuggac

SEQ ID NO: 1769856 - RNA, 19 nt, Artificial Sequence
  Description of Artificial Sequence: Synthetic oligonucleotide
  Antisense strand to SEQ ID NO: 1769855
guccaggagagaaucaacc

SEQ ID NO: 1769857 - RNA, 19 nt, Artificial Sequence
  Description of Artificial Sequence: Synthetic oligonucleotide
  Sense strand starting at position 2563 of SEQ ID NO: 1562748
ugauucucuccuggaccua

SEQ ID NO: 1769858 - RNA, 19 nt, Artificial Sequence
  Description of Artificial Sequence: Synthetic oligonucleotide
  Antisense strand to SEQ ID NO: 1769857
uagguccaggagagaauca

SEQ ID NO: 1769859 - RNA, 19 nt, Artificial Sequence
  Description of Artificial Sequence: Synthetic oligonucleotide
  Sense strand starting at position 2654 of SEQ ID NO: 1562748
ugccuaaagcguguuccua

SEQ ID NO: 1769860 - RNA, 19 nt, Artificial Sequence
  Description of Artificial Sequence: Synthetic oligonucleotide
  Antisense strand to SEQ ID NO: 1769859
uaggaacacgcuuuaggca

SEQ ID NO: 1769861 - RNA, 19 nt, Artificial Sequence
  Description of Artificial Sequence: Synthetic oligonucleotide
  Sense strand starting at position 2656 of SEQ ID NO: 1562748
ccuaaagcguguuccuacu

SEQ ID NO: 1769862 - RNA, 19 nt, Artificial Sequence
  Description of Artificial Sequence: Synthetic oligonucleotide
  Antisense strand to SEQ ID NO: 1769861
aguaggaacacgcuuuagg

SEQ ID NO: 1769863 - RNA, 19 nt, Artificial Sequence
  Description of Artificial Sequence: Synthetic oligonucleotide
  Sense strand starting at position 2662 of SEQ ID NO: 1562748
gcguguuccuacucgccau

SEQ ID NO: 1769864 - RNA, 19 nt, Artificial Sequence
  Description of Artificial Sequence: Synthetic oligonucleotide
  Antisense strand to SEQ ID NO: 1769863
auggcgaguaggaacacgc

SEQ ID NO: 1769865 - RNA, 19 nt, Artificial Sequence
  Description of Artificial Sequence: Synthetic oligonucleotide
  Sense strand starting at position 2687 of SEQ ID NO: 1562748
aggcucauacucugagaca

SEQ ID NO: 1769866 - RNA, 19 nt, Artificial Sequence
  Description of Artificial Sequence: Synthetic oligonucleotide
  Antisense strand to SEQ ID NO: 1769865
ugucucagaguaugagccu

SEQ ID NO: 1769867 - RNA, 19 nt, Artificial Sequence
  Description of Artificial Sequence: Synthetic oligonucleotide
  Sense strand starting at position 2688 of SEQ ID NO: 1562748
ggcucauacucugagacac

SEQ ID NO: 1769868 - RNA, 19 nt, Artificial Sequence
  Description of Artificial Sequence: Synthetic oligonucleotide
  Antisense strand to SEQ ID NO: 1769867
gugucucagaguaugagcc

SEQ ID NO: 1769869 - RNA, 19 nt, Artificial Sequence
  Description of Artificial Sequence: Synthetic oligonucleotide
  Sense strand starting at position 2863 of SEQ ID NO: 1562748
ucaggacacgcguaauuca

SEQ ID NO: 1769870 - RNA, 19 nt, Artificial Sequence
  Description of Artificial Sequence: Synthetic oligonucleotide
  Antisense strand to SEQ ID NO: 1769869
ugaauuacgcguguccuga

SEQ ID NO: 1769871 - RNA, 19 nt, Artificial Sequence
  Description of Artificial Sequence: Synthetic oligonucleotide
  Sense strand starting at position 3123 of SEQ ID NO: 1562748
ggaggacugcucuguacac

SEQ ID NO: 1769872 - RNA, 19 nt, Artificial Sequence
  Description of Artificial Sequence: Synthetic oligonucleotide
  Antisense strand to SEQ ID NO: 1769871
guguacagagcaguccucc

SEQ ID NO: 1769873 - RNA, 19 nt, Artificial Sequence
  Description of Artificial Sequence: Synthetic oligonucleotide
  Sense strand starting at position 3124 of SEQ ID NO: 1562748
gaggacugcucuguacaca

SEQ ID NO: 1769874 - RNA, 19 nt, Artificial Sequence
  Description of Artificial Sequence: Synthetic oligonucleotide
  Antisense strand to SEQ ID NO: 1769873
uguguacagagcaguccuc

SEQ ID NO: 1769875 - RNA, 19 nt, Artificial Sequence
  Description of Artificial Sequence: Synthetic oligonucleotide
  Sense strand starting at position 3172 of SEQ ID NO: 1562748
ccagcuuucugagcugaca

SEQ ID NO: 1769876 - RNA, 19 nt, Artificial Sequence
  Description of Artificial Sequence: Synthetic oligonucleotide
  Antisense strand to SEQ ID NO: 1769875
ugucagcucagaaagcugg

SEQ ID NO: 1769877 - RNA, 19 nt, Artificial Sequence
  Description of Artificial Sequence: Synthetic oligonucleotide
  Sense strand starting at position 3209 of SEQ ID NO: 1562748
gaaagaugccaguaaggca

SEQ ID NO: 1769878 - RNA, 19 nt, Artificial Sequence
  Description of Artificial Sequence: Synthetic oligonucleotide
  Antisense strand to SEQ ID NO: 1769877
ugccuuacuggcaucuuuc

SEQ ID NO: 1769879 - RNA, 19 nt, Artificial Sequence
  Description of Artificial Sequence: Synthetic oligonucleotide
  Sense strand starting at position 3425 of SEQ ID NO: 1562748
aucacaguucguggcaaga

SEQ ID NO: 1769880 - RNA, 19 nt, Artificial Sequence
  Description of Artificial Sequence: Synthetic oligonucleotide
  Antisense strand to SEQ ID NO: 1769879
ucuugccacgaacugugau

SEQ ID NO: 1769881 - RNA, 19 nt, Artificial Sequence
  Description of Artificial Sequence: Synthetic oligonucleotide
  Sense strand starting at position 3557 of SEQ ID NO: 1562748
gcacuugaguauuccugau

SEQ ID NO: 1769882 - RNA, 19 nt, Artificial Sequence
  Description of Artificial Sequence: Synthetic oligonucleotide
  Antisense strand to SEQ ID NO: 1769881
aucaggaauacucaagugc

SEQ ID NO: 1769883 - RNA, 19 nt, Artificial Sequence
  Description of Artificial Sequence: Synthetic oligonucleotide
  Sense strand starting at position 31 of SEQ ID NO: 1562749
acaguaggcuccuccauaa

SEQ ID NO: 1769884 - RNA, 19 nt, Artificial Sequence
  Description of Artificial Sequence: Synthetic oligonucleotide
  Antisense strand to SEQ ID NO: 1769883
uuauggaggagccuacugu

SEQ ID NO: 1769885 - RNA, 19 nt, Artificial Sequence
  Description of Artificial Sequence: Synthetic oligonucleotide
  Sense strand starting at position 203 of SEQ ID NO: 1562749
agggaauaguggcuaucca

SEQ ID NO: 1769886 - RNA, 19 nt, Artificial Sequence
  Description of Artificial Sequence: Synthetic oligonucleotide
  Antisense strand to SEQ ID NO: 1769885
uggauagccacuauucccu

SEQ ID NO: 1769887 - RNA, 19 nt, Artificial Sequence
  Description of Artificial Sequence: Synthetic oligonucleotide
  Sense strand starting at position 204 of SEQ ID NO: 1562749
gggaauaguggcuauccau

SEQ ID NO: 1769888 - RNA, 19 nt, Artificial Sequence
  Description of Artificial Sequence: Synthetic oligonucleotide
  Antisense strand to SEQ ID NO: 1769887
auggauagccacuauuccc

SEQ ID NO: 1769889 - RNA, 19 nt, Artificial Sequence
  Description of Artificial Sequence: Synthetic oligonucleotide
  Sense strand starting at position 310 of SEQ ID NO: 1562749
uuuguuaauggguaaacau

SEQ ID NO: 1769890 - RNA, 19 nt, Artificial Sequence
  Description of Artificial Sequence: Synthetic oligonucleotide
  Antisense strand to SEQ ID NO: 1769889
auguuuacccauuaacaaa

SEQ ID NO: 1769891 - RNA, 19 nt, Artificial Sequence
  Description of Artificial Sequence: Synthetic oligonucleotide
  Sense strand starting at position 338 of SEQ ID NO: 1562749
uucuuucucccuuggagau

SEQ ID NO: 1769892 - RNA, 19 nt, Artificial Sequence
  Description of Artificial Sequence: Synthetic oligonucleotide
  Antisense strand to SEQ ID NO: 1769891
aucuccaagggagaaagaa

SEQ ID NO: 1769893 - RNA, 19 nt, Artificial Sequence
  Description of Artificial Sequence: Synthetic oligonucleotide
  Sense strand starting at position 339 of SEQ ID NO: 1562749
ucuuucucccuuggagaua

SEQ ID NO: 1769894 - RNA, 19 nt, Artificial Sequence
  Description of Artificial Sequence: Synthetic oligonucleotide
  Antisense strand to SEQ ID NO: 1769893
uaucuccaagggagaaaga

SEQ ID NO: 1769895 - RNA, 19 nt, Artificial Sequence
  Description of Artificial Sequence: Synthetic oligonucleotide
  Sense strand starting at position 485 of SEQ ID NO: 1562749
gaguuuggccucgacaauu

SEQ ID NO: 1769896 - RNA, 19 nt, Artificial Sequence
  Description of Artificial Sequence: Synthetic oligonucleotide
  Antisense strand to SEQ ID NO: 1769895
aauugucgaggccaaacuc

SEQ ID NO: 1769897 - RNA, 19 nt, Artificial Sequence
  Description of Artificial Sequence: Synthetic oligonucleotide
  Sense strand starting at position 546 of SEQ ID NO: 1562749
gaacauggguggucagaug

SEQ ID NO: 1769898 - RNA, 19 nt, Artificial Sequence
  Description of Artificial Sequence: Synthetic oligonucleotide
  Antisense strand to SEQ ID NO: 1769897
caucugaccacccauguuc

SEQ ID NO: 1769899 - RNA, 19 nt, Artificial Sequence
  Description of Artificial Sequence: Synthetic oligonucleotide
  Sense strand starting at position 557 of SEQ ID NO: 1562749
gucagaugccuuuagggac

SEQ ID NO: 1769900 - RNA, 19 nt, Artificial Sequence
  Description of Artificial Sequence: Synthetic oligonucleotide
  Antisense strand to SEQ ID NO: 1769899
gucccuaaaggcaucugac

SEQ ID NO: 1769901 - RNA, 19 nt, Artificial Sequence
  Description of Artificial Sequence: Synthetic oligonucleotide
  Sense strand starting at position 563 of SEQ ID NO: 1562749
ugccuuuagggacagugau

SEQ ID NO: 1769902 - RNA, 19 nt, Artificial Sequence
  Description of Artificial Sequence: Synthetic oligonucleotide
  Antisense strand to SEQ ID NO: 1769901
aucacugucccuaaaggca

SEQ ID NO: 1769903 - RNA, 19 nt, Artificial Sequence
  Description of Artificial Sequence: Synthetic oligonucleotide
  Sense strand starting at position 654 of SEQ ID NO: 1562749
acuugugguauccauagua

SEQ ID NO: 1769904 - RNA, 19 nt, Artificial Sequence
  Description of Artificial Sequence: Synthetic oligonucleotide
  Antisense strand to SEQ ID NO: 1769903
uacuauggauaccacaagu

SEQ ID NO: 1769905 - RNA, 19 nt, Artificial Sequence
  Description of Artificial Sequence: Synthetic oligonucleotide
  Sense strand starting at position 720 of SEQ ID NO: 1562749
gcaauuugcagcugugaag

SEQ ID NO: 1769906 - RNA, 19 nt, Artificial Sequence
  Description of Artificial Sequence: Synthetic oligonucleotide
  Antisense strand to SEQ ID NO: 1769905
cuucacagcugcaaauugc

SEQ ID NO: 1769907 - RNA, 19 nt, Artificial Sequence
  Description of Artificial Sequence: Synthetic oligonucleotide
  Sense strand starting at position 895 of SEQ ID NO: 1562749
caaguagucaugggugaga

SEQ ID NO: 1769908 - RNA, 19 nt, Artificial Sequence
  Description of Artificial Sequence: Synthetic oligonucleotide
  Antisense strand to SEQ ID NO: 1769907
ucucacccaugacuacuug

SEQ ID NO: 1769909 - RNA, 19 nt, Artificial Sequence
  Description of Artificial Sequence: Synthetic oligonucleotide
  Sense strand starting at position 1034 of SEQ ID NO: 1562749
gaccauuuguuugaggaag

SEQ ID NO: 1769910 - RNA, 19 nt, Artificial Sequence
  Description of Artificial Sequence: Synthetic oligonucleotide
  Antisense strand to SEQ ID NO: 1769909
cuuccucaaacaaaugguc

SEQ ID NO: 1769911 - RNA, 19 nt, Artificial Sequence
  Description of Artificial Sequence: Synthetic oligonucleotide
  Sense strand starting at position 1071 of SEQ ID NO: 1562749
uuugaaaucugggcagaug

SEQ ID NO: 1769912 - RNA, 19 nt, Artificial Sequence
  Description of Artificial Sequence: Synthetic oligonucleotide
  Antisense strand to SEQ ID NO: 1769911
caucugcccagauuucaaa

SEQ ID NO: 1769913 - RNA, 19 nt, Artificial Sequence
  Description of Artificial Sequence: Synthetic oligonucleotide
  Sense strand starting at position 1533 of SEQ ID NO: 1562749
aguuucucucugggagaag

SEQ ID NO: 1769914 - RNA, 19 nt, Artificial Sequence
  Description of Artificial Sequence: Synthetic oligonucleotide
  Antisense strand to SEQ ID NO: 1769913
cuucucccagagagaaacu

SEQ ID NO: 1769915 - RNA, 19 nt, Artificial Sequence
  Description of Artificial Sequence: Synthetic oligonucleotide
  Sense strand starting at position 2169 of SEQ ID NO: 1562749
ggacaucuggcacacaguu

SEQ ID NO: 1769916 - RNA, 19 nt, Artificial Sequence
  Description of Artificial Sequence: Synthetic oligonucleotide
  Antisense strand to SEQ ID NO: 1769915
aacugugugccagaugucc

SEQ ID NO: 1769917 - RNA, 19 nt, Artificial Sequence
  Description of Artificial Sequence: Synthetic oligonucleotide
  Sense strand starting at position 2194 of SEQ ID NO: 1562749
auuugcuagcucugguauu

SEQ ID NO: 1769918 - RNA, 19 nt, Artificial Sequence
  Description of Artificial Sequence: Synthetic oligonucleotide
  Antisense strand to SEQ ID NO: 1769917
aauaccagagcuagcaaau

SEQ ID NO: 1769919 - RNA, 19 nt, Artificial Sequence
  Description of Artificial Sequence: Synthetic oligonucleotide
  Sense strand starting at position 2200 of SEQ ID NO: 1562749
uagcucugguauuuguaga

SEQ ID NO: 1769920 - RNA, 19 nt, Artificial Sequence
  Description of Artificial Sequence: Synthetic oligonucleotide
  Antisense strand to SEQ ID NO: 1769919
ucuacaaauaccagagcua

SEQ ID NO: 1769921 - RNA, 19 nt, Artificial Sequence
  Description of Artificial Sequence: Synthetic oligonucleotide
  Sense strand starting at position 2201 of SEQ ID NO: 1562749
agcucugguauuuguagau

SEQ ID NO: 1769922 - RNA, 19 nt, Artificial Sequence
  Description of Artificial Sequence: Synthetic oligonucleotide
  Antisense strand to SEQ ID NO: 1769921
aucuacaaauaccagagcu

SEQ ID NO: 1769923 - RNA, 19 nt, Artificial Sequence
  Description of Artificial Sequence: Synthetic oligonucleotide
  Sense strand starting at position 2234 of SEQ ID NO: 1562749
cugcgugugcauguuaaca

SEQ ID NO: 1769924 - RNA, 19 nt, Artificial Sequence
  Description of Artificial Sequence: Synthetic oligonucleotide
  Antisense strand to SEQ ID NO: 1769923
uguuaacaugcacacgcag

SEQ ID NO: 1769925 - RNA, 19 nt, Artificial Sequence
  Description of Artificial Sequence: Synthetic oligonucleotide
  Sense strand starting at position 2260 of SEQ ID NO: 1562749
uguauaauuuaugcaugca

SEQ ID NO: 1769926 - RNA, 19 nt, Artificial Sequence
  Description of Artificial Sequence: Synthetic oligonucleotide
  Antisense strand to SEQ ID NO: 1769925
ugcaugcauaaauuauaca

SEQ ID NO: 1769927 - RNA, 19 nt, Artificial Sequence
  Description of Artificial Sequence: Synthetic oligonucleotide
  Sense strand starting at position 2311 of SEQ ID NO: 1562749
gauguuuaaguguaacuac

SEQ ID NO: 1769928 - RNA, 19 nt, Artificial Sequence
  Description of Artificial Sequence: Synthetic oligonucleotide
  Antisense strand to SEQ ID NO: 1769927
guaguuacacuuaaacauc

SEQ ID NO: 1769929 - RNA, 19 nt, Artificial Sequence
  Description of Artificial Sequence: Synthetic oligonucleotide
  Sense strand starting at position 2314 of SEQ ID NO: 1562749
guuuaaguguaacuacaca

SEQ ID NO: 1769930 - RNA, 19 nt, Artificial Sequence
  Description of Artificial Sequence: Synthetic oligonucleotide
  Antisense strand to SEQ ID NO: 1769929
uguguaguuacacuuaaac

SEQ ID NO: 1769931 - RNA, 19 nt, Artificial Sequence
  Description of Artificial Sequence: Synthetic oligonucleotide
  Sense strand starting at position 2510 of SEQ ID NO: 1562749
ggagcucacaguugaagga

SEQ ID NO: 1769932 - RNA, 19 nt, Artificial Sequence
  Description of Artificial Sequence: Synthetic oligonucleotide
  Antisense strand to SEQ ID NO: 1769931
uccuucaacugugagcucc

SEQ ID NO: 1769933 - RNA, 19 nt, Artificial Sequence
  Description of Artificial Sequence: Synthetic oligonucleotide
  Sense strand starting at position 2618 of SEQ ID NO: 1562749
ggaagcuugguccaccuaa

SEQ ID NO: 1769934 - RNA, 19 nt, Artificial Sequence
  Description of Artificial Sequence: Synthetic oligonucleotide
  Antisense strand to SEQ ID NO: 1769933
uuagguggaccaagcuucc

SEQ ID NO: 1769935 - RNA, 19 nt, Artificial Sequence
  Description of Artificial Sequence: Synthetic oligonucleotide
  Sense strand starting at position 2904 of SEQ ID NO: 1562749
ucuggauugcaccacaauu

SEQ ID NO: 1769936 - RNA, 19 nt, Artificial Sequence
  Description of Artificial Sequence: Synthetic oligonucleotide
  Antisense strand to SEQ ID NO: 1769935
aauuguggugcaauccaga
